United States Patent Application Publication US 2022/0213167 A1 - sequence listing, part 9

SEQ ID NO: 174687 - protein, 16 aa, Homo sapiens
  CDR3 for alpha chain variable domain of TCR clone 87344 (TRAV23/DV6, TRAJ9)
CAASIGGNTGGFKTIF

SEQ ID NO: 174688 - protein, 16 aa, Homo sapiens
  CDR3 for beta chain variable domain of TCR clone 87344 (TRBV12-4, TRBJ2-5)
CASSFFVRGRQETQYF

SEQ ID NO: 174689 - protein, 11 aa, Homo sapiens
  CDR3 for alpha chain variable domain of TCR clone 87345 (TRAV8-4, TRAJ20)
CAVTNVLTTTS

SEQ ID NO: 174690 - protein, 13 aa, Homo sapiens
  CDR3 for beta chain variable domain of TCR clone 87345 (TRBV12-4, TRBJ1-1)
CASSPGTGFEAFF

SEQ ID NO: 174691 - protein, 14 aa, Homo sapiens
  CDR3 for alpha chain variable domain of TCR clone 87346 (TRAV12-2, TRAJ4)
CAVLIGGGYNKLIF

SEQ ID NO: 174692 - protein, 14 aa, Homo sapiens
  CDR3 for beta chain variable domain of TCR clone 87346 (TRBV6-1, TRBJ1-3)
CASVQGGGGNTIYF

SEQ ID NO: 174693 - protein, 16 aa, Homo sapiens
  CDR3 for alpha chain variable domain of TCR clone 87347 (TRAV12-1, TRAJ45)
CVVNPSSGGGADGLTF

SEQ ID NO: 174694 - protein, 15 aa, Homo sapiens
  CDR3 for beta chain variable domain of TCR clone 87347 (TRBV20-1, TRBJ2-7)
CSARKGLAESYEQYF

SEQ ID NO: 174695 - protein, 14 aa, Homo sapiens
  CDR3 for alpha chain variable domain of TCR clone 87348 (TRAV13-1, TRAJ4)
CAASLSGGYNKLIF

SEQ ID NO: 174696 - protein, 13 aa, Homo sapiens
  CDR3 for beta chain variable domain of TCR clone 87348 (TRBV12-4, TRBJ2-5)
CASRLAVQETQYF

SEQ ID NO: 174697 - protein, 13 aa, Homo sapiens
  CDR3 for alpha chain variable domain of TCR clone 87349 (TRAV3, TRAJ21)
CAVREPDFNKFYF

SEQ ID NO: 174698 - protein, 14 aa, Homo sapiens
  CDR3 for beta chain variable domain of TCR clone 87349 (TRBV4-1, TRBJ2-2)
FASSQAVNTGELFF

SEQ ID NO: 174699 - protein, 18 aa, Homo sapiens
  CDR3 for alpha chain variable domain of TCR clone 87350 (TRAV21, TRAJ52)
CAVSPSPAGGTSYGKLTF

SEQ ID NO: 174700 - protein, 17 aa, Homo sapiens
  CDR3 for beta chain variable domain of TCR clone 87350 (TRBV13, TRBJ2-3)
CASGLSRVAGGRNTQYF

SEQ ID NO: 174701 - protein, 14 aa, Homo sapiens
  CDR3 for alpha chain variable domain of TCR clone 87351 (TRAV27, TRAJ36)
CAGPPKRGANNLFF

SEQ ID NO: 174702 - protein, 15 aa, Homo sapiens
  CDR3 for beta chain variable domain of TCR clone 87351 (TRBV18, TRBJ2-7)
CASSPASTPNYEQYS

SEQ ID NO: 174703 - protein, 17 aa, Homo sapiens
  CDR3 for alpha chain variable domain of TCR clone 87352 (TRAV12-2, TRAJ4)
CAVNVRPVSGGYNKPIF

SEQ ID NO: 174704 - protein, 17 aa, Homo sapiens
  CDR3 for beta chain variable domain of TCR clone 87352 (TRBV6-3, TRBJ2-1)
CASSYSSGTRGLDEQFF

SEQ ID NO: 174705 - protein, 14 aa, Homo sapiens
  CDR3 for alpha chain variable domain of TCR clone 87353 (TRAV12-2, TRAJ13)
CAVKKTGGYQKVTF

SEQ ID NO: 174706 - protein, 15 aa, Homo sapiens
  CDR3 for beta chain variable domain of TCR clone 87353 (TRBV28, TRBJ2-5)
CASSPPWSYQEAQYF

SEQ ID NO: 174707 - protein, 12 aa, Homo sapiens
  CDR3 for alpha chain variable domain of TCR clone 87354 (TRAV12-1, TRAJ40)
CVVYSGTYKYIF

SEQ ID NO: 174708 - protein, 15 aa, Homo sapiens
  CDR3 for beta chain variable domain of TCR clone 87354 (TRBV25-1, TRBJ1-6)
CASSGDRGLNSPLHF

SEQ ID NO: 174709 - protein, 16 aa, Homo sapiens
  CDR3 for alpha chain variable domain of TCR clone 87355 (TRAV16, TRAJ4)
CALSHMFSGGYNKLIF

SEQ ID NO: 174710 - protein, 14 aa, Homo sapiens
  CDR3 for beta chain variable domain of TCR clone 87355 (TRBV4-1, TRBJ2-2)
CASSQAVNTGELFF

SEQ ID NO: 174711 - protein, 14 aa, Homo sapiens
  CDR3 for alpha chain variable domain of TCR clone 87356 (TRAV8-3, TRAJ4)
CAVGAAGGYNKLMF

SEQ ID NO: 174712 - protein, 15 aa, Homo sapiens
  CDR3 for beta chain variable domain of TCR clone 87356 (TRBV5-1, TRBJ2-1)
CASSPPRAPYNEQFF

SEQ ID NO: 174713 - protein, 14 aa, Homo sapiens
  CDR3 for alpha chain variable domain of TCR clone 87357 (TRAV1-2, TRAJ27)
CAVRSGTNAGKSTF

SEQ ID NO: 174714 - protein, 15 aa, Homo sapiens
  CDR3 for beta chain variable domain of TCR clone 87357 (TRBV18, TRBJ2-1)
CASSPPSASYNEQFF

SEQ ID NO: 174715 - protein, 23 aa, Homo sapiens
  CDR3 for alpha chain variable domain of TCR clone 87358 (TRAV26-1, TRAJ38)
CIADNAGNNHIQNPDPAVYQLRD

SEQ ID NO: 174716 - protein, 15 aa, Homo sapiens
  CDR3 for beta chain variable domain of TCR clone 87358 (TRBV11-3, TRBJ2-3)
CASLKDGREGDTQYF

SEQ ID NO: 174717 - protein, 14 aa, Homo sapiens
  CDR3 for alpha chain variable domain of TCR clone 87359 (TRAV12-3, TRAJ10)
SHLPLTGGGNKLTF

SEQ ID NO: 174718 - protein, 15 aa, Homo sapiens
  CDR3 for beta chain variable domain of TCR clone 87359 (TRBV6-3, TRBJ2-7)
CASSSPGTVFYEQYL

SEQ ID NO: 174719 - protein, 15 aa, Homo sapiens
  CDR3 for alpha chain variable domain of TCR clone 87360 (TRAV12-3, TRAJ10)
CASYILTGGGNKLTF

SEQ ID NO: 174720 - protein, 15 aa, Homo sapiens
  CDR3 for beta chain variable domain of TCR clone 87360 (TRBV18, TRBJ2-1)
CASSPPSASYNEQFF

SEQ ID NO: 174721 - protein, 14 aa, Homo sapiens
  CDR3 for alpha chain variable domain of TCR clone 87361 (TRAV8-1, TRAJ5)
CAVRTDTVRRALTF

SEQ ID NO: 174722 - protein, 12 aa, Homo sapiens
  CDR3 for beta chain variable domain of TCR clone 87361 (TRBV11-2, TRBJ2-1)
CASSPGNNEQFF

SEQ ID NO: 174723 - protein, 13 aa, Homo sapiens
  CDR3 for alpha chain variable domain of TCR clone 87362 (TRAV12-2, TRAJ17)
CAVSKAAGNKLTF

SEQ ID NO: 174724 - protein, 15 aa, Homo sapiens
  CDR3 for beta chain variable domain of TCR clone 87362 (TRBV7-2, TRBJ2-7)
CASSLKGALTYEQYF

SEQ ID NO: 174725 - protein, 13 aa, Homo sapiens
  CDR3 for alpha chain variable domain of TCR clone 87363 (TRAV23/DV6, TRAJ10)
ASVLTGGGNKLTF

SEQ ID NO: 174726 - protein, 13 aa, Homo sapiens
  CDR3 for beta chain variable domain of TCR clone 87363 (TRBV11-1, TRBJ1-2)
CASVGGWGYGYTF

SEQ ID NO: 174727 - protein, 11 aa, Homo sapiens
  CDR3 for alpha chain variable domain of TCR clone 87364 (TRAV30, TRAJ32)
ILGGATNKLIF

SEQ ID NO: 174728 - protein, 13 aa, Homo sapiens
  CDR3 for beta chain variable domain of TCR clone 87364 (TRBV6-3, TRBJ2-7)
CASSFSGGYEQYF

SEQ ID NO: 174729 - protein, 23 aa, Homo sapiens
  CDR3 for alpha chain variable domain of TCR clone 87365 (TRAV26-1, TRAJ38)
CIADNAGNNHIQNPDPAVYQLRD

SEQ ID NO: 174730 - protein, 13 aa, Homo sapiens
  CDR3 for beta chain variable domain of TCR clone 87365 (TRBV20-1, TRBJ1-1)
WSARGGGNTEAFF

SEQ ID NO: 174731 - protein, 12 aa, Homo sapiens
  CDR3 for alpha chain variable domain of TCR clone 87366 (TRAV4, TRAJ21)
CLVVDNFNKFYF

SEQ ID NO: 174732 - protein, 17 aa, Homo sapiens
  CDR3 for beta chain variable domain of TCR clone 87366 (TRBV3-1, TRBJ2-7)
CASSQDLTGLSSYEQYF

SEQ ID NO: 174733 - protein, 13 aa, Homo sapiens
  CDR3 for alpha chain variable domain of TCR clone 87367 (TRAV35, TRAJ36)
CAGPRIGANNLFF

SEQ ID NO: 174734 - protein, 15 aa, Homo sapiens
  CDR3 for beta chain variable domain of TCR clone 87367 (TRBV28, TRBJ2-5)
CASSPPWWYQETQYF

SEQ ID NO: 174735 - protein, 12 aa, Homo sapiens
  CDR3 for alpha chain variable domain of TCR clone 87368 (TRAV3, TRAJ26)
CAVRDYDQNFVF

SEQ ID NO: 174736 - protein, 16 aa, Homo sapiens
  CDR3 for beta chain variable domain of TCR clone 87368 (TRBV11-2, TRBJ1-2)
CASSPSGREANYGYTF

SEQ ID NO: 174737 - protein, 11 aa, Homo sapiens
  CDR3 for alpha chain variable domain of TCR clone 87369 (TRAV2, TRAJ40)
CAVEDPGNLQI

SEQ ID NO: 174738 - protein, 14 aa, Homo sapiens
  CDR3 for beta chain variable domain of TCR clone 87369 (TRBV19, TRBJ2-2)
CASSTLHMSGELFF

SEQ ID NO: 174739 - protein, 14 aa, Homo sapiens
  CDR3 for alpha chain variable domain of TCR clone 87370 (TRAV12-2, TRAJ13)
CAVKKTGGYKKVTF

SEQ ID NO: 174740 - protein, 15 aa, Homo sapiens
  CDR3 for beta chain variable domain of TCR clone 87370 (TRBV19, TRBJ1-6)
CASSTQGAVGSPLHF

SEQ ID NO: 174741 - protein, 12 aa, Homo sapiens
  CDR3 for alpha chain variable domain of TCR clone 87371 (TRAV29/DV5, TRAJ43)
SAAPYNNNDMRF

SEQ ID NO: 174742 - protein, 17 aa, Homo sapiens
  CDR3 for beta chain variable domain of TCR clone 87371 (TRBV19, TRBJ2-6)
CASSTGQVFSGANVLTF

SEQ ID NO: 174743 - protein, 16 aa, Homo sapiens
  CDR3 for alpha chain variable domain of TCR clone 87372 (TRAV3, TRAJ6)
RAVRDGMGRRKLHTYI

SEQ ID NO: 174744 - protein, 15 aa, Homo sapiens
  CDR3 for beta chain variable domain of TCR clone 87372 (TRBV5-1, TRBJ2-7)
CASSLGDFTTYEQYF

SEQ ID NO: 174745 - protein, 13 aa, Homo sapiens
  CDR3 for alpha chain variable domain of TCR clone 87373 (TRAV8-6, TRAJ34)
CAVSDQGTDKPIF

SEQ ID NO: 174746 - protein, 14 aa, Homo sapiens
  CDR3 for beta chain variable domain of TCR clone 87373 (TRBV12-4, TRBJ1-1)
CASTWTGHDTEAFF

SEQ ID NO: 174747 - protein, 14 aa, Homo sapiens
  CDR3 for alpha chain variable domain of TCR clone 87374 (TRAV9-2, TRAJ39)
CALYIYNAGNMLTF

SEQ ID NO: 174748 - protein, 13 aa, Homo sapiens
  CDR3 for beta chain variable domain of TCR clone 87374 (TRBV7-3, TRBJ1-2)
CASSRDRNYGYTF

SEQ ID NO: 174749 - protein, 17 aa, Homo sapiens
  CDR3 for alpha chain variable domain of TCR clone 87375 (TRAV12-3, TRAJ6)
CAMSARGGAGGSYIPTF

SEQ ID NO: 174750 - protein, 13 aa, Homo sapiens
  CDR3 for beta chain variable domain of TCR clone 87375 (TRBV10-3, TRBJ2-7)
CASKLAVNYEQYF

SEQ ID NO: 174751 - protein, 16 aa, Homo sapiens
  CDR3 for alpha chain variable domain of TCR clone 87376 (TRAV12-3, TRAJ53)
CAMSPGSGGSNYKLTF

SEQ ID NO: 174752 - protein, 14 aa, Homo sapiens
  CDR3 for beta chain variable domain of TCR clone 87376 (TRBV5-1, TRBJ2-7)
CASSRGESLYEQYF

SEQ ID NO: 174753 - protein, 14 aa, Homo sapiens
  CDR3 for alpha chain variable domain of TCR clone 87377 (TRAV38-1, TRAJ45)
CAYYSGGGADGLTF

SEQ ID NO: 174754 - protein, 20 aa, Homo sapiens
  CDR3 for beta chain variable domain of TCR clone 87377 (TRBV28, TRBJ2-1)
CASTPIGWSPGLAGGNEQFF

SEQ ID NO: 174755 - protein, 12 aa, Homo sapiens
  CDR3 for alpha chain variable domain of TCR clone 87378 (TRAV21, TRAJ31)
CVLAGNNARLMF

SEQ ID NO: 174756 - protein, 12 aa, Homo sapiens
  CDR3 for beta chain variable domain of TCR clone 87378 (TRBV11-2, TRBJ2-2)
CASSLGGGELFF

SEQ ID NO: 174757 - protein, 13 aa, Homo sapiens
  CDR3 for alpha chain variable domain of TCR clone 87379 (TRAV22, TRAJ29)
CAVGGSGNTPLAF

SEQ ID NO: 174758 - protein, 18 aa, Homo sapiens
  CDR3 for beta chain variable domain of TCR clone 87379 (TRBV10-3, TRBJ2-3)
CAISESRVGPMRGDTQYF

SEQ ID NO: 174759 - protein, 16 aa, Homo sapiens
  CDR3 for alpha chain variable domain of TCR clone 87380 (TRAV21, TRAJ37)
CAVRPRGSSNTGKLIF

SEQ ID NO: 174760 - protein, 13 aa, Homo sapiens
  CDR3 for beta chain variable domain of TCR clone 87380 (TRBV7-9, TRBJ2-5)
CASLAPGQETQYF

SEQ ID NO: 174761 - protein, 16 aa, Homo sapiens
  CDR3 for alpha chain variable domain of TCR clone 87381 (TRAV35, TRAJ52)
CAGQGSGGTSYGKLTF

SEQ ID NO: 174762 - protein, 14 aa, Homo sapiens
  CDR3 for beta chain variable domain of TCR clone 87381 (TRBV7-9, TRBJ2-1)
CASSSMVGFGEQFF

SEQ ID NO: 174763 - protein, 15 aa, Homo sapiens
  CDR3 for alpha chain variable domain of TCR clone 87382 (TRAV8-3, TRAJ41)
CAVGRTQIPGMHSTS

SEQ ID NO: 174764 - protein, 17 aa, Homo sapiens
  CDR3 for beta chain variable domain of TCR clone 87382 (TRBV25-1, TRBJ2-1)
CASSAYGQGRGVYEQFF

SEQ ID NO: 174765 - protein, 14 aa, Homo sapiens
  CDR3 for alpha chain variable domain of TCR clone 87383 (TRAV12-1, TRAJ17)
CVVNYKAAGIKLTF

SEQ ID NO: 174766 - protein, 17 aa, Homo sapiens
  CDR3 for beta chain variable domain of TCR clone 87383 (TRBV20-1, TRBJ2-1)
CSASPSGLAGSYNEQFF

SEQ ID NO: 174767 - protein, 17 aa, Homo sapiens
  CDR3 for alpha chain variable domain of TCR clone 87384 (TRAV3, TRAJ42)
CAVRDRDYGGSQGNPIF

SEQ ID NO: 174768 - protein, 12 aa, Homo sapiens
  CDR3 for beta chain variable domain of TCR clone 87384 (TRBV29-1, TRBJ2-3)
CSVTGGADTQYF

SEQ ID NO: 174769 - protein, 16 aa, Homo sapiens
  CDR3 for alpha chain variable domain of TCR clone 87385 (TRAV1-2, TRAJ10)
CAVKGVLTGGGNKLTF

SEQ ID NO: 174770 - protein, 14 aa, Homo sapiens
  CDR3 for beta chain variable domain of TCR clone 87385 (TRBV19, TRBJ2-1)
CARGARSFQWEQFF

SEQ ID NO: 174771 - protein, 18 aa, Homo sapiens
  CDR3 for alpha chain variable domain of TCR clone 87386 (TRAV1-2, TRAJ18)
CAVRDMGDRVSTLGRLYF

SEQ ID NO: 174772 - protein, 16 aa, Homo sapiens
  CDR3 for beta chain variable domain of TCR clone 87386 (TRBV29-1, TRBJ1-2)
CSVEANRDIANYGYTF

SEQ ID NO: 174773 - protein, 16 aa, Homo sapiens
  CDR3 for alpha chain variable domain of TCR clone 87387 (TRAV16, TRAJ57)
CAPYLITQGGSEKLVF

SEQ ID NO: 174774 - protein, 17 aa, Homo sapiens
  CDR3 for beta chain variable domain of TCR clone 87387 (TRBV24-1, TRBJ2-4)
CSTSDAEARGVRNIQYF

SEQ ID NO: 174775 - protein, 12 aa, Homo sapiens
  CDR3 for alpha chain variable domain of TCR clone 87388 (TRAV12-3, TRAJ17)
CAMALTGNKLTF

SEQ ID NO: 174776 - protein, 15 aa, Homo sapiens
  CDR3 for beta chain variable domain of TCR clone 87388 (TRBV20-1, TRBJ2-7)
CRARDRVSGMDEQYF

SEQ ID NO: 174777 - protein, 15 aa, Homo sapiens
  CDR3 for alpha chain variable domain of TCR clone 87389 (TRAV12-1, TRAJ10)
CVVNKLTGGGNKLTF

SEQ ID NO: 174778 - protein, 17 aa, Homo sapiens
  CDR3 for beta chain variable domain of TCR clone 87389 (TRBV5-1, TRBJ1-6)
CASSPSLQGSDNSTLHF

SEQ ID NO: 174779 - protein, 13 aa, Homo sapiens
  CDR3 for alpha chain variable domain of TCR clone 87390 (TRAV3, TRAJ8)
CAVRFTGFQKFVF

SEQ ID NO: 174780 - protein, 12 aa, Homo sapiens
  CDR3 for beta chain variable domain of TCR clone 87390 (TRBV2, TRBJ1-2)
CASSGQTYGYTF

SEQ ID NO: 174781 - protein, 15 aa, Homo sapiens
  CDR3 for alpha chain variable domain of TCR clone 87391 (TRAV3, TRAJ22)
CAVRDRGGSARQLTF

SEQ ID NO: 174782 - protein, 14 aa, Homo sapiens
  CDR3 for beta chain variable domain of TCR clone 87391 (TRBV5-7, TRBJ2-7)
CASSSGQVTYEQYF

SEQ ID NO: 174783 - protein, 14 aa, Homo sapiens
  CDR3 for alpha chain variable domain of TCR clone 87392 (TRAV1-2, TRAJ16)
CAVNRFSDGQKLLF

SEQ ID NO: 174784 - protein, 15 aa, Homo sapiens
  CDR3 for beta chain variable domain of TCR clone 87392 (TRBV7-2, TRBJ2-7)
CASSLKGALTYEKYF

SEQ ID NO: 174785 - protein, 12 aa, Homo sapiens
  CDR3 for alpha chain variable domain of TCR clone 87393 (TRAV12-3, TRAJ40)
CAMSSGTYKYIF

SEQ ID NO: 174786 - protein, 15 aa, Homo sapiens
  CDR3 for beta chain variable domain of TCR clone 87393 (TRBV7-3, TRBJ2-2)
CASSETGQGTGGMFF

SEQ ID NO: 174787 - protein, 15 aa, Homo sapiens
  CDR3 for alpha chain variable domain of TCR clone 87394 (TRAV13-1, TRAJ9)
CAASTLNTGGFKTIF

SEQ ID NO: 174788 - protein, 15 aa, Homo sapiens
  CDR3 for beta chain variable domain of TCR clone 87394 (TRBV6-5, TRBJ2-4)
CASSLLESPKNIQYF

SEQ ID NO: 174789 - protein, 12 aa, Homo sapiens
  CDR3 for alpha chain variable domain of TCR clone 87395 (TRAV8-3, TRAJ20)
CAVGANDYKISF

SEQ ID NO: 174790 - protein, 16 aa, Homo sapiens
  CDR3 for beta chain variable domain of TCR clone 87395 (TRBV19, TRBJ2-2)
CASRSPGKGATGELFF

SEQ ID NO: 174791 - protein, 16 aa, Homo sapiens
  CDR3 for alpha chain variable domain of TCR clone 87396 (TRAV3, TRAJ10)
CAVRDMRSGGGNKLTF

SEQ ID NO: 174792 - protein, 20 aa, Homo sapiens
  CDR3 for beta chain variable domain of TCR clone 87396 (TRBV11-3, TRBJ2-7)
CASSQRTSGSLRAVLRAGHQ

SEQ ID NO: 174793 - protein, 12 aa, Homo sapiens
  CDR3 for alpha chain variable domain of TCR clone 87397 (TRAV27, TRAJ35)
CAGADFGNVLHC

SEQ ID NO: 174794 - protein, 20 aa, Homo sapiens
  CDR3 for beta chain variable domain of TCR clone 87397 (TRBV4-1, TRBJ2-5)
CASPPGGAETRDPVLRARHA

SEQ ID NO: 174795 - protein, 15 aa, Homo sapiens
  CDR3 for alpha chain variable domain of TCR clone 87398 (TRAV21, TRAJ24)
CAARSSTDSWGKLQF

SEQ ID NO: 174796 - protein, 15 aa, Homo sapiens
  CDR3 for beta chain variable domain of TCR clone 87398 (TRBV4-1, TRBJ2-7)
CASSQNTGRLYDQYF

SEQ ID NO: 174797 - protein, 13 aa, Homo sapiens
  CDR3 for alpha chain variable domain of TCR clone 87399 (TRAV36/DV7, TRAJ7)
CAGTRYGNNRLAF

SEQ ID NO: 174798 - protein, 15 aa, Homo sapiens
  CDR3 for beta chain variable domain of TCR clone 87399 (TRBV11-3, TRBJ2-7)
CASSPGPAGSYEQYF

SEQ ID NO: 174799 - protein, 14 aa, Homo sapiens
  CDR3 for alpha chain variable domain of TCR clone 87400 (TRAV1-2, TRAJ16)
CAVNRFSDGQRLLF

SEQ ID NO: 174800 - protein, 13 aa, Homo sapiens
  CDR3 for beta chain variable domain of TCR clone 87400 (TRBV7-3, TRBJ1-2)
CASSLKRGYGYTF

SEQ ID NO: 174801 - protein, 19 aa, Homo sapiens
  CDR3 for alpha chain variable domain of TCR clone 87401 (TRAV2, TRAJ20)
ILQVREADAAVYRACKLSF

SEQ ID NO: 174802 - protein, 16 aa, Homo sapiens
  CDR3 for beta chain variable domain of TCR clone 87401 (TRBV19, TRBJ2-1)
CASSKAGPSSYNEQFF

SEQ ID NO: 174803 - protein, 12 aa, Homo sapiens
  CDR3 for alpha chain variable domain of TCR clone 87402 (TRAV38-2/DV8, TRAJ48)
CALLSGNEKLTF

SEQ ID NO: 174804 - protein, 14 aa, Homo sapiens
  CDR3 for beta chain variable domain of TCR clone 87402 (TRBV4-1, TRBJ2-2)
CASSQAVNTGELFF

SEQ ID NO: 174805 - protein, 14 aa, Homo sapiens
  CDR3 for alpha chain variable domain of TCR clone 87403 (TRAV3, TRAJ7)
CAVREEEREQQTRF

SEQ ID NO: 174806 - protein, 12 aa, Homo sapiens
  CDR3 for beta chain variable domain of TCR clone 87403 (TRBV7-8, TRBJ2-7)
CASSLGDREQYV

SEQ ID NO: 174807 - protein, 15 aa, Homo sapiens
  CDR3 for alpha chain variable domain of TCR clone 87404 (TRAV17, TRAJ56)
CATDANTGANSKLTF

SEQ ID NO: 174808 - protein, 12 aa, Homo sapiens
  CDR3 for beta chain variable domain of TCR clone 87404 (TRBV7-8, TRBJ2-7)
CASSPGDREQYF

SEQ ID NO: 174809 - protein, 12 aa, Homo sapiens
  CDR3 for alpha chain variable domain of TCR clone 87405 (TRAV27, TRAJ9)
CAGESGGFKTIF

SEQ ID NO: 174810 - protein, 13 aa, Homo sapiens
  CDR3 for beta chain variable domain of TCR clone 87405 (TRBV7-2, TRBJ2-2)
CASSSVRAGELFF

SEQ ID NO: 174811 - protein, 10 aa, Homo sapiens
  CDR3 for alpha chain variable domain of TCR clone 87406 (TRAV38-2/DV8, TRAJ40)
CASGTYKYIF

SEQ ID NO: 174812 - protein, 14 aa, Homo sapiens
  CDR3 for beta chain variable domain of TCR clone 87406 (TRBV7-9, TRBJ2-1)
CSSSPRDSLYEQFF

SEQ ID NO: 174813 - protein, 13 aa, Homo sapiens
  CDR3 for alpha chain variable domain of TCR clone 87407 (TRAV12-3, TRAJ46)
CAMKKSSGDKLTF

SEQ ID NO: 174814 - protein, 17 aa, Homo sapiens
  CDR3 for beta chain variable domain of TCR clone 87407 (TRBV7-8, TRBJ2-6)
CASSAGTGGAGANVLTF

SEQ ID NO: 174815 - protein, 14 aa, Homo sapiens
  CDR3 for alpha chain variable domain of TCR clone 87408 (TRAV8-3, TRAJ4)
CAVGAAGGYNKLIF

SEQ ID NO: 174816 - protein, 17 aa, Homo sapiens
  CDR3 for beta chain variable domain of TCR clone 87408 (TRBV7-6, TRBJ2-5)
CASSSPQAGDPSETQYF

SEQ ID NO: 174817 - protein, 14 aa, Homo sapiens
  CDR3 for alpha chain variable domain of TCR clone 87409 (TRAV2, TRAJ11)
CAVVPNSGYSTLIF

SEQ ID NO: 174818 - protein, 15 aa, Homo sapiens
  CDR3 for beta chain variable domain of TCR clone 87409 (TRBV4-1, TRBJ1-3)
CASSQDLRVGNTIYF

SEQ ID NO: 174819 - protein, 12 aa, Homo sapiens
  CDR3 for alpha chain variable domain of TCR clone 87410 (TRAV2, TRAJ10)
CASTGGGNKLTF

SEQ ID NO: 174820 - protein, 15 aa, Homo sapiens
  CDR3 for beta chain variable domain of TCR clone 87410 (TRBV10-3, TRBJ2-1)
CAISLGLVGGNEQFF

SEQ ID NO: 174821 - protein, 13 aa, Homo sapiens
  CDR3 for alpha chain variable domain of TCR clone 87411 (TRAV21, TRAJ27)
CAARPGNAGKSTF

SEQ ID NO: 174822 - protein, 13 aa, Homo sapiens
  CDR3 for beta chain variable domain of TCR clone 87411 (TRBV12-4, TRBJ2-5)
CASSPGTEETQYF

SEQ ID NO: 174823 - protein, 17 aa, Homo sapiens
  CDR3 for alpha chain variable domain of TCR clone 87412 (TRAV12-1, TRAJ6)
CVVKGGIPSGGSYIPTF

SEQ ID NO: 174824 - protein, 13 aa, Homo sapiens
  CDR3 for beta chain variable domain of TCR clone 87412 (TRBV5-1, TRBJ2-5)
CASSVIPAETQYF

SEQ ID NO: 174825 - protein, 16 aa, Homo sapiens
  CDR3 for alpha chain variable domain of TCR clone 87413 (TRAV1-2, TRAJ4)
CAVRDSLSGGYNKLIF

SEQ ID NO: 174826 - protein, 14 aa, Homo sapiens
  CDR3 for beta chain variable domain of TCR clone 87413 (TRBV7-2, TRBJ2-3)
CASSQTGSSYTQYF

SEQ ID NO: 174827 - protein, 16 aa, Homo sapiens
  CDR3 for alpha chain variable domain of TCR clone 87414 (TRAV17, TRAJ28)
CTTDEYSGAGSYQLTF

SEQ ID NO: 174828 - protein, 13 aa, Homo sapiens
  CDR3 for beta chain variable domain of TCR clone 87414 (TRBV7-9, TRBJ1-2)
CASRTGPNYGYTF

SEQ ID NO: 174829 - protein, 14 aa, Homo sapiens
  CDR3 for alpha chain variable domain of TCR clone 87415 (TRAV1-1, TRAJ27)
CAVIYNTNAGKSTF

SEQ ID NO: 174830 - protein, 13 aa, Homo sapiens
  CDR3 for beta chain variable domain of TCR clone 87415 (TRBV7-9, TRBJ1-2)
CASSLRQNYGYTF

SEQ ID NO: 174831 - protein, 14 aa, Homo sapiens
  CDR3 for alpha chain variable domain of TCR clone 87416 (TRAV12-3, TRAJ10)
SHLPLTGGGNKITF

SEQ ID NO: 174832 - protein, 15 aa, Homo sapiens
  CDR3 for beta chain variable domain of TCR clone 87416 (TRBV7-3, TRBJ2-2)
CASSETGQGTGELFF

SEQ ID NO: 174833 - protein, 19 aa, Homo sapiens
  CDR3 for alpha chain variable domain of TCR clone 87417 (TRAV26-1, TRAJ52)
CIVRAHRNAGGTSYGKLAF

SEQ ID NO: 174834 - protein, 15 aa, Homo sapiens
  CDR3 for beta chain variable domain of TCR clone 87417 (TRBV12-4, TRBJ2-5)
CASSPPTGLQETQYF

SEQ ID NO: 174835 - protein, 11 aa, Homo sapiens
  CDR3 for alpha chain variable domain of TCR clone 87418 (TRAV12-1, TRAJ21)
CVVNNFNKFYF

SEQ ID NO: 174836 - protein, 16 aa, Homo sapiens
  CDR3 for beta chain variable domain of TCR clone 87418 (TRBV13, TRBJ2-2)
CASSPRTGEHTGELFF

SEQ ID NO: 174837 - protein, 15 aa, Homo sapiens
  CDR3 for alpha chain variable domain of TCR clone 87419 (TRAV14/DV4, TRAJ10)
CAMREPTGGGNKLTF

SEQ ID NO: 174838 - protein, 18 aa, Homo sapiens
  CDR3 for beta chain variable domain of TCR clone 87419 (TRBV7-9, TRBJ2-7)
CASSLTTSGSRAWYEQYF

SEQ ID NO: 174839 - protein, 19 aa, Homo sapiens
  CDR3 for alpha chain variable domain of TCR clone 87420 (TRAV26-1, TRAJ52)
CIVRARRNAGGTSYGKLKF

SEQ ID NO: 174840 - protein, 15 aa, Homo sapiens
  CDR3 for beta chain variable domain of TCR clone 87420 (TRBV12-4, TRBJ2-5)
CASSPPTGLQETQYF

SEQ ID NO: 174841 - protein, 14 aa, Homo sapiens
  CDR3 for alpha chain variable domain of TCR clone 87421 (TRAV2, TRAJ37)
CAVDFTSNTGKLIF

SEQ ID NO: 174842 - protein, 17 aa, Homo sapiens
  CDR3 for beta chain variable domain of TCR clone 87421 (TRBV20-1, TRBJ2-2)
CSASGSGQGGLTGELFF

SEQ ID NO: 174843 - protein, 11 aa, Homo sapiens
  CDR3 for alpha chain variable domain of TCR clone 87422 (TRAV12-3, TRAJ27)
CAMANAGKSTF

SEQ ID NO: 174844 - protein, 13 aa, Homo sapiens
  CDR3 for beta chain variable domain of TCR clone 87422 (TRBV20-1, TRBJ1-1)
CSARVGGNTEAYF

SEQ ID NO: 174845 - protein, 14 aa, Homo sapiens
  CDR3 for alpha chain variable domain of TCR clone 87423 (TRAV12-2, TRAJ9)
CAGNMEGGGFKTIF

SEQ ID NO: 174846 - protein, 14 aa, Homo sapiens
  CDR3 for beta chain variable domain of TCR clone 87423 (TRBV27, TRBJ2-5)
CASSSLKGWETQYF

SEQ ID NO: 174847 - protein, 15 aa, Homo sapiens
  CDR3 for alpha chain variable domain of TCR clone 87424 (TRAV26-1, TRAJ47)
CIVRVGWGYGNKLVF

SEQ ID NO: 174848 - protein, 19 aa, Homo sapiens
  CDR3 for beta chain variable domain of TCR clone 87424 (TRBV25-1, TRBJ2-2)
CAILVYRVDRGRKTGELFF

SEQ ID NO: 174849 - protein, 12 aa, Homo sapiens
  CDR3 for alpha chain variable domain of TCR clone 87425 (TRAV2, TRAJ9)
CAVGAGAFKTIF

SEQ ID NO: 174850 - protein, 16 aa, Homo sapiens
  CDR3 for beta chain variable domain of TCR clone 87425 (TRBV13, TRBJ2-2)
CASSPRTGEHTGELFF

SEQ ID NO: 174851 - protein, 13 aa, Homo sapiens
  CDR3 for alpha chain variable domain of TCR clone 87426 (TRAV2, TRAJ15)
CAVASQAGTALIF

SEQ ID NO: 174852 - protein, 16 aa, Homo sapiens
  CDR3 for beta chain variable domain of TCR clone 87426 (TRBV2, TRBJ2-1)
CASRSPAGGKYNEQFF

SEQ ID NO: 174853 - protein, 16 aa, Homo sapiens
  CDR3 for alpha chain variable domain of TCR clone 87427 (TRAV3, TRAJ37)
CAVRGKGSGNTGKLIF

SEQ ID NO: 174854 - protein, 15 aa, Homo sapiens
  CDR3 for beta chain variable domain of TCR clone 87427 (TRBV4-2, TRBJ1-1)
CASSQAGNTEAFLDK

SEQ ID NO: 174855 - protein, 13 aa, Homo sapiens
  CDR3 for alpha chain variable domain of TCR clone 87428 (TRAV1-2, TRAJ9)
CAALNTGGFKTIF

SEQ ID NO: 174856 - protein, 15 aa, Homo sapiens
  CDR3 for beta chain variable domain of TCR clone 87428 (TRBV7-9, TRBJ2-2)
CASSFGQLNTGELFF

SEQ ID NO: 174857 - protein, 15 aa, Homo sapiens
  CDR3 for alpha chain variable domain of TCR clone 87429 (TRAV8-3, TRAJ27)
CAVGPSKTNAGKSTF

SEQ ID NO: 174858 - protein, 15 aa, Homo sapiens
  CDR3 for beta chain variable domain of TCR clone 87429 (TRBV7-2, TRBJ2-1)
CASSSGLAGGNQQFF

SEQ ID NO: 174859 - protein, 13 aa, Homo sapiens
  CDR3 for alpha chain variable domain of TCR clone 87430 (TRAV17, TRAJ26)
CATVDNYGQNFVF

SEQ ID NO: 174860 - protein, 15 aa, Homo sapiens
  CDR3 for beta chain variable domain of TCR clone 87430 (TRBV15, TRBJ2-3)
CATSRDPRGTDTQYF

SEQ ID NO: 174861 - protein, 13 aa, Homo sapiens
  CDR3 for alpha chain variable domain of TCR clone 87431 (TRAV17, TRAJ9)
CATDYTGGFKTIF

SEQ ID NO: 174862 - protein, 16 aa, Homo sapiens
  CDR3 for beta chain variable domain of TCR clone 87431 (TRBV19, TRBJ2-1)
CASSMGGGSSYNEQFF

SEQ ID NO: 174863 - protein, 14 aa, Homo sapiens
  CDR3 for alpha chain variable domain of TCR clone 87432 (TRAV17, TRAJ40)
CATALTSGTYKYIF

SEQ ID NO: 174864 - protein, 14 aa, Homo sapiens
  CDR3 for beta chain variable domain of TCR clone 87432 (TRBV28, TRBJ1-5)
CASSLGVLVKPQHF

SEQ ID NO: 174865 - protein, 13 aa, Homo sapiens
  CDR3 for alpha chain variable domain of TCR clone 87433 (TRAV3, TRAJ21)
CALREPDFNKFYF

SEQ ID NO: 174866 - protein, 14 aa, Homo sapiens
  CDR3 for beta chain variable domain of TCR clone 87433 (TRBV4-1, TRBJ2-2)
CASSQAVNTGELFF

SEQ ID NO: 174867 - protein, 13 aa, Homo sapiens
  CDR3 for alpha chain variable domain of TCR clone 87434 (TRAV2, TRAJ40)
CAVVTSGTYKYIF

SEQ ID NO: 174868 - protein, 13 aa, Homo sapiens
  CDR3 for beta chain variable domain of TCR clone 87434 (TRBV24-1, TRBJ1-4)
CATNNGRSEKLFF

SEQ ID NO: 174869 - protein, 12 aa, Homo sapiens
  CDR3 for alpha chain variable domain of TCR clone 87435 (TRAV1-1, TRAJ24)
CAVRGSWGQFQF

SEQ ID NO: 174870 - protein, 14 aa, Homo sapiens
  CDR3 for beta chain variable domain of TCR clone 87435 (TRBV20-1, TRBJ2-3)
CSARGGTSTDTQYF

SEQ ID NO: 174871 - protein, 20 aa, Homo sapiens
  CDR3 for alpha chain variable domain of TCR clone 87436 (TRAV12-3, TRAJ37)
CALVRVWQHRQTNLWARDNF

SEQ ID NO: 174872 - protein, 16 aa, Homo sapiens
  CDR3 for beta chain variable domain of TCR clone 87436 (TRBV7-3, TRBJ2-2)
CASSLKRGTLSGELFF

SEQ ID NO: 174873 - protein, 16 aa, Homo sapiens
  CDR3 for alpha chain variable domain of TCR clone 87437 (TRAV21, TRAJ52)
CAVTNAGGTSYGKLPF

SEQ ID NO: 174874 - protein, 13 aa, Homo sapiens
  CDR3 for beta chain variable domain of TCR clone 87437 (TRBV20-1, TRBJ2-3)
CSARLAGTDTQYF

SEQ ID NO: 174875 - protein, 14 aa, Homo sapiens
  CDR3 for alpha chain variable domain of TCR clone 87438 (TRAV8-4, TRAJ54)
CAVSEVLGAQKLVF

SEQ ID NO: 174876 - protein, 13 aa, Homo sapiens
  CDR3 for beta chain variable domain of TCR clone 87438 (TRBV27, TRBJ2-7)
CASSFVSSYEQYL

SEQ ID NO: 174877 - protein, 10 aa, Homo sapiens
  CDR3 for alpha chain variable domain of TCR clone 87439 (TRAV26-1, TRAJ22)
RSDSARQLTF

SEQ ID NO: 174878 - protein, 13 aa, Homo sapiens
  CDR3 for beta chain variable domain of TCR clone 87439 (TRBV7-9, TRBJ1-2)
CASSLKQNYGYTF

SEQ ID NO: 174879 - protein, 13 aa, Homo sapiens
  CDR3 for alpha chain variable domain of TCR clone 87440 (TRAV27, TRAJ16)
CAGGTRGSYIPTF

SEQ ID NO: 174880 - protein, 12 aa, Homo sapiens
  CDR3 for beta chain variable domain of TCR clone 87440 (TRBV11-2, TRBJ2-2)
CASSLGGGELFF

SEQ ID NO: 174881 - protein, 18 aa, Homo sapiens
  CDR3 for alpha chain variable domain of TCR clone 87441 (TRAV12-3, TRAJ52)
CAMSVGGAGGTSYGKVTF

SEQ ID NO: 174882 - protein, 16 aa, Homo sapiens
  CDR3 for beta chain variable domain of TCR clone 87441 (TRBV7-9, TRBJ1-2)
CASSISLDRGGYGYTF

SEQ ID NO: 174883 - protein, 15 aa, Homo sapiens
  CDR3 for alpha chain variable domain of TCR clone 87442 (TRAV13-1, TRAJ11)
CSASNRNSGCSTLTF

SEQ ID NO: 174884 - protein, 11 aa, Homo sapiens
  CDR3 for beta chain variable domain of TCR clone 87442 (TRBV20-1, TRBJ2-7)
CSARLSYEQYF

SEQ ID NO: 174885 - protein, 13 aa, Homo sapiens
  CDR3 for alpha chain variable domain of TCR clone 87443 (TRAV8-3, TRAJ28)
CAVGAVGSYQLTF

SEQ ID NO: 174886 - protein, 17 aa, Homo sapiens
  CDR3 for beta chain variable domain of TCR clone 87443 (TRBV11-2, TRBJ2-1)
CASSLYSPGVEYNEQFF

SEQ ID NO: 174887 - protein, 16 aa, Homo sapiens
  CDR3 for alpha chain variable domain of TCR clone 87444 (TRAV30, TRAJ24)
CGTEIVDADSWGKFQF

SEQ ID NO: 174888 - protein, 12 aa, Homo sapiens
  CDR3 for beta chain variable domain of TCR clone 87444 (TRBV11-2, TRBJ2-2)
CASSLGVGELFF

SEQ ID NO: 174889 - protein, 17 aa, Homo sapiens
  CDR3 for alpha chain variable domain of TCR clone 87445 (TRAV26-2, TRAJ42)
CILRDVGYGGSQGNLIF

SEQ ID NO: 174890 - protein, 16 aa, Homo sapiens
  CDR3 for beta chain variable domain of TCR clone 87445 (TRBV12-4, TRBJ2-7)
CASSLIGGTGTYEQCF

SEQ ID NO: 174891 - protein, 15 aa, Homo sapiens
  CDR3 for alpha chain variable domain of TCR clone 87446 (TRAV17, TRAJ22)
CATVAPSGSARQLTF

SEQ ID NO: 174892 - protein, 16 aa, Homo sapiens
  CDR3 for beta chain variable domain of TCR clone 87446 (TRBV10-3, TRBJ2-7)
CAISADFAGRPYEQYL

SEQ ID NO: 174893 - protein, 13 aa, Homo sapiens
  CDR3 for alpha chain variable domain of TCR clone 87447 (TRAV12-3, TRAJ33)
CAMSVNSNYQLIW

SEQ ID NO: 174894 - protein, 15 aa, Homo sapiens
  CDR3 for beta chain variable domain of TCR clone 87447 (TRBV28, TRBJ2-1)
CASSIIAGGRNEQFF

SEQ ID NO: 174895 - protein, 11 aa, Homo sapiens
  CDR3 for alpha chain variable domain of TCR clone 87448 (TRAV17, TRAJ43)
CATPRSNDMRF

SEQ ID NO: 174896 - protein, 14 aa, Homo sapiens
  CDR3 for beta chain variable domain of TCR clone 87448 (TRBV7-2, TRBJ1-1)
CASSFLTGTTEAFF

SEQ ID NO: 174897 - protein, 17 aa, Homo sapiens
  CDR3 for alpha chain variable domain of TCR clone 87449 (TRAV3, TRAJ6)
CAVRDGPRDGGSYIPTF

SEQ ID NO: 174898 - protein, 14 aa, Homo sapiens
  CDR3 for beta chain variable domain of TCR clone 87449 (TRBV7-2, TRBJ2-7)
CASSPKTSFYEQYF

SEQ ID NO: 174899 - protein, 15 aa, Homo sapiens
  CDR3 for alpha chain variable domain of TCR clone 87450 (TRAV35, TRAJ33)
CAGQPPRYSNYQLIW

SEQ ID NO: 174900 - protein, 12 aa, Homo sapiens
  CDR3 for beta chain variable domain of TCR clone 87450 (TRBV19, TRBJ2-1)
CASSRQGAEQFF

SEQ ID NO: 174901 - protein, 13 aa, Homo sapiens
  CDR3 for alpha chain variable domain of TCR clone 87451 (TRAV12-3, TRAJ47)
CAMKKEYGNKLVF

SEQ ID NO: 174902 - protein, 16 aa, Homo sapiens
  CDR3 for beta chain variable domain of TCR clone 87451 (TRBV3-1, TRBJ2-6)
CASSLTWVSGANVLSF

SEQ ID NO: 174903 - protein, 14 aa, Homo sapiens
  CDR3 for alpha chain variable domain of TCR clone 87452 (TRAV20, TRAJ42)
CAVQAGGSQGNLIF

SEQ ID NO: 174904 - protein, 16 aa, Homo sapiens
  CDR3 for beta chain variable domain of TCR clone 87452 (TRBV12-5, TRBJ2-5)
CASGPRTSGNQETQYF

SEQ ID NO: 174905 - protein, 15 aa, Homo sapiens
  CDR3 for alpha chain variable domain of TCR clone 87453 (TRAV8-4, TRAJ48)
CAVSAANFGNEKLTF

SEQ ID NO: 174906 - protein, 12 aa, Homo sapiens
  CDR3 for beta chain variable domain of TCR clone 87453 (TRBV3-1, TRBJ2-5)
CASSQRGETQYF

SEQ ID NO: 174907 - protein, 18 aa, Homo sapiens
  CDR3 for alpha chain variable domain of TCR clone 87454 (TRAV13-1, TRAJ52)
CAAKNPNAGGTSYGKLTF

SEQ ID NO: 174908 - protein, 15 aa, Homo sapiens
  CDR3 for beta chain variable domain of TCR clone 87454 (TRBV6-1, TRBJ2-3)
CGSSERGGITDTQYF

SEQ ID NO: 174909 - protein, 15 aa, Homo sapiens
  CDR3 for alpha chain variable domain of TCR clone 87455 (TRAV23/DV6, TRAJ13)
CAAWPGGGGYQKVTF

SEQ ID NO: 174910 - protein, 13 aa, Homo sapiens
  CDR3 for beta chain variable domain of TCR clone 87455 (TRBV10-2, TRBJ2-7)
CASGASGGYEQYF

SEQ ID NO: 174911 - protein, 14 aa, Homo sapiens
  CDR3 for alpha chain variable domain of TCR clone 87456 (TRAV8-6, TRAJ30)
CAVSEQNRDDKIIF

SEQ ID NO: 174912 - protein, 14 aa, Homo sapiens
  CDR3 for beta chain variable domain of TCR clone 87456 (TRBV15, TRBJ2-5)
CATSIGGLGETQYF

SEQ ID NO: 174913 - protein, 15 aa, Homo sapiens
  CDR3 for alpha chain variable domain of TCR clone 87457 (TRAV20, TRAJ32)
CAVQAKRGATNKLIF

SEQ ID NO: 174914 - protein, 17 aa, Homo sapiens
  CDR3 for beta chain variable domain of TCR clone 87457 (TRBV7-8, TRBJ2-6)
CASSAGTGGAGANVLTF

SEQ ID NO: 174915 - protein, 14 aa, Homo sapiens
  CDR3 for alpha chain variable domain of TCR clone 87458 (TRAV12-2, TRAJ13)
CAVKKTGGYQKVTF

SEQ ID NO: 174916 - protein, 16 aa, Homo sapiens
  CDR3 for beta chain variable domain of TCR clone 87458 (TRBV12-4, TRBJ1-5)
CASRQPVGGSNQPQHF

SEQ ID NO: 174917 - protein, 13 aa, Homo sapiens
  CDR3 for alpha chain variable domain of TCR clone 87459 (TRAV8-3, TRAJ43)
CAVGPDNNNDMRC

SEQ ID NO: 174918 - protein, 14 aa, Homo sapiens
  CDR3 for beta chain variable domain of TCR clone 87459 (TRBV19, TRBJ2-1)
CASPTFVLSGEQFF

SEQ ID NO: 174919 - protein, 10 aa, Homo sapiens
  CDR3 for alpha chain variable domain of TCR clone 87460 (TRAV13-1, TRAJ30)
CAARDDKIIF

SEQ ID NO: 174920 - protein, 14 aa, Homo sapiens
  CDR3 for beta chain variable domain of TCR clone 87460 (TRBV19, TRBJ1-5)
CASSLSGGSQPQHF

SEQ ID NO: 174921 - protein, 14 aa, Homo sapiens
  CDR3 for alpha chain variable domain of TCR clone 87461 (TRAV26-1, TRAJ45)
CIEVTGGGADGLTF

SEQ ID NO: 174922 - protein, 19 aa, Homo sapiens
  CDR3 for beta chain variable domain of TCR clone 87461 (TRBV25-1, TRBJ2-2)
CAILVYRVDRGRKTGELFF

SEQ ID NO: 174923 - protein, 10 aa, Homo sapiens
  CDR3 for alpha chain variable domain of TCR clone 87462 (TRAV1-2, TRAJ20)
CVPNDYKLSF

SEQ ID NO: 174924 - protein, 15 aa, Homo sapiens
  CDR3 for beta chain variable domain of TCR clone 87462 (TRBV7-9, TRBJ1-4)
CASSARTGGNEKLFF

SEQ ID NO: 174925 - protein, 16 aa, Homo sapiens
  CDR3 for alpha chain variable domain of TCR clone 87463 (TRAV8-3, TRAJ13)
CAVGAYPSGGYQKVTF

SEQ ID NO: 174926 - protein, 15 aa, Homo sapiens
  CDR3 for beta chain variable domain of TCR clone 87463 (TRBV19, TRBJ1-5)
CASSIVWAENQPQHF

SEQ ID NO: 174927 - protein, 12 aa, Homo sapiens
  CDR3 for alpha chain variable domain of TCR clone 87464 (TRAV21, TRAJ13)
PGPSGGYQNVTF

SEQ ID NO: 174928 - protein, 15 aa, Homo sapiens
  CDR3 for beta chain variable domain of TCR clone 87464 (TRBV7-9, TRBJ1-6)
CASSSPGRGNSPLHF

SEQ ID NO: 174929 - protein, 14 aa, Homo sapiens
  CDR3 for alpha chain variable domain of TCR clone 87465 (TRAV14/DV4, TRAJ15)
CAMRRDQAGTALTF

SEQ ID NO: 174930 - protein, 16 aa, Homo sapiens
  CDR3 for beta chain variable domain of TCR clone 87465 (TRBV15, TRBJ2-3)
CATSRDLGIVTDTQYF

SEQ ID NO: 174931 - protein, 16 aa, Homo sapiens
  CDR3 for alpha chain variable domain of TCR clone 87466 (TRAV17, TRAJ28)
CATALDSGAGSYQLPF

SEQ ID NO: 174932 - protein, 15 aa, Homo sapiens
  CDR3 for beta chain variable domain of TCR clone 87466 (TRBV12-4, TRBJ1-2)
CASSFEAGLGYGYTF

SEQ ID NO: 174933 - protein, 12 aa, Homo sapiens
  CDR3 for alpha chain variable domain of TCR clone 87467 (TRAV12-1, TRAJ34)
CVVAGATDKLFF

SEQ ID NO: 174934 - protein, 16 aa, Homo sapiens
  CDR3 for beta chain variable domain of TCR clone 87467 (TRBV7-2, TRBJ1-2)
CASSSNQDRRGHGYTF

SEQ ID NO: 174935 - protein, 12 aa, Homo sapiens
  CDR3 for alpha chain variable domain of TCR clone 87468 (TRAV12-3, TRAJ3)
CAIDSSASKIIF

SEQ ID NO: 174936 - protein, 17 aa, Homo sapiens
  CDR3 for beta chain variable domain of TCR clone 87468 (TRBV7-9, TRBJ2-3)
CASSLEEAGAYPDTQYV

SEQ ID NO: 174937 - protein, 12 aa, Homo sapiens
  CDR3 for alpha chain variable domain of TCR clone 87469 (TRAV16, TRAJ27)
CALNTNAGKSTF

SEQ ID NO: 174938 - protein, 18 aa, Homo sapiens
  CDR3 for beta chain variable domain of TCR clone 87469 (TRBV12-4, TRBJ2-2)
CASSLVAGTRGRTGELFF

SEQ ID NO: 174939 - protein, 14 aa, Homo sapiens
  CDR3 for alpha chain variable domain of TCR clone 87470 (TRAV12-2, TRAJ44)
CAVNPAGPASKLTF

SEQ ID NO: 174940 - protein, 13 aa, Homo sapiens
  CDR3 for beta chain variable domain of TCR clone 87470 (TRBV20-1, TRBJ1-6)
CSAPVGVGSPLHF

SEQ ID NO: 174941 - protein, 14 aa, Homo sapiens
  CDR3 for alpha chain variable domain of TCR clone 87471 (TRAV12-1, TRAJ3)
CVVNPGSSASKIIF

SEQ ID NO: 174942 - protein, 14 aa, Homo sapiens
  CDR3 for beta chain variable domain of TCR clone 87471 (TRBV20-1, TRBJ2-3)
CSARGGTRTDTQYF

SEQ ID NO: 174943 - protein, 17 aa, Homo sapiens
  CDR3 for alpha chain variable domain of TCR clone 87472 (TRAV26-1, TRAJ37)
CIVRVITVSSNTGKLIF

SEQ ID NO: 174944 - protein, 14 aa, Homo sapiens
  CDR3 for beta chain variable domain of TCR clone 87472 (TRBV19, TRBJ2-1)
CASPTFVLSGEQLF

SEQ ID NO: 174945 - protein, 12 aa, Homo sapiens
  CDR3 for alpha chain variable domain of TCR clone 87473 (TRAV12-1, TRAJ31)
CVSWNNNARLMF

SEQ ID NO: 174946 - protein, 15 aa, Homo sapiens
  CDR3 for beta chain variable domain of TCR clone 87473 (TRBV7-2, TRBJ1-5)
CASSLVRGQDQPQHF

SEQ ID NO: 174947 - protein, 22 aa, Homo sapiens
  CDR3 for alpha chain variable domain of TCR clone 87474 (TRAV21, )
CAVRQDAGNNHIQNPDPAVYQL

SEQ ID NO: 174948 - protein, 18 aa, Homo sapiens
  CDR3 for beta chain variable domain of TCR clone 87474 (TRBV4-2, TRBJ1-1)
CASRPLDGEVTLKLSLDK

SEQ ID NO: 174949 - protein, 14 aa, Homo sapiens
  CDR3 for alpha chain variable domain of TCR clone 87475 (TRAV17, TRAJ4)
CATAPLGGYNTLIF

SEQ ID NO: 174950 - protein, 13 aa, Homo sapiens
  CDR3 for beta chain variable domain of TCR clone 87475 (TRBV12-4, TRBJ1-3)
CASSLASGNTIYF

SEQ ID NO: 174951 - protein, 14 aa, Homo sapiens
  CDR3 for alpha chain variable domain of TCR clone 87476 (TRAV35, TRAJ33)
CAGSSQDSNYQLIW

SEQ ID NO: 174952 - protein, 13 aa, Homo sapiens
  CDR3 for beta chain variable domain of TCR clone 87476 (TRBV18, TRBJ1-1)
CASSGGRNTEAFF

SEQ ID NO: 174953 - protein, 14 aa, Homo sapiens
  CDR3 for alpha chain variable domain of TCR clone 87477 (TRAV1-2, TRAJ16)
CAVNRFSDGQKLLF

SEQ ID NO: 174954 - protein, 17 aa, Homo sapiens
  CDR3 for beta chain variable domain of TCR clone 87477 (TRBV10-3, TRBJ2-4)
CTSVPSVNKGSKNIQYL

SEQ ID NO: 174955 - protein, 11 aa, Homo sapiens
  CDR3 for alpha chain variable domain of TCR clone 87478 (TRAV3, TRAJ21)
CAVGNFNKFYF

SEQ ID NO: 174956 - protein, 16 aa, Homo sapiens
  CDR3 for beta chain variable domain of TCR clone 87478 (TRBV20-1, TRBJ1-2)
RSASMGQGVANYGYTF

SEQ ID NO: 174957 - protein, 12 aa, Homo sapiens
  CDR3 for alpha chain variable domain of TCR clone 87479 (TRAV13-1, TRAJ21)
CAAKEGFNKFYF

SEQ ID NO: 174958 - protein, 13 aa, Homo sapiens
  CDR3 for beta chain variable domain of TCR clone 87479 (TRBV4-2, TRBJ1-1)
CASGQAGNTEAFF

SEQ ID NO: 174959 - protein, 13 aa, Homo sapiens
  CDR3 for alpha chain variable domain of TCR clone 87480 (TRAV12-3, TRAJ33)
CAMSVSSNYQLIW

SEQ ID NO: 174960 - protein, 14 aa, Homo sapiens
  CDR3 for beta chain variable domain of TCR clone 87480 (TRBV27, TRBJ2-5)
CASSSLKGWETQYF

SEQ ID NO: 174961 - protein, 13 aa, Homo sapiens
  CDR3 for alpha chain variable domain of TCR clone 87481 (TRAV26-1, TRAJ33)
CIVRVEGNYQLIW

SEQ ID NO: 174962 - protein, 13 aa, Homo sapiens
  CDR3 for beta chain variable domain of TCR clone 87481 (TRBV19, TRBJ1-2)
CASSVPGQDGYTF

SEQ ID NO: 174963 - protein, 12 aa, Homo sapiens
  CDR3 for alpha chain variable domain of TCR clone 87482 (TRAV13-1, TRAJ21)
CAAFFNFNKFYF

SEQ ID NO: 174964 - protein, 14 aa, Homo sapiens
  CDR3 for beta chain variable domain of TCR clone 87482 (TRBV4-1, TRBJ2-7)
RASRLTSGSYEQYF

SEQ ID NO: 174965 - protein, 16 aa, Homo sapiens
  CDR3 for alpha chain variable domain of TCR clone 87483 (TRAV4, TRAJ22)
CLVGDLYSGTARQLTF

SEQ ID NO: 174966 - protein, 15 aa, Homo sapiens
  CDR3 for beta chain variable domain of TCR clone 87483 (TRBV7-9, TRBJ1-4)
CASSRTGGFNEKLFF

SEQ ID NO: 174967 - protein, 17 aa, Homo sapiens
  CDR3 for alpha chain variable domain of TCR clone 87484 (TRAV26-1, TRAJ57)
CIVRPRFTQGRSEKLVF

SEQ ID NO: 174968 - protein, 16 aa, Homo sapiens
  CDR3 for beta chain variable domain of TCR clone 87484 (TRBV13, TRBJ2-2)
CASSEVFGANTGELFF

SEQ ID NO: 174969 - protein, 16 aa, Homo sapiens
  CDR3 for alpha chain variable domain of TCR clone 87485 (TRAV35, TRAJ28)
CAGQRYSGAGSYQLTF

SEQ ID NO: 174970 - protein, 14 aa, Homo sapiens
  CDR3 for beta chain variable domain of TCR clone 87485 (TRBV18, TRBJ2-7)
CASSPRRGAYEQYF

SEQ ID NO: 174971 - protein, 13 aa, Homo sapiens
  CDR3 for alpha chain variable domain of TCR clone 87486 (TRAV21, TRAJ27)
CAARPGNAGKSTF

SEQ ID NO: 174972 - protein, 16 aa, Homo sapiens
  CDR3 for beta chain variable domain of TCR clone 87486 (TRBV20-1, TRBJ1-2)
CIASMGQGVANYGYTF

SEQ ID NO: 174973 - protein, 14 aa, Homo sapiens
  CDR3 for alpha chain variable domain of TCR clone 87487 (TRAV12-2, TRAJ44)
CAVNKAGTASKLTF

SEQ ID NO: 174974 - protein, 13 aa, Homo sapiens
  CDR3 for beta chain variable domain of TCR clone 87487 (TRBV4-2, TRBJ1-1)
CASSQAGNTEAFF

SEQ ID NO: 174975 - protein, 12 aa, Homo sapiens
  CDR3 for alpha chain variable domain of TCR clone 87488 (TRAV8-3, TRAJ40)
CAVTSGTYKYIF

SEQ ID NO: 174976 - protein, 14 aa, Homo sapiens
  CDR3 for beta chain variable domain of TCR clone 87488 (TRBV12-4, TRBJ2-3)
CTSSGQGSTDTQYF

SEQ ID NO: 174977 - protein, 15 aa, Homo sapiens
  CDR3 for alpha chain variable domain of TCR clone 87489 (TRAV6, TRAJ32)
CALDMGGGATNKLIF

SEQ ID NO: 174978 - protein, 16 aa, Homo sapiens
  CDR3 for beta chain variable domain of TCR clone 87489 (TRBV7-3, TRBJ2-2)
CASSVKRGTLSGELFF

SEQ ID NO: 174979 - protein, 15 aa, Homo sapiens
  CDR3 for alpha chain variable domain of TCR clone 87490 (TRAV4, TRAJ39)
CLVGPNNNAGNMLTF

SEQ ID NO: 174980 - protein, 13 aa, Homo sapiens
  CDR3 for beta chain variable domain of TCR clone 87490 (TRBV11-2, TRBJ2-5)
CASSSTGEETQYY

SEQ ID NO: 174981 - protein, 14 aa, Homo sapiens
  CDR3 for alpha chain variable domain of TCR clone 87491 (TRAV29/DV5, TRAJ36)
CAARRKTGANNLFF

SEQ ID NO: 174982 - protein, 14 aa, Homo sapiens
  CDR3 for beta chain variable domain of TCR clone 87491 (TRBV19, TRBJ2-7)
CASSMGQGAIEQYF

SEQ ID NO: 174983 - protein, 10 aa, Homo sapiens
  CDR3 for alpha chain variable domain of TCR clone 87492 (TRAV26-1, TRAJ40)
CIAGNYKYIF

SEQ ID NO: 174984 - protein, 15 aa, Homo sapiens
  CDR3 for beta chain variable domain of TCR clone 87492 (TRBV19, TRBJ2-1)
CASSSPGVPLDEQFF

SEQ ID NO: 174985 - protein, 16 aa, Homo sapiens
  CDR3 for alpha chain variable domain of TCR clone 87493 (TRAV12-3, TRAJ53)
RAMSPGSGGSNYKLTF

SEQ ID NO: 174986 - protein, 17 aa, Homo sapiens
  CDR3 for beta chain variable domain of TCR clone 87493 (TRBV20-1, TRBJ2-2)
CSASGSGQGGLTGELFF

SEQ ID NO: 174987 - protein, 14 aa, Homo sapiens
  CDR3 for alpha chain variable domain of TCR clone 87494 (TRAV2, TRAJ37)
CAVDFTSNTGKLIF

SEQ ID NO: 174988 - protein, 14 aa, Homo sapiens
  CDR3 for beta chain variable domain of TCR clone 87494 (TRBV7-8, TRBJ2-2)
CASSSLKGTGELFF

SEQ ID NO: 174989 - protein, 12 aa, Homo sapiens
  CDR3 for alpha chain variable domain of TCR clone 87495 (TRAV8-3, TRAJ26)
CAGDNYGQNFVF

SEQ ID NO: 174990 - protein, 13 aa, Homo sapiens
  CDR3 for beta chain variable domain of TCR clone 87495 (TRBV20-1, TRBJ1-1)
CSTGTVGNTEAFF

SEQ ID NO: 174991 - protein, 12 aa, Homo sapiens
  CDR3 for alpha chain variable domain of TCR clone 87496 (TRAV36/DV7, TRAJ26)
CAVDNYGQNFVF

SEQ ID NO: 174992 - protein, 17 aa, Homo sapiens
  CDR3 for beta chain variable domain of TCR clone 87496 (TRBV11-2, TRBJ2-1)
CASSLYPPGVEYNEQFF

SEQ ID NO: 174993 - protein, 15 aa, Homo sapiens
  CDR3 for alpha chain variable domain of TCR clone 87497 (TRAV21, TRAJ53)
CATLNSGGSDYKLTF

SEQ ID NO: 174994 - protein, 15 aa, Homo sapiens
  CDR3 for beta chain variable domain of TCR clone 87497 (TRBV9, TRBJ2-1)
CQQRRWRGNYNEQFF

SEQ ID NO: 174995 - protein, 14 aa, Homo sapiens
  CDR3 for alpha chain variable domain of TCR clone 87498 (TRAV17, TRAJ35)
CATDRPGFGYVLHC

SEQ ID NO: 174996 - protein, 19 aa, Homo sapiens
  CDR3 for beta chain variable domain of TCR clone 87498 (TRBV11-3, TRBJ2-2)
CASSTRPGAKTTNTGELFF

SEQ ID NO: 174997 - protein, 18 aa, Homo sapiens
  CDR3 for alpha chain variable domain of TCR clone 87499 (TRAV35, TRAJ28)
CAGHNYPLSGAGSYQHTF

SEQ ID NO: 174998 - protein, 12 aa, Homo sapiens
  CDR3 for beta chain variable domain of TCR clone 87499 (TRBV7-9, TRBJ1-1)
CASSSEGTEAFF

SEQ ID NO: 174999 - protein, 15 aa, Homo sapiens
  CDR3 for alpha chain variable domain of TCR clone 87500 (TRAV3, TRAJ5)
CAVRDLATGRRALTF

SEQ ID NO: 175000 - protein, 15 aa, Homo sapiens
  CDR3 for beta chain variable domain of TCR clone 87500 (TRBV20-1, TRBJ2-1)
CSARSPGGPGNEQFF

SEQ ID NO: 175001 - protein, 15 aa, Homo sapiens
  CDR3 for alpha chain variable domain of TCR clone 87501 (TRAV8-2, TRAJ40)
CVVLGTTSGTYKYIF

SEQ ID NO: 175002 - protein, 16 aa, Homo sapiens
  CDR3 for beta chain variable domain of TCR clone 87501 (TRBV7-3, TRBJ2-1)
CASSLEGYRSYNEQFV

SEQ ID NO: 175003 - protein, 13 aa, Homo sapiens
  CDR3 for alpha chain variable domain of TCR clone 87502 (TRAV21, TRAJ58)
CAVKGASGSRLTF

SEQ ID NO: 175004 - protein, 13 aa, Homo sapiens
  CDR3 for beta chain variable domain of TCR clone 87502 (TRBV7-7, TRBJ2-2)
CASSLTSAGELFF

SEQ ID NO: 175005 - protein, 13 aa, Homo sapiens
  CDR3 for alpha chain variable domain of TCR clone 87503 (TRAV3, TRAJ15)
CAVRDQAGTALIF

SEQ ID NO: 175006 - protein, 15 aa, Homo sapiens
  CDR3 for beta chain variable domain of TCR clone 87503 (TRBV11-1, TRBJ2-7)
CASSSNYGASYEQYF

SEQ ID NO: 175007 - protein, 14 aa, Homo sapiens
  CDR3 for alpha chain variable domain of TCR clone 87504 (TRAV2, TRAJ37)
CAVDFTSNTGKLIF

SEQ ID NO: 175008 - protein, 15 aa, Homo sapiens
  CDR3 for beta chain variable domain of TCR clone 87504 (TRBV19, TRBJ2-7)
CASSPAGSGEALRYF

SEQ ID NO: 175009 - protein, 12 aa, Homo sapiens
  CDR3 for alpha chain variable domain of TCR clone 87505 (TRAV21, TRAJ33)
CAKMGSNYQLIW

SEQ ID NO: 175010 - protein, 13 aa, Homo sapiens
  CDR3 for beta chain variable domain of TCR clone 87505 (TRBV12-4, TRBJ2-5)
CASSPGTEETQYF

SEQ ID NO: 175011 - protein, 12 aa, Homo sapiens
  CDR3 for alpha chain variable domain of TCR clone 87506 (TRAV4, TRAJ26)
CLVGDYGQNFVY

SEQ ID NO: 175012 - protein, 16 aa, Homo sapiens
  CDR3 for beta chain variable domain of TCR clone 87506 (TRBV7-2, TRBJ1-2)
CASSSNQDRRGHGYTF

SEQ ID NO: 175013 - protein, 11 aa, Homo sapiens
  CDR3 for alpha chain variable domain of TCR clone 87507 (TRAV2, TRAJ13)
CASGGYQKVTF

SEQ ID NO: 175014 - protein, 16 aa, Homo sapiens
  CDR3 for beta chain variable domain of TCR clone 87507 (TRBV19, TRBJ2-1)
CASSKAGPSAYNEQFF

SEQ ID NO: 175015 - protein, 18 aa, Homo sapiens
  CDR3 for alpha chain variable domain of TCR clone 87508 (TRAV26-2, TRAJ45)
CILRVDKYSGGSADGLTF

SEQ ID NO: 175016 - protein, 11 aa, Homo sapiens
  CDR3 for beta chain variable domain of TCR clone 87508 (TRBV29-1, TRBJ2-5)
CSEDRTGTQYF

SEQ ID NO: 175017 - protein, 19 aa, Homo sapiens
  CDR3 for alpha chain variable domain of TCR clone 87509 (TRAV1-2, TRAJ26)
CLLPLCCERPDNYGQNFVF

SEQ ID NO: 175018 - protein, 15 aa, Homo sapiens
  CDR3 for beta chain variable domain of TCR clone 87509 (TRBV4-1, TRBJ1-4)
CASSDTGGTNEKLFF

SEQ ID NO: 175019 - protein, 13 aa, Homo sapiens
  CDR3 for alpha chain variable domain of TCR clone 87510 (TRAV13-2, TRAJ48)
CAEMDFGNEKLTF

SEQ ID NO: 175020 - protein, 13 aa, Homo sapiens
  CDR3 for beta chain variable domain of TCR clone 87510 (TRBV7-2, TRBJ2-7)
CASSSPSGSEQYF

SEQ ID NO: 175021 - protein, 16 aa, Homo sapiens
  CDR3 for alpha chain variable domain of TCR clone 87511 (TRAV3, TRAJ18)
CAVRDGRGSTLGRLYF

SEQ ID NO: 175022 - protein, 13 aa, Homo sapiens
  CDR3 for beta chain variable domain of TCR clone 87511 (TRBV20-1, TRBJ1-1)
CSAPLGGGTEAFF

SEQ ID NO: 175023 - protein, 16 aa, Homo sapiens
  CDR3 for alpha chain variable domain of TCR clone 87512 (TRAV3, TRAJ10)
CAVRDMRAGGGNKLTF

SEQ ID NO: 175024 - protein, 15 aa, Homo sapiens
  CDR3 for beta chain variable domain of TCR clone 87512 (TRBV6-5, TRBJ2-1)
CASSYDAGAGNEQFF

SEQ ID NO: 175025 - protein, 16 aa, Homo sapiens
  CDR3 for alpha chain variable domain of TCR clone 87513 (TRAV23/DV6, TRAJ52)
CAARPSGGTSHGKLTF

SEQ ID NO: 175026 - protein, 13 aa, Homo sapiens
  CDR3 for beta chain variable domain of TCR clone 87513 (TRBV7-9, TRBJ1-1)
CASSLSGETEAFF

SEQ ID NO: 175027 - protein, 13 aa, Homo sapiens
  CDR3 for alpha chain variable domain of TCR clone 87514 (TRAV27, TRAJ54)
CAGAGQGAQKLVF

SEQ ID NO: 175028 - protein, 15 aa, Homo sapiens
  CDR3 for beta chain variable domain of TCR clone 87514 (TRBV18, TRBJ2-6)
CASSPSYAAANVLTF

SEQ ID NO: 175029 - protein, 16 aa, Homo sapiens
  CDR3 for alpha chain variable domain of TCR clone 87515 (TRAV30, TRAJ24)
CGTEMVDADSWGKFQF

SEQ ID NO: 175030 - protein, 15 aa, Homo sapiens
  CDR3 for beta chain variable domain of TCR clone 87515 (TRBV6-3, TRBJ2-7)
CASSSPGTVFYEQYF

SEQ ID NO: 175031 - protein, 12 aa, Homo sapiens
  CDR3 for alpha chain variable domain of TCR clone 87516 (TRAV10, TRAJ34)
CVMSGKHRQAHL

SEQ ID NO: 175032 - protein, 14 aa, Homo sapiens
  CDR3 for beta chain variable domain of TCR clone 87516 (TRBV19, TRBJ2-1)
CASPTFVLNGEQFF

SEQ ID NO: 175033 - protein, 14 aa, Homo sapiens
  CDR3 for alpha chain variable domain of TCR clone 87517 (TRAV20, TRAJ20)
CALRRGYNDYKLSF

SEQ ID NO: 175034 - protein, 13 aa, Homo sapiens
  CDR3 for beta chain variable domain of TCR clone 87517 (TRBV19, TRBJ2-5)
CASSETAPETQYF

SEQ ID NO: 175035 - protein, 17 aa, Homo sapiens
  CDR3 for alpha chain variable domain of TCR clone 87518 (TRAV3, TRAJ6)
CAVRDGPRAGGSYIPTF

SEQ ID NO: 175036 - protein, 20 aa, Homo sapiens
  CDR3 for beta chain variable domain of TCR clone 87518 (TRBV28, TRBJ2-1)
CASTPIERSPGLAGGNEQFF

SEQ ID NO: 175037 - protein, 23 aa, Homo sapiens
  CDR3 for alpha chain variable domain of TCR clone 87519 (TRAV4, )
CLVGPHNYDIQNPDPAVYQLRDF

SEQ ID NO: 175038 - protein, 17 aa, Homo sapiens
  CDR3 for beta chain variable domain of TCR clone 87519 (TRBV24-1, TRBJ2-1)
CATSDVSTSGTYNEQFF

SEQ ID NO: 175039 - protein, 13 aa, Homo sapiens
  CDR3 for alpha chain variable domain of TCR clone 87520 (TRAV25, TRAJ23)
CAGVNNQGGKLIF

SEQ ID NO: 175040 - protein, 14 aa, Homo sapiens
  CDR3 for beta chain variable domain of TCR clone 87520 (TRBV19, TRBJ2-2)
CASSKLGTTGELFF

SEQ ID NO: 175041 - protein, 13 aa, Homo sapiens
  CDR3 for alpha chain variable domain of TCR clone 87521 (TRAV12-1, TRAJ26)
SATYLYYGQNFVF

SEQ ID NO: 175042 - protein, 15 aa, Homo sapiens
  CDR3 for beta chain variable domain of TCR clone 87521 (TRBV5-1, TRBJ2-6)
CASSLDPSGANGLTF

SEQ ID NO: 175043 - protein, 16 aa, Homo sapiens
  CDR3 for alpha chain variable domain of TCR clone 87522 (TRAV3, TRAJ18)
CAVRDARGSTLGRLYF

SEQ ID NO: 175044 - protein, 15 aa, Homo sapiens
  CDR3 for beta chain variable domain of TCR clone 87522 (TRBV7-9, TRBJ1-6)
CASSSPGRGNSPLHF

SEQ ID NO: 175045 - protein, 13 aa, Homo sapiens
  CDR3 for alpha chain variable domain of TCR clone 87523 (TRAV13-1, TRAJ29)
CAASIGVNTPLVF

SEQ ID NO: 175046 - protein, 14 aa, Homo sapiens
  CDR3 for beta chain variable domain of TCR clone 87523 (TRBV20-1, TRBJ2-5)
CSASDSGSGETQYF

SEQ ID NO: 175047 - protein, 14 aa, Homo sapiens
  CDR3 for alpha chain variable domain of TCR clone 87524 (TRAV8-1, TRAJ5)
CAVSMDTGRRALTF

SEQ ID NO: 175048 - protein, 15 aa, Homo sapiens
  CDR3 for beta chain variable domain of TCR clone 87524 (TRBV19, TRBJ2-4)
CASRGPRRGENNQYF

SEQ ID NO: 175049 - protein, 14 aa, Homo sapiens
  CDR3 for alpha chain variable domain of TCR clone 87525 (TRAV1-2, TRAJ16)
CAVNRFSDGQKLLF

SEQ ID NO: 175050 - protein, 17 aa, Homo sapiens
  CDR3 for beta chain variable domain of TCR clone 87525 (TRBV5-1, TRBJ2-2)
CASSLAGLSEGTGELFF

SEQ ID NO: 175051 - protein, 13 aa, Homo sapiens
  CDR3 for alpha chain variable domain of TCR clone 87526 (TRAV2, TRAJ40)
CAVVTSGTYKYIF

SEQ ID NO: 175052 - protein, 12 aa, Homo sapiens
  CDR3 for beta chain variable domain of TCR clone 87526 (TRBV19, TRBJ1-4)
CASKDWPGGLFF

SEQ ID NO: 175053 - protein, 14 aa, Homo sapiens
  CDR3 for alpha chain variable domain of TCR clone 87527 (TRAV8-4, TRAJ13)
CAVTLSGGYQKVTF

SEQ ID NO: 175054 - protein, 14 aa, Homo sapiens
  CDR3 for beta chain variable domain of TCR clone 87527 (TRBV7-2, TRBJ1-2)
CASSQTGSTYCYTF

SEQ ID NO: 175055 - protein, 15 aa, Homo sapiens
  CDR3 for alpha chain variable domain of TCR clone 87528 (TRAV29/DV5, TRAJ24)
CAASGATDSWGKFQF

SEQ ID NO: 175056 - protein, 12 aa, Homo sapiens
  CDR3 for beta chain variable domain of TCR clone 87528 (TRBV7-8, TRBJ2-7)
CASSLAGYEQYF

SEQ ID NO: 175057 - protein, 12 aa, Homo sapiens
  CDR3 for alpha chain variable domain of TCR clone 87529 (TRAV12-3, TRAJ17)
CAMTLTGNRLTF

SEQ ID NO: 175058 - protein, 13 aa, Homo sapiens
  CDR3 for beta chain variable domain of TCR clone 87529 (TRBV7-9, TRBJ1-2)
CASSLKQNYGYTF

SEQ ID NO: 175059 - protein, 14 aa, Homo sapiens
  CDR3 for alpha chain variable domain of TCR clone 87530 (TRAV12-2, TRAJ40)
CAVKIPSGTYKYIF

SEQ ID NO: 175060 - protein, 14 aa, Homo sapiens
  CDR3 for beta chain variable domain of TCR clone 87530 (TRBV20-1, TRBJ2-2)
CSAPDTANTGELFF

SEQ ID NO: 175061 - protein, 13 aa, Homo sapiens
  CDR3 for alpha chain variable domain of TCR clone 87531 (TRAV27, TRAJ45)
CRSSGGGADGLTF

SEQ ID NO: 175062 - protein, 15 aa, Homo sapiens
  CDR3 for beta chain variable domain of TCR clone 87531 (TRBV6-5, TRBJ2-1)
CASSYDAGAGNEQFF

SEQ ID NO: 175063 - protein, 12 aa, Homo sapiens
  CDR3 for alpha chain variable domain of TCR clone 87532 (TRAV21, TRAJ33)
CAKMDSNYQLIW

SEQ ID NO: 175064 - protein, 17 aa, Homo sapiens
  CDR3 for beta chain variable domain of TCR clone 87532 (TRBV2, TRBJ1-5)
CASSVGTGMRGYQPQHF

SEQ ID NO: 175065 - protein, 23 aa, Homo sapiens
  CDR3 for alpha chain variable domain of TCR clone 87533 (TRAV26-1, TRAJ38)
CIADNAGNNHIQNPDPAVYQLRD

SEQ ID NO: 175066 - protein, 15 aa, Homo sapiens
  CDR3 for beta chain variable domain of TCR clone 87533 (TRBV2, TRBJ2-5)
CASRIAGVGGETQYF

SEQ ID NO: 175067 - protein, 13 aa, Homo sapiens
  CDR3 for alpha chain variable domain of TCR clone 87534 (TRAV2, TRAJ15)
CAAASQAGTALIF

SEQ ID NO: 175068 - protein, 13 aa, Homo sapiens
  CDR3 for beta chain variable domain of TCR clone 87534 (TRBV7-2, TRBJ2-2)
CASSLAVTGELFF

SEQ ID NO: 175069 - protein, 12 aa, Homo sapiens
  CDR3 for alpha chain variable domain of TCR clone 87535 (TRAV29/DV5, TRAJ49)
CAAEITGNQFYF

SEQ ID NO: 175070 - protein, 14 aa, Homo sapiens
  CDR3 for beta chain variable domain of TCR clone 87535 (TRBV19, TRBJ2-1)
CARGARSFQWEQFF

SEQ ID NO: 175071 - protein, 14 aa, Homo sapiens
  CDR3 for alpha chain variable domain of TCR clone 87536 (TRAV12-2, TRAJ6)
CAVNVSRKLHTYIW

SEQ ID NO: 175072 - protein, 12 aa, Homo sapiens
  CDR3 for beta chain variable domain of TCR clone 87536 (TRBV29-1, TRBJ2-3)
CSVTGGADTQYF

SEQ ID NO: 175073 - protein, 14 aa, Homo sapiens
  CDR3 for alpha chain variable domain of TCR clone 87537 (TRAV1-2, TRAJ8)
CSVREDTGFQKLVF

SEQ ID NO: 175074 - protein, 14 aa, Homo sapiens
  CDR3 for beta chain variable domain of TCR clone 87537 (TRBV7-9, TRBJ1-1)
CASTPLQSYTEAFF

SEQ ID NO: 175075 - protein, 12 aa, Homo sapiens
  CDR3 for alpha chain variable domain of TCR clone 87538 (TRAV3, TRAJ27)
CAVRDKAGKSTL

SEQ ID NO: 175076 - protein, 14 aa, Homo sapiens
  CDR3 for beta chain variable domain of TCR clone 87538 (TRBV5-1, TRBJ1-2)
CASSVDSTNYGYTF

SEQ ID NO: 175077 - protein, 14 aa, Homo sapiens
  CDR3 for alpha chain variable domain of TCR clone 87539 (TRAV35, TRAJ54)
CAGYLIQGAQKLVF

SEQ ID NO: 175078 - protein, 16 aa, Homo sapiens
  CDR3 for beta chain variable domain of TCR clone 87539 (TRBV5-1, TRBJ1-4)
CASSLAAQPTNEKLFF

SEQ ID NO: 175079 - protein, 13 aa, Homo sapiens
  CDR3 for alpha chain variable domain of TCR clone 87540 (TRAV27, TRAJ49)
CAPRPYTGNQFYF

SEQ ID NO: 175080 - protein, 16 aa, Homo sapiens
  CDR3 for beta chain variable domain of TCR clone 87540 (TRBV4-1, TRBJ1-2)
CASSQDAGQVLDGYTF

SEQ ID NO: 175081 - protein, 19 aa, Homo sapiens
  CDR3 for alpha chain variable domain of TCR clone 87541 (TRAV26-1, TRAJ52)
CIVRAHRNAGGTSYGKLTF

SEQ ID NO: 175082 - protein, 13 aa, Homo sapiens
  CDR3 for beta chain variable domain of TCR clone 87541 (TRBV20-1, TRBJ1-6)
CSAPVGVGSPLHF

SEQ ID NO: 175083 - protein, 14 aa, Homo sapiens
  CDR3 for alpha chain variable domain of TCR clone 87542 (TRAV12-2, TRAJ13)
CAVKKTGGYQKVTF

SEQ ID NO: 175084 - protein, 14 aa, Homo sapiens
  CDR3 for beta chain variable domain of TCR clone 87542 (TRBV12-4, TRBJ1-4)
CASRMTGRSEKLFF

SEQ ID NO: 175085 - protein, 16 aa, Homo sapiens
  CDR3 for alpha chain variable domain of TCR clone 87543 (TRAV8-3, TRAJ42)
CAVAGDYGGSQGNLIF

SEQ ID NO: 175086 - protein, 14 aa, Homo sapiens
  CDR3 for beta chain variable domain of TCR clone 87543 (TRBV7-2, TRBJ1-3)
CASSLGTAGNTIYF

SEQ ID NO: 175087 - protein, 13 aa, Homo sapiens
  CDR3 for alpha chain variable domain of TCR clone 87544 (TRAV8-3, TRAJ36)
CAVGATGANNLFF

SEQ ID NO: 175088 - protein, 15 aa, Homo sapiens
  CDR3 for beta chain variable domain of TCR clone 87544 (TRBV12-4, TRBJ2-5)
CASSGTGQAQETQYF

SEQ ID NO: 175089 - protein, 13 aa, Homo sapiens
  CDR3 for alpha chain variable domain of TCR clone 87545 (TRAV27, TRAJ49)
CAPRPYTGNQFYF

SEQ ID NO: 175090 - protein, 15 aa, Homo sapiens
  CDR3 for beta chain variable domain of TCR clone 87545 (TRBV7-9, TRBJ1-6)
CASSSPGRGNSPLHF

SEQ ID NO: 175091 - protein, 11 aa, Homo sapiens
  CDR3 for alpha chain variable domain of TCR clone 87546 (TRAV1-1, TRAJ16)
CDAGDGQKLLF

SEQ ID NO: 175092 - protein, 16 aa, Homo sapiens
  CDR3 for beta chain variable domain of TCR clone 87546 (TRBV7-3, TRBJ2-2)
CASSLKRGTLSGELFF

SEQ ID NO: 175093 - protein, 16 aa, Homo sapiens
  CDR3 for alpha chain variable domain of TCR clone 87547 (TRAV12-2, TRAJ6)
CATPLAGSGGSYIPTF

SEQ ID NO: 175094 - protein, 10 aa, Homo sapiens
  CDR3 for beta chain variable domain of TCR clone 87547 (TRBV28, TRBJ1-2)
CASSSDRAVF

SEQ ID NO: 175095 - protein, 11 aa, Homo sapiens
  CDR3 for alpha chain variable domain of TCR clone 87548 (TRAV21, TRAJ34)
CAHYNTDKLIF

SEQ ID NO: 175096 - protein, 15 aa, Homo sapiens
  CDR3 for beta chain variable domain of TCR clone 87548 (TRBV12-4, TRBJ2-2)
CASSLVRGLGGELFF

SEQ ID NO: 175097 - protein, 14 aa, Homo sapiens
  CDR3 for alpha chain variable domain of TCR clone 87549 (TRAV2, TRAJ23)
CAVGLRNQGGKLIF

SEQ ID NO: 175098 - protein, 13 aa, Homo sapiens
  CDR3 for beta chain variable domain of TCR clone 87549 (TRBV4-2, TRBJ1-1)
CASSQAGNTEAFF

SEQ ID NO: 175099 - protein, 14 aa, Homo sapiens
  CDR3 for alpha chain variable domain of TCR clone 87550 (TRAV38-1, TRAJ45)
CAYYSGGDADGLTF

SEQ ID NO: 175100 - protein, 20 aa, Homo sapiens
  CDR3 for beta chain variable domain of TCR clone 87550 (TRBV28, TRBJ2-1)
CASTPIGRSPGLAGGSEQFF

SEQ ID NO: 175101 - protein, 15 aa, Homo sapiens
  CDR3 for alpha chain variable domain of TCR clone 87551 (TRAV3, TRAJ22)
CAVRDRGGSAMQLTF

SEQ ID NO: 175102 - protein, 15 aa, Homo sapiens
  CDR3 for beta chain variable domain of TCR clone 87551 (TRBV7-3, TRBJ2-2)
CASSETGQGTGELFF

SEQ ID NO: 175103 - protein, 15 aa, Homo sapiens
  CDR3 for alpha chain variable domain of TCR clone 87552 (TRAV38-2/DV8, TRAJ48)
CAYRSPESGNEKLTF

SEQ ID NO: 175104 - protein, 14 aa, Homo sapiens
  CDR3 for beta chain variable domain of TCR clone 87552 (TRBV28, TRBJ2-3)
CASSLTDLLDTQYF

SEQ ID NO: 175105 - protein, 15 aa, Homo sapiens
  CDR3 for alpha chain variable domain of TCR clone 87553 (TRAV25, TRAJ52)
CAGTSGGTSYGKLTF

SEQ ID NO: 175106 - protein, 15 aa, Homo sapiens
  CDR3 for beta chain variable domain of TCR clone 87553 (TRBV5-1, TRBJ2-1)
CASSPPRAPYNEQFF

SEQ ID NO: 175107 - protein, 16 aa, Homo sapiens
  CDR3 for alpha chain variable domain of TCR clone 87554 (TRAV12-3, TRAJ53)
CAMSPGSGGSNYKLTF

SEQ ID NO: 175108 - protein, 17 aa, Homo sapiens
  CDR3 for beta chain variable domain of TCR clone 87554 (TRBV28, TRBJ2-5)
CASSTPEGDALQENQYF

SEQ ID NO: 175109 - protein, 12 aa, Homo sapiens
  CDR3 for alpha chain variable domain of TCR clone 87555 (TRAV16, TRAJ57)
CALEGGSEKLVF

SEQ ID NO: 175110 - protein, 12 aa, Homo sapiens
  CDR3 for beta chain variable domain of TCR clone 87555 (TRBV28, TRBJ2-7)
CASSGLPYEQYF

SEQ ID NO: 175111 - protein, 14 aa, Homo sapiens
  CDR3 for alpha chain variable domain of TCR clone 87556 (TRAV13-1, TRAJ44)
CAAKATGTASKLTL

SEQ ID NO: 175112 - protein, 16 aa, Homo sapiens
  CDR3 for beta chain variable domain of TCR clone 87556 (TRBV7-9, TRBJ1-3)
CASSQTSGLRMGTIYF

SEQ ID NO: 175113 - protein, 16 aa, Homo sapiens
  CDR3 for alpha chain variable domain of TCR clone 87557 (TRAV12-2, TRAJ32)
CAVNLGQGGATNKLIF

SEQ ID NO: 175114 - protein, 16 aa, Homo sapiens
  CDR3 for beta chain variable domain of TCR clone 87557 (TRBV5-1, TRBJ2-2)
CASSSRTGGRTGELFF

SEQ ID NO: 175115 - protein, 14 aa, Homo sapiens
  CDR3 for alpha chain variable domain of TCR clone 87558 (TRAV14/DV4, TRAJ42)
CPRGSLRSQGNLIF

SEQ ID NO: 175116 - protein, 14 aa, Homo sapiens
  CDR3 for beta chain variable domain of TCR clone 87558 (TRBV20-1, TRBJ2-4)
CSASGRVGENIQYF

SEQ ID NO: 175117 - protein, 13 aa, Homo sapiens
  CDR3 for alpha chain variable domain of TCR clone 87559 (TRAV17, TRAJ9)
CATDGTGGFKTIF

SEQ ID NO: 175118 - protein, 17 aa, Homo sapiens
  CDR3 for beta chain variable domain of TCR clone 87559 (TRBV6-5, TRBJ2-7)
CASSYSCWGQGSYEQYF

SEQ ID NO: 175119 - protein, 14 aa, Homo sapiens
  CDR3 for alpha chain variable domain of TCR clone 87560 (TRAV22, TRAJ6)
CAGVGPGGSYIPTF

SEQ ID NO: 175120 - protein, 14 aa, Homo sapiens
  CDR3 for beta chain variable domain of TCR clone 87560 (TRBV5-4, TRBJ2-1)
CASSLSGSYNEQFF

SEQ ID NO: 175121 - protein, 15 aa, Homo sapiens
  CDR3 for alpha chain variable domain of TCR clone 87561 (TRAV8-3, TRAJ40)
CAVGPYTSGTYKYIF

SEQ ID NO: 175122 - protein, 15 aa, Homo sapiens
  CDR3 for beta chain variable domain of TCR clone 87561 (TRBV7-2, TRBJ2-7)
CQQPRPRGGSGEQYF

SEQ ID NO: 175123 - protein, 16 aa, Homo sapiens
  CDR3 for alpha chain variable domain of TCR clone 87562 (TRAV20, TRAJ6)
CAVQAGGTGGSYIPTF

SEQ ID NO: 175124 - protein, 14 aa, Homo sapiens
  CDR3 for beta chain variable domain of TCR clone 87562 (TRBV28, TRBJ1-5)
CASIPYGLEQPQHF

SEQ ID NO: 175125 - protein, 14 aa, Homo sapiens
  CDR3 for alpha chain variable domain of TCR clone 87563 (TRAV26-1, TRAJ34)
CIVRESYNTDKLIF

SEQ ID NO: 175126 - protein, 13 aa, Homo sapiens
  CDR3 for beta chain variable domain of TCR clone 87563 (TRBV19, TRBJ2-1)
CAASRGVYNEQFF

SEQ ID NO: 175127 - protein, 15 aa, Homo sapiens
  CDR3 for alpha chain variable domain of TCR clone 87564 (TRAV36/DV7, TRAJ53)
CAVEGSGGSNYKLIF

SEQ ID NO: 175128 - protein, 16 aa, Homo sapiens
  CDR3 for beta chain variable domain of TCR clone 87564 (TRBV27, TRBJ2-2)
CASSLSGFWVTGELFF

SEQ ID NO: 175129 - protein, 12 aa, Homo sapiens
  CDR3 for alpha chain variable domain of TCR clone 87565 (TRAV13-1, TRAJ49)
CAASPMGNQFYF

SEQ ID NO: 175130 - protein, 13 aa, Homo sapiens
  CDR3 for beta chain variable domain of TCR clone 87565 (TRBV20-1, TRBJ2-2)
FSASAAGTGELFF

SEQ ID NO: 175131 - protein, 13 aa, Homo sapiens
  CDR3 for alpha chain variable domain of TCR clone 87566 (TRAV13-2, TRAJ53)
CAENMGSNYKLTF

SEQ ID NO: 175132 - protein, 13 aa, Homo sapiens
  CDR3 for beta chain variable domain of TCR clone 87566 (TRBV4-1, TRBJ2-2)
CASSKENTGELFF

SEQ ID NO: 175133 - protein, 15 aa, Homo sapiens
  CDR3 for alpha chain variable domain of TCR clone 87567 (TRAV1-1, TRAJ24)
CALSGGTDSWGKFQF

SEQ ID NO: 175134 - protein, 16 aa, Homo sapiens
  CDR3 for beta chain variable domain of TCR clone 87567 (TRBV2, TRBJ2-7)
CASSGPWTGPSYEQYF

SEQ ID NO: 175135 - protein, 17 aa, Homo sapiens
  CDR3 for alpha chain variable domain of TCR clone 87568 (TRAV4, )
CLVDIQNPDPAVYQLRD

SEQ ID NO: 175136 - protein, 15 aa, Homo sapiens
  CDR3 for beta chain variable domain of TCR clone 87568 (TRBV2, TRBJ2-5)
RASSEQGLIGETQYF

SEQ ID NO: 175137 - protein, 15 aa, Homo sapiens
  CDR3 for alpha chain variable domain of TCR clone 87569 (TRAV26-1, TRAJ29)
CIVRVEGSGNTPLVF

SEQ ID NO: 175138 - protein, 14 aa, Homo sapiens
  CDR3 for beta chain variable domain of TCR clone 87569 (TRBV18, TRBJ2-5)
CASSPVVPQETQYF

SEQ ID NO: 175139 - protein, 16 aa, Homo sapiens
  CDR3 for alpha chain variable domain of TCR clone 87570 (TRAV3, TRAJ21)
CDVRDIERGNFNKFYF

SEQ ID NO: 175140 - protein, 13 aa, Homo sapiens
  CDR3 for beta chain variable domain of TCR clone 87570 (TRBV27, TRBJ2-7)
CASSLTTGYEQYF

SEQ ID NO: 175141 - protein, 14 aa, Homo sapiens
  CDR3 for alpha chain variable domain of TCR clone 87571 (TRAV27, TRAJ17)
CRSTIRAAGNKLTF

SEQ ID NO: 175142 - protein, 16 aa, Homo sapiens
  CDR3 for beta chain variable domain of TCR clone 87571 (TRBV5-7, TRBJ2-5)
CASSLAPAGGRETQYF

SEQ ID NO: 175143 - protein, 12 aa, Homo sapiens
  CDR3 for alpha chain variable domain of TCR clone 87572 (TRAV8-6, TRAJ11)
CAVSSGYSTLTF

SEQ ID NO: 175144 - protein, 11 aa, Homo sapiens
  CDR3 for beta chain variable domain of TCR clone 87572 (TRBV20-1, TRBJ1-5)
CSAQGDQPQYF

SEQ ID NO: 175145 - protein, 18 aa, Homo sapiens
  CDR3 for alpha chain variable domain of TCR clone 87573 (TRAV29/DV5, TRAJ52)
CAAGFRGAGGTSYGKLTF

SEQ ID NO: 175146 - protein, 12 aa, Homo sapiens
  CDR3 for beta chain variable domain of TCR clone 87573 (TRBV7-8, TRBJ2-7)
CASSLGDREQYF

SEQ ID NO: 175147 - protein, 14 aa, Homo sapiens
  CDR3 for alpha chain variable domain of TCR clone 87574 (TRAV23/DV6, TRAJ15)
CAASKYQAGTALIF

SEQ ID NO: 175148 - protein, 16 aa, Homo sapiens
  CDR3 for beta chain variable domain of TCR clone 87574 (TRBV28, TRBJ2-2)
CASSLEGGSNTGELFF

SEQ ID NO: 175149 - protein, 12 aa, Homo sapiens
  CDR3 for alpha chain variable domain of TCR clone 87575 (TRAV30, TRAJ43)
CGTEERGNDMRF

SEQ ID NO: 175150 - protein, 17 aa, Homo sapiens
  CDR3 for beta chain variable domain of TCR clone 87575 (TRBV11-2, TRBJ2-1)
CASSLSPPGVEYNEQFF

SEQ ID NO: 175151 - protein, 11 aa, Homo sapiens
  CDR3 for alpha chain variable domain of TCR clone 87576 (TRAV21, TRAJ11)
CAVNGYSTLTF

SEQ ID NO: 175152 - protein, 15 aa, Homo sapiens
  CDR3 for beta chain variable domain of TCR clone 87576 (TRBV6-3, TRBJ2-7)
CASSSPGTVFYEKYF

SEQ ID NO: 175153 - protein, 13 aa, Homo sapiens
  CDR3 for alpha chain variable domain of TCR clone 87577 (TRAV2, TRAJ13)
CAVDSGGYQKVTF

SEQ ID NO: 175154 - protein, 13 aa, Homo sapiens
  CDR3 for beta chain variable domain of TCR clone 87577 (TRBV28, TRBJ2-5)
CASSFAGGETQYF

SEQ ID NO: 175155 - protein, 13 aa, Homo sapiens
  CDR3 for alpha chain variable domain of TCR clone 87578 (TRAV38-2/DV8, TRAJ57)
CAYTQGGSEKLVF

SEQ ID NO: 175156 - protein, 12 aa, Homo sapiens
  CDR3 for beta chain variable domain of TCR clone 87578 (TRBV11-2, TRBJ2-2)
CASSLGGGELFF

SEQ ID NO: 175157 - protein, 15 aa, Homo sapiens
  CDR3 for alpha chain variable domain of TCR clone 87579 (TRAV27, TRAJ38)
CAARRNAGNNRKLIW

SEQ ID NO: 175158 - protein, 13 aa, Homo sapiens
  CDR3 for beta chain variable domain of TCR clone 87579 (TRBV20-1, TRBJ2-7)
CSARVRQGGEQYF

SEQ ID NO: 175159 - protein, 18 aa, Homo sapiens
  CDR3 for alpha chain variable domain of TCR clone 87580 (TRAV21, TRAJ52)
CAVRPSPAGGTSYGKLSF

SEQ ID NO: 175160 - protein, 13 aa, Homo sapiens
  CDR3 for beta chain variable domain of TCR clone 87580 (TRBV7-3, TRBJ1-1)
CASSQDWGAEAFF

SEQ ID NO: 175161 - protein, 13 aa, Homo sapiens
  CDR3 for alpha chain variable domain of TCR clone 87581 (TRAV8-6, TRAJ21)
CAVSPSSLNKFYF

SEQ ID NO: 175162 - protein, 14 aa, Homo sapiens
  CDR3 for beta chain variable domain of TCR clone 87581 (TRBV7-9, TRBJ2-5)
RASSLDTAQETQYF

SEQ ID NO: 175163 - protein, 11 aa, Homo sapiens
  CDR3 for alpha chain variable domain of TCR clone 87582 (TRAV17, TRAJ9)
CATTGGFKTIF

SEQ ID NO: 175164 - protein, 16 aa, Homo sapiens
  CDR3 for beta chain variable domain of TCR clone 87582 (TRBV28, TRBJ2-7)
CASSLFFETGGPEQYF

SEQ ID NO: 175165 - protein, 13 aa, Homo sapiens
  CDR3 for alpha chain variable domain of TCR clone 87583 (TRAV12-3, TRAJ13)
CAMTSGGYQKVTF

SEQ ID NO: 175166 - protein, 13 aa, Homo sapiens
  CDR3 for beta chain variable domain of TCR clone 87583 (TRBV20-1, TRBJ2-2)
CSALSGGVGELFF

SEQ ID NO: 175167 - protein, 13 aa, Homo sapiens
  CDR3 for alpha chain variable domain of TCR clone 87584 (TRAV12-1, TRAJ31)
CVVNMNNNAGLMF

SEQ ID NO: 175168 - protein, 15 aa, Homo sapiens
  CDR3 for beta chain variable domain of TCR clone 87584 (TRBV4-1, TRBJ1-2)
CASSQGQGAAYGYTF

SEQ ID NO: 175169 - protein, 13 aa, Homo sapiens
  CDR3 for alpha chain variable domain of TCR clone 87585 (TRAV12-3, TRAJ5)
YAMIYTGRRALTF

SEQ ID NO: 175170 - protein, 12 aa, Homo sapiens
  CDR3 for beta chain variable domain of TCR clone 87585 (TRBV18, TRBJ1-4)
CASSPSREKLFF

SEQ ID NO: 175171 - protein, 13 aa, Homo sapiens
  CDR3 for alpha chain variable domain of TCR clone 87586 (TRAV22, TRAJ29)
CAVGGSGNTPVVF

SEQ ID NO: 175172 - protein, 13 aa, Homo sapiens
  CDR3 for beta chain variable domain of TCR clone 87586 (TRBV4-2, TRBJ1-1)
CASSQAGNTEAFF

SEQ ID NO: 175173 - protein, 14 aa, Homo sapiens
  CDR3 for alpha chain variable domain of TCR clone 87587 (TRAV1-2, TRAJ16)
CAVNRFSDGQKLLF

SEQ ID NO: 175174 - protein, 15 aa, Homo sapiens
  CDR3 for beta chain variable domain of TCR clone 87587 (TRBV6-5, TRBJ1-2)
CASSYSQAFNYGYTF

SEQ ID NO: 175175 - protein, 14 aa, Homo sapiens
  CDR3 for alpha chain variable domain of TCR clone 87588 (TRAV29/DV5, TRAJ36)
CAARRETGANNLFF

SEQ ID NO: 175176 - protein, 14 aa, Homo sapiens
  CDR3 for beta chain variable domain of TCR clone 87588 (TRBV12-5, TRBJ2-5)
CASGSRTHQETQYF

SEQ ID NO: 175177 - protein, 13 aa, Homo sapiens
  CDR3 for alpha chain variable domain of TCR clone 87589 (TRAV8-3, TRAJ28)
CAVGGVGSYQLTF

SEQ ID NO: 175178 - protein, 15 aa, Homo sapiens
  CDR3 for beta chain variable domain of TCR clone 87589 (TRBV7-9, TRBJ1-5)
CASSQGHQPNQPQHF

SEQ ID NO: 175179 - protein, 19 aa, Homo sapiens
  CDR3 for alpha chain variable domain of TCR clone 87590 (TRAV26-1, TRAJ52)
CIVRAHRNAGGISYGKLTF

SEQ ID NO: 175180 - protein, 15 aa, Homo sapiens
  CDR3 for beta chain variable domain of TCR clone 87590 (TRBV29-1, TRBJ2-1)
CGGRDRKSSYNEQFF

SEQ ID NO: 175181 - protein, 10 aa, Homo sapiens
  CDR3 for alpha chain variable domain of TCR clone 87591 (TRAV8-4, TRAJ43)
CAVSADDMRF

SEQ ID NO: 175182 - protein, 15 aa, Homo sapiens
  CDR3 for beta chain variable domain of TCR clone 87591 (TRBV5-1, TRBJ2-3)
CASSVTSGSTDTQYL

SEQ ID NO: 175183 - protein, 15 aa, Homo sapiens
  CDR3 for alpha chain variable domain of TCR clone 87592 (TRAV27, TRAJ38)
CAARRNAGNNRKLIW

SEQ ID NO: 175184 - protein, 13 aa, Homo sapiens
  CDR3 for beta chain variable domain of TCR clone 87592 (TRBV18, TRBJ2-1)
CASGLASNNEQFF

SEQ ID NO: 175185 - protein, 15 aa, Homo sapiens
  CDR3 for alpha chain variable domain of TCR clone 87593 (TRAV21, TRAJ53)
CATLNSGGSNYKLTF

SEQ ID NO: 175186 - protein, 17 aa, Homo sapiens
  CDR3 for beta chain variable domain of TCR clone 87593 (TRBV5-1, TRBJ2-1)
CASSLGQISFSYNEQFF

SEQ ID NO: 175187 - protein, 13 aa, Homo sapiens
  CDR3 for alpha chain variable domain of TCR clone 87594 (TRAV13-1, TRAJ5)
CAARVTGRRALTF

SEQ ID NO: 175188 - protein, 15 aa, Homo sapiens
  CDR3 for beta chain variable domain of TCR clone 87594 (TRBV7-9, TRBJ2-7)
CASSPGGGLTCEQYF

SEQ ID NO: 175189 - protein, 14 aa, Homo sapiens
  CDR3 for alpha chain variable domain of TCR clone 87595 (TRAV1-2, TRAJ16)
CAVNRFSDGQKLLF

SEQ ID NO: 175190 - protein, 15 aa, Homo sapiens
  CDR3 for beta chain variable domain of TCR clone 87595 (TRBV4-3, TRBJ2-7)
CASSQGDWGDYEQYF

SEQ ID NO: 175191 - protein, 12 aa, Homo sapiens
  CDR3 for alpha chain variable domain of TCR clone 87596 (TRAV13-1, TRAJ16)
CAAVSDGQKLLF

SEQ ID NO: 175192 - protein, 17 aa, Homo sapiens
  CDR3 for beta chain variable domain of TCR clone 87596 (TRBV13, TRBJ2-3)
CASSLSRVAGGRDTQYF

SEQ ID NO: 175193 - protein, 16 aa, Homo sapiens
  CDR3 for alpha chain variable domain of TCR clone 87597 (TRAV8-3, TRAJ10)
CAVGPILTGGGNKLTF

SEQ ID NO: 175194 - protein, 14 aa, Homo sapiens
  CDR3 for beta chain variable domain of TCR clone 87597 (TRBV7-2, TRBJ2-7)
CASSPKTSFYEQYF

SEQ ID NO: 175195 - protein, 13 aa, Homo sapiens
  CDR3 for alpha chain variable domain of TCR clone 87598 (TRAV12-3, TRAJ13)
CEMSSGGYQKVTF

SEQ ID NO: 175196 - protein, 14 aa, Homo sapiens
  CDR3 for beta chain variable domain of TCR clone 87598 (TRBV2, TRBJ2-1)
CASRTGSSYNEQFF

SEQ ID NO: 175197 - protein, 16 aa, Homo sapiens
  CDR3 for alpha chain variable domain of TCR clone 87599 (TRAV30, TRAJ24)
FGTEIVDADSWGKFQF

SEQ ID NO: 175198 - protein, 15 aa, Homo sapiens
  CDR3 for beta chain variable domain of TCR clone 87599 (TRBV7-9, TRBJ1-4)
CASSARTGGNEKLFF

SEQ ID NO: 175199 - protein, 17 aa, Homo sapiens
  CDR3 for alpha chain variable domain of TCR clone 87600 (TRAV26-1, TRAJ28)
CIVRVPDSGAGSYQLPF

SEQ ID NO: 175200 - protein, 17 aa, Homo sapiens
  CDR3 for beta chain variable domain of TCR clone 87600 (TRBV28, TRBJ2-7)
CASSPLPAGGKSYEQYF

SEQ ID NO: 175201 - protein, 13 aa, Homo sapiens
  CDR3 for alpha chain variable domain of TCR clone 87601 (TRAV8-3, TRAJ28)
CAVGAVGSYQLTF

SEQ ID NO: 175202 - protein, 15 aa, Homo sapiens
  CDR3 for beta chain variable domain of TCR clone 87601 (TRBV7-9, TRBJ1-5)
CASSQDHQPNQPQHF

SEQ ID NO: 175203 - protein, 16 aa, Homo sapiens
  CDR3 for alpha chain variable domain of TCR clone 87602 (TRAV3, TRAJ4)
RAVRPSPSGGYNKLIF

SEQ ID NO: 175204 - protein, 12 aa, Homo sapiens
  CDR3 for beta chain variable domain of TCR clone 87602 (TRBV7-9, TRBJ2-7)
CASSQGVYEQYF

SEQ ID NO: 175205 - protein, 12 aa, Homo sapiens
  CDR3 for alpha chain variable domain of TCR clone 87603 (TRAV12-2, TRAJ10)
WGVTGGGNKLTF

SEQ ID NO: 175206 - protein, 16 aa, Homo sapiens
  CDR3 for beta chain variable domain of TCR clone 87603 (TRBV4-3, TRBJ2-2)
CASSHLQGSGTGELFF

SEQ ID NO: 175207 - protein, 13 aa, Homo sapiens
  CDR3 for alpha chain variable domain of TCR clone 87604 (TRAV12-1, TRAJ11)
CVVSRAGYSTLTF

SEQ ID NO: 175208 - protein, 16 aa, Homo sapiens
  CDR3 for beta chain variable domain of TCR clone 87604 (TRBV27, TRBJ2-2)
CASSLRPGGAPGELFF

SEQ ID NO: 175209 - protein, 17 aa, Homo sapiens
  CDR3 for alpha chain variable domain of TCR clone 87605 (TRAV26-1, TRAJ37)
CIVRVITVPSNTGKLIF

SEQ ID NO: 175210 - protein, 13 aa, Homo sapiens
  CDR3 for beta chain variable domain of TCR clone 87605 (TRBV2, TRBJ2-7)
CASSVGGSGEQYF

SEQ ID NO: 175211 - protein, 13 aa, Homo sapiens
  CDR3 for alpha chain variable domain of TCR clone 87606 (TRAV1-1, TRAJ9)
CAAKNTGGFKTIF

SEQ ID NO: 175212 - protein, 14 aa, Homo sapiens
  CDR3 for beta chain variable domain of TCR clone 87606 (TRBV20-1, TRBJ2-1)
CSAQIGGSANQQFF

SEQ ID NO: 175213 - protein, 15 aa, Homo sapiens
  CDR3 for alpha chain variable domain of TCR clone 87607 (TRAV12-2, TRAJ43)
CAFDMRFGAGTRLTV

SEQ ID NO: 175214 - protein, 17 aa, Homo sapiens
  CDR3 for beta chain variable domain of TCR clone 87607 (TRBV7-8, TRBJ2-6)
CASSAGTGGAGANVLTF

SEQ ID NO: 175215 - protein, 13 aa, Homo sapiens
  CDR3 for alpha chain variable domain of TCR clone 87608 (TRAV26-1, TRAJ34)
CIVRPWITDKLIF

SEQ ID NO: 175216 - protein, 13 aa, Homo sapiens
  CDR3 for beta chain variable domain of TCR clone 87608 (TRBV5-1, TRBJ2-1)
CASSLGSYNEQFL

SEQ ID NO: 175217 - protein, 12 aa, Homo sapiens
  CDR3 for alpha chain variable domain of TCR clone 87609 (TRAV24, TRAJ40)
CAFMPGTYKYIF

SEQ ID NO: 175218 - protein, 11 aa, Homo sapiens
  CDR3 for beta chain variable domain of TCR clone 87609 (TRBV10-1, TRBJ2-3)
CASSDSDTRYF

SEQ ID NO: 175219 - protein, 17 aa, Homo sapiens
  CDR3 for alpha chain variable domain of TCR clone 87610 (TRAV35, TRAJ28)
CAGLQVYSGAGSYQLSF

SEQ ID NO: 175220 - protein, 15 aa, Homo sapiens
  CDR3 for beta chain variable domain of TCR clone 87610 (TRBV2, TRBJ1-2)
CASSEIGGANYGYTF

SEQ ID NO: 175221 - protein, 13 aa, Homo sapiens
  CDR3 for alpha chain variable domain of TCR clone 87611 (TRAV17, TRAJ9)
CATGSTGGFNTIF

SEQ ID NO: 175222 - protein, 14 aa, Homo sapiens
  CDR3 for beta chain variable domain of TCR clone 87611 (TRBV7-8, TRBJ2-7)
CASTFRGGPNEQYF

SEQ ID NO: 175223 - protein, 14 aa, Homo sapiens
  CDR3 for alpha chain variable domain of TCR clone 87612 (TRAV12-3, TRAJ10)
SHLPLTGGGNKLTF

SEQ ID NO: 175224 - protein, 16 aa, Homo sapiens
  CDR3 for beta chain variable domain of TCR clone 87612 (TRBV2, TRBJ2-3)
CASSTSVEGVTDTQYF

SEQ ID NO: 175225 - protein, 14 aa, Homo sapiens
  CDR3 for alpha chain variable domain of TCR clone 87613 (TRAV12-2, TRAJ40)
CAVKIPSGTYKYIF

SEQ ID NO: 175226 - protein, 16 aa, Homo sapiens
  CDR3 for beta chain variable domain of TCR clone 87613 (TRBV13, TRBJ2-3)
CQQPLQGSRGRNTQYF

SEQ ID NO: 175227 - protein, 12 aa, Homo sapiens
  CDR3 for alpha chain variable domain of TCR clone 87614 (TRAV12-3, TRAJ17)
CAMTLKGNKLTF

SEQ ID NO: 175228 - protein, 14 aa, Homo sapiens
  CDR3 for beta chain variable domain of TCR clone 87614 (TRBV19, TRBJ2-1)
CASPTFVLSGEQFF

SEQ ID NO: 175229 - protein, 13 aa, Homo sapiens
  CDR3 for alpha chain variable domain of TCR clone 87615 (TRAV36/DV7, TRAJ49)
CAGDSNTGNQSYF

SEQ ID NO: 175230 - protein, 16 aa, Homo sapiens
  CDR3 for beta chain variable domain of TCR clone 87615 (TRBV5-1, TRBJ1-1)
CASSKTGTEVGTGAFF

SEQ ID NO: 175231 - protein, 18 aa, Homo sapiens
  CDR3 for alpha chain variable domain of TCR clone 87616 (TRAV26-1, TRAJ22)
CIVRVALISSGSARQLTF

SEQ ID NO: 175232 - protein, 13 aa, Homo sapiens
  CDR3 for beta chain variable domain of TCR clone 87616 (TRBV13, TRBJ2-5)
CASSPEVAETQYF

SEQ ID NO: 175233 - protein, 14 aa, Homo sapiens
  CDR3 for alpha chain variable domain of TCR clone 87617 (TRAV2, TRAJ9)
CAVEDRCGGFKTIF

SEQ ID NO: 175234 - protein, 11 aa, Homo sapiens
  CDR3 for beta chain variable domain of TCR clone 87617 (TRBV12-4, TRBJ2-3)
CASTATDTQYF

SEQ ID NO: 175235 - protein, 16 aa, Homo sapiens
  CDR3 for alpha chain variable domain of TCR clone 87618 (TRAV3, TRAJ3)
CAVRDRAKSSASKIIF

SEQ ID NO: 175236 - protein, 16 aa, Homo sapiens
  CDR3 for beta chain variable domain of TCR clone 87618 (TRBV20-1, TRBJ2-4)
CSATSLAELAKNIQYF

SEQ ID NO: 175237 - protein, 16 aa, Homo sapiens
  CDR3 for alpha chain variable domain of TCR clone 87619 (TRAV12-3, TRAJ53)
CAMSPGSGGSNYKLTF

SEQ ID NO: 175238 - protein, 13 aa, Homo sapiens
  CDR3 for beta chain variable domain of TCR clone 87619 (TRBV4-1, TRBJ2-7)
CASSQGQAYEQYF

SEQ ID NO: 175239 - protein, 13 aa, Homo sapiens
  CDR3 for alpha chain variable domain of TCR clone 87620 (TRAV27, TRAJ41)
CAGEGNSGYALNF

SEQ ID NO: 175240 - protein, 14 aa, Homo sapiens
  CDR3 for beta chain variable domain of TCR clone 87620 (TRBV4-1, TRBJ2-2)
CASSQAVNTGELFF

SEQ ID NO: 175241 - protein, 16 aa, Homo sapiens
  CDR3 for alpha chain variable domain of TCR clone 87621 (TRAV4, TRAJ5)
CLVGPDHGHGQESPYF

SEQ ID NO: 175242 - protein, 13 aa, Homo sapiens
  CDR3 for beta chain variable domain of TCR clone 87621 (TRBV4-2, TRBJ1-2)
CASSLSASGGYTF

SEQ ID NO: 175243 - protein, 11 aa, Homo sapiens
  CDR3 for alpha chain variable domain of TCR clone 87622 (TRAV13-1, TRAJ39)
CASHAGNMLTF

SEQ ID NO: 175244 - protein, 13 aa, Homo sapiens
  CDR3 for beta chain variable domain of TCR clone 87622 (TRBV7-2, TRBJ2-2)
CASSLAVTGELFF

SEQ ID NO: 175245 - protein, 13 aa, Homo sapiens
  CDR3 for alpha chain variable domain of TCR clone 87623 (TRAV13-1, TRAJ21)
CAASIYNFNKFYF

SEQ ID NO: 175246 - protein, 12 aa, Homo sapiens
  CDR3 for beta chain variable domain of TCR clone 87623 (TRBV11-2, TRBJ2-1)
FASSPGNNEQFF

SEQ ID NO: 175247 - protein, 13 aa, Homo sapiens
  CDR3 for alpha chain variable domain of TCR clone 87624 (TRAV1-2, TRAJ11)
CAVRDSGYSTLTF

SEQ ID NO: 175248 - protein, 12 aa, Homo sapiens
  CDR3 for beta chain variable domain of TCR clone 87624 (TRBV7-8, TRBJ2-7)
CASSLGDREQYF

SEQ ID NO: 175249 - protein, 12 aa, Homo sapiens
  CDR3 for alpha chain variable domain of TCR clone 87625 (TRAV3, TRAJ26)
CAVRDYGQNFVF

SEQ ID NO: 175250 - protein, 14 aa, Homo sapiens
  CDR3 for beta chain variable domain of TCR clone 87625 (TRBV7-2, TRBJ2-7)
CASSPKTSFYEQYF

SEQ ID NO: 175251 - protein, 11 aa, Homo sapiens
  CDR3 for alpha chain variable domain of TCR clone 87626 (TRAV21, TRAJ34)
CAHYNTDKLIF

SEQ ID NO: 175252 - protein, 17 aa, Homo sapiens
  CDR3 for beta chain variable domain of TCR clone 87626 (TRBV20-1, TRBJ2-1)
CSAPPRLAGTRYNEQFF

SEQ ID NO: 175253 - protein, 16 aa, Homo sapiens
  CDR3 for alpha chain variable domain of TCR clone 87627 (TRAV3, TRAJ18)
CAVRDGRGSTLGRLYF

SEQ ID NO: 175254 - protein, 15 aa, Homo sapiens
  CDR3 for beta chain variable domain of TCR clone 87627 (TRBV7-9, TRBJ1-6)
CASSYPGRGNSPLHF

SEQ ID NO: 175255 - protein, 13 aa, Homo sapiens
  CDR3 for alpha chain variable domain of TCR clone 87628 (TRAV16, TRAJ54)
CALMVQGAQKLVF

SEQ ID NO: 175256 - protein, 15 aa, Homo sapiens
  CDR3 for beta chain variable domain of TCR clone 87628 (TRBV7-9, TRBJ1-4)
CASSRTGGFNEKLFF

SEQ ID NO: 175257 - protein, 15 aa, Homo sapiens
  CDR3 for alpha chain variable domain of TCR clone 87629 (TRAV27, TRAJ38)
CAARRNAGNNRKLIW

SEQ ID NO: 175258 - protein, 16 aa, Homo sapiens
  CDR3 for beta chain variable domain of TCR clone 87629 (TRBV18, TRBJ1-2)
CASSPPERVTIYGYTF

SEQ ID NO: 175259 - protein, 14 aa, Homo sapiens
  CDR3 for alpha chain variable domain of TCR clone 87630 (TRAV13-1, TRAJ44)
CAAKATGTASKLTF

SEQ ID NO: 175260 - protein, 16 aa, Homo sapiens
  CDR3 for beta chain variable domain of TCR clone 87630 (TRBV7-9, TRBJ2-6)
CASGLKGPLRANVLTF

SEQ ID NO: 175261 - protein, 15 aa, Homo sapiens
  CDR3 for alpha chain variable domain of TCR clone 87631 (TRAV27, TRAJ38)
CAARRNAGNNRNLIW

SEQ ID NO: 175262 - protein, 13 aa, Homo sapiens
  CDR3 for beta chain variable domain of TCR clone 87631 (TRBV28, TRBJ2-5)
CAGVSRGEETQYF

SEQ ID NO: 175263 - protein, 12 aa, Homo sapiens
  CDR3 for alpha chain variable domain of TCR clone 87632 (TRAV22, TRAJ22)
CAPGGSARQLTF

SEQ ID NO: 175264 - protein, 14 aa, Homo sapiens
  CDR3 for beta chain variable domain of TCR clone 87632 (TRBV11-1, TRBJ2-7)
CASSFRQGSYEQYF

SEQ ID NO: 175265 - protein, 15 aa, Homo sapiens
  CDR3 for alpha chain variable domain of TCR clone 87633 (TRAV8-3, TRAJ40)
CAVGPYTSGTYKYIF

SEQ ID NO: 175266 - protein, 16 aa, Homo sapiens
  CDR3 for beta chain variable domain of TCR clone 87633 (TRBV7-2, TRBJ2-7)
CASSLAPGGGSGEQYF

SEQ ID NO: 175267 - protein, 13 aa, Homo sapiens
  CDR3 for alpha chain variable domain of TCR clone 87634 (TRAV21, TRAJ15)
CAVANQAGTALIF

SEQ ID NO: 175268 - protein, 15 aa, Homo sapiens
  CDR3 for beta chain variable domain of TCR clone 87634 (TRBV11-2, TRBJ1-2)
CASSLEGVQRNGYTF

SEQ ID NO: 175269 - protein, 12 aa, Homo sapiens
  CDR3 for alpha chain variable domain of TCR clone 87635 (TRAV26-1, TRAJ36)
CIVRVRADNLFF

SEQ ID NO: 175270 - protein, 14 aa, Homo sapiens
  CDR3 for beta chain variable domain of TCR clone 87635 (TRBV14, TRBJ2-3)
CASSRKLAADTQCF

SEQ ID NO: 175271 - protein, 15 aa, Homo sapiens
  CDR3 for alpha chain variable domain of TCR clone 87636 (TRAV23/DV6, TRAJ28)
CAALLAYSGPGSYQL

SEQ ID NO: 175272 - protein, 13 aa, Homo sapiens
  CDR3 for beta chain variable domain of TCR clone 87636 (TRBV4-2, TRBJ2-3)
CASSQGNTDTQYF

SEQ ID NO: 175273 - protein, 14 aa, Homo sapiens
  CDR3 for alpha chain variable domain of TCR clone 87637 (TRAV17, TRAJ12)
CATDEKDSSYKLIF

SEQ ID NO: 175274 - protein, 14 aa, Homo sapiens
  CDR3 for beta chain variable domain of TCR clone 87637 (TRBV7-2, TRBJ2-7)
CASSPKTSFYEQYF

SEQ ID NO: 175275 - protein, 14 aa, Homo sapiens
  CDR3 for alpha chain variable domain of TCR clone 87638 (TRAV26-1, TRAJ49)
CIVRLTNTGNQIYF

SEQ ID NO: 175276 - protein, 13 aa, Homo sapiens
  CDR3 for beta chain variable domain of TCR clone 87638 (TRBV4-1, TRBJ2-7)
CASSQGQAYEQYF

SEQ ID NO: 175277 - protein, 15 aa, Homo sapiens
  CDR3 for alpha chain variable domain of TCR clone 87639 (TRAV13-1, TRAJ5)
CAASKADTGRRALTF

SEQ ID NO: 175278 - protein, 16 aa, Homo sapiens
  CDR3 for beta chain variable domain of TCR clone 87639 (TRBV7-2, TRBJ2-1)
RASSLGRTSGDNEQFF

SEQ ID NO: 175279 - protein, 11 aa, Homo sapiens
  CDR3 for alpha chain variable domain of TCR clone 87640 (TRAV12-1, TRAJ30)
CVVNGQDKIIF

SEQ ID NO: 175280 - protein, 15 aa, Homo sapiens
  CDR3 for beta chain variable domain of TCR clone 87640 (TRBV18, TRBJ2-1)
CASLPDRGRDNEQFF

SEQ ID NO: 175281 - protein, 15 aa, Homo sapiens
  CDR3 for alpha chain variable domain of TCR clone 87641 (TRAV8-6, TRAJ10)
CAVSDQAGGGNKLTF

SEQ ID NO: 175282 - protein, 15 aa, Homo sapiens
  CDR3 for beta chain variable domain of TCR clone 87641 (TRBV6-3, TRBJ2-7)
CASSSPGTVFYEQYF

SEQ ID NO: 175283 - protein, 16 aa, Homo sapiens
  CDR3 for alpha chain variable domain of TCR clone 87642 (TRAV14/DV4, TRAJ21)
CAMREGPENNFNKFYF

SEQ ID NO: 175284 - protein, 13 aa, Homo sapiens
  CDR3 for beta chain variable domain of TCR clone 87642 (TRBV19, TRBJ1-1)
CASTRRGDTEAFF

SEQ ID NO: 175285 - protein, 17 aa, Homo sapiens
  CDR3 for alpha chain variable domain of TCR clone 87643 (TRAV3, TRAJ6)
CVVRDGPRAGGSYIPTF

SEQ ID NO: 175286 - protein, 15 aa, Homo sapiens
  CDR3 for beta chain variable domain of TCR clone 87643 (TRBV20-1, TRBJ1-1)
CSASWDRFLNTEAFF

SEQ ID NO: 175287 - protein, 17 aa, Homo sapiens
  CDR3 for alpha chain variable domain of TCR clone 87644 (TRAV2, TRAJ22)
ILQVREADAAEQRQLTF

SEQ ID NO: 175288 - protein, 14 aa, Homo sapiens
  CDR3 for beta chain variable domain of TCR clone 87644 (TRBV20-1, TRBJ2-1)
CSAQIGGSANEQFF

SEQ ID NO: 175289 - protein, 13 aa, Homo sapiens
  CDR3 for alpha chain variable domain of TCR clone 87645 (TRAV12-1, TRAJ33)
CGEAPDSNYQLIW

SEQ ID NO: 175290 - protein, 15 aa, Homo sapiens
  CDR3 for beta chain variable domain of TCR clone 87645 (TRBV27, TRBJ2-1)
CASSNGGGSSNEQFF

SEQ ID NO: 175291 - protein, 14 aa, Homo sapiens
  CDR3 for alpha chain variable domain of TCR clone 87646 (TRAV3, TRAJ9)
CAVRLNTGGFKTIF

SEQ ID NO: 175292 - protein, 15 aa, Homo sapiens
  CDR3 for beta chain variable domain of TCR clone 87646 (TRBV7-3, TRBJ2-3)
CASSLGLTLGDTQYF

SEQ ID NO: 175293 - protein, 13 aa, Homo sapiens
  CDR3 for alpha chain variable domain of TCR clone 87647 (TRAV12-1, TRAJ26)
CAVRRNYGQNFVF

SEQ ID NO: 175294 - protein, 15 aa, Homo sapiens
  CDR3 for beta chain variable domain of TCR clone 87647 (TRBV28, TRBJ2-1)
CASSIIAGGRSEQFF

SEQ ID NO: 175295 - protein, 11 aa, Homo sapiens
  CDR3 for alpha chain variable domain of TCR clone 87648 (TRAV2, TRAJ33)
CAVESNYQLIW

SEQ ID NO: 175296 - protein, 16 aa, Homo sapiens
  CDR3 for beta chain variable domain of TCR clone 87648 (TRBV12-4, TRBJ1-5)
CASSRPVGGSNQPQHF

SEQ ID NO: 175297 - protein, 13 aa, Homo sapiens
  CDR3 for alpha chain variable domain of TCR clone 87649 (TRAV17, TRAJ5)
CAPMDTGRRALTF

SEQ ID NO: 175298 - protein, 14 aa, Homo sapiens
  CDR3 for beta chain variable domain of TCR clone 87649 (TRBV29-1, TRBJ2-7)
CSVDQRQASYEQHF

SEQ ID NO: 175299 - protein, 18 aa, Homo sapiens
  CDR3 for alpha chain variable domain of TCR clone 87650 (TRAV13-1, TRAJ52)
CAASKRSAGGTSYGKLTF

SEQ ID NO: 175300 - protein, 13 aa, Homo sapiens
  CDR3 for beta chain variable domain of TCR clone 87650 (TRBV7-3, TRBJ2-1)
CASSPGSYNEQFF

SEQ ID NO: 175301 - protein, 13 aa, Homo sapiens
  CDR3 for alpha chain variable domain of TCR clone 87651 (TRAV13-2, TRAJ10)
CAEDTGGGNKLTF

SEQ ID NO: 175302 - protein, 15 aa, Homo sapiens
  CDR3 for beta chain variable domain of TCR clone 87651 (TRBV12-4, TRBJ2-2)
CASSRQGANTGELFF

SEQ ID NO: 175303 - protein, 14 aa, Homo sapiens
  CDR3 for alpha chain variable domain of TCR clone 87652 (TRAV38-1, TRAJ39)
CAFAYNNAGNMLTF

SEQ ID NO: 175304 - protein, 16 aa, Homo sapiens
  CDR3 for beta chain variable domain of TCR clone 87652 (TRBV4-1, TRBJ2-6)
CASSQVGDPGANVLTF

SEQ ID NO: 175305 - protein, 11 aa, Homo sapiens
  CDR3 for alpha chain variable domain of TCR clone 87653 (TRAV3, TRAJ21)
CAVGNFNKFYF

SEQ ID NO: 175306 - protein, 12 aa, Homo sapiens
  CDR3 for beta chain variable domain of TCR clone 87653 (TRBV29-1, TRBJ2-3)
CSVTGGADTQYF

SEQ ID NO: 175307 - protein, 16 aa, Homo sapiens
  CDR3 for alpha chain variable domain of TCR clone 87654 (TRAV3, TRAJ10)
CAVRDMRAGGGNKLTF

SEQ ID NO: 175308 - protein, 19 aa, Homo sapiens
  CDR3 for beta chain variable domain of TCR clone 87654 (TRBV6-3, TRBJ1-2)
CASSYLKGRTGPPNYGYTF

SEQ ID NO: 175309 - protein, 12 aa, Homo sapiens
  CDR3 for alpha chain variable domain of TCR clone 87655 (TRAV12-2, TRAJ8)
CAVNTGFQKLVF

SEQ ID NO: 175310 - protein, 15 aa, Homo sapiens
  CDR3 for beta chain variable domain of TCR clone 87655 (TRBV7-8, TRBJ1-5)
CASSLERRGLEPQQF

SEQ ID NO: 175311 - protein, 14 aa, Homo sapiens
  CDR3 for alpha chain variable domain of TCR clone 87656 (TRAV12-3, TRAJ10)
SHLPLTGGGNKLTF

SEQ ID NO: 175312 - protein, 15 aa, Homo sapiens
  CDR3 for beta chain variable domain of TCR clone 87656 (TRBV5-1, TRBJ1-1)
CASSSTTGTNTEAFF

SEQ ID NO: 175313 - protein, 16 aa, Homo sapiens
  CDR3 for alpha chain variable domain of TCR clone 87657 (TRAV30, TRAJ24)
CGTEIVDADSWGNFQF

SEQ ID NO: 175314 - protein, 16 aa, Homo sapiens
  CDR3 for beta chain variable domain of TCR clone 87657 (TRBV7-3, TRBJ2-2)
CASSLKRGTLSGELFF

SEQ ID NO: 175315 - protein, 14 aa, Homo sapiens
  CDR3 for alpha chain variable domain of TCR clone 87658 (TRAV8-4, TRAJ5)
CAVSTDTGRRALTF

SEQ ID NO: 175316 - protein, 14 aa, Homo sapiens
  CDR3 for beta chain variable domain of TCR clone 87658 (TRBV12-4, TRBJ1-1)
CASTWTGHDTEAFF

SEQ ID NO: 175317 - protein, 15 aa, Homo sapiens
  CDR3 for alpha chain variable domain of TCR clone 87659 (TRAV17, TRAJ52)
CATEAGGTSYGKLTF

SEQ ID NO: 175318 - protein, 16 aa, Homo sapiens
  CDR3 for beta chain variable domain of TCR clone 87659 (TRBV5-4, TRBJ2-3)
CASQQPGAGGADTQYF

SEQ ID NO: 175319 - protein, 12 aa, Homo sapiens
  CDR3 for alpha chain variable domain of TCR clone 87660 (TRAV26-2, TRAJ21)
CILKGNFNKFYF

SEQ ID NO: 175320 - protein, 16 aa, Homo sapiens
  CDR3 for beta chain variable domain of TCR clone 87660 (TRBV7-3, TRBJ2-2)
CASSLKRGTLSGELFF

SEQ ID NO: 175321 - protein, 19 aa, Homo sapiens
  CDR3 for alpha chain variable domain of TCR clone 87661 (TRAV2, TRAJ20)
ILQVREADAAVYRDCKLSF

SEQ ID NO: 175322 - protein, 13 aa, Homo sapiens
  CDR3 for beta chain variable domain of TCR clone 87661 (TRBV15, TRBJ1-6)
CATSGGLNSSLHF

SEQ ID NO: 175323 - protein, 14 aa, Homo sapiens
  CDR3 for alpha chain variable domain of TCR clone 87662 (TRAV1-2, TRAJ8)
CPVREDTGFQKLVF

SEQ ID NO: 175324 - protein, 15 aa, Homo sapiens
  CDR3 for beta chain variable domain of TCR clone 87662 (TRBV6-3, TRBJ2-7)
CASSSPGTVFYEQYF

SEQ ID NO: 175325 - protein, 15 aa, Homo sapiens
  CDR3 for alpha chain variable domain of TCR clone 87663 (TRAV26-1, TRAJ37)
CIVKTGSSSTGKLIF

SEQ ID NO: 175326 - protein, 12 aa, Homo sapiens
  CDR3 for beta chain variable domain of TCR clone 87663 (TRBV7-8, TRBJ2-7)
CASSLGDREQYF

SEQ ID NO: 175327 - protein, 11 aa, Homo sapiens
  CDR3 for alpha chain variable domain of TCR clone 87664 (TRAV22, TRAJ4)
CCGGGYNKLIF

SEQ ID NO: 175328 - protein, 19 aa, Homo sapiens
  CDR3 for beta chain variable domain of TCR clone 87664 (TRBV23-1, TRBJ2-3)
TVSLRQQPRSTGSTDTQYF

SEQ ID NO: 175329 - protein, 14 aa, Homo sapiens
  CDR3 for alpha chain variable domain of TCR clone 87665 (TRAV26-1, TRAJ38)
CIADNAGNNRKLIW

SEQ ID NO: 175330 - protein, 13 aa, Homo sapiens
  CDR3 for beta chain variable domain of TCR clone 87665 (TRBV19, TRBJ1-2)
RASSVPGQDGYTF

SEQ ID NO: 175331 - protein, 14 aa, Homo sapiens
  CDR3 for alpha chain variable domain of TCR clone 87666 (TRAV12-1, TRAJ17)
CVVNYKAAGNKLTF

SEQ ID NO: 175332 - protein, 15 aa, Homo sapiens
  CDR3 for beta chain variable domain of TCR clone 87666 (TRBV12-4, TRBJ2-1)
CASSPLSGRNNEQFF

SEQ ID NO: 175333 - protein, 13 aa, Homo sapiens
  CDR3 for alpha chain variable domain of TCR clone 87667 (TRAV12-2, TRAJ6)
CAVNVSRKLHTYI

SEQ ID NO: 175334 - protein, 12 aa, Homo sapiens
  CDR3 for beta chain variable domain of TCR clone 87667 (TRBV29-1, TRBJ2-3)
CSVKGGADTQYF

SEQ ID NO: 175335 - protein, 15 aa, Homo sapiens
  CDR3 for alpha chain variable domain of TCR clone 87668 (TRAV25, TRAJ53)
CAATGGGGSNYKLTF

SEQ ID NO: 175336 - protein, 11 aa, Homo sapiens
  CDR3 for beta chain variable domain of TCR clone 87668 (TRBV11-3, TRBJ2-2)
CASSSGGELFC

SEQ ID NO: 175337 - protein, 13 aa, Homo sapiens
  CDR3 for alpha chain variable domain of TCR clone 87669 (TRAV8-4, TRAJ36)
CAGSEGGANNLFF

SEQ ID NO: 175338 - protein, 12 aa, Homo sapiens
  CDR3 for beta chain variable domain of TCR clone 87669 (TRBV28, TRBJ2-7)
CASTGNHYEQYF

SEQ ID NO: 175339 - protein, 14 aa, Homo sapiens
  CDR3 for alpha chain variable domain of TCR clone 87670 (TRAV13-1, TRAJ3)
CAASKSSSASKIIF

SEQ ID NO: 175340 - protein, 15 aa, Homo sapiens
  CDR3 for beta chain variable domain of TCR clone 87670 (TRBV6-1, TRBJ2-1)
CASSELRGQYNEQFF

SEQ ID NO: 175341 - protein, 13 aa, Homo sapiens
  CDR3 for alpha chain variable domain of TCR clone 87671 (TRAV13-1, TRAJ21)
CAASIYNFNKFYF

SEQ ID NO: 175342 - protein, 15 aa, Homo sapiens
  CDR3 for beta chain variable domain of TCR clone 87671 (TRBV7-9, TRBJ1-3)
CASSLTQGRTDTIYF

SEQ ID NO: 175343 - protein, 11 aa, Homo sapiens
  CDR3 for alpha chain variable domain of TCR clone 87672 (TRAV12-1, TRAJ21)
CVVNNFNKFYS

SEQ ID NO: 175344 - protein, 14 aa, Homo sapiens
  CDR3 for beta chain variable domain of TCR clone 87672 (TRBV15, TRBJ1-5)
CATSREQSNQPQHF

SEQ ID NO: 175345 - protein, 15 aa, Homo sapiens
  CDR3 for alpha chain variable domain of TCR clone 87673 (TRAV2, TRAJ15)
CAVGDRGQAGTALIF

SEQ ID NO: 175346 - protein, 13 aa, Homo sapiens
  CDR3 for beta chain variable domain of TCR clone 87673 (TRBV7-9, TRBJ2-3)
CASSPGSTDTQYF

SEQ ID NO: 175347 - protein, 12 aa, Homo sapiens
  CDR3 for alpha chain variable domain of TCR clone 87674 (TRAV13-2, TRAJ23)
CAERHRGGKLIF

SEQ ID NO: 175348 - protein, 15 aa, Homo sapiens
  CDR3 for beta chain variable domain of TCR clone 87674 (TRBV7-3, TRBJ2-2)
CASSETGQGTGELFF

SEQ ID NO: 175349 - protein, 12 aa, Homo sapiens
  CDR3 for alpha chain variable domain of TCR clone 87675 (TRAV36/DV7, TRAJ54)
CAVVRGAQKLVF

SEQ ID NO: 175350 - protein, 16 aa, Homo sapiens
  CDR3 for beta chain variable domain of TCR clone 87675 (TRBV5-4, TRBJ2-3)
CASQQPGAGGSDTQYF

SEQ ID NO: 175351 - protein, 14 aa, Homo sapiens
  CDR3 for alpha chain variable domain of TCR clone 87676 (TRAV8-4, TRAJ13)
CAVTLSGRYQKVTF

SEQ ID NO: 175352 - protein, 14 aa, Homo sapiens
  CDR3 for beta chain variable domain of TCR clone 87676 (TRBV7-2, TRBJ1-2)
CASSQTGSTYGYTF

SEQ ID NO: 175353 - protein, 16 aa, Homo sapiens
  CDR3 for alpha chain variable domain of TCR clone 87677 (TRAV30, TRAJ24)
CGTEIVDAASWGQFQF

SEQ ID NO: 175354 - protein, 14 aa, Homo sapiens
  CDR3 for beta chain variable domain of TCR clone 87677 (TRBV12-5, TRBJ2-5)
CASGSRTHQETQYF

SEQ ID NO: 175355 - protein, 14 aa, Homo sapiens
  CDR3 for alpha chain variable domain of TCR clone 87678 (TRAV23/DV6, TRAJ27)
CAASRDNNAGKSTF

SEQ ID NO: 175356 - protein, 13 aa, Homo sapiens
  CDR3 for beta chain variable domain of TCR clone 87678 (TRBV20-1, TRBJ1-5)
CSASGRGNQPQHF

SEQ ID NO: 175357 - protein, 14 aa, Homo sapiens
  CDR3 for alpha chain variable domain of TCR clone 87679 (TRAV12-2, TRAJ15)
CAPHTGQAGTALIF

SEQ ID NO: 175358 - protein, 14 aa, Homo sapiens
  CDR3 for beta chain variable domain of TCR clone 87679 (TRBV7-2, TRBJ2-7)
CASSPKTSFYDQYF

SEQ ID NO: 175359 - protein, 14 aa, Homo sapiens
  CDR3 for alpha chain variable domain of TCR clone 87680 (TRAV8-4, TRAJ13)
CAVTLSVGYPKVTF

SEQ ID NO: 175360 - protein, 14 aa, Homo sapiens
  CDR3 for beta chain variable domain of TCR clone 87680 (TRBV7-2, TRBJ1-2)
CASSQTGSTYGYTF

SEQ ID NO: 175361 - protein, 14 aa, Homo sapiens
  CDR3 for alpha chain variable domain of TCR clone 87681 (TRAV26-1, TRAJ38)
CIADNAGNNRKLIW

SEQ ID NO: 175362 - protein, 13 aa, Homo sapiens
  CDR3 for beta chain variable domain of TCR clone 87681 (TRBV20-1, TRBJ1-1)
CIARGGGNTEAFF

SEQ ID NO: 175363 - protein, 14 aa, Homo sapiens
  CDR3 for alpha chain variable domain of TCR clone 87682 (TRAV2, TRAJ9)
CAVEDRSGGFKTIF

SEQ ID NO: 175364 - protein, 19 aa, Homo sapiens
  CDR3 for beta chain variable domain of TCR clone 87682 (TRBV12-4, TRBJ2-7)
CASSPRSLRTSGRGHEQYF

SEQ ID NO: 175365 - protein, 15 aa, Homo sapiens
  CDR3 for alpha chain variable domain of TCR clone 87683 (TRAV3, TRAJ23)
CAVRDRGNQGGKLIF

SEQ ID NO: 175366 - protein, 13 aa, Homo sapiens
  CDR3 for beta chain variable domain of TCR clone 87683 (TRBV7-9, TRBJ1-2)
CASSLKQNYGYTF

SEQ ID NO: 175367 - protein, 13 aa, Homo sapiens
  CDR3 for alpha chain variable domain of TCR clone 87684 (TRAV12-1, TRAJ31)
CLVNMNNNARLMF

SEQ ID NO: 175368 - protein, 15 aa, Homo sapiens
  CDR3 for beta chain variable domain of TCR clone 87684 (TRBV4-1, TRBJ1-2)
CASSQGQGAAYGYTF

SEQ ID NO: 175369 - protein, 14 aa, Homo sapiens
  CDR3 for alpha chain variable domain of TCR clone 87685 (TRAV12-3, TRAJ57)
CAMSAWGGSEKLVF

SEQ ID NO: 175370 - protein, 14 aa, Homo sapiens
  CDR3 for beta chain variable domain of TCR clone 87685 (TRBV18, TRBJ2-5)
CACSPGVSQETQYF

SEQ ID NO: 175371 - protein, 12 aa, Homo sapiens
  CDR3 for alpha chain variable domain of TCR clone 87686 (TRAV12-3, TRAJ5)
CAMDTGRRALTF

SEQ ID NO: 175372 - protein, 17 aa, Homo sapiens
  CDR3 for beta chain variable domain of TCR clone 87686 (TRBV28, TRBJ2-5)
CASSTPEGDALQETQYF

SEQ ID NO: 175373 - protein, 12 aa, Homo sapiens
  CDR3 for alpha chain variable domain of TCR clone 87687 (TRAV20, TRAJ33)
CAVRCSNYQLIW

SEQ ID NO: 175374 - protein, 13 aa, Homo sapiens
  CDR3 for beta chain variable domain of TCR clone 87687 (TRBV4-3, TRBJ1-1)
CASSPTGNTEAFF

SEQ ID NO: 175375 - protein, 12 aa, Homo sapiens
  CDR3 for alpha chain variable domain of TCR clone 87688 (TRAV8-6, TRAJ4)
CAVSDHPNKLIF

SEQ ID NO: 175376 - protein, 15 aa, Homo sapiens
  CDR3 for beta chain variable domain of TCR clone 87688 (TRBV9, TRBJ1-6)
CASSVAGTGDSPLHF

SEQ ID NO: 175377 - protein, 14 aa, Homo sapiens
  CDR3 for alpha chain variable domain of TCR clone 87689 (TRAV8-3, TRAJ39)
CAVGAWGAGNMPTF

SEQ ID NO: 175378 - protein, 16 aa, Homo sapiens
  CDR3 for beta chain variable domain of TCR clone 87689 (TRBV7-2, TRBJ1-3)
CASSSGRVLSGNTIYF

SEQ ID NO: 175379 - protein, 11 aa, Homo sapiens
  CDR3 for alpha chain variable domain of TCR clone 87690 (TRAV21, TRAJ31)
CAVRNNARLMF

SEQ ID NO: 175380 - protein, 16 aa, Homo sapiens
  CDR3 for beta chain variable domain of TCR clone 87690 (TRBV2, TRBJ2-1)
CASRSPAGGKYNEQFF

SEQ ID NO: 175381 - protein, 11 aa, Homo sapiens
  CDR3 for alpha chain variable domain of TCR clone 87691 (TRAV12-1, TRAJ34)
CVVNKGRELIF

SEQ ID NO: 175382 - protein, 14 aa, Homo sapiens
  CDR3 for beta chain variable domain of TCR clone 87691 (TRBV7-2, TRBJ2-7)
CASSPKTSFYEQYF

SEQ ID NO: 175383 - protein, 16 aa, Homo sapiens
  CDR3 for alpha chain variable domain of TCR clone 87692 (TRAV3, TRAJ37)
CAVRPHGSGNTGKLIF

SEQ ID NO: 175384 - protein, 16 aa, Homo sapiens
  CDR3 for beta chain variable domain of TCR clone 87692 (TRBV9, TRBJ1-2)
CSSSVEEKVSPYGYTF

SEQ ID NO: 175385 - protein, 14 aa, Homo sapiens
  CDR3 for alpha chain variable domain of TCR clone 87693 (TRAV26-1, TRAJ45)
CIVRVVGGADGLTF

SEQ ID NO: 175386 - protein, 16 aa, Homo sapiens
  CDR3 for beta chain variable domain of TCR clone 87693 (TRBV7-9, TRBJ1-1)
CATSLTQVRSNTEAFF

SEQ ID NO: 175387 - protein, 12 aa, Homo sapiens
  CDR3 for alpha chain variable domain of TCR clone 87694 (TRAV36/DV7, TRAJ50)
CAVEPENLLRQG

SEQ ID NO: 175388 - protein, 13 aa, Homo sapiens
  CDR3 for beta chain variable domain of TCR clone 87694 (TRBV7-2, TRBJ2-7)
CASSAPSGSEQYF

SEQ ID NO: 175389 - protein, 12 aa, Homo sapiens
  CDR3 for alpha chain variable domain of TCR clone 87695 (TRAV1-2, TRAJ9)
CAGYTGGFKTIF

SEQ ID NO: 175390 - protein, 15 aa, Homo sapiens
  CDR3 for beta chain variable domain of TCR clone 87695 (TRBV11-2, TRBJ2-1)
CASSPAGKSLNEQFF

SEQ ID NO: 175391 - protein, 11 aa, Homo sapiens
  CDR3 for alpha chain variable domain of TCR clone 87696 (TRAV17, TRAJ9)
CATTGGFKTIF

SEQ ID NO: 175392 - protein, 14 aa, Homo sapiens
  CDR3 for beta chain variable domain of TCR clone 87696 (TRBV7-9, TRBJ2-2)
CASCGLADTGELFF

SEQ ID NO: 175393 - protein, 14 aa, Homo sapiens
  CDR3 for alpha chain variable domain of TCR clone 87697 (TRAV1-2, TRAJ16)
CAVNRFSDGQKLLF

SEQ ID NO: 175394 - protein, 14 aa, Homo sapiens
  CDR3 for beta chain variable domain of TCR clone 87697 (TRBV7-3, TRBJ1-1)
CASSLGTVYTEAFF

SEQ ID NO: 175395 - protein, 13 aa, Homo sapiens
  CDR3 for alpha chain variable domain of TCR clone 87698 (TRAV29/DV5, TRAJ47)
CAASAEYGNKLAF

SEQ ID NO: 175396 - protein, 15 aa, Homo sapiens
  CDR3 for beta chain variable domain of TCR clone 87698 (TRBV7-9, TRBJ1-4)
CASSARTGGNEKLFF

SEQ ID NO: 175397 - protein, 13 aa, Homo sapiens
  CDR3 for alpha chain variable domain of TCR clone 87699 (TRAV2, TRAJ15)
CAVASQAGTALIF

SEQ ID NO: 175398 - protein, 15 aa, Homo sapiens
  CDR3 for beta chain variable domain of TCR clone 87699 (TRBV28, TRBJ2-5)
CASSFRQGALETQYF

SEQ ID NO: 175399 - protein, 14 aa, Homo sapiens
  CDR3 for alpha chain variable domain of TCR clone 87700 (TRAV12-2, TRAJ13)
CAVKKTGGYQKVTF

SEQ ID NO: 175400 - protein, 12 aa, Homo sapiens
  CDR3 for beta chain variable domain of TCR clone 87700 (TRBV7-9, TRBJ2-7)
CASSFGSYEQYF

SEQ ID NO: 175401 - protein, 13 aa, Homo sapiens
  CDR3 for alpha chain variable domain of TCR clone 87701 (TRAV13-1, TRAJ10)
CAALEGGGNKLTF

SEQ ID NO: 175402 - protein, 13 aa, Homo sapiens
  CDR3 for beta chain variable domain of TCR clone 87701 (TRBV7-9, TRBJ1-2)
CASSLKQNYGYAF

SEQ ID NO: 175403 - protein, 15 aa, Homo sapiens
  CDR3 for alpha chain variable domain of TCR clone 87702 (TRAV4, TRAJ10)
CLVGDEEGGGNKLTF

SEQ ID NO: 175404 - protein, 12 aa, Homo sapiens
  CDR3 for beta chain variable domain of TCR clone 87702 (TRBV14, TRBJ2-5)
CASSHLKETQYF

SEQ ID NO: 175405 - protein, 17 aa, Homo sapiens
  CDR3 for alpha chain variable domain of TCR clone 87703 (TRAV1-2, TRAJ8)
CAVRDPDENTGFQKLVF

SEQ ID NO: 175406 - protein, 13 aa, Homo sapiens
  CDR3 for beta chain variable domain of TCR clone 87703 (TRBV7-9, TRBJ1-1)
CASSWDGNTEAFF

SEQ ID NO: 175407 - protein, 16 aa, Homo sapiens
  CDR3 for alpha chain variable domain of TCR clone 87704 (TRAV12-3, TRAJ53)
CAMSPGSGGSNYKLTF

SEQ ID NO: 175408 - protein, 11 aa, Homo sapiens
  CDR3 for beta chain variable domain of TCR clone 87704 (TRBV29-1, TRBJ2-5)
CSQDRTGTQYF

SEQ ID NO: 175409 - protein, 15 aa, Homo sapiens
  CDR3 for alpha chain variable domain of TCR clone 87705 (TRAV21, TRAJ37)
CAVRPTLSNTGKLIF

SEQ ID NO: 175410 - protein, 14 aa, Homo sapiens
  CDR3 for beta chain variable domain of TCR clone 87705 (TRBV25-1, TRBJ1-1)
CASTHLGGNTEAFF

SEQ ID NO: 175411 - protein, 14 aa, Homo sapiens
  CDR3 for alpha chain variable domain of TCR clone 87706 (TRAV34, TRAJ44)
CGADGTGTASKLTF

SEQ ID NO: 175412 - protein, 17 aa, Homo sapiens
  CDR3 for beta chain variable domain of TCR clone 87706 (TRBV7-9, TRBJ2-3)
CASSPTVAGDLTDTQYF

SEQ ID NO: 175413 - protein, 16 aa, Homo sapiens
  CDR3 for alpha chain variable domain of TCR clone 87707 (TRAV3, TRAJ3)
CSVRDRAKSSASKIIF

SEQ ID NO: 175414 - protein, 13 aa, Homo sapiens
  CDR3 for beta chain variable domain of TCR clone 87707 (TRBV10-3, TRBJ2-7)
CASKLAVNYEQYF

SEQ ID NO: 175415 - protein, 12 aa, Homo sapiens
  CDR3 for alpha chain variable domain of TCR clone 87708 (TRAV20, TRAJ36)
CAQVTGANNPFF

SEQ ID NO: 175416 - protein, 14 aa, Homo sapiens
  CDR3 for beta chain variable domain of TCR clone 87708 (TRBV6-1, TRBJ2-2)
CASSQRQATGELFF

SEQ ID NO: 175417 - protein, 13 aa, Homo sapiens
  CDR3 for alpha chain variable domain of TCR clone 87709 (TRAV26-1, TRAJ36)
CIAVRRGANNLLF

SEQ ID NO: 175418 - protein, 19 aa, Homo sapiens
  CDR3 for beta chain variable domain of TCR clone 87709 (TRBV27, TRBJ2-1)
CASSLEILSPGAAGNEQFF

SEQ ID NO: 175419 - protein, 15 aa, Homo sapiens
  CDR3 for alpha chain variable domain of TCR clone 87710 (TRAV17, TRAJ52)
CATEVGGTSYGKLTF

SEQ ID NO: 175420 - protein, 14 aa, Homo sapiens
  CDR3 for beta chain variable domain of TCR clone 87710 (TRBV28, TRBJ1-5)
CASSLGVLVKPQHF

SEQ ID NO: 175421 - protein, 14 aa, Homo sapiens
  CDR3 for alpha chain variable domain of TCR clone 87711 (TRAV13-1, TRAJ40)
CAASMTSGTYKYIF

SEQ ID NO: 175422 - protein, 14 aa, Homo sapiens
  CDR3 for beta chain variable domain of TCR clone 87711 (TRBV12-5, TRBJ2-5)
CASGSRTHQETQYF

SEQ ID NO: 175423 - protein, 14 aa, Homo sapiens
  CDR3 for alpha chain variable domain of TCR clone 87712 (TRAV2, TRAJ37)
CAVDFTSNTGKLIF

SEQ ID NO: 175424 - protein, 13 aa, Homo sapiens
  CDR3 for beta chain variable domain of TCR clone 87712 (TRBV27, TRBJ2-7)
CASSLTTGYEQYF

SEQ ID NO: 175425 - protein, 14 aa, Homo sapiens
  CDR3 for alpha chain variable domain of TCR clone 87713 (TRAV12-2, TRAJ32)
CAHPESGATNKLIF

SEQ ID NO: 175426 - protein, 14 aa, Homo sapiens
  CDR3 for beta chain variable domain of TCR clone 87713 (TRBV4-2, TRBJ2-3)
CAIRETRAPGMQYF

SEQ ID NO: 175427 - protein, 16 aa, Homo sapiens
  CDR3 for alpha chain variable domain of TCR clone 87714 (TRAV8-3, TRAJ44)
CAVGASNTGTASRLTL

SEQ ID NO: 175428 - protein, 15 aa, Homo sapiens
  CDR3 for beta chain variable domain of TCR clone 87714 (TRBV27, TRBJ1-5)
CASTFNRGSNQPQHF

SEQ ID NO: 175429 - protein, 11 aa, Homo sapiens
  CDR3 for alpha chain variable domain of TCR clone 87715 (TRAV21, TRAJ34)
CAHYNTDKLIF

SEQ ID NO: 175430 - protein, 11 aa, Homo sapiens
  CDR3 for beta chain variable domain of TCR clone 87715 (TRBV12-4, TRBJ2-3)
CASTATDTQYF

SEQ ID NO: 175431 - protein, 14 aa, Homo sapiens
  CDR3 for alpha chain variable domain of TCR clone 87716 (TRAV8-3, TRAJ35)
CAVVPQGFGSVLHC

SEQ ID NO: 175432 - protein, 15 aa, Homo sapiens
  CDR3 for beta chain variable domain of TCR clone 87716 (TRBV6-1, TRBJ2-2)
CASSAGQGYTGELFF

SEQ ID NO: 175433 - protein, 17 aa, Homo sapiens
  CDR3 for alpha chain variable domain of TCR clone 87717 (TRAV38-2/DV8, TRAJ56)
CAYRSEVGTGANSKLPF

SEQ ID NO: 175434 - protein, 14 aa, Homo sapiens
  CDR3 for beta chain variable domain of TCR clone 87717 (TRBV11-1, TRBJ1-1)
CASSLEHPNTEAFF

SEQ ID NO: 175435 - protein, 13 aa, Homo sapiens
  CDR3 for alpha chain variable domain of TCR clone 87718 (TRAV8-3, TRAJ43)
CAVVPYNNNDLRF

SEQ ID NO: 175436 - protein, 17 aa, Homo sapiens
  CDR3 for beta chain variable domain of TCR clone 87718 (TRBV7-7, TRBJ1-1)
CASIGDRPNLGVTEAFF

SEQ ID NO: 175437 - protein, 14 aa, Homo sapiens
  CDR3 for alpha chain variable domain of TCR clone 87719 (TRAV12-1, TRAJ17)
CVVNYKAAGNKLTF

SEQ ID NO: 175438 - protein, 17 aa, Homo sapiens
  CDR3 for beta chain variable domain of TCR clone 87719 (TRBV20-1, TRBJ2-1)
CSAISSGLAGSYNEQFF

SEQ ID NO: 175439 - protein, 16 aa, Homo sapiens
  CDR3 for alpha chain variable domain of TCR clone 87720 (TRAV13-1, TRAJ48)
CAASIFGNFGNEKLTF

SEQ ID NO: 175440 - protein, 12 aa, Homo sapiens
  CDR3 for beta chain variable domain of TCR clone 87720 (TRBV14, TRBJ2-4)
CASSSLKSIQYF

SEQ ID NO: 175441 - protein, 13 aa, Homo sapiens
  CDR3 for alpha chain variable domain of TCR clone 87721 (TRAV2, TRAJ12)
CAVGADSSYKLIF

SEQ ID NO: 175442 - protein, 13 aa, Homo sapiens
  CDR3 for beta chain variable domain of TCR clone 87721 (TRBV20-1, TRBJ2-1)
CSARSSPRDEQFC

SEQ ID NO: 175443 - protein, 15 aa, Homo sapiens
  CDR3 for alpha chain variable domain of TCR clone 87722 (TRAV8-6, TRAJ38)
CAVSSNAGNNRKLIW

SEQ ID NO: 175444 - protein, 14 aa, Homo sapiens
  CDR3 for beta chain variable domain of TCR clone 87722 (TRBV19, TRBJ2-1)
CASPTFVLSGEQFF

SEQ ID NO: 175445 - protein, 12 aa, Homo sapiens
  CDR3 for alpha chain variable domain of TCR clone 87723 (TRAV3, TRAJ43)
CAVRDPNNDMRF

SEQ ID NO: 175446 - protein, 15 aa, Homo sapiens
  CDR3 for beta chain variable domain of TCR clone 87723 (TRBV4-3, TRBJ2-7)
CASSEGDWGDYEQYF

SEQ ID NO: 175447 - protein, 14 aa, Homo sapiens
  CDR3 for alpha chain variable domain of TCR clone 87724 (TRAV21, TRAJ11)
CAVRRNSGYSTLTF

SEQ ID NO: 175448 - protein, 15 aa, Homo sapiens
  CDR3 for beta chain variable domain of TCR clone 87724 (TRBV28, TRBJ2-7)
CASSPGGRGFYEQYF

SEQ ID NO: 175449 - protein, 14 aa, Homo sapiens
  CDR3 for alpha chain variable domain of TCR clone 87725 (TRAV1-2, TRAJ6)
CAVSLSGGSYIPTF

SEQ ID NO: 175450 - protein, 15 aa, Homo sapiens
  CDR3 for beta chain variable domain of TCR clone 87725 (TRBV28, TRBJ2-7)
CASSPGGRVFYEQYF

SEQ ID NO: 175451 - protein, 14 aa, Homo sapiens
  CDR3 for alpha chain variable domain of TCR clone 87726 (TRAV12-3, TRAJ10)
SHLPLTGGGNKLTF

SEQ ID NO: 175452 - protein, 14 aa, Homo sapiens
  CDR3 for beta chain variable domain of TCR clone 87726 (TRBV4-2, TRBJ2-1)
RASGLDRAYNEQFF

SEQ ID NO: 175453 - protein, 15 aa, Homo sapiens
  CDR3 for alpha chain variable domain of TCR clone 87727 (TRAV12-2, TRAJ45)
CAVKRTGGGADGLTF

SEQ ID NO: 175454 - protein, 15 aa, Homo sapiens
  CDR3 for beta chain variable domain of TCR clone 87727 (TRBV2, TRBJ1-2)
CASRRDRRSNYGYTF

SEQ ID NO: 175455 - protein, 15 aa, Homo sapiens
  CDR3 for alpha chain variable domain of TCR clone 87728 (TRAV35, TRAJ58)
CAGRRQETSGSRLTF

SEQ ID NO: 175456 - protein, 11 aa, Homo sapiens
  CDR3 for beta chain variable domain of TCR clone 87728 (TRBV29-1, TRBJ2-5)
CSEDRTGTQYF

SEQ ID NO: 175457 - protein, 14 aa, Homo sapiens
  CDR3 for alpha chain variable domain of TCR clone 87729 (TRAV12-2, TRAJ40)
CDVKIPSGTYKYIF

SEQ ID NO: 175458 - protein, 17 aa, Homo sapiens
  CDR3 for beta chain variable domain of TCR clone 87729 (TRBV11-2, TRBJ2-1)
CASSLYPPGVEYNEQFF

SEQ ID NO: 175459 - protein, 13 aa, Homo sapiens
  CDR3 for alpha chain variable domain of TCR clone 87730 (TRAV12-3, TRAJ33)
CAMSVNSNYQLIW

SEQ ID NO: 175460 - protein, 15 aa, Homo sapiens
  CDR3 for beta chain variable domain of TCR clone 87730 (TRBV7-2, TRBJ1-2)
CASSLVSGGDYGYTF

SEQ ID NO: 175461 - protein, 14 aa, Homo sapiens
  CDR3 for alpha chain variable domain of TCR clone 87731 (TRAV21, TRAJ21)
CAVKGFGNFNKIYF

SEQ ID NO: 175462 - protein, 13 aa, Homo sapiens
  CDR3 for beta chain variable domain of TCR clone 87731 (TRBV18, TRBJ1-1)
CASSPETKPEAFF

SEQ ID NO: 175463 - protein, 12 aa, Homo sapiens
  CDR3 for alpha chain variable domain of TCR clone 87732 (TRAV22, TRAJ22)
CAPGGSARQLTF

SEQ ID NO: 175464 - protein, 13 aa, Homo sapiens
  CDR3 for beta chain variable domain of TCR clone 87732 (TRBV15, TRBJ1-6)
CAASGGLNSPLHF

SEQ ID NO: 175465 - protein, 15 aa, Homo sapiens
  CDR3 for alpha chain variable domain of TCR clone 87733 (TRAV17, TRAJ57)
CATGPSQGGSEKLVF

SEQ ID NO: 175466 - protein, 12 aa, Homo sapiens
  CDR3 for beta chain variable domain of TCR clone 87733 (TRBV7-9, TRBJ2-7)
CASSLEGYEQYF

SEQ ID NO: 175467 - protein, 13 aa, Homo sapiens
  CDR3 for alpha chain variable domain of TCR clone 87734 (TRAV20, TRAJ37)
CAGCSSNTGKLIF

SEQ ID NO: 175468 - protein, 15 aa, Homo sapiens
  CDR3 for beta chain variable domain of TCR clone 87734 (TRBV12-4, TRBJ2-1)
CAGSPLSGRNSEQFF

SEQ ID NO: 175469 - protein, 15 aa, Homo sapiens
  CDR3 for alpha chain variable domain of TCR clone 87735 (TRAV25, TRAJ52)
CAGRPGGTSFGKLTF

SEQ ID NO: 175470 - protein, 17 aa, Homo sapiens
  CDR3 for beta chain variable domain of TCR clone 87735 (TRBV7-8, TRBJ2-6)
CASSAGTGGAGANVLTF

SEQ ID NO: 175471 - protein, 12 aa, Homo sapiens
  CDR3 for alpha chain variable domain of TCR clone 87736 (TRAV12-1, TRAJ23)
CVVNNQGGKLIF

SEQ ID NO: 175472 - protein, 16 aa, Homo sapiens
  CDR3 for beta chain variable domain of TCR clone 87736 (TRBV11-1, TRBJ2-7)
CASSSQTGTLSYEQYF

SEQ ID NO: 175473 - protein, 14 aa, Homo sapiens
  CDR3 for alpha chain variable domain of TCR clone 87737 (TRAV2, TRAJ9)
CAVEDRSGGFKTIF

SEQ ID NO: 175474 - protein, 11 aa, Homo sapiens
  CDR3 for beta chain variable domain of TCR clone 87737 (TRBV6-1, TRBJ2-1)
CASISSNEQFF

SEQ ID NO: 175475 - protein, 13 aa, Homo sapiens
  CDR3 for alpha chain variable domain of TCR clone 87738 (TRAV2, TRAJ24)
CAVTTDSWGKLQF

SEQ ID NO: 175476 - protein, 14 aa, Homo sapiens
  CDR3 for beta chain variable domain of TCR clone 87738 (TRBV13, TRBJ2-5)
CASSLGGGQETQYF

SEQ ID NO: 175477 - protein, 15 aa, Homo sapiens
  CDR3 for alpha chain variable domain of TCR clone 87739 (TRAV10, TRAJ39)
CVVGASGNAGNMLTF

SEQ ID NO: 175478 - protein, 13 aa, Homo sapiens
  CDR3 for beta chain variable domain of TCR clone 87739 (TRBV18, TRBJ2-7)
CASQSGGGYEQYF

SEQ ID NO: 175479 - protein, 17 aa, Homo sapiens
  CDR3 for alpha chain variable domain of TCR clone 87740 (TRAV3, TRAJ38)
CAVRDCLNAGNNRKLIW

SEQ ID NO: 175480 - protein, 13 aa, Homo sapiens
  CDR3 for beta chain variable domain of TCR clone 87740 (TRBV23-1, TRBJ1-4)
CASRGKFNENLFF

SEQ ID NO: 175481 - protein, 14 aa, Homo sapiens
  CDR3 for alpha chain variable domain of TCR clone 87741 (TRAV12-2, TRAJ17)
CAVLFKAAGNKLTF

SEQ ID NO: 175482 - protein, 15 aa, Homo sapiens
  CDR3 for beta chain variable domain of TCR clone 87741 (TRBV18, TRBJ1-5)
CASSPSDRSNQPQHF

SEQ ID NO: 175483 - protein, 13 aa, Homo sapiens
  CDR3 for alpha chain variable domain of TCR clone 87742 (TRAV1-2, TRAJ27)
CAVFNTNAGKSTF

SEQ ID NO: 175484 - protein, 17 aa, Homo sapiens
  CDR3 for beta chain variable domain of TCR clone 87742 (TRBV11-2, TRBJ2-4)
CASSLGEGEGGKNIRYF

SEQ ID NO: 175485 - protein, 12 aa, Homo sapiens
  CDR3 for alpha chain variable domain of TCR clone 87743 (TRAV16, TRAJ10)
CSRTGGGNKLTF

SEQ ID NO: 175486 - protein, 16 aa, Homo sapiens
  CDR3 for beta chain variable domain of TCR clone 87743 (TRBV15, TRBJ1-2)
CATSRGPRTGGGGYTF

SEQ ID NO: 175487 - protein, 14 aa, Homo sapiens
  CDR3 for alpha chain variable domain of TCR clone 87744 (TRAV8-3, TRAJ9)
CAVVYNTGGFKTIF

SEQ ID NO: 175488 - protein, 14 aa, Homo sapiens
  CDR3 for beta chain variable domain of TCR clone 87744 (TRBV7-3, TRBJ2-2)
CANSSGGYTGELFF

SEQ ID NO: 175489 - protein, 13 aa, Homo sapiens
  CDR3 for alpha chain variable domain of TCR clone 87745 (TRAV3, TRAJ16)
CAVRDRNGQKLLF

SEQ ID NO: 175490 - protein, 16 aa, Homo sapiens
  CDR3 for beta chain variable domain of TCR clone 87745 (TRBV7-9, TRBJ1-2)
CASSLGFSSGEDGYTF

SEQ ID NO: 175491 - protein, 15 aa, Homo sapiens
  CDR3 for alpha chain variable domain of TCR clone 87746 (TRAV3, TRAJ23)
CAVRDRGNQGGKLIL

SEQ ID NO: 175492 - protein, 15 aa, Homo sapiens
  CDR3 for beta chain variable domain of TCR clone 87746 (TRBV7-3, TRBJ2-1)
CQQLAPSGSYNEQFF

SEQ ID NO: 175493 - protein, 16 aa, Homo sapiens
  CDR3 for alpha chain variable domain of TCR clone 87747 (TRAV12-3, TRAJ53)
CAMSPGSGGSNYKLTF

SEQ ID NO: 175494 - protein, 14 aa, Homo sapiens
  CDR3 for beta chain variable domain of TCR clone 87747 (TRBV19, TRBJ2-1)
CASSMGSGATEQFF

SEQ ID NO: 175495 - protein, 12 aa, Homo sapiens
  CDR3 for alpha chain variable domain of TCR clone 87748 (TRAV12-3, TRAJ17)
CAMTLTGNKPTF

SEQ ID NO: 175496 - protein, 15 aa, Homo sapiens
  CDR3 for beta chain variable domain of TCR clone 87748 (TRBV20-1, TRBJ2-7)
CSARDRASGMDEQYF

SEQ ID NO: 175497 - protein, 15 aa, Homo sapiens
  CDR3 for alpha chain variable domain of TCR clone 87749 (TRAV1-2, TRAJ26)
CAVSDLITMVRILSL

SEQ ID NO: 175498 - protein, 15 aa, Homo sapiens
  CDR3 for beta chain variable domain of TCR clone 87749 (TRBV9, TRBJ1-6)
CASSVAGTGDSPLHF

SEQ ID NO: 175499 - protein, 13 aa, Homo sapiens
  CDR3 for alpha chain variable domain of TCR clone 87750 (TRAV1-2, TRAJ9)
CAALNTVGFKTIF

SEQ ID NO: 175500 - protein, 13 aa, Homo sapiens
  CDR3 for beta chain variable domain of TCR clone 87750 (TRBV15, TRBJ1-6)
CATSGGLNSPLHF

SEQ ID NO: 175501 - protein, 15 aa, Homo sapiens
  CDR3 for alpha chain variable domain of TCR clone 87751 (TRAV3, TRAJ3)
CAVRDRDSSAFKIIF

SEQ ID NO: 175502 - protein, 18 aa, Homo sapiens
  CDR3 for beta chain variable domain of TCR clone 87751 (TRBV25-1, TRBJ1-2)
CASSGLQNGQGLIFGYTF

SEQ ID NO: 175503 - protein, 12 aa, Homo sapiens
  CDR3 for alpha chain variable domain of TCR clone 87752 (TRAV26-2, TRAJ21)
CILKGNFNKFYF

SEQ ID NO: 175504 - protein, 14 aa, Homo sapiens
  CDR3 for beta chain variable domain of TCR clone 87752 (TRBV7-9, TRBJ1-1)
CASTPLQSYTEASF

SEQ ID NO: 175505 - protein, 15 aa, Homo sapiens
  CDR3 for alpha chain variable domain of TCR clone 87753 (TRAV13-1, TRAJ32)
CAASIYGGATNKLIF

SEQ ID NO: 175506 - protein, 12 aa, Homo sapiens
  CDR3 for beta chain variable domain of TCR clone 87753 (TRBV7-6, TRBJ2-3)
CSSSTGTDTQYF

SEQ ID NO: 175507 - protein, 13 aa, Homo sapiens
  CDR3 for alpha chain variable domain of TCR clone 87754 (TRAV26-1, TRAJ30)
CIVRVESNDKIIF

SEQ ID NO: 175508 - protein, 16 aa, Homo sapiens
  CDR3 for beta chain variable domain of TCR clone 87754 (TRBV12-4, TRBJ2-7)
CASSLIGGTGTYEQYF

SEQ ID NO: 175509 - protein, 12 aa, Homo sapiens
  CDR3 for alpha chain variable domain of TCR clone 87755 (TRAV13-1, TRAJ15)
CAASQAGSALIF

SEQ ID NO: 175510 - protein, 14 aa, Homo sapiens
  CDR3 for beta chain variable domain of TCR clone 87755 (TRBV19, TRBJ2-2)
CASSTLHRSGELFF

SEQ ID NO: 175511 - protein, 10 aa, Homo sapiens
  CDR3 for alpha chain variable domain of TCR clone 87756 (TRAV30, TRAJ48)
CGIGNEQLTF

SEQ ID NO: 175512 - protein, 14 aa, Homo sapiens
  CDR3 for beta chain variable domain of TCR clone 87756 (TRBV7-6, TRBJ2-3)
CASSVAGGTDTQYF

SEQ ID NO: 175513 - protein, 13 aa, Homo sapiens
  CDR3 for alpha chain variable domain of TCR clone 87757 (TRAV20, TRAJ37)
CAGCSSNTGKLIF

SEQ ID NO: 175514 - protein, 12 aa, Homo sapiens
  CDR3 for beta chain variable domain of TCR clone 87757 (TRBV11-2, TRBJ2-3)
CASSPPEDTQYF

SEQ ID NO: 175515 - protein, 14 aa, Homo sapiens
  CDR3 for alpha chain variable domain of TCR clone 87758 (TRAV25, TRAJ22)
CAVRSSGSARQLTF

SEQ ID NO: 175516 - protein, 14 aa, Homo sapiens
  CDR3 for beta chain variable domain of TCR clone 87758 (TRBV7-6, TRBJ2-3)
CASSVAGGTDTQYF

SEQ ID NO: 175517 - protein, 17 aa, Homo sapiens
  CDR3 for alpha chain variable domain of TCR clone 87759 (TRAV16, TRAJ58)
CITVLSNGETSGPRLTF

SEQ ID NO: 175518 - protein, 13 aa, Homo sapiens
  CDR3 for beta chain variable domain of TCR clone 87759 (TRBV20-1, TRBJ2-2)
CSASAAGTGELFF

SEQ ID NO: 175519 - protein, 16 aa, Homo sapiens
  CDR3 for alpha chain variable domain of TCR clone 87760 (TRAV1-2, TRAJ10)
CAVRGVLTGGGNKLTF

SEQ ID NO: 175520 - protein, 13 aa, Homo sapiens
  CDR3 for beta chain variable domain of TCR clone 87760 (TRBV7-7, TRBJ1-1)
CASSLGANTEAFF

SEQ ID NO: 175521 - protein, 17 aa, Homo sapiens
  CDR3 for alpha chain variable domain of TCR clone 87761 (TRAV26-1, TRAJ58)
CIVRVGAEETSGSRLTF

SEQ ID NO: 175522 - protein, 18 aa, Homo sapiens
  CDR3 for beta chain variable domain of TCR clone 87761 (TRBV7-9, TRBJ2-7)
CASSLTTSGSRTWYEQYL

SEQ ID NO: 175523 - protein, 12 aa, Homo sapiens
  CDR3 for alpha chain variable domain of TCR clone 87762 (TRAV12-3, TRAJ41)
SAMSYSGYALNF

SEQ ID NO: 175524 - protein, 13 aa, Homo sapiens
  CDR3 for beta chain variable domain of TCR clone 87762 (TRBV7-3, TRBJ2-1)
CASSLDSYNEQFF

SEQ ID NO: 175525 - protein, 12 aa, Homo sapiens
  CDR3 for alpha chain variable domain of TCR clone 87763 (TRAV23/DV6, TRAJ3)
CAARAPQQCFQV

SEQ ID NO: 175526 - protein, 17 aa, Homo sapiens
  CDR3 for beta chain variable domain of TCR clone 87763 (TRBV7-9, TRBJ2-3)
CASSPTVAGDLTDTQYF

SEQ ID NO: 175527 - protein, 16 aa, Homo sapiens
  CDR3 for alpha chain variable domain of TCR clone 87764 (TRAV1-2, TRAJ10)
CAVRGVLTGGGNKLTF

SEQ ID NO: 175528 - protein, 19 aa, Homo sapiens
  CDR3 for beta chain variable domain of TCR clone 87764 (TRBV7-2, TRBJ2-3)
CASSFLSRNWGGGTDTQYF

SEQ ID NO: 175529 - protein, 11 aa, Homo sapiens
  CDR3 for alpha chain variable domain of TCR clone 87765 (TRAV21, TRAJ31)
CAVRNNARLMF

SEQ ID NO: 175530 - protein, 17 aa, Homo sapiens
  CDR3 for beta chain variable domain of TCR clone 87765 (TRBV28, TRBJ1-5)
CAGSLSWLVSSNQPQHF

SEQ ID NO: 175531 - protein, 17 aa, Homo sapiens
  CDR3 for alpha chain variable domain of TCR clone 87766 (TRAV35, TRAJ28)
CAGLQVYSGAGSYQPTL

SEQ ID NO: 175532 - protein, 15 aa, Homo sapiens
  CDR3 for beta chain variable domain of TCR clone 87766 (TRBV2, TRBJ1-2)
CASSEIGGANYGYTF

SEQ ID NO: 175533 - protein, 14 aa, Homo sapiens
  CDR3 for alpha chain variable domain of TCR clone 87767 (TRAV13-1, TRAJ35)
CAASKGGFGNVLHC

SEQ ID NO: 175534 - protein, 15 aa, Homo sapiens
  CDR3 for beta chain variable domain of TCR clone 87767 (TRBV9, TRBJ1-6)
CASSVAGTGDSPLHF

SEQ ID NO: 175535 - protein, 14 aa, Homo sapiens
  CDR3 for alpha chain variable domain of TCR clone 87768 (TRAV8-3, TRAJ4)
CAVGAAGGNNKLIF

SEQ ID NO: 175536 - protein, 14 aa, Homo sapiens
  CDR3 for beta chain variable domain of TCR clone 87768 (TRBV12-5, TRBJ2-5)
CASGSRTHQETQYF

SEQ ID NO: 175537 - protein, 16 aa, Homo sapiens
  CDR3 for alpha chain variable domain of TCR clone 87769 (TRAV17, TRAJ17)
CATALQEEAAGNKLTF

SEQ ID NO: 175538 - protein, 12 aa, Homo sapiens
  CDR3 for beta chain variable domain of TCR clone 87769 (TRBV4-2, TRBJ2-5)
CASGGAQGTQYF

SEQ ID NO: 175539 - protein, 14 aa, Homo sapiens
  CDR3 for alpha chain variable domain of TCR clone 87770 (TRAV1-2, TRAJ16)
CAVNRFSDGQKLLF

SEQ ID NO: 175540 - protein, 11 aa, Homo sapiens
  CDR3 for beta chain variable domain of TCR clone 87770 (TRBV7-2, TRBJ2-7)
CASSSGLWQYF

SEQ ID NO: 175541 - protein, 12 aa, Homo sapiens
  CDR3 for alpha chain variable domain of TCR clone 87771 (TRAV13-1, TRAJ48)
CAANFGNEKLTF

SEQ ID NO: 175542 - protein, 14 aa, Homo sapiens
  CDR3 for beta chain variable domain of TCR clone 87771 (TRBV9, TRBJ1-2)
CASSVSTRSYGHTF

SEQ ID NO: 175543 - protein, 14 aa, Homo sapiens
  CDR3 for alpha chain variable domain of TCR clone 87772 (TRAV13-1, TRAJ9)
CAASALTGGFKTIF

SEQ ID NO: 175544 - protein, 13 aa, Homo sapiens
  CDR3 for beta chain variable domain of TCR clone 87772 (TRBV5-5, TRBJ1-2)
CASSFWRGEDYTF

SEQ ID NO: 175545 - protein, 12 aa, Homo sapiens
  CDR3 for alpha chain variable domain of TCR clone 87773 (TRAV8-3, TRAJ20)
CAVDFNDYKLSF

SEQ ID NO: 175546 - protein, 13 aa, Homo sapiens
  CDR3 for beta chain variable domain of TCR clone 87773 (TRBV7-9, TRBJ1-2)
CASSLKQNYGYTF

SEQ ID NO: 175547 - protein, 11 aa, Homo sapiens
  CDR3 for alpha chain variable domain of TCR clone 87774 (TRAV1-2, TRAJ40)
CAVPGTYKYIF

SEQ ID NO: 175548 - protein, 12 aa, Homo sapiens
  CDR3 for beta chain variable domain of TCR clone 87774 (TRBV19, TRBJ2-5)
CASSISEETQYF

SEQ ID NO: 175549 - protein, 13 aa, Homo sapiens
  CDR3 for alpha chain variable domain of TCR clone 87775 (TRAV12-1, TRAJ7)
CVVNMRGNNRLAF

SEQ ID NO: 175550 - protein, 14 aa, Homo sapiens
  CDR3 for beta chain variable domain of TCR clone 87775 (TRBV11-2, TRBJ2-3)
CASSLGGGANTQYF

SEQ ID NO: 175551 - protein, 15 aa, Homo sapiens
  CDR3 for alpha chain variable domain of TCR clone 87776 (TRAV9-2, TRAJ28)
CALSISGAGSYQLTF

SEQ ID NO: 175552 - protein, 14 aa, Homo sapiens
  CDR3 for beta chain variable domain of TCR clone 87776 (TRBV7-9, TRBJ2-5)
CASSLVGGEETQYF

SEQ ID NO: 175553 - protein, 15 aa, Homo sapiens
  CDR3 for alpha chain variable domain of TCR clone 87777 (TRAV17, TRAJ16)
CATALRFSDSQKLLF

SEQ ID NO: 175554 - protein, 15 aa, Homo sapiens
  CDR3 for beta chain variable domain of TCR clone 87777 (TRBV20-1, TRBJ1-1)
CSASRGVTGNTEAFF

SEQ ID NO: 175555 - protein, 14 aa, Homo sapiens
  CDR3 for alpha chain variable domain of TCR clone 87778 (TRAV13-1, TRAJ6)
CEASGPGGSYIPTF

SEQ ID NO: 175556 - protein, 15 aa, Homo sapiens
  CDR3 for beta chain variable domain of TCR clone 87778 (TRBV27, TRBJ2-1)
CASSPLAGGANEQFF

SEQ ID NO: 175557 - protein, 11 aa, Homo sapiens
  CDR3 for alpha chain variable domain of TCR clone 87779 (TRAV39, TRAJ49)
CAVDISTQFYF

SEQ ID NO: 175558 - protein, 16 aa, Homo sapiens
  CDR3 for beta chain variable domain of TCR clone 87779 (TRBV7-8, TRBJ2-3)
CASSTEGQRETDTQYF

SEQ ID NO: 175559 - protein, 13 aa, Homo sapiens
  CDR3 for alpha chain variable domain of TCR clone 87780 (TRAV35, TRAJ42)
CAGFPGSQGNLIF

SEQ ID NO: 175560 - protein, 13 aa, Homo sapiens
  CDR3 for beta chain variable domain of TCR clone 87780 (TRBV29-1, TRBJ2-1)
CSVEGGRVNEEFF

SEQ ID NO: 175561 - protein, 14 aa, Homo sapiens
  CDR3 for alpha chain variable domain of TCR clone 87781 (TRAV26-1, TRAJ48)
CIVRTNFVNEKLTF

SEQ ID NO: 175562 - protein, 12 aa, Homo sapiens
  CDR3 for beta chain variable domain of TCR clone 87781 (TRBV20-1, TRBJ2-7)
CSASSGANEQYF

SEQ ID NO: 175563 - protein, 12 aa, Homo sapiens
  CDR3 for alpha chain variable domain of TCR clone 87782 (TRAV3, TRAJ27)
CAVRDGAGKSTF

SEQ ID NO: 175564 - protein, 13 aa, Homo sapiens
  CDR3 for beta chain variable domain of TCR clone 87782 (TRBV10-3, TRBJ1-2)
CAINADLDYGYTF

SEQ ID NO: 175565 - protein, 14 aa, Homo sapiens
  CDR3 for alpha chain variable domain of TCR clone 87783 (TRAV12-1, TRAJ17)
CVVNYKAAGNKLTF

SEQ ID NO: 175566 - protein, 15 aa, Homo sapiens
  CDR3 for beta chain variable domain of TCR clone 87783 (TRBV28, TRBJ1-5)
CASNLGGGRGQPQHF

SEQ ID NO: 175567 - protein, 15 aa, Homo sapiens
  CDR3 for alpha chain variable domain of TCR clone 87784 (TRAV26-2, TRAJ54)
CILRDIGQGAQKLVF

SEQ ID NO: 175568 - protein, 13 aa, Homo sapiens
  CDR3 for beta chain variable domain of TCR clone 87784 (TRBV7-9, TRBJ1-1)
CASSLAGVTEAFF

SEQ ID NO: 175569 - protein, 15 aa, Homo sapiens
  CDR3 for alpha chain variable domain of TCR clone 87785 (TRAV13-1, TRAJ10)
CAATILTGGGNKLTF

SEQ ID NO: 175570 - protein, 13 aa, Homo sapiens
  CDR3 for beta chain variable domain of TCR clone 87785 (TRBV9, TRBJ2-1)
CASSPSGGSEQFF

SEQ ID NO: 175571 - protein, 14 aa, Homo sapiens
  CDR3 for alpha chain variable domain of TCR clone 87786 (TRAV9-2, TRAJ39)
CALSIYNAGNMLTF

SEQ ID NO: 175572 - protein, 14 aa, Homo sapiens
  CDR3 for beta chain variable domain of TCR clone 87786 (TRBV6-1, TRBJ1-3)
CASVQGGGGNTIYF

SEQ ID NO: 175573 - protein, 14 aa, Homo sapiens
  CDR3 for alpha chain variable domain of TCR clone 87787 (TRAV8-3, TRAJ4)
CAVGASGGYNKLIF

SEQ ID NO: 175574 - protein, 15 aa, Homo sapiens
  CDR3 for beta chain variable domain of TCR clone 87787 (TRBV20-1, TRBJ2-7)
CSARDRVSGMDEQYF

SEQ ID NO: 175575 - protein, 13 aa, Homo sapiens
  CDR3 for alpha chain variable domain of TCR clone 87788 (TRAV2, TRAJ40)
CAVVTSGTYKYIF

SEQ ID NO: 175576 - protein, 12 aa, Homo sapiens
  CDR3 for beta chain variable domain of TCR clone 87788 (TRBV7-9, TRBJ1-1)
CASSLVRGEAFF

SEQ ID NO: 175577 - protein, 15 aa, Homo sapiens
  CDR3 for alpha chain variable domain of TCR clone 87789 (TRAV4, TRAJ10)
CLVGDEEGGGNKLPF

SEQ ID NO: 175578 - protein, 15 aa, Homo sapiens
  CDR3 for beta chain variable domain of TCR clone 87789 (TRBV7-2, TRBJ2-7)
CASSLTGQGTYEQYF

SEQ ID NO: 175579 - protein, 12 aa, Homo sapiens
  CDR3 for alpha chain variable domain of TCR clone 87790 (TRAV21, TRAJ29)
CAATSGNTPLVF

SEQ ID NO: 175580 - protein, 13 aa, Homo sapiens
  CDR3 for beta chain variable domain of TCR clone 87790 (TRBV4-2, TRBJ1-1)
CASSQAGNTEAFF

SEQ ID NO: 175581 - protein, 17 aa, Homo sapiens
  CDR3 for alpha chain variable domain of TCR clone 87791 (TRAV13-1, TRAJ31)
CAPRDRLMFGDGTQLVV

SEQ ID NO: 175582 - protein, 12 aa, Homo sapiens
  CDR3 for beta chain variable domain of TCR clone 87791 (TRBV7-9, TRBJ2-7)
CASSLEGYEQDF

SEQ ID NO: 175583 - protein, 16 aa, Homo sapiens
  CDR3 for alpha chain variable domain of TCR clone 87792 (TRAV1-2, TRAJ6)
CAVRDQGTGGSYIPTF

SEQ ID NO: 175584 - protein, 13 aa, Homo sapiens
  CDR3 for beta chain variable domain of TCR clone 87792 (TRBV28, TRBJ2-7)
CARTPGLAGEQYF

SEQ ID NO: 175585 - protein, 13 aa, Homo sapiens
  CDR3 for alpha chain variable domain of TCR clone 87793 (TRAV8-3, TRAJ43)
CAVGPDNNNDMRF

SEQ ID NO: 175586 - protein, 19 aa, Homo sapiens
  CDR3 for beta chain variable domain of TCR clone 87793 (TRBV25-1, TRBJ2-2)
CAILVYRVDRGRKTGELFF

SEQ ID NO: 175587 - protein, 12 aa, Homo sapiens
  CDR3 for alpha chain variable domain of TCR clone 87794 (TRAV22, TRAJ22)
CAPGGSARQLTF

SEQ ID NO: 175588 - protein, 13 aa, Homo sapiens
  CDR3 for beta chain variable domain of TCR clone 87794 (TRBV20-1, TRBJ1-1)
CSARGGGNTEAFF

SEQ ID NO: 175589 - protein, 11 aa, Homo sapiens
  CDR3 for alpha chain variable domain of TCR clone 87795 (TRAV21, TRAJ11)
CAVNGYSTLTF

SEQ ID NO: 175590 - protein, 11 aa, Homo sapiens
  CDR3 for beta chain variable domain of TCR clone 87795 (TRBV19, TRBJ1-1)
CASRIGSEAFF

SEQ ID NO: 175591 - protein, 15 aa, Homo sapiens
  CDR3 for alpha chain variable domain of TCR clone 87796 (TRAV3, TRAJ32)
CAVGSYGGATNKLIF

SEQ ID NO: 175592 - protein, 16 aa, Homo sapiens
  CDR3 for beta chain variable domain of TCR clone 87796 (TRBV5-1, TRBJ2-5)
CASSLSLAGAQETQYF

SEQ ID NO: 175593 - protein, 12 aa, Homo sapiens
  CDR3 for alpha chain variable domain of TCR clone 87797 (TRAV36/DV7, TRAJ54)
CAVVRGAQKLVF

SEQ ID NO: 175594 - protein, 13 aa, Homo sapiens
  CDR3 for beta chain variable domain of TCR clone 87797 (TRBV12-4, TRBJ2-7)
CASSPTETYEQYF

SEQ ID NO: 175595 - protein, 16 aa, Homo sapiens
  CDR3 for alpha chain variable domain of TCR clone 87798 (TRAV30, TRAJ24)
CGTEIVDADSWGKFQF

SEQ ID NO: 175596 - protein, 16 aa, Homo sapiens
  CDR3 for beta chain variable domain of TCR clone 87798 (TRBV28, TRBJ2-5)
CASSFSPAGGWETQYF

SEQ ID NO: 175597 - protein, 16 aa, Homo sapiens
  CDR3 for alpha chain variable domain of TCR clone 87799 (TRAV1-1, TRAJ20)
CLLLLRCERWNYKLSF

SEQ ID NO: 175598 - protein, 18 aa, Homo sapiens
  CDR3 for beta chain variable domain of TCR clone 87799 (TRBV20-1, TRBJ2-6)
CSAETTPTHGSGANVLTF

SEQ ID NO: 175599 - protein, 13 aa, Homo sapiens
  CDR3 for alpha chain variable domain of TCR clone 87800 (TRAV3, TRAJ21)
CAVREPDFNKFYF

SEQ ID NO: 175600 - protein, 15 aa, Homo sapiens
  CDR3 for beta chain variable domain of TCR clone 87800 (TRBV2, TRBJ2-1)
CASSELAGGTMSSSS

SEQ ID NO: 175601 - protein, 14 aa, Homo sapiens
  CDR3 for alpha chain variable domain of TCR clone 87801 (TRAV16, TRAJ33)
CALSAMDSNYQLIW

SEQ ID NO: 175602 - protein, 16 aa, Homo sapiens
  CDR3 for beta chain variable domain of TCR clone 87801 (TRBV12-4, TRBJ2-3)
CASSFPSNTSTDTQYF

SEQ ID NO: 175603 - protein, 20 aa, Homo sapiens
  CDR3 for alpha chain variable domain of TCR clone 87802 (TRAV25, TRAJ21)
TATQTTDVGTYPLSFSKFYF

SEQ ID NO: 175604 - protein, 14 aa, Homo sapiens
  CDR3 for beta chain variable domain of TCR clone 87802 (TRBV6-1, TRBJ2-1)
CASAKDGFYNEQFF

SEQ ID NO: 175605 - protein, 12 aa, Homo sapiens
  CDR3 for alpha chain variable domain of TCR clone 87803 (TRAV13-1, TRAJ20)
CAASMGDYKLSF

SEQ ID NO: 175606 - protein, 14 aa, Homo sapiens
  CDR3 for beta chain variable domain of TCR clone 87803 (TRBV20-1, TRBJ2-5)
CSASGSGSGETQYF

SEQ ID NO: 175607 - protein, 11 aa, Homo sapiens
  CDR3 for alpha chain variable domain of TCR clone 87804 (TRAV12-1, TRAJ34)
CVVNKRRELIF

SEQ ID NO: 175608 - protein, 12 aa, Homo sapiens
  CDR3 for beta chain variable domain of TCR clone 87804 (TRBV2, TRBJ2-1)
CAYGPPGNEQFF

SEQ ID NO: 175609 - protein, 18 aa, Homo sapiens
  CDR3 for alpha chain variable domain of TCR clone 87805 (TRAV21, TRAJ52)
CAVRPSPAGGTSYGKLTF

SEQ ID NO: 175610 - protein, 14 aa, Homo sapiens
  CDR3 for beta chain variable domain of TCR clone 87805 (TRBV28, TRBJ2-7)
CASTFYGRAHEQYF

SEQ ID NO: 175611 - protein, 11 aa, Homo sapiens
  CDR3 for alpha chain variable domain of TCR clone 87806 (TRAV2, TRAJ33)
CAVESNYQLIW

SEQ ID NO: 175612 - protein, 15 aa, Homo sapiens
  CDR3 for beta chain variable domain of TCR clone 87806 (TRBV7-2, TRBJ2-2)
CASRRPGQNTGELFF

SEQ ID NO: 175613 - protein, 19 aa, Homo sapiens
  CDR3 for alpha chain variable domain of TCR clone 87807 (TRAV26-1, TRAJ52)
CIVRAHRNAGGTSYGKLTF

SEQ ID NO: 175614 - protein, 15 aa, Homo sapiens
  CDR3 for beta chain variable domain of TCR clone 87807 (TRBV29-1, TRBJ2-1)
CSGRDRKSSYNELFF

SEQ ID NO: 175615 - protein, 13 aa, Homo sapiens
  CDR3 for alpha chain variable domain of TCR clone 87808 (TRAV39, TRAJ58)
CAGEETSGSRLTF

SEQ ID NO: 175616 - protein, 13 aa, Homo sapiens
  CDR3 for beta chain variable domain of TCR clone 87808 (TRBV15, TRBJ2-7)
CATSTAGHYEQYF

SEQ ID NO: 175617 - protein, 18 aa, Homo sapiens
  CDR3 for alpha chain variable domain of TCR clone 87809 (TRAV13-1, TRAJ52)
CAASKRSAGGTSYGKLTF

SEQ ID NO: 175618 - protein, 14 aa, Homo sapiens
  CDR3 for beta chain variable domain of TCR clone 87809 (TRBV19, TRBJ2-7)
CASTVQGRPYEQYF

SEQ ID NO: 175619 - protein, 18 aa, Homo sapiens
  CDR3 for alpha chain variable domain of TCR clone 87810 (TRAV13-1, TRAJ31)
CAAIVTMPDSCLEMELSW

SEQ ID NO: 175620 - protein, 11 aa, Homo sapiens
  CDR3 for beta chain variable domain of TCR clone 87810 (TRBV20-1, TRBJ2-7)
CSARTSYEQYF

SEQ ID NO: 175621 - protein, 14 aa, Homo sapiens
  CDR3 for alpha chain variable domain of TCR clone 87811 (TRAV13-1, TRAJ44)
CAAKATGTASKLTF

SEQ ID NO: 175622 - protein, 17 aa, Homo sapiens
  CDR3 for beta chain variable domain of TCR clone 87811 (TRBV7-3, TRBJ2-3)
RASSLMKRMRGAETQYF

SEQ ID NO: 175623 - protein, 11 aa, Homo sapiens
  CDR3 for alpha chain variable domain of TCR clone 87812 (TRAV36/DV7, TRAJ54)
CCGPGAQKLVF

SEQ ID NO: 175624 - protein, 14 aa, Homo sapiens
  CDR3 for beta chain variable domain of TCR clone 87812 (TRBV7-3, TRBJ1-1)
CASSLKGGNTEAFF

SEQ ID NO: 175625 - protein, 15 aa, Homo sapiens
  CDR3 for alpha chain variable domain of TCR clone 87813 (TRAV13-1, TRAJ18)
CAASGGGSTLGRLYV

SEQ ID NO: 175626 - protein, 13 aa, Homo sapiens
  CDR3 for beta chain variable domain of TCR clone 87813 (TRBV18, TRBJ2-1)
CASGLASNNEQFF

SEQ ID NO: 175627 - protein, 12 aa, Homo sapiens
  CDR3 for alpha chain variable domain of TCR clone 87814 (TRAV23/DV6, TRAJ36)
CAASNEANNLFF

SEQ ID NO: 175628 - protein, 13 aa, Homo sapiens
  CDR3 for beta chain variable domain of TCR clone 87814 (TRBV7-9, TRBJ1-2)
CASSLKQNYGYTF

SEQ ID NO: 175629 - protein, 17 aa, Homo sapiens
  CDR3 for alpha chain variable domain of TCR clone 87815 (TRAV4, TRAJ42)
CLVGVLNYGGSQGNLIF

SEQ ID NO: 175630 - protein, 12 aa, Homo sapiens
  CDR3 for beta chain variable domain of TCR clone 87815 (TRBV11-2, TRBJ2-2)
CASSLGGGELFF

SEQ ID NO: 175631 - protein, 13 aa, Homo sapiens
  CDR3 for alpha chain variable domain of TCR clone 87816 (TRAV36/DV7, TRAJ49)
CAGDSKTGNQFYF

SEQ ID NO: 175632 - protein, 12 aa, Homo sapiens
  CDR3 for beta chain variable domain of TCR clone 87816 (TRBV11-2, TRBJ2-2)
CASSLGGGELFF

SEQ ID NO: 175633 - protein, 15 aa, Homo sapiens
  CDR3 for alpha chain variable domain of TCR clone 87817 (TRAV8-3, TRAJ40)
CAAPSLGSGTYKYIF

SEQ ID NO: 175634 - protein, 16 aa, Homo sapiens
  CDR3 for beta chain variable domain of TCR clone 87817 (TRBV7-3, TRBJ2-3)
CASILSGYRPEDTQYF

SEQ ID NO: 175635 - protein, 14 aa, Homo sapiens
  CDR3 for alpha chain variable domain of TCR clone 87818 (TRAV21, TRAJ52)
CGRAGGTRYGKLTF

SEQ ID NO: 175636 - protein, 14 aa, Homo sapiens
  CDR3 for beta chain variable domain of TCR clone 87818 (TRBV19, TRBJ1-2)
CASSVLGYNYGYTF

SEQ ID NO: 175637 - protein, 16 aa, Homo sapiens
  CDR3 for alpha chain variable domain of TCR clone 87819 (TRAV3, TRAJ21)
CAVRDIERGNFNKFYF

SEQ ID NO: 175638 - protein, 20 aa, Homo sapiens
  CDR3 for beta chain variable domain of TCR clone 87819 (TRBV4-1, TRBJ2-2)
CASSQASPPGLASNTGELFF

SEQ ID NO: 175639 - protein, 12 aa, Homo sapiens
  CDR3 for alpha chain variable domain of TCR clone 87820 (TRAV13-2, TRAJ23)
CAERHRGGKLIF

SEQ ID NO: 175640 - protein, 16 aa, Homo sapiens
  CDR3 for beta chain variable domain of TCR clone 87820 (TRBV27, TRBJ2-2)
CASSLSGLWVTGELFF

SEQ ID NO: 175641 - protein, 12 aa, Homo sapiens
  CDR3 for alpha chain variable domain of TCR clone 87821 (TRAV21, TRAJ31)
CAVWGNNARLMF

SEQ ID NO: 175642 - protein, 16 aa, Homo sapiens
  CDR3 for beta chain variable domain of TCR clone 87821 (TRBV7-9, TRBJ2-3)
CASSPWREVGTDTQYF

SEQ ID NO: 175643 - protein, 16 aa, Homo sapiens
  CDR3 for alpha chain variable domain of TCR clone 87822 (TRAV1-2, TRAJ6)
CAVRDQGTGGSYIPTF

SEQ ID NO: 175644 - protein, 13 aa, Homo sapiens
  CDR3 for beta chain variable domain of TCR clone 87822 (TRBV28, TRBJ2-7)
CASTPGLAGEQYF

SEQ ID NO: 175645 - protein, 10 aa, Homo sapiens
  CDR3 for alpha chain variable domain of TCR clone 87823 (TRAV12-3, TRAJ18)
CAMSAEAQHW

SEQ ID NO: 175646 - protein, 13 aa, Homo sapiens
  CDR3 for beta chain variable domain of TCR clone 87823 (TRBV15, TRBJ1-6)
CATSGGLNSPLHF

SEQ ID NO: 175647 - protein, 11 aa, Homo sapiens
  CDR3 for alpha chain variable domain of TCR clone 87824 (TRAV17, TRAJ9)
CGFTGGFKTIF

SEQ ID NO: 175648 - protein, 14 aa, Homo sapiens
  CDR3 for beta chain variable domain of TCR clone 87824 (TRBV7-9, TRBJ2-2)
CASSLVQDTGEMFF

SEQ ID NO: 175649 - protein, 12 aa, Homo sapiens
  CDR3 for alpha chain variable domain of TCR clone 87825 (TRAV12-2, TRAJ10)
WGVTGGGNKLTF

SEQ ID NO: 175650 - protein, 12 aa, Homo sapiens
  CDR3 for beta chain variable domain of TCR clone 87825 (TRBV14, TRBJ2-5)
CASSQLKETQYF

SEQ ID NO: 175651 - protein, 12 aa, Homo sapiens
  CDR3 for alpha chain variable domain of TCR clone 87826 (TRAV3, TRAJ27)
CAVRDGPGKSTF

SEQ ID NO: 175652 - protein, 13 aa, Homo sapiens
  CDR3 for beta chain variable domain of TCR clone 87826 (TRBV10-3, TRBJ1-2)
CAINADLNYGYTF

SEQ ID NO: 175653 - protein, 14 aa, Homo sapiens
  CDR3 for alpha chain variable domain of TCR clone 87827 (TRAV21, TRAJ35)
CAVMPIGFGNVLHC

SEQ ID NO: 175654 - protein, 15 aa, Homo sapiens
  CDR3 for beta chain variable domain of TCR clone 87827 (TRBV6-3, TRBJ2-7)
CASSSPGTVFYEQYF

SEQ ID NO: 175655 - protein, 13 aa, Homo sapiens
  CDR3 for alpha chain variable domain of TCR clone 87828 (TRAV21, TRAJ3)
CCEPYSSASKIIF

SEQ ID NO: 175656 - protein, 15 aa, Homo sapiens
  CDR3 for beta chain variable domain of TCR clone 87828 (TRBV7-3, TRBJ2-1)
CASGPTGGGEVEQFF

SEQ ID NO: 175657 - protein, 12 aa, Homo sapiens
  CDR3 for alpha chain variable domain of TCR clone 87829 (TRAV13-1, TRAJ15)
CAASQAGTALIF

SEQ ID NO: 175658 - protein, 13 aa, Homo sapiens
  CDR3 for beta chain variable domain of TCR clone 87829 (TRBV12-4, TRBJ1-1)
CASSPGTGFEAFF

SEQ ID NO: 175659 - protein, 16 aa, Homo sapiens
  CDR3 for alpha chain variable domain of TCR clone 87830 (TRAV23/DV6, TRAJ9)
CAASIGGNTGGFKPIF

SEQ ID NO: 175660 - protein, 12 aa, Homo sapiens
  CDR3 for beta chain variable domain of TCR clone 87830 (TRBV11-2, TRBJ2-1)
CASSVQREGQFF

SEQ ID NO: 175661 - protein, 11 aa, Homo sapiens
  CDR3 for alpha chain variable domain of TCR clone 87831 (TRAV3, TRAJ21)
CAVGNFNKFYF

SEQ ID NO: 175662 - protein, 13 aa, Homo sapiens
  CDR3 for beta chain variable domain of TCR clone 87831 (TRBV2, TRBJ1-4)
CASSERAGEKLFF

SEQ ID NO: 175663 - protein, 13 aa, Homo sapiens
  CDR3 for alpha chain variable domain of TCR clone 87832 (TRAV38-1, TRAJ42)
CARWGGSQGNLIF

SEQ ID NO: 175664 - protein, 15 aa, Homo sapiens
  CDR3 for beta chain variable domain of TCR clone 87832 (TRBV10-3, TRBJ2-3)
CAISMTSGGTDTQYF

SEQ ID NO: 175665 - protein, 16 aa, Homo sapiens
  CDR3 for alpha chain variable domain of TCR clone 87833 (TRAV20, TRAJ28)
CAVRDPSGAGSYQLTF

SEQ ID NO: 175666 - protein, 15 aa, Homo sapiens
  CDR3 for beta chain variable domain of TCR clone 87833 (TRBV9, TRBJ1-6)
CASSVAGTGDSPLHF

SEQ ID NO: 175667 - protein, 14 aa, Homo sapiens
  CDR3 for alpha chain variable domain of TCR clone 87834 (TRAV1-1, TRAJ28)
CAAPSGAGSYQLTF

SEQ ID NO: 175668 - protein, 15 aa, Homo sapiens
  CDR3 for beta chain variable domain of TCR clone 87834 (TRBV7-2, TRBJ1-2)
CASSLVSGGDYGYTC

SEQ ID NO: 175669 - protein, 13 aa, Homo sapiens
  CDR3 for alpha chain variable domain of TCR clone 87835 (TRAV13-2, TRAJ21)
CAENLYNFNKFYF

SEQ ID NO: 175670 - protein, 15 aa, Homo sapiens
  CDR3 for beta chain variable domain of TCR clone 87835 (TRBV9, TRBJ1-6)
CASSVAGTGDSPLHF

SEQ ID NO: 175671 - protein, 17 aa, Homo sapiens
  CDR3 for alpha chain variable domain of TCR clone 87836 (TRAV3, TRAJ42)
CAVRDRDYGGSQGNLIF

SEQ ID NO: 175672 - protein, 12 aa, Homo sapiens
  CDR3 for beta chain variable domain of TCR clone 87836 (TRBV2, TRBJ2-1)
CAYGPPGNEQFF

SEQ ID NO: 175673 - protein, 10 aa, Homo sapiens
  CDR3 for alpha chain variable domain of TCR clone 87837 (TRAV23/DV6, TRAJ57)
CAASSTLSQG

SEQ ID NO: 175674 - protein, 14 aa, Homo sapiens
  CDR3 for beta chain variable domain of TCR clone 87837 (TRBV7-2, TRBJ2-7)
CASRSQGAAYEQYF

SEQ ID NO: 175675 - protein, 14 aa, Homo sapiens
  CDR3 for alpha chain variable domain of TCR clone 87838 (TRAV13-2, TRAJ20)
CAESPAKDDYKLSF

SEQ ID NO: 175676 - protein, 14 aa, Homo sapiens
  CDR3 for beta chain variable domain of TCR clone 87838 (TRBV7-9, TRBJ2-5)
CASSLDTAQETQYF

SEQ ID NO: 175677 - protein, 15 aa, Homo sapiens
  CDR3 for alpha chain variable domain of TCR clone 87839 (TRAV3, TRAJ4)
CAVRDGTGGYNKLIF

SEQ ID NO: 175678 - protein, 13 aa, Homo sapiens
  CDR3 for beta chain variable domain of TCR clone 87839 (TRBV4-1, TRBJ2-1)
CASSQAGGDEQFF

SEQ ID NO: 175679 - protein, 17 aa, Homo sapiens
  CDR3 for alpha chain variable domain of TCR clone 87840 (TRAV13-1, TRAJ52)
CAAGRNAGGTSYGKLTF

SEQ ID NO: 175680 - protein, 13 aa, Homo sapiens
  CDR3 for beta chain variable domain of TCR clone 87840 (TRBV20-1, TRBJ1-1)
CSARGGGSTEAFF

SEQ ID NO: 175681 - protein, 13 aa, Homo sapiens
  CDR3 for alpha chain variable domain of TCR clone 87841 (TRAV16, TRAJ34)
CALISYNTDKLIF

SEQ ID NO: 175682 - protein, 15 aa, Homo sapiens
  CDR3 for beta chain variable domain of TCR clone 87841 (TRBV9, TRBJ1-6)
CASSVAGTGDSPLHF

SEQ ID NO: 175683 - protein, 14 aa, Homo sapiens
  CDR3 for alpha chain variable domain of TCR clone 87842 (TRAV13-1, TRAJ35)
CAASKGGFGNVLHF

SEQ ID NO: 175684 - protein, 12 aa, Homo sapiens
  CDR3 for beta chain variable domain of TCR clone 87842 (TRBV7-3, TRBJ1-1)
CQQPGLGAEAFF

SEQ ID NO: 175685 - protein, 15 aa, Homo sapiens
  CDR3 for alpha chain variable domain of TCR clone 87843 (TRAV8-3, TRAJ22)
CAVGPPSGSARQLTF

SEQ ID NO: 175686 - protein, 13 aa, Homo sapiens
  CDR3 for beta chain variable domain of TCR clone 87843 (TRBV19, TRBJ2-3)
CASSMRNVDTQYF

SEQ ID NO: 175687 - protein, 13 aa, Homo sapiens
  CDR3 for alpha chain variable domain of TCR clone 87844 (TRAV12-2, TRAJ42)
CAVKRGSQGNLIF

SEQ ID NO: 175688 - protein, 12 aa, Homo sapiens
  CDR3 for beta chain variable domain of TCR clone 87844 (TRBV5-7, TRBJ1-2)
CASSLVQNGDTF

SEQ ID NO: 175689 - protein, 17 aa, Homo sapiens
  CDR3 for alpha chain variable domain of TCR clone 87845 (TRAV4, TRAJ42)
CLVGVLNYGGSQGNLIF

SEQ ID NO: 175690 - protein, 15 aa, Homo sapiens
  CDR3 for beta chain variable domain of TCR clone 87845 (TRBV6-1, TRBJ2-3)
CASSGQVLNTDTQYF

SEQ ID NO: 175691 - protein, 13 aa, Homo sapiens
  CDR3 for alpha chain variable domain of TCR clone 87846 (TRAV12-3, TRAJ40)
CAMRDSGTYKYIF

SEQ ID NO: 175692 - protein, 14 aa, Homo sapiens
  CDR3 for beta chain variable domain of TCR clone 87846 (TRBV7-2, TRBJ1-5)
CASSTQGAGQPQHF

SEQ ID NO: 175693 - protein, 16 aa, Homo sapiens
  CDR3 for alpha chain variable domain of TCR clone 87847 (TRAV30, TRAJ24)
CGTEIVGADSGGKFQF

SEQ ID NO: 175694 - protein, 15 aa, Homo sapiens
  CDR3 for beta chain variable domain of TCR clone 87847 (TRBV7-9, TRBJ1-4)
CASSARTGGNEKLFF

SEQ ID NO: 175695 - protein, 13 aa, Homo sapiens
  CDR3 for alpha chain variable domain of TCR clone 87848 (TRAV27, TRAJ45)
CRSSGGGADGLTF

SEQ ID NO: 175696 - protein, 15 aa, Homo sapiens
  CDR3 for beta chain variable domain of TCR clone 87848 (TRBV11-2, TRBJ1-1)
CASSSRSSLLLSLDK

SEQ ID NO: 175697 - protein, 12 aa, Homo sapiens
  CDR3 for alpha chain variable domain of TCR clone 87849 (TRAV21, TRAJ3)
CCFYSSASKIIF

SEQ ID NO: 175698 - protein, 16 aa, Homo sapiens
  CDR3 for beta chain variable domain of TCR clone 87849 (TRBV19, TRBJ2-1)
CASSKAGPSPTMSSSS

SEQ ID NO: 175699 - protein, 14 aa, Homo sapiens
  CDR3 for alpha chain variable domain of TCR clone 87850 (TRAV12-3, TRAJ57)
CAMSAWVGSEKLVF

SEQ ID NO: 175700 - protein, 14 aa, Homo sapiens
  CDR3 for beta chain variable domain of TCR clone 87850 (TRBV18, TRBJ2-5)
CASSPGVSQETQYF

SEQ ID NO: 175701 - protein, 14 aa, Homo sapiens
  CDR3 for alpha chain variable domain of TCR clone 87851 (TRAV13-1, TRAJ35)
CAASKGGFGNVLHC

SEQ ID NO: 175702 - protein, 11 aa, Homo sapiens
  CDR3 for beta chain variable domain of TCR clone 87851 (TRBV7-8, TRBJ2-7)
CASSLSLEQYF

SEQ ID NO: 175703 - protein, 14 aa, Homo sapiens
  CDR3 for alpha chain variable domain of TCR clone 87852 (TRAV13-1, TRAJ45)
CAAIGGGGADGLTF

SEQ ID NO: 175704 - protein, 16 aa, Homo sapiens
  CDR3 for beta chain variable domain of TCR clone 87852 (TRBV7-2, TRBJ1-1)
CASSLGAGWTNTEAVF

SEQ ID NO: 175705 - protein, 13 aa, Homo sapiens
  CDR3 for alpha chain variable domain of TCR clone 87853 (TRAV3, TRAJ30)
CAVRDRGDEKIIF

SEQ ID NO: 175706 - protein, 14 aa, Homo sapiens
  CDR3 for beta chain variable domain of TCR clone 87853 (TRBV5-1, TRBJ1-1)
CASSRTTGDTEAFF

SEQ ID NO: 175707 - protein, 13 aa, Homo sapiens
  CDR3 for alpha chain variable domain of TCR clone 87854 (TRAV13-2, TRAJ48)
CAEMDFGNEKLTF

SEQ ID NO: 175708 - protein, 15 aa, Homo sapiens
  CDR3 for beta chain variable domain of TCR clone 87854 (TRBV4-1, TRBJ1-4)
CASSDTGGTNEKLFF

SEQ ID NO: 175709 - protein, 15 aa, Homo sapiens
  CDR3 for alpha chain variable domain of TCR clone 87855 (TRAV8-6, TRAJ10)
CAVSDQAGGGTKLTF

SEQ ID NO: 175710 - protein, 15 aa, Homo sapiens
  CDR3 for beta chain variable domain of TCR clone 87855 (TRBV3-1, TRBJ2-5)
CASSANLGGPETQYF

SEQ ID NO: 175711 - protein, 15 aa, Homo sapiens
  CDR3 for alpha chain variable domain of TCR clone 87856 (TRAV26-2, TRAJ39)
CSLRGNNNAGNMLTF

SEQ ID NO: 175712 - protein, 14 aa, Homo sapiens
  CDR3 for beta chain variable domain of TCR clone 87856 (TRBV19, TRBJ2-1)
CASPTFVLSGEQFF

SEQ ID NO: 175713 - protein, 17 aa, Homo sapiens
  CDR3 for alpha chain variable domain of TCR clone 87857 (TRAV38-2/DV8, TRAJ28)
CAFLTLYSGAGSYQLTF

SEQ ID NO: 175714 - protein, 16 aa, Homo sapiens
  CDR3 for beta chain variable domain of TCR clone 87857 (TRBV4-3, TRBJ2-3)
CASSLGLAGEGDTQYF

SEQ ID NO: 175715 - protein, 14 aa, Homo sapiens
  CDR3 for alpha chain variable domain of TCR clone 87858 (TRAV26-1, TRAJ40)
CIIRVARGTYKYIF

SEQ ID NO: 175716 - protein, 14 aa, Homo sapiens
  CDR3 for beta chain variable domain of TCR clone 87858 (TRBV7-3, TRBJ2-7)
CASSLKADSYEQYF

SEQ ID NO: 175717 - protein, 22 aa, Homo sapiens
  CDR3 for alpha chain variable domain of TCR clone 87859 (TRAV21, TRAJ39)
AASQPGDSATPKGAKAGNMLTF

SEQ ID NO: 175718 - protein, 13 aa, Homo sapiens
  CDR3 for beta chain variable domain of TCR clone 87859 (TRBV7-9, TRBJ2-7)
CASSFAGAYEQYF

SEQ ID NO: 175719 - protein, 16 aa, Homo sapiens
  CDR3 for alpha chain variable domain of TCR clone 87860 (TRAV1-2, TRAJ10)
CAVRGVLTGGGNKLTF

SEQ ID NO: 175720 - protein, 15 aa, Homo sapiens
  CDR3 for beta chain variable domain of TCR clone 87860 (TRBV7-9, TRBJ1-6)
CASSSPGRGNSPRHF

SEQ ID NO: 175721 - protein, 12 aa, Homo sapiens
  CDR3 for alpha chain variable domain of TCR clone 87861 (TRAV4, TRAJ26)
CLVGDYGQNFVF

SEQ ID NO: 175722 - protein, 11 aa, Homo sapiens
  CDR3 for beta chain variable domain of TCR clone 87861 (TRBV7-8, TRBJ2-7)
CASSLSLEQYF

SEQ ID NO: 175723 - protein, 12 aa, Homo sapiens
  CDR3 for alpha chain variable domain of TCR clone 87862 (TRAV12-2, TRAJ42)
CAAGGSQGNLIF

SEQ ID NO: 175724 - protein, 16 aa, Homo sapiens
  CDR3 for beta chain variable domain of TCR clone 87862 (TRBV7-3, TRBJ2-2)
CASSLKRGTLSGELFF

SEQ ID NO: 175725 - protein, 12 aa, Homo sapiens
  CDR3 for alpha chain variable domain of TCR clone 87863 (TRAV12-3, TRAJ40)
CALSSGTYKYIF

SEQ ID NO: 175726 - protein, 20 aa, Homo sapiens
  CDR3 for beta chain variable domain of TCR clone 87863 (TRBV7-8, TRBJ2-2)
CASSHLFPGPTIHITGELFF

SEQ ID NO: 175727 - protein, 15 aa, Homo sapiens
  CDR3 for alpha chain variable domain of TCR clone 87864 (TRAV38-2/DV8, TRAJ57)
CAYGRVFGKGTKLTV

SEQ ID NO: 175728 - protein, 14 aa, Homo sapiens
  CDR3 for beta chain variable domain of TCR clone 87864 (TRBV19, TRBJ2-1)
CASPTFVLSGEQFF

SEQ ID NO: 175729 - protein, 14 aa, Homo sapiens
  CDR3 for alpha chain variable domain of TCR clone 87865 (TRAV1-2, TRAJ16)
CAVNRFSDGQTLLF

SEQ ID NO: 175730 - protein, 14 aa, Homo sapiens
  CDR3 for beta chain variable domain of TCR clone 87865 (TRBV7-8, TRBJ2-7)
CASSQTQGADEQYF

SEQ ID NO: 175731 - protein, 11 aa, Homo sapiens
  CDR3 for alpha chain variable domain of TCR clone 87866 (TRAV20, TRAJ23)
CACNQGGKLIF

SEQ ID NO: 175732 - protein, 14 aa, Homo sapiens
  CDR3 for beta chain variable domain of TCR clone 87866 (TRBV15, TRBJ2-5)
CATSMGGSGETQYF

SEQ ID NO: 175733 - protein, 11 aa, Homo sapiens
  CDR3 for alpha chain variable domain of TCR clone 87867 (TRAV12-3, TRAJ43)
CAMSVSNDMRF

SEQ ID NO: 175734 - protein, 16 aa, Homo sapiens
  CDR3 for beta chain variable domain of TCR clone 87867 (TRBV10-3, TRBJ2-1)
CAISGVGDGGGGEQFF

SEQ ID NO: 175735 - protein, 11 aa, Homo sapiens
  CDR3 for alpha chain variable domain of TCR clone 87868 (TRAV17, TRAJ9)
CATTGGFKTIF

SEQ ID NO: 175736 - protein, 14 aa, Homo sapiens
  CDR3 for beta chain variable domain of TCR clone 87868 (TRBV7-7, TRBJ2-2)
CASSRDRSTGELFF

SEQ ID NO: 175737 - protein, 16 aa, Homo sapiens
  CDR3 for alpha chain variable domain of TCR clone 87869 (TRAV30, TRAJ24)
CGTAIVDAASWGKFQF

SEQ ID NO: 175738 - protein, 14 aa, Homo sapiens
  CDR3 for beta chain variable domain of TCR clone 87869 (TRBV12-5, TRBJ2-5)
CASGSRTHQETQYF

SEQ ID NO: 175739 - protein, 13 aa, Homo sapiens
  CDR3 for alpha chain variable domain of TCR clone 87870 (TRAV38-2/DV8, TRAJ34)
CAYRTWNTDKLIF

SEQ ID NO: 175740 - protein, 14 aa, Homo sapiens
  CDR3 for beta chain variable domain of TCR clone 87870 (TRBV19, TRBJ2-1)
CASPTFVLSGEQFF

SEQ ID NO: 175741 - protein, 14 aa, Homo sapiens
  CDR3 for alpha chain variable domain of TCR clone 87871 (TRAV12-2, TRAJ9)
CAVNMEGGGFKTIF

SEQ ID NO: 175742 - protein, 13 aa, Homo sapiens
  CDR3 for beta chain variable domain of TCR clone 87871 (TRBV12-4, TRBJ1-2)
CASSSGPNYGYTF

SEQ ID NO: 175743 - protein, 14 aa, Homo sapiens
  CDR3 for alpha chain variable domain of TCR clone 87872 (TRAV1-2, TRAJ8)
CAVREATGFQKLVF

SEQ ID NO: 175744 - protein, 14 aa, Homo sapiens
  CDR3 for beta chain variable domain of TCR clone 87872 (TRBV20-1, TRBJ1-1)
CSAQTRIGGTEAFF

SEQ ID NO: 175745 - protein, 14 aa, Homo sapiens
  CDR3 for alpha chain variable domain of TCR clone 87873 (TRAV13-1, TRAJ44)
CEAKAAGTASKLTF

SEQ ID NO: 175746 - protein, 13 aa, Homo sapiens
  CDR3 for beta chain variable domain of TCR clone 87873 (TRBV5-5, TRBJ1-2)
CASSFWRGEDYTF

SEQ ID NO: 175747 - protein, 11 aa, Homo sapiens
  CDR3 for alpha chain variable domain of TCR clone 87874 (TRAV13-1, TRAJ52)
PGGTSYGKLTF

SEQ ID NO: 175748 - protein, 16 aa, Homo sapiens
  CDR3 for beta chain variable domain of TCR clone 87874 (TRBV28, TRBJ2-7)
CASSPWVATGDVSQYF

SEQ ID NO: 175749 - protein, 14 aa, Homo sapiens
  CDR3 for alpha chain variable domain of TCR clone 87875 (TRAV1-2, TRAJ8)
CAAREDTGFQKLVF

SEQ ID NO: 175750 - protein, 15 aa, Homo sapiens
  CDR3 for beta chain variable domain of TCR clone 87875 (TRBV7-9, TRBJ1-1)
CASSHRGTVNTEAFF

SEQ ID NO: 175751 - protein, 13 aa, Homo sapiens
  CDR3 for alpha chain variable domain of TCR clone 87876 (TRAV12-2, TRAJ37)
CAVSSGNTGKPIF

SEQ ID NO: 175752 - protein, 17 aa, Homo sapiens
  CDR3 for beta chain variable domain of TCR clone 87876 (TRBV5-1, TRBJ2-5)
CASSLLGLAANQETQYF

SEQ ID NO: 175753 - protein, 15 aa, Homo sapiens
  CDR3 for alpha chain variable domain of TCR clone 87877 (TRAV3, TRAJ22)
CAVRDRGGSAREMTF

SEQ ID NO: 175754 - protein, 16 aa, Homo sapiens
  CDR3 for beta chain variable domain of TCR clone 87877 (TRBV5-4, TRBJ2-3)
CASQQPGAGGADTQYF

SEQ ID NO: 175755 - protein, 17 aa, Homo sapiens
  CDR3 for alpha chain variable domain of TCR clone 87878 (TRAV38-1, TRAJ28)
CAIMKPTSGAGSYQLTF

SEQ ID NO: 175756 - protein, 15 aa, Homo sapiens
  CDR3 for beta chain variable domain of TCR clone 87878 (TRBV5-1, TRBJ2-4)
CASSLGGGGSYIQYF

SEQ ID NO: 175757 - protein, 14 aa, Homo sapiens
  CDR3 for alpha chain variable domain of TCR clone 87879 (TRAV38-1, TRAJ40)
CALRPTSGTYKYIF

SEQ ID NO: 175758 - protein, 14 aa, Homo sapiens
  CDR3 for beta chain variable domain of TCR clone 87879 (TRBV25-1, TRBJ1-1)
CASTHLGGYTEAFF

SEQ ID NO: 175759 - protein, 16 aa, Homo sapiens
  CDR3 for alpha chain variable domain of TCR clone 87880 (TRAV16, TRAJ4)
CALSRMFSGGYNKLIF

SEQ ID NO: 175760 - protein, 15 aa, Homo sapiens
  CDR3 for beta chain variable domain of TCR clone 87880 (TRBV20-1, TRBJ2-3)
CSATGTSGFTDTQYF

SEQ ID NO: 175761 - protein, 16 aa, Homo sapiens
  CDR3 for alpha chain variable domain of TCR clone 87881 (TRAV23/DV6, TRAJ52)
CAARPSGGTSYGKLTF

SEQ ID NO: 175762 - protein, 13 aa, Homo sapiens
  CDR3 for beta chain variable domain of TCR clone 87881 (TRBV7-9, TRBJ1-1)
CAGSLSGETEAFF

SEQ ID NO: 175763 - protein, 15 aa, Homo sapiens
  CDR3 for alpha chain variable domain of TCR clone 87882 (TRAV26-1, TRAJ15)
CIVRAANQAGTALIF

SEQ ID NO: 175764 - protein, 15 aa, Homo sapiens
  CDR3 for beta chain variable domain of TCR clone 87882 (TRBV20-1, TRBJ1-1)
CSARSAATTNTEAFF

SEQ ID NO: 175765 - protein, 11 aa, Homo sapiens
  CDR3 for alpha chain variable domain of TCR clone 87883 (TRAV2, TRAJ13)
CASGGYQKVTF

SEQ ID NO: 175766 - protein, 16 aa, Homo sapiens
  CDR3 for beta chain variable domain of TCR clone 87883 (TRBV6-1, TRBJ2-5)
CAISETLDRGAETQYF

SEQ ID NO: 175767 - protein, 17 aa, Homo sapiens
  CDR3 for alpha chain variable domain of TCR clone 87884 (TRAV3, TRAJ6)
CAVRDGPRAGGSYIPTF

SEQ ID NO: 175768 - protein, 16 aa, Homo sapiens
  CDR3 for beta chain variable domain of TCR clone 87884 (TRBV15, TRBJ1-2)
CATSRGPRTGGGGYTF

SEQ ID NO: 175769 - protein, 10 aa, Homo sapiens
  CDR3 for alpha chain variable domain of TCR clone 87885 (TRAV30, TRAJ48)
CGIGNEKLTF

SEQ ID NO: 175770 - protein, 12 aa, Homo sapiens
  CDR3 for beta chain variable domain of TCR clone 87885 (TRBV20-1, TRBJ2-4)
CSLGGQRNIQYF

SEQ ID NO: 175771 - protein, 12 aa, Homo sapiens
  CDR3 for alpha chain variable domain of TCR clone 87886 (TRAV1-1, TRAJ43)
CAPRLSSNDMRF

SEQ ID NO: 175772 - protein, 15 aa, Homo sapiens
  CDR3 for beta chain variable domain of TCR clone 87886 (TRBV5-1, TRBJ2-7)
CASSLGDFTTYEQYF

SEQ ID NO: 175773 - protein, 11 aa, Homo sapiens
  CDR3 for alpha chain variable domain of TCR clone 87887 (TRAV2, TRAJ13)
CASGGYQKVTF

SEQ ID NO: 175774 - protein, 14 aa, Homo sapiens
  CDR3 for beta chain variable domain of TCR clone 87887 (TRBV5-5, TRBJ1-5)
CASSGQGVDQPQHF

SEQ ID NO: 175775 - protein, 15 aa, Homo sapiens
  CDR3 for alpha chain variable domain of TCR clone 87888 (TRAV8-3, TRAJ40)
CAAPSLGSGTYKYIF

SEQ ID NO: 175776 - protein, 16 aa, Homo sapiens
  CDR3 for beta chain variable domain of TCR clone 87888 (TRBV7-3, TRBJ2-3)
CASSLSGYRPEDMQYF

SEQ ID NO: 175777 - protein, 10 aa, Homo sapiens
  CDR3 for alpha chain variable domain of TCR clone 87889 (TRAV30, TRAJ20)
CGTDDYKLSF

SEQ ID NO: 175778 - protein, 13 aa, Homo sapiens
  CDR3 for beta chain variable domain of TCR clone 87889 (TRBV27, TRBJ2-7)
CASSFSQGYEQYF

SEQ ID NO: 175779 - protein, 14 aa, Homo sapiens
  CDR3 for alpha chain variable domain of TCR clone 87890 (TRAV12-3, TRAJ10)
SHLPLTGGGNELTF

SEQ ID NO: 175780 - protein, 11 aa, Homo sapiens
  CDR3 for beta chain variable domain of TCR clone 87890 (TRBV19, TRBJ1-1)
CASSIGSEAFF

SEQ ID NO: 175781 - protein, 14 aa, Homo sapiens
  CDR3 for alpha chain variable domain of TCR clone 87891 (TRAV12-3, TRAJ11)
CAMTTNSGYSTLTF

SEQ ID NO: 175782 - protein, 16 aa, Homo sapiens
  CDR3 for beta chain variable domain of TCR clone 87891 (TRBV20-1, TRBJ1-1)
CSARALTQGMNTEAVF

SEQ ID NO: 175783 - protein, 15 aa, Homo sapiens
  CDR3 for alpha chain variable domain of TCR clone 87892 (TRAV3, TRAJ11)
CAVRDRGSGYSTLPF

SEQ ID NO: 175784 - protein, 11 aa, Homo sapiens
  CDR3 for beta chain variable domain of TCR clone 87892 (TRBV29-1, TRBJ2-5)
CSEDRTGTQYF

SEQ ID NO: 175785 - protein, 15 aa, Homo sapiens
  CDR3 for alpha chain variable domain of TCR clone 87893 (TRAV13-1, TRAJ17)
CAASIHGGCRQHANF

SEQ ID NO: 175786 - protein, 14 aa, Homo sapiens
  CDR3 for beta chain variable domain of TCR clone 87893 (TRBV20-1, TRBJ2-4)
CSARDRGQGGIQYF

SEQ ID NO: 175787 - protein, 14 aa, Homo sapiens
  CDR3 for alpha chain variable domain of TCR clone 87894 (TRAV12-3, TRAJ10)
SHLPLTGGGKKLTF

SEQ ID NO: 175788 - protein, 12 aa, Homo sapiens
  CDR3 for beta chain variable domain of TCR clone 87894 (TRBV11-2, TRBJ2-2)
CASSLGGGELFF

SEQ ID NO: 175789 - protein, 18 aa, Homo sapiens
  CDR3 for alpha chain variable domain of TCR clone 87895 (TRAV12-3, TRAJ52)
CAMSVGGAGGTSYGKLTF

SEQ ID NO: 175790 - protein, 12 aa, Homo sapiens
  CDR3 for beta chain variable domain of TCR clone 87895 (TRBV7-9, TRBJ1-1)
CASSLVRGEAFF

SEQ ID NO: 175791 - protein, 18 aa, Homo sapiens
  CDR3 for alpha chain variable domain of TCR clone 87896 (TRAV26-1, TRAJ52)
CIVRVAGAGGTSYGKLTF

SEQ ID NO: 175792 - protein, 13 aa, Homo sapiens
  CDR3 for beta chain variable domain of TCR clone 87896 (TRBV7-8, TRBJ1-2)
CASSAQSYHGYTF

SEQ ID NO: 175793 - protein, 14 aa, Homo sapiens
  CDR3 for alpha chain variable domain of TCR clone 87897 (TRAV4, TRAJ17)
CLVGDMAAGNKPTF

SEQ ID NO: 175794 - protein, 14 aa, Homo sapiens
  CDR3 for beta chain variable domain of TCR clone 87897 (TRBV4-1, TRBJ2-7)
CASSPVAGGDEQYF

SEQ ID NO: 175795 - protein, 14 aa, Homo sapiens
  CDR3 for alpha chain variable domain of TCR clone 87898 (TRAV8-3, TRAJ9)
CAVVYNTGGFKTIF

SEQ ID NO: 175796 - protein, 14 aa, Homo sapiens
  CDR3 for beta chain variable domain of TCR clone 87898 (TRBV7-3, TRBJ2-2)
CASSSGGNTGELFF

SEQ ID NO: 175797 - protein, 12 aa, Homo sapiens
  CDR3 for alpha chain variable domain of TCR clone 87899 (TRAV12-2, TRAJ8)
CAVNTGFQKIVF

SEQ ID NO: 175798 - protein, 15 aa, Homo sapiens
  CDR3 for beta chain variable domain of TCR clone 87899 (TRBV7-8, TRBJ1-5)
CASSLERRGLEPQHF

SEQ ID NO: 175799 - protein, 14 aa, Homo sapiens
  CDR3 for alpha chain variable domain of TCR clone 87900 (TRAV38-1, TRAJ39)
CACHFYNAGNMLTF

SEQ ID NO: 175800 - protein, 12 aa, Homo sapiens
  CDR3 for beta chain variable domain of TCR clone 87900 (TRBV11-2, TRBJ2-2)
CASSLGGGELFF

SEQ ID NO: 175801 - protein, 14 aa, Homo sapiens
  CDR3 for alpha chain variable domain of TCR clone 87901 (TRAV12-3, TRAJ10)
SHLPLTGGGNKLTF

SEQ ID NO: 175802 - protein, 15 aa, Homo sapiens
  CDR3 for beta chain variable domain of TCR clone 87901 (TRBV7-9, TRBJ1-6)
CASSSTGRGNSPLHF

SEQ ID NO: 175803 - protein, 12 aa, Homo sapiens
  CDR3 for alpha chain variable domain of TCR clone 87902 (TRAV22, TRAJ22)
CAPGGSARQLTF

SEQ ID NO: 175804 - protein, 14 aa, Homo sapiens
  CDR3 for beta chain variable domain of TCR clone 87902 (TRBV6-1, TRBJ1-3)
CASVQGGGGNTIYF

SEQ ID NO: 175805 - protein, 11 aa, Homo sapiens
  CDR3 for alpha chain variable domain of TCR clone 87903 (TRAV16, TRAJ49)
CALRSGNQFYF

SEQ ID NO: 175806 - protein, 16 aa, Homo sapiens
  CDR3 for beta chain variable domain of TCR clone 87903 (TRBV20-1, TRBJ1-5)
CSARDVGGGWIQAQHF

SEQ ID NO: 175807 - protein, 15 aa, Homo sapiens
  CDR3 for alpha chain variable domain of TCR clone 87904 (TRAV3, TRAJ22)
CAVRDRGGSARQLTF

SEQ ID NO: 175808 - protein, 15 aa, Homo sapiens
  CDR3 for beta chain variable domain of TCR clone 87904 (TRBV28, TRBJ2-5)
CASSPPWSYQETQYF

SEQ ID NO: 175809 - protein, 19 aa, Homo sapiens
  CDR3 for alpha chain variable domain of TCR clone 87905 (TRAV26-1, TRAJ42)
CVILRRQTYYGGSQGNLIF

SEQ ID NO: 175810 - protein, 16 aa, Homo sapiens
  CDR3 for beta chain variable domain of TCR clone 87905 (TRBV7-3, TRBJ2-2)
CASSLKRGTLSGELFF

SEQ ID NO: 175811 - protein, 13 aa, Homo sapiens
  CDR3 for alpha chain variable domain of TCR clone 87906 (TRAV27, TRAJ3)
ASLRGSSASKIIF

SEQ ID NO: 175812 - protein, 17 aa, Homo sapiens
  CDR3 for beta chain variable domain of TCR clone 87906 (TRBV28, TRBJ1-3)
CASSMGWPLETPYILER

SEQ ID NO: 175813 - protein, 15 aa, Homo sapiens
  CDR3 for alpha chain variable domain of TCR clone 87907 (TRAV12-2, TRAJ52)
CAVTSGGTSSGKLTF

SEQ ID NO: 175814 - protein, 15 aa, Homo sapiens
  CDR3 for beta chain variable domain of TCR clone 87907 (TRBV7-2, TRBJ2-1)
CASSPGFISGNEQFF

SEQ ID NO: 175815 - protein, 14 aa, Homo sapiens
  CDR3 for alpha chain variable domain of TCR clone 87908 (TRAV1-2, TRAJ16)
CAVNRFSDGQKLLF

SEQ ID NO: 175816 - protein, 14 aa, Homo sapiens
  CDR3 for beta chain variable domain of TCR clone 87908 (TRBV20-1, TRBJ2-7)
CSAKTGTGGYEQYF

SEQ ID NO: 175817 - protein, 12 aa, Homo sapiens
  CDR3 for alpha chain variable domain of TCR clone 87909 (TRAV17, TRAJ49)
CATVTTGNQFYF

SEQ ID NO: 175818 - protein, 13 aa, Homo sapiens
  CDR3 for beta chain variable domain of TCR clone 87909 (TRBV6-3, TRBJ2-3)
CASEGELKDTQYF

SEQ ID NO: 175819 - protein, 13 aa, Homo sapiens
  CDR3 for alpha chain variable domain of TCR clone 87910 (TRAV1-2, TRAJ9)
CAALNTGGFTTIF

SEQ ID NO: 175820 - protein, 13 aa, Homo sapiens
  CDR3 for beta chain variable domain of TCR clone 87910 (TRBV7-3, TRBJ1-1)
CASSQDWGAEAFF

SEQ ID NO: 175821 - protein, 14 aa, Homo sapiens
  CDR3 for alpha chain variable domain of TCR clone 87911 (TRAV1-1, TRAJ16)
CAVNRFSDGQKLLF

SEQ ID NO: 175822 - protein, 15 aa, Homo sapiens
  CDR3 for beta chain variable domain of TCR clone 87911 (TRBV9, TRBJ1-6)
CASSVAGTGDSPLHF

SEQ ID NO: 175823 - protein, 16 aa, Homo sapiens
  CDR3 for alpha chain variable domain of TCR clone 87912 (TRAV13-1, TRAJ48)
CAASIVGNFGNEKLTF

SEQ ID NO: 175824 - protein, 16 aa, Homo sapiens
  CDR3 for beta chain variable domain of TCR clone 87912 (TRBV18, TRBJ1-5)
CASSPYRVEGNQPQHF

SEQ ID NO: 175825 - protein, 14 aa, Homo sapiens
  CDR3 for alpha chain variable domain of TCR clone 87913 (TRAV1-2, TRAJ16)
CAVNRFSDGQKLLF

SEQ ID NO: 175826 - protein, 11 aa, Homo sapiens
  CDR3 for beta chain variable domain of TCR clone 87913 (TRBV12-4, TRBJ2-3)
YASTATDTQYF

SEQ ID NO: 175827 - protein, 12 aa, Homo sapiens
  CDR3 for alpha chain variable domain of TCR clone 87914 (TRAV2, TRAJ33)
CAFMDSTYQLIW

SEQ ID NO: 175828 - protein, 16 aa, Homo sapiens
  CDR3 for beta chain variable domain of TCR clone 87914 (TRBV2, TRBJ2-7)
CASSEPWTGPSYEQYF

SEQ ID NO: 175829 - protein, 15 aa, Homo sapiens
  CDR3 for alpha chain variable domain of TCR clone 87915 (TRAV26-1, TRAJ9)
CIVRESNTGGFKTIF

SEQ ID NO: 175830 - protein, 11 aa, Homo sapiens
  CDR3 for beta chain variable domain of TCR clone 87915 (TRBV7-6, TRBJ2-5)
CASSIQETQYF

SEQ ID NO: 175831 - protein, 15 aa, Homo sapiens
  CDR3 for alpha chain variable domain of TCR clone 87916 (TRAV29/DV5, TRAJ29)
CAASERSSGNTPLVF

SEQ ID NO: 175832 - protein, 13 aa, Homo sapiens
  CDR3 for beta chain variable domain of TCR clone 87916 (TRBV15, TRBJ1-6)
CATSGGLNSPLHF

SEQ ID NO: 175833 - protein, 17 aa, Homo sapiens
  CDR3 for alpha chain variable domain of TCR clone 87917 (TRAV3, TRAJ6)
CAVRDGPRAGGSYIPTF

SEQ ID NO: 175834 - protein, 18 aa, Homo sapiens
  CDR3 for beta chain variable domain of TCR clone 87917 (TRBV12-4, TRBJ2-2)
CASSLVAGTRGRTGELFF

SEQ ID NO: 175835 - protein, 14 aa, Homo sapiens
  CDR3 for alpha chain variable domain of TCR clone 87918 (TRAV12-1, TRAJ12)
CVVTRMDSGYKLIF

SEQ ID NO: 175836 - protein, 14 aa, Homo sapiens
  CDR3 for beta chain variable domain of TCR clone 87918 (TRBV4-1, TRBJ2-7)
CASSPVAGGDEQYF

SEQ ID NO: 175837 - protein, 11 aa, Homo sapiens
  CDR3 for alpha chain variable domain of TCR clone 87919 (TRAV4, TRAJ23)
CLVAPGGKLIF

SEQ ID NO: 175838 - protein, 15 aa, Homo sapiens
  CDR3 for beta chain variable domain of TCR clone 87919 (TRBV7-2, TRBJ2-1)
CASSFQADEYNEPFF

SEQ ID NO: 175839 - protein, 15 aa, Homo sapiens
  CDR3 for alpha chain variable domain of TCR clone 87920 (TRAV21, TRAJ22)
CAVRLFFWFCKATDL

SEQ ID NO: 175840 - protein, 14 aa, Homo sapiens
  CDR3 for beta chain variable domain of TCR clone 87920 (TRBV19, TRBJ1-5)
CASRAPDSFLPQHF

SEQ ID NO: 175841 - protein, 12 aa, Homo sapiens
  CDR3 for alpha chain variable domain of TCR clone 87921 (TRAV13-1, TRAJ48)
CAANFGNGKLTF

SEQ ID NO: 175842 - protein, 13 aa, Homo sapiens
  CDR3 for beta chain variable domain of TCR clone 87921 (TRBV7-3, TRBJ1-1)
CASSQDWGAEAFF

SEQ ID NO: 175843 - protein, 16 aa, Homo sapiens
  CDR3 for alpha chain variable domain of TCR clone 87922 (TRAV3, TRAJ5)
CAVRNLMDTGRRALTF

SEQ ID NO: 175844 - protein, 16 aa, Homo sapiens
  CDR3 for beta chain variable domain of TCR clone 87922 (TRBV4-2, TRBJ2-7)
RASSQEGLANSYEQYF

SEQ ID NO: 175845 - protein, 15 aa, Homo sapiens
  CDR3 for alpha chain variable domain of TCR clone 87923 (TRAV2, TRAJ9)
CAVEDRGTGGFKTIF

SEQ ID NO: 175846 - protein, 14 aa, Homo sapiens
  CDR3 for beta chain variable domain of TCR clone 87923 (TRBV20-1, TRBJ1-1)
CSAQTRIGGTEAFF

SEQ ID NO: 175847 - protein, 15 aa, Homo sapiens
  CDR3 for alpha chain variable domain of TCR clone 87924 (TRAV12-2, TRAJ45)
CAVRRSGGGADGLTF

SEQ ID NO: 175848 - protein, 15 aa, Homo sapiens
  CDR3 for beta chain variable domain of TCR clone 87924 (TRBV20-1, TRBJ2-7)
CSARDRVSGMDEQYF

SEQ ID NO: 175849 - protein, 14 aa, Homo sapiens
  CDR3 for alpha chain variable domain of TCR clone 87925 (TRAV13-2, TRAJ39)
CAENHNNAGNMLTF

SEQ ID NO: 175850 - protein, 13 aa, Homo sapiens
  CDR3 for beta chain variable domain of TCR clone 87925 (TRBV4-3, TRBJ2-1)
CASSQKVERQQFF

SEQ ID NO: 175851 - protein, 16 aa, Homo sapiens
  CDR3 for alpha chain variable domain of TCR clone 87926 (TRAV12-2, TRAJ6)
CAAPLAGSGGSYIPTF

SEQ ID NO: 175852 - protein, 10 aa, Homo sapiens
  CDR3 for beta chain variable domain of TCR clone 87926 (TRBV28, TRBJ1-2)
CASNSDRAVF

SEQ ID NO: 175853 - protein, 12 aa, Homo sapiens
  CDR3 for alpha chain variable domain of TCR clone 87927 (TRAV3, TRAJ39)
CAVIEWSNMLTF

SEQ ID NO: 175854 - protein, 14 aa, Homo sapiens
  CDR3 for beta chain variable domain of TCR clone 87927 (TRBV7-8, TRBJ2-3)
CASSFPHGQDTHYF

SEQ ID NO: 175855 - protein, 16 aa, Homo sapiens
  CDR3 for alpha chain variable domain of TCR clone 87928 (TRAV3, TRAJ10)
CAVRDMRAGGGNKLTI

SEQ ID NO: 175856 - protein, 13 aa, Homo sapiens
  CDR3 for beta chain variable domain of TCR clone 87928 (TRBV6-1, TRBJ1-1)
CASSRQGNTEAFF

SEQ ID NO: 175857 - protein, 18 aa, Homo sapiens
  CDR3 for alpha chain variable domain of TCR clone 87929 (TRAV1-2, TRAJ32)
CAVRVSMNYGGATNKLIF

SEQ ID NO: 175858 - protein, 15 aa, Homo sapiens
  CDR3 for beta chain variable domain of TCR clone 87929 (TRBV2, TRBJ2-1)
CASSEEREGDNEQFF

SEQ ID NO: 175859 - protein, 14 aa, Homo sapiens
  CDR3 for alpha chain variable domain of TCR clone 87930 (TRAV26-1, TRAJ38)
CIADNAGNNRKLSW

SEQ ID NO: 175860 - protein, 14 aa, Homo sapiens
  CDR3 for beta chain variable domain of TCR clone 87930 (TRBV4-1, TRBJ2-2)
CASSQAVNTGELFF

SEQ ID NO: 175861 - protein, 14 aa, Homo sapiens
  CDR3 for alpha chain variable domain of TCR clone 87931 (TRAV1-2, TRAJ16)
CAVNRFSDGQKLLF

SEQ ID NO: 175862 - protein, 16 aa, Homo sapiens
  CDR3 for beta chain variable domain of TCR clone 87931 (TRBV5-1, TRBJ2-7)
CASSWGTGGRAWEQYF

SEQ ID NO: 175863 - protein, 15 aa, Homo sapiens
  CDR3 for alpha chain variable domain of TCR clone 87932 (TRAV4, TRAJ26)
CLVGGFDNYGQNFVF

SEQ ID NO: 175864 - protein, 13 aa, Homo sapiens
  CDR3 for beta chain variable domain of TCR clone 87932 (TRBV20-1, TRBJ2-5)
CSASLTGRETQYF

SEQ ID NO: 175865 - protein, 18 aa, Homo sapiens
  CDR3 for alpha chain variable domain of TCR clone 87933 (TRAV21, TRAJ52)
CAVRPSPAGGTSYGKLTF

SEQ ID NO: 175866 - protein, 17 aa, Homo sapiens
  CDR3 for beta chain variable domain of TCR clone 87933 (TRBV19, TRBJ2-6)
CASSTGQVFSGANVLTF

SEQ ID NO: 175867 - protein, 14 aa, Homo sapiens
  CDR3 for alpha chain variable domain of TCR clone 87934 (TRAV8-1, TRAJ9)
CAVNAWTGGFKTIF

SEQ ID NO: 175868 - protein, 16 aa, Homo sapiens
  CDR3 for beta chain variable domain of TCR clone 87934 (TRBV28, TRBJ2-2)
CASSLEGSSNTGELFF

SEQ ID NO: 175869 - protein, 11 aa, Homo sapiens
  CDR3 for alpha chain variable domain of TCR clone 87935 (TRAV35, TRAJ30)
CAPGGDDKIIL

SEQ ID NO: 175870 - protein, 14 aa, Homo sapiens
  CDR3 for beta chain variable domain of TCR clone 87935 (TRBV7-6, TRBJ2-1)
CASSLGGGADEQFL

SEQ ID NO: 175871 - protein, 11 aa, Homo sapiens
  CDR3 for alpha chain variable domain of TCR clone 87936 (TRAV17, TRAJ9)
CVFTGGFKTIF

SEQ ID NO: 175872 - protein, 12 aa, Homo sapiens
  CDR3 for beta chain variable domain of TCR clone 87936 (TRBV29-1, TRBJ2-3)
CSVTGGADTQYF

SEQ ID NO: 175873 - protein, 14 aa, Homo sapiens
  CDR3 for alpha chain variable domain of TCR clone 87937 (TRAV13-1, TRAJ13)
CAASRAGGYQKVTF

SEQ ID NO: 175874 - protein, 17 aa, Homo sapiens
  CDR3 for beta chain variable domain of TCR clone 87937 (TRBV15, TRBJ1-5)
CATSRAPPGTRNQPQHF

SEQ ID NO: 175875 - protein, 11 aa, Homo sapiens
  CDR3 for alpha chain variable domain of TCR clone 87938 (TRAV21, TRAJ11)
CAVNGYSALTF

SEQ ID NO: 175876 - protein, 16 aa, Homo sapiens
  CDR3 for beta chain variable domain of TCR clone 87938 (TRBV19, TRBJ2-1)
CASSKAGPSSYNEQFF

SEQ ID NO: 175877 - protein, 15 aa, Homo sapiens
  CDR3 for alpha chain variable domain of TCR clone 87939 (TRAV12-2, TRAJ53)
CAVNGGGGSNYKLTF

SEQ ID NO: 175878 - protein, 15 aa, Homo sapiens
  CDR3 for beta chain variable domain of TCR clone 87939 (TRBV19, TRBJ1-5)
CASSDSGPRNQPQHF

SEQ ID NO: 175879 - protein, 12 aa, Homo sapiens
  CDR3 for alpha chain variable domain of TCR clone 87940 (TRAV35, TRAJ30)
CAGLNRDEKIIF

SEQ ID NO: 175880 - protein, 15 aa, Homo sapiens
  CDR3 for beta chain variable domain of TCR clone 87940 (TRBV9, TRBJ1-6)
CASSVAGTGDSPLHF

SEQ ID NO: 175881 - protein, 11 aa, Homo sapiens
  CDR3 for alpha chain variable domain of TCR clone 87941 (TRAV3, TRAJ13)
CAVTSYQKVTF

SEQ ID NO: 175882 - protein, 15 aa, Homo sapiens
  CDR3 for beta chain variable domain of TCR clone 87941 (TRBV7-9, TRBJ2-7)
YASSSSGLAVYEQYF

SEQ ID NO: 175883 - protein, 14 aa, Homo sapiens
  CDR3 for alpha chain variable domain of TCR clone 87942 (TRAV1-2, TRAJ16)
CAVNRFSDGQKPPF

SEQ ID NO: 175884 - protein, 14 aa, Homo sapiens
  CDR3 for beta chain variable domain of TCR clone 87942 (TRBV7-2, TRBJ2-7)
CASSPKTSFYEQYF

SEQ ID NO: 175885 - protein, 16 aa, Homo sapiens
  CDR3 for alpha chain variable domain of TCR clone 87943 (TRAV35, TRAJ28)
CAGQRYSGDGSYQLTF

SEQ ID NO: 175886 - protein, 13 aa, Homo sapiens
  CDR3 for beta chain variable domain of TCR clone 87943 (TRBV19, TRBJ1-2)
CASSQGQVYGYTF

SEQ ID NO: 175887 - protein, 15 aa, Homo sapiens
  CDR3 for alpha chain variable domain of TCR clone 87944 (TRAV2, TRAJ22)
CAVPSRGGSARQLTF

SEQ ID NO: 175888 - protein, 18 aa, Homo sapiens
  CDR3 for beta chain variable domain of TCR clone 87944 (TRBV11-2, TRBJ2-3)
CASSLGGASRGAPNTQYF

SEQ ID NO: 175889 - protein, 14 aa, Homo sapiens
  CDR3 for alpha chain variable domain of TCR clone 87945 (TRAV1-2, TRAJ8)
CAVREDAGFQKLVF

SEQ ID NO: 175890 - protein, 14 aa, Homo sapiens
  CDR3 for beta chain variable domain of TCR clone 87945 (TRBV15, TRBJ2-3)
CATRSGTSTDTQYF

SEQ ID NO: 175891 - protein, 14 aa, Homo sapiens
  CDR3 for alpha chain variable domain of TCR clone 87946 (TRAV9-2, TRAJ39)
CALYIYNAGNMLTF

SEQ ID NO: 175892 - protein, 12 aa, Homo sapiens
  CDR3 for beta chain variable domain of TCR clone 87946 (TRBV12-4, TRBJ1-2)
CASSFIWLHLRF

SEQ ID NO: 175893 - protein, 14 aa, Homo sapiens
  CDR3 for alpha chain variable domain of TCR clone 87947 (TRAV1-2, TRAJ6)
CAVSLSGGSYIPTF

SEQ ID NO: 175894 - protein, 15 aa, Homo sapiens
  CDR3 for beta chain variable domain of TCR clone 87947 (TRBV28, TRBJ2-7)
CASSPGSRGFYEQYF

SEQ ID NO: 175895 - protein, 17 aa, Homo sapiens
  CDR3 for alpha chain variable domain of TCR clone 87948 (TRAV3, TRAJ6)
CAVRDGPRAGGSYIPTF

SEQ ID NO: 175896 - protein, 17 aa, Homo sapiens
  CDR3 for beta chain variable domain of TCR clone 87948 (TRBV7-9, TRBJ2-3)
CASSPTVAGDLTDTQYF

SEQ ID NO: 175897 - protein, 11 aa, Homo sapiens
  CDR3 for alpha chain variable domain of TCR clone 87949 (TRAV2, TRAJ33)
CAVDSNYQLIW

SEQ ID NO: 175898 - protein, 13 aa, Homo sapiens
  CDR3 for beta chain variable domain of TCR clone 87949 (TRBV7-2, TRBJ2-4)
CASSRERANIQYF

SEQ ID NO: 175899 - protein, 11 aa, Homo sapiens
  CDR3 for alpha chain variable domain of TCR clone 87950 (TRAV12-1, TRAJ21)
CVVYNFNKFYF

SEQ ID NO: 175900 - protein, 17 aa, Homo sapiens
  CDR3 for beta chain variable domain of TCR clone 87950 (TRBV7-9, TRBJ2-7)
CASSWQGRWREAYEQYF

SEQ ID NO: 175901 - protein, 13 aa, Homo sapiens
  CDR3 for alpha chain variable domain of TCR clone 87951 (TRAV21, TRAJ27)
CAAGPGNAGKSTF

SEQ ID NO: 175902 - protein, 14 aa, Homo sapiens
  CDR3 for beta chain variable domain of TCR clone 87951 (TRBV7-6, TRBJ2-3)
CASSLGTVTDTQYF

SEQ ID NO: 175903 - protein, 16 aa, Homo sapiens
  CDR3 for alpha chain variable domain of TCR clone 87952 (TRAV20, TRAJ26)
CAVQHRRDNYGQNFVF

SEQ ID NO: 175904 - protein, 15 aa, Homo sapiens
  CDR3 for beta chain variable domain of TCR clone 87952 (TRBV7-2, TRBJ2-7)
CASSWGQGAIYEQYS

SEQ ID NO: 175905 - protein, 12 aa, Homo sapiens
  CDR3 for alpha chain variable domain of TCR clone 87953 (TRAV2, TRAJ5)
CALDTGRRALTF

SEQ ID NO: 175906 - protein, 15 aa, Homo sapiens
  CDR3 for beta chain variable domain of TCR clone 87953 (TRBV10-3, TRBJ2-1)
CASSDVQDRAYEQFF

SEQ ID NO: 175907 - protein, 14 aa, Homo sapiens
  CDR3 for alpha chain variable domain of TCR clone 87954 (TRAV35, TRAJ33)
CAGSSQDSNYQLIC

SEQ ID NO: 175908 - protein, 14 aa, Homo sapiens
  CDR3 for beta chain variable domain of TCR clone 87954 (TRBV20-1, TRBJ2-1)
CSAQIGGSANEQFF

SEQ ID NO: 175909 - protein, 11 aa, Homo sapiens
  CDR3 for alpha chain variable domain of TCR clone 87955 (TRAV35, TRAJ30)
CAGEREDKIIF

SEQ ID NO: 175910 - protein, 14 aa, Homo sapiens
  CDR3 for beta chain variable domain of TCR clone 87955 (TRBV15, TRBJ2-5)
CATSGDRGQETQYF

SEQ ID NO: 175911 - protein, 12 aa, Homo sapiens
  CDR3 for alpha chain variable domain of TCR clone 87956 (TRAV12-1, TRAJ6)
CVVSERSYIPTF

SEQ ID NO: 175912 - protein, 13 aa, Homo sapiens
  CDR3 for beta chain variable domain of TCR clone 87956 (TRBV14, TRBJ1-2)
CASSQQGYYGDTF

SEQ ID NO: 175913 - protein, 14 aa, Homo sapiens
  CDR3 for alpha chain variable domain of TCR clone 87957 (TRAV2, TRAJ9)
CAVDPNTGGLKTIF

SEQ ID NO: 175914 - protein, 14 aa, Homo sapiens
  CDR3 for beta chain variable domain of TCR clone 87957 (TRBV27, TRBJ1-1)
CASSPQGKRAEAFF

SEQ ID NO: 175915 - protein, 14 aa, Homo sapiens
  CDR3 for alpha chain variable domain of TCR clone 87958 (TRAV1-2, TRAJ6)
CAVRSSGGSYIPTF

SEQ ID NO: 175916 - protein, 13 aa, Homo sapiens
  CDR3 for beta chain variable domain of TCR clone 87958 (TRBV19, TRBJ1-2)
CASSVPGQDGYTF

SEQ ID NO: 175917 - protein, 22 aa, Homo sapiens
  CDR3 for alpha chain variable domain of TCR clone 87959 (TRAV17, TRAJ28)
CFLLLCYGPAQGLWGWEFQLTF

SEQ ID NO: 175918 - protein, 14 aa, Homo sapiens
  CDR3 for beta chain variable domain of TCR clone 87959 (TRBV13, TRBJ2-5)
CASSLDYPQETQYF

SEQ ID NO: 175919 - protein, 11 aa, Homo sapiens
  CDR3 for alpha chain variable domain of TCR clone 87960 (TRAV12-1, TRAJ43)
CVEYDNNDMRF

SEQ ID NO: 175920 - protein, 15 aa, Homo sapiens
  CDR3 for beta chain variable domain of TCR clone 87960 (TRBV18, TRBJ2-5)
CASSPRASEAETQCF

SEQ ID NO: 175921 - protein, 12 aa, Homo sapiens
  CDR3 for alpha chain variable domain of TCR clone 87961 (TRAV1-1, TRAJ43)
CAPRVSSNDMRF

SEQ ID NO: 175922 - protein, 15 aa, Homo sapiens
  CDR3 for beta chain variable domain of TCR clone 87961 (TRBV19, TRBJ2-7)
CASRPTPGLSIEQYF

SEQ ID NO: 175923 - protein, 12 aa, Homo sapiens
  CDR3 for alpha chain variable domain of TCR clone 87962 (TRAV13-1, TRAJ21)
CAAKGGFNKFYF

SEQ ID NO: 175924 - protein, 14 aa, Homo sapiens
  CDR3 for beta chain variable domain of TCR clone 87962 (TRBV23-1, TRBJ2-5)
CASSFLRSQETQYF

SEQ ID NO: 175925 - protein, 10 aa, Homo sapiens
  CDR3 for alpha chain variable domain of TCR clone 87963 (TRAV1-2, TRAJ23)
CAGQGGKLIF

SEQ ID NO: 175926 - protein, 16 aa, Homo sapiens
  CDR3 for beta chain variable domain of TCR clone 87963 (TRBV11-2, TRBJ1-1)
CASSLRQGGERSKAFF

SEQ ID NO: 175927 - protein, 13 aa, Homo sapiens
  CDR3 for alpha chain variable domain of TCR clone 87964 (TRAV1-2, TRAJ9)
CAVLNTGGFKTIF

SEQ ID NO: 175928 - protein, 13 aa, Homo sapiens
  CDR3 for beta chain variable domain of TCR clone 87964 (TRBV19, TRBJ2-7)
SASRKAGGSEQYF

SEQ ID NO: 175929 - protein, 13 aa, Homo sapiens
  CDR3 for alpha chain variable domain of TCR clone 87965 (TRAV2, TRAJ40)
CAVVTSGTYKYIF

SEQ ID NO: 175930 - protein, 15 aa, Homo sapiens
  CDR3 for beta chain variable domain of TCR clone 87965 (TRBV7-8, TRBJ1-5)
CASSLERRGLEPQHF

SEQ ID NO: 175931 - protein, 14 aa, Homo sapiens
  CDR3 for alpha chain variable domain of TCR clone 87966 (TRAV13-1, TRAJ16)
CAAAYFFRWPEAAL

SEQ ID NO: 175932 - protein, 14 aa, Homo sapiens
  CDR3 for beta chain variable domain of TCR clone 87966 (TRBV4-2, TRBJ2-1)
CASGLDRAYNEQFF

SEQ ID NO: 175933 - protein, 14 aa, Homo sapiens
  CDR3 for alpha chain variable domain of TCR clone 87967 (TRAV13-1, TRAJ44)
CAAKATGTASKLTF

SEQ ID NO: 175934 - protein, 16 aa, Homo sapiens
  CDR3 for beta chain variable domain of TCR clone 87967 (TRBV7-9, TRBJ2-6)
CASSLKGPLRANVLPF

SEQ ID NO: 175935 - protein, 14 aa, Homo sapiens
  CDR3 for alpha chain variable domain of TCR clone 87968 (TRAV12-2, TRAJ49)
CAVTLGLYGNQFYF

SEQ ID NO: 175936 - protein, 20 aa, Homo sapiens
  CDR3 for beta chain variable domain of TCR clone 87968 (TRBV28, TRBJ2-1)
CASTPIGRSPGLAGGNEQFF

SEQ ID NO: 175937 - protein, 18 aa, Homo sapiens
  CDR3 for alpha chain variable domain of TCR clone 87969 (TRAV21, TRAJ52)
CAVRPSPAGGTSYGKLTF

SEQ ID NO: 175938 - protein, 15 aa, Homo sapiens
  CDR3 for beta chain variable domain of TCR clone 87969 (TRBV7-9, TRBJ2-7)
CASSSSGLADYEQYF

SEQ ID NO: 175939 - protein, 14 aa, Homo sapiens
  CDR3 for alpha chain variable domain of TCR clone 87970 (TRAV1-2, TRAJ16)
CAVNRFSDGQKLLF

SEQ ID NO: 175940 - protein, 13 aa, Homo sapiens
  CDR3 for beta chain variable domain of TCR clone 87970 (TRBV10-3, TRBJ1-2)
CAISERDSYGDTF

SEQ ID NO: 175941 - protein, 14 aa, Homo sapiens
  CDR3 for alpha chain variable domain of TCR clone 87971 (TRAV12-1, TRAJ3)
CVVSGYSSASKIIF

SEQ ID NO: 175942 - protein, 14 aa, Homo sapiens
  CDR3 for beta chain variable domain of TCR clone 87971 (TRBV6-6, TRBJ1-3)
CASSRQGAGNTIYF

SEQ ID NO: 175943 - protein, 14 aa, Homo sapiens
  CDR3 for alpha chain variable domain of TCR clone 87972 (TRAV12-3, TRAJ12)
CAMSRMDSSYKLIF

SEQ ID NO: 175944 - protein, 14 aa, Homo sapiens
  CDR3 for beta chain variable domain of TCR clone 87972 (TRBV20-1, TRBJ1-4)
CSARSGQGNEKLFF

SEQ ID NO: 175945 - protein, 17 aa, Homo sapiens
  CDR3 for alpha chain variable domain of TCR clone 87973 (TRAV3, TRAJ42)
CAVRDRDYGGSQGNLIF

SEQ ID NO: 175946 - protein, 16 aa, Homo sapiens
  CDR3 for beta chain variable domain of TCR clone 87973 (TRBV2, TRBJ2-1)
CASSVGGSLSYNEQFF

SEQ ID NO: 175947 - protein, 14 aa, Homo sapiens
  CDR3 for alpha chain variable domain of TCR clone 87974 (TRAV1-2, TRAJ8)
CAVREDTGFQKLVF

SEQ ID NO: 175948 - protein, 12 aa, Homo sapiens
  CDR3 for beta chain variable domain of TCR clone 87974 (TRBV11-2, TRBJ2-2)
CASSLGGGDLFF

SEQ ID NO: 175949 - protein, 22 aa, Homo sapiens
  CDR3 for alpha chain variable domain of TCR clone 87975 (TRAV3, TRAJ38)
CAVGDCLNAGNNHIQNPDPAVY

SEQ ID NO: 175950 - protein, 19 aa, Homo sapiens
  CDR3 for beta chain variable domain of TCR clone 87975 (TRBV7-2, TRBJ2-3)
CASSFLSRNWGGGTDTQYF

SEQ ID NO: 175951 - protein, 12 aa, Homo sapiens
  CDR3 for alpha chain variable domain of TCR clone 87976 (TRAV16, TRAJ20)
CSGPSNDYKLSF

SEQ ID NO: 175952 - protein, 15 aa, Homo sapiens
  CDR3 for beta chain variable domain of TCR clone 87976 (TRBV5-1, TRBJ2-2)
CASSRVGSDTGELFF

SEQ ID NO: 175953 - protein, 15 aa, Homo sapiens
  CDR3 for alpha chain variable domain of TCR clone 87977 (TRAV12-2, TRAJ53)
CAVNGWGGSNYKLTF

SEQ ID NO: 175954 - protein, 17 aa, Homo sapiens
  CDR3 for beta chain variable domain of TCR clone 87977 (TRBV7-3, TRBJ2-3)
CASSLMKRMRGADTQYF

SEQ ID NO: 175955 - protein, 12 aa, Homo sapiens
  CDR3 for alpha chain variable domain of TCR clone 87978 (TRAV1-1, TRAJ8)
CAGGTGFQKLVF

SEQ ID NO: 175956 - protein, 15 aa, Homo sapiens
  CDR3 for beta chain variable domain of TCR clone 87978 (TRBV2, TRBJ2-3)
CASSDFEKATDTQYF

SEQ ID NO: 175957 - protein, 11 aa, Homo sapiens
  CDR3 for alpha chain variable domain of TCR clone 87979 (TRAV2, TRAJ33)
CAVDSNYQLIW

SEQ ID NO: 175958 - protein, 14 aa, Homo sapiens
  CDR3 for beta chain variable domain of TCR clone 87979 (TRBV11-2, TRBJ2-3)
CTSSRLARTDTQYF

SEQ ID NO: 175959 - protein, 14 aa, Homo sapiens
  CDR3 for alpha chain variable domain of TCR clone 87980 (TRAV29/DV5, TRAJ45)
CAASFRGGADGLTF

SEQ ID NO: 175960 - protein, 11 aa, Homo sapiens
  CDR3 for beta chain variable domain of TCR clone 87980 (TRBV11-2, TRBJ2-2)
CASSLHGELFF

SEQ ID NO: 175961 - protein, 14 aa, Homo sapiens
  CDR3 for alpha chain variable domain of TCR clone 87981 (TRAV8-2, TRAJ37)
CVVSISGNTGKLIF

SEQ ID NO: 175962 - protein, 13 aa, Homo sapiens
  CDR3 for beta chain variable domain of TCR clone 87981 (TRBV7-3, TRBJ1-1)
CASSQDWGAEAFF

SEQ ID NO: 175963 - protein, 15 aa, Homo sapiens
  CDR3 for alpha chain variable domain of TCR clone 87982 (TRAV3, TRAJ17)
CAVRDTGAAGNKLTF

SEQ ID NO: 175964 - protein, 17 aa, Homo sapiens
  CDR3 for beta chain variable domain of TCR clone 87982 (TRBV11-2, TRBJ2-1)
CASSLYPPGVEYNEQFF

SEQ ID NO: 175965 - protein, 15 aa, Homo sapiens
  CDR3 for alpha chain variable domain of TCR clone 87983 (TRAV3, TRAJ20)
CAVRDIKLSDYKLSF

SEQ ID NO: 175966 - protein, 15 aa, Homo sapiens
  CDR3 for beta chain variable domain of TCR clone 87983 (TRBV12-4, TRBJ2-5)
CASSPPTGLQETQYF

SEQ ID NO: 175967 - protein, 16 aa, Homo sapiens
  CDR3 for alpha chain variable domain of TCR clone 87984 (TRAV12-3, TRAJ53)
CAMSPGSGGSNYKLTF

SEQ ID NO: 175968 - protein, 17 aa, Homo sapiens
  CDR3 for beta chain variable domain of TCR clone 87984 (TRBV4-1, TRBJ1-4)
CASSQEGPRGVEEKLFF

SEQ ID NO: 175969 - protein, 10 aa, Homo sapiens
  CDR3 for alpha chain variable domain of TCR clone 87985 (TRAV39, TRAJ44)
SAGTASKLTF

SEQ ID NO: 175970 - protein, 13 aa, Homo sapiens
  CDR3 for beta chain variable domain of TCR clone 87985 (TRBV7-3, TRBJ1-1)
CASSQDWGAEAFF

SEQ ID NO: 175971 - protein, 16 aa, Homo sapiens
  CDR3 for alpha chain variable domain of TCR clone 87986 (TRAV14/DV4, TRAJ53)
CAMREGGGGSNYKLTF

SEQ ID NO: 175972 - protein, 13 aa, Homo sapiens
  CDR3 for beta chain variable domain of TCR clone 87986 (TRBV7-2, TRBJ1-1)
CASNLKGAKVAFF

SEQ ID NO: 175973 - protein, 16 aa, Homo sapiens
  CDR3 for alpha chain variable domain of TCR clone 87987 (TRAV30, TRAJ24)
CGTEIVDAYSWGKFQF

SEQ ID NO: 175974 - protein, 16 aa, Homo sapiens
  CDR3 for beta chain variable domain of TCR clone 87987 (TRBV7-3, TRBJ2-3)
ELSLMKRMRGADTQYF

SEQ ID NO: 175975 - protein, 11 aa, Homo sapiens
  CDR3 for alpha chain variable domain of TCR clone 87988 (TRAV23/DV6, TRAJ48)
CAPRWGEKLTF

SEQ ID NO: 175976 - protein, 13 aa, Homo sapiens
  CDR3 for beta chain variable domain of TCR clone 87988 (TRBV12-4, TRBJ2-5)
CASSPGTEETQFF

SEQ ID NO: 175977 - protein, 14 aa, Homo sapiens
  CDR3 for alpha chain variable domain of TCR clone 87989 (TRAV1-1, TRAJ23)
CAVSIYNQGGKLIF

SEQ ID NO: 175978 - protein, 17 aa, Homo sapiens
  CDR3 for beta chain variable domain of TCR clone 87989 (TRBV11-2, TRBJ2-1)
CASSLYPPGVEYNEQFF

SEQ ID NO: 175979 - protein, 13 aa, Homo sapiens
  CDR3 for alpha chain variable domain of TCR clone 87990 (TRAV8-3, TRAJ43)
CAVVPYNNNDMRF

SEQ ID NO: 175980 - protein, 17 aa, Homo sapiens
  CDR3 for beta chain variable domain of TCR clone 87990 (TRBV7-7, TRBJ1-1)
CACIGDRPNLGVTEAFF

SEQ ID NO: 175981 - protein, 12 aa, Homo sapiens
  CDR3 for alpha chain variable domain of TCR clone 87991 (TRAV26-1, TRAJ17)
CISQSCRQQANF

SEQ ID NO: 175982 - protein, 16 aa, Homo sapiens
  CDR3 for beta chain variable domain of TCR clone 87991 (TRBV28, TRBJ1-4)
CASSSGTGAANEKLFF

SEQ ID NO: 175983 - protein, 14 aa, Homo sapiens
  CDR3 for alpha chain variable domain of TCR clone 87992 (TRAV12-2, TRAJ13)
CAVKKTGGYQKVTF

SEQ ID NO: 175984 - protein, 14 aa, Homo sapiens
  CDR3 for beta chain variable domain of TCR clone 87992 (TRBV27, TRBJ2-1)
CQSNGGGSSNEQFF

SEQ ID NO: 175985 - protein, 12 aa, Homo sapiens
  CDR3 for alpha chain variable domain of TCR clone 87993 (TRAV20, TRAJ39)
CAVGNAGNMLTF

SEQ ID NO: 175986 - protein, 17 aa, Homo sapiens
  CDR3 for beta chain variable domain of TCR clone 87993 (TRBV4-1, TRBJ2-3)
CSSSQGYVSGGTDTQYF

SEQ ID NO: 175987 - protein, 12 aa, Homo sapiens
  CDR3 for alpha chain variable domain of TCR clone 87994 (TRAV12-2, TRAJ31)
CAVNTPDARLIF

SEQ ID NO: 175988 - protein, 17 aa, Homo sapiens
  CDR3 for beta chain variable domain of TCR clone 87994 (TRBV20-1, TRBJ1-6)
CSARGGYTFSYNSPLHF

SEQ ID NO: 175989 - protein, 14 aa, Homo sapiens
  CDR3 for alpha chain variable domain of TCR clone 87995 (TRAV17, TRAJ6)
CATDASGGGYIPTF

SEQ ID NO: 175990 - protein, 19 aa, Homo sapiens
  CDR3 for beta chain variable domain of TCR clone 87995 (TRBV4-3, TRBJ2-7)
CASSQEFIGWQVTPYEQYF

SEQ ID NO: 175991 - protein, 23 aa, Homo sapiens
  CDR3 for alpha chain variable domain of TCR clone 87996 (TRAV20, TRAJ32)
CAVDGKVVLQTSSSLELALCLLS

SEQ ID NO: 175992 - protein, 16 aa, Homo sapiens
  CDR3 for beta chain variable domain of TCR clone 87996 (TRBV19, TRBJ2-2)
CASRSPGTGATGELFF

SEQ ID NO: 175993 - protein, 12 aa, Homo sapiens
  CDR3 for alpha chain variable domain of TCR clone 87997 (TRAV12-1, TRAJ20)
CVVNPHDYKLSF

SEQ ID NO: 175994 - protein, 12 aa, Homo sapiens
  CDR3 for beta chain variable domain of TCR clone 87997 (TRBV11-2, TRBJ2-2)
CASSLGGGELFF

SEQ ID NO: 175995 - protein, 15 aa, Homo sapiens
  CDR3 for alpha chain variable domain of TCR clone 87998 (TRAV3, TRAJ22)
CAVRGRGGSARQLTF

SEQ ID NO: 175996 - protein, 15 aa, Homo sapiens
  CDR3 for beta chain variable domain of TCR clone 87998 (TRBV27, TRBJ2-1)
CASSNGGGSSNEQFF

SEQ ID NO: 175997 - protein, 13 aa, Homo sapiens
  CDR3 for alpha chain variable domain of TCR clone 87999 (TRAV17, TRAJ5)
CAPMDTGRRALTF

SEQ ID NO: 175998 - protein, 15 aa, Homo sapiens
  CDR3 for beta chain variable domain of TCR clone 87999 (TRBV7-2, TRBJ2-2)
CASRRPGQNTGELFF

SEQ ID NO: 175999 - protein, 15 aa, Homo sapiens
  CDR3 for alpha chain variable domain of TCR clone 88000 (TRAV3, TRAJ5)
CAVRNRKTGRRALTF

SEQ ID NO: 176000 - protein, 15 aa, Homo sapiens
  CDR3 for beta chain variable domain of TCR clone 88000 (TRBV7-8, TRBJ2-1)
CASSLADSLYNEQFF

SEQ ID NO: 176001 - protein, 12 aa, Homo sapiens
  CDR3 for alpha chain variable domain of TCR clone 88001 (TRAV30, TRAJ43)
CGTEERGNDMRF

SEQ ID NO: 176002 - protein, 13 aa, Homo sapiens
  CDR3 for beta chain variable domain of TCR clone 88001 (TRBV7-9, TRBJ2-3)
CANSPGSTDTQYF

SEQ ID NO: 176003 - protein, 13 aa, Homo sapiens
  CDR3 for alpha chain variable domain of TCR clone 88002 (TRAV8-3, TRAJ48)
CAVVRFGNEKLTF

SEQ ID NO: 176004 - protein, 16 aa, Homo sapiens
  CDR3 for beta chain variable domain of TCR clone 88002 (TRBV20-1, TRBJ2-5)
CSARDFASGIQVTQYF

SEQ ID NO: 176005 - protein, 17 aa, Homo sapiens
  CDR3 for alpha chain variable domain of TCR clone 88003 (TRAV3, TRAJ6)
CAVRDGPRAGGSDIPTF

SEQ ID NO: 176006 - protein, 16 aa, Homo sapiens
  CDR3 for beta chain variable domain of TCR clone 88003 (TRBV12-4, TRBJ2-7)
CASSLIGGTGTYEQYF

SEQ ID NO: 176007 - protein, 12 aa, Homo sapiens
  CDR3 for alpha chain variable domain of TCR clone 88004 (TRAV25, TRAJ20)
CAGRSNDYKLSF

SEQ ID NO: 176008 - protein, 15 aa, Homo sapiens
  CDR3 for beta chain variable domain of TCR clone 88004 (TRBV7-6, TRBJ2-7)
CASSGRRDTFGEQYC

SEQ ID NO: 176009 - protein, 14 aa, Homo sapiens
  CDR3 for alpha chain variable domain of TCR clone 88005 (TRAV1-2, TRAJ16)
CAVNRFSDGQKLLF

SEQ ID NO: 176010 - protein, 14 aa, Homo sapiens
  CDR3 for beta chain variable domain of TCR clone 88005 (TRBV20-1, TRBJ2-7)
CSAISREASYEQYF

SEQ ID NO: 176011 - protein, 13 aa, Homo sapiens
  CDR3 for alpha chain variable domain of TCR clone 88006 (TRAV21, TRAJ15)
CAVRNQAGTALIF

SEQ ID NO: 176012 - protein, 16 aa, Homo sapiens
  CDR3 for beta chain variable domain of TCR clone 88006 (TRBV20-1, TRBJ2-5)
FSPGGTSGGYMETQYF

SEQ ID NO: 176013 - protein, 14 aa, Homo sapiens
  CDR3 for alpha chain variable domain of TCR clone 88007 (TRAV2, TRAJ9)
CAVEDRSGGFKTIF

SEQ ID NO: 176014 - protein, 15 aa, Homo sapiens
  CDR3 for beta chain variable domain of TCR clone 88007 (TRBV12-4, TRBJ1-2)
CASSPITGGGYGYTF

SEQ ID NO: 176015 - protein, 13 aa, Homo sapiens
  CDR3 for alpha chain variable domain of TCR clone 88008 (TRAV21, TRAJ36)
CAVIKTGANNLFF

SEQ ID NO: 176016 - protein, 14 aa, Homo sapiens
  CDR3 for beta chain variable domain of TCR clone 88008 (TRBV7-3, TRBJ2-1)
CASSLTGLNNEQFF

SEQ ID NO: 176017 - protein, 20 aa, Homo sapiens
  CDR3 for alpha chain variable domain of TCR clone 88009 (TRAV12-3, TRAJ41)
SLFIRDSQPSDSATPEALNF

SEQ ID NO: 176018 - protein, 15 aa, Homo sapiens
  CDR3 for beta chain variable domain of TCR clone 88009 (TRBV5-1, TRBJ2-7)
CASNLDLTSSYEQYF

SEQ ID NO: 176019 - protein, 15 aa, Homo sapiens
  CDR3 for alpha chain variable domain of TCR clone 88010 (TRAV25, TRAJ53)
CAATGGGGSNYKLTF

SEQ ID NO: 176020 - protein, 13 aa, Homo sapiens
  CDR3 for beta chain variable domain of TCR clone 88010 (TRBV12-5, TRBJ2-3)
CASGDRQSDTQYF

SEQ ID NO: 176021 - protein, 15 aa, Homo sapiens
  CDR3 for alpha chain variable domain of TCR clone 88011 (TRAV4, TRAJ39)
CLVGPNHNAGNMLTF

SEQ ID NO: 176022 - protein, 13 aa, Homo sapiens
  CDR3 for beta chain variable domain of TCR clone 88011 (TRBV11-2, TRBJ2-5)
CASSSTGEETQYF

SEQ ID NO: 176023 - protein, 16 aa, Homo sapiens
  CDR3 for alpha chain variable domain of TCR clone 88012 (TRAV1-2, TRAJ6)
CAVRDQGTGGSYIPTF

SEQ ID NO: 176024 - protein, 19 aa, Homo sapiens
  CDR3 for beta chain variable domain of TCR clone 88012 (TRBV28, TRBJ2-7)
CASSYSGTSRLGWVYEQYF

SEQ ID NO: 176025 - protein, 18 aa, Homo sapiens
  CDR3 for alpha chain variable domain of TCR clone 88013 (TRAV17, TRAJ45)
CATSLDLYSGGGADGLTF

SEQ ID NO: 176026 - protein, 13 aa, Homo sapiens
  CDR3 for beta chain variable domain of TCR clone 88013 (TRBV7-3, TRBJ1-1)
CASSQDWGAEAFF

SEQ ID NO: 176027 - protein, 14 aa, Homo sapiens
  CDR3 for alpha chain variable domain of TCR clone 88014 (TRAV26-1, TRAJ21)
CIVRPPYNFNKFYF

SEQ ID NO: 176028 - protein, 13 aa, Homo sapiens
  CDR3 for beta chain variable domain of TCR clone 88014 (TRBV7-9, TRBJ1-2)
CASSLKQNYGYTF

SEQ ID NO: 176029 - protein, 11 aa, Homo sapiens
  CDR3 for alpha chain variable domain of TCR clone 88015 (TRAV3, TRAJ18)
CAVRLTEAQPC

SEQ ID NO: 176030 - protein, 15 aa, Homo sapiens
  CDR3 for beta chain variable domain of TCR clone 88015 (TRBV7-2, TRBJ2-1)
CASTHGTGIYNEQFF

SEQ ID NO: 176031 - protein, 14 aa, Homo sapiens
  CDR3 for alpha chain variable domain of TCR clone 88016 (TRAV2, TRAJ9)
YAVEDRSGGFKTIF

SEQ ID NO: 176032 - protein, 14 aa, Homo sapiens
  CDR3 for beta chain variable domain of TCR clone 88016 (TRBV4-1, TRBJ2-2)
CASSQAVNTGELFF

SEQ ID NO: 176033 - protein, 13 aa, Homo sapiens
  CDR3 for alpha chain variable domain of TCR clone 88017 (TRAV30, TRAJ24)
CGTVTDSWGKLQF

SEQ ID NO: 176034 - protein, 14 aa, Homo sapiens
  CDR3 for beta chain variable domain of TCR clone 88017 (TRBV6-3, TRBJ2-2)
CASTYTPDTGELFF

SEQ ID NO: 176035 - protein, 11 aa, Homo sapiens
  CDR3 for alpha chain variable domain of TCR clone 88018 (TRAV21, TRAJ34)
CAVTNTDKLIF

SEQ ID NO: 176036 - protein, 15 aa, Homo sapiens
  CDR3 for beta chain variable domain of TCR clone 88018 (TRBV2, TRBJ2-1)
CASSELAGSYNEQFF

SEQ ID NO: 176037 - protein, 13 aa, Homo sapiens
  CDR3 for alpha chain variable domain of TCR clone 88019 (TRAV17, TRAJ9)
CATDYTGGFKTIF

SEQ ID NO: 176038 - protein, 20 aa, Homo sapiens
  CDR3 for beta chain variable domain of TCR clone 88019 (TRBV28, TRBJ2-1)
CASTPIGRSPGIAGGNEQFF

SEQ ID NO: 176039 - protein, 12 aa, Homo sapiens
  CDR3 for alpha chain variable domain of TCR clone 88020 (TRAV8-3, TRAJ26)
CAGDNYGQNFVF

SEQ ID NO: 176040 - protein, 15 aa, Homo sapiens
  CDR3 for beta chain variable domain of TCR clone 88020 (TRBV20-1, TRBJ2-2)
CSAIPGHSNTGELFF

SEQ ID NO: 176041 - protein, 12 aa, Homo sapiens
  CDR3 for alpha chain variable domain of TCR clone 88021 (TRAV1-1, TRAJ8)
CAGGTGFQKLVF

SEQ ID NO: 176042 - protein, 14 aa, Homo sapiens
  CDR3 for beta chain variable domain of TCR clone 88021 (TRBV4-1, TRBJ2-2)
CASSQAVNTGELFF

SEQ ID NO: 176043 - protein, 15 aa, Homo sapiens
  CDR3 for alpha chain variable domain of TCR clone 88022 (TRAV13-2, TRAJ35)
YAESPNIGFGNVLHC

SEQ ID NO: 176044 - protein, 13 aa, Homo sapiens
  CDR3 for beta chain variable domain of TCR clone 88022 (TRBV10-2, TRBJ2-5)
CASSTLARETQYF

SEQ ID NO: 176045 - protein, 12 aa, Homo sapiens
  CDR3 for alpha chain variable domain of TCR clone 88023 (TRAV12-2, TRAJ30)
CAVRNRDDKIIF

SEQ ID NO: 176046 - protein, 15 aa, Homo sapiens
  CDR3 for beta chain variable domain of TCR clone 88023 (TRBV6-3, TRBJ1-5)
CASRVDRWSKQPQHF

SEQ ID NO: 176047 - protein, 16 aa, Homo sapiens
  CDR3 for alpha chain variable domain of TCR clone 88024 (TRAV3, TRAJ37)
CAVRGKGSGNTGKLIF

SEQ ID NO: 176048 - protein, 13 aa, Homo sapiens
  CDR3 for beta chain variable domain of TCR clone 88024 (TRBV3-1, TRBJ2-2)
CASLARGSGELFF

SEQ ID NO: 176049 - protein, 11 aa, Homo sapiens
  CDR3 for alpha chain variable domain of TCR clone 88025 (TRAV35, TRAJ52)
CAGTPKGKLTF

SEQ ID NO: 176050 - protein, 15 aa, Homo sapiens
  CDR3 for beta chain variable domain of TCR clone 88025 (TRBV11-2, TRBJ2-1)
CASSKNRGLIYEQFF

SEQ ID NO: 176051 - protein, 13 aa, Homo sapiens
  CDR3 for alpha chain variable domain of TCR clone 88026 (TRAV21, TRAJ20)
CAVGLRVDYKLSF

SEQ ID NO: 176052 - protein, 14 aa, Homo sapiens
  CDR3 for beta chain variable domain of TCR clone 88026 (TRBV12-4, TRBJ1-1)
CASSLNDMNTEAFF

SEQ ID NO: 176053 - protein, 13 aa, Homo sapiens
  CDR3 for alpha chain variable domain of TCR clone 88027 (TRAV27, TRAJ27)
CAGGITNEGKSTF

SEQ ID NO: 176054 - protein, 13 aa, Homo sapiens
  CDR3 for beta chain variable domain of TCR clone 88027 (TRBV20-1, TRBJ1-2)
CSASLGVGYGYTF

SEQ ID NO: 176055 - protein, 12 aa, Homo sapiens
  CDR3 for alpha chain variable domain of TCR clone 88028 (TRAV13-1, TRAJ15)
CAASLAGTALIF

SEQ ID NO: 176056 - protein, 14 aa, Homo sapiens
  CDR3 for beta chain variable domain of TCR clone 88028 (TRBV19, TRBJ2-2)
CASSTLHRSGELFF

SEQ ID NO: 176057 - protein, 14 aa, Homo sapiens
  CDR3 for alpha chain variable domain of TCR clone 88029 (TRAV35, TRAJ33)
CAGSSQDSNYQLIW

SEQ ID NO: 176058 - protein, 12 aa, Homo sapiens
  CDR3 for beta chain variable domain of TCR clone 88029 (TRBV7-3, TRBJ2-1)
CASSFQSGPQFF

SEQ ID NO: 176059 - protein, 15 aa, Homo sapiens
  CDR3 for alpha chain variable domain of TCR clone 88030 (TRAV25, TRAJ52)
CAGRPGGTSYGKPTF

SEQ ID NO: 176060 - protein, 17 aa, Homo sapiens
  CDR3 for beta chain variable domain of TCR clone 88030 (TRBV7-8, TRBJ2-6)
CASSAGTGGAGANVLTF

SEQ ID NO: 176061 - protein, 17 aa, Homo sapiens
  CDR3 for alpha chain variable domain of TCR clone 88031 (TRAV13-1, TRAJ52)
CAASSGAGGTSYGKLTF

SEQ ID NO: 176062 - protein, 16 aa, Homo sapiens
  CDR3 for beta chain variable domain of TCR clone 88031 (TRBV29-1, TRBJ2-7)
CSVEDAEDGTAYEQYF

SEQ ID NO: 176063 - protein, 15 aa, Homo sapiens
  CDR3 for alpha chain variable domain of TCR clone 88032 (TRAV12-2, TRAJ43)
CAFDMRFGAGTRLTV

SEQ ID NO: 176064 - protein, 18 aa, Homo sapiens
  CDR3 for beta chain variable domain of TCR clone 88032 (TRBV20-1, TRBJ2-3)
WSASGLAGGPGTTDTQYF

SEQ ID NO: 176065 - protein, 13 aa, Homo sapiens
  CDR3 for alpha chain variable domain of TCR clone 88033 (TRAV35, TRAJ43)
CAVYPYNNNDMRF

SEQ ID NO: 176066 - protein, 15 aa, Homo sapiens
  CDR3 for beta chain variable domain of TCR clone 88033 (TRBV25-1, TRBJ1-4)
CASSKRIATNEKLFF

SEQ ID NO: 176067 - protein, 10 aa, Homo sapiens
  CDR3 for alpha chain variable domain of TCR clone 88034 (TRAV22, TRAJ15)
CAATGTALIF

SEQ ID NO: 176068 - protein, 15 aa, Homo sapiens
  CDR3 for beta chain variable domain of TCR clone 88034 (TRBV7-3, TRBJ2-1)
CASSPTGGGEVEQFF

SEQ ID NO: 176069 - protein, 17 aa, Homo sapiens
  CDR3 for alpha chain variable domain of TCR clone 88035 (TRAV3, TRAJ6)
CAVRDGPRAGGSYIPTF

SEQ ID NO: 176070 - protein, 13 aa, Homo sapiens
  CDR3 for beta chain variable domain of TCR clone 88035 (TRBV7-2, TRBJ2-1)
CASSPGTSNEQFF

SEQ ID NO: 176071 - protein, 15 aa, Homo sapiens
  CDR3 for alpha chain variable domain of TCR clone 88036 (TRAV25, TRAJ52)
CPGRPGGTSYGKLTF

SEQ ID NO: 176072 - protein, 17 aa, Homo sapiens
  CDR3 for beta chain variable domain of TCR clone 88036 (TRBV7-8, TRBJ2-6)
CASSAGTGGAGANVLTF

SEQ ID NO: 176073 - protein, 18 aa, Homo sapiens
  CDR3 for alpha chain variable domain of TCR clone 88037 (TRAV12-3, TRAJ52)
CAMSRTNAGGTIYGKLTF

SEQ ID NO: 176074 - protein, 17 aa, Homo sapiens
  CDR3 for beta chain variable domain of TCR clone 88037 (TRBV7-3, TRBJ2-3)
CASSLMKWMRGADTQYF

SEQ ID NO: 176075 - protein, 16 aa, Homo sapiens
  CDR3 for alpha chain variable domain of TCR clone 88038 (TRAV23/DV6, TRAJ9)
CAASIGGNTGGFKTIF

SEQ ID NO: 176076 - protein, 15 aa, Homo sapiens
  CDR3 for beta chain variable domain of TCR clone 88038 (TRBV2, TRBJ2-1)
CASRESGGAYNEQFF

SEQ ID NO: 176077 - protein, 20 aa, Homo sapiens
  CDR3 for alpha chain variable domain of TCR clone 88039 (TRAV12-1, TRAJ42)
SSVIQPPTSVRGGSQGNLIF

SEQ ID NO: 176078 - protein, 18 aa, Homo sapiens
  CDR3 for beta chain variable domain of TCR clone 88039 (TRBV11-2, TRBJ2-3)
CASSLGGASREAPNTQYF

SEQ ID NO: 176079 - protein, 17 aa, Homo sapiens
  CDR3 for alpha chain variable domain of TCR clone 88040 (TRAV17, TRAJ52)
CATERPSGGTSYGKLTF

SEQ ID NO: 176080 - protein, 13 aa, Homo sapiens
  CDR3 for beta chain variable domain of TCR clone 88040 (TRBV7-9, TRBJ1-2)
CASSVKQNYGYTF

SEQ ID NO: 176081 - protein, 12 aa, Homo sapiens
  CDR3 for alpha chain variable domain of TCR clone 88041 (TRAV8-3, TRAJ26)
CAGDNYGQNFVF

SEQ ID NO: 176082 - protein, 12 aa, Homo sapiens
  CDR3 for beta chain variable domain of TCR clone 88041 (TRBV11-2, TRBJ2-4)
CASSSASGSEYF

SEQ ID NO: 176083 - protein, 14 aa, Homo sapiens
  CDR3 for alpha chain variable domain of TCR clone 88042 (TRAV27, TRAJ44)
CAASFTGTASKLTF

SEQ ID NO: 176084 - protein, 13 aa, Homo sapiens
  CDR3 for beta chain variable domain of TCR clone 88042 (TRBV27, TRBJ2-3)
CAISRGGLYTQYF

SEQ ID NO: 176085 - protein, 20 aa, Homo sapiens
  CDR3 for alpha chain variable domain of TCR clone 88043 (TRAV26-1, TRAJ42)
CCLLLHRQTYYGGSQGNLIF

SEQ ID NO: 176086 - protein, 16 aa, Homo sapiens
  CDR3 for beta chain variable domain of TCR clone 88043 (TRBV7-3, TRBJ2-2)
CASSLKRGTLSGELFF

SEQ ID NO: 176087 - protein, 15 aa, Homo sapiens
  CDR3 for alpha chain variable domain of TCR clone 88044 (TRAV12-2, TRAJ9)
CAVNNERTGGFKTIF

SEQ ID NO: 176088 - protein, 23 aa, Homo sapiens
  CDR3 for beta chain variable domain of TCR clone 88044 (TRBV4-1, TRBJ1-4)
CASSQERKNEKTVFWQWNPALCL

SEQ ID NO: 176089 - protein, 14 aa, Homo sapiens
  CDR3 for alpha chain variable domain of TCR clone 88045 (TRAV13-1, TRAJ44)
CAAKATGTASKLTF

SEQ ID NO: 176090 - protein, 14 aa, Homo sapiens
  CDR3 for beta chain variable domain of TCR clone 88045 (TRBV2, TRBJ2-7)
CASSLTSGGYEQYF

SEQ ID NO: 176091 - protein, 17 aa, Homo sapiens
  CDR3 for alpha chain variable domain of TCR clone 88046 (TRAV3, TRAJ6)
CSVRDGPRAGGSYIPTF

SEQ ID NO: 176092 - protein, 16 aa, Homo sapiens
  CDR3 for beta chain variable domain of TCR clone 88046 (TRBV7-8, TRBJ2-3)
CASSTEGQRETDTQYF

SEQ ID NO: 176093 - protein, 17 aa, Homo sapiens
  CDR3 for alpha chain variable domain of TCR clone 88047 (TRAV3, TRAJ6)
CAVRDGPRAGGSYIPTF

SEQ ID NO: 176094 - protein, 15 aa, Homo sapiens
  CDR3 for beta chain variable domain of TCR clone 88047 (TRBV9, TRBJ1-6)
CASSVAGTGDSPLLF

SEQ ID NO: 176095 - protein, 16 aa, Homo sapiens
  CDR3 for alpha chain variable domain of TCR clone 88048 (TRAV3, TRAJ10)
CAVRDMRAGGGNKLTF

SEQ ID NO: 176096 - protein, 16 aa, Homo sapiens
  CDR3 for beta chain variable domain of TCR clone 88048 (TRBV4-3, TRBJ2-1)
CASSPALDRGVNEQFF

SEQ ID NO: 176097 - protein, 11 aa, Homo sapiens
  CDR3 for alpha chain variable domain of TCR clone 88049 (TRAV16, TRAJ33)
CALHSNYQLIW

SEQ ID NO: 176098 - protein, 14 aa, Homo sapiens
  CDR3 for beta chain variable domain of TCR clone 88049 (TRBV11-2, TRBJ2-7)
CASSSTGEGYEQYF

SEQ ID NO: 176099 - protein, 12 aa, Homo sapiens
  CDR3 for alpha chain variable domain of TCR clone 88050 (TRAV8-3, TRAJ41)
CAVALSGYSLNF

SEQ ID NO: 176100 - protein, 18 aa, Homo sapiens
  CDR3 for beta chain variable domain of TCR clone 88050 (TRBV20-1, TRBJ2-6)
CSAETTPTHGSGANVLTF

SEQ ID NO: 176101 - protein, 12 aa, Homo sapiens
  CDR3 for alpha chain variable domain of TCR clone 88051 (TRAV26-1, TRAJ26)
CIAYNYGQNFVF

SEQ ID NO: 176102 - protein, 15 aa, Homo sapiens
  CDR3 for beta chain variable domain of TCR clone 88051 (TRBV7-2, TRBJ2-3)
CASSLRGGSTDTQYF

SEQ ID NO: 176103 - protein, 18 aa, Homo sapiens
  CDR3 for alpha chain variable domain of TCR clone 88052 (TRAV26-2, TRAJ45)
CILRVDKYSGGGADGLTF

SEQ ID NO: 176104 - protein, 11 aa, Homo sapiens
  CDR3 for beta chain variable domain of TCR clone 88052 (TRBV29-1, TRBJ2-5)
CSKDRTGTQYF

SEQ ID NO: 176105 - protein, 14 aa, Homo sapiens
  CDR3 for alpha chain variable domain of TCR clone 88053 (TRAV17, TRAJ22)
CATDAIGSARQLTF

SEQ ID NO: 176106 - protein, 14 aa, Homo sapiens
  CDR3 for beta chain variable domain of TCR clone 88053 (TRBV18, TRBJ2-5)
CASSPGVSQETQYF

SEQ ID NO: 176107 - protein, 15 aa, Homo sapiens
  CDR3 for alpha chain variable domain of TCR clone 88054 (TRAV26-1, TRAJ37)
CIVKTGSSNTGKLIF

SEQ ID NO: 176108 - protein, 12 aa, Homo sapiens
  CDR3 for beta chain variable domain of TCR clone 88054 (TRBV7-8, TRBJ2-7)
CASSIGDREQYF

SEQ ID NO: 176109 - protein, 14 aa, Homo sapiens
  CDR3 for alpha chain variable domain of TCR clone 88055 (TRAV8-2, TRAJ45)
CVVSAGGGADGLTF

SEQ ID NO: 176110 - protein, 17 aa, Homo sapiens
  CDR3 for beta chain variable domain of TCR clone 88055 (TRBV7-3, TRBJ2-3)
CASSLMKRMRGADTQYF

SEQ ID NO: 176111 - protein, 17 aa, Homo sapiens
  CDR3 for alpha chain variable domain of TCR clone 88056 (TRAV3, TRAJ7)
CAVRDMSPLEGTTDSLL

SEQ ID NO: 176112 - protein, 17 aa, Homo sapiens
  CDR3 for beta chain variable domain of TCR clone 88056 (TRBV15, TRBJ1-2)
CATSGREIDVVNYGYSF

SEQ ID NO: 176113 - protein, 14 aa, Homo sapiens
  CDR3 for alpha chain variable domain of TCR clone 88057 (TRAV26-1, TRAJ15)
CIVRANKAGTALIF

SEQ ID NO: 176114 - protein, 16 aa, Homo sapiens
  CDR3 for beta chain variable domain of TCR clone 88057 (TRBV20-1, TRBJ1-4)
CSAIGGPRGANEKLFF

SEQ ID NO: 176115 - protein, 13 aa, Homo sapiens
  CDR3 for alpha chain variable domain of TCR clone 88058 (TRAV12-1, TRAJ39)
CVARSGAGNMLTF

SEQ ID NO: 176116 - protein, 13 aa, Homo sapiens
  CDR3 for beta chain variable domain of TCR clone 88058 (TRBV4-1, TRBJ2-2)
CASSQENTGELFF

SEQ ID NO: 176117 - protein, 13 aa, Homo sapiens
  CDR3 for alpha chain variable domain of TCR clone 88059 (TRAV2, TRAJ40)
CAVVTSGTYKYIL

SEQ ID NO: 176118 - protein, 14 aa, Homo sapiens
  CDR3 for beta chain variable domain of TCR clone 88059 (TRBV19, TRBJ2-1)
CASPTFVLSGEQFF

SEQ ID NO: 176119 - protein, 15 aa, Homo sapiens
  CDR3 for alpha chain variable domain of TCR clone 88060 (TRAV25, TRAJ10)
CAGPLLTGGGSKLTF

SEQ ID NO: 176120 - protein, 18 aa, Homo sapiens
  CDR3 for beta chain variable domain of TCR clone 88060 (TRBV6-6, TRBJ1-3)
CASSYSKWDSISGNTIYF

SEQ ID NO: 176121 - protein, 15 aa, Homo sapiens
  CDR3 for alpha chain variable domain of TCR clone 88061 (TRAV14/DV4, TRAJ33)
CAMRAGRDSNYQLIW

SEQ ID NO: 176122 - protein, 15 aa, Homo sapiens
  CDR3 for beta chain variable domain of TCR clone 88061 (TRBV5-5, TRBJ1-5)
CASSSTPGSNQPQHF

SEQ ID NO: 176123 - protein, 18 aa, Homo sapiens
  CDR3 for alpha chain variable domain of TCR clone 88062 (TRAV26-1, TRAJ23)
CIVRVGLEVGNQGGKLIF

SEQ ID NO: 176124 - protein, 15 aa, Homo sapiens
  CDR3 for beta chain variable domain of TCR clone 88062 (TRBV9, TRBJ1-6)
CASSVAGTGDSPLHF

SEQ ID NO: 176125 - protein, 14 aa, Homo sapiens
  CDR3 for alpha chain variable domain of TCR clone 88063 (TRAV17, TRAJ6)
CATNPAGGSYIPTF

SEQ ID NO: 176126 - protein, 15 aa, Homo sapiens
  CDR3 for beta chain variable domain of TCR clone 88063 (TRBV2, TRBJ2-5)
CDSSGTVAAGETQYF

SEQ ID NO: 176127 - protein, 11 aa, Homo sapiens
  CDR3 for alpha chain variable domain of TCR clone 88064 (TRAV1-2, TRAJ11)
CAVRGYSTLTF

SEQ ID NO: 176128 - protein, 16 aa, Homo sapiens
  CDR3 for beta chain variable domain of TCR clone 88064 (TRBV7-2, TRBJ2-5)
CASSPRGRGGGETQYF

SEQ ID NO: 176129 - protein, 14 aa, Homo sapiens
  CDR3 for alpha chain variable domain of TCR clone 88065 (TRAV23/DV6, TRAJ8)
CAASKNTGFQKLVF

SEQ ID NO: 176130 - protein, 16 aa, Homo sapiens
  CDR3 for beta chain variable domain of TCR clone 88065 (TRBV4-1, TRBJ2-6)
CASSQVGDPGANGLTF

SEQ ID NO: 176131 - protein, 15 aa, Homo sapiens
  CDR3 for alpha chain variable domain of TCR clone 88066 (TRAV8-3, TRAJ45)
CVSSYSGGGADGLTF

SEQ ID NO: 176132 - protein, 17 aa, Homo sapiens
  CDR3 for beta chain variable domain of TCR clone 88066 (TRBV7-8, TRBJ1-2)
CASSLRPLQGHLYGYTF

SEQ ID NO: 176133 - protein, 14 aa, Homo sapiens
  CDR3 for alpha chain variable domain of TCR clone 88067 (TRAV12-2, TRAJ53)
CAVKGGGSNYKLTF

SEQ ID NO: 176134 - protein, 14 aa, Homo sapiens
  CDR3 for beta chain variable domain of TCR clone 88067 (TRBV20-1, TRBJ2-1)
CSAQIGGSANEQFF

SEQ ID NO: 176135 - protein, 15 aa, Homo sapiens
  CDR3 for alpha chain variable domain of TCR clone 88068 (TRAV8-4, TRAJ12)
CAVSDRVDSSYKLIF

SEQ ID NO: 176136 - protein, 15 aa, Homo sapiens
  CDR3 for beta chain variable domain of TCR clone 88068 (TRBV7-9, TRBJ1-1)
CASSLLEQGGTEAFF

SEQ ID NO: 176137 - protein, 14 aa, Homo sapiens
  CDR3 for alpha chain variable domain of TCR clone 88069 (TRAV12-2, TRAJ5)
CAVNRSTGRRALTF

SEQ ID NO: 176138 - protein, 14 aa, Homo sapiens
  CDR3 for beta chain variable domain of TCR clone 88069 (TRBV13, TRBJ2-5)
CASSLGPRGETQYF

SEQ ID NO: 176139 - protein, 13 aa, Homo sapiens
  CDR3 for alpha chain variable domain of TCR clone 88070 (TRAV27, TRAJ17)
CAGAATAGNKLTF

SEQ ID NO: 176140 - protein, 15 aa, Homo sapiens
  CDR3 for beta chain variable domain of TCR clone 88070 (TRBV9, TRBJ1-6)
CASSVAGTGDSPLHF

SEQ ID NO: 176141 - protein, 16 aa, Homo sapiens
  CDR3 for alpha chain variable domain of TCR clone 88071 (TRAV1-2, TRAJ10)
CAVRGVLTGGGNKLTF

SEQ ID NO: 176142 - protein, 14 aa, Homo sapiens
  CDR3 for beta chain variable domain of TCR clone 88071 (TRBV28, TRBJ1-2)
CASRIQGANYGYTF

SEQ ID NO: 176143 - protein, 15 aa, Homo sapiens
  CDR3 for alpha chain variable domain of TCR clone 88072 (TRAV12-2, TRAJ57)
CAVSRGQGGSEKLFF

SEQ ID NO: 176144 - protein, 14 aa, Homo sapiens
  CDR3 for beta chain variable domain of TCR clone 88072 (TRBV20-1, TRBJ2-1)
CSAHPGLPYNEQFF

SEQ ID NO: 176145 - protein, 16 aa, Homo sapiens
  CDR3 for alpha chain variable domain of TCR clone 88073 (TRAV36/DV7, TRAJ33)
WRPGNRVQDSNYQLIW

SEQ ID NO: 176146 - protein, 15 aa, Homo sapiens
  CDR3 for beta chain variable domain of TCR clone 88073 (TRBV29-1, TRBJ2-1)
CSVGRHALFYNEQFF

SEQ ID NO: 176147 - protein, 15 aa, Homo sapiens
  CDR3 for alpha chain variable domain of TCR clone 88074 (TRAV17, TRAJ56)
TSVLRTPGANSKLTF

SEQ ID NO: 176148 - protein, 13 aa, Homo sapiens
  CDR3 for beta chain variable domain of TCR clone 88074 (TRBV7-2, TRBJ2-2)
CASSLAVTGELFF

SEQ ID NO: 176149 - protein, 13 aa, Homo sapiens
  CDR3 for alpha chain variable domain of TCR clone 88075 (TRAV16, TRAJ28)
CALTGAGSYQLTF

SEQ ID NO: 176150 - protein, 16 aa, Homo sapiens
  CDR3 for beta chain variable domain of TCR clone 88075 (TRBV28, TRBJ1-5)
CASSMTGQGWNQPQHF

SEQ ID NO: 176151 - protein, 15 aa, Homo sapiens
  CDR3 for alpha chain variable domain of TCR clone 88076 (TRAV3, TRAJ22)
CAVRDRGGSARQLTL

SEQ ID NO: 176152 - protein, 14 aa, Homo sapiens
  CDR3 for beta chain variable domain of TCR clone 88076 (TRBV19, TRBJ2-1)
CASSRLASINEQFF

SEQ ID NO: 176153 - protein, 14 aa, Homo sapiens
  CDR3 for alpha chain variable domain of TCR clone 88077 (TRAV2, TRAJ9)
CAVEDRSGGFKTIF

SEQ ID NO: 176154 - protein, 14 aa, Homo sapiens
  CDR3 for beta chain variable domain of TCR clone 88077 (TRBV2, TRBJ2-1)
CASSEALIYNEQFF

SEQ ID NO: 176155 - protein, 10 aa, Homo sapiens
  CDR3 for alpha chain variable domain of TCR clone 88078 (TRAV26-1, TRAJ22)
CIVSLNLFWF

SEQ ID NO: 176156 - protein, 15 aa, Homo sapiens
  CDR3 for beta chain variable domain of TCR clone 88078 (TRBV4-2, TRBJ1-2)
CASSQRTGGRDGYTF

SEQ ID NO: 176157 - protein, 12 aa, Homo sapiens
  CDR3 for alpha chain variable domain of TCR clone 88079 (TRAV12-1, TRAJ40)
CVFYSGTYKYIF

SEQ ID NO: 176158 - protein, 18 aa, Homo sapiens
  CDR3 for beta chain variable domain of TCR clone 88079 (TRBV12-4, TRBJ2-2)
CASSLVAGTRGLTGELFF

SEQ ID NO: 176159 - protein, 16 aa, Homo sapiens
  CDR3 for alpha chain variable domain of TCR clone 88080 (TRAV26-1, TRAJ23)
CIVRVHPYNQGGKPIF

SEQ ID NO: 176160 - protein, 15 aa, Homo sapiens
  CDR3 for beta chain variable domain of TCR clone 88080 (TRBV5-7, TRBJ2-7)
CASSPYFEGSYEQYF

SEQ ID NO: 176161 - protein, 16 aa, Homo sapiens
  CDR3 for alpha chain variable domain of TCR clone 88081 (TRAV30, TRAJ24)
CGTEIVDADSWGKFQF

SEQ ID NO: 176162 - protein, 15 aa, Homo sapiens
  CDR3 for beta chain variable domain of TCR clone 88081 (TRBV7-8, TRBJ2-5)
CASSDAAGSQETQYF

SEQ ID NO: 176163 - protein, 13 aa, Homo sapiens
  CDR3 for alpha chain variable domain of TCR clone 88082 (TRAV12-1, TRAJ26)
CVVRRNYGQNFGF

SEQ ID NO: 176164 - protein, 15 aa, Homo sapiens
  CDR3 for beta chain variable domain of TCR clone 88082 (TRBV28, TRBJ2-1)
CASSIIAGGRSEQFF

SEQ ID NO: 176165 - protein, 15 aa, Homo sapiens
  CDR3 for alpha chain variable domain of TCR clone 88083 (TRAV8-3, TRAJ11)
CAVGLLNSGYSTLTF

SEQ ID NO: 176166 - protein, 13 aa, Homo sapiens
  CDR3 for beta chain variable domain of TCR clone 88083 (TRBV10-3, TRBJ2-7)
CASKLAVNYEQYF

SEQ ID NO: 176167 - protein, 12 aa, Homo sapiens
  CDR3 for alpha chain variable domain of TCR clone 88084 (TRAV35, TRAJ39)
LAPNNAGNMLTF

SEQ ID NO: 176168 - protein, 15 aa, Homo sapiens
  CDR3 for beta chain variable domain of TCR clone 88084 (TRBV7-2, TRBJ1-2)
CASSPRAGWNYGYTF

SEQ ID NO: 176169 - protein, 11 aa, Homo sapiens
  CDR3 for alpha chain variable domain of TCR clone 88085 (TRAV12-3, TRAJ43)
CAMSVSNDMRF

SEQ ID NO: 176170 - protein, 13 aa, Homo sapiens
  CDR3 for beta chain variable domain of TCR clone 88085 (TRBV7-3, TRBJ1-1)
CASSQDWGAEAFF

SEQ ID NO: 176171 - protein, 16 aa, Homo sapiens
  CDR3 for alpha chain variable domain of TCR clone 88086 (TRAV12-3, TRAJ53)
CAMSPGSGGSKDKLTF

SEQ ID NO: 176172 - protein, 11 aa, Homo sapiens
  CDR3 for beta chain variable domain of TCR clone 88086 (TRBV29-1, TRBJ2-5)
CSEDRTGTQYF

SEQ ID NO: 176173 - protein, 17 aa, Homo sapiens
  CDR3 for alpha chain variable domain of TCR clone 88087 (TRAV3, TRAJ6)
CAVRDGPRAGGIYIPTF

SEQ ID NO: 176174 - protein, 15 aa, Homo sapiens
  CDR3 for beta chain variable domain of TCR clone 88087 (TRBV5-8, TRBJ2-2)
CASSLDRGATGELFF

SEQ ID NO: 176175 - protein, 14 aa, Homo sapiens
  CDR3 for alpha chain variable domain of TCR clone 88088 (TRAV1-1, TRAJ35)
CAVRSIGCGNVLHC

SEQ ID NO: 176176 - protein, 14 aa, Homo sapiens
  CDR3 for beta chain variable domain of TCR clone 88088 (TRBV5-7, TRBJ2-7)
CASSGGLSSYEQYF

SEQ ID NO: 176177 - protein, 14 aa, Homo sapiens
  CDR3 for alpha chain variable domain of TCR clone 88089 (TRAV26-1, TRAJ21)
CIVRPPYTFNKFYF

SEQ ID NO: 176178 - protein, 14 aa, Homo sapiens
  CDR3 for beta chain variable domain of TCR clone 88089 (TRBV11-3, TRBJ2-1)
CASSATTSGSIQFF

SEQ ID NO: 176179 - protein, 16 aa, Homo sapiens
  CDR3 for alpha chain variable domain of TCR clone 88090 (TRAV30, TRAJ24)
CGTEIVDADSWGKFQF

SEQ ID NO: 176180 - protein, 13 aa, Homo sapiens
  CDR3 for beta chain variable domain of TCR clone 88090 (TRBV4-1, TRBJ2-2)
CTSSQENTGELFF

SEQ ID NO: 176181 - protein, 14 aa, Homo sapiens
  CDR3 for alpha chain variable domain of TCR clone 88091 (TRAV1-2, TRAJ8)
CAVREDTGFQKLVF

SEQ ID NO: 176182 - protein, 16 aa, Homo sapiens
  CDR3 for beta chain variable domain of TCR clone 88091 (TRBV2, TRBJ1-3)
CASSRTGGSTGNTIYF

SEQ ID NO: 176183 - protein, 15 aa, Homo sapiens
  CDR3 for alpha chain variable domain of TCR clone 88092 (TRAV2, TRAJ9)
CAVAAVNTGGFKTIF

SEQ ID NO: 176184 - protein, 14 aa, Homo sapiens
  CDR3 for beta chain variable domain of TCR clone 88092 (TRBV7-8, TRBJ2-5)
CASSATGGQETQYF

SEQ ID NO: 176185 - protein, 16 aa, Homo sapiens
  CDR3 for alpha chain variable domain of TCR clone 88093 (TRAV27, TRAJ45)
CAGAPSQEEVLTDSPF

SEQ ID NO: 176186 - protein, 12 aa, Homo sapiens
  CDR3 for beta chain variable domain of TCR clone 88093 (TRBV24-1, TRBJ2-7)
CATSDPGYEQYF

SEQ ID NO: 176187 - protein, 14 aa, Homo sapiens
  CDR3 for alpha chain variable domain of TCR clone 88094 (TRAV12-2, TRAJ13)
CAVKKTGGYQQVTF

SEQ ID NO: 176188 - protein, 14 aa, Homo sapiens
  CDR3 for beta chain variable domain of TCR clone 88094 (TRBV10-3, TRBJ2-1)
CAISSDLAYNEQFF

SEQ ID NO: 176189 - protein, 14 aa, Homo sapiens
  CDR3 for alpha chain variable domain of TCR clone 88095 (TRAV8-4, TRAJ39)
CAVSLNNAGNMLTF

SEQ ID NO: 176190 - protein, 16 aa, Homo sapiens
  CDR3 for beta chain variable domain of TCR clone 88095 (TRBV13, TRBJ2-7)
CASSSRESGRTYEQDF

SEQ ID NO: 176191 - protein, 15 aa, Homo sapiens
  CDR3 for alpha chain variable domain of TCR clone 88096 (TRAV12-1, TRAJ52)
CVGNADGTSYGKLTF

SEQ ID NO: 176192 - protein, 14 aa, Homo sapiens
  CDR3 for beta chain variable domain of TCR clone 88096 (TRBV7-3, TRBJ2-2)
CASSPDPSGRELFF

SEQ ID NO: 176193 - protein, 13 aa, Homo sapiens
  CDR3 for alpha chain variable domain of TCR clone 88097 (TRAV20, TRAJ21)
CAVEGYNFNKFYF

SEQ ID NO: 176194 - protein, 14 aa, Homo sapiens
  CDR3 for beta chain variable domain of TCR clone 88097 (TRBV7-3, TRBJ2-1)
CASSLAGGTNEQFF

SEQ ID NO: 176195 - protein, 15 aa, Homo sapiens
  CDR3 for alpha chain variable domain of TCR clone 88098 (TRAV6, TRAJ4)
CALGGDSGGYNKLIF

SEQ ID NO: 176196 - protein, 15 aa, Homo sapiens
  CDR3 for beta chain variable domain of TCR clone 88098 (TRBV6-5, TRBJ2-1)
CASSYDAGAGNEQFF

SEQ ID NO: 176197 - protein, 17 aa, Homo sapiens
  CDR3 for alpha chain variable domain of TCR clone 88099 (TRAV8-3, TRAJ34)
CAIPGKLIFGTGARLQV

SEQ ID NO: 176198 - protein, 15 aa, Homo sapiens
  CDR3 for beta chain variable domain of TCR clone 88099 (TRBV5-7, TRBJ2-1)
CASSRRLAGDNEQFF

SEQ ID NO: 176199 - protein, 15 aa, Homo sapiens
  CDR3 for alpha chain variable domain of TCR clone 88100 (TRAV20, TRAJ23)
CAVQAVRNQGGKLIF

SEQ ID NO: 176200 - protein, 17 aa, Homo sapiens
  CDR3 for beta chain variable domain of TCR clone 88100 (TRBV28, TRBJ2-5)
CASSTPEGDALQETQYF

SEQ ID NO: 176201 - protein, 13 aa, Homo sapiens
  CDR3 for alpha chain variable domain of TCR clone 88101 (TRAV2, TRAJ40)
CAVVTSGTYEYIF

SEQ ID NO: 176202 - protein, 16 aa, Homo sapiens
  CDR3 for beta chain variable domain of TCR clone 88101 (TRBV7-9, TRBJ1-3)
CASSLGAGSSGNTIYF

SEQ ID NO: 176203 - protein, 15 aa, Homo sapiens
  CDR3 for alpha chain variable domain of TCR clone 88102 (TRAV12-2, TRAJ23)
CAVKPIYNQGGKLIS

SEQ ID NO: 176204 - protein, 15 aa, Homo sapiens
  CDR3 for beta chain variable domain of TCR clone 88102 (TRBV5-1, TRBJ1-2)
CASSLVGGQSQGYTF

SEQ ID NO: 176205 - protein, 13 aa, Homo sapiens
  CDR3 for alpha chain variable domain of TCR clone 88103 (TRAV36/DV7, TRAJ49)
CAVEANTGNQLYF

SEQ ID NO: 176206 - protein, 14 aa, Homo sapiens
  CDR3 for beta chain variable domain of TCR clone 88103 (TRBV20-1, TRBJ2-5)
CSASSGRAAETQYF

SEQ ID NO: 176207 - protein, 13 aa, Homo sapiens
  CDR3 for alpha chain variable domain of TCR clone 88104 (TRAV20, TRAJ31)
CAVQAWNNARLMF

SEQ ID NO: 176208 - protein, 14 aa, Homo sapiens
  CDR3 for beta chain variable domain of TCR clone 88104 (TRBV7-2, TRBJ1-1)
CASSFLTGTTEAFF

SEQ ID NO: 176209 - protein, 13 aa, Homo sapiens
  CDR3 for alpha chain variable domain of TCR clone 88105 (TRAV27, TRAJ6)
CAGGIRGSYIPTF

SEQ ID NO: 176210 - protein, 14 aa, Homo sapiens
  CDR3 for beta chain variable domain of TCR clone 88105 (TRBV19, TRBJ2-5)
CASSMTGQQETQYF

SEQ ID NO: 176211 - protein, 17 aa, Homo sapiens
  CDR3 for alpha chain variable domain of TCR clone 88106 (TRAV3, TRAJ6)
CAVRDGPRAGGSYIPTF

SEQ ID NO: 176212 - protein, 14 aa, Homo sapiens
  CDR3 for beta chain variable domain of TCR clone 88106 (TRBV19, TRBJ2-7)
CASSIFAGTYEQYF

SEQ ID NO: 176213 - protein, 13 aa, Homo sapiens
  CDR3 for alpha chain variable domain of TCR clone 88107 (TRAV12-1, TRAJ34)
CVATGYNTDKLIF

SEQ ID NO: 176214 - protein, 13 aa, Homo sapiens
  CDR3 for beta chain variable domain of TCR clone 88107 (TRBV28, TRBJ2-7)
CASKAGGVYEQYF

SEQ ID NO: 176215 - protein, 10 aa, Homo sapiens
  CDR3 for alpha chain variable domain of TCR clone 88108 (TRAV36/DV7, TRAJ56)
SAGPAVELTF

SEQ ID NO: 176216 - protein, 13 aa, Homo sapiens
  CDR3 for beta chain variable domain of TCR clone 88108 (TRBV7-9, TRBJ2-7)
CASSFWSSYEQYF

SEQ ID NO: 176217 - protein, 14 aa, Homo sapiens
  CDR3 for alpha chain variable domain of TCR clone 88109 (TRAV35, TRAJ22)
CAGLRPGSARQLTF

SEQ ID NO: 176218 - protein, 15 aa, Homo sapiens
  CDR3 for beta chain variable domain of TCR clone 88109 (TRBV11-2, TRBJ2-2)
CASSSDRVNAGELFF

SEQ ID NO: 176219 - protein, 12 aa, Homo sapiens
  CDR3 for alpha chain variable domain of TCR clone 88110 (TRAV12-3, TRAJ17)
CAMKLTGNKLTF

SEQ ID NO: 176220 - protein, 11 aa, Homo sapiens
  CDR3 for beta chain variable domain of TCR clone 88110 (TRBV12-4, TRBJ2-2)
CASSSAGELFF

SEQ ID NO: 176221 - protein, 13 aa, Homo sapiens
  CDR3 for alpha chain variable domain of TCR clone 88111 (TRAV3, TRAJ15)
CAVRDQAGTALII

SEQ ID NO: 176222 - protein, 15 aa, Homo sapiens
  CDR3 for beta chain variable domain of TCR clone 88111 (TRBV11-1, TRBJ2-7)
CASSLNYGASYEQYF

SEQ ID NO: 176223 - protein, 15 aa, Homo sapiens
  CDR3 for alpha chain variable domain of TCR clone 88112 (TRAV17, TRAJ28)
CATVDSGAGSYQLTF

SEQ ID NO: 176224 - protein, 16 aa, Homo sapiens
  CDR3 for beta chain variable domain of TCR clone 88112 (TRBV5-7, TRBJ1-4)
CASSPSGGLKTEKLFF

SEQ ID NO: 176225 - protein, 14 aa, Homo sapiens
  CDR3 for alpha chain variable domain of TCR clone 88113 (TRAV29/DV5, TRAJ48)
CAAMALFGNETLTF

SEQ ID NO: 176226 - protein, 15 aa, Homo sapiens
  CDR3 for beta chain variable domain of TCR clone 88113 (TRBV7-2, TRBJ2-1)
CASTHGTGIYNEQFF

SEQ ID NO: 176227 - protein, 12 aa, Homo sapiens
  CDR3 for alpha chain variable domain of TCR clone 88114 (TRAV21, TRAJ33)
CAKMDSNYQLIW

SEQ ID NO: 176228 - protein, 12 aa, Homo sapiens
  CDR3 for beta chain variable domain of TCR clone 88114 (TRBV11-2, TRBJ2-4)
CASSSASGSEYF

SEQ ID NO: 176229 - protein, 12 aa, Homo sapiens
  CDR3 for alpha chain variable domain of TCR clone 88115 (TRAV1-1, TRAJ9)
CAVDTGGFKTNF

SEQ ID NO: 176230 - protein, 14 aa, Homo sapiens
  CDR3 for beta chain variable domain of TCR clone 88115 (TRBV7-8, TRBJ2-5)
CASSATGGQETQYF

SEQ ID NO: 176231 - protein, 11 aa, Homo sapiens
  CDR3 for alpha chain variable domain of TCR clone 88116 (TRAV12-3, TRAJ27)
CAMANAGKSTF

SEQ ID NO: 176232 - protein, 15 aa, Homo sapiens
  CDR3 for beta chain variable domain of TCR clone 88116 (TRBV27, TRBJ1-6)
CASSFDRGLGSPLHF

SEQ ID NO: 176233 - protein, 11 aa, Homo sapiens
  CDR3 for alpha chain variable domain of TCR clone 88117 (TRAV2, TRAJ33)
CAVESNYQLIW

SEQ ID NO: 176234 - protein, 15 aa, Homo sapiens
  CDR3 for beta chain variable domain of TCR clone 88117 (TRBV19, TRBJ1-1)
CASTSGQIQNTDAFF

SEQ ID NO: 176235 - protein, 14 aa, Homo sapiens
  CDR3 for alpha chain variable domain of TCR clone 88118 (TRAV38-2/DV8, TRAJ49)
CAYRSPNTGNQFYF

SEQ ID NO: 176236 - protein, 14 aa, Homo sapiens
  CDR3 for beta chain variable domain of TCR clone 88118 (TRBV28, TRBJ1-1)
CAGSSEQGYTEAFF

SEQ ID NO: 176237 - protein, 14 aa, Homo sapiens
  CDR3 for alpha chain variable domain of TCR clone 88119 (TRAV26-1, TRAJ49)
CIVRPSNTCNQFYF

SEQ ID NO: 176238 - protein, 15 aa, Homo sapiens
  CDR3 for beta chain variable domain of TCR clone 88119 (TRBV19, TRBJ1-1)
CASMGFRDVNTEAFF

SEQ ID NO: 176239 - protein, 16 aa, Homo sapiens
  CDR3 for alpha chain variable domain of TCR clone 88120 (TRAV8-3, TRAJ13)
CAVGAYPSGGYQKVTF

SEQ ID NO: 176240 - protein, 15 aa, Homo sapiens
  CDR3 for beta chain variable domain of TCR clone 88120 (TRBV19, TRBJ1-5)
CASSIVWADNQPQYF

SEQ ID NO: 176241 - protein, 13 aa, Homo sapiens
  CDR3 for alpha chain variable domain of TCR clone 88121 (TRAV17, TRAJ31)
CATDENNNARLMF

SEQ ID NO: 176242 - protein, 14 aa, Homo sapiens
  CDR3 for beta chain variable domain of TCR clone 88121 (TRBV11-2, TRBJ2-1)
CASSPSRKGGGQFF

SEQ ID NO: 176243 - protein, 14 aa, Homo sapiens
  CDR3 for alpha chain variable domain of TCR clone 88122 (TRAV12-3, TRAJ15)
CAMIPPQAGTALIF

SEQ ID NO: 176244 - protein, 12 aa, Homo sapiens
  CDR3 for beta chain variable domain of TCR clone 88122 (TRBV11-2, TRBJ2-2)
CASSFGGGELFL

SEQ ID NO: 176245 - protein, 13 aa, Homo sapiens
  CDR3 for alpha chain variable domain of TCR clone 88123 (TRAV2, TRAJ23)
CAVLGNQGGKLIF

SEQ ID NO: 176246 - protein, 14 aa, Homo sapiens
  CDR3 for beta chain variable domain of TCR clone 88123 (TRBV11-2, TRBJ2-1)
CASSRATSYNEQFF

SEQ ID NO: 176247 - protein, 12 aa, Homo sapiens
  CDR3 for alpha chain variable domain of TCR clone 88124 (TRAV13-2, TRAJ23)
CAERHRGGKLIF

SEQ ID NO: 176248 - protein, 16 aa, Homo sapiens
  CDR3 for beta chain variable domain of TCR clone 88124 (TRBV4-1, TRBJ2-5)
CVSSHADRAGGETQYF

SEQ ID NO: 176249 - protein, 12 aa, Homo sapiens
  CDR3 for alpha chain variable domain of TCR clone 88125 (TRAV2, TRAJ9)
CAVGAGGFKTIF

SEQ ID NO: 176250 - protein, 14 aa, Homo sapiens
  CDR3 for beta chain variable domain of TCR clone 88125 (TRBV7-9, TRBJ2-3)
CASSLEDGTDTQYF

SEQ ID NO: 176251 - protein, 12 aa, Homo sapiens
  CDR3 for alpha chain variable domain of TCR clone 88126 (TRAV13-1, TRAJ9)
CASHTGGFKTIF

SEQ ID NO: 176252 - protein, 18 aa, Homo sapiens
  CDR3 for beta chain variable domain of TCR clone 88126 (TRBV11-2, TRBJ2-3)
CASSLAGASRGAPNTQYF

SEQ ID NO: 176253 - protein, 18 aa, Homo sapiens
  CDR3 for alpha chain variable domain of TCR clone 88127 (TRAV21, TRAJ52)
CAVRPSPAGGTSYGKLTF

SEQ ID NO: 176254 - protein, 15 aa, Homo sapiens
  CDR3 for beta chain variable domain of TCR clone 88127 (TRBV10-2, TRBJ1-4)
CASTPIDRGNEKLFF

SEQ ID NO: 176255 - protein, 12 aa, Homo sapiens
  CDR3 for alpha chain variable domain of TCR clone 88128 (TRAV30, TRAJ20)
CGTENNDYKLSF

SEQ ID NO: 176256 - protein, 17 aa, Homo sapiens
  CDR3 for beta chain variable domain of TCR clone 88128 (TRBV20-1, TRBJ2-7)
CSARDRVSGWTSSTSGR

SEQ ID NO: 176257 - protein, 13 aa, Homo sapiens
  CDR3 for alpha chain variable domain of TCR clone 88129 (TRAV21, TRAJ20)
CAVGVFADYKLSF

SEQ ID NO: 176258 - protein, 14 aa, Homo sapiens
  CDR3 for beta chain variable domain of TCR clone 88129 (TRBV4-2, TRBJ1-4)
CASSPPSGNEKLFF

SEQ ID NO: 176259 - protein, 16 aa, Homo sapiens
  CDR3 for alpha chain variable domain of TCR clone 88130 (TRAV1-2, TRAJ10)
CAVRGVLTGGGNKLTF

SEQ ID NO: 176260 - protein, 16 aa, Homo sapiens
  CDR3 for beta chain variable domain of TCR clone 88130 (TRBV29-1, TRBJ2-7)
CSVEVVGTSGSYERYF

SEQ ID NO: 176261 - protein, 14 aa, Homo sapiens
  CDR3 for alpha chain variable domain of TCR clone 88131 (TRAV26-1, TRAJ22)
CIVRVYGSARKLTF

SEQ ID NO: 176262 - protein, 17 aa, Homo sapiens
  CDR3 for beta chain variable domain of TCR clone 88131 (TRBV7-3, TRBJ2-3)
CASSPGGLAGFGDTQYF

SEQ ID NO: 176263 - protein, 12 aa, Homo sapiens
  CDR3 for alpha chain variable domain of TCR clone 88132 (TRAV12-3, TRAJ17)
CAMTLTGNKLPF

SEQ ID NO: 176264 - protein, 15 aa, Homo sapiens
  CDR3 for beta chain variable domain of TCR clone 88132 (TRBV19, TRBJ2-1)
CASSILGEGRNEQFF

SEQ ID NO: 176265 - protein, 11 aa, Homo sapiens
  CDR3 for alpha chain variable domain of TCR clone 88133 (TRAV13-1, TRAJ15)
CAATPGTALIF

SEQ ID NO: 176266 - protein, 13 aa, Homo sapiens
  CDR3 for beta chain variable domain of TCR clone 88133 (TRBV7-2, TRBJ2-1)
CASSVGVYNEQFF

SEQ ID NO: 176267 - protein, 15 aa, Homo sapiens
  CDR3 for alpha chain variable domain of TCR clone 88134 (TRAV8-3, TRAJ45)
CASSYSGGGAEGLTF

SEQ ID NO: 176268 - protein, 17 aa, Homo sapiens
  CDR3 for beta chain variable domain of TCR clone 88134 (TRBV7-8, TRBJ1-2)
CASSLRPLQGHLYGYTF

SEQ ID NO: 176269 - protein, 12 aa, Homo sapiens
  CDR3 for alpha chain variable domain of TCR clone 88135 (TRAV8-3, TRAJ26)
CAGDNDGQNFVF

SEQ ID NO: 176270 - protein, 12 aa, Homo sapiens
  CDR3 for beta chain variable domain of TCR clone 88135 (TRBV11-2, TRBJ2-2)
CASSLGGGELFF

SEQ ID NO: 176271 - protein, 14 aa, Homo sapiens
  CDR3 for alpha chain variable domain of TCR clone 88136 (TRAV1-2, TRAJ16)
CAVNRFSDGKKLLF

SEQ ID NO: 176272 - protein, 13 aa, Homo sapiens
  CDR3 for beta chain variable domain of TCR clone 88136 (TRBV6-1, TRBJ1-1)
CASSRQGNTEAFF

SEQ ID NO: 176273 - protein, 16 aa, Homo sapiens
  CDR3 for alpha chain variable domain of TCR clone 88137 (TRAV30, TRAJ24)
CGTEIVDADSWGKFQF

SEQ ID NO: 176274 - protein, 19 aa, Homo sapiens
  CDR3 for beta chain variable domain of TCR clone 88137 (TRBV4-3, TRBJ2-7)
CASSQEFIGWQVTPYEQYF

SEQ ID NO: 176275 - protein, 20 aa, Homo sapiens
  CDR3 for alpha chain variable domain of TCR clone 88138 (TRAV26-1, TRAJ42)
CCVLLRRQTYYGGSQGNPIF

SEQ ID NO: 176276 - protein, 16 aa, Homo sapiens
  CDR3 for beta chain variable domain of TCR clone 88138 (TRBV7-3, TRBJ2-2)
CASSLKRGTLSGELFF

SEQ ID NO: 176277 - protein, 12 aa, Homo sapiens
  CDR3 for alpha chain variable domain of TCR clone 88139 (TRAV3, TRAJ43)
CAVRDPNNDMRF

SEQ ID NO: 176278 - protein, 17 aa, Homo sapiens
  CDR3 for beta chain variable domain of TCR clone 88139 (TRBV7-8, TRBJ2-6)
CASSAWTGGAGANVLTF

SEQ ID NO: 176279 - protein, 15 aa, Homo sapiens
  CDR3 for alpha chain variable domain of TCR clone 88140 (TRAV38-1, TRAJ37)
CAFIFGSGNTGKLIF

SEQ ID NO: 176280 - protein, 12 aa, Homo sapiens
  CDR3 for beta chain variable domain of TCR clone 88140 (TRBV7-9, TRBJ2-7)
CASSLEGYGQYF

SEQ ID NO: 176281 - protein, 17 aa, Homo sapiens
  CDR3 for alpha chain variable domain of TCR clone 88141 (TRAV13-1, TRAJ10)
CAASIWRGTGGGNKLTF

SEQ ID NO: 176282 - protein, 12 aa, Homo sapiens
  CDR3 for beta chain variable domain of TCR clone 88141 (TRBV7-8, TRBJ2-7)
CASSLGDREQYF

SEQ ID NO: 176283 - protein, 10 aa, Homo sapiens
  CDR3 for alpha chain variable domain of TCR clone 88142 (TRAV1-2, TRAJ23)
CAGQGGKLIF

SEQ ID NO: 176284 - protein, 17 aa, Homo sapiens
  CDR3 for beta chain variable domain of TCR clone 88142 (TRBV11-2, TRBJ2-1)
CASSLYPPGVEYNEQFF

SEQ ID NO: 176285 - protein, 13 aa, Homo sapiens
  CDR3 for alpha chain variable domain of TCR clone 88143 (TRAV1-2, TRAJ34)
CAVRGYNTDKLIF

SEQ ID NO: 176286 - protein, 13 aa, Homo sapiens
  CDR3 for beta chain variable domain of TCR clone 88143 (TRBV20-1, TRBJ1-2)
CSARDQGAYGYTF

SEQ ID NO: 176287 - protein, 16 aa, Homo sapiens
  CDR3 for alpha chain variable domain of TCR clone 88144 (TRAV21, TRAJ37)
CAVRPRGSSNTGKLIF

SEQ ID NO: 176288 - protein, 15 aa, Homo sapiens
  CDR3 for beta chain variable domain of TCR clone 88144 (TRBV27, TRBJ2-1)
CASSNGGGSSNEQFF

SEQ ID NO: 176289 - protein, 14 aa, Homo sapiens
  CDR3 for alpha chain variable domain of TCR clone 88145 (TRAV1-2, TRAJ8)
CAVREDTGFQKLVF

SEQ ID NO: 176290 - protein, 13 aa, Homo sapiens
  CDR3 for beta chain variable domain of TCR clone 88145 (TRBV12-4, TRBJ2-5)
CASRKRVKETQYF

SEQ ID NO: 176291 - protein, 14 aa, Homo sapiens
  CDR3 for alpha chain variable domain of TCR clone 88146 (TRAV20, TRAJ42)
CAVQAGGSQGNLIF

SEQ ID NO: 176292 - protein, 14 aa, Homo sapiens
  CDR3 for beta chain variable domain of TCR clone 88146 (TRBV7-2, TRBJ1-2)
CASSSQGAHYGYTF

SEQ ID NO: 176293 - protein, 13 aa, Homo sapiens
  CDR3 for alpha chain variable domain of TCR clone 88147 (TRAV2, TRAJ15)
CAVASQAGTALIF

SEQ ID NO: 176294 - protein, 16 aa, Homo sapiens
  CDR3 for beta chain variable domain of TCR clone 88147 (TRBV18, TRBJ1-5)
CASSPYRVGGNQPQHF

SEQ ID NO: 176295 - protein, 11 aa, Homo sapiens
  CDR3 for alpha chain variable domain of TCR clone 88148 (TRAV1-2, TRAJ20)
CAVSNDYKLSF

SEQ ID NO: 176296 - protein, 15 aa, Homo sapiens
  CDR3 for beta chain variable domain of TCR clone 88148 (TRBV5-1, TRBJ2-2)
CASNSQGGNTGELFF

SEQ ID NO: 176297 - protein, 15 aa, Homo sapiens
  CDR3 for alpha chain variable domain of TCR clone 88149 (TRAV1-2, TRAJ13)
CAVNSGGYQKVPLEL

SEQ ID NO: 176298 - protein, 14 aa, Homo sapiens
  CDR3 for beta chain variable domain of TCR clone 88149 (TRBV4-1, TRBJ1-5)
CASSPKGDNQPQHF

SEQ ID NO: 176299 - protein, 14 aa, Homo sapiens
  CDR3 for alpha chain variable domain of TCR clone 88150 (TRAV14/DV4, TRAJ42)
CPRGSLRGQGNLIF

SEQ ID NO: 176300 - protein, 18 aa, Homo sapiens
  CDR3 for beta chain variable domain of TCR clone 88150 (TRBV20-1, TRBJ2-3)
CSASGLAGGPGTTNTQYF

SEQ ID NO: 176301 - protein, 17 aa, Homo sapiens
  CDR3 for alpha chain variable domain of TCR clone 88151 (TRAV12-3, TRAJ6)
CAMSARGGAGGSYIRTF

SEQ ID NO: 176302 - protein, 12 aa, Homo sapiens
  CDR3 for beta chain variable domain of TCR clone 88151 (TRBV12-4, TRBJ2-3)
CASSTLPDTQYF

SEQ ID NO: 176303 - protein, 15 aa, Homo sapiens
  CDR3 for alpha chain variable domain of TCR clone 88152 (TRAV17, TRAJ37)
CATDHGSSNTGKIIF

SEQ ID NO: 176304 - protein, 14 aa, Homo sapiens
  CDR3 for beta chain variable domain of TCR clone 88152 (TRBV7-2, TRBJ2-3)
CASSRTSGADTQYF

SEQ ID NO: 176305 - protein, 13 aa, Homo sapiens
  CDR3 for alpha chain variable domain of TCR clone 88153 (TRAV8-3, TRAJ43)
CAVVPYNNNDMRF

SEQ ID NO: 176306 - protein, 13 aa, Homo sapiens
  CDR3 for beta chain variable domain of TCR clone 88153 (TRBV7-9, TRBJ1-2)
CASSLKQNYGYTF

SEQ ID NO: 176307 - protein, 14 aa, Homo sapiens
  CDR3 for alpha chain variable domain of TCR clone 88154 (TRAV27, TRAJ13)
CRSSNSGGYQKVTF

SEQ ID NO: 176308 - protein, 13 aa, Homo sapiens
  CDR3 for beta chain variable domain of TCR clone 88154 (TRBV7-6, TRBJ2-1)
CRQLGGGADEQFF

SEQ ID NO: 176309 - protein, 15 aa, Homo sapiens
  CDR3 for alpha chain variable domain of TCR clone 88155 (TRAV8-3, TRAJ45)
CASSYSGAGADGLTF

SEQ ID NO: 176310 - protein, 13 aa, Homo sapiens
  CDR3 for beta chain variable domain of TCR clone 88155 (TRBV10-3, TRBJ2-7)
CASKLAVNYEQYF

SEQ ID NO: 176311 - protein, 14 aa, Homo sapiens
  CDR3 for alpha chain variable domain of TCR clone 88156 (TRAV13-1, TRAJ26)
CASSSAHYGQNFVF

SEQ ID NO: 176312 - protein, 17 aa, Homo sapiens
  CDR3 for beta chain variable domain of TCR clone 88156 (TRBV25-1, TRBJ2-5)
CASSRRGGRGGQETQYF

SEQ ID NO: 176313 - protein, 20 aa, Homo sapiens
  CDR3 for alpha chain variable domain of TCR clone 88157 (TRAV26-1, TRAJ37)
CCVLLHRQINGPSNTGKLIF

SEQ ID NO: 176314 - protein, 13 aa, Homo sapiens
  CDR3 for beta chain variable domain of TCR clone 88157 (TRBV20-1, TRBJ2-7)
CSARTSGNYEQYF

SEQ ID NO: 176315 - protein, 16 aa, Homo sapiens
  CDR3 for alpha chain variable domain of TCR clone 88158 (TRAV30, TRAJ24)
CGTEIVDAESWGKFQF

SEQ ID NO: 176316 - protein, 14 aa, Homo sapiens
  CDR3 for beta chain variable domain of TCR clone 88158 (TRBV13, TRBJ2-1)
CASSPRPRYNEQFF

SEQ ID NO: 176317 - protein, 14 aa, Homo sapiens
  CDR3 for alpha chain variable domain of TCR clone 88159 (TRAV12-2, TRAJ45)
CAVNIGGGADGLTF

SEQ ID NO: 176318 - protein, 18 aa, Homo sapiens
  CDR3 for beta chain variable domain of TCR clone 88159 (TRBV11-2, TRBJ2-3)
CASSLGGASRGAPNTQYF

SEQ ID NO: 176319 - protein, 15 aa, Homo sapiens
  CDR3 for alpha chain variable domain of TCR clone 88160 (TRAV27, TRAJ38)
CAARRNAGNNRKLIW

SEQ ID NO: 176320 - protein, 15 aa, Homo sapiens
  CDR3 for beta chain variable domain of TCR clone 88160 (TRBV12-4, TRBJ2-5)
CASSPPTGLQETQYF

SEQ ID NO: 176321 - protein, 23 aa, Homo sapiens
  CDR3 for alpha chain variable domain of TCR clone 88161 (TRAV2, TRAJ32)
CAFTMVVLQTSSSLEMALCLLSS

SEQ ID NO: 176322 - protein, 16 aa, Homo sapiens
  CDR3 for beta chain variable domain of TCR clone 88161 (TRBV7-9, TRBJ2-7)
CASSYPDREGGYEQYF

SEQ ID NO: 176323 - protein, 14 aa, Homo sapiens
  CDR3 for alpha chain variable domain of TCR clone 88162 (TRAV13-1, TRAJ35)
CAASKGGLGNVLHC

SEQ ID NO: 176324 - protein, 14 aa, Homo sapiens
  CDR3 for beta chain variable domain of TCR clone 88162 (TRBV4-1, TRBJ2-2)
CASSQAVNTGELFF

SEQ ID NO: 176325 - protein, 13 aa, Homo sapiens
  CDR3 for alpha chain variable domain of TCR clone 88163 (TRAV8-3, TRAJ48)
CAVSPFGNEKLTF

SEQ ID NO: 176326 - protein, 14 aa, Homo sapiens
  CDR3 for beta chain variable domain of TCR clone 88163 (TRBV18, TRBJ2-7)
CASSPRGGAYEQYF

SEQ ID NO: 176327 - protein, 13 aa, Homo sapiens
  CDR3 for alpha chain variable domain of TCR clone 88164 (TRAV17, TRAJ4)
CATKSGGYNTLIF

SEQ ID NO: 176328 - protein, 14 aa, Homo sapiens
  CDR3 for beta chain variable domain of TCR clone 88164 (TRBV20-1, TRBJ1-5)
CSARDDRGNQPQHF

SEQ ID NO: 176329 - protein, 12 aa, Homo sapiens
  CDR3 for alpha chain variable domain of TCR clone 88165 (TRAV41, TRAJ58)
CAVETSGSRLTF

SEQ ID NO: 176330 - protein, 15 aa, Homo sapiens
  CDR3 for beta chain variable domain of TCR clone 88165 (TRBV29-1, TRBJ2-6)
CSVGDRGCGANVLTF

SEQ ID NO: 176331 - protein, 18 aa, Homo sapiens
  CDR3 for alpha chain variable domain of TCR clone 88166 (TRAV12-1, TRAJ52)
CVVKLINAGGTSYGKLTF

SEQ ID NO: 176332 - protein, 13 aa, Homo sapiens
  CDR3 for beta chain variable domain of TCR clone 88166 (TRBV7-2, TRBJ2-7)
CASSSPSGSEQYF

SEQ ID NO: 176333 - protein, 14 aa, Homo sapiens
  CDR3 for alpha chain variable domain of TCR clone 88167 (TRAV13-1, TRAJ37)
CAAADSSNTGKLIF

SEQ ID NO: 176334 - protein, 17 aa, Homo sapiens
  CDR3 for beta chain variable domain of TCR clone 88167 (TRBV20-1, TRBJ2-2)
CSASGSGQGGLTGELFF

SEQ ID NO: 176335 - protein, 12 aa, Homo sapiens
  CDR3 for alpha chain variable domain of TCR clone 88168 (TRAV2, TRAJ26)
CAGSPGRLWSEF

SEQ ID NO: 176336 - protein, 16 aa, Homo sapiens
  CDR3 for beta chain variable domain of TCR clone 88168 (TRBV13, TRBJ2-2)
CASSPRTGEHAGELFF

SEQ ID NO: 176337 - protein, 15 aa, Homo sapiens
  CDR3 for alpha chain variable domain of TCR clone 88169 (TRAV3, TRAJ5)
CAVRDLDTGGRALTF

SEQ ID NO: 176338 - protein, 13 aa, Homo sapiens
  CDR3 for beta chain variable domain of TCR clone 88169 (TRBV20-1, TRBJ2-5)
CSARDSKQATQYF

SEQ ID NO: 176339 - protein, 16 aa, Homo sapiens
  CDR3 for alpha chain variable domain of TCR clone 88170 (TRAV13-1, TRAJ48)
CAASIFGNFGNEKLTF

SEQ ID NO: 176340 - protein, 16 aa, Homo sapiens
  CDR3 for beta chain variable domain of TCR clone 88170 (TRBV7-2, TRBJ2-6)
CASSERRSSGANVLTF

SEQ ID NO: 176341 - protein, 12 aa, Homo sapiens
  CDR3 for alpha chain variable domain of TCR clone 88171 (TRAV12-3, TRAJ17)
RAMTLTGNKLTF

SEQ ID NO: 176342 - protein, 15 aa, Homo sapiens
  CDR3 for beta chain variable domain of TCR clone 88171 (TRBV20-1, TRBJ2-7)
CSARDRISGMDEQYF

SEQ ID NO: 176343 - protein, 14 aa, Homo sapiens
  CDR3 for alpha chain variable domain of TCR clone 88172 (TRAV12-3, TRAJ10)
SHLPLTGGGDKLTF

SEQ ID NO: 176344 - protein, 12 aa, Homo sapiens
  CDR3 for beta chain variable domain of TCR clone 88172 (TRBV29-1, TRBJ1-1)
CSVATPGVEAFF

SEQ ID NO: 176345 - protein, 14 aa, Homo sapiens
  CDR3 for alpha chain variable domain of TCR clone 88173 (TRAV8-2, TRAJ45)
CVVSAGGGADGLTF

SEQ ID NO: 176346 - protein, 12 aa, Homo sapiens
  CDR3 for beta chain variable domain of TCR clone 88173 (TRBV12-4, TRBJ2-1)
CASSLVRVGQFF

SEQ ID NO: 176347 - protein, 18 aa, Homo sapiens
  CDR3 for alpha chain variable domain of TCR clone 88174 (TRAV13-1, TRAJ52)
CAAKNPNAGGTSYGKLTF

SEQ ID NO: 176348 - protein, 12 aa, Homo sapiens
  CDR3 for beta chain variable domain of TCR clone 88174 (TRBV18, TRBJ1-1)
CASSPGGTEAFF

SEQ ID NO: 176349 - protein, 17 aa, Homo sapiens
  CDR3 for alpha chain variable domain of TCR clone 88175 (TRAV4, TRAJ18)
CLVGERSVGSTLGRLYF

SEQ ID NO: 176350 - protein, 14 aa, Homo sapiens
  CDR3 for beta chain variable domain of TCR clone 88175 (TRBV19, TRBJ2-2)
CANSGQGIAGELFF

SEQ ID NO: 176351 - protein, 11 aa, Homo sapiens
  CDR3 for alpha chain variable domain of TCR clone 88176 (TRAV1-2, TRAJ40)
CAVPGTYKYIF

SEQ ID NO: 176352 - protein, 13 aa, Homo sapiens
  CDR3 for beta chain variable domain of TCR clone 88176 (TRBV7-3, TRBJ2-5)
CASSFRGGETQYF

SEQ ID NO: 176353 - protein, 14 aa, Homo sapiens
  CDR3 for alpha chain variable domain of TCR clone 88177 (TRAV2, TRAJ9)
CAVEDRSGGFKTIF

SEQ ID NO: 176354 - protein, 17 aa, Homo sapiens
  CDR3 for beta chain variable domain of TCR clone 88177 (TRBV11-2, TRBJ2-1)
CASSLCPPGVEYNEQFF

SEQ ID NO: 176355 - protein, 15 aa, Homo sapiens
  CDR3 for alpha chain variable domain of TCR clone 88178 (TRAV13-1, TRAJ44)
CAASRGGGTASKLTF

SEQ ID NO: 176356 - protein, 12 aa, Homo sapiens
  CDR3 for beta chain variable domain of TCR clone 88178 (TRBV7-9, TRBJ2-7)
CASSLEGYEQYF

SEQ ID NO: 176357 - protein, 13 aa, Homo sapiens
  CDR3 for alpha chain variable domain of TCR clone 88179 (TRAV12-1, TRAJ7)
CVVNMRGNNRLAF

SEQ ID NO: 176358 - protein, 17 aa, Homo sapiens
  CDR3 for beta chain variable domain of TCR clone 88179 (TRBV7-8, TRBJ2-6)
CASSAGTGGAGANVLTF

SEQ ID NO: 176359 - protein, 22 aa, Homo sapiens
  CDR3 for alpha chain variable domain of TCR clone 88180 (TRAV12-1, TRAJ12)
SSVIQPPTSVVTRMDSSYKLIF

SEQ ID NO: 176360 - protein, 13 aa, Homo sapiens
  CDR3 for beta chain variable domain of TCR clone 88180 (TRBV20-1, TRBJ1-1)
CSARGGGNTEAFF

SEQ ID NO: 176361 - protein, 10 aa, Homo sapiens
  CDR3 for alpha chain variable domain of TCR clone 88181 (TRAV30, TRAJ16)
CGTGGQKLLF

SEQ ID NO: 176362 - protein, 11 aa, Homo sapiens
  CDR3 for beta chain variable domain of TCR clone 88181 (TRBV11-2, TRBJ2-2)
CASSLPGELFF

SEQ ID NO: 176363 - protein, 14 aa, Homo sapiens
  CDR3 for alpha chain variable domain of TCR clone 88182 (TRAV26-1, TRAJ26)
CIVRATFLGQNFVF

SEQ ID NO: 176364 - protein, 16 aa, Homo sapiens
  CDR3 for beta chain variable domain of TCR clone 88182 (TRBV12-5, TRBJ2-5)
CASGPRTSGNQETQYF

SEQ ID NO: 176365 - protein, 16 aa, Homo sapiens
  CDR3 for alpha chain variable domain of TCR clone 88183 (TRAV22, TRAJ45)
CAGERGKRGGADGLTF

SEQ ID NO: 176366 - protein, 16 aa, Homo sapiens
  CDR3 for beta chain variable domain of TCR clone 88183 (TRBV5-1, TRBJ2-5)
CASSLRRTSGQETQYF

SEQ ID NO: 176367 - protein, 19 aa, Homo sapiens
  CDR3 for alpha chain variable domain of TCR clone 88184 (TRAV17, TRAJ17)
CATDGRPGAIKAAGNKLTF

SEQ ID NO: 176368 - protein, 17 aa, Homo sapiens
  CDR3 for beta chain variable domain of TCR clone 88184 (TRBV12-4, TRBJ1-1)
CASSLSGFRTMNTEAFF

SEQ ID NO: 176369 - protein, 16 aa, Homo sapiens
  CDR3 for alpha chain variable domain of TCR clone 88185 (TRAV16, TRAJ52)
CALSAAGGTSYGKLTF

SEQ ID NO: 176370 - protein, 15 aa, Homo sapiens
  CDR3 for beta chain variable domain of TCR clone 88185 (TRBV4-1, TRBJ1-2)
CASSQDRNRDYGYTF

SEQ ID NO: 176371 - protein, 11 aa, Homo sapiens
  CDR3 for alpha chain variable domain of TCR clone 88186 (TRAV17, TRAJ36)
CDPTGANNLFF

SEQ ID NO: 176372 - protein, 12 aa, Homo sapiens
  CDR3 for beta chain variable domain of TCR clone 88186 (TRBV29-1, TRBJ2-3)
CSVTGGADTQYF

SEQ ID NO: 176373 - protein, 16 aa, Homo sapiens
  CDR3 for alpha chain variable domain of TCR clone 88187 (TRAV12-2, TRAJ6)
CAAPLAGSGGSYIPTF

SEQ ID NO: 176374 - protein, 13 aa, Homo sapiens
  CDR3 for beta chain variable domain of TCR clone 88187 (TRBV4-2, TRBJ1-1)
CASSQAGNTEAFF

SEQ ID NO: 176375 - protein, 16 aa, Homo sapiens
  CDR3 for alpha chain variable domain of TCR clone 88188 (TRAV8-3, TRAJ22)
CAVDLLGPGSSRQLTF

SEQ ID NO: 176376 - protein, 14 aa, Homo sapiens
  CDR3 for beta chain variable domain of TCR clone 88188 (TRBV11-2, TRBJ2-7)
CASSLELEGYEQYF

SEQ ID NO: 176377 - protein, 16 aa, Homo sapiens
  CDR3 for alpha chain variable domain of TCR clone 88189 (TRAV30, TRAJ24)
CGTAIVDADSWGTFQF

SEQ ID NO: 176378 - protein, 14 aa, Homo sapiens
  CDR3 for beta chain variable domain of TCR clone 88189 (TRBV12-5, TRBJ2-5)
CASGSRTHQETQYF

SEQ ID NO: 176379 - protein, 14 aa, Homo sapiens
  CDR3 for alpha chain variable domain of TCR clone 88190 (TRAV12-1, TRAJ3)
CGAARYSSASKIIF

SEQ ID NO: 176380 - protein, 15 aa, Homo sapiens
  CDR3 for beta chain variable domain of TCR clone 88190 (TRBV7-2, TRBJ2-6)
CASSREGSGANDLTF

SEQ ID NO: 176381 - protein, 13 aa, Homo sapiens
  CDR3 for alpha chain variable domain of TCR clone 88191 (TRAV1-2, TRAJ31)
CAVRPNNNARLMF

SEQ ID NO: 176382 - protein, 14 aa, Homo sapiens
  CDR3 for beta chain variable domain of TCR clone 88191 (TRBV11-2, TRBJ2-1)
CASSLSGPYNEQLF

SEQ ID NO: 176383 - protein, 12 aa, Homo sapiens
  CDR3 for alpha chain variable domain of TCR clone 88192 (TRAV2, TRAJ9)
CAVGAGGFKTIF

SEQ ID NO: 176384 - protein, 14 aa, Homo sapiens
  CDR3 for beta chain variable domain of TCR clone 88192 (TRBV12-4, TRBJ1-1)
CASSLGTGGTEAFF

SEQ ID NO: 176385 - protein, 14 aa, Homo sapiens
  CDR3 for alpha chain variable domain of TCR clone 88193 (TRAV13-1, TRAJ44)
CAAKATGTASKLTF

SEQ ID NO: 176386 - protein, 15 aa, Homo sapiens
  CDR3 for beta chain variable domain of TCR clone 88193 (TRBV5-1, TRBJ1-4)
FAPAAWKDGNEKLFF

SEQ ID NO: 176387 - protein, 10 aa, Homo sapiens
  CDR3 for alpha chain variable domain of TCR clone 88194 (TRAV12-3, TRAJ49)
CAMNDDQFYF

SEQ ID NO: 176388 - protein, 13 aa, Homo sapiens
  CDR3 for beta chain variable domain of TCR clone 88194 (TRBV12-4, TRBJ1-1)
CASSPVTGFEAFF

SEQ ID NO: 176389 - protein, 14 aa, Homo sapiens
  CDR3 for alpha chain variable domain of TCR clone 88195 (TRAV1-2, TRAJ16)
CAVNRFSDGQKLLF

SEQ ID NO: 176390 - protein, 15 aa, Homo sapiens
  CDR3 for beta chain variable domain of TCR clone 88195 (TRBV11-3, TRBJ2-2)
CASSLGGRPTGELFF

SEQ ID NO: 176391 - protein, 18 aa, Homo sapiens
  CDR3 for alpha chain variable domain of TCR clone 88196 (TRAV26-2, TRAJ54)
CILRDVEVGIQGAQKLVF

SEQ ID NO: 176392 - protein, 14 aa, Homo sapiens
  CDR3 for beta chain variable domain of TCR clone 88196 (TRBV19, TRBJ1-5)
CASSQGYSNQPQHF

SEQ ID NO: 176393 - protein, 15 aa, Homo sapiens
  CDR3 for alpha chain variable domain of TCR clone 88197 (TRAV38-1, TRAJ57)
CAFMKLQGGSEKLVF

SEQ ID NO: 176394 - protein, 17 aa, Homo sapiens
  CDR3 for beta chain variable domain of TCR clone 88197 (TRBV7-3, TRBJ2-3)
CASSPRGQGYGTDTQYF

SEQ ID NO: 176395 - protein, 16 aa, Homo sapiens
  CDR3 for alpha chain variable domain of TCR clone 88198 (TRAV23/DV6, TRAJ9)
CAASIGENTGGFKTIF

SEQ ID NO: 176396 - protein, 12 aa, Homo sapiens
  CDR3 for beta chain variable domain of TCR clone 88198 (TRBV6-3, TRBJ2-7)
CASSEPGFEQYF

SEQ ID NO: 176397 - protein, 17 aa, Homo sapiens
  CDR3 for alpha chain variable domain of TCR clone 88199 (TRAV1-1, TRAJ28)
CSVDPAYSGAGSYQLTF

SEQ ID NO: 176398 - protein, 14 aa, Homo sapiens
  CDR3 for beta chain variable domain of TCR clone 88199 (TRBV19, TRBJ2-1)
CASPTFVLSGEQFF

SEQ ID NO: 176399 - protein, 12 aa, Homo sapiens
  CDR3 for alpha chain variable domain of TCR clone 88200 (TRAV1-2, TRAJ9)
CTGYTGGFKTIF

SEQ ID NO: 176400 - protein, 15 aa, Homo sapiens
  CDR3 for beta chain variable domain of TCR clone 88200 (TRBV11-2, TRBJ2-1)
CASSPAGQSLNEQFF

SEQ ID NO: 176401 - protein, 13 aa, Homo sapiens
  CDR3 for alpha chain variable domain of TCR clone 88201 (TRAV23/DV6, TRAJ58)
CAAMLIRGSRLTF

SEQ ID NO: 176402 - protein, 13 aa, Homo sapiens
  CDR3 for beta chain variable domain of TCR clone 88201 (TRBV2, TRBJ1-6)
CADSGSYNSPLHF

SEQ ID NO: 176403 - protein, 12 aa, Homo sapiens
  CDR3 for alpha chain variable domain of TCR clone 88202 (TRAV13-2, TRAJ23)
CAGRHRGGKLIF

SEQ ID NO: 176404 - protein, 12 aa, Homo sapiens
  CDR3 for beta chain variable domain of TCR clone 88202 (TRBV5-5, TRBJ2-5)
CASSYFGETQYF

SEQ ID NO: 176405 - protein, 15 aa, Homo sapiens
  CDR3 for alpha chain variable domain of TCR clone 88203 (TRAV35, TRAJ40)
CAGQLGTSGTYKYIF

SEQ ID NO: 176406 - protein, 14 aa, Homo sapiens
  CDR3 for beta chain variable domain of TCR clone 88203 (TRBV7-3, TRBJ2-1)
CASSLGGGTNEQFF

SEQ ID NO: 176407 - protein, 21 aa, Homo sapiens
  CDR3 for alpha chain variable domain of TCR clone 88204 (TRAV34, TRAJ44)
PAMQASTSVEQTTGIASKLTF

SEQ ID NO: 176408 - protein, 15 aa, Homo sapiens
  CDR3 for beta chain variable domain of TCR clone 88204 (TRBV5-7, TRBJ2-7)
CASSLGPGRGHEQYF

SEQ ID NO: 176409 - protein, 18 aa, Homo sapiens
  CDR3 for alpha chain variable domain of TCR clone 88205 (TRAV26-1, TRAJ52)
CIVRVEGAGGTSYGKLTF

SEQ ID NO: 176410 - protein, 16 aa, Homo sapiens
  CDR3 for beta chain variable domain of TCR clone 88205 (TRBV7-3, TRBJ2-1)
CASSSEGYRSYNEQFF

SEQ ID NO: 176411 - protein, 14 aa, Homo sapiens
  CDR3 for alpha chain variable domain of TCR clone 88206 (TRAV17, TRAJ34)
CATDSLEGTDKLIF

SEQ ID NO: 176412 - protein, 15 aa, Homo sapiens
  CDR3 for beta chain variable domain of TCR clone 88206 (TRBV7-2, TRBJ2-1)
CASSFSGGIYNEQFF

SEQ ID NO: 176413 - protein, 13 aa, Homo sapiens
  CDR3 for alpha chain variable domain of TCR clone 88207 (TRAV8-3, TRAJ28)
CAVGAVGSYQPTF

SEQ ID NO: 176414 - protein, 15 aa, Homo sapiens
  CDR3 for beta chain variable domain of TCR clone 88207 (TRBV7-9, TRBJ1-5)
CASSQGHQPNQPQHL

SEQ ID NO: 176415 - protein, 13 aa, Homo sapiens
  CDR3 for alpha chain variable domain of TCR clone 88208 (TRAV8-6, TRAJ21)
CAVSPSSLNKFYF

SEQ ID NO: 176416 - protein, 16 aa, Homo sapiens
  CDR3 for beta chain variable domain of TCR clone 88208 (TRBV7-7, TRBJ2-1)
CASSLASGTSYNEQFF

SEQ ID NO: 176417 - protein, 14 aa, Homo sapiens
  CDR3 for alpha chain variable domain of TCR clone 88209 (TRAV13-1, TRAJ44)
CSAKATGTASKLTF

SEQ ID NO: 176418 - protein, 12 aa, Homo sapiens
  CDR3 for beta chain variable domain of TCR clone 88209 (TRBV7-8, TRBJ2-7)
CASSLGDREQYF

SEQ ID NO: 176419 - protein, 14 aa, Homo sapiens
  CDR3 for alpha chain variable domain of TCR clone 88210 (TRAV17, TRAJ56)
CATVPAGANSKLTF

SEQ ID NO: 176420 - protein, 18 aa, Homo sapiens
  CDR3 for beta chain variable domain of TCR clone 88210 (TRBV7-2, TRBJ2-3)
CASSLKREGSGITDTQHF

SEQ ID NO: 176421 - protein, 12 aa, Homo sapiens
  CDR3 for alpha chain variable domain of TCR clone 88211 (TRAV1-1, TRAJ15)
CAVGQAGTALIF

SEQ ID NO: 176422 - protein, 16 aa, Homo sapiens
  CDR3 for beta chain variable domain of TCR clone 88211 (TRBV12-4, TRBJ2-7)
CASSTEGQGSSYEQYF

SEQ ID NO: 176423 - protein, 13 aa, Homo sapiens
  CDR3 for alpha chain variable domain of TCR clone 88212 (TRAV35, TRAJ57)
CAGSQGGSEKLFF

SEQ ID NO: 176424 - protein, 14 aa, Homo sapiens
  CDR3 for beta chain variable domain of TCR clone 88212 (TRBV25-1, TRBJ1-1)
CASTHLGGNTEAFF

SEQ ID NO: 176425 - protein, 13 aa, Homo sapiens
  CDR3 for alpha chain variable domain of TCR clone 88213 (TRAV3, TRAJ20)
CAVRLLNDYKLSF

SEQ ID NO: 176426 - protein, 12 aa, Homo sapiens
  CDR3 for beta chain variable domain of TCR clone 88213 (TRBV6-1, TRBJ2-1)
CATYGLNNEQFF

SEQ ID NO: 176427 - protein, 16 aa, Homo sapiens
  CDR3 for alpha chain variable domain of TCR clone 88214 (TRAV26-1, TRAJ37)
CIVRGDGSANTGKLIF

SEQ ID NO: 176428 - protein, 17 aa, Homo sapiens
  CDR3 for beta chain variable domain of TCR clone 88214 (TRBV4-1, TRBJ2-7)
CASSRDPLGVRGGEQYF

SEQ ID NO: 176429 - protein, 14 aa, Homo sapiens
  CDR3 for alpha chain variable domain of TCR clone 88215 (TRAV3, TRAJ27)
CAVRDDTNAGKSTF

SEQ ID NO: 176430 - protein, 15 aa, Homo sapiens
  CDR3 for beta chain variable domain of TCR clone 88215 (TRBV7-7, TRBJ2-2)
CATSKLAKNTGELFC

SEQ ID NO: 176431 - protein, 14 aa, Homo sapiens
  CDR3 for alpha chain variable domain of TCR clone 88216 (TRAV17, TRAJ45)
CATASGGGAYGLTF

SEQ ID NO: 176432 - protein, 15 aa, Homo sapiens
  CDR3 for beta chain variable domain of TCR clone 88216 (TRBV11-2, TRBJ2-1)
CASSRNRGLMYEQFF

SEQ ID NO: 176433 - protein, 11 aa, Homo sapiens
  CDR3 for alpha chain variable domain of TCR clone 88217 (TRAV23/DV6, TRAJ48)
CAPRWGDKLTF

SEQ ID NO: 176434 - protein, 13 aa, Homo sapiens
  CDR3 for beta chain variable domain of TCR clone 88217 (TRBV12-4, TRBJ2-5)
CASSPGTEETQYF

SEQ ID NO: 176435 - protein, 13 aa, Homo sapiens
  CDR3 for alpha chain variable domain of TCR clone 88218 (TRAV27, TRAJ49)
CAPRPYTGNQFYF

SEQ ID NO: 176436 - protein, 18 aa, Homo sapiens
  CDR3 for beta chain variable domain of TCR clone 88218 (TRBV7-3, TRBJ2-5)
CASSLGGAAQGGWETQYF

SEQ ID NO: 176437 - protein, 14 aa, Homo sapiens
  CDR3 for alpha chain variable domain of TCR clone 88219 (TRAV26-1, TRAJ22)
CIVRGYGSARQLTF

SEQ ID NO: 176438 - protein, 17 aa, Homo sapiens
  CDR3 for beta chain variable domain of TCR clone 88219 (TRBV7-3, TRBJ2-3)
CASSPGGLAGFGDTQYF

SEQ ID NO: 176439 - protein, 21 aa, Homo sapiens
  CDR3 for alpha chain variable domain of TCR clone 88220 (TRAV1-1, TRAJ6)
CLLHLRCERLERTGGSYIPTF

SEQ ID NO: 176440 - protein, 13 aa, Homo sapiens
  CDR3 for beta chain variable domain of TCR clone 88220 (TRBV10-2, TRBJ2-7)
CASGASGGYEQYF

SEQ ID NO: 176441 - protein, 13 aa, Homo sapiens
  CDR3 for alpha chain variable domain of TCR clone 88221 (TRAV36/DV7, TRAJ50)
CAVSKTSYDKVIF

SEQ ID NO: 176442 - protein, 14 aa, Homo sapiens
  CDR3 for beta chain variable domain of TCR clone 88221 (TRBV7-9, TRBJ2-2)
CASSLTANTGELFF

SEQ ID NO: 176443 - protein, 16 aa, Homo sapiens
  CDR3 for alpha chain variable domain of TCR clone 88222 (TRAV38-2/DV8, TRAJ33)
CAYGTGLFDSNYQLIW

SEQ ID NO: 176444 - protein, 13 aa, Homo sapiens
  CDR3 for beta chain variable domain of TCR clone 88222 (TRBV27, TRBJ1-4)
CASSLMGDEKLFF

SEQ ID NO: 176445 - protein, 15 aa, Homo sapiens
  CDR3 for alpha chain variable domain of TCR clone 88223 (TRAV25, TRAJ52)
CAGTSVGTSYGKLTF

SEQ ID NO: 176446 - protein, 16 aa, Homo sapiens
  CDR3 for beta chain variable domain of TCR clone 88223 (TRBV15, TRBJ1-2)
CATSRGPRTGGGGYTF

SEQ ID NO: 176447 - protein, 15 aa, Homo sapiens
  CDR3 for alpha chain variable domain of TCR clone 88224 (TRAV35, TRAJ23)
CAGPLGNNQGGKLIF

SEQ ID NO: 176448 - protein, 14 aa, Homo sapiens
  CDR3 for beta chain variable domain of TCR clone 88224 (TRBV7-9, TRBJ1-1)
CASTLLQSYTEAFF

SEQ ID NO: 176449 - protein, 14 aa, Homo sapiens
  CDR3 for alpha chain variable domain of TCR clone 88225 (TRAV35, TRAJ24)
CAGPRRDRWGKLQF

SEQ ID NO: 176450 - protein, 12 aa, Homo sapiens
  CDR3 for beta chain variable domain of TCR clone 88225 (TRBV12-4, TRBJ2-3)
CASSLGQDTQYF

SEQ ID NO: 176451 - protein, 13 aa, Homo sapiens
  CDR3 for alpha chain variable domain of TCR clone 88226 (TRAV8-1, TRAJ28)
CAVSGAGSYQLNF

SEQ ID NO: 176452 - protein, 14 aa, Homo sapiens
  CDR3 for beta chain variable domain of TCR clone 88226 (TRBV7-2, TRBJ2-2)
CASRGQGAAGELFF

SEQ ID NO: 176453 - protein, 14 aa, Homo sapiens
  CDR3 for alpha chain variable domain of TCR clone 88227 (TRAV12-1, TRAJ17)
CVVNYKSAGNKLTF

SEQ ID NO: 176454 - protein, 14 aa, Homo sapiens
  CDR3 for beta chain variable domain of TCR clone 88227 (TRBV7-8, TRBJ2-3)
CASSLEAGTDTQYF

SEQ ID NO: 176455 - protein, 14 aa, Homo sapiens
  CDR3 for alpha chain variable domain of TCR clone 88228 (TRAV13-1, TRAJ44)
CAARATGTASKLTF

SEQ ID NO: 176456 - protein, 14 aa, Homo sapiens
  CDR3 for beta chain variable domain of TCR clone 88228 (TRBV19, TRBJ2-2)
CASSTLHRSGELFF

SEQ ID NO: 176457 - protein, 14 aa, Homo sapiens
  CDR3 for alpha chain variable domain of TCR clone 88229 (TRAV12-2, TRAJ13)
CAVKKTGGYQKVTF

SEQ ID NO: 176458 - protein, 15 aa, Homo sapiens
  CDR3 for beta chain variable domain of TCR clone 88229 (TRBV5-1, TRBJ2-5)
CASSFKGGDQETQYF

SEQ ID NO: 176459 - protein, 15 aa, Homo sapiens
  CDR3 for alpha chain variable domain of TCR clone 88230 (TRAV34, TRAJ38)
CGADFTPGNNRKLIW

SEQ ID NO: 176460 - protein, 13 aa, Homo sapiens
  CDR3 for beta chain variable domain of TCR clone 88230 (TRBV4-1, TRBJ2-7)
CASSQGQAYEQYF

SEQ ID NO: 176461 - protein, 15 aa, Homo sapiens
  CDR3 for alpha chain variable domain of TCR clone 88231 (TRAV3, TRAJ5)
CALRDRKTGRRALTF

SEQ ID NO: 176462 - protein, 15 aa, Homo sapiens
  CDR3 for beta chain variable domain of TCR clone 88231 (TRBV7-8, TRBJ2-1)
CASSLADSLYNEQFF

SEQ ID NO: 176463 - protein, 12 aa, Homo sapiens
  CDR3 for alpha chain variable domain of TCR clone 88232 (TRAV41, TRAJ58)
CAVETSGARLTF

SEQ ID NO: 176464 - protein, 15 aa, Homo sapiens
  CDR3 for beta chain variable domain of TCR clone 88232 (TRBV29-1, TRBJ2-6)
CSVGDRGSGANVLTF

SEQ ID NO: 176465 - protein, 14 aa, Homo sapiens
  CDR3 for alpha chain variable domain of TCR clone 88233 (TRAV12-2, TRAJ45)
CAVNKGGGAAGLTF

SEQ ID NO: 176466 - protein, 14 aa, Homo sapiens
  CDR3 for beta chain variable domain of TCR clone 88233 (TRBV20-1, TRBJ1-1)
CSAMGGTANTEAFF

SEQ ID NO: 176467 - protein, 14 aa, Homo sapiens
  CDR3 for alpha chain variable domain of TCR clone 88234 (TRAV35, TRAJ13)
CAGSPSGVYQKVTF

SEQ ID NO: 176468 - protein, 17 aa, Homo sapiens
  CDR3 for beta chain variable domain of TCR clone 88234 (TRBV7-6, TRBJ2-5)
CASSPGLADPWGETQYF

SEQ ID NO: 176469 - protein, 14 aa, Homo sapiens
  CDR3 for alpha chain variable domain of TCR clone 88235 (TRAV29/DV5, TRAJ36)
CAARRKTGANNLFF

SEQ ID NO: 176470 - protein, 15 aa, Homo sapiens
  CDR3 for beta chain variable domain of TCR clone 88235 (TRBV11-2, TRBJ1-6)
CASTGFGTAVSPLHF

SEQ ID NO: 176471 - protein, 11 aa, Homo sapiens
  CDR3 for alpha chain variable domain of TCR clone 88236 (TRAV21, TRAJ34)
CAHYNTDKLIF

SEQ ID NO: 176472 - protein, 11 aa, Homo sapiens
  CDR3 for beta chain variable domain of TCR clone 88236 (TRBV29-1, TRBJ2-5)
CSDDRTGTQYF

SEQ ID NO: 176473 - protein, 13 aa, Homo sapiens
  CDR3 for alpha chain variable domain of TCR clone 88237 (TRAV12-1, TRAJ26)
CVVRRNYGQNFVF

SEQ ID NO: 176474 - protein, 14 aa, Homo sapiens
  CDR3 for beta chain variable domain of TCR clone 88237 (TRBV3-1, TRBJ2-5)
CASSQGPDQETQYF

SEQ ID NO: 176475 - protein, 10 aa, Homo sapiens
  CDR3 for alpha chain variable domain of TCR clone 88238 (TRAV1-2, TRAJ23)
CAGQGVKLIF

SEQ ID NO: 176476 - protein, 16 aa, Homo sapiens
  CDR3 for beta chain variable domain of TCR clone 88238 (TRBV11-2, TRBJ1-1)
CASSLRQGGEHSKAFF

SEQ ID NO: 176477 - protein, 14 aa, Homo sapiens
  CDR3 for alpha chain variable domain of TCR clone 88239 (TRAV1-2, TRAJ16)
CAVKRFSDGQKLLF

SEQ ID NO: 176478 - protein, 13 aa, Homo sapiens
  CDR3 for beta chain variable domain of TCR clone 88239 (TRBV10-3, TRBJ2-7)
CASKLAVNYEQYF

SEQ ID NO: 176479 - protein, 12 aa, Homo sapiens
  CDR3 for alpha chain variable domain of TCR clone 88240 (TRAV12-3, TRAJ17)
CAMTLTGNKLTF

SEQ ID NO: 176480 - protein, 15 aa, Homo sapiens
  CDR3 for beta chain variable domain of TCR clone 88240 (TRBV4-2, TRBJ1-1)
CASSRVGSMNTEAFF

SEQ ID NO: 176481 - protein, 13 aa, Homo sapiens
  CDR3 for alpha chain variable domain of TCR clone 88241 (TRAV12-1, TRAJ34)
CVLTGYNTDKLIF

SEQ ID NO: 176482 - protein, 13 aa, Homo sapiens
  CDR3 for beta chain variable domain of TCR clone 88241 (TRBV28, TRBJ2-7)
CASKAGGVYEQYF

SEQ ID NO: 176483 - protein, 11 aa, Homo sapiens
  CDR3 for alpha chain variable domain of TCR clone 88242 (TRAV2, TRAJ13)
CASGGYQKVTF

SEQ ID NO: 176484 - protein, 12 aa, Homo sapiens
  CDR3 for beta chain variable domain of TCR clone 88242 (TRBV20-1, TRBJ1-1)
QCSTWGGTEAFF

SEQ ID NO: 176485 - protein, 14 aa, Homo sapiens
  CDR3 for alpha chain variable domain of TCR clone 88243 (TRAV1-2, TRAJ8)
CAVREDTGFQKLVF

SEQ ID NO: 176486 - protein, 15 aa, Homo sapiens
  CDR3 for beta chain variable domain of TCR clone 88243 (TRBV7-3, TRBJ2-2)
CASSETAQGTGELFF

SEQ ID NO: 176487 - protein, 13 aa, Homo sapiens
  CDR3 for alpha chain variable domain of TCR clone 88244 (TRAV12-3, TRAJ13)
CAMSSGGYQKVTF

SEQ ID NO: 176488 - protein, 18 aa, Homo sapiens
  CDR3 for beta chain variable domain of TCR clone 88244 (TRBV11-2, TRBJ2-3)
CASSLGGASRGAPNTQYF

SEQ ID NO: 176489 - protein, 12 aa, Homo sapiens
  CDR3 for alpha chain variable domain of TCR clone 88245 (TRAV1-1, TRAJ8)
CAVGTGFQKLVF

SEQ ID NO: 176490 - protein, 13 aa, Homo sapiens
  CDR3 for beta chain variable domain of TCR clone 88245 (TRBV7-9, TRBJ1-2)
CASSLKQNYGYTF

SEQ ID NO: 176491 - protein, 12 aa, Homo sapiens
  CDR3 for alpha chain variable domain of TCR clone 88246 (TRAV8-3, TRAJ26)
CAGDNYGQTFVF

SEQ ID NO: 176492 - protein, 17 aa, Homo sapiens
  CDR3 for beta chain variable domain of TCR clone 88246 (TRBV7-8, TRBJ2-6)
CASSAGTGGAGANVLTF

SEQ ID NO: 176493 - protein, 13 aa, Homo sapiens
  CDR3 for alpha chain variable domain of TCR clone 88247 (TRAV12-3, TRAJ13)
CAMSSGGYQKVTF

SEQ ID NO: 176494 - protein, 13 aa, Homo sapiens
  CDR3 for beta chain variable domain of TCR clone 88247 (TRBV7-9, TRBJ2-1)
CASSLDVGNEQFF

SEQ ID NO: 176495 - protein, 14 aa, Homo sapiens
  CDR3 for alpha chain variable domain of TCR clone 88248 (TRAV12-2, TRAJ17)
CAVLFKAAGNKLTF

SEQ ID NO: 176496 - protein, 15 aa, Homo sapiens
  CDR3 for beta chain variable domain of TCR clone 88248 (TRBV19, TRBJ1-5)
CASSIVWADNQPQHF

SEQ ID NO: 176497 - protein, 17 aa, Homo sapiens
  CDR3 for alpha chain variable domain of TCR clone 88249 (TRAV8-1, TRAJ43)
CAVTNDMRFGAGTRLTV

SEQ ID NO: 176498 - protein, 12 aa, Homo sapiens
  CDR3 for beta chain variable domain of TCR clone 88249 (TRBV11-2, TRBJ2-2)
CARSLGGGELFF

SEQ ID NO: 176499 - protein, 15 aa, Homo sapiens
  CDR3 for alpha chain variable domain of TCR clone 88250 (TRAV26-1, TRAJ22)
CIVRVSFWFCKATDL

SEQ ID NO: 176500 - protein, 11 aa, Homo sapiens
  CDR3 for beta chain variable domain of TCR clone 88250 (TRBV12-4, TRBJ2-3)
CASTATDTQYF

SEQ ID NO: 176501 - protein, 12 aa, Homo sapiens
  CDR3 for alpha chain variable domain of TCR clone 88251 (TRAV17, TRAJ39)
CATGAAGNMLTF

SEQ ID NO: 176502 - protein, 15 aa, Homo sapiens
  CDR3 for beta chain variable domain of TCR clone 88251 (TRBV9, TRBJ1-6)
CASSVAGTGDSPLHF

SEQ ID NO: 176503 - protein, 17 aa, Homo sapiens
  CDR3 for alpha chain variable domain of TCR clone 88252 (TRAV1-2, TRAJ27)
CAVRDKTGDTNAGKSTF

SEQ ID NO: 176504 - protein, 14 aa, Homo sapiens
  CDR3 for beta chain variable domain of TCR clone 88252 (TRBV19, TRBJ2-1)
CASPTFVLSGEQFF

SEQ ID NO: 176505 - protein, 12 aa, Homo sapiens
  CDR3 for alpha chain variable domain of TCR clone 88253 (TRAV12-3, TRAJ17)
CAMTLTGNKLTF

SEQ ID NO: 176506 - protein, 12 aa, Homo sapiens
  CDR3 for beta chain variable domain of TCR clone 88253 (TRBV11-3, TRBJ1-1)
CASSHRQGEAFF

SEQ ID NO: 176507 - protein, 13 aa, Homo sapiens
  CDR3 for alpha chain variable domain of TCR clone 88254 (TRAV12-2, TRAJ22)
CALYSGSASQLTF

SEQ ID NO: 176508 - protein, 13 aa, Homo sapiens
  CDR3 for beta chain variable domain of TCR clone 88254 (TRBV19, TRBJ2-1)
CASMEFRSNEQFF

SEQ ID NO: 176509 - protein, 15 aa, Homo sapiens
  CDR3 for alpha chain variable domain of TCR clone 88255 (TRAV26-1, TRAJ13)
CIVRHEAGGYQKVTF

SEQ ID NO: 176510 - protein, 15 aa, Homo sapiens
  CDR3 for beta chain variable domain of TCR clone 88255 (TRBV7-3, TRBJ2-2)
CASSETGQGTGELFF

SEQ ID NO: 176511 - protein, 11 aa, Homo sapiens
  CDR3 for alpha chain variable domain of TCR clone 88256 (TRAV2, TRAJ33)
CAVDSNYQLIW

SEQ ID NO: 176512 - protein, 15 aa, Homo sapiens
  CDR3 for beta chain variable domain of TCR clone 88256 (TRBV19, TRBJ1-1)
CASTSGQIQNTEALF

SEQ ID NO: 176513 - protein, 13 aa, Homo sapiens
  CDR3 for alpha chain variable domain of TCR clone 88257 (TRAV17, TRAJ9)
CVTDYTGGFKTIF

SEQ ID NO: 176514 - protein, 14 aa, Homo sapiens
  CDR3 for beta chain variable domain of TCR clone 88257 (TRBV19, TRBJ2-5)
CASSMTGQQETQYF

SEQ ID NO: 176515 - protein, 16 aa, Homo sapiens
  CDR3 for alpha chain variable domain of TCR clone 88258 (TRAV30, TRAJ24)
FGTEIVDADSWGKFQF

SEQ ID NO: 176516 - protein, 13 aa, Homo sapiens
  CDR3 for beta chain variable domain of TCR clone 88258 (TRBV11-2, TRBJ2-5)
CASSSTGEETQYF

SEQ ID NO: 176517 - protein, 17 aa, Homo sapiens
  CDR3 for alpha chain variable domain of TCR clone 88259 (TRAV13-1, TRAJ52)
CSASPGAGGTSYGKLTF

SEQ ID NO: 176518 - protein, 15 aa, Homo sapiens
  CDR3 for beta chain variable domain of TCR clone 88259 (TRBV2, TRBJ2-1)
CASSELAGSYNEQFF

SEQ ID NO: 176519 - protein, 14 aa, Homo sapiens
  CDR3 for alpha chain variable domain of TCR clone 88260 (TRAV12-2, TRAJ11)
CAVEGGSGYSTLTF

SEQ ID NO: 176520 - protein, 16 aa, Homo sapiens
  CDR3 for beta chain variable domain of TCR clone 88260 (TRBV6-1, TRBJ1-2)
CASSGAWKGRSHGYTF

SEQ ID NO: 176521 - protein, 14 aa, Homo sapiens
  CDR3 for alpha chain variable domain of TCR clone 88261 (TRAV1-2, TRAJ16)
CAVNRFSDGRKLLF

SEQ ID NO: 176522 - protein, 14 aa, Homo sapiens
  CDR3 for beta chain variable domain of TCR clone 88261 (TRBV7-8, TRBJ2-3)
CASSLEAGTDTQYF

SEQ ID NO: 176523 - protein, 14 aa, Homo sapiens
  CDR3 for alpha chain variable domain of TCR clone 88262 (TRAV12-2, TRAJ40)
CAVKIPSGTHKYIF

SEQ ID NO: 176524 - protein, 17 aa, Homo sapiens
  CDR3 for beta chain variable domain of TCR clone 88262 (TRBV13, TRBJ2-3)
CASSLARVAGGRNTQYF

SEQ ID NO: 176525 - protein, 11 aa, Homo sapiens
  CDR3 for alpha chain variable domain of TCR clone 88263 (TRAV12-3, TRAJ43)
CAMSVSNDMRF

SEQ ID NO: 176526 - protein, 15 aa, Homo sapiens
  CDR3 for beta chain variable domain of TCR clone 88263 (TRBV20-1, TRBJ1-1)
CSASRGVTGNTEAFF

SEQ ID NO: 176527 - protein, 13 aa, Homo sapiens
  CDR3 for alpha chain variable domain of TCR clone 88264 (TRAV38-2/DV8, TRAJ34)
CAYRTWNTDKLIF

SEQ ID NO: 176528 - protein, 15 aa, Homo sapiens
  CDR3 for beta chain variable domain of TCR clone 88264 (TRBV4-1, TRBJ1-4)
CASSDTGGTNEKLFF

SEQ ID NO: 176529 - protein, 11 aa, Homo sapiens
  CDR3 for alpha chain variable domain of TCR clone 88265 (TRAV12-1, TRAJ34)
CVVNKGRELIF

SEQ ID NO: 176530 - protein, 12 aa, Homo sapiens
  CDR3 for beta chain variable domain of TCR clone 88265 (TRBV2, TRBJ2-1)
CACGPPGNEQFF

SEQ ID NO: 176531 - protein, 16 aa, Homo sapiens
  CDR3 for alpha chain variable domain of TCR clone 88266 (TRAV30, TRAJ24)
CGTEIVNADSWGKFQF

SEQ ID NO: 176532 - protein, 16 aa, Homo sapiens
  CDR3 for beta chain variable domain of TCR clone 88266 (TRBV2, TRBJ1-3)
CASSGGAGRSGNTIYF

SEQ ID NO: 176533 - protein, 12 aa, Homo sapiens
  CDR3 for alpha chain variable domain of TCR clone 88267 (TRAV16, TRAJ26)
CALRCYGQNFVF

SEQ ID NO: 176534 - protein, 14 aa, Homo sapiens
  CDR3 for beta chain variable domain of TCR clone 88267 (TRBV10-3, TRBJ2-1)
CAISSDLAYNEQFF

SEQ ID NO: 176535 - protein, 14 aa, Homo sapiens
  CDR3 for alpha chain variable domain of TCR clone 88268 (TRAV21, TRAJ35)
CAVMPIGFGNVLHC

SEQ ID NO: 176536 - protein, 14 aa, Homo sapiens
  CDR3 for beta chain variable domain of TCR clone 88268 (TRBV7-2, TRBJ2-3)
CASSQTGSSYTQYF

SEQ ID NO: 176537 - protein, 18 aa, Homo sapiens
  CDR3 for alpha chain variable domain of TCR clone 88269 (TRAV21, TRAJ52)
CAVRPSPAGGPSYGKLTF

SEQ ID NO: 176538 - protein, 13 aa, Homo sapiens
  CDR3 for beta chain variable domain of TCR clone 88269 (TRBV29-1, TRBJ2-1)
CSVEGGRVNEQFF

SEQ ID NO: 176539 - protein, 14 aa, Homo sapiens
  CDR3 for alpha chain variable domain of TCR clone 88270 (TRAV17, TRAJ54)
CATDANQGAQKLEF

SEQ ID NO: 176540 - protein, 12 aa, Homo sapiens
  CDR3 for beta chain variable domain of TCR clone 88270 (TRBV6-3, TRBJ2-1)
CASSGSYNEQFF

SEQ ID NO: 176541 - protein, 12 aa, Homo sapiens
  CDR3 for alpha chain variable domain of TCR clone 88271 (TRAV8-3, TRAJ26)
CAGDNYGQNFVF

SEQ ID NO: 176542 - protein, 16 aa, Homo sapiens
  CDR3 for beta chain variable domain of TCR clone 88271 (TRBV20-1, TRBJ1-4)
CSAPGQGVLTNEKLFF

SEQ ID NO: 176543 - protein, 15 aa, Homo sapiens
  CDR3 for alpha chain variable domain of TCR clone 88272 (TRAV27, TRAJ38)
CAARRNAGNNRKLIW

SEQ ID NO: 176544 - protein, 13 aa, Homo sapiens
  CDR3 for beta chain variable domain of TCR clone 88272 (TRBV7-2, TRBJ1-1)
CASNLKGAKVAFF

SEQ ID NO: 176545 - protein, 11 aa, Homo sapiens
  CDR3 for alpha chain variable domain of TCR clone 88273 (TRAV1-1, TRAJ23)
CAVRQGGKLIF

SEQ ID NO: 176546 - protein, 15 aa, Homo sapiens
  CDR3 for beta chain variable domain of TCR clone 88273 (TRBV3-1, TRBJ2-2)
CASSQDWTRAGELFF

SEQ ID NO: 176547 - protein, 14 aa, Homo sapiens
  CDR3 for alpha chain variable domain of TCR clone 88274 (TRAV8-2, TRAJ4)
CVVSPSGGYNKLIF

SEQ ID NO: 176548 - protein, 13 aa, Homo sapiens
  CDR3 for beta chain variable domain of TCR clone 88274 (TRBV7-2, TRBJ2-2)
CASSLAVTGELFF

SEQ ID NO: 176549 - protein, 14 aa, Homo sapiens
  CDR3 for alpha chain variable domain of TCR clone 88275 (TRAV2, TRAJ9)
CAVEDRSGGFKTIF

SEQ ID NO: 176550 - protein, 16 aa, Homo sapiens
  CDR3 for beta chain variable domain of TCR clone 88275 (TRBV28, TRBJ1-5)
CASSLTGQGRNQPQHF

SEQ ID NO: 176551 - protein, 18 aa, Homo sapiens
  CDR3 for alpha chain variable domain of TCR clone 88276 (TRAV13-1, TRAJ52)
CAASKRSAGGTSYGKLTF

SEQ ID NO: 176552 - protein, 16 aa, Homo sapiens
  CDR3 for beta chain variable domain of TCR clone 88276 (TRBV4-3, TRBJ2-1)
CASSPALDRGVNEQFF

SEQ ID NO: 176553 - protein, 14 aa, Homo sapiens
  CDR3 for alpha chain variable domain of TCR clone 88277 (TRAV13-1, TRAJ35)
CAASKGGFGNVLHC

SEQ ID NO: 176554 - protein, 15 aa, Homo sapiens
  CDR3 for beta chain variable domain of TCR clone 88277 (TRBV6-3, TRBJ2-7)
CASSSLGTVFYEQYF

SEQ ID NO: 176555 - protein, 15 aa, Homo sapiens
  CDR3 for alpha chain variable domain of TCR clone 88278 (TRAV12-3, TRAJ27)
CAMRPITPMQANQPL

SEQ ID NO: 176556 - protein, 13 aa, Homo sapiens
  CDR3 for beta chain variable domain of TCR clone 88278 (TRBV11-2, TRBJ2-5)
CASSRGPSETQYF

SEQ ID NO: 176557 - protein, 14 aa, Homo sapiens
  CDR3 for alpha chain variable domain of TCR clone 88279 (TRAV35, TRAJ40)
RAGSTTSGTYKYIF

SEQ ID NO: 176558 - protein, 13 aa, Homo sapiens
  CDR3 for beta chain variable domain of TCR clone 88279 (TRBV20-1, TRBJ1-6)
CSAPLGVGSPLHF

SEQ ID NO: 176559 - protein, 14 aa, Homo sapiens
  CDR3 for alpha chain variable domain of TCR clone 88280 (TRAV23/DV6, TRAJ24)
CAASLSDSWGQLQF

SEQ ID NO: 176560 - protein, 16 aa, Homo sapiens
  CDR3 for beta chain variable domain of TCR clone 88280 (TRBV7-9, TRBJ2-6)
CASSLKGPLRANVLTF

SEQ ID NO: 176561 - protein, 14 aa, Homo sapiens
  CDR3 for alpha chain variable domain of TCR clone 88281 (TRAV13-1, TRAJ9)
CAASALTGGFKTIF

SEQ ID NO: 176562 - protein, 15 aa, Homo sapiens
  CDR3 for beta chain variable domain of TCR clone 88281 (TRBV20-1, TRBJ2-1)
CSARFSAGGLNEQFF

SEQ ID NO: 176563 - protein, 23 aa, Homo sapiens
  CDR3 for alpha chain variable domain of TCR clone 88282 (TRAV8-6, TRAJ38)
CAVRNAGNNHIHNPDPAVYQLRD

SEQ ID NO: 176564 - protein, 15 aa, Homo sapiens
  CDR3 for beta chain variable domain of TCR clone 88282 (TRBV4-1, TRBJ2-2)
CASSEGQGITGELFF

SEQ ID NO: 176565 - protein, 12 aa, Homo sapiens
  CDR3 for alpha chain variable domain of TCR clone 88283 (TRAV3, TRAJ20)
CAVRDPDYKLSF

SEQ ID NO: 176566 - protein, 15 aa, Homo sapiens
  CDR3 for beta chain variable domain of TCR clone 88283 (TRBV6-5, TRBJ1-2)
CASSYSQAFNYGYTF

SEQ ID NO: 176567 - protein, 15 aa, Homo sapiens
  CDR3 for alpha chain variable domain of TCR clone 88284 (TRAV3, TRAJ20)
CAVRDIKLSDYKLSF

SEQ ID NO: 176568 - protein, 18 aa, Homo sapiens
  CDR3 for beta chain variable domain of TCR clone 88284 (TRBV6-6, TRBJ1-3)
CASSYSKWDSISGNTIYF

SEQ ID NO: 176569 - protein, 12 aa, Homo sapiens
  CDR3 for alpha chain variable domain of TCR clone 88285 (TRAV29/DV5, TRAJ27)
CTASTNAGKSTF

SEQ ID NO: 176570 - protein, 13 aa, Homo sapiens
  CDR3 for beta chain variable domain of TCR clone 88285 (TRBV6-5, TRBJ2-7)
CASSYSGQYEQYF

SEQ ID NO: 176571 - protein, 12 aa, Homo sapiens
  CDR3 for alpha chain variable domain of TCR clone 88286 (TRAV29/DV5, TRAJ26)
CAAIPSGQNFVF

SEQ ID NO: 176572 - protein, 15 aa, Homo sapiens
  CDR3 for beta chain variable domain of TCR clone 88286 (TRBV19, TRBJ1-5)
CASSDSGPRNRPQHF

SEQ ID NO: 176573 - protein, 13 aa, Homo sapiens
  CDR3 for alpha chain variable domain of TCR clone 88287 (TRAV8-3, TRAJ44)
CAVLPGTASKLTF

SEQ ID NO: 176574 - protein, 14 aa, Homo sapiens
  CDR3 for beta chain variable domain of TCR clone 88287 (TRBV11-2, TRBJ2-3)
CASRRLARTDTQYF

SEQ ID NO: 176575 - protein, 11 aa, Homo sapiens
  CDR3 for alpha chain variable domain of TCR clone 88288 (TRAV21, TRAJ56)
GYTGANSKLTF

SEQ ID NO: 176576 - protein, 14 aa, Homo sapiens
  CDR3 for beta chain variable domain of TCR clone 88288 (TRBV27, TRBJ2-2)
CASRPGVNTGELFF

SEQ ID NO: 176577 - protein, 18 aa, Homo sapiens
  CDR3 for alpha chain variable domain of TCR clone 88289 (TRAV21, TRAJ52)
CAVRPSPAGGTSYGKLTF

SEQ ID NO: 176578 - protein, 13 aa, Homo sapiens
  CDR3 for beta chain variable domain of TCR clone 88289 (TRBV2, TRBJ1-4)
CASSERAGEKLFF

SEQ ID NO: 176579 - protein, 14 aa, Homo sapiens
  CDR3 for alpha chain variable domain of TCR clone 88290 (TRAV12-2, TRAJ13)
CAVKKTGGYQKVAF

SEQ ID NO: 176580 - protein, 13 aa, Homo sapiens
  CDR3 for beta chain variable domain of TCR clone 88290 (TRBV7-3, TRBJ2-5)
CASSFRGGETQYF

SEQ ID NO: 176581 - protein, 14 aa, Homo sapiens
  CDR3 for alpha chain variable domain of TCR clone 88291 (TRAV3, TRAJ40)
CAVRDRRGTYKYIF

SEQ ID NO: 176582 - protein, 12 aa, Homo sapiens
  CDR3 for beta chain variable domain of TCR clone 88291 (TRBV12-4, TRBJ2-3)
CASSTLPDTQYF

SEQ ID NO: 176583 - protein, 16 aa, Homo sapiens
  CDR3 for alpha chain variable domain of TCR clone 88292 (TRAV4, TRAJ22)
CLVGDLYSGSARQLTF

SEQ ID NO: 176584 - protein, 14 aa, Homo sapiens
  CDR3 for beta chain variable domain of TCR clone 88292 (TRBV19, TRBJ1-2)
CASSIGAGSYGYTF

SEQ ID NO: 176585 - protein, 10 aa, Homo sapiens
  CDR3 for alpha chain variable domain of TCR clone 88293 (TRAV1-2, TRAJ23)
RAGQGGKLIF

SEQ ID NO: 176586 - protein, 16 aa, Homo sapiens
  CDR3 for beta chain variable domain of TCR clone 88293 (TRBV11-2, TRBJ1-1)
CASSLRQGGEHSKAFF

SEQ ID NO: 176587 - protein, 11 aa, Homo sapiens
  CDR3 for alpha chain variable domain of TCR clone 88294 (TRAV17, TRAJ36)
CAPTGANNLFF

SEQ ID NO: 176588 - protein, 11 aa, Homo sapiens
  CDR3 for beta chain variable domain of TCR clone 88294 (TRBV11-2, TRBJ2-2)
CASSLPGELFF

SEQ ID NO: 176589 - protein, 11 aa, Homo sapiens
  CDR3 for alpha chain variable domain of TCR clone 88295 (TRAV20, TRAJ40)
CAVGGTYKYIF

SEQ ID NO: 176590 - protein, 15 aa, Homo sapiens
  CDR3 for beta chain variable domain of TCR clone 88295 (TRBV6-3, TRBJ2-2)
CASSFLSTLTGELFF

SEQ ID NO: 176591 - protein, 12 aa, Homo sapiens
  CDR3 for alpha chain variable domain of TCR clone 88296 (TRAV1-1, TRAJ8)
CAGGTGFQKLVF

SEQ ID NO: 176592 - protein, 13 aa, Homo sapiens
  CDR3 for beta chain variable domain of TCR clone 88296 (TRBV7-9, TRBJ1-2)
CAGSLKQNYGYTF

SEQ ID NO: 176593 - protein, 13 aa, Homo sapiens
  CDR3 for alpha chain variable domain of TCR clone 88297 (TRAV12-2, TRAJ6)
CAVNVSRKLHTFI

SEQ ID NO: 176594 - protein, 12 aa, Homo sapiens
  CDR3 for beta chain variable domain of TCR clone 88297 (TRBV29-1, TRBJ2-3)
CSVTGGADTQYF

SEQ ID NO: 176595 - protein, 12 aa, Homo sapiens
  CDR3 for alpha chain variable domain of TCR clone 88298 (TRAV30, TRAJ39)
CGRGNAGNMLTF

SEQ ID NO: 176596 - protein, 14 aa, Homo sapiens
  CDR3 for beta chain variable domain of TCR clone 88298 (TRBV7-2, TRBJ2-2)
YASRGQGAAGELFF

SEQ ID NO: 176597 - protein, 15 aa, Homo sapiens
  CDR3 for alpha chain variable domain of TCR clone 88299 (TRAV17, TRAJ48)
CATDEANFGNEKLTF

SEQ ID NO: 176598 - protein, 14 aa, Homo sapiens
  CDR3 for beta chain variable domain of TCR clone 88299 (TRBV10-3, TRBJ1-3)
CAIRGQRAGNTIYF

SEQ ID NO: 176599 - protein, 14 aa, Homo sapiens
  CDR3 for alpha chain variable domain of TCR clone 88300 (TRAV1-1, TRAJ28)
CAAPSGAGSYQLTF

SEQ ID NO: 176600 - protein, 15 aa, Homo sapiens
  CDR3 for beta chain variable domain of TCR clone 88300 (TRBV7-2, TRBJ1-2)
CASGLVSGGDYGYTF

SEQ ID NO: 176601 - protein, 16 aa, Homo sapiens
  CDR3 for alpha chain variable domain of TCR clone 88301 (TRAV3, TRAJ21)
CAVRDIERRNFNKFYF

SEQ ID NO: 176602 - protein, 13 aa, Homo sapiens
  CDR3 for beta chain variable domain of TCR clone 88301 (TRBV27, TRBJ2-7)
CASSLTTGYEQYF

SEQ ID NO: 176603 - protein, 13 aa, Homo sapiens
  CDR3 for alpha chain variable domain of TCR clone 88302 (TRAV13-1, TRAJ5)
CAARVTGRRALTF

SEQ ID NO: 176604 - protein, 15 aa, Homo sapiens
  CDR3 for beta chain variable domain of TCR clone 88302 (TRBV7-3, TRBJ2-1)
CASSPTGGGEVEQFF

SEQ ID NO: 176605 - protein, 18 aa, Homo sapiens
  CDR3 for alpha chain variable domain of TCR clone 88303 (TRAV16, TRAJ52)
CALSGVDAGGTSYGKLTF

SEQ ID NO: 176606 - protein, 14 aa, Homo sapiens
  CDR3 for beta chain variable domain of TCR clone 88303 (TRBV4-1, TRBJ2-2)
CASSQAVNTGELFF

SEQ ID NO: 176607 - protein, 13 aa, Homo sapiens
  CDR3 for alpha chain variable domain of TCR clone 88304 (TRAV12-3, TRAJ13)
CAMTSGGYQKVTS

SEQ ID NO: 176608 - protein, 13 aa, Homo sapiens
  CDR3 for beta chain variable domain of TCR clone 88304 (TRBV20-1, TRBJ2-2)
CSALSGGAGELFF

SEQ ID NO: 176609 - protein, 15 aa, Homo sapiens
  CDR3 for alpha chain variable domain of TCR clone 88305 (TRAV3, TRAJ22)
CAVRDRGSSARQLTF

SEQ ID NO: 176610 - protein, 14 aa, Homo sapiens
  CDR3 for beta chain variable domain of TCR clone 88305 (TRBV19, TRBJ1-5)
CASSLGLIGQPQHF

SEQ ID NO: 176611 - protein, 14 aa, Homo sapiens
  CDR3 for alpha chain variable domain of TCR clone 88306 (TRAV12-2, TRAJ45)
CALPERGVADGLTF

SEQ ID NO: 176612 - protein, 14 aa, Homo sapiens
  CDR3 for beta chain variable domain of TCR clone 88306 (TRBV18, TRBJ1-5)
CASSPGNSNQPQHF

SEQ ID NO: 176613 - protein, 14 aa, Homo sapiens
  CDR3 for alpha chain variable domain of TCR clone 88307 (TRAV1-2, TRAJ16)
CAVNRFSDGQKLLF

SEQ ID NO: 176614 - protein, 14 aa, Homo sapiens
  CDR3 for beta chain variable domain of TCR clone 88307 (TRBV7-3, TRBJ2-3)
CASSPSARTDTQYF

SEQ ID NO: 176615 - protein, 14 aa, Homo sapiens
  CDR3 for alpha chain variable domain of TCR clone 88308 (TRAV1-2, TRAJ16)
CAVNRFSDGQELLF

SEQ ID NO: 176616 - protein, 12 aa, Homo sapiens
  CDR3 for beta chain variable domain of TCR clone 88308 (TRBV5-1, TRBJ2-5)
CASSWDQETQYF

SEQ ID NO: 176617 - protein, 15 aa, Homo sapiens
  CDR3 for alpha chain variable domain of TCR clone 88309 (TRAV23/DV6, TRAJ18)
CAARYRGSTLGTLYF

SEQ ID NO: 176618 - protein, 13 aa, Homo sapiens
  CDR3 for beta chain variable domain of TCR clone 88309 (TRBV7-2, TRBJ2-7)
CASSSPSGSEQYF

SEQ ID NO: 176619 - protein, 11 aa, Homo sapiens
  CDR3 for alpha chain variable domain of TCR clone 88310 (TRAV1-2, TRAJ20)
CAVANDYKLSF

SEQ ID NO: 176620 - protein, 13 aa, Homo sapiens
  CDR3 for beta chain variable domain of TCR clone 88310 (TRBV20-1, TRBJ2-5)
CSARGDYQETQYF

SEQ ID NO: 176621 - protein, 14 aa, Homo sapiens
  CDR3 for alpha chain variable domain of TCR clone 88311 (TRAV1-2, TRAJ16)
CAVNRFSDGQKLLF

SEQ ID NO: 176622 - protein, 14 aa, Homo sapiens
  CDR3 for beta chain variable domain of TCR clone 88311 (TRBV18, TRBJ1-5)
CASSPGTGDQPQHF

SEQ ID NO: 176623 - protein, 14 aa, Homo sapiens
  CDR3 for alpha chain variable domain of TCR clone 88312 (TRAV12-2, TRAJ13)
CAAKKTGGYQKVTF

SEQ ID NO: 176624 - protein, 14 aa, Homo sapiens
  CDR3 for beta chain variable domain of TCR clone 88312 (TRBV7-2, TRBJ2-7)
CASSPKTSFYEQYF

SEQ ID NO: 176625 - protein, 13 aa, Homo sapiens
  CDR3 for alpha chain variable domain of TCR clone 88313 (TRAV17, TRAJ22)
CAHHYGSARQLTF

SEQ ID NO: 176626 - protein, 13 aa, Homo sapiens
  CDR3 for beta chain variable domain of TCR clone 88313 (TRBV27, TRBJ1-4)
CASSLMGDEKLFF

SEQ ID NO: 176627 - protein, 14 aa, Homo sapiens
  CDR3 for alpha chain variable domain of TCR clone 88314 (TRAV8-1, TRAJ22)
CAAPSSGSARQLTF

SEQ ID NO: 176628 - protein, 14 aa, Homo sapiens
  CDR3 for beta chain variable domain of TCR clone 88314 (TRBV9, TRBJ2-2)
CASSVGQGAGELFV

SEQ ID NO: 176629 - protein, 12 aa, Homo sapiens
  CDR3 for alpha chain variable domain of TCR clone 88315 (TRAV17, TRAJ53)
CATEGSNYKLTF

SEQ ID NO: 176630 - protein, 19 aa, Homo sapiens
  CDR3 for beta chain variable domain of TCR clone 88315 (TRBV5-1, TRBJ2-3)
CASSLWTSGGITTPNTQYF

SEQ ID NO: 176631 - protein, 14 aa, Homo sapiens
  CDR3 for alpha chain variable domain of TCR clone 88316 (TRAV12-2, TRAJ40)
CAVKIPSGTYKYIF

SEQ ID NO: 176632 - protein, 13 aa, Homo sapiens
  CDR3 for beta chain variable domain of TCR clone 88316 (TRBV12-4, TRBJ2-7)
CASSPTETYEQYF

SEQ ID NO: 176633 - protein, 13 aa, Homo sapiens
  CDR3 for alpha chain variable domain of TCR clone 88317 (TRAV27, TRAJ41)
CAGEGNSVYALNF

SEQ ID NO: 176634 - protein, 16 aa, Homo sapiens
  CDR3 for beta chain variable domain of TCR clone 88317 (TRBV29-1, TRBJ2-7)
CSVEVVGTSGSYEQYF

SEQ ID NO: 176635 - protein, 13 aa, Homo sapiens
  CDR3 for alpha chain variable domain of TCR clone 88318 (TRAV13-2, TRAJ48)
CAEMDFGNEKLTF

SEQ ID NO: 176636 - protein, 16 aa, Homo sapiens
  CDR3 for beta chain variable domain of TCR clone 88318 (TRBV20-1, TRBJ1-4)
CSAPGQGLLTNEKLFF

SEQ ID NO: 176637 - protein, 15 aa, Homo sapiens
  CDR3 for alpha chain variable domain of TCR clone 88319 (TRAV20, TRAJ43)
CAVQAGKSSNNDMRF

SEQ ID NO: 176638 - protein, 18 aa, Homo sapiens
  CDR3 for beta chain variable domain of TCR clone 88319 (TRBV12-4, TRBJ2-2)
CASRPFGAGALNTGELFF

SEQ ID NO: 176639 - protein, 11 aa, Homo sapiens
  CDR3 for alpha chain variable domain of TCR clone 88320 (TRAV3, TRAJ21)
CAVGNFNKFCF

SEQ ID NO: 176640 - protein, 16 aa, Homo sapiens
  CDR3 for beta chain variable domain of TCR clone 88320 (TRBV19, TRBJ2-1)
CASSKAGPSPYNEQFF

SEQ ID NO: 176641 - protein, 14 aa, Homo sapiens
  CDR3 for alpha chain variable domain of TCR clone 88321 (TRAV12-2, TRAJ13)
CAVKKTGGYQKVTF

SEQ ID NO: 176642 - protein, 14 aa, Homo sapiens
  CDR3 for beta chain variable domain of TCR clone 88321 (TRBV7-9, TRBJ2-1)
CASSPRGSLYEQFF

SEQ ID NO: 176643 - protein, 13 aa, Homo sapiens
  CDR3 for alpha chain variable domain of TCR clone 88322 (TRAV8-3, TRAJ28)
CAVGAVGSYQLTF

SEQ ID NO: 176644 - protein, 14 aa, Homo sapiens
  CDR3 for beta chain variable domain of TCR clone 88322 (TRBV7-2, TRBJ2-7)
CGSRSQGAAYEQYF

SEQ ID NO: 176645 - protein, 12 aa, Homo sapiens
  CDR3 for alpha chain variable domain of TCR clone 88323 (TRAV21, TRAJ11)
CAATSGYSTLPF

SEQ ID NO: 176646 - protein, 16 aa, Homo sapiens
  CDR3 for beta chain variable domain of TCR clone 88323 (TRBV28, TRBJ2-2)
CASSLEGGSNTGELFF

SEQ ID NO: 176647 - protein, 16 aa, Homo sapiens
  CDR3 for alpha chain variable domain of TCR clone 88324 (TRAV38-1, TRAJ56)
CAFMKRQTGANSKLTF

SEQ ID NO: 176648 - protein, 12 aa, Homo sapiens
  CDR3 for beta chain variable domain of TCR clone 88324 (TRBV11-2, TRBJ2-1)
CASSPGNNEQFF

SEQ ID NO: 176649 - protein, 14 aa, Homo sapiens
  CDR3 for alpha chain variable domain of TCR clone 88325 (TRAV38-1, TRAJ40)
CALRPTSGTYKYIF

SEQ ID NO: 176650 - protein, 14 aa, Homo sapiens
  CDR3 for beta chain variable domain of TCR clone 88325 (TRBV5-4, TRBJ1-1)
CASSLDRRRDEAFF

SEQ ID NO: 176651 - protein, 13 aa, Homo sapiens
  CDR3 for alpha chain variable domain of TCR clone 88326 (TRAV36/DV7, TRAJ49)
CAGDSNTGKQFYF

SEQ ID NO: 176652 - protein, 12 aa, Homo sapiens
  CDR3 for beta chain variable domain of TCR clone 88326 (TRBV19, TRBJ1-1)
CASMNRYTEAFF

SEQ ID NO: 176653 - protein, 15 aa, Homo sapiens
  CDR3 for alpha chain variable domain of TCR clone 88327 (TRAV21, TRAJ52)
CAVRGGGTSYGKRTF

SEQ ID NO: 176654 - protein, 15 aa, Homo sapiens
  CDR3 for beta chain variable domain of TCR clone 88327 (TRBV18, TRBJ1-5)
CASSPSDRSNQPQHF

SEQ ID NO: 176655 - protein, 16 aa, Homo sapiens
  CDR3 for alpha chain variable domain of TCR clone 88328 (TRAV30, TRAJ24)
CGTEIVDADSWGKFQF

SEQ ID NO: 176656 - protein, 13 aa, Homo sapiens
  CDR3 for beta chain variable domain of TCR clone 88328 (TRBV11-2, TRBJ2-1)
CASSLDLVNEQFF

SEQ ID NO: 176657 - protein, 12 aa, Homo sapiens
  CDR3 for alpha chain variable domain of TCR clone 88329 (TRAV13-1, TRAJ49)
CVASSTGNQFYF

SEQ ID NO: 176658 - protein, 14 aa, Homo sapiens
  CDR3 for beta chain variable domain of TCR clone 88329 (TRBV7-2, TRBJ2-5)
CASSPAGNQETQYF

SEQ ID NO: 176659 - protein, 15 aa, Homo sapiens
  CDR3 for alpha chain variable domain of TCR clone 88330 (TRAV3, TRAJ5)
CAVRDRKTGRTALTF

SEQ ID NO: 176660 - protein, 15 aa, Homo sapiens
  CDR3 for beta chain variable domain of TCR clone 88330 (TRBV7-8, TRBJ2-1)
CASSLADSLYNEQFF

SEQ ID NO: 176661 - protein, 14 aa, Homo sapiens
  CDR3 for alpha chain variable domain of TCR clone 88331 (TRAV12-1, TRAJ17)
CVVNPKAAGNKLTL

SEQ ID NO: 176662 - protein, 16 aa, Homo sapiens
  CDR3 for beta chain variable domain of TCR clone 88331 (TRBV20-1, TRBJ2-1)
CSASASGYSSYNEQFF

SEQ ID NO: 176663 - protein, 16 aa, Homo sapiens
  CDR3 for alpha chain variable domain of TCR clone 88332 (TRAV30, TRAJ24)
CGTEIVDADSWGKFQF

SEQ ID NO: 176664 - protein, 13 aa, Homo sapiens
  CDR3 for beta chain variable domain of TCR clone 88332 (TRBV2, TRBJ1-1)
CARNPTGGFHAFF

SEQ ID NO: 176665 - protein, 18 aa, Homo sapiens
  CDR3 for alpha chain variable domain of TCR clone 88333 (TRAV21, TRAJ52)
CAVRPSPAGGTSYGKLTF

SEQ ID NO: 176666 - protein, 12 aa, Homo sapiens
  CDR3 for beta chain variable domain of TCR clone 88333 (TRBV27, TRBJ2-2)
CASKLFTGELFF

SEQ ID NO: 176667 - protein, 15 aa, Homo sapiens
  CDR3 for alpha chain variable domain of TCR clone 88334 (TRAV8-3, TRAJ40)
CAAPSLGSGTYRYIF

SEQ ID NO: 176668 - protein, 12 aa, Homo sapiens
  CDR3 for beta chain variable domain of TCR clone 88334 (TRBV11-2, TRBJ2-1)
CASSPGNNEQFF

SEQ ID NO: 176669 - protein, 16 aa, Homo sapiens
  CDR3 for alpha chain variable domain of TCR clone 88335 (TRAV30, TRAJ24)
CGTEIVDADSWGKFPV

SEQ ID NO: 176670 - protein, 14 aa, Homo sapiens
  CDR3 for beta chain variable domain of TCR clone 88335 (TRBV12-5, TRBJ2-5)
CASGSRTHQETQYF

SEQ ID NO: 176671 - protein, 12 aa, Homo sapiens
  CDR3 for alpha chain variable domain of TCR clone 88336 (TRAV26-1, TRAJ36)
CIVRVRADNLFF

SEQ ID NO: 176672 - protein, 13 aa, Homo sapiens
  CDR3 for beta chain variable domain of TCR clone 88336 (TRBV11-2, TRBJ2-5)
CASSRGLSETQYF

SEQ ID NO: 176673 - protein, 12 aa, Homo sapiens
  CDR3 for alpha chain variable domain of TCR clone 88337 (TRAV12-1, TRAJ40)
CVVNGETYKYIF

SEQ ID NO: 176674 - protein, 18 aa, Homo sapiens
  CDR3 for beta chain variable domain of TCR clone 88337 (TRBV7-6, TRBJ2-1)
CASSPRTSGMSSYNEQFF

SEQ ID NO: 176675 - protein, 16 aa, Homo sapiens
  CDR3 for alpha chain variable domain of TCR clone 88338 (TRAV3, TRAJ37)
CAVRGKRSGNTGKLIF

SEQ ID NO: 176676 - protein, 16 aa, Homo sapiens
  CDR3 for beta chain variable domain of TCR clone 88338 (TRBV12-5, TRBJ2-5)
CASGPRTSGSQETQYF

SEQ ID NO: 176677 - protein, 13 aa, Homo sapiens
  CDR3 for alpha chain variable domain of TCR clone 88339 (TRAV2, TRAJ40)
CAVVTSGTYKYIF

SEQ ID NO: 176678 - protein, 14 aa, Homo sapiens
  CDR3 for beta chain variable domain of TCR clone 88339 (TRBV19, TRBJ2-5)
CASPTFVLSGEQYF

SEQ ID NO: 176679 - protein, 18 aa, Homo sapiens
  CDR3 for alpha chain variable domain of TCR clone 88340 (TRAV12-3, TRAJ52)
CAMSRTNAGGTTYGKLTF

SEQ ID NO: 176680 - protein, 17 aa, Homo sapiens
  CDR3 for beta chain variable domain of TCR clone 88340 (TRBV7-3, TRBJ2-3)
CASSLMKRMRGADTQYF

SEQ ID NO: 176681 - protein, 15 aa, Homo sapiens
  CDR3 for alpha chain variable domain of TCR clone 88341 (TRAV26-2, TRAJ39)
CSLRGNNNAVNMLTF

SEQ ID NO: 176682 - protein, 15 aa, Homo sapiens
  CDR3 for beta chain variable domain of TCR clone 88341 (TRBV5-4, TRBJ1-1)
CASSSLGWANTEAFF

SEQ ID NO: 176683 - protein, 14 aa, Homo sapiens
  CDR3 for alpha chain variable domain of TCR clone 88342 (TRAV12-3, TRAJ10)
SHLPLTGGGNKLTF

SEQ ID NO: 176684 - protein, 15 aa, Homo sapiens
  CDR3 for beta chain variable domain of TCR clone 88342 (TRBV15, TRBJ1-5)
CATSRDPVSNQPQHF

SEQ ID NO: 176685 - protein, 17 aa, Homo sapiens
  CDR3 for alpha chain variable domain of TCR clone 88343 (TRAV3, TRAJ13)
CAVRDIAGVTRKLPLEL

SEQ ID NO: 176686 - protein, 13 aa, Homo sapiens
  CDR3 for beta chain variable domain of TCR clone 88343 (TRBV2, TRBJ2-2)
CASSKKNTGELFF

SEQ ID NO: 176687 - protein, 14 aa, Homo sapiens
  CDR3 for alpha chain variable domain of TCR clone 88344 (TRAV1-2, TRAJ13)
CAVKHSGGYQKVTF

SEQ ID NO: 176688 - protein, 14 aa, Homo sapiens
  CDR3 for beta chain variable domain of TCR clone 88344 (TRBV7-3, TRBJ2-1)
CASSPRDSLYEQFF

SEQ ID NO: 176689 - protein, 16 aa, Homo sapiens
  CDR3 for alpha chain variable domain of TCR clone 88345 (TRAV12-2, TRAJ10)
CAVNRVLTGGGNELTF

SEQ ID NO: 176690 - protein, 12 aa, Homo sapiens
  CDR3 for beta chain variable domain of TCR clone 88345 (TRBV28, TRBJ2-7)
CASSFSSYEQYF

SEQ ID NO: 176691 - protein, 15 aa, Homo sapiens
  CDR3 for alpha chain variable domain of TCR clone 88346 (TRAV21, TRAJ37)
CAVRPTLSNTGKLIF

SEQ ID NO: 176692 - protein, 16 aa, Homo sapiens
  CDR3 for beta chain variable domain of TCR clone 88346 (TRBV24-1, TRBJ2-3)
CATSDRRQDLTDTHYF

SEQ ID NO: 176693 - protein, 14 aa, Homo sapiens
  CDR3 for alpha chain variable domain of TCR clone 88347 (TRAV26-1, TRAJ49)
CIVRLTNTGNQFYF

SEQ ID NO: 176694 - protein, 13 aa, Homo sapiens
  CDR3 for beta chain variable domain of TCR clone 88347 (TRBV10-3, TRBJ2-7)
CASKLAVNYEQYF

SEQ ID NO: 176695 - protein, 14 aa, Homo sapiens
  CDR3 for alpha chain variable domain of TCR clone 88348 (TRAV1-2, TRAJ16)
CAVNRFSDGQKLLF

SEQ ID NO: 176696 - protein, 15 aa, Homo sapiens
  CDR3 for beta chain variable domain of TCR clone 88348 (TRBV7-9, TRBJ1-6)
CASSSPGRGNSPIHF

SEQ ID NO: 176697 - protein, 14 aa, Homo sapiens
  CDR3 for alpha chain variable domain of TCR clone 88349 (TRAV12-2, TRAJ40)
CAVKIPSGTYKYIF

SEQ ID NO: 176698 - protein, 15 aa, Homo sapiens
  CDR3 for beta chain variable domain of TCR clone 88349 (TRBV6-1, TRBJ2-1)
CASSELRGQYNEQFF

SEQ ID NO: 176699 - protein, 15 aa, Homo sapiens
  CDR3 for alpha chain variable domain of TCR clone 88350 (TRAV3, TRAJ17)
CAVRDTGAAGNKLTF

SEQ ID NO: 176700 - protein, 14 aa, Homo sapiens
  CDR3 for beta chain variable domain of TCR clone 88350 (TRBV6-3, TRBJ1-1)
CASSNLLPGAEASF

SEQ ID NO: 176701 - protein, 14 aa, Homo sapiens
  CDR3 for alpha chain variable domain of TCR clone 88351 (TRAV1-2, TRAJ16)
CAVNRFSDGQKLLF

SEQ ID NO: 176702 - protein, 12 aa, Homo sapiens
  CDR3 for beta chain variable domain of TCR clone 88351 (TRBV7-2, TRBJ2-3)
CASSLTGDTQYF

SEQ ID NO: 176703 - protein, 15 aa, Homo sapiens
  CDR3 for alpha chain variable domain of TCR clone 88352 (TRAV26-2, TRAJ28)
CILVESGAGSYQLTF

SEQ ID NO: 176704 - protein, 11 aa, Homo sapiens
  CDR3 for beta chain variable domain of TCR clone 88352 (TRBV25-1, TRBJ2-7)
CASSTSYEQYV

SEQ ID NO: 176705 - protein, 12 aa, Homo sapiens
  CDR3 for alpha chain variable domain of TCR clone 88353 (TRAV17, TRAJ20)
CATYSNDYELSF

SEQ ID NO: 176706 - protein, 14 aa, Homo sapiens
  CDR3 for beta chain variable domain of TCR clone 88353 (TRBV25-1, TRBJ1-1)
CASAHLGGNTEAFF

SEQ ID NO: 176707 - protein, 15 aa, Homo sapiens
  CDR3 for alpha chain variable domain of TCR clone 88354 (TRAV12-3, TRAJ49)
CAMAVTPNTGNQFYF

SEQ ID NO: 176708 - protein, 13 aa, Homo sapiens
  CDR3 for beta chain variable domain of TCR clone 88354 (TRBV10-2, TRBJ2-7)
CASGASGGYEQYF

SEQ ID NO: 176709 - protein, 12 aa, Homo sapiens
  CDR3 for alpha chain variable domain of TCR clone 88355 (TRAV27, TRAJ36)
CAGMTGANNLFF

SEQ ID NO: 176710 - protein, 12 aa, Homo sapiens
  CDR3 for beta chain variable domain of TCR clone 88355 (TRBV11-2, TRBJ2-2)
CASSLPTGELFF

SEQ ID NO: 176711 - protein, 15 aa, Homo sapiens
  CDR3 for alpha chain variable domain of TCR clone 88356 (TRAV14/DV4, TRAJ26)
CAMREGQKYGQNFVF

SEQ ID NO: 176712 - protein, 13 aa, Homo sapiens
  CDR3 for beta chain variable domain of TCR clone 88356 (TRBV24-1, TRBJ2-2)
CATSDWSTGELFF

SEQ ID NO: 176713 - protein, 14 aa, Homo sapiens
  CDR3 for alpha chain variable domain of TCR clone 88357 (TRAV1-2, TRAJ16)
CAVNRFSDGQKLLF

SEQ ID NO: 176714 - protein, 11 aa, Homo sapiens
  CDR3 for beta chain variable domain of TCR clone 88357 (TRBV5-1, TRBJ2-1)
CAGSIGQEQFF

SEQ ID NO: 176715 - protein, 21 aa, Homo sapiens
  CDR3 for alpha chain variable domain of TCR clone 88358 (TRAV12-1, TRAJ32)
SSVIQPPTSTNYGGATNKLIF

SEQ ID NO: 176716 - protein, 15 aa, Homo sapiens
  CDR3 for beta chain variable domain of TCR clone 88358 (TRBV7-9, TRBJ2-2)
CASGPLDTFPGELFF

SEQ ID NO: 176717 - protein, 13 aa, Homo sapiens
  CDR3 for alpha chain variable domain of TCR clone 88359 (TRAV20, TRAJ7)
CAVLQGGNNRLAF

SEQ ID NO: 176718 - protein, 15 aa, Homo sapiens
  CDR3 for beta chain variable domain of TCR clone 88359 (TRBV11-2, TRBJ2-2)
CASSLDGGNTGELFF

SEQ ID NO: 176719 - protein, 16 aa, Homo sapiens
  CDR3 for alpha chain variable domain of TCR clone 88360 (TRAV3, TRAJ37)
CAVRPHGSGNTGKLIF

SEQ ID NO: 176720 - protein, 17 aa, Homo sapiens
  CDR3 for beta chain variable domain of TCR clone 88360 (TRBV7-9, TRBJ2-6)
CASSFGAGYSGANVLTF

SEQ ID NO: 176721 - protein, 13 aa, Homo sapiens
  CDR3 for alpha chain variable domain of TCR clone 88361 (TRAV21, TRAJ20)
CAVGLRVDYKLSF

SEQ ID NO: 176722 - protein, 18 aa, Homo sapiens
  CDR3 for beta chain variable domain of TCR clone 88361 (TRBV11-2, TRBJ2-3)
CASSLGGASRGAPNTQYF

SEQ ID NO: 176723 - protein, 15 aa, Homo sapiens
  CDR3 for alpha chain variable domain of TCR clone 88362 (TRAV3, TRAJ22)
CAVRDRGGSARQLTF

SEQ ID NO: 176724 - protein, 16 aa, Homo sapiens
  CDR3 for beta chain variable domain of TCR clone 88362 (TRBV5-4, TRBJ2-3)
CDSQQPGAGGSDTQYF

SEQ ID NO: 176725 - protein, 15 aa, Homo sapiens
  CDR3 for alpha chain variable domain of TCR clone 88363 (TRAV17, TRAJ22)
CATVAPSGSARQLTF

SEQ ID NO: 176726 - protein, 13 aa, Homo sapiens
  CDR3 for beta chain variable domain of TCR clone 88363 (TRBV11-2, TRBJ2-5)
CASSRGPSETQYF

SEQ ID NO: 176727 - protein, 15 aa, Homo sapiens
  CDR3 for alpha chain variable domain of TCR clone 88364 (TRAV17, TRAJ57)
CATGPSQGGSEKLVF

SEQ ID NO: 176728 - protein, 15 aa, Homo sapiens
  CDR3 for beta chain variable domain of TCR clone 88364 (TRBV5-1, TRBJ2-1)
CASSPPRAPYNEQFF

SEQ ID NO: 176729 - protein, 12 aa, Homo sapiens
  CDR3 for alpha chain variable domain of TCR clone 88365 (TRAV12-1, TRAJ40)
CAVPSGTYKYIF

SEQ ID NO: 176730 - protein, 15 aa, Homo sapiens
  CDR3 for beta chain variable domain of TCR clone 88365 (TRBV12-4, TRBJ2-1)
CASSPLSGRNNEQFF

SEQ ID NO: 176731 - protein, 13 aa, Homo sapiens
  CDR3 for alpha chain variable domain of TCR clone 88366 (TRAV2, TRAJ15)
CAVASQAGTALIF

SEQ ID NO: 176732 - protein, 13 aa, Homo sapiens
  CDR3 for beta chain variable domain of TCR clone 88366 (TRBV12-4, TRBJ1-2)
CASSSGPNYGYTF

SEQ ID NO: 176733 - protein, 12 aa, Homo sapiens
  CDR3 for alpha chain variable domain of TCR clone 88367 (TRAV12-1, TRAJ40)
CVVPSGTYKYIF

SEQ ID NO: 176734 - protein, 15 aa, Homo sapiens
  CDR3 for beta chain variable domain of TCR clone 88367 (TRBV12-4, TRBJ2-1)
CASSPLSGKNNEQFF

SEQ ID NO: 176735 - protein, 16 aa, Homo sapiens
  CDR3 for alpha chain variable domain of TCR clone 88368 (TRAV3, TRAJ37)
CAVRVRGSGNTGKLIF

SEQ ID NO: 176736 - protein, 13 aa, Homo sapiens
  CDR3 for beta chain variable domain of TCR clone 88368 (TRBV7-9, TRBJ1-2)
CAISLKQNYGYTF

SEQ ID NO: 176737 - protein, 14 aa, Homo sapiens
  CDR3 for alpha chain variable domain of TCR clone 88369 (TRAV13-1, TRAJ6)
CAASIPGGSYIPTF

SEQ ID NO: 176738 - protein, 14 aa, Homo sapiens
  CDR3 for beta chain variable domain of TCR clone 88369 (TRBV6-3, TRBJ2-1)
CASLHSAYYNEQFF

SEQ ID NO: 176739 - protein, 13 aa, Homo sapiens
  CDR3 for alpha chain variable domain of TCR clone 88370 (TRAV13-1, TRAJ39)
CAASICAGDMLTF

SEQ ID NO: 176740 - protein, 15 aa, Homo sapiens
  CDR3 for beta chain variable domain of TCR clone 88370 (TRBV7-9, TRBJ1-1)
CASSLLEQGGTEAFF

SEQ ID NO: 176741 - protein, 15 aa, Homo sapiens
  CDR3 for alpha chain variable domain of TCR clone 88371 (TRAV12-3, TRAJ6)
CAMSATTGGSYIPTF

SEQ ID NO: 176742 - protein, 17 aa, Homo sapiens
  CDR3 for beta chain variable domain of TCR clone 88371 (TRBV13, TRBJ2-3)
CASSLSRVAGGRSTQYF

SEQ ID NO: 176743 - protein, 15 aa, Homo sapiens
  CDR3 for alpha chain variable domain of TCR clone 88372 (TRAV4, TRAJ42)
CLVGGYGGSQGNLIF

SEQ ID NO: 176744 - protein, 16 aa, Homo sapiens
  CDR3 for beta chain variable domain of TCR clone 88372 (TRBV27, TRBJ1-1)
CASSTRTGRVGTEAFF

SEQ ID NO: 176745 - protein, 14 aa, Homo sapiens
  CDR3 for alpha chain variable domain of TCR clone 88373 (TRAV23/DV6, TRAJ11)
CAASLESGYSTLTF

SEQ ID NO: 176746 - protein, 13 aa, Homo sapiens
  CDR3 for beta chain variable domain of TCR clone 88373 (TRBV4-1, TRBJ2-5)
CASSLTRGETLYF

SEQ ID NO: 176747 - protein, 17 aa, Homo sapiens
  CDR3 for alpha chain variable domain of TCR clone 88374 (TRAV26-1, TRAJ37)
CIVRVITVSSNTGKLIF

SEQ ID NO: 176748 - protein, 16 aa, Homo sapiens
  CDR3 for beta chain variable domain of TCR clone 88374 (TRBV7-3, TRBJ2-1)
CASSLEGYRSYNEQFF

SEQ ID NO: 176749 - protein, 21 aa, Homo sapiens
  CDR3 for alpha chain variable domain of TCR clone 88375 (TRAV26-1, TRAJ38)
CIAANAGNNHIQNPDPAVYQL

SEQ ID NO: 176750 - protein, 13 aa, Homo sapiens
  CDR3 for beta chain variable domain of TCR clone 88375 (TRBV20-1, TRBJ1-1)
CSARGGGNTEAFF

SEQ ID NO: 176751 - protein, 10 aa, Homo sapiens
  CDR3 for alpha chain variable domain of TCR clone 88376 (TRAV17, TRAJ36)
CATVAGNLFF

SEQ ID NO: 176752 - protein, 12 aa, Homo sapiens
  CDR3 for beta chain variable domain of TCR clone 88376 (TRBV7-8, TRBJ2-7)
CASSLGDREQYF

SEQ ID NO: 176753 - protein, 12 aa, Homo sapiens
  CDR3 for alpha chain variable domain of TCR clone 88377 (TRAV1-2, TRAJ33)
CAALDSNYQLIW

SEQ ID NO: 176754 - protein, 12 aa, Homo sapiens
  CDR3 for beta chain variable domain of TCR clone 88377 (TRBV7-9, TRBJ2-7)
CASSLQGYEQYF

SEQ ID NO: 176755 - protein, 16 aa, Homo sapiens
  CDR3 for alpha chain variable domain of TCR clone 88378 (TRAV3, TRAJ5)
CDVRNLMDTGRRALTF

SEQ ID NO: 176756 - protein, 16 aa, Homo sapiens
  CDR3 for beta chain variable domain of TCR clone 88378 (TRBV4-2, TRBJ2-7)
CASSQEGLANSYEQYF

SEQ ID NO: 176757 - protein, 13 aa, Homo sapiens
  CDR3 for alpha chain variable domain of TCR clone 88379 (TRAV12-1, TRAJ16)
CVVNGPDGQKLLF

SEQ ID NO: 176758 - protein, 14 aa, Homo sapiens
  CDR3 for beta chain variable domain of TCR clone 88379 (TRBV7-9, TRBJ2-1)
CASSPRDSLYEQFF

SEQ ID NO: 176759 - protein, 13 aa, Homo sapiens
  CDR3 for alpha chain variable domain of TCR clone 88380 (TRAV8-4, TRAJ48)
CAVSLFGNEKLTF

SEQ ID NO: 176760 - protein, 15 aa, Homo sapiens
  CDR3 for beta chain variable domain of TCR clone 88380 (TRBV20-1, TRBJ2-7)
CSARKGLAESYEQYC

SEQ ID NO: 176761 - protein, 16 aa, Homo sapiens
  CDR3 for alpha chain variable domain of TCR clone 88381 (TRAV3, TRAJ10)
CAVRDMRAGGGNKRTF

SEQ ID NO: 176762 - protein, 13 aa, Homo sapiens
  CDR3 for beta chain variable domain of TCR clone 88381 (TRBV4-2, TRBJ1-1)
CASSQAGNTEAFF

SEQ ID NO: 176763 - protein, 17 aa, Homo sapiens
  CDR3 for alpha chain variable domain of TCR clone 88382 (TRAV3, TRAJ42)
CAVRDRDYGGSQGNLIF

SEQ ID NO: 176764 - protein, 18 aa, Homo sapiens
  CDR3 for beta chain variable domain of TCR clone 88382 (TRBV20-1, TRBJ2-3)
FSASGLAGGPGTTDTQYF

SEQ ID NO: 176765 - protein, 14 aa, Homo sapiens
  CDR3 for alpha chain variable domain of TCR clone 88383 (TRAV12-3, TRAJ10)
SHLPLTGGGNKLTF

SEQ ID NO: 176766 - protein, 14 aa, Homo sapiens
  CDR3 for beta chain variable domain of TCR clone 88383 (TRBV6-1, TRBJ1-3)
CASVQGGGRNTMYF

SEQ ID NO: 176767 - protein, 13 aa, Homo sapiens
  CDR3 for alpha chain variable domain of TCR clone 88384 (TRAV12-1, TRAJ16)
CVVNGPDGQKQLF

SEQ ID NO: 176768 - protein, 13 aa, Homo sapiens
  CDR3 for beta chain variable domain of TCR clone 88384 (TRBV2, TRBJ1-1)
CARNPTGGFHAFF

SEQ ID NO: 176769 - protein, 10 aa, Homo sapiens
  CDR3 for alpha chain variable domain of TCR clone 88385 (TRAV21, TRAJ34)
CSLYTDKLIF

SEQ ID NO: 176770 - protein, 13 aa, Homo sapiens
  CDR3 for beta chain variable domain of TCR clone 88385 (TRBV7-6, TRBJ1-2)
CASSLVADYGYTF

SEQ ID NO: 176771 - protein, 15 aa, Homo sapiens
  CDR3 for alpha chain variable domain of TCR clone 88386 (TRAV4, TRAJ42)
CLVGWYGGSQGNLIF

SEQ ID NO: 176772 - protein, 16 aa, Homo sapiens
  CDR3 for beta chain variable domain of TCR clone 88386 (TRBV27, TRBJ1-1)
CASSTRTGGVGTEAFF

SEQ ID NO: 176773 - protein, 15 aa, Homo sapiens
  CDR3 for alpha chain variable domain of TCR clone 88387 (TRAV8-3, TRAJ27)
CAVGPSETNAGKSTF

SEQ ID NO: 176774 - protein, 14 aa, Homo sapiens
  CDR3 for beta chain variable domain of TCR clone 88387 (TRBV11-2, TRBJ2-3)
CASSRLARTDTQYF

SEQ ID NO: 176775 - protein, 17 aa, Homo sapiens
  CDR3 for alpha chain variable domain of TCR clone 88388 (TRAV17, TRAJ52)
CATDANAGGTSYGKLTF

SEQ ID NO: 176776 - protein, 15 aa, Homo sapiens
  CDR3 for beta chain variable domain of TCR clone 88388 (TRBV7-9, TRBJ1-5)
CASSQGHQPNQPQHF

SEQ ID NO: 176777 - protein, 15 aa, Homo sapiens
  CDR3 for alpha chain variable domain of TCR clone 88389 (TRAV17, TRAJ57)
CATGPSQGGSEKLVF

SEQ ID NO: 176778 - protein, 16 aa, Homo sapiens
  CDR3 for beta chain variable domain of TCR clone 88389 (TRBV12-4, TRBJ1-5)
CASSRPVGGSNQPQDF

SEQ ID NO: 176779 - protein, 12 aa, Homo sapiens
  CDR3 for alpha chain variable domain of TCR clone 88390 (TRAV21, TRAJ33)
CAKMDSNYQLIW

SEQ ID NO: 176780 - protein, 15 aa, Homo sapiens
  CDR3 for beta chain variable domain of TCR clone 88390 (TRBV7-9, TRBJ1-4)
CASSRTGGFNEKLFF

SEQ ID NO: 176781 - protein, 14 aa, Homo sapiens
  CDR3 for alpha chain variable domain of TCR clone 88391 (TRAV1-2, TRAJ16)
CAVNRFSDGQKLLF

SEQ ID NO: 176782 - protein, 16 aa, Homo sapiens
  CDR3 for beta chain variable domain of TCR clone 88391 (TRBV15, TRBJ2-3)
CATSRGGPRGGYTQYF

SEQ ID NO: 176783 - protein, 14 aa, Homo sapiens
  CDR3 for alpha chain variable domain of TCR clone 88392 (TRAV26-1, TRAJ22)
CIVRVYGSARQLTF

SEQ ID NO: 176784 - protein, 17 aa, Homo sapiens
  CDR3 for beta chain variable domain of TCR clone 88392 (TRBV7-3, TRBJ2-3)
WASSPGGLAGFGDTQYF

SEQ ID NO: 176785 - protein, 12 aa, Homo sapiens
  CDR3 for alpha chain variable domain of TCR clone 88393 (TRAV2, TRAJ9)
CAVGAGGFKTIF

SEQ ID NO: 176786 - protein, 14 aa, Homo sapiens
  CDR3 for beta chain variable domain of TCR clone 88393 (TRBV20-1, TRBJ1-1)
CSAQTRIGGTEAFF

SEQ ID NO: 176787 - protein, 14 aa, Homo sapiens
  CDR3 for alpha chain variable domain of TCR clone 88394 (TRAV12-2, TRAJ40)
CAVKIPSGTYKYIF

SEQ ID NO: 176788 - protein, 15 aa, Homo sapiens
  CDR3 for beta chain variable domain of TCR clone 88394 (TRBV4-1, TRBJ1-1)
CASSQEWGHYTEAFF

SEQ ID NO: 176789 - protein, 13 aa, Homo sapiens
  CDR3 for alpha chain variable domain of TCR clone 88395 (TRAV1-2, TRAJ9)
CAVLNTGGFKTIF

SEQ ID NO: 176790 - protein, 14 aa, Homo sapiens
  CDR3 for beta chain variable domain of TCR clone 88395 (TRBV5-1, TRBJ2-2)
CASSLGGGSGGLFF

SEQ ID NO: 176791 - protein, 13 aa, Homo sapiens
  CDR3 for alpha chain variable domain of TCR clone 88396 (TRAV27, TRAJ17)
CAGAATAGNKLTV

SEQ ID NO: 176792 - protein, 15 aa, Homo sapiens
  CDR3 for beta chain variable domain of TCR clone 88396 (TRBV5-1, TRBJ2-3)
CASRNQAGSTDTQYF

SEQ ID NO: 176793 - protein, 14 aa, Homo sapiens
  CDR3 for alpha chain variable domain of TCR clone 88397 (TRAV35, TRAJ22)
CAGLRPGSARQLTF

SEQ ID NO: 176794 - protein, 17 aa, Homo sapiens
  CDR3 for beta chain variable domain of TCR clone 88397 (TRBV15, TRBJ1-2)
CATSGREIDVVNYGYTF

SEQ ID NO: 176795 - protein, 10 aa, Homo sapiens
  CDR3 for alpha chain variable domain of TCR clone 88398 (TRAV12-3, TRAJ34)
CAMSADKLIF

SEQ ID NO: 176796 - protein, 15 aa, Homo sapiens
  CDR3 for beta chain variable domain of TCR clone 88398 (TRBV27, TRBJ2-1)
CASSNGGGTSNEQFF

SEQ ID NO: 176797 - protein, 16 aa, Homo sapiens
  CDR3 for alpha chain variable domain of TCR clone 88399 (TRAV21, TRAJ52)
CAVTNAGGTSYGKLTF

SEQ ID NO: 176798 - protein, 14 aa, Homo sapiens
  CDR3 for beta chain variable domain of TCR clone 88399 (TRBV7-3, TRBJ1-1)
CASSLGTGYTEAFF

SEQ ID NO: 176799 - protein, 14 aa, Homo sapiens
  CDR3 for alpha chain variable domain of TCR clone 88400 (TRAV1-2, TRAJ8)
CAVREDTGFQKLVF

SEQ ID NO: 176800 - protein, 11 aa, Homo sapiens
  CDR3 for beta chain variable domain of TCR clone 88400 (TRBV19, TRBJ2-5)
CASSIKETQYF

SEQ ID NO: 176801 - protein, 14 aa, Homo sapiens
  CDR3 for alpha chain variable domain of TCR clone 88401 (TRAV13-1, TRAJ12)
CSNYPMDSSYKLIF

SEQ ID NO: 176802 - protein, 11 aa, Homo sapiens
  CDR3 for beta chain variable domain of TCR clone 88401 (TRBV20-1, TRBJ2-1)
CSLASGSEQFF

SEQ ID NO: 176803 - protein, 15 aa, Homo sapiens
  CDR3 for alpha chain variable domain of TCR clone 88402 (TRAV17, TRAJ57)
CATGPSQGGSEKLVF

SEQ ID NO: 176804 - protein, 16 aa, Homo sapiens
  CDR3 for beta chain variable domain of TCR clone 88402 (TRBV5-5, TRBJ2-2)
CASSGRREGATGELFF

SEQ ID NO: 176805 - protein, 13 aa, Homo sapiens
  CDR3 for alpha chain variable domain of TCR clone 88403 (TRAV36/DV7, TRAJ54)
CAVDIQGAQKLVF

SEQ ID NO: 176806 - protein, 14 aa, Homo sapiens
  CDR3 for beta chain variable domain of TCR clone 88403 (TRBV19, TRBJ2-7)
CASNCRDTFTGMYF

SEQ ID NO: 176807 - protein, 13 aa, Homo sapiens
  CDR3 for alpha chain variable domain of TCR clone 88404 (TRAV12-3, TRAJ39)
CAVRSNAGNMLTF

SEQ ID NO: 176808 - protein, 20 aa, Homo sapiens
  CDR3 for beta chain variable domain of TCR clone 88404 (TRBV7-8, TRBJ2-2)
CASSHLFPGPTIHITGELFF

SEQ ID NO: 176809 - protein, 15 aa, Homo sapiens
  CDR3 for alpha chain variable domain of TCR clone 88405 (TRAV26-1, TRAJ29)
CIVRVEGSGNTPLVF

SEQ ID NO: 176810 - protein, 16 aa, Homo sapiens
  CDR3 for beta chain variable domain of TCR clone 88405 (TRBV6-6, TRBJ1-5)
CASSYSTLVGNQPQHF

SEQ ID NO: 176811 - protein, 16 aa, Homo sapiens
  CDR3 for alpha chain variable domain of TCR clone 88406 (TRAV26-1, TRAJ36)
CIVRVPDQTGANNLFF

SEQ ID NO: 176812 - protein, 21 aa, Homo sapiens
  CDR3 for beta chain variable domain of TCR clone 88406 (TRBV6-1, TRBJ1-1)
CASSGVGNYKGILGFDTEAFF

SEQ ID NO: 176813 - protein, 15 aa, Homo sapiens
  CDR3 for alpha chain variable domain of TCR clone 88407 (TRAV3, TRAJ5)
CAVRDLDTGRRALTF

SEQ ID NO: 176814 - protein, 15 aa, Homo sapiens
  CDR3 for beta chain variable domain of TCR clone 88407 (TRBV12-4, TRBJ2-7)
CTSVPAVRETYEQYF

SEQ ID NO: 176815 - protein, 19 aa, Homo sapiens
  CDR3 for alpha chain variable domain of TCR clone 88408 (TRAV2, TRAJ8)
CAVEHGLSETCIWNWHPTS

SEQ ID NO: 176816 - protein, 15 aa, Homo sapiens
  CDR3 for beta chain variable domain of TCR clone 88408 (TRBV15, TRBJ2-7)
CATSSRQESSYEQYF

SEQ ID NO: 176817 - protein, 15 aa, Homo sapiens
  CDR3 for alpha chain variable domain of TCR clone 88409 (TRAV3, TRAJ5)
CAVRDLDTGRRALTF

SEQ ID NO: 176818 - protein, 15 aa, Homo sapiens
  CDR3 for beta chain variable domain of TCR clone 88409 (TRBV20-1, TRBJ2-1)
CSARSPGGPGNEQFS

SEQ ID NO: 176819 - protein, 12 aa, Homo sapiens
  CDR3 for alpha chain variable domain of TCR clone 88410 (TRAV12-3, TRAJ20)
CAMVRGDYKLSF

SEQ ID NO: 176820 - protein, 14 aa, Homo sapiens
  CDR3 for beta chain variable domain of TCR clone 88410 (TRBV7-8, TRBJ2-7)
CASSPRDRVYEQYF

SEQ ID NO: 176821 - protein, 16 aa, Homo sapiens
  CDR3 for alpha chain variable domain of TCR clone 88411 (TRAV12-3, TRAJ53)
CAMSPGSGCSNYKLTF

SEQ ID NO: 176822 - protein, 12 aa, Homo sapiens
  CDR3 for beta chain variable domain of TCR clone 88411 (TRBV11-2, TRBJ2-2)
CASSLGGGELFF

SEQ ID NO: 176823 - protein, 17 aa, Homo sapiens
  CDR3 for alpha chain variable domain of TCR clone 88412 (TRAV3, TRAJ6)
CAVRDGPRAGGSYIPKF

SEQ ID NO: 176824 - protein, 12 aa, Homo sapiens
  CDR3 for beta chain variable domain of TCR clone 88412 (TRBV11-2, TRBJ2-2)
CASSLGGGELFF

SEQ ID NO: 176825 - protein, 11 aa, Homo sapiens
  CDR3 for alpha chain variable domain of TCR clone 88413 (TRAV17, TRAJ9)
CATTGGFKTIF

SEQ ID NO: 176826 - protein, 13 aa, Homo sapiens
  CDR3 for beta chain variable domain of TCR clone 88413 (TRBV20-1, TRBJ1-1)
CSARGGGNTEAFF

SEQ ID NO: 176827 - protein, 15 aa, Homo sapiens
  CDR3 for alpha chain variable domain of TCR clone 88414 (TRAV8-2, TRAJ40)
CVVLGTSSGTYKYIF

SEQ ID NO: 176828 - protein, 16 aa, Homo sapiens
  CDR3 for beta chain variable domain of TCR clone 88414 (TRBV7-3, TRBJ2-1)
CASSLEGYRSYNEQFF

SEQ ID NO: 176829 - protein, 15 aa, Homo sapiens
  CDR3 for alpha chain variable domain of TCR clone 88415 (TRAV17, TRAJ42)
CATDHYGGSQGNLIF

SEQ ID NO: 176830 - protein, 14 aa, Homo sapiens
  CDR3 for beta chain variable domain of TCR clone 88415 (TRBV19, TRBJ2-5)
CASSIEHSQETQYL

SEQ ID NO: 176831 - protein, 14 aa, Homo sapiens
  CDR3 for alpha chain variable domain of TCR clone 88416 (TRAV12-2, TRAJ40)
CAVKIPSGTYKYIF

SEQ ID NO: 176832 - protein, 14 aa, Homo sapiens
  CDR3 for beta chain variable domain of TCR clone 88416 (TRBV7-3, TRBJ1-1)
CASSLKGGNTEAFF

SEQ ID NO: 176833 - protein, 13 aa, Homo sapiens
  CDR3 for alpha chain variable domain of TCR clone 88417 (TRAV8-3, TRAJ48)
CCGCNFGNETLTF

SEQ ID NO: 176834 - protein, 12 aa, Homo sapiens
  CDR3 for beta chain variable domain of TCR clone 88417 (TRBV7-2, TRBJ2-5)
CASSQYQETQYF

SEQ ID NO: 176835 - protein, 14 aa, Homo sapiens
  CDR3 for alpha chain variable domain of TCR clone 88418 (TRAV17, TRAJ6)
CATNPAGGSYIPTF

SEQ ID NO: 176836 - protein, 15 aa, Homo sapiens
  CDR3 for beta chain variable domain of TCR clone 88418 (TRBV10-3, TRBJ2-3)
CAISLTSGGTDTQYF

SEQ ID NO: 176837 - protein, 14 aa, Homo sapiens
  CDR3 for alpha chain variable domain of TCR clone 88419 (TRAV12-3, TRAJ10)
SHLPLTGGGNKLTF

SEQ ID NO: 176838 - protein, 15 aa, Homo sapiens
  CDR3 for beta chain variable domain of TCR clone 88419 (TRBV5-1, TRBJ1-1)
CASSWTGRGNTEAFF

SEQ ID NO: 176839 - protein, 14 aa, Homo sapiens
  CDR3 for alpha chain variable domain of TCR clone 88420 (TRAV3, TRAJ40)
CAVRDRRGTYKYIF

SEQ ID NO: 176840 - protein, 13 aa, Homo sapiens
  CDR3 for beta chain variable domain of TCR clone 88420 (TRBV7-9, TRBJ2-3)
CASGPGSTDTQYF

SEQ ID NO: 176841 - protein, 15 aa, Homo sapiens
  CDR3 for alpha chain variable domain of TCR clone 88421 (TRAV2, TRAJ9)
CAVAALNTGGFKTIF

SEQ ID NO: 176842 - protein, 13 aa, Homo sapiens
  CDR3 for beta chain variable domain of TCR clone 88421 (TRBV4-1, TRBJ2-1)
CASSQAGGDEQFF

SEQ ID NO: 176843 - protein, 14 aa, Homo sapiens
  CDR3 for alpha chain variable domain of TCR clone 88422 (TRAV26-1, TRAJ49)
CIVRLTNTGNQFYF

SEQ ID NO: 176844 - protein, 13 aa, Homo sapiens
  CDR3 for beta chain variable domain of TCR clone 88422 (TRBV4-1, TRBJ2-7)
CASSQGQAYERYF

SEQ ID NO: 176845 - protein, 15 aa, Homo sapiens
  CDR3 for alpha chain variable domain of TCR clone 88423 (TRAV8-6, TRAJ10)
CAVSDQAGGGNKLTF

SEQ ID NO: 176846 - protein, 15 aa, Homo sapiens
  CDR3 for beta chain variable domain of TCR clone 88423 (TRBV3-1, TRBJ2-5)
CAGSANLGGPETQYF

SEQ ID NO: 176847 - protein, 18 aa, Homo sapiens
  CDR3 for alpha chain variable domain of TCR clone 88424 (TRAV12-3, TRAJ52)
CAMSVGGAGGTSYGKLTL

SEQ ID NO: 176848 - protein, 17 aa, Homo sapiens
  CDR3 for beta chain variable domain of TCR clone 88424 (TRBV13, TRBJ2-3)
CASSLSRVAGGRNTQYF

SEQ ID NO: 176849 - protein, 14 aa, Homo sapiens
  CDR3 for alpha chain variable domain of TCR clone 88425 (TRAV1-2, TRAJ16)
CAVNRLSDGQKLLF

SEQ ID NO: 176850 - protein, 13 aa, Homo sapiens
  CDR3 for beta chain variable domain of TCR clone 88425 (TRBV29-1, TRBJ1-1)
CSVGDSRNTEAFF

SEQ ID NO: 176851 - protein, 13 aa, Homo sapiens
  CDR3 for alpha chain variable domain of TCR clone 88426 (TRAV30, TRAJ6)
CGFIEGGSYLPTF

SEQ ID NO: 176852 - protein, 13 aa, Homo sapiens
  CDR3 for beta chain variable domain of TCR clone 88426 (TRBV5-4, TRBJ2-5)
CASSPVSQETQYF

SEQ ID NO: 176853 - protein, 15 aa, Homo sapiens
  CDR3 for alpha chain variable domain of TCR clone 88427 (TRAV27, TRAJ38)
CAGRFNAGNNRKLIW

SEQ ID NO: 176854 - protein, 16 aa, Homo sapiens
  CDR3 for beta chain variable domain of TCR clone 88427 (TRBV7-9, TRBJ2-3)
CASSPWREVGTDTQYF

SEQ ID NO: 176855 - protein, 14 aa, Homo sapiens
  CDR3 for alpha chain variable domain of TCR clone 88428 (TRAV23/DV6, TRAJ10)
CAARLTGGGNKLTF

SEQ ID NO: 176856 - protein, 16 aa, Homo sapiens
  CDR3 for beta chain variable domain of TCR clone 88428 (TRBV19, TRBJ2-3)
CASSPGAASRTDTQYF

SEQ ID NO: 176857 - protein, 14 aa, Homo sapiens
  CDR3 for alpha chain variable domain of TCR clone 88429 (TRAV26-1, TRAJ38)
CIADNAGNNRKLIW

SEQ ID NO: 176858 - protein, 13 aa, Homo sapiens
  CDR3 for beta chain variable domain of TCR clone 88429 (TRBV19, TRBJ1-2)
CASSQGQVYGYTF

SEQ ID NO: 176859 - protein, 15 aa, Homo sapiens
  CDR3 for alpha chain variable domain of TCR clone 88430 (TRAV8-3, TRAJ11)
CAVGLLNSGYSTLTF

SEQ ID NO: 176860 - protein, 12 aa, Homo sapiens
  CDR3 for beta chain variable domain of TCR clone 88430 (TRBV14, TRBJ1-1)
CASSQLKGLAFF

SEQ ID NO: 176861 - protein, 16 aa, Homo sapiens
  CDR3 for alpha chain variable domain of TCR clone 88431 (TRAV17, TRAJ28)
CATDEYSGAGRYQLTF

SEQ ID NO: 176862 - protein, 13 aa, Homo sapiens
  CDR3 for beta chain variable domain of TCR clone 88431 (TRBV7-9, TRBJ1-2)
CASRTGPNYGYTF

SEQ ID NO: 176863 - protein, 12 aa, Homo sapiens
  CDR3 for alpha chain variable domain of TCR clone 88432 (TRAV12-3, TRAJ17)
CAMTLTGNKLTF

SEQ ID NO: 176864 - protein, 17 aa, Homo sapiens
  CDR3 for beta chain variable domain of TCR clone 88432 (TRBV7-3, TRBJ2-3)
CAGSLMKRMRGADTQYF

SEQ ID NO: 176865 - protein, 12 aa, Homo sapiens
  CDR3 for alpha chain variable domain of TCR clone 88433 (TRAV3, TRAJ27)
CDVRDKAGKSTF

SEQ ID NO: 176866 - protein, 14 aa, Homo sapiens
  CDR3 for beta chain variable domain of TCR clone 88433 (TRBV5-1, TRBJ1-2)
CASSVDSTNYGYTF

SEQ ID NO: 176867 - protein, 14 aa, Homo sapiens
  CDR3 for alpha chain variable domain of TCR clone 88434 (TRAV3, TRAJ22)
CAVSDYGSARQLTF

SEQ ID NO: 176868 - protein, 13 aa, Homo sapiens
  CDR3 for beta chain variable domain of TCR clone 88434 (TRBV11-2, TRBJ2-5)
CASGHGAKETQYF

SEQ ID NO: 176869 - protein, 14 aa, Homo sapiens
  CDR3 for alpha chain variable domain of TCR clone 88435 (TRAV27, TRAJ22)
CAGLPSGSARQLTF

SEQ ID NO: 176870 - protein, 17 aa, Homo sapiens
  CDR3 for beta chain variable domain of TCR clone 88435 (TRBV19, TRBJ2-7)
CASSISFYDSYPYEQYF

SEQ ID NO: 176871 - protein, 15 aa, Homo sapiens
  CDR3 for alpha chain variable domain of TCR clone 88436 (TRAV17, TRAJ56)
CATEPFTGANSKLTL

SEQ ID NO: 176872 - protein, 15 aa, Homo sapiens
  CDR3 for beta chain variable domain of TCR clone 88436 (TRBV28, TRBJ1-5)
CASSRTGGYVQPQHF

SEQ ID NO: 176873 - protein, 18 aa, Homo sapiens
  CDR3 for alpha chain variable domain of TCR clone 88437 (TRAV29/DV5, TRAJ52)
CAAGFRGAGGTSYGKLTF

SEQ ID NO: 176874 - protein, 16 aa, Homo sapiens
  CDR3 for beta chain variable domain of TCR clone 88437 (TRBV7-3, TRBJ2-2)
CASSLKRGTLSGELFF

SEQ ID NO: 176875 - protein, 13 aa, Homo sapiens
  CDR3 for alpha chain variable domain of TCR clone 88438 (TRAV30, TRAJ39)
CGPEKNAGNMLTF

SEQ ID NO: 176876 - protein, 12 aa, Homo sapiens
  CDR3 for beta chain variable domain of TCR clone 88438 (TRBV12-4, TRBJ2-5)
CASSSAQETQYF

SEQ ID NO: 176877 - protein, 15 aa, Homo sapiens
  CDR3 for alpha chain variable domain of TCR clone 88439 (TRAV8-3, TRAJ13)
CAVAPNSGGYQKVTF

SEQ ID NO: 176878 - protein, 13 aa, Homo sapiens
  CDR3 for beta chain variable domain of TCR clone 88439 (TRBV7-3, TRBJ1-1)
CASSQDWGAEAFF

SEQ ID NO: 176879 - protein, 10 aa, Homo sapiens
  CDR3 for alpha chain variable domain of TCR clone 88440 (TRAV8-2, TRAJ29)
CTGGNTPLVF

SEQ ID NO: 176880 - protein, 13 aa, Homo sapiens
  CDR3 for beta chain variable domain of TCR clone 88440 (TRBV20-1, TRBJ1-1)
CSARGGGSTEAFF

SEQ ID NO: 176881 - protein, 13 aa, Homo sapiens
  CDR3 for alpha chain variable domain of TCR clone 88441 (TRAV1-2, TRAJ9)
CAALNTGGFKTIF

SEQ ID NO: 176882 - protein, 16 aa, Homo sapiens
  CDR3 for beta chain variable domain of TCR clone 88441 (TRBV28, TRBJ2-1)
CASSSPEYPRDNEQFF

SEQ ID NO: 176883 - protein, 11 aa, Homo sapiens
  CDR3 for alpha chain variable domain of TCR clone 88442 (TRAV13-1, TRAJ6)
CATLGSYIPTY

SEQ ID NO: 176884 - protein, 12 aa, Homo sapiens
  CDR3 for beta chain variable domain of TCR clone 88442 (TRBV11-2, TRBJ2-1)
CASSPGNNEQFF

SEQ ID NO: 176885 - protein, 13 aa, Homo sapiens
  CDR3 for alpha chain variable domain of TCR clone 88443 (TRAV17, TRAJ9)
CATDYTGGFKTIF

SEQ ID NO: 176886 - protein, 16 aa, Homo sapiens
  CDR3 for beta chain variable domain of TCR clone 88443 (TRBV7-7, TRBJ2-1)
CASSLASGPPTMSSSS

SEQ ID NO: 176887 - protein, 14 aa, Homo sapiens
  CDR3 for alpha chain variable domain of TCR clone 88444 (TRAV16, TRAJ17)
CAPRIKAAGNKLTF

SEQ ID NO: 176888 - protein, 14 aa, Homo sapiens
  CDR3 for beta chain variable domain of TCR clone 88444 (TRBV11-1, TRBJ2-7)
CASSFRQGSYEQYF

SEQ ID NO: 176889 - protein, 13 aa, Homo sapiens
  CDR3 for alpha chain variable domain of TCR clone 88445 (TRAV12-1, TRAJ26)
SATYLYYGQNFVF

SEQ ID NO: 176890 - protein, 16 aa, Homo sapiens
  CDR3 for beta chain variable domain of TCR clone 88445 (TRBV2, TRBJ2-1)
CASSVGGSLSYNEQFF

SEQ ID NO: 176891 - protein, 11 aa, Homo sapiens
  CDR3 for alpha chain variable domain of TCR clone 88446 (TRAV2, TRAJ13)
CASGGYQKVTF

SEQ ID NO: 176892 - protein, 16 aa, Homo sapiens
  CDR3 for beta chain variable domain of TCR clone 88446 (TRBV6-1, TRBJ2-5)
CASSETLDRGAEIQYF

SEQ ID NO: 176893 - protein, 11 aa, Homo sapiens
  CDR3 for alpha chain variable domain of TCR clone 88447 (TRAV23/DV6, TRAJ48)
CAPRWGEKLTF

SEQ ID NO: 176894 - protein, 13 aa, Homo sapiens
  CDR3 for beta chain variable domain of TCR clone 88447 (TRBV7-9, TRBJ1-2)
CASSLKQNYGYTF

SEQ ID NO: 176895 - protein, 13 aa, Homo sapiens
  CDR3 for alpha chain variable domain of TCR clone 88448 (TRAV17, TRAJ9)
CATDYTGGFKTIF

SEQ ID NO: 176896 - protein, 15 aa, Homo sapiens
  CDR3 for beta chain variable domain of TCR clone 88448 (TRBV6-6, TRBJ2-5)
CASSPGGGLEETQYF

SEQ ID NO: 176897 - protein, 14 aa, Homo sapiens
  CDR3 for alpha chain variable domain of TCR clone 88449 (TRAV1-2, TRAJ15)
CAVRDRQAGTALIF

SEQ ID NO: 176898 - protein, 15 aa, Homo sapiens
  CDR3 for beta chain variable domain of TCR clone 88449 (TRBV12-4, TRBJ2-5)
CASSPPTGLQETQYF

SEQ ID NO: 176899 - protein, 22 aa, Homo sapiens
  CDR3 for alpha chain variable domain of TCR clone 88450 (TRAV27, TRAJ41)
CAVRTQIPDIQNPDPAVYQLRA

SEQ ID NO: 176900 - protein, 16 aa, Homo sapiens
  CDR3 for beta chain variable domain of TCR clone 88450 (TRBV5-1, TRBJ2-3)
CASSLGLAVYTDTQYF

SEQ ID NO: 176901 - protein, 14 aa, Homo sapiens
  CDR3 for alpha chain variable domain of TCR clone 88451 (TRAV29/DV5, TRAJ49)
CAASLSNTGNQFYF

SEQ ID NO: 176902 - protein, 15 aa, Homo sapiens
  CDR3 for beta chain variable domain of TCR clone 88451 (TRBV20-1, TRBJ2-1)
CSARGIRGTYNEQFF

SEQ ID NO: 176903 - protein, 14 aa, Homo sapiens
  CDR3 for alpha chain variable domain of TCR clone 88452 (TRAV1-2, TRAJ8)
CAVREDTGFQKLLF

SEQ ID NO: 176904 - protein, 16 aa, Homo sapiens
  CDR3 for beta chain variable domain of TCR clone 88452 (TRBV7-3, TRBJ2-2)
CASSLKRGTLSGELFF

SEQ ID NO: 176905 - protein, 17 aa, Homo sapiens
  CDR3 for alpha chain variable domain of TCR clone 88453 (TRAV23/DV6, TRAJ18)
CAASSSHRGSTLGRLYF

SEQ ID NO: 176906 - protein, 15 aa, Homo sapiens
  CDR3 for beta chain variable domain of TCR clone 88453 (TRBV27, TRBJ2-1)
CASSNGGGSSNEQFF

SEQ ID NO: 176907 - protein, 10 aa, Homo sapiens
  CDR3 for alpha chain variable domain of TCR clone 88454 (TRAV12-1, TRAJ37)
ARGNTGKLIF

SEQ ID NO: 176908 - protein, 15 aa, Homo sapiens
  CDR3 for beta chain variable domain of TCR clone 88454 (TRBV7-2, TRBJ2-3)
CASSLEQGGTDTQYV

SEQ ID NO: 176909 - protein, 13 aa, Homo sapiens
  CDR3 for alpha chain variable domain of TCR clone 88455 (TRAV27, TRAJ41)
CAGEGNSGYALNF

SEQ ID NO: 176910 - protein, 14 aa, Homo sapiens
  CDR3 for beta chain variable domain of TCR clone 88455 (TRBV7-2, TRBJ1-1)
CASSFLTGTTETFF

SEQ ID NO: 176911 - protein, 15 aa, Homo sapiens
  CDR3 for alpha chain variable domain of TCR clone 88456 (TRAV12-1, TRAJ44)
CVVFVNTGTPSKLTF

SEQ ID NO: 176912 - protein, 17 aa, Homo sapiens
  CDR3 for beta chain variable domain of TCR clone 88456 (TRBV7-8, TRBJ2-6)
CASSAGTGGAGANVLTF

SEQ ID NO: 176913 - protein, 15 aa, Homo sapiens
  CDR3 for alpha chain variable domain of TCR clone 88457 (TRAV2, TRAJ15)
CAVEDRGQAGTALIF

SEQ ID NO: 176914 - protein, 14 aa, Homo sapiens
  CDR3 for beta chain variable domain of TCR clone 88457 (TRBV3-1, TRBJ1-5)
CASSPLWSNQPQHF

SEQ ID NO: 176915 - protein, 14 aa, Homo sapiens
  CDR3 for alpha chain variable domain of TCR clone 88458 (TRAV12-2, TRAJ13)
CAVKKTGGYQKVTF

SEQ ID NO: 176916 - protein, 11 aa, Homo sapiens
  CDR3 for beta chain variable domain of TCR clone 88458 (TRBV27, TRBJ2-3)
CASSLGDTQYF

SEQ ID NO: 176917 - protein, 21 aa, Homo sapiens
  CDR3 for alpha chain variable domain of TCR clone 88459 (TRAV8-4, TRAJ47)
HLTKPSAHMSDAADRGNKLVF

SEQ ID NO: 176918 - protein, 14 aa, Homo sapiens
  CDR3 for beta chain variable domain of TCR clone 88459 (TRBV7-9, TRBJ2-1)
CASSPRDSLYEQFF

SEQ ID NO: 176919 - protein, 13 aa, Homo sapiens
  CDR3 for alpha chain variable domain of TCR clone 88460 (TRAV8-6, TRAJ48)
CAGVNFGNEKLTF

SEQ ID NO: 176920 - protein, 16 aa, Homo sapiens
  CDR3 for beta chain variable domain of TCR clone 88460 (TRBV4-3, TRBJ2-6)
CASSQARSSGANVLTF

SEQ ID NO: 176921 - protein, 14 aa, Homo sapiens
  CDR3 for alpha chain variable domain of TCR clone 88461 (TRAV8-2, TRAJ37)
CVVSISGNTGKLIF

SEQ ID NO: 176922 - protein, 17 aa, Homo sapiens
  CDR3 for beta chain variable domain of TCR clone 88461 (TRBV7-9, TRBJ2-3)
RASSPTVARDLTDTQYF

SEQ ID NO: 176923 - protein, 12 aa, Homo sapiens
  CDR3 for alpha chain variable domain of TCR clone 88462 (TRAV12-3, TRAJ17)
CAMTLTGNKLTF

SEQ ID NO: 176924 - protein, 15 aa, Homo sapiens
  CDR3 for beta chain variable domain of TCR clone 88462 (TRBV20-1, TRBJ2-7)
CSARDRVSGMEGQYF

SEQ ID NO: 176925 - protein, 15 aa, Homo sapiens
  CDR3 for alpha chain variable domain of TCR clone 88463 (TRAV34, TRAJ38)
CGADFTPGNNRKLIW

SEQ ID NO: 176926 - protein, 18 aa, Homo sapiens
  CDR3 for beta chain variable domain of TCR clone 88463 (TRBV19, TRBJ2-1)
CASPRDPSGGKNYNEQFF

SEQ ID NO: 176927 - protein, 13 aa, Homo sapiens
  CDR3 for alpha chain variable domain of TCR clone 88464 (TRAV9-2, TRAJ33)
CALRMDSNYQLIW

SEQ ID NO: 176928 - protein, 15 aa, Homo sapiens
  CDR3 for beta chain variable domain of TCR clone 88464 (TRBV4-3, TRBJ1-1)
CASSQELGRGTEAFF

SEQ ID NO: 176929 - protein, 14 aa, Homo sapiens
  CDR3 for alpha chain variable domain of TCR clone 88465 (TRAV3, TRAJ21)
CAVRYPYNFNKFYF

SEQ ID NO: 176930 - protein, 15 aa, Homo sapiens
  CDR3 for beta chain variable domain of TCR clone 88465 (TRBV29-1, TRBJ2-5)
CSVEGLAVNQEAQYF

SEQ ID NO: 176931 - protein, 12 aa, Homo sapiens
  CDR3 for alpha chain variable domain of TCR clone 88466 (TRAV13-2, TRAJ8)
CAPWLGFQKLVF

SEQ ID NO: 176932 - protein, 16 aa, Homo sapiens
  CDR3 for beta chain variable domain of TCR clone 88466 (TRBV5-1, TRBJ2-3)
CASSLGLAVYTDTQYF

SEQ ID NO: 176933 - protein, 14 aa, Homo sapiens
  CDR3 for alpha chain variable domain of TCR clone 88467 (TRAV17, TRAJ34)
CATDSLEGTDKLTF

SEQ ID NO: 176934 - protein, 13 aa, Homo sapiens
  CDR3 for beta chain variable domain of TCR clone 88467 (TRBV11-2, TRBJ2-7)
CASSGTRPYEQYF

SEQ ID NO: 176935 - protein, 14 aa, Homo sapiens
  CDR3 for alpha chain variable domain of TCR clone 88468 (TRAV12-1, TRAJ27)
CGEHIRTNAGKSTF

SEQ ID NO: 176936 - protein, 16 aa, Homo sapiens
  CDR3 for beta chain variable domain of TCR clone 88468 (TRBV19, TRBJ2-1)
CASSKAGPSSYNEQFF

SEQ ID NO: 176937 - protein, 14 aa, Homo sapiens
  CDR3 for alpha chain variable domain of TCR clone 88469 (TRAV8-3, TRAJ27)
CAGGRNTNAGKSIF

SEQ ID NO: 176938 - protein, 15 aa, Homo sapiens
  CDR3 for beta chain variable domain of TCR clone 88469 (TRBV11-3, TRBJ2-5)
CASSLRGRVQETQYF

SEQ ID NO: 176939 - protein, 12 aa, Homo sapiens
  CDR3 for alpha chain variable domain of TCR clone 88470 (TRAV17, TRAJ20)
CATAPNDYKLSF

SEQ ID NO: 176940 - protein, 12 aa, Homo sapiens
  CDR3 for beta chain variable domain of TCR clone 88470 (TRBV10-3, TRBJ2-7)
CAHGADSGEQYF

SEQ ID NO: 176941 - protein, 11 aa, Homo sapiens
  CDR3 for alpha chain variable domain of TCR clone 88471 (TRAV1-2, TRAJ31)
CAVNNNARLMF

SEQ ID NO: 176942 - protein, 15 aa, Homo sapiens
  CDR3 for beta chain variable domain of TCR clone 88471 (TRBV28, TRBJ2-1)
CASSIIAGGSSEQFF

SEQ ID NO: 176943 - protein, 14 aa, Homo sapiens
  CDR3 for alpha chain variable domain of TCR clone 88472 (TRAV12-3, TRAJ10)
SHLPLTGGGNKLTF

SEQ ID NO: 176944 - protein, 14 aa, Homo sapiens
  CDR3 for beta chain variable domain of TCR clone 88472 (TRBV7-2, TRBJ2-7)
CASSGLAGRGEQYF

SEQ ID NO: 176945 - protein, 14 aa, Homo sapiens
  CDR3 for alpha chain variable domain of TCR clone 88473 (TRAV12-2, TRAJ13)
CAVKKTGGYQKVTF

SEQ ID NO: 176946 - protein, 12 aa, Homo sapiens
  CDR3 for beta chain variable domain of TCR clone 88473 (TRBV7-9, TRBJ1-1)
CASSLVRGEAFF

SEQ ID NO: 176947 - protein, 13 aa, Homo sapiens
  CDR3 for alpha chain variable domain of TCR clone 88474 (TRAV12-3, TRAJ33)
CAMSVNSNYQLIW

SEQ ID NO: 176948 - protein, 15 aa, Homo sapiens
  CDR3 for beta chain variable domain of TCR clone 88474 (TRBV19, TRBJ1-1)
CASTSGQIQNTEAFF

SEQ ID NO: 176949 - protein, 14 aa, Homo sapiens
  CDR3 for alpha chain variable domain of TCR clone 88475 (TRAV29/DV5, TRAJ20)
CAASAPIEDYKLSF

SEQ ID NO: 176950 - protein, 16 aa, Homo sapiens
  CDR3 for beta chain variable domain of TCR clone 88475 (TRBV9, TRBJ2-2)
CASSAMGKGNTGELFF

SEQ ID NO: 176951 - protein, 12 aa, Homo sapiens
  CDR3 for alpha chain variable domain of TCR clone 88476 (TRAV12-1, TRAJ40)
CVVYSGTYKYIF

SEQ ID NO: 176952 - protein, 17 aa, Homo sapiens
  CDR3 for beta chain variable domain of TCR clone 88476 (TRBV11-3, TRBJ1-5)
CASSPLTGLRGNQHQHF

SEQ ID NO: 176953 - protein, 15 aa, Homo sapiens
  CDR3 for alpha chain variable domain of TCR clone 88477 (TRAV8-4, TRAJ29)
CAVSEDFRGNTPLVF

SEQ ID NO: 176954 - protein, 14 aa, Homo sapiens
  CDR3 for beta chain variable domain of TCR clone 88477 (TRBV7-2, TRBJ2-7)
CASRSQGAAYEQYF

SEQ ID NO: 176955 - protein, 15 aa, Homo sapiens
  CDR3 for alpha chain variable domain of TCR clone 88478 (TRAV12-2, TRAJ43)
CAFDMRFGAGTRLTV

SEQ ID NO: 176956 - protein, 17 aa, Homo sapiens
  CDR3 for beta chain variable domain of TCR clone 88478 (TRBV13, TRBJ2-3)
CASSRSRVAGGRNTQYF

SEQ ID NO: 176957 - protein, 13 aa, Homo sapiens
  CDR3 for alpha chain variable domain of TCR clone 88479 (TRAV36/DV7, TRAJ49)
CAGDSNTGNQFYF

SEQ ID NO: 176958 - protein, 12 aa, Homo sapiens
  CDR3 for beta chain variable domain of TCR clone 88479 (TRBV6-3, TRBJ2-7)
CASSEPGFEQYF

SEQ ID NO: 176959 - protein, 18 aa, Homo sapiens
  CDR3 for alpha chain variable domain of TCR clone 88480 (TRAV17, TRAJ45)
CATSLDLYSGGGAGGLTF

SEQ ID NO: 176960 - protein, 15 aa, Homo sapiens
  CDR3 for beta chain variable domain of TCR clone 88480 (TRBV11-2, TRBJ2-1)
CASSKNRGLIYEQFF

SEQ ID NO: 176961 - protein, 14 aa, Homo sapiens
  CDR3 for alpha chain variable domain of TCR clone 88481 (TRAV2, TRAJ37)
CAVDFTSNTGKLIF

SEQ ID NO: 176962 - protein, 13 aa, Homo sapiens
  CDR3 for beta chain variable domain of TCR clone 88481 (TRBV4-1, TRBJ2-2)
CASSRENTGELFF

SEQ ID NO: 176963 - protein, 14 aa, Homo sapiens
  CDR3 for alpha chain variable domain of TCR clone 88482 (TRAV12-2, TRAJ5)
CAVNRSTGRRALTF

SEQ ID NO: 176964 - protein, 14 aa, Homo sapiens
  CDR3 for beta chain variable domain of TCR clone 88482 (TRBV20-1, TRBJ1-1)
CSAQTRIGGTEAFF

SEQ ID NO: 176965 - protein, 17 aa, Homo sapiens
  CDR3 for alpha chain variable domain of TCR clone 88483 (TRAV26-1, TRAJ27)
CIVSTPWINTNAGKSPF

SEQ ID NO: 176966 - protein, 16 aa, Homo sapiens
  CDR3 for beta chain variable domain of TCR clone 88483 (TRBV7-9, TRBJ2-1)
CASSLDPGLAIDEQFF

SEQ ID NO: 176967 - protein, 13 aa, Homo sapiens
  CDR3 for alpha chain variable domain of TCR clone 88484 (TRAV8-3, TRAJ28)
CAVGAVGSYQLTF

SEQ ID NO: 176968 - protein, 12 aa, Homo sapiens
  CDR3 for beta chain variable domain of TCR clone 88484 (TRBV2, TRBJ2-7)
CASSWISLEQYF

SEQ ID NO: 176969 - protein, 11 aa, Homo sapiens
  CDR3 for alpha chain variable domain of TCR clone 88485 (TRAV2, TRAJ33)
CAVESNYQLIW

SEQ ID NO: 176970 - protein, 14 aa, Homo sapiens
  CDR3 for beta chain variable domain of TCR clone 88485 (TRBV5-1, TRBJ2-3)
CASSRGQGGGTQYF

SEQ ID NO: 176971 - protein, 13 aa, Homo sapiens
  CDR3 for alpha chain variable domain of TCR clone 88486 (TRAV12-1, TRAJ6)
CVVYPGGSYIPTF

SEQ ID NO: 176972 - protein, 16 aa, Homo sapiens
  CDR3 for beta chain variable domain of TCR clone 88486 (TRBV19, TRBJ2-2)
CASRSPGTGATGELFF

SEQ ID NO: 176973 - protein, 13 aa, Homo sapiens
  CDR3 for alpha chain variable domain of TCR clone 88487 (TRAV1-2, TRAJ9)
CAALSTGGFKTIF

SEQ ID NO: 176974 - protein, 15 aa, Homo sapiens
  CDR3 for beta chain variable domain of TCR clone 88487 (TRBV7-9, TRBJ1-6)
CASSSPGRGNSPLHF

SEQ ID NO: 176975 - protein, 15 aa, Homo sapiens
  CDR3 for alpha chain variable domain of TCR clone 88488 (TRAV13-1, TRAJ50)
CAAKGSETFYDKVIF

SEQ ID NO: 176976 - protein, 18 aa, Homo sapiens
  CDR3 for beta chain variable domain of TCR clone 88488 (TRBV10-3, TRBJ2-1)
CTSVPSVSLRGGVDEQFF

SEQ ID NO: 176977 - protein, 22 aa, Homo sapiens
  CDR3 for alpha chain variable domain of TCR clone 88489 (TRAV3, TRAJ38)
CAVRDCLNAGNNHIQNPDPAVY

SEQ ID NO: 176978 - protein, 14 aa, Homo sapiens
  CDR3 for beta chain variable domain of TCR clone 88489 (TRBV5-5, TRBJ1-5)
CASSGQGVDQTQHF

SEQ ID NO: 176979 - protein, 16 aa, Homo sapiens
  CDR3 for alpha chain variable domain of TCR clone 88490 (TRAV27, TRAJ48)
TAAQPGDTGLYLPLTF

SEQ ID NO: 176980 - protein, 14 aa, Homo sapiens
  CDR3 for beta chain variable domain of TCR clone 88490 (TRBV7-6, TRBJ2-3)
CASSLGTVTDTQYF

SEQ ID NO: 176981 - protein, 17 aa, Homo sapiens
  CDR3 for alpha chain variable domain of TCR clone 88491 (TRAV12-2, TRAJ45)
CAVNIWGSGGGADGLTF

SEQ ID NO: 176982 - protein, 18 aa, Homo sapiens
  CDR3 for beta chain variable domain of TCR clone 88491 (TRBV20-1, TRBJ2-6)
CSAETTPTHGSGANDLTF

SEQ ID NO: 176983 - protein, 13 aa, Homo sapiens
  CDR3 for alpha chain variable domain of TCR clone 88492 (TRAV8-3, TRAJ21)
CAVGLDNFNKFYF

SEQ ID NO: 176984 - protein, 17 aa, Homo sapiens
  CDR3 for beta chain variable domain of TCR clone 88492 (TRBV11-2, TRBJ2-1)
CASSLYPPGVEYNEQFF

SEQ ID NO: 176985 - protein, 17 aa, Homo sapiens
  CDR3 for alpha chain variable domain of TCR clone 88493 (TRAV8-6, TRAJ58)
CAVSSWVGETSGSRLTF

SEQ ID NO: 176986 - protein, 15 aa, Homo sapiens
  CDR3 for beta chain variable domain of TCR clone 88493 (TRBV27, TRBJ1-6)
CASSFDRGLGSPLHF

SEQ ID NO: 176987 - protein, 13 aa, Homo sapiens
  CDR3 for alpha chain variable domain of TCR clone 88494 (TRAV35, TRAJ43)
CAGYPYNNNDMRF

SEQ ID NO: 176988 - protein, 16 aa, Homo sapiens
  CDR3 for beta chain variable domain of TCR clone 88494 (TRBV7-3, TRBJ2-1)
CASSLEGYRSYNEQFF

SEQ ID NO: 176989 - protein, 11 aa, Homo sapiens
  CDR3 for alpha chain variable domain of TCR clone 88495 (TRAV27, TRAJ47)
SIVEYGNKLVF

SEQ ID NO: 176990 - protein, 15 aa, Homo sapiens
  CDR3 for beta chain variable domain of TCR clone 88495 (TRBV28, TRBJ2-1)
CASSIIAGGRSEQFF

SEQ ID NO: 176991 - protein, 15 aa, Homo sapiens
  CDR3 for alpha chain variable domain of TCR clone 88496 (TRAV12-2, TRAJ8)
CAVREENTGFQKLVF

SEQ ID NO: 176992 - protein, 17 aa, Homo sapiens
  CDR3 for beta chain variable domain of TCR clone 88496 (TRBV13, TRBJ2-3)
CASSLSRVAGGRNTQYF

SEQ ID NO: 176993 - protein, 13 aa, Homo sapiens
  CDR3 for alpha chain variable domain of TCR clone 88497 (TRAV13-2, TRAJ13)
CAERPGGYQKVTF

SEQ ID NO: 176994 - protein, 16 aa, Homo sapiens
  CDR3 for beta chain variable domain of TCR clone 88497 (TRBV7-3, TRBJ2-1)
CASSLVSGSSNNEQFF

SEQ ID NO: 176995 - protein, 11 aa, Homo sapiens
  CDR3 for alpha chain variable domain of TCR clone 88498 (TRAV2, TRAJ33)
CAVDSNYQLIW

SEQ ID NO: 176996 - protein, 13 aa, Homo sapiens
  CDR3 for beta chain variable domain of TCR clone 88498 (TRBV20-1, TRBJ1-1)
CSAPLGGGTEAFF

SEQ ID NO: 176997 - protein, 15 aa, Homo sapiens
  CDR3 for alpha chain variable domain of TCR clone 88499 (TRAV35, TRAJ40)
CAGQLGQAGAYKYIF

SEQ ID NO: 176998 - protein, 14 aa, Homo sapiens
  CDR3 for beta chain variable domain of TCR clone 88499 (TRBV7-3, TRBJ2-1)
CASSLTGGANEQFF

SEQ ID NO: 176999 - protein, 12 aa, Homo sapiens
  CDR3 for alpha chain variable domain of TCR clone 88500 (TRAV12-1, TRAJ40)
CVVNGETYKYIF

SEQ ID NO: 177000 - protein, 14 aa, Homo sapiens
  CDR3 for beta chain variable domain of TCR clone 88500 (TRBV7-9, TRBJ1-1)
CASSSTKCNTEAFF

SEQ ID NO: 177001 - protein, 13 aa, Homo sapiens
  CDR3 for alpha chain variable domain of TCR clone 88501 (TRAV3, TRAJ20)
CCEAFCNDYKLSF

SEQ ID NO: 177002 - protein, 16 aa, Homo sapiens
  CDR3 for beta chain variable domain of TCR clone 88501 (TRBV20-1, TRBJ2-1)
CSARDHLAGGRGEQFF

SEQ ID NO: 177003 - protein, 11 aa, Homo sapiens
  CDR3 for alpha chain variable domain of TCR clone 88502 (TRAV1-2, TRAJ20)
FAVSNDYKLSF

SEQ ID NO: 177004 - protein, 16 aa, Homo sapiens
  CDR3 for beta chain variable domain of TCR clone 88502 (TRBV29-1, TRBJ2-6)
CSVEDITYSGANVLTF

SEQ ID NO: 177005 - protein, 14 aa, Homo sapiens
  CDR3 for alpha chain variable domain of TCR clone 88503 (TRAV38-1, TRAJ29)
CAFITPSGNTPLVF

SEQ ID NO: 177006 - protein, 15 aa, Homo sapiens
  CDR3 for beta chain variable domain of TCR clone 88503 (TRBV7-2, TRBJ2-2)
CASSPTGANTGELFF

SEQ ID NO: 177007 - protein, 14 aa, Homo sapiens
  CDR3 for alpha chain variable domain of TCR clone 88504 (TRAV1-2, TRAJ16)
CAVNRFSDGQQLLF

SEQ ID NO: 177008 - protein, 12 aa, Homo sapiens
  CDR3 for beta chain variable domain of TCR clone 88504 (TRBV7-9, TRBJ2-7)
CASSLEGYEQYF

SEQ ID NO: 177009 - protein, 12 aa, Homo sapiens
  CDR3 for alpha chain variable domain of TCR clone 88505 (TRAV12-2, TRAJ8)
CAVNTGFQKLVF

SEQ ID NO: 177010 - protein, 13 aa, Homo sapiens
  CDR3 for beta chain variable domain of TCR clone 88505 (TRBV27, TRBJ2-7)
CASSFSQGYEQYF

SEQ ID NO: 177011 - protein, 12 aa, Homo sapiens
  CDR3 for alpha chain variable domain of TCR clone 88506 (TRAV12-2, TRAJ10)
WGVTGGGNKLTF

SEQ ID NO: 177012 - protein, 15 aa, Homo sapiens
  CDR3 for beta chain variable domain of TCR clone 88506 (TRBV4-1, TRBJ1-2)
CASSQGQGAAYGYTF

SEQ ID NO: 177013 - protein, 13 aa, Homo sapiens
  CDR3 for alpha chain variable domain of TCR clone 88507 (TRAV6, TRAJ39)
CALLGNAGNMLTF

SEQ ID NO: 177014 - protein, 15 aa, Homo sapiens
  CDR3 for beta chain variable domain of TCR clone 88507 (TRBV11-2, TRBJ2-5)
CASSPSTGGYETQYF

SEQ ID NO: 177015 - protein, 14 aa, Homo sapiens
  CDR3 for alpha chain variable domain of TCR clone 88508 (TRAV12-1, TRAJ42)
CVVIYGGSQRNLIF

SEQ ID NO: 177016 - protein, 13 aa, Homo sapiens
  CDR3 for beta chain variable domain of TCR clone 88508 (TRBV18, TRBJ2-5)
CASSPPGKETQYF

SEQ ID NO: 177017 - protein, 17 aa, Homo sapiens
  CDR3 for alpha chain variable domain of TCR clone 88509 (TRAV3, TRAJ42)
CAVRDRDYGGSQGNLIF

SEQ ID NO: 177018 - protein, 14 aa, Homo sapiens
  CDR3 for beta chain variable domain of TCR clone 88509 (TRBV7-2, TRBJ2-5)
CASSPRGRSETQYF

SEQ ID NO: 177019 - protein, 13 aa, Homo sapiens
  CDR3 for alpha chain variable domain of TCR clone 88510 (TRAV13-1, TRAJ40)
CAARTSGTYKYIF

SEQ ID NO: 177020 - protein, 14 aa, Homo sapiens
  CDR3 for beta chain variable domain of TCR clone 88510 (TRBV19, TRBJ1-1)
CASLRTGLNTEAFF

SEQ ID NO: 177021 - protein, 14 aa, Homo sapiens
  CDR3 for alpha chain variable domain of TCR clone 88511 (TRAV21, TRAJ57)
CAVSRGGGSEKLVF

SEQ ID NO: 177022 - protein, 16 aa, Homo sapiens
  CDR3 for beta chain variable domain of TCR clone 88511 (TRBV5-1, TRBJ2-3)
CASSSVGRRSTDTQYF

SEQ ID NO: 177023 - protein, 22 aa, Homo sapiens
  CDR3 for alpha chain variable domain of TCR clone 88512 (TRAV4, )
CLVGPHNYDIQNPDPAVYHLRD

SEQ ID NO: 177024 - protein, 17 aa, Homo sapiens
  CDR3 for beta chain variable domain of TCR clone 88512 (TRBV24-1, TRBJ2-1)
CATSDVSTSGTYNEQFF

SEQ ID NO: 177025 - protein, 12 aa, Homo sapiens
  CDR3 for alpha chain variable domain of TCR clone 88513 (TRAV23/DV6, TRAJ16)
CAARGSGQKLLF

SEQ ID NO: 177026 - protein, 15 aa, Homo sapiens
  CDR3 for beta chain variable domain of TCR clone 88513 (TRBV15, TRBJ2-1)
CATSRPGQGLHEQFF

SEQ ID NO: 177027 - protein, 16 aa, Homo sapiens
  CDR3 for alpha chain variable domain of TCR clone 88514 (TRAV16, TRAJ52)
CALRAAGGTSYGKLTF

SEQ ID NO: 177028 - protein, 17 aa, Homo sapiens
  CDR3 for beta chain variable domain of TCR clone 88514 (TRBV11-2, TRBJ2-1)
CASSLYPPGVEYNEQFF

SEQ ID NO: 177029 - protein, 14 aa, Homo sapiens
  CDR3 for alpha chain variable domain of TCR clone 88515 (TRAV13-1, TRAJ44)
CAAKATGTASKLTF

SEQ ID NO: 177030 - protein, 12 aa, Homo sapiens
  CDR3 for beta chain variable domain of TCR clone 88515 (TRBV29-1, TRBJ2-3)
CSVTGGADTQYF

SEQ ID NO: 177031 - protein, 11 aa, Homo sapiens
  CDR3 for alpha chain variable domain of TCR clone 88516 (TRAV3, TRAJ21)
CAVVNFNKFYF

SEQ ID NO: 177032 - protein, 15 aa, Homo sapiens
  CDR3 for beta chain variable domain of TCR clone 88516 (TRBV5-1, TRBJ2-1)
CASSLVANSYNEQFF

SEQ ID NO: 177033 - protein, 12 aa, Homo sapiens
  CDR3 for alpha chain variable domain of TCR clone 88517 (TRAV12-3, TRAJ40)
CAMSSGTYKYIF

SEQ ID NO: 177034 - protein, 19 aa, Homo sapiens
  CDR3 for beta chain variable domain of TCR clone 88517 (TRBV25-1, TRBJ2-2)
CAILVYRVDRGRKTGELFF

SEQ ID NO: 177035 - protein, 12 aa, Homo sapiens
  CDR3 for alpha chain variable domain of TCR clone 88518 (TRAV2, TRAJ9)
CAVGAGGFKTIF

SEQ ID NO: 177036 - protein, 15 aa, Homo sapiens
  CDR3 for beta chain variable domain of TCR clone 88518 (TRBV7-2, TRBJ2-1)
CASSFQADEYNEQFF

SEQ ID NO: 177037 - protein, 15 aa, Homo sapiens
  CDR3 for alpha chain variable domain of TCR clone 88519 (TRAV26-1, TRAJ22)
CIVRVSFWFCKATDL

SEQ ID NO: 177038 - protein, 13 aa, Homo sapiens
  CDR3 for beta chain variable domain of TCR clone 88519 (TRBV7-9, TRBJ1-2)
CASSLKQNYGYTY

SEQ ID NO: 177039 - protein, 10 aa, Homo sapiens
  CDR3 for alpha chain variable domain of TCR clone 88520 (TRAV16, TRAJ22)
SAMYLRQLTF

SEQ ID NO: 177040 - protein, 17 aa, Homo sapiens
  CDR3 for beta chain variable domain of TCR clone 88520 (TRBV7-9, TRBJ1-6)
CASSSRDVEIHPSTLGT

SEQ ID NO: 177041 - protein, 14 aa, Homo sapiens
  CDR3 for alpha chain variable domain of TCR clone 88521 (TRAV13-1, TRAJ44)
CAAKATGTASKLTF

SEQ ID NO: 177042 - protein, 16 aa, Homo sapiens
  CDR3 for beta chain variable domain of TCR clone 88521 (TRBV28, TRBJ2-7)
CASSLFFETGGPEQYF

SEQ ID NO: 177043 - protein, 13 aa, Homo sapiens
  CDR3 for alpha chain variable domain of TCR clone 88522 (TRAV8-6, TRAJ8)
CAVSNTGFQKLVF

SEQ ID NO: 177044 - protein, 15 aa, Homo sapiens
  CDR3 for beta chain variable domain of TCR clone 88522 (TRBV28, TRBJ2-5)
CASSSGRTMQETQYF

SEQ ID NO: 177045 - protein, 13 aa, Homo sapiens
  CDR3 for alpha chain variable domain of TCR clone 88523 (TRAV8-3, TRAJ36)
CAVGATGANNLFF

SEQ ID NO: 177046 - protein, 12 aa, Homo sapiens
  CDR3 for beta chain variable domain of TCR clone 88523 (TRBV29-1, TRBJ2-3)
CSVTGGADTQYF

SEQ ID NO: 177047 - protein, 20 aa, Homo sapiens
  CDR3 for alpha chain variable domain of TCR clone 88524 (TRAV8-3, TRAJ45)
LSTSVLWGSYSGGGAEGLTF

SEQ ID NO: 177048 - protein, 11 aa, Homo sapiens
  CDR3 for beta chain variable domain of TCR clone 88524 (TRBV20-1, TRBJ2-5)
CSADRAETQYF

SEQ ID NO: 177049 - protein, 15 aa, Homo sapiens
  CDR3 for alpha chain variable domain of TCR clone 88525 (TRAV2, TRAJ15)
CAVEDRGQAGTALIF

SEQ ID NO: 177050 - protein, 13 aa, Homo sapiens
  CDR3 for beta chain variable domain of TCR clone 88525 (TRBV12-4, TRBJ2-5)
CASSSGGSRTQYF

SEQ ID NO: 177051 - protein, 17 aa, Homo sapiens
  CDR3 for alpha chain variable domain of TCR clone 88526 (TRAV3, TRAJ6)
CAVRDGPRAGGSYIPTL

SEQ ID NO: 177052 - protein, 13 aa, Homo sapiens
  CDR3 for beta chain variable domain of TCR clone 88526 (TRBV27, TRBJ1-1)
CASSLSIGAEAFF

SEQ ID NO: 177053 - protein, 12 aa, Homo sapiens
  CDR3 for alpha chain variable domain of TCR clone 88527 (TRAV1-1, TRAJ9)
CAVDTGGFKIIF

SEQ ID NO: 177054 - protein, 14 aa, Homo sapiens
  CDR3 for beta chain variable domain of TCR clone 88527 (TRBV7-8, TRBJ2-5)
CASSATGGQETQYF

SEQ ID NO: 177055 - protein, 16 aa, Homo sapiens
  CDR3 for alpha chain variable domain of TCR clone 88528 (TRAV16, TRAJ57)
CAPYLITQGGSEKLVF

SEQ ID NO: 177056 - protein, 16 aa, Homo sapiens
  CDR3 for beta chain variable domain of TCR clone 88528 (TRBV13, TRBJ2-2)
CASSPRTGEHTGELFF

SEQ ID NO: 177057 - protein, 13 aa, Homo sapiens
  CDR3 for alpha chain variable domain of TCR clone 88529 (TRAV13-1, TRAJ11)
CAASIRGYSTLTF

SEQ ID NO: 177058 - protein, 17 aa, Homo sapiens
  CDR3 for beta chain variable domain of TCR clone 88529 (TRBV4-3, TRBJ1-2)
CASSSRLQAGGSVGYSF

SEQ ID NO: 177059 - protein, 15 aa, Homo sapiens
  CDR3 for alpha chain variable domain of TCR clone 88530 (TRAV8-3, TRAJ23)
CAVGGRYNQGGKLIF

SEQ ID NO: 177060 - protein, 22 aa, Homo sapiens
  CDR3 for beta chain variable domain of TCR clone 88530 (TRBV29-1, TRBJ2-5)
TVSNMSPEDSSIYLCSAGTQYF

SEQ ID NO: 177061 - protein, 16 aa, Homo sapiens
  CDR3 for alpha chain variable domain of TCR clone 88531 (TRAV30, TRAJ24)
CGTEIVDADSWGIFQF

SEQ ID NO: 177062 - protein, 14 aa, Homo sapiens
  CDR3 for beta chain variable domain of TCR clone 88531 (TRBV20-1, TRBJ1-1)
CSAQTRIGGTEAFF

SEQ ID NO: 177063 - protein, 16 aa, Homo sapiens
  CDR3 for alpha chain variable domain of TCR clone 88532 (TRAV3, TRAJ3)
CAVRDRAKSSASKIIF

SEQ ID NO: 177064 - protein, 13 aa, Homo sapiens
  CDR3 for beta chain variable domain of TCR clone 88532 (TRBV7-9, TRBJ1-2)
CASSLKQNYGYTF

SEQ ID NO: 177065 - protein, 15 aa, Homo sapiens
  CDR3 for alpha chain variable domain of TCR clone 88533 (TRAV12-1, TRAJ22)
CVVRISSGSARQLTF

SEQ ID NO: 177066 - protein, 13 aa, Homo sapiens
  CDR3 for beta chain variable domain of TCR clone 88533 (TRBV6-3, TRBJ1-1)
CASSYSRTDSALF

SEQ ID NO: 177067 - protein, 13 aa, Homo sapiens
  CDR3 for alpha chain variable domain of TCR clone 88534 (TRAV36/DV7, TRAJ39)
CAVNNNAGNMLTF

SEQ ID NO: 177068 - protein, 16 aa, Homo sapiens
  CDR3 for beta chain variable domain of TCR clone 88534 (TRBV7-3, TRBJ2-2)
CASSLKRGTLSGELFF

SEQ ID NO: 177069 - protein, 16 aa, Homo sapiens
  CDR3 for alpha chain variable domain of TCR clone 88535 (TRAV3, TRAJ10)
CAVRDMRAGGGNKLTF

SEQ ID NO: 177070 - protein, 12 aa, Homo sapiens
  CDR3 for beta chain variable domain of TCR clone 88535 (TRBV12-4, TRBJ2-3)
CASSSTTDTQYF

SEQ ID NO: 177071 - protein, 14 aa, Homo sapiens
  CDR3 for alpha chain variable domain of TCR clone 88536 (TRAV12-2, TRAJ17)
CAVNIKAAGNKLTV

SEQ ID NO: 177072 - protein, 16 aa, Homo sapiens
  CDR3 for beta chain variable domain of TCR clone 88536 (TRBV20-1, TRBJ2-6)
CSASSQGYDGANVLTF

SEQ ID NO: 177073 - protein, 16 aa, Homo sapiens
  CDR3 for alpha chain variable domain of TCR clone 88537 (TRAV30, TRAJ24)
CGTEIVAADSWGKFQL

SEQ ID NO: 177074 - protein, 14 aa, Homo sapiens
  CDR3 for beta chain variable domain of TCR clone 88537 (TRBV12-5, TRBJ2-5)
CASGSRTHQETQYF

SEQ ID NO: 177075 - protein, 16 aa, Homo sapiens
  CDR3 for alpha chain variable domain of TCR clone 88538 (TRAV21, TRAJ37)
CAVRTAGSSNTGKLIF

SEQ ID NO: 177076 - protein, 16 aa, Homo sapiens
  CDR3 for beta chain variable domain of TCR clone 88538 (TRBV19, TRBJ2-1)
CASSKAGPSSYNEQFF

SEQ ID NO: 177077 - protein, 18 aa, Homo sapiens
  CDR3 for alpha chain variable domain of TCR clone 88539 (TRAV3, TRAJ17)
CAVRARRGGRSCRQQANF

SEQ ID NO: 177078 - protein, 16 aa, Homo sapiens
  CDR3 for beta chain variable domain of TCR clone 88539 (TRBV20-1, TRBJ1-4)
CSAPGQGLLTNEKLFF

SEQ ID NO: 177079 - protein, 16 aa, Homo sapiens
  CDR3 for alpha chain variable domain of TCR clone 88540 (TRAV20, TRAJ53)
CAVQAESGGSNYKLTF

SEQ ID NO: 177080 - protein, 14 aa, Homo sapiens
  CDR3 for beta chain variable domain of TCR clone 88540 (TRBV19, TRBJ2-1)
CASPTFVLSGEQFF

SEQ ID NO: 177081 - protein, 12 aa, Homo sapiens
  CDR3 for alpha chain variable domain of TCR clone 88541 (TRAV8-3, TRAJ26)
CAGDNYGQNFVF

SEQ ID NO: 177082 - protein, 13 aa, Homo sapiens
  CDR3 for beta chain variable domain of TCR clone 88541 (TRBV2, TRBJ2-7)
CASSVGGSGEQYF

SEQ ID NO: 177083 - protein, 14 aa, Homo sapiens
  CDR3 for alpha chain variable domain of TCR clone 88542 (TRAV29/DV5, TRAJ48)
CAAMALFGNEKLTF

SEQ ID NO: 177084 - protein, 15 aa, Homo sapiens
  CDR3 for beta chain variable domain of TCR clone 88542 (TRBV7-8, TRBJ2-1)
CASTHGTGIYNEQFF

SEQ ID NO: 177085 - protein, 15 aa, Homo sapiens
  CDR3 for alpha chain variable domain of TCR clone 88543 (TRAV8-1, TRAJ8)
CAVNAMNTGFQKLVF

SEQ ID NO: 177086 - protein, 11 aa, Homo sapiens
  CDR3 for beta chain variable domain of TCR clone 88543 (TRBV12-4, TRBJ2-3)
CASTATDTQYF

SEQ ID NO: 177087 - protein, 14 aa, Homo sapiens
  CDR3 for alpha chain variable domain of TCR clone 88544 (TRAV1-2, TRAJ8)
CAVREDTGFQKLVF

SEQ ID NO: 177088 - protein, 15 aa, Homo sapiens
  CDR3 for beta chain variable domain of TCR clone 88544 (TRBV18, TRBJ2-3)
CASSPLAGETDTQYF

SEQ ID NO: 177089 - protein, 14 aa, Homo sapiens
  CDR3 for alpha chain variable domain of TCR clone 88545 (TRAV12-2, TRAJ17)
CAVLFKAAGNKLTF

SEQ ID NO: 177090 - protein, 11 aa, Homo sapiens
  CDR3 for beta chain variable domain of TCR clone 88545 (TRBV11-2, TRBJ1-1)
CASSINTEAFF

SEQ ID NO: 177091 - protein, 13 aa, Homo sapiens
  CDR3 for alpha chain variable domain of TCR clone 88546 (TRAV8-6, TRAJ8)
CAVSNTGFQKLVF

SEQ ID NO: 177092 - protein, 13 aa, Homo sapiens
  CDR3 for beta chain variable domain of TCR clone 88546 (TRBV7-9, TRBJ1-2)
CASSLKQNYGYTF

SEQ ID NO: 177093 - protein, 14 aa, Homo sapiens
  CDR3 for alpha chain variable domain of TCR clone 88547 (TRAV13-1, TRAJ9)
CAASALTGSFKTIF

SEQ ID NO: 177094 - protein, 13 aa, Homo sapiens
  CDR3 for beta chain variable domain of TCR clone 88547 (TRBV20-1, TRBJ1-1)
CSAGTVGNTEAFF

SEQ ID NO: 177095 - protein, 11 aa, Homo sapiens
  CDR3 for alpha chain variable domain of TCR clone 88548 (TRAV27, TRAJ47)
CRSNQGNKLVF

SEQ ID NO: 177096 - protein, 12 aa, Homo sapiens
  CDR3 for beta chain variable domain of TCR clone 88548 (TRBV11-2, TRBJ2-2)
CASSLGGGELFF

SEQ ID NO: 177097 - protein, 16 aa, Homo sapiens
  CDR3 for alpha chain variable domain of TCR clone 88549 (TRAV30, TRAJ24)
CGTEIVDADSWGKFQF

SEQ ID NO: 177098 - protein, 13 aa, Homo sapiens
  CDR3 for beta chain variable domain of TCR clone 88549 (TRBV11-2, TRBJ2-5)
CASSSTGEGTQYF

SEQ ID NO: 177099 - protein, 13 aa, Homo sapiens
  CDR3 for alpha chain variable domain of TCR clone 88550 (TRAV35, TRAJ42)
CAGFPGSQGNLIF

SEQ ID NO: 177100 - protein, 13 aa, Homo sapiens
  CDR3 for beta chain variable domain of TCR clone 88550 (TRBV12-4, TRBJ2-2)
CASSITGSGELFF

SEQ ID NO: 177101 - protein, 12 aa, Homo sapiens
  CDR3 for alpha chain variable domain of TCR clone 88551 (TRAV10, TRAJ43)
CVVVRVGNDMRF

SEQ ID NO: 177102 - protein, 15 aa, Homo sapiens
  CDR3 for beta chain variable domain of TCR clone 88551 (TRBV10-3, TRBJ2-3)
CAISLTSGGTDTQYF

SEQ ID NO: 177103 - protein, 14 aa, Homo sapiens
  CDR3 for alpha chain variable domain of TCR clone 88552 (TRAV8-2, TRAJ4)
CVVSPSGGYNKLIF

SEQ ID NO: 177104 - protein, 15 aa, Homo sapiens
  CDR3 for beta chain variable domain of TCR clone 88552 (TRBV4-1, TRBJ1-4)
CASSDKGGTNEKLFF

SEQ ID NO: 177105 - protein, 15 aa, Homo sapiens
  CDR3 for alpha chain variable domain of TCR clone 88553 (TRAV25, TRAJ53)
CAATGGGGCNYKLTF

SEQ ID NO: 177106 - protein, 19 aa, Homo sapiens
  CDR3 for beta chain variable domain of TCR clone 88553 (TRBV7-2, TRBJ2-3)
CASSFLSRNWGGGTDTQYF

SEQ ID NO: 177107 - protein, 15 aa, Homo sapiens
  CDR3 for alpha chain variable domain of TCR clone 88554 (TRAV12-3, TRAJ42)
CAMSGHGGSQGNLIF

SEQ ID NO: 177108 - protein, 14 aa, Homo sapiens
  CDR3 for beta chain variable domain of TCR clone 88554 (TRBV7-3, TRBJ2-2)
CASSLLGSTGELFF

SEQ ID NO: 177109 - protein, 14 aa, Homo sapiens
  CDR3 for alpha chain variable domain of TCR clone 88555 (TRAV1-2, TRAJ8)
RAVREDTGFQKLVF

SEQ ID NO: 177110 - protein, 12 aa, Homo sapiens
  CDR3 for beta chain variable domain of TCR clone 88555 (TRBV11-2, TRBJ2-2)
CASSLPTGELFF

SEQ ID NO: 177111 - protein, 23 aa, Homo sapiens
  CDR3 for alpha chain variable domain of TCR clone 88556 (TRAV26-1, TRAJ38)
CIADNAGNNHIQNPDPAVYQLRN

SEQ ID NO: 177112 - protein, 16 aa, Homo sapiens
  CDR3 for beta chain variable domain of TCR clone 88556 (TRBV7-9, TRBJ1-2)
CASSLGFSSGEDGYTF

SEQ ID NO: 177113 - protein, 16 aa, Homo sapiens
  CDR3 for alpha chain variable domain of TCR clone 88557 (TRAV26-1, TRAJ36)
CIVRVSYQTGANNLFF

SEQ ID NO: 177114 - protein, 13 aa, Homo sapiens
  CDR3 for beta chain variable domain of TCR clone 88557 (TRBV20-1, TRBJ1-6)
CSAPLGVGSPLHF

SEQ ID NO: 177115 - protein, 14 aa, Homo sapiens
  CDR3 for alpha chain variable domain of TCR clone 88558 (TRAV12-2, TRAJ53)
CAVKGGGSNYKLTF

SEQ ID NO: 177116 - protein, 15 aa, Homo sapiens
  CDR3 for beta chain variable domain of TCR clone 88558 (TRBV9, TRBJ1-6)
CASSVAGTGDSPLHF

SEQ ID NO: 177117 - protein, 14 aa, Homo sapiens
  CDR3 for alpha chain variable domain of TCR clone 88559 (TRAV38-1, TRAJ45)
CAYYSGGGADGLTF

SEQ ID NO: 177118 - protein, 13 aa, Homo sapiens
  CDR3 for beta chain variable domain of TCR clone 88559 (TRBV19, TRBJ1-2)
CASSVPGQDGYTF

SEQ ID NO: 177119 - protein, 14 aa, Homo sapiens
  CDR3 for alpha chain variable domain of TCR clone 88560 (TRAV2, TRAJ9)
CAVEDRSGGFKTIF

SEQ ID NO: 177120 - protein, 13 aa, Homo sapiens
  CDR3 for beta chain variable domain of TCR clone 88560 (TRBV28, TRBJ2-4)
CASSQSSKNIQYF

SEQ ID NO: 177121 - protein, 16 aa, Homo sapiens
  CDR3 for alpha chain variable domain of TCR clone 88561 (TRAV3, TRAJ37)
CAVRPHGSGNTGKLIF

SEQ ID NO: 177122 - protein, 15 aa, Homo sapiens
  CDR3 for beta chain variable domain of TCR clone 88561 (TRBV11-3, TRBJ2-3)
CASLKDGREGDTQYF

SEQ ID NO: 177123 - protein, 13 aa, Homo sapiens
  CDR3 for alpha chain variable domain of TCR clone 88562 (TRAV21, TRAJ36)
CAVIKTGANNLFF

SEQ ID NO: 177124 - protein, 13 aa, Homo sapiens
  CDR3 for beta chain variable domain of TCR clone 88562 (TRBV29-1, TRBJ2-3)
CGATRGGRDTQYF

SEQ ID NO: 177125 - protein, 10 aa, Homo sapiens
  CDR3 for alpha chain variable domain of TCR clone 88563 (TRAV26-1, TRAJ40)
CIAGTSKYIF

SEQ ID NO: 177126 - protein, 15 aa, Homo sapiens
  CDR3 for beta chain variable domain of TCR clone 88563 (TRBV19, TRBJ2-1)
CASSSPGVPLDEQFF

SEQ ID NO: 177127 - protein, 14 aa, Homo sapiens
  CDR3 for alpha chain variable domain of TCR clone 88564 (TRAV12-2, TRAJ53)
CAVKGGGSNYKLTF

SEQ ID NO: 177128 - protein, 15 aa, Homo sapiens
  CDR3 for beta chain variable domain of TCR clone 88564 (TRBV28, TRBJ2-1)
CASSIIAGGRSEQFF

SEQ ID NO: 177129 - protein, 11 aa, Homo sapiens
  CDR3 for alpha chain variable domain of TCR clone 88565 (TRAV3, TRAJ21)
CAVGNFNKFYF

SEQ ID NO: 177130 - protein, 16 aa, Homo sapiens
  CDR3 for beta chain variable domain of TCR clone 88565 (TRBV19, TRBJ2-1)
CASSKAGPSSYKEQFF

SEQ ID NO: 177131 - protein, 13 aa, Homo sapiens
  CDR3 for alpha chain variable domain of TCR clone 88566 (TRAV1-2, TRAJ9)
CAGLNTGGFKTIF

SEQ ID NO: 177132 - protein, 13 aa, Homo sapiens
  CDR3 for beta chain variable domain of TCR clone 88566 (TRBV19, TRBJ1-2)
CASSVPGQDGYTF

SEQ ID NO: 177133 - protein, 14 aa, Homo sapiens
  CDR3 for alpha chain variable domain of TCR clone 88567 (TRAV35, TRAJ33)
CAGSSQDSNYQLIW

SEQ ID NO: 177134 - protein, 12 aa, Homo sapiens
  CDR3 for beta chain variable domain of TCR clone 88567 (TRBV29-1, TRBJ2-3)
CSVTGGADTQYF

SEQ ID NO: 177135 - protein, 13 aa, Homo sapiens
  CDR3 for alpha chain variable domain of TCR clone 88568 (TRAV1-1, TRAJ9)
CAAKNTGGFKTIF

SEQ ID NO: 177136 - protein, 14 aa, Homo sapiens
  CDR3 for beta chain variable domain of TCR clone 88568 (TRBV20-1, TRBJ2-1)
CSALIGGSANEQFF

SEQ ID NO: 177137 - protein, 12 aa, Homo sapiens
  CDR3 for alpha chain variable domain of TCR clone 88569 (TRAV20, TRAJ37)
CWCSSNTGKLIF

SEQ ID NO: 177138 - protein, 11 aa, Homo sapiens
  CDR3 for beta chain variable domain of TCR clone 88569 (TRBV12-4, TRBJ2-3)
CASTATDTQYF

SEQ ID NO: 177139 - protein, 13 aa, Homo sapiens
  CDR3 for alpha chain variable domain of TCR clone 88570 (TRAV2, TRAJ40)
CAVVTSVTYKYIF

SEQ ID NO: 177140 - protein, 13 aa, Homo sapiens
  CDR3 for beta chain variable domain of TCR clone 88570 (TRBV7-9, TRBJ2-5)
CASLPSGRETQYF

SEQ ID NO: 177141 - protein, 13 aa, Homo sapiens
  CDR3 for alpha chain variable domain of TCR clone 88571 (TRAV2, TRAJ40)
CAVVTSGTYKYIF

SEQ ID NO: 177142 - protein, 13 aa, Homo sapiens
  CDR3 for beta chain variable domain of TCR clone 88571 (TRBV7-9, TRBJ2-7)
CASSAPGGYEQYF

SEQ ID NO: 177143 - protein, 14 aa, Homo sapiens
  CDR3 for alpha chain variable domain of TCR clone 88572 (TRAV2, TRAJ37)
CAVEGSSNTGKLIF

SEQ ID NO: 177144 - protein, 13 aa, Homo sapiens
  CDR3 for beta chain variable domain of TCR clone 88572 (TRBV10-3, TRBJ2-7)
CASKLAVNYEQYF

SEQ ID NO: 177145 - protein, 13 aa, Homo sapiens
  CDR3 for alpha chain variable domain of TCR clone 88573 (TRAV1-1, TRAJ31)
CASYLNNNARLMF

SEQ ID NO: 177146 - protein, 14 aa, Homo sapiens
  CDR3 for beta chain variable domain of TCR clone 88573 (TRBV4-1, TRBJ2-5)
CASSRSGSGETQYF

SEQ ID NO: 177147 - protein, 19 aa, Homo sapiens
  CDR3 for alpha chain variable domain of TCR clone 88574 (TRAV26-1, TRAJ52)
CIVRAHRNAGGTSYGKLTF

SEQ ID NO: 177148 - protein, 13 aa, Homo sapiens
  CDR3 for beta chain variable domain of TCR clone 88574 (TRBV15, TRBJ2-7)
CATSTTGHYEQYF

SEQ ID NO: 177149 - protein, 15 aa, Homo sapiens
  CDR3 for alpha chain variable domain of TCR clone 88575 (TRAV12-1, TRAJ15)
CVVTRANQAGNALIF

SEQ ID NO: 177150 - protein, 14 aa, Homo sapiens
  CDR3 for beta chain variable domain of TCR clone 88575 (TRBV5-1, TRBJ1-1)
CASSLVSINTEAFF

SEQ ID NO: 177151 - protein, 14 aa, Homo sapiens
  CDR3 for alpha chain variable domain of TCR clone 88576 (TRAV1-2, TRAJ8)
CAVREDTGFQKLVS

SEQ ID NO: 177152 - protein, 14 aa, Homo sapiens
  CDR3 for beta chain variable domain of TCR clone 88576 (TRBV12-5, TRBJ2-5)
CASGSRTHQETQYF

SEQ ID NO: 177153 - protein, 13 aa, Homo sapiens
  CDR3 for alpha chain variable domain of TCR clone 88577 (TRAV13-1, TRAJ5)
CAARVTGRRALTF

SEQ ID NO: 177154 - protein, 14 aa, Homo sapiens
  CDR3 for beta chain variable domain of TCR clone 88577 (TRBV5-1, TRBJ2-2)
CASSLGLAVGELFF

SEQ ID NO: 177155 - protein, 15 aa, Homo sapiens
  CDR3 for alpha chain variable domain of TCR clone 88578 (TRAV35, TRAJ40)
CAGQLGTSGTYKYIF

SEQ ID NO: 177156 - protein, 14 aa, Homo sapiens
  CDR3 for beta chain variable domain of TCR clone 88578 (TRBV7-3, TRBJ2-1)
CASNLAGGTNEQFF

SEQ ID NO: 177157 - protein, 13 aa, Homo sapiens
  CDR3 for alpha chain variable domain of TCR clone 88579 (TRAV16, TRAJ54)
CALMVQGAQKLVF

SEQ ID NO: 177158 - protein, 12 aa, Homo sapiens
  CDR3 for beta chain variable domain of TCR clone 88579 (TRBV18, TRBJ2-7)
CDSSTAMGEQYF

SEQ ID NO: 177159 - protein, 16 aa, Homo sapiens
  CDR3 for alpha chain variable domain of TCR clone 88580 (TRAV30, TRAJ24)
CGTEIVDADSWGKFQF

SEQ ID NO: 177160 - protein, 14 aa, Homo sapiens
  CDR3 for beta chain variable domain of TCR clone 88580 (TRBV12-5, TRBJ2-5)
CASGSRTQQETQFF

SEQ ID NO: 177161 - protein, 13 aa, Homo sapiens
  CDR3 for alpha chain variable domain of TCR clone 88581 (TRAV27, TRAJ41)
CAGEDNSGYALNF

SEQ ID NO: 177162 - protein, 14 aa, Homo sapiens
  CDR3 for beta chain variable domain of TCR clone 88581 (TRBV7-2, TRBJ1-1)
CASSFLTGTTEAFF

SEQ ID NO: 177163 - protein, 11 aa, Homo sapiens
  CDR3 for alpha chain variable domain of TCR clone 88582 (TRAV13-1, TRAJ30)
CAANRDDKIIF

SEQ ID NO: 177164 - protein, 15 aa, Homo sapiens
  CDR3 for beta chain variable domain of TCR clone 88582 (TRBV18, TRBJ1-1)
CASSPSSWVNTEAFF

SEQ ID NO: 177165 - protein, 18 aa, Homo sapiens
  CDR3 for alpha chain variable domain of TCR clone 88583 (TRAV12-3, TRAJ52)
CAMSVGGAGGTSYGKLTF

SEQ ID NO: 177166 - protein, 15 aa, Homo sapiens
  CDR3 for beta chain variable domain of TCR clone 88583 (TRBV5-5, TRBJ2-2)
CASSRQASGAGELFF

SEQ ID NO: 177167 - protein, 10 aa, Homo sapiens
  CDR3 for alpha chain variable domain of TCR clone 88584 (TRAV38-2/DV8, TRAJ40)
CASGPYKYIF

SEQ ID NO: 177168 - protein, 14 aa, Homo sapiens
  CDR3 for beta chain variable domain of TCR clone 88584 (TRBV7-9, TRBJ2-1)
CASSPRDSLYEQFF

SEQ ID NO: 177169 - protein, 13 aa, Homo sapiens
  CDR3 for alpha chain variable domain of TCR clone 88585 (TRAV12-1, TRAJ26)
SATYLYYGQNFVF

SEQ ID NO: 177170 - protein, 15 aa, Homo sapiens
  CDR3 for beta chain variable domain of TCR clone 88585 (TRBV5-1, TRBJ2-6)
CASSLEPSGANVLTF

SEQ ID NO: 177171 - protein, 17 aa, Homo sapiens
  CDR3 for alpha chain variable domain of TCR clone 88586 (TRAV3, TRAJ42)
CAVRDRDDGGSQGNLIF

SEQ ID NO: 177172 - protein, 12 aa, Homo sapiens
  CDR3 for beta chain variable domain of TCR clone 88586 (TRBV11-2, TRBJ2-1)
CASSPGNNEQFF

SEQ ID NO: 177173 - protein, 15 aa, Homo sapiens
  CDR3 for alpha chain variable domain of TCR clone 88587 (TRAV25, TRAJ53)
CAATGGGGSNYKRTF

SEQ ID NO: 177174 - protein, 11 aa, Homo sapiens
  CDR3 for beta chain variable domain of TCR clone 88587 (TRBV11-3, TRBJ2-2)
CASSSGGELFF

SEQ ID NO: 177175 - protein, 15 aa, Homo sapiens
  CDR3 for alpha chain variable domain of TCR clone 88588 (TRAV26-2, TRAJ45)
CILRDRADQEEVLTD

SEQ ID NO: 177176 - protein, 15 aa, Homo sapiens
  CDR3 for beta chain variable domain of TCR clone 88588 (TRBV7-6, TRBJ2-5)
CASSKPTGPQETQYF

SEQ ID NO: 177177 - protein, 14 aa, Homo sapiens
  CDR3 for alpha chain variable domain of TCR clone 88589 (TRAV2, TRAJ3)
CAVRPYRSASKIIF

SEQ ID NO: 177178 - protein, 17 aa, Homo sapiens
  CDR3 for beta chain variable domain of TCR clone 88589 (TRBV7-6, TRBJ2-5)
CASSSPQAGDPSETQYF

SEQ ID NO: 177179 - protein, 16 aa, Homo sapiens
  CDR3 for alpha chain variable domain of TCR clone 88590 (TRAV3, TRAJ37)
CAVRGKGSGNTGKLIF

SEQ ID NO: 177180 - protein, 17 aa, Homo sapiens
  CDR3 for beta chain variable domain of TCR clone 88590 (TRBV28, TRBJ2-3)
CASTASGRDLSTDTQYF

SEQ ID NO: 177181 - protein, 20 aa, Homo sapiens
  CDR3 for alpha chain variable domain of TCR clone 88591 (TRAV17, TRAJ29)
CATDAFRKHTSCLWKVHKTF

SEQ ID NO: 177182 - protein, 13 aa, Homo sapiens
  CDR3 for beta chain variable domain of TCR clone 88591 (TRBV5-7, TRBJ2-6)
CASTSSGANVLTF

SEQ ID NO: 177183 - protein, 12 aa, Homo sapiens
  CDR3 for alpha chain variable domain of TCR clone 88592 (TRAV2, TRAJ33)
CACMDSNYQLIW

SEQ ID NO: 177184 - protein, 16 aa, Homo sapiens
  CDR3 for beta chain variable domain of TCR clone 88592 (TRBV2, TRBJ2-7)
CASSEPWTGPSYEQYF

SEQ ID NO: 177185 - protein, 14 aa, Homo sapiens
  CDR3 for alpha chain variable domain of TCR clone 88593 (TRAV26-1, TRAJ38)
CIADNAGNNRKLIW

SEQ ID NO: 177186 - protein, 13 aa, Homo sapiens
  CDR3 for beta chain variable domain of TCR clone 88593 (TRBV20-1, TRBJ1-1)
CSARGGGNTETFF

SEQ ID NO: 177187 - protein, 15 aa, Homo sapiens
  CDR3 for alpha chain variable domain of TCR clone 88594 (TRAV12-3, TRAJ6)
CAMSPASGGSYIPTF

SEQ ID NO: 177188 - protein, 11 aa, Homo sapiens
  CDR3 for beta chain variable domain of TCR clone 88594 (TRBV11-2, TRBJ2-2)
CASSLPGELFF

SEQ ID NO: 177189 - protein, 14 aa, Homo sapiens
  CDR3 for alpha chain variable domain of TCR clone 88595 (TRAV12-3, TRAJ10)
SHLPLTGGGNKLTF

SEQ ID NO: 177190 - protein, 15 aa, Homo sapiens
  CDR3 for beta chain variable domain of TCR clone 88595 (TRBV12-4, TRBJ2-1)
CASSPLSGRNNEQFF

SEQ ID NO: 177191 - protein, 14 aa, Homo sapiens
  CDR3 for alpha chain variable domain of TCR clone 88596 (TRAV1-2, TRAJ16)
CAVNRFSDGQKLLF

SEQ ID NO: 177192 - protein, 16 aa, Homo sapiens
  CDR3 for beta chain variable domain of TCR clone 88596 (TRBV5-1, TRBJ2-5)
CASSFQGLADQETQYF

SEQ ID NO: 177193 - protein, 12 aa, Homo sapiens
  CDR3 for alpha chain variable domain of TCR clone 88597 (TRAV17, TRAJ20)
CATQSNDYKLNF

SEQ ID NO: 177194 - protein, 13 aa, Homo sapiens
  CDR3 for beta chain variable domain of TCR clone 88597 (TRBV10-3, TRBJ1-1)
CAIIPEGGTEAFF

SEQ ID NO: 177195 - protein, 14 aa, Homo sapiens
  CDR3 for alpha chain variable domain of TCR clone 88598 (TRAV23/DV6, TRAJ8)
CAASKATGFQKLVF

SEQ ID NO: 177196 - protein, 16 aa, Homo sapiens
  CDR3 for beta chain variable domain of TCR clone 88598 (TRBV18, TRBJ2-7)
CASSPGRAGGAYEQYF

SEQ ID NO: 177197 - protein, 11 aa, Homo sapiens
  CDR3 for alpha chain variable domain of TCR clone 88599 (TRAV27, TRAJ47)
SIVEYGNKLVF

SEQ ID NO: 177198 - protein, 18 aa, Homo sapiens
  CDR3 for beta chain variable domain of TCR clone 88599 (TRBV2, TRBJ2-1)
CASRGLAGGHRTYNEQFF

SEQ ID NO: 177199 - protein, 14 aa, Homo sapiens
  CDR3 for alpha chain variable domain of TCR clone 88600 (TRAV21, TRAJ3)
CAVMGYSSASKIIF

SEQ ID NO: 177200 - protein, 15 aa, Homo sapiens
  CDR3 for beta chain variable domain of TCR clone 88600 (TRBV5-1, TRBJ2-7)
CASSLNGGPAREQYF

SEQ ID NO: 177201 - protein, 12 aa, Homo sapiens
  CDR3 for alpha chain variable domain of TCR clone 88601 (TRAV12-3, TRAJ42)
CAPGGSQGNLIF

SEQ ID NO: 177202 - protein, 13 aa, Homo sapiens
  CDR3 for beta chain variable domain of TCR clone 88601 (TRBV5-7, TRBJ2-6)
CASTSRGANVLTF

SEQ ID NO: 177203 - protein, 14 aa, Homo sapiens
  CDR3 for alpha chain variable domain of TCR clone 88602 (TRAV16, TRAJ39)
CALSKNNAGNILTF

SEQ ID NO: 177204 - protein, 16 aa, Homo sapiens
  CDR3 for beta chain variable domain of TCR clone 88602 (TRBV6-6, TRBJ2-1)
CASSYSFSGSYNEQFF

SEQ ID NO: 177205 - protein, 13 aa, Homo sapiens
  CDR3 for alpha chain variable domain of TCR clone 88603 (TRAV36/DV7, TRAJ33)
CAVDMDSNYQLIW

SEQ ID NO: 177206 - protein, 16 aa, Homo sapiens
  CDR3 for beta chain variable domain of TCR clone 88603 (TRBV15, TRBJ2-3)
CATRLSGGRAPATQYF

SEQ ID NO: 177207 - protein, 15 aa, Homo sapiens
  CDR3 for alpha chain variable domain of TCR clone 88604 (TRAV21, TRAJ13)
CAVRPTSGGYQKVTF

SEQ ID NO: 177208 - protein, 16 aa, Homo sapiens
  CDR3 for beta chain variable domain of TCR clone 88604 (TRBV11-2, TRBJ1-1)
CASSPVGPRSDTEAFF

SEQ ID NO: 177209 - protein, 13 aa, Homo sapiens
  CDR3 for alpha chain variable domain of TCR clone 88605 (TRAV20, TRAJ37)
CAGCSSNTGKLIF

SEQ ID NO: 177210 - protein, 21 aa, Homo sapiens
  CDR3 for beta chain variable domain of TCR clone 88605 (TRBV4-2, TRBJ2-3)
PCSQKTRPCISVPATPGTQYF

SEQ ID NO: 177211 - protein, 15 aa, Homo sapiens
  CDR3 for alpha chain variable domain of TCR clone 88606 (TRAV26-1, TRAJ40)
CIVRVTTTGTYKYIF

SEQ ID NO: 177212 - protein, 12 aa, Homo sapiens
  CDR3 for beta chain variable domain of TCR clone 88606 (TRBV7-9, TRBJ1-4)
CASSTDREKLFF

SEQ ID NO: 177213 - protein, 14 aa, Homo sapiens
  CDR3 for alpha chain variable domain of TCR clone 88607 (TRAV13-2, TRAJ22)
CSDGTLGSARQLTF

SEQ ID NO: 177214 - protein, 16 aa, Homo sapiens
  CDR3 for beta chain variable domain of TCR clone 88607 (TRBV19, TRBJ2-1)
CASSSKGTRSYNEQFF

SEQ ID NO: 177215 - protein, 14 aa, Homo sapiens
  CDR3 for alpha chain variable domain of TCR clone 88608 (TRAV12-2, TRAJ40)
CAVKILSGTYKYIF

SEQ ID NO: 177216 - protein, 16 aa, Homo sapiens
  CDR3 for beta chain variable domain of TCR clone 88608 (TRBV19, TRBJ2-1)
CASSKAGPSSYNEQFF

SEQ ID NO: 177217 - protein, 12 aa, Homo sapiens
  CDR3 for alpha chain variable domain of TCR clone 88609 (TRAV29/DV5, TRAJ52)
CAASAITLMLVV

SEQ ID NO: 177218 - protein, 15 aa, Homo sapiens
  CDR3 for beta chain variable domain of TCR clone 88609 (TRBV11-2, TRBJ2-1)
CASSKNRGLIYEQFF

SEQ ID NO: 177219 - protein, 13 aa, Homo sapiens
  CDR3 for alpha chain variable domain of TCR clone 88610 (TRAV2, TRAJ40)
CAVVTSGTYKYIF

SEQ ID NO: 177220 - protein, 14 aa, Homo sapiens
  CDR3 for beta chain variable domain of TCR clone 88610 (TRBV28, TRBJ2-1)
CANSYYTAYNEQFF

SEQ ID NO: 177221 - protein, 13 aa, Homo sapiens
  CDR3 for alpha chain variable domain of TCR clone 88611 (TRAV16, TRAJ9)
CALSNTGGFKTIF

SEQ ID NO: 177222 - protein, 14 aa, Homo sapiens
  CDR3 for beta chain variable domain of TCR clone 88611 (TRBV5-1, TRBJ2-1)
CASILEGPVYEQFF

SEQ ID NO: 177223 - protein, 13 aa, Homo sapiens
  CDR3 for alpha chain variable domain of TCR clone 88612 (TRAV13-1, TRAJ5)
CAASDTGRRALTF

SEQ ID NO: 177224 - protein, 12 aa, Homo sapiens
  CDR3 for beta chain variable domain of TCR clone 88612 (TRBV28, TRBJ2-3)
CVSSLYRDTQYF

SEQ ID NO: 177225 - protein, 14 aa, Homo sapiens
  CDR3 for alpha chain variable domain of TCR clone 88613 (TRAV13-1, TRAJ6)
CAASITGGSYIPTF

SEQ ID NO: 177226 - protein, 17 aa, Homo sapiens
  CDR3 for beta chain variable domain of TCR clone 88613 (TRBV7-9, TRBJ2-3)
CASSPTVAGDLTDTQYF

SEQ ID NO: 177227 - protein, 12 aa, Homo sapiens
  CDR3 for alpha chain variable domain of TCR clone 88614 (TRAV16, TRAJ10)
CSRTGGGHKLTF

SEQ ID NO: 177228 - protein, 15 aa, Homo sapiens
  CDR3 for beta chain variable domain of TCR clone 88614 (TRBV6-3, TRBJ2-7)
CASSSPGTVFYEQYF

SEQ ID NO: 177229 - protein, 14 aa, Homo sapiens
  CDR3 for alpha chain variable domain of TCR clone 88615 (TRAV6, TRAJ37)
CALGSQGNTGTLIF

SEQ ID NO: 177230 - protein, 15 aa, Homo sapiens
  CDR3 for beta chain variable domain of TCR clone 88615 (TRBV2, TRBJ2-1)
CASSEEREGDNEQFF

SEQ ID NO: 177231 - protein, 14 aa, Homo sapiens
  CDR3 for alpha chain variable domain of TCR clone 88616 (TRAV17, TRAJ54)
CATDANQGAQKLLF

SEQ ID NO: 177232 - protein, 12 aa, Homo sapiens
  CDR3 for beta chain variable domain of TCR clone 88616 (TRBV7-9, TRBJ2-7)
CASSIKREEQYF

SEQ ID NO: 177233 - protein, 13 aa, Homo sapiens
  CDR3 for alpha chain variable domain of TCR clone 88617 (TRAV21, TRAJ27)
CAARPGNAGKSTF

SEQ ID NO: 177234 - protein, 15 aa, Homo sapiens
  CDR3 for beta chain variable domain of TCR clone 88617 (TRBV20-1, TRBJ2-7)
CSARDRVAGMDEQYF

SEQ ID NO: 177235 - protein, 14 aa, Homo sapiens
  CDR3 for alpha chain variable domain of TCR clone 88618 (TRAV8-2, TRAJ4)
CVVSPSGGFNKLIF

SEQ ID NO: 177236 - protein, 15 aa, Homo sapiens
  CDR3 for beta chain variable domain of TCR clone 88618 (TRBV4-1, TRBJ1-4)
CASSDTGGTNEKLFF

SEQ ID NO: 177237 - protein, 17 aa, Homo sapiens
  CDR3 for alpha chain variable domain of TCR clone 88619 (TRAV2, TRAJ43)
CAEEGEQCHALWSRDQT

SEQ ID NO: 177238 - protein, 16 aa, Homo sapiens
  CDR3 for beta chain variable domain of TCR clone 88619 (TRBV4-1, TRBJ2-7)
CASSQEWTSGPLEQYF

SEQ ID NO: 177239 - protein, 11 aa, Homo sapiens
  CDR3 for alpha chain variable domain of TCR clone 88620 (TRAV26-1, TRAJ27)
CIDPNAGKSTF

SEQ ID NO: 177240 - protein, 18 aa, Homo sapiens
  CDR3 for beta chain variable domain of TCR clone 88620 (TRBV7-9, TRBJ2-6)
CAISFPGAGISGANVLTF

SEQ ID NO: 177241 - protein, 13 aa, Homo sapiens
  CDR3 for alpha chain variable domain of TCR clone 88621 (TRAV8-1, TRAJ39)
CAGLNNAGNMLTF

SEQ ID NO: 177242 - protein, 17 aa, Homo sapiens
  CDR3 for beta chain variable domain of TCR clone 88621 (TRBV19, TRBJ2-3)
CASSIEPAGGGTDTQYF

SEQ ID NO: 177243 - protein, 10 aa, Homo sapiens
  CDR3 for alpha chain variable domain of TCR clone 88622 (TRAV12-3, TRAJ49)
CAMNDDQFFF

SEQ ID NO: 177244 - protein, 13 aa, Homo sapiens
  CDR3 for beta chain variable domain of TCR clone 88622 (TRBV12-4, TRBJ1-1)
CASSPGTGFEAFF

SEQ ID NO: 177245 - protein, 17 aa, Homo sapiens
  CDR3 for alpha chain variable domain of TCR clone 88623 (TRAV8-4, TRAJ10)
CAVSRPTLTGGGNKLTF

SEQ ID NO: 177246 - protein, 12 aa, Homo sapiens
  CDR3 for beta chain variable domain of TCR clone 88623 (TRBV11-2, TRBJ2-2)
CASSLGGGELFF

SEQ ID NO: 177247 - protein, 16 aa, Homo sapiens
  CDR3 for alpha chain variable domain of TCR clone 88624 (TRAV20, TRAJ53)
CAVRRGRGGSNYKLTF

SEQ ID NO: 177248 - protein, 12 aa, Homo sapiens
  CDR3 for beta chain variable domain of TCR clone 88624 (TRBV29-1, TRBJ2-3)
CSVVLGADTQYF

SEQ ID NO: 177249 - protein, 11 aa, Homo sapiens
  CDR3 for alpha chain variable domain of TCR clone 88625 (TRAV17, TRAJ9)
CGFTGGFKTIF

SEQ ID NO: 177250 - protein, 13 aa, Homo sapiens
  CDR3 for beta chain variable domain of TCR clone 88625 (TRBV7-9, TRBJ2-2)
CQQLSSRHRELFF

SEQ ID NO: 177251 - protein, 15 aa, Homo sapiens
  CDR3 for alpha chain variable domain of TCR clone 88626 (TRAV8-4, TRAJ3)
CAVSDPYSSASKIIF

SEQ ID NO: 177252 - protein, 16 aa, Homo sapiens
  CDR3 for beta chain variable domain of TCR clone 88626 (TRBV2, TRBJ2-1)
CASSVGGSLSYNEQFF

SEQ ID NO: 177253 - protein, 15 aa, Homo sapiens
  CDR3 for alpha chain variable domain of TCR clone 88627 (TRAV8-3, TRAJ40)
CAAPSLGSGTYKYIF

SEQ ID NO: 177254 - protein, 16 aa, Homo sapiens
  CDR3 for beta chain variable domain of TCR clone 88627 (TRBV7-3, TRBJ2-3)
CARSLSGYRPEDTQYF

SEQ ID NO: 177255 - protein, 16 aa, Homo sapiens
  CDR3 for alpha chain variable domain of TCR clone 88628 (TRAV12-3, TRAJ53)
CAMSPGRGGSNYKLTF

SEQ ID NO: 177256 - protein, 17 aa, Homo sapiens
  CDR3 for beta chain variable domain of TCR clone 88628 (TRBV20-1, TRBJ2-2)
CSASGSGQGGLTGELFF

SEQ ID NO: 177257 - protein, 15 aa, Homo sapiens
  CDR3 for alpha chain variable domain of TCR clone 88629 (TRAV13-1, TRAJ17)
CAASIERSAGNKLTF

SEQ ID NO: 177258 - protein, 12 aa, Homo sapiens
  CDR3 for beta chain variable domain of TCR clone 88629 (TRBV5-7, TRBJ1-1)
CASSLGRGKAFF

SEQ ID NO: 177259 - protein, 15 aa, Homo sapiens
  CDR3 for alpha chain variable domain of TCR clone 88630 (TRAV3, TRAJ20)
CAVRDSRSNDYKLSF

SEQ ID NO: 177260 - protein, 14 aa, Homo sapiens
  CDR3 for beta chain variable domain of TCR clone 88630 (TRBV20-1, TRBJ2-7)
CSARRGNGIHEQYF

SEQ ID NO: 177261 - protein, 23 aa, Homo sapiens
  CDR3 for alpha chain variable domain of TCR clone 88631 (TRAV26-1, TRAJ38)
CIADNAGNNHIQNPDPAVYQLRD

SEQ ID NO: 177262 - protein, 12 aa, Homo sapiens
  CDR3 for beta chain variable domain of TCR clone 88631 (TRBV5-5, TRBJ2-5)
CASSYFGETQYF

SEQ ID NO: 177263 - protein, 16 aa, Homo sapiens
  CDR3 for alpha chain variable domain of TCR clone 88632 (TRAV16, TRAJ52)
CALSAAGGTSYGKLTF

SEQ ID NO: 177264 - protein, 14 aa, Homo sapiens
  CDR3 for beta chain variable domain of TCR clone 88632 (TRBV7-8, TRBJ2-3)
CASSLEAGTDTQYF

SEQ ID NO: 177265 - protein, 11 aa, Homo sapiens
  CDR3 for alpha chain variable domain of TCR clone 88633 (TRAV5, TRAJ3)
CGGSSAPKIIF

SEQ ID NO: 177266 - protein, 13 aa, Homo sapiens
  CDR3 for beta chain variable domain of TCR clone 88633 (TRBV27, TRBJ2-1)
CASRTLGVGEQFF

SEQ ID NO: 177267 - protein, 13 aa, Homo sapiens
  CDR3 for alpha chain variable domain of TCR clone 88634 (TRAV21, TRAJ27)
CAARHGNAGKSTF

SEQ ID NO: 177268 - protein, 13 aa, Homo sapiens
  CDR3 for beta chain variable domain of TCR clone 88634 (TRBV18, TRBJ2-7)
CASQSGGGYEQYF

SEQ ID NO: 177269 - protein, 16 aa, Homo sapiens
  CDR3 for alpha chain variable domain of TCR clone 88635 (TRAV12-3, TRAJ53)
CAMSPGSGGSNYKLTF

SEQ ID NO: 177270 - protein, 15 aa, Homo sapiens
  CDR3 for beta chain variable domain of TCR clone 88635 (TRBV2, TRBJ2-1)
CASSEEREGDNEQFF

SEQ ID NO: 177271 - protein, 15 aa, Homo sapiens
  CDR3 for alpha chain variable domain of TCR clone 88636 (TRAV12-3, TRAJ11)
CAMSEENSGYSTLNF

SEQ ID NO: 177272 - protein, 16 aa, Homo sapiens
  CDR3 for beta chain variable domain of TCR clone 88636 (TRBV5-1, TRBJ2-7)
CASSLEGLAGLYEQYF

SEQ ID NO: 177273 - protein, 11 aa, Homo sapiens
  CDR3 for alpha chain variable domain of TCR clone 88637 (TRAV8-3, TRAJ36)
CAVGATGQTTS

SEQ ID NO: 177274 - protein, 14 aa, Homo sapiens
  CDR3 for beta chain variable domain of TCR clone 88637 (TRBV7-8, TRBJ1-2)
CASSPDSLSYGYTF

SEQ ID NO: 177275 - protein, 14 aa, Homo sapiens
  CDR3 for alpha chain variable domain of TCR clone 88638 (TRAV12-2, TRAJ37)
CVSEGSSNTGKLIF

SEQ ID NO: 177276 - protein, 14 aa, Homo sapiens
  CDR3 for beta chain variable domain of TCR clone 88638 (TRBV20-1, TRBJ1-1)
CSAQTRIGGTEAFF

SEQ ID NO: 177277 - protein, 13 aa, Homo sapiens
  CDR3 for alpha chain variable domain of TCR clone 88639 (TRAV14/DV4, TRAJ54)
CNERGPGAQKLVF

SEQ ID NO: 177278 - protein, 15 aa, Homo sapiens
  CDR3 for beta chain variable domain of TCR clone 88639 (TRBV5-1, TRBJ2-7)
CASSLNGGPAREQYF

SEQ ID NO: 177279 - protein, 17 aa, Homo sapiens
  CDR3 for alpha chain variable domain of TCR clone 88640 (TRAV3, TRAJ42)
CAVRDRDYGGSQGNLIF

SEQ ID NO: 177280 - protein, 17 aa, Homo sapiens
  CDR3 for beta chain variable domain of TCR clone 88640 (TRBV4-1, TRBJ1-4)
CASSQEGPRGVEEKLFF

SEQ ID NO: 177281 - protein, 14 aa, Homo sapiens
  CDR3 for alpha chain variable domain of TCR clone 88641 (TRAV12-3, TRAJ42)
CAMNYGGSQGNLIL

SEQ ID NO: 177282 - protein, 15 aa, Homo sapiens
  CDR3 for beta chain variable domain of TCR clone 88641 (TRBV5-7, TRBJ1-5)
CASSYGKLWDQPQHF

SEQ ID NO: 177283 - protein, 13 aa, Homo sapiens
  CDR3 for alpha chain variable domain of TCR clone 88642 (TRAV27, TRAJ3)
ASLPGSSASKIIF

SEQ ID NO: 177284 - protein, 15 aa, Homo sapiens
  CDR3 for beta chain variable domain of TCR clone 88642 (TRBV28, TRBJ1-3)
CASSMGWASGNTIYF

SEQ ID NO: 177285 - protein, 17 aa, Homo sapiens
  CDR3 for alpha chain variable domain of TCR clone 88643 (TRAV26-1, TRAJ37)
CIVRVITVSRNTGKLIF

SEQ ID NO: 177286 - protein, 15 aa, Homo sapiens
  CDR3 for beta chain variable domain of TCR clone 88643 (TRBV10-1, TRBJ2-3)
CASSATSGGFDTQYF

SEQ ID NO: 177287 - protein, 11 aa, Homo sapiens
  CDR3 for alpha chain variable domain of TCR clone 88644 (TRAV17, TRAJ9)
CATTGGFKTIF

SEQ ID NO: 177288 - protein, 13 aa, Homo sapiens
  CDR3 for beta chain variable domain of TCR clone 88644 (TRBV7-9, TRBJ1-2)
CASSLKQNYGYTF

SEQ ID NO: 177289 - protein, 15 aa, Homo sapiens
  CDR3 for alpha chain variable domain of TCR clone 88645 (TRAV8-3, TRAJ27)
CAVGPSKTNAGKSTF

SEQ ID NO: 177290 - protein, 15 aa, Homo sapiens
  CDR3 for beta chain variable domain of TCR clone 88645 (TRBV7-2, TRBJ2-1)
CASSSALAGGNEQFF

SEQ ID NO: 177291 - protein, 15 aa, Homo sapiens
  CDR3 for alpha chain variable domain of TCR clone 88646 (TRAV8-3, TRAJ7)
CAVGSISYGNNRLAF

SEQ ID NO: 177292 - protein, 15 aa, Homo sapiens
  CDR3 for beta chain variable domain of TCR clone 88646 (TRBV7-9, TRBJ1-6)
CASSSPGRGNSPLHF

SEQ ID NO: 177293 - protein, 15 aa, Homo sapiens
  CDR3 for alpha chain variable domain of TCR clone 88647 (TRAV3, TRAJ32)
CAVSSYGGATNKLIF

SEQ ID NO: 177294 - protein, 14 aa, Homo sapiens
  CDR3 for beta chain variable domain of TCR clone 88647 (TRBV19, TRBJ2-1)
CASPTFVLSGEQFF

SEQ ID NO: 177295 - protein, 14 aa, Homo sapiens
  CDR3 for alpha chain variable domain of TCR clone 88648 (TRAV12-2, TRAJ9)
CAVNMEGGGFNTIF

SEQ ID NO: 177296 - protein, 14 aa, Homo sapiens
  CDR3 for beta chain variable domain of TCR clone 88648 (TRBV27, TRBJ2-5)
CASSSLKGWETQYF

SEQ ID NO: 177297 - protein, 16 aa, Homo sapiens
  CDR3 for alpha chain variable domain of TCR clone 88649 (TRAV3, TRAJ23)
CAVKIGSYNQGGKLIF

SEQ ID NO: 177298 - protein, 17 aa, Homo sapiens
  CDR3 for beta chain variable domain of TCR clone 88649 (TRBV10-3, TRBJ2-6)
CAISESTAPSGANVLTF

SEQ ID NO: 177299 - protein, 15 aa, Homo sapiens
  CDR3 for alpha chain variable domain of TCR clone 88650 (TRAV21, TRAJ24)
CAARSSTDSWGNCSL

SEQ ID NO: 177300 - protein, 13 aa, Homo sapiens
  CDR3 for beta chain variable domain of TCR clone 88650 (TRBV11-3, TRBJ2-5)
CASSSTGEETQYF

SEQ ID NO: 177301 - protein, 14 aa, Homo sapiens
  CDR3 for alpha chain variable domain of TCR clone 88651 (TRAV1-2, TRAJ8)
CAVREATGFQKLVF

SEQ ID NO: 177302 - protein, 16 aa, Homo sapiens
  CDR3 for beta chain variable domain of TCR clone 88651 (TRBV4-1, TRBJ2-3)
CASSQSTSGAEDTQYF

SEQ ID NO: 177303 - protein, 14 aa, Homo sapiens
  CDR3 for alpha chain variable domain of TCR clone 88652 (TRAV27, TRAJ39)
CAGRPTGAGNMLTF

SEQ ID NO: 177304 - protein, 18 aa, Homo sapiens
  CDR3 for beta chain variable domain of TCR clone 88652 (TRBV20-1, TRBJ2-6)
CSAETTPTHGSGANVLTF

SEQ ID NO: 177305 - protein, 13 aa, Homo sapiens
  CDR3 for alpha chain variable domain of TCR clone 88653 (TRAV12-3, TRAJ7)
CAMTPYGNNRLAF

SEQ ID NO: 177306 - protein, 11 aa, Homo sapiens
  CDR3 for beta chain variable domain of TCR clone 88653 (TRBV12-4, TRBJ2-3)
CASTATDTQYF

SEQ ID NO: 177307 - protein, 17 aa, Homo sapiens
  CDR3 for alpha chain variable domain of TCR clone 88654 (TRAV2, TRAJ36)
CAVEDRGNWGTQPLLWD

SEQ ID NO: 177308 - protein, 14 aa, Homo sapiens
  CDR3 for beta chain variable domain of TCR clone 88654 (TRBV7-9, TRBJ2-5)
CASSLDTAQETQYF

SEQ ID NO: 177309 - protein, 16 aa, Homo sapiens
  CDR3 for alpha chain variable domain of TCR clone 88655 (TRAV3, TRAJ37)
CAVRPHGSGNTGKLIF

SEQ ID NO: 177310 - protein, 15 aa, Homo sapiens
  CDR3 for beta chain variable domain of TCR clone 88655 (TRBV20-1, TRBJ2-7)
RSARDRVSGMDEQYF

SEQ ID NO: 177311 - protein, 17 aa, Homo sapiens
  CDR3 for alpha chain variable domain of TCR clone 88656 (TRAV4, TRAJ18)
CLVGERSVGSTLGRLYF

SEQ ID NO: 177312 - protein, 15 aa, Homo sapiens
  CDR3 for beta chain variable domain of TCR clone 88656 (TRBV7-9, TRBJ1-6)
CASSSPGRGNSPLHF

SEQ ID NO: 177313 - protein, 15 aa, Homo sapiens
  CDR3 for alpha chain variable domain of TCR clone 88657 (TRAV13-1, TRAJ11)
CAASNRNSGYSTLTF

SEQ ID NO: 177314 - protein, 11 aa, Homo sapiens
  CDR3 for beta chain variable domain of TCR clone 88657 (TRBV20-1, TRBJ2-7)
CSARLSHEQYF

SEQ ID NO: 177315 - protein, 13 aa, Homo sapiens
  CDR3 for alpha chain variable domain of TCR clone 88658 (TRAV8-3, TRAJ7)
CAVGAYGNNRLAF

SEQ ID NO: 177316 - protein, 13 aa, Homo sapiens
  CDR3 for beta chain variable domain of TCR clone 88658 (TRBV7-3, TRBJ1-5)
CASSLDSKQPQHF

SEQ ID NO: 177317 - protein, 15 aa, Homo sapiens
  CDR3 for alpha chain variable domain of TCR clone 88659 (TRAV12-1, TRAJ9)
CVVSFGDTGGFKPIF

SEQ ID NO: 177318 - protein, 19 aa, Homo sapiens
  CDR3 for beta chain variable domain of TCR clone 88659 (TRBV25-1, TRBJ2-2)
CAILVYRVDRGRKTGELFF

SEQ ID NO: 177319 - protein, 16 aa, Homo sapiens
  CDR3 for alpha chain variable domain of TCR clone 88660 (TRAV1-2, TRAJ10)
CAVRGVLTGGGNKLTF

SEQ ID NO: 177320 - protein, 16 aa, Homo sapiens
  CDR3 for beta chain variable domain of TCR clone 88660 (TRBV7-2, TRBJ2-7)
CASTSQAASGGYEQYF

SEQ ID NO: 177321 - protein, 18 aa, Homo sapiens
  CDR3 for alpha chain variable domain of TCR clone 88661 (TRAV21, TRAJ52)
CAVRPSPAGGTSYGKLTF

SEQ ID NO: 177322 - protein, 16 aa, Homo sapiens
  CDR3 for beta chain variable domain of TCR clone 88661 (TRBV13, TRBJ2-3)
CQQPLQGRGGRNTQYF

SEQ ID NO: 177323 - protein, 13 aa, Homo sapiens
  CDR3 for alpha chain variable domain of TCR clone 88662 (TRAV12-2, TRAJ52)
CAVGGTSYGKLTF

SEQ ID NO: 177324 - protein, 14 aa, Homo sapiens
  CDR3 for beta chain variable domain of TCR clone 88662 (TRBV7-2, TRBJ1-1)
CASSFLTGTTEAFF

SEQ ID NO: 177325 - protein, 11 aa, Homo sapiens
  CDR3 for alpha chain variable domain of TCR clone 88663 (TRAV13-2, TRAJ23)
CAESPRGKLIF

SEQ ID NO: 177326 - protein, 14 aa, Homo sapiens
  CDR3 for beta chain variable domain of TCR clone 88663 (TRBV19, TRBJ2-1)
CASPTFVLSGEQFF

SEQ ID NO: 177327 - protein, 13 aa, Homo sapiens
  CDR3 for alpha chain variable domain of TCR clone 88664 (TRAV21, TRAJ45)
CAVPGGGADGLTF

SEQ ID NO: 177328 - protein, 17 aa, Homo sapiens
  CDR3 for beta chain variable domain of TCR clone 88664 (TRBV20-1, TRBJ2-1)
CSAPPRLAGTRYNEQFF

SEQ ID NO: 177329 - protein, 14 aa, Homo sapiens
  CDR3 for alpha chain variable domain of TCR clone 88665 (TRAV26-1, TRAJ40)
CIVRVARGTYNYIF

SEQ ID NO: 177330 - protein, 14 aa, Homo sapiens
  CDR3 for beta chain variable domain of TCR clone 88665 (TRBV7-3, TRBJ2-7)
CASSLKADSYEQYF

SEQ ID NO: 177331 - protein, 13 aa, Homo sapiens
  CDR3 for alpha chain variable domain of TCR clone 88666 (TRAV13-2, TRAJ53)
CAENMRSNYKLTF

SEQ ID NO: 177332 - protein, 13 aa, Homo sapiens
  CDR3 for beta chain variable domain of TCR clone 88666 (TRBV4-1, TRBJ2-2)
CASSQENTGELFF

SEQ ID NO: 177333 - protein, 16 aa, Homo sapiens
  CDR3 for alpha chain variable domain of TCR clone 88667 (TRAV30, TRAJ24)
CGTEIVDADSWGKFQF

SEQ ID NO: 177334 - protein, 15 aa, Homo sapiens
  CDR3 for beta chain variable domain of TCR clone 88667 (TRBV7-9, TRBJ1-4)
CASSARTGGDEKLFF

SEQ ID NO: 177335 - protein, 14 aa, Homo sapiens
  CDR3 for alpha chain variable domain of TCR clone 88668 (TRAV23/DV6, TRAJ40)
CAASLTSGTYKYIF

SEQ ID NO: 177336 - protein, 13 aa, Homo sapiens
  CDR3 for beta chain variable domain of TCR clone 88668 (TRBV7-8, TRBJ2-7)
CASSLTGGREQYF

SEQ ID NO: 177337 - protein, 12 aa, Homo sapiens
  CDR3 for alpha chain variable domain of TCR clone 88669 (TRAV23/DV6, TRAJ30)
CAASKGDDTIIF

SEQ ID NO: 177338 - protein, 18 aa, Homo sapiens
  CDR3 for beta chain variable domain of TCR clone 88669 (TRBV10-3, TRBJ2-3)
CAISESRVGPMRGDTQYF

SEQ ID NO: 177339 - protein, 16 aa, Homo sapiens
  CDR3 for alpha chain variable domain of TCR clone 88670 (TRAV12-3, TRAJ53)
CAMSPGSGGSNYKLTF

SEQ ID NO: 177340 - protein, 14 aa, Homo sapiens
  CDR3 for beta chain variable domain of TCR clone 88670 (TRBV19, TRBJ2-2)
CASSGQGIAGELFF

SEQ ID NO: 177341 - protein, 13 aa, Homo sapiens
  CDR3 for alpha chain variable domain of TCR clone 88671 (TRAV27, TRAJ6)
CAGGTRGSYIPTF

SEQ ID NO: 177342 - protein, 15 aa, Homo sapiens
  CDR3 for beta chain variable domain of TCR clone 88671 (TRBV5-6, TRBJ2-7)
CASSLGPGRGHEQYF

SEQ ID NO: 177343 - protein, 16 aa, Homo sapiens
  CDR3 for alpha chain variable domain of TCR clone 88672 (TRAV3, TRAJ37)
CAVIPHGSGNTGKLIF

SEQ ID NO: 177344 - protein, 16 aa, Homo sapiens
  CDR3 for beta chain variable domain of TCR clone 88672 (TRBV9, TRBJ1-2)
CASSVEEKVSPYGYTF

SEQ ID NO: 177345 - protein, 14 aa, Homo sapiens
  CDR3 for alpha chain variable domain of TCR clone 88673 (TRAV12-2, TRAJ4)
CAVLIGGGYNKLIF

SEQ ID NO: 177346 - protein, 13 aa, Homo sapiens
  CDR3 for beta chain variable domain of TCR clone 88673 (TRBV7-3, TRBJ1-1)
CASSQDWGAEAFF

SEQ ID NO: 177347 - protein, 11 aa, Homo sapiens
  CDR3 for alpha chain variable domain of TCR clone 88674 (TRAV2, TRAJ33)
CAVDSNYQLIW

SEQ ID NO: 177348 - protein, 15 aa, Homo sapiens
  CDR3 for beta chain variable domain of TCR clone 88674 (TRBV12-4, TRBJ1-2)
CASSFVDRGNYGYTF

SEQ ID NO: 177349 - protein, 13 aa, Homo sapiens
  CDR3 for alpha chain variable domain of TCR clone 88675 (TRAV27, TRAJ41)
CAGEGNSGYELNF

SEQ ID NO: 177350 - protein, 14 aa, Homo sapiens
  CDR3 for beta chain variable domain of TCR clone 88675 (TRBV7-2, TRBJ1-1)
CASSFLTGTTGAFF

SEQ ID NO: 177351 - protein, 12 aa, Homo sapiens
  CDR3 for alpha chain variable domain of TCR clone 88676 (TRAV20, TRAJ39)
CAVGNAGNMLTF

SEQ ID NO: 177352 - protein, 15 aa, Homo sapiens
  CDR3 for beta chain variable domain of TCR clone 88676 (TRBV27, TRBJ2-1)
CASSNGGGSSNEQLF

SEQ ID NO: 177353 - protein, 13 aa, Homo sapiens
  CDR3 for alpha chain variable domain of TCR clone 88677 (TRAV23/DV6, TRAJ30)
CAAPSNRDDKIIF

SEQ ID NO: 177354 - protein, 14 aa, Homo sapiens
  CDR3 for beta chain variable domain of TCR clone 88677 (TRBV7-2, TRBJ2-7)
CASSPKTSFYEQYF

SEQ ID NO: 177355 - protein, 13 aa, Homo sapiens
  CDR3 for alpha chain variable domain of TCR clone 88678 (TRAV20, TRAJ56)
CAVQAGANSKLTF

SEQ ID NO: 177356 - protein, 14 aa, Homo sapiens
  CDR3 for beta chain variable domain of TCR clone 88678 (TRBV19, TRBJ2-1)
CASPTFVLSGEQFF

SEQ ID NO: 177357 - protein, 12 aa, Homo sapiens
  CDR3 for alpha chain variable domain of TCR clone 88679 (TRAV12-3, TRAJ20)
CAMVRGDYKLSF

SEQ ID NO: 177358 - protein, 15 aa, Homo sapiens
  CDR3 for beta chain variable domain of TCR clone 88679 (TRBV19, TRBJ1-1)
CASTSGQIQNTEAFF

SEQ ID NO: 177359 - protein, 13 aa, Homo sapiens
  CDR3 for alpha chain variable domain of TCR clone 88680 (TRAV8-2, TRAJ44)
CSRGAGTASKLTF

SEQ ID NO: 177360 - protein, 13 aa, Homo sapiens
  CDR3 for beta chain variable domain of TCR clone 88680 (TRBV12-4, TRBJ2-7)
CASSRQESYEQYF

SEQ ID NO: 177361 - protein, 15 aa, Homo sapiens
  CDR3 for alpha chain variable domain of TCR clone 88681 (TRAV8-3, TRAJ27)
CAVGPSKTNAGKSTF

SEQ ID NO: 177362 - protein, 14 aa, Homo sapiens
  CDR3 for beta chain variable domain of TCR clone 88681 (TRBV7-2, TRBJ2-7)
CASRSQGAAYEQYF

SEQ ID NO: 177363 - protein, 13 aa, Homo sapiens
  CDR3 for alpha chain variable domain of TCR clone 88682 (TRAV16, TRAJ27)
CALRRTNAGKSTF

SEQ ID NO: 177364 - protein, 15 aa, Homo sapiens
  CDR3 for beta chain variable domain of TCR clone 88682 (TRBV18, TRBJ2-1)
CASSPPSASYNEQYF

SEQ ID NO: 177365 - protein, 14 aa, Homo sapiens
  CDR3 for alpha chain variable domain of TCR clone 88683 (TRAV12-2, TRAJ44)
CAVNPAGTASKLTF

SEQ ID NO: 177366 - protein, 13 aa, Homo sapiens
  CDR3 for beta chain variable domain of TCR clone 88683 (TRBV20-1, TRBJ1-6)
CGAPLGVGSPLHF

SEQ ID NO: 177367 - protein, 14 aa, Homo sapiens
  CDR3 for alpha chain variable domain of TCR clone 88684 (TRAV12-2, TRAJ32)
CAHPESGATNNLIF

SEQ ID NO: 177368 - protein, 14 aa, Homo sapiens
  CDR3 for beta chain variable domain of TCR clone 88684 (TRBV4-2, TRBJ2-3)
CASRETRAPGMQYF

SEQ ID NO: 177369 - protein, 16 aa, Homo sapiens
  CDR3 for alpha chain variable domain of TCR clone 88685 (TRAV3, TRAJ37)
CAVRGKGSGNTGKLIF

SEQ ID NO: 177370 - protein, 14 aa, Homo sapiens
  CDR3 for beta chain variable domain of TCR clone 88685 (TRBV7-2, TRBJ1-2)
CASSQTGSTYGYTF

SEQ ID NO: 177371 - protein, 14 aa, Homo sapiens
  CDR3 for alpha chain variable domain of TCR clone 88686 (TRAV12-1, TRAJ17)
CVVNYKAAGNKLTF

SEQ ID NO: 177372 - protein, 16 aa, Homo sapiens
  CDR3 for beta chain variable domain of TCR clone 88686 (TRBV4-3, TRBJ2-1)
CASSPALDRGVNEQFF

SEQ ID NO: 177373 - protein, 14 aa, Homo sapiens
  CDR3 for alpha chain variable domain of TCR clone 88687 (TRAV13-1, TRAJ36)
CAAIYQTGANILFF

SEQ ID NO: 177374 - protein, 15 aa, Homo sapiens
  CDR3 for beta chain variable domain of TCR clone 88687 (TRBV5-1, TRBJ1-1)
CASSPLGGSNTEAFF

SEQ ID NO: 177375 - protein, 16 aa, Homo sapiens
  CDR3 for alpha chain variable domain of TCR clone 88688 (TRAV12-3, TRAJ53)
CAMSPGSGGSNYKLTF

SEQ ID NO: 177376 - protein, 17 aa, Homo sapiens
  CDR3 for beta chain variable domain of TCR clone 88688 (TRBV24-1, TRBJ2-1)
CATSDVSTSGTYNEQFF

SEQ ID NO: 177377 - protein, 15 aa, Homo sapiens
  CDR3 for alpha chain variable domain of TCR clone 88689 (TRAV17, TRAJ16)
CATALRFSDGQKLLF

SEQ ID NO: 177378 - protein, 15 aa, Homo sapiens
  CDR3 for beta chain variable domain of TCR clone 88689 (TRBV13, TRBJ1-5)
CASSFRQGGVQPQHF

SEQ ID NO: 177379 - protein, 16 aa, Homo sapiens
  CDR3 for alpha chain variable domain of TCR clone 88690 (TRAV12-3, TRAJ53)
CAMSPGSGGSHYKLTI

SEQ ID NO: 177380 - protein, 11 aa, Homo sapiens
  CDR3 for beta chain variable domain of TCR clone 88690 (TRBV29-1, TRBJ2-5)
CSEDRTGTQYF

SEQ ID NO: 177381 - protein, 10 aa, Homo sapiens
  CDR3 for alpha chain variable domain of TCR clone 88691 (TRAV36/DV7, TRAJ48)
CAGGNEKLTF

SEQ ID NO: 177382 - protein, 16 aa, Homo sapiens
  CDR3 for beta chain variable domain of TCR clone 88691 (TRBV15, TRBJ2-3)
CATRLSGGRAPDTQYF

SEQ ID NO: 177383 - protein, 14 aa, Homo sapiens
  CDR3 for alpha chain variable domain of TCR clone 88692 (TRAV12-1, TRAJ9)
CVVTGYTGGFETIF

SEQ ID NO: 177384 - protein, 13 aa, Homo sapiens
  CDR3 for beta chain variable domain of TCR clone 88692 (TRBV20-1, TRBJ1-1)
CSARAGGNTEAFF

SEQ ID NO: 177385 - protein, 14 aa, Homo sapiens
  CDR3 for alpha chain variable domain of TCR clone 88693 (TRAV9-2, TRAJ39)
CALYIYNAGNMLTF

SEQ ID NO: 177386 - protein, 13 aa, Homo sapiens
  CDR3 for beta chain variable domain of TCR clone 88693 (TRBV18, TRBJ2-5)
CASSLQGQETQYF

SEQ ID NO: 177387 - protein, 13 aa, Homo sapiens
  CDR3 for alpha chain variable domain of TCR clone 88694 (TRAV2, TRAJ40)
CAVFTSGTYKYIF

SEQ ID NO: 177388 - protein, 17 aa, Homo sapiens
  CDR3 for beta chain variable domain of TCR clone 88694 (TRBV7-3, TRBJ2-3)
CASSLMKRMRGADTQYF

SEQ ID NO: 177389 - protein, 14 aa, Homo sapiens
  CDR3 for alpha chain variable domain of TCR clone 88695 (TRAV12-1, TRAJ30)
CVVNIGGRDDEIIF

SEQ ID NO: 177390 - protein, 13 aa, Homo sapiens
  CDR3 for beta chain variable domain of TCR clone 88695 (TRBV12-5, TRBJ2-1)
CASGLGRGNEQFF

SEQ ID NO: 177391 - protein, 15 aa, Homo sapiens
  CDR3 for alpha chain variable domain of TCR clone 88696 (TRAV20, TRAJ23)
CAVQAVRNQGGKLIF

SEQ ID NO: 177392 - protein, 13 aa, Homo sapiens
  CDR3 for beta chain variable domain of TCR clone 88696 (TRBV10-3, TRBJ2-7)
CASKLAVNYEQYF

SEQ ID NO: 177393 - protein, 13 aa, Homo sapiens
  CDR3 for alpha chain variable domain of TCR clone 88697 (TRAV12-2, TRAJ49)
CAVKPNTGNQFYF

SEQ ID NO: 177394 - protein, 13 aa, Homo sapiens
  CDR3 for beta chain variable domain of TCR clone 88697 (TRBV24-1, TRBJ2-1)
CATSAGPYNEQFF

SEQ ID NO: 177395 - protein, 11 aa, Homo sapiens
  CDR3 for alpha chain variable domain of TCR clone 88698 (TRAV2, TRAJ33)
CAVDSNYQLIW

SEQ ID NO: 177396 - protein, 11 aa, Homo sapiens
  CDR3 for beta chain variable domain of TCR clone 88698 (TRBV12-4, TRBJ2-3)
CASTATDTQYF

SEQ ID NO: 177397 - protein, 13 aa, Homo sapiens
  CDR3 for alpha chain variable domain of TCR clone 88699 (TRAV25, TRAJ40)
CAGSTSGTYKYIF

SEQ ID NO: 177398 - protein, 14 aa, Homo sapiens
  CDR3 for beta chain variable domain of TCR clone 88699 (TRBV7-2, TRBJ2-7)
CASRSQGAAYEQYF

SEQ ID NO: 177399 - protein, 10 aa, Homo sapiens
  CDR3 for alpha chain variable domain of TCR clone 88700 (TRAV12-1, TRAJ37)
ARGNTGKLIF

SEQ ID NO: 177400 - protein, 16 aa, Homo sapiens
  CDR3 for beta chain variable domain of TCR clone 88700 (TRBV12-5, TRBJ2-5)
CASGPRTSGNQETQYF

SEQ ID NO: 177401 - protein, 11 aa, Homo sapiens
  CDR3 for alpha chain variable domain of TCR clone 88701 (TRAV13-1, TRAJ39)
CASHAGNMLNF

SEQ ID NO: 177402 - protein, 14 aa, Homo sapiens
  CDR3 for beta chain variable domain of TCR clone 88701 (TRBV11-2, TRBJ1-5)
CASSLDRGRQPQHF

SEQ ID NO: 177403 - protein, 12 aa, Homo sapiens
  CDR3 for alpha chain variable domain of TCR clone 88702 (TRAV30, TRAJ43)
CGTEERGNDMCF

SEQ ID NO: 177404 - protein, 13 aa, Homo sapiens
  CDR3 for beta chain variable domain of TCR clone 88702 (TRBV27, TRBJ2-7)
CASSFSQGYEQYF

SEQ ID NO: 177405 - protein, 15 aa, Homo sapiens
  CDR3 for alpha chain variable domain of TCR clone 88703 (TRAV21, TRAJ53)
CATLNSGGSNYKLTF

SEQ ID NO: 177406 - protein, 14 aa, Homo sapiens
  CDR3 for beta chain variable domain of TCR clone 88703 (TRBV15, TRBJ1-2)
CATSRASVNYGHTF

SEQ ID NO: 177407 - protein, 13 aa, Homo sapiens
  CDR3 for alpha chain variable domain of TCR clone 88704 (TRAV12-3, TRAJ7)
CAMTPYGNNRLAF

SEQ ID NO: 177408 - protein, 15 aa, Homo sapiens
  CDR3 for beta chain variable domain of TCR clone 88704 (TRBV18, TRBJ1-1)
CATSPRQGENTEAFF

SEQ ID NO: 177409 - protein, 16 aa, Homo sapiens
  CDR3 for alpha chain variable domain of TCR clone 88705 (TRAV13-1, TRAJ37)
CAASSLGSSNTGKLIL

SEQ ID NO: 177410 - protein, 12 aa, Homo sapiens
  CDR3 for beta chain variable domain of TCR clone 88705 (TRBV6-1, TRBJ2-5)
CASSEGRETQYF

SEQ ID NO: 177411 - protein, 16 aa, Homo sapiens
  CDR3 for alpha chain variable domain of TCR clone 88706 (TRAV12-3, TRAJ45)
CAMGWGSGGGADGLTF

SEQ ID NO: 177412 - protein, 14 aa, Homo sapiens
  CDR3 for beta chain variable domain of TCR clone 88706 (TRBV18, TRBJ2-5)
CASSPGVSQETQYF

SEQ ID NO: 177413 - protein, 15 aa, Homo sapiens
  CDR3 for alpha chain variable domain of TCR clone 88707 (TRAV3, TRAJ22)
CAVRDRGGSARQLTF

SEQ ID NO: 177414 - protein, 17 aa, Homo sapiens
  CDR3 for beta chain variable domain of TCR clone 88707 (TRBV20-1, TRBJ2-1)
CSASSSGLAGSYNEQFF

SEQ ID NO: 177415 - protein, 15 aa, Homo sapiens
  CDR3 for alpha chain variable domain of TCR clone 88708 (TRAV27, TRAJ38)
CAARRNAGNNRKLIW

SEQ ID NO: 177416 - protein, 17 aa, Homo sapiens
  CDR3 for beta chain variable domain of TCR clone 88708 (TRBV24-1, TRBJ2-1)
CATSDVSTSGTYNEQFF

SEQ ID NO: 177417 - protein, 13 aa, Homo sapiens
  CDR3 for alpha chain variable domain of TCR clone 88709 (TRAV3, TRAJ15)
CAVRDQAGTALIF

SEQ ID NO: 177418 - protein, 15 aa, Homo sapiens
  CDR3 for beta chain variable domain of TCR clone 88709 (TRBV11-1, TRBJ2-7)
CASSLNYGASYGQYF

SEQ ID NO: 177419 - protein, 12 aa, Homo sapiens
  CDR3 for alpha chain variable domain of TCR clone 88710 (TRAV16, TRAJ8)
CAPLGGFQKLVF

SEQ ID NO: 177420 - protein, 15 aa, Homo sapiens
  CDR3 for beta chain variable domain of TCR clone 88710 (TRBV6-1, TRBJ1-5)
CASIPHRLGNQPQHF

SEQ ID NO: 177421 - protein, 16 aa, Homo sapiens
  CDR3 for alpha chain variable domain of TCR clone 88711 (TRAV23/DV6, TRAJ52)
CSASMNGGTSYGKLTF

SEQ ID NO: 177422 - protein, 16 aa, Homo sapiens
  CDR3 for beta chain variable domain of TCR clone 88711 (TRBV27, TRBJ2-2)
CASSFRGLVRTGELFF

SEQ ID NO: 177423 - protein, 13 aa, Homo sapiens
  CDR3 for alpha chain variable domain of TCR clone 88712 (TRAV12-3, TRAJ7)
CAMTPYGNNRLAF

SEQ ID NO: 177424 - protein, 16 aa, Homo sapiens
  CDR3 for beta chain variable domain of TCR clone 88712 (TRBV20-1, IGHJ2)
CSARPYGGELNEKLFF

SEQ ID NO: 177425 - protein, 16 aa, Homo sapiens
  CDR3 for alpha chain variable domain of TCR clone 88713 (TRAV30, TRAJ24)
CGTEIADADSWGKFQF

SEQ ID NO: 177426 - protein, 15 aa, Homo sapiens
  CDR3 for beta chain variable domain of TCR clone 88713 (TRBV7-2, TRBJ2-1)
CASTHGTGIYNEQFF

SEQ ID NO: 177427 - protein, 12 aa, Homo sapiens
  CDR3 for alpha chain variable domain of TCR clone 88714 (TRAV2, TRAJ9)
CAVGAGGFKTIF

SEQ ID NO: 177428 - protein, 16 aa, Homo sapiens
  CDR3 for beta chain variable domain of TCR clone 88714 (TRBV13, TRBJ2-2)
CASSPRTGEHIGELFF

SEQ ID NO: 177429 - protein, 13 aa, Homo sapiens
  CDR3 for alpha chain variable domain of TCR clone 88715 (TRAV21, TRAJ57)
CAVTQGGSEKLVF

SEQ ID NO: 177430 - protein, 14 aa, Homo sapiens
  CDR3 for beta chain variable domain of TCR clone 88715 (TRBV7-2, TRBJ1-1)
CASSFLTGTTEAFF

SEQ ID NO: 177431 - protein, 17 aa, Homo sapiens
  CDR3 for alpha chain variable domain of TCR clone 88716 (TRAV38-1, TRAJ45)
CAFMRSHSGGGSDGLTF

SEQ ID NO: 177432 - protein, 15 aa, Homo sapiens
  CDR3 for beta chain variable domain of TCR clone 88716 (TRBV7-2, TRBJ2-3)
CASSLVVRGPDTQYF

SEQ ID NO: 177433 - protein, 13 aa, Homo sapiens
  CDR3 for alpha chain variable domain of TCR clone 88717 (TRAV12-3, TRAJ13)
CAMTSAGYQKVTF

SEQ ID NO: 177434 - protein, 13 aa, Homo sapiens
  CDR3 for beta chain variable domain of TCR clone 88717 (TRBV20-1, TRBJ2-2)
CSALSGGAGELFF

SEQ ID NO: 177435 - protein, 16 aa, Homo sapiens
  CDR3 for alpha chain variable domain of TCR clone 88718 (TRAV8-4, TRAJ5)
CAVSPLTATGRRALTF

SEQ ID NO: 177436 - protein, 14 aa, Homo sapiens
  CDR3 for beta chain variable domain of TCR clone 88718 (TRBV19, TRBJ1-6)
CASSTDGWNSPLHF

SEQ ID NO: 177437 - protein, 12 aa, Homo sapiens
  CDR3 for alpha chain variable domain of TCR clone 88719 (TRAV21, TRAJ39)
CAADNAGNMLTF

SEQ ID NO: 177438 - protein, 13 aa, Homo sapiens
  CDR3 for beta chain variable domain of TCR clone 88719 (TRBV7-9, TRBJ1-2)
CASSLKQNYGYTF

SEQ ID NO: 177439 - protein, 11 aa, Homo sapiens
  CDR3 for alpha chain variable domain of TCR clone 88720 (TRAV35, TRAJ30)
CAGLRDDKIIF

SEQ ID NO: 177440 - protein, 15 aa, Homo sapiens
  CDR3 for beta chain variable domain of TCR clone 88720 (TRBV7-9, TRBJ1-6)
CASSSPGRGNSPLHF

SEQ ID NO: 177441 - protein, 15 aa, Homo sapiens
  CDR3 for alpha chain variable domain of TCR clone 88721 (TRAV25, TRAJ10)
CAGLGLTGGGNTLTF

SEQ ID NO: 177442 - protein, 14 aa, Homo sapiens
  CDR3 for beta chain variable domain of TCR clone 88721 (TRBV7-2, TRBJ2-1)
CASSLEGGYNEQFF

SEQ ID NO: 177443 - protein, 12 aa, Homo sapiens
  CDR3 for alpha chain variable domain of TCR clone 88722 (TRAV1-1, TRAJ8)
CAGGTGFQKLVF

SEQ ID NO: 177444 - protein, 16 aa, Homo sapiens
  CDR3 for beta chain variable domain of TCR clone 88722 (TRBV2, TRBJ2-1)
CASSVGGSLSYNEQFF

SEQ ID NO: 177445 - protein, 11 aa, Homo sapiens
  CDR3 for alpha chain variable domain of TCR clone 88723 (TRAV13-1, TRAJ5)
SRDTGRRALTF

SEQ ID NO: 177446 - protein, 17 aa, Homo sapiens
  CDR3 for beta chain variable domain of TCR clone 88723 (TRBV24-1, TRBJ2-1)
CATSDVSTSGTYNEQFF

SEQ ID NO: 177447 - protein, 13 aa, Homo sapiens
  CDR3 for alpha chain variable domain of TCR clone 88724 (TRAV17, TRAJ31)
CATDENNNARLRF

SEQ ID NO: 177448 - protein, 14 aa, Homo sapiens
  CDR3 for beta chain variable domain of TCR clone 88724 (TRBV11-2, TRBJ2-1)
CASSPSRQGGGQFF

SEQ ID NO: 177449 - protein, 12 aa, Homo sapiens
  CDR3 for alpha chain variable domain of TCR clone 88725 (TRAV13-1, TRAJ21)
CAAKEGLNKFYF

SEQ ID NO: 177450 - protein, 14 aa, Homo sapiens
  CDR3 for beta chain variable domain of TCR clone 88725 (TRBV18, TRBJ2-7)
CASSPRGGAYEQYF

SEQ ID NO: 177451 - protein, 16 aa, Homo sapiens
  CDR3 for alpha chain variable domain of TCR clone 88726 (TRAV26-1, TRAJ36)
CIVRVSYQTGANNLFF

SEQ ID NO: 177452 - protein, 15 aa, Homo sapiens
  CDR3 for beta chain variable domain of TCR clone 88726 (TRBV7-2, TRBJ2-2)
CASRRPGQNTGELFF

SEQ ID NO: 177453 - protein, 12 aa, Homo sapiens
  CDR3 for alpha chain variable domain of TCR clone 88727 (TRAV12-3, TRAJ3)
CAIDSSASKIIF

SEQ ID NO: 177454 - protein, 14 aa, Homo sapiens
  CDR3 for beta chain variable domain of TCR clone 88727 (TRBV7-2, TRBJ1-1)
CASSFLTGTTEAFF

SEQ ID NO: 177455 - protein, 13 aa, Homo sapiens
  CDR3 for alpha chain variable domain of TCR clone 88728 (TRAV8-3, TRAJ28)
CAVGAVGSYQLTF

SEQ ID NO: 177456 - protein, 14 aa, Homo sapiens
  CDR3 for beta chain variable domain of TCR clone 88728 (TRBV7-2, TRBJ2-7)
CASRTQGAAYEQYF

SEQ ID NO: 177457 - protein, 13 aa, Homo sapiens
  CDR3 for alpha chain variable domain of TCR clone 88729 (TRAV12-2, TRAJ50)
CAVIVTSYDKVIF

SEQ ID NO: 177458 - protein, 17 aa, Homo sapiens
  CDR3 for beta chain variable domain of TCR clone 88729 (TRBV24-1, TRBJ2-4)
CATSDAEARGVRNIQYF

SEQ ID NO: 177459 - protein, 13 aa, Homo sapiens
  CDR3 for alpha chain variable domain of TCR clone 88730 (TRAV8-3, TRAJ48)
CAVVPFGNEKLTF

SEQ ID NO: 177460 - protein, 15 aa, Homo sapiens
  CDR3 for beta chain variable domain of TCR clone 88730 (TRBV11-2, TRBJ2-1)
CARSSPSTRYNEQFF

SEQ ID NO: 177461 - protein, 14 aa, Homo sapiens
  CDR3 for alpha chain variable domain of TCR clone 88731 (TRAV8-1, TRAJ5)
CAVRTDTGRRARTF

SEQ ID NO: 177462 - protein, 15 aa, Homo sapiens
  CDR3 for beta chain variable domain of TCR clone 88731 (TRBV7-3, TRBJ2-1)
CASSPTGGGEVEQFF

SEQ ID NO: 177463 - protein, 16 aa, Homo sapiens
  CDR3 for alpha chain variable domain of TCR clone 88732 (TRAV3, TRAJ37)
CAVRVRGSGNTGKLIF

SEQ ID NO: 177464 - protein, 12 aa, Homo sapiens
  CDR3 for beta chain variable domain of TCR clone 88732 (TRBV29-1, TRBJ1-3)
CSTRDSGNTIYF

SEQ ID NO: 177465 - protein, 14 aa, Homo sapiens
  CDR3 for alpha chain variable domain of TCR clone 88733 (TRAV38-1, TRAJ45)
CASHSGGGADGLTF

SEQ ID NO: 177466 - protein, 15 aa, Homo sapiens
  CDR3 for beta chain variable domain of TCR clone 88733 (TRBV5-1, TRBJ2-1)
CASSLVANSYNEQFF

SEQ ID NO: 177467 - protein, 15 aa, Homo sapiens
  CDR3 for alpha chain variable domain of TCR clone 88734 (TRAV8-3, TRAJ27)
CAVGPSKTNAGKSTF

SEQ ID NO: 177468 - protein, 15 aa, Homo sapiens
  CDR3 for beta chain variable domain of TCR clone 88734 (TRBV10-3, TRBJ2-3)
CAISLTSGGTDTQYF

SEQ ID NO: 177469 - protein, 13 aa, Homo sapiens
  CDR3 for alpha chain variable domain of TCR clone 88735 (TRAV21, TRAJ20)
CAVGVFADYKLSF

SEQ ID NO: 177470 - protein, 12 aa, Homo sapiens
  CDR3 for beta chain variable domain of TCR clone 88735 (TRBV11-2, TRBJ2-2)
CASSLGGGELFF

SEQ ID NO: 177471 - protein, 11 aa, Homo sapiens
  CDR3 for alpha chain variable domain of TCR clone 88736 (TRAV3, TRAJ32)
CAVREGIMVVL

SEQ ID NO: 177472 - protein, 13 aa, Homo sapiens
  CDR3 for beta chain variable domain of TCR clone 88736 (TRBV2, TRBJ1-1)
CASSEGGNTEAFL

SEQ ID NO: 177473 - protein, 12 aa, Homo sapiens
  CDR3 for alpha chain variable domain of TCR clone 88737 (TRAV16, TRAJ10)
CSRTGGGNKLTF

SEQ ID NO: 177474 - protein, 15 aa, Homo sapiens
  CDR3 for beta chain variable domain of TCR clone 88737 (TRBV6-3, TRBJ2-7)
CASSSPGTFFYEQYF

SEQ ID NO: 177475 - protein, 14 aa, Homo sapiens
  CDR3 for alpha chain variable domain of TCR clone 88738 (TRAV8-3, TRAJ4)
CAVGASGGYKKLIF

SEQ ID NO: 177476 - protein, 16 aa, Homo sapiens
  CDR3 for beta chain variable domain of TCR clone 88738 (TRBV4-3, TRBJ2-2)
CASSHLQGSGTGELFF

SEQ ID NO: 177477 - protein, 18 aa, Homo sapiens
  CDR3 for alpha chain variable domain of TCR clone 88739 (TRAV26-1, TRAJ37)
CIVRVDMRGSSNTGKLIF

SEQ ID NO: 177478 - protein, 15 aa, Homo sapiens
  CDR3 for beta chain variable domain of TCR clone 88739 (TRBV20-1, TRBJ2-7)
CSARVLASPLYEQYF

SEQ ID NO: 177479 - protein, 14 aa, Homo sapiens
  CDR3 for alpha chain variable domain of TCR clone 88740 (TRAV26-1, TRAJ38)
CIADNAGNNRKLLW

SEQ ID NO: 177480 - protein, 15 aa, Homo sapiens
  CDR3 for beta chain variable domain of TCR clone 88740 (TRBV27, TRBJ2-7)
CASSTAGTGSYEQYF

SEQ ID NO: 177481 - protein, 14 aa, Homo sapiens
  CDR3 for alpha chain variable domain of TCR clone 88741 (TRAV16, TRAJ40)
CALHESYYLRDLQI

SEQ ID NO: 177482 - protein, 12 aa, Homo sapiens
  CDR3 for beta chain variable domain of TCR clone 88741 (TRBV7-3, TRBJ2-3)
CASSSLTDTQYF

SEQ ID NO: 177483 - protein, 11 aa, Homo sapiens
  CDR3 for alpha chain variable domain of TCR clone 88742 (TRAV2, TRAJ13)
CASGGYQKVTF

SEQ ID NO: 177484 - protein, 11 aa, Homo sapiens
  CDR3 for beta chain variable domain of TCR clone 88742 (TRBV29-1, TRBJ2-5)
RSEDRTGTQYF

SEQ ID NO: 177485 - protein, 11 aa, Homo sapiens
  CDR3 for alpha chain variable domain of TCR clone 88743 (TRAV2, TRAJ13)
CASGGYQKVTF

SEQ ID NO: 177486 - protein, 22 aa, Homo sapiens
  CDR3 for beta chain variable domain of TCR clone 88743 (TRBV6-1, TRBJ1-3)
CASVQGGGWKHHIFWRGKLAHC

SEQ ID NO: 177487 - protein, 14 aa, Homo sapiens
  CDR3 for alpha chain variable domain of TCR clone 88744 (TRAV1-2, TRAJ16)
CAVNRFSDGQKLLF

SEQ ID NO: 177488 - protein, 13 aa, Homo sapiens
  CDR3 for beta chain variable domain of TCR clone 88744 (TRBV15, TRBJ2-5)
CATSQIGEETQYF

SEQ ID NO: 177489 - protein, 15 aa, Homo sapiens
  CDR3 for alpha chain variable domain of TCR clone 88745 (TRAV17, TRAJ45)
CATAYSGGGADGLTF

SEQ ID NO: 177490 - protein, 11 aa, Homo sapiens
  CDR3 for beta chain variable domain of TCR clone 88745 (TRBV7-8, TRBJ2-7)
CASSLSREQYF

SEQ ID NO: 177491 - protein, 16 aa, Homo sapiens
  CDR3 for alpha chain variable domain of TCR clone 88746 (TRAV38-1, TRAJ37)
CAFKGDGSSNTGKRIF

SEQ ID NO: 177492 - protein, 13 aa, Homo sapiens
  CDR3 for beta chain variable domain of TCR clone 88746 (TRBV12-4, TRBJ2-5)
CASSLFRRETQYF

SEQ ID NO: 177493 - protein, 13 aa, Homo sapiens
  CDR3 for alpha chain variable domain of TCR clone 88747 (TRAV8-3, TRAJ28)
CAVGAVGSYQLTF

SEQ ID NO: 177494 - protein, 16 aa, Homo sapiens
  CDR3 for beta chain variable domain of TCR clone 88747 (TRBV4-1, TRBJ2-5)
CASSQAIAASSATQYF

SEQ ID NO: 177495 - protein, 16 aa, Homo sapiens
  CDR3 for alpha chain variable domain of TCR clone 88748 (TRAV16, TRAJ52)
CALSAAGGTSYGKLTF

SEQ ID NO: 177496 - protein, 14 aa, Homo sapiens
  CDR3 for beta chain variable domain of TCR clone 88748 (TRBV6-1, TRBJ2-7)
CASSEGPVSYEQYF

SEQ ID NO: 177497 - protein, 16 aa, Homo sapiens
  CDR3 for alpha chain variable domain of TCR clone 88749 (TRAV20, TRAJ22)
CAVQASSSGSARQLTF

SEQ ID NO: 177498 - protein, 15 aa, Homo sapiens
  CDR3 for beta chain variable domain of TCR clone 88749 (TRBV18, TRBJ2-1)
CASSPPSASYNEQFF

SEQ ID NO: 177499 - protein, 12 aa, Homo sapiens
  CDR3 for alpha chain variable domain of TCR clone 88750 (TRAV17, TRAJ20)
CATDSNDYKLSF

SEQ ID NO: 177500 - protein, 15 aa, Homo sapiens
  CDR3 for beta chain variable domain of TCR clone 88750 (TRBV4-1, TRBJ1-4)
CASSDTGGTNEKLFF

SEQ ID NO: 177501 - protein, 11 aa, Homo sapiens
  CDR3 for alpha chain variable domain of TCR clone 88751 (TRAV3, TRAJ21)
CAVCNFNKFYF

SEQ ID NO: 177502 - protein, 15 aa, Homo sapiens
  CDR3 for beta chain variable domain of TCR clone 88751 (TRBV5-1, TRBJ2-1)
CASSLVANSYNEQFF

SEQ ID NO: 177503 - protein, 11 aa, Homo sapiens
  CDR3 for alpha chain variable domain of TCR clone 88752 (TRAV3, TRAJ49)
FAPITGNQFYF

SEQ ID NO: 177504 - protein, 16 aa, Homo sapiens
  CDR3 for beta chain variable domain of TCR clone 88752 (TRBV5-1, TRBJ2-3)
CASSVFPMSSTDTQYF

SEQ ID NO: 177505 - protein, 16 aa, Homo sapiens
  CDR3 for alpha chain variable domain of TCR clone 88753 (TRAV3, TRAJ28)
CAVLPRSGAGSYQPTF

SEQ ID NO: 177506 - protein, 13 aa, Homo sapiens
  CDR3 for beta chain variable domain of TCR clone 88753 (TRBV12-4, TRBJ2-5)
CASRLAVQETQYF

SEQ ID NO: 177507 - protein, 12 aa, Homo sapiens
  CDR3 for alpha chain variable domain of TCR clone 88754 (TRAV13-2, TRAJ8)
CAPWLGFQKLVF

SEQ ID NO: 177508 - protein, 14 aa, Homo sapiens
  CDR3 for beta chain variable domain of TCR clone 88754 (TRBV7-8, TRBJ2-3)
CASSLEAGTDTQYF

SEQ ID NO: 177509 - protein, 15 aa, Homo sapiens
  CDR3 for alpha chain variable domain of TCR clone 88755 (TRAV8-3, TRAJ27)
CAVGPSKTNAGKSTF

SEQ ID NO: 177510 - protein, 15 aa, Homo sapiens
  CDR3 for beta chain variable domain of TCR clone 88755 (TRBV7-2, TRBJ2-1)
WASSSGLAGGNEQFF

SEQ ID NO: 177511 - protein, 12 aa, Homo sapiens
  CDR3 for alpha chain variable domain of TCR clone 88756 (TRAV16, TRAJ13)
CITLRGYQKVTF

SEQ ID NO: 177512 - protein, 17 aa, Homo sapiens
  CDR3 for beta chain variable domain of TCR clone 88756 (TRBV28, TRBJ2-5)
CASSRRGGLAGAETQYF

SEQ ID NO: 177513 - protein, 16 aa, Homo sapiens
  CDR3 for alpha chain variable domain of TCR clone 88757 (TRAV23/DV6, TRAJ9)
CAASIGGNTGGFKTIF

SEQ ID NO: 177514 - protein, 12 aa, Homo sapiens
  CDR3 for beta chain variable domain of TCR clone 88757 (TRBV11-2, TRBJ2-1)
CASSVQREEQFF

SEQ ID NO: 177515 - protein, 16 aa, Homo sapiens
  CDR3 for alpha chain variable domain of TCR clone 88758 (TRAV8-3, TRAJ13)
CAVGAYPSGGYQKVTF

SEQ ID NO: 177516 - protein, 14 aa, Homo sapiens
  CDR3 for beta chain variable domain of TCR clone 88758 (TRBV18, TRBJ2-7)
CASSPRGGAYEQYF

SEQ ID NO: 177517 - protein, 16 aa, Homo sapiens
  CDR3 for alpha chain variable domain of TCR clone 88759 (TRAV26-1, TRAJ23)
CIVRVHPYNQGGKLIF

SEQ ID NO: 177518 - protein, 16 aa, Homo sapiens
  CDR3 for beta chain variable domain of TCR clone 88759 (TRBV20-1, TRBJ1-4)
CSAPGQGLLTNEKLFF

SEQ ID NO: 177519 - protein, 12 aa, Homo sapiens
  CDR3 for alpha chain variable domain of TCR clone 88760 (TRAV2, TRAJ31)
CAAEDNNARLMF

SEQ ID NO: 177520 - protein, 20 aa, Homo sapiens
  CDR3 for beta chain variable domain of TCR clone 88760 (TRBV7-8, TRBJ2-2)
CASSHLFPGPTIHITGELFF

SEQ ID NO: 177521 - protein, 15 aa, Homo sapiens
  CDR3 for alpha chain variable domain of TCR clone 88761 (TRAV23/DV6, TRAJ18)
CAARYRGSTLGRLYF

SEQ ID NO: 177522 - protein, 12 aa, Homo sapiens
  CDR3 for beta chain variable domain of TCR clone 88761 (TRBV6-1, TRBJ2-1)
CASRGPGDEQFF

SEQ ID NO: 177523 - protein, 12 aa, Homo sapiens
  CDR3 for alpha chain variable domain of TCR clone 88762 (TRAV29/DV5, TRAJ49)
CAATDTGNQFYF

SEQ ID NO: 177524 - protein, 17 aa, Homo sapiens
  CDR3 for beta chain variable domain of TCR clone 88762 (TRBV13, TRBJ2-3)
CASSLSRVAGGRNTQYF

SEQ ID NO: 177525 - protein, 11 aa, Homo sapiens
  CDR3 for alpha chain variable domain of TCR clone 88763 (TRAV30, TRAJ24)
WMLTAGGKFQF

SEQ ID NO: 177526 - protein, 13 aa, Homo sapiens
  CDR3 for beta chain variable domain of TCR clone 88763 (TRBV10-3, TRBJ2-7)
CASKLAVNYEQYF

SEQ ID NO: 177527 - protein, 14 aa, Homo sapiens
  CDR3 for alpha chain variable domain of TCR clone 88764 (TRAV2, TRAJ9)
CAVEDRSGGFKTIF

SEQ ID NO: 177528 - protein, 14 aa, Homo sapiens
  CDR3 for beta chain variable domain of TCR clone 88764 (TRBV18, TRBJ2-7)
CAGSPRGGAYEQYF

SEQ ID NO: 177529 - protein, 11 aa, Homo sapiens
  CDR3 for alpha chain variable domain of TCR clone 88765 (TRAV12-1, TRAJ21)
CVVNNFNKFYF

SEQ ID NO: 177530 - protein, 15 aa, Homo sapiens
  CDR3 for beta chain variable domain of TCR clone 88765 (TRBV7-9, TRBJ1-6)
CASSSPGRGNSPLHF

SEQ ID NO: 177531 - protein, 16 aa, Homo sapiens
  CDR3 for alpha chain variable domain of TCR clone 88766 (TRAV23/DV6, TRAJ21)
CAASSGGGTTSTNFTL

SEQ ID NO: 177532 - protein, 14 aa, Homo sapiens
  CDR3 for beta chain variable domain of TCR clone 88766 (TRBV15, TRBJ2-1)
CATSGVEDYNEQFF

SEQ ID NO: 177533 - protein, 12 aa, Homo sapiens
  CDR3 for alpha chain variable domain of TCR clone 88767 (TRAV2, TRAJ31)
CAVEDNNARLMF

SEQ ID NO: 177534 - protein, 16 aa, Homo sapiens
  CDR3 for beta chain variable domain of TCR clone 88767 (TRBV7-2, TRBJ1-2)
CASSSNQDRRGHGYTF

SEQ ID NO: 177535 - protein, 16 aa, Homo sapiens
  CDR3 for alpha chain variable domain of TCR clone 88768 (TRAV26-1, TRAJ50)
CIVRALMKTSYDKVIF

SEQ ID NO: 177536 - protein, 12 aa, Homo sapiens
  CDR3 for beta chain variable domain of TCR clone 88768 (TRBV12-4, TRBJ2-7)
CASSLGGYEQYF

SEQ ID NO: 177537 - protein, 14 aa, Homo sapiens
  CDR3 for alpha chain variable domain of TCR clone 88769 (TRAV21, TRAJ45)
CAVSSGGGADGLTF

SEQ ID NO: 177538 - protein, 15 aa, Homo sapiens
  CDR3 for beta chain variable domain of TCR clone 88769 (TRBV5-1, TRBJ2-1)
CASSPPRAPYNEQFF

SEQ ID NO: 177539 - protein, 13 aa, Homo sapiens
  CDR3 for alpha chain variable domain of TCR clone 88770 (TRAV8-3, TRAJ28)
CAVAAVGSYQLTF

SEQ ID NO: 177540 - protein, 14 aa, Homo sapiens
  CDR3 for beta chain variable domain of TCR clone 88770 (TRBV7-2, TRBJ2-7)
CASRSQGAAYEQYF

SEQ ID NO: 177541 - protein, 12 aa, Homo sapiens
  CDR3 for alpha chain variable domain of TCR clone 88771 (TRAV2, TRAJ10)
CASTGGGNKLTF

SEQ ID NO: 177542 - protein, 15 aa, Homo sapiens
  CDR3 for beta chain variable domain of TCR clone 88771 (TRBV6-3, TRBJ2-7)
CASSSPGTVFYEQYF

SEQ ID NO: 177543 - protein, 14 aa, Homo sapiens
  CDR3 for alpha chain variable domain of TCR clone 88772 (TRAV4, TRAJ26)
CLVGPHNYGQNFVF

SEQ ID NO: 177544 - protein, 13 aa, Homo sapiens
  CDR3 for beta chain variable domain of TCR clone 88772 (TRBV20-1, TRBJ1-2)
CSARGTADYGYTF

SEQ ID NO: 177545 - protein, 14 aa, Homo sapiens
  CDR3 for alpha chain variable domain of TCR clone 88773 (TRAV12-3, TRAJ12)
CAMSEVDSSYKLIF

SEQ ID NO: 177546 - protein, 12 aa, Homo sapiens
  CDR3 for beta chain variable domain of TCR clone 88773 (TRBV18, TRBJ1-4)
CASSPSREKLFC

SEQ ID NO: 177547 - protein, 15 aa, Homo sapiens
  CDR3 for alpha chain variable domain of TCR clone 88774 (TRAV21, TRAJ53)
CATLNSGGSNYKLTF

SEQ ID NO: 177548 - protein, 16 aa, Homo sapiens
  CDR3 for beta chain variable domain of TCR clone 88774 (TRBV9, TRBJ2-1)
CASSVDGGGNYNEQFF

SEQ ID NO: 177549 - protein, 15 aa, Homo sapiens
  CDR3 for alpha chain variable domain of TCR clone 88775 (TRAV26-1, TRAJ39)
CIVRVASNAGNMLTF

SEQ ID NO: 177550 - protein, 14 aa, Homo sapiens
  CDR3 for beta chain variable domain of TCR clone 88775 (TRBV7-7, TRBJ2-3)
CASSVAGGTDTQYF

SEQ ID NO: 177551 - protein, 14 aa, Homo sapiens
  CDR3 for alpha chain variable domain of TCR clone 88776 (TRAV12-1, TRAJ38)
CGELKAGNNRKLIW

SEQ ID NO: 177552 - protein, 12 aa, Homo sapiens
  CDR3 for beta chain variable domain of TCR clone 88776 (TRBV24-1, TRBJ1-1)
CATLYPDAEAFF

SEQ ID NO: 177553 - protein, 15 aa, Homo sapiens
  CDR3 for alpha chain variable domain of TCR clone 88777 (TRAV20, TRAJ58)
CAVQDLETSGSRLTF

SEQ ID NO: 177554 - protein, 13 aa, Homo sapiens
  CDR3 for beta chain variable domain of TCR clone 88777 (TRBV20-1, TRBJ1-1)
CSARSGGNTEAFF

SEQ ID NO: 177555 - protein, 15 aa, Homo sapiens
  CDR3 for alpha chain variable domain of TCR clone 88778 (TRAV8-3, TRAJ45)
CASSYSGGGADGLTF

SEQ ID NO: 177556 - protein, 14 aa, Homo sapiens
  CDR3 for beta chain variable domain of TCR clone 88778 (TRBV7-9, TRBJ2-2)
CASSGLADTGELFF

SEQ ID NO: 177557 - protein, 14 aa, Homo sapiens
  CDR3 for alpha chain variable domain of TCR clone 88779 (TRAV17, TRAJ57)
CATDPQGASEKLVF

SEQ ID NO: 177558 - protein, 16 aa, Homo sapiens
  CDR3 for beta chain variable domain of TCR clone 88779 (TRBV20-1, TRBJ1-4)
CSAPGQGLLTNEKLFF

SEQ ID NO: 177559 - protein, 13 aa, Homo sapiens
  CDR3 for alpha chain variable domain of TCR clone 88780 (TRAV22, TRAJ29)
CAVGGSGNTPLVF

SEQ ID NO: 177560 - protein, 16 aa, Homo sapiens
  CDR3 for beta chain variable domain of TCR clone 88780 (TRBV5-1, TRBJ2-3)
CASSSGRQDATDTQYF

SEQ ID NO: 177561 - protein, 14 aa, Homo sapiens
  CDR3 for alpha chain variable domain of TCR clone 88781 (TRAV12-3, TRAJ29)
CAMILLSGNTPLVF

SEQ ID NO: 177562 - protein, 16 aa, Homo sapiens
  CDR3 for beta chain variable domain of TCR clone 88781 (TRBV12-4, TRBJ2-5)
CASSFFVRGRQETQYF

SEQ ID NO: 177563 - protein, 12 aa, Homo sapiens
  CDR3 for alpha chain variable domain of TCR clone 88782 (TRAV12-3, TRAJ17)
CAMTLTGNKLTF

SEQ ID NO: 177564 - protein, 15 aa, Homo sapiens
  CDR3 for beta chain variable domain of TCR clone 88782 (TRBV18, TRBJ2-7)
CASSPTFMDSYEQYF

SEQ ID NO: 177565 - protein, 12 aa, Homo sapiens
  CDR3 for alpha chain variable domain of TCR clone 88783 (TRAV3, TRAJ39)
CAVIEWSNMLTS

SEQ ID NO: 177566 - protein, 14 aa, Homo sapiens
  CDR3 for beta chain variable domain of TCR clone 88783 (TRBV7-8, TRBJ2-3)
CASSFPDGQDTQYF

SEQ ID NO: 177567 - protein, 14 aa, Homo sapiens
  CDR3 for alpha chain variable domain of TCR clone 88784 (TRAV1-2, TRAJ16)
CAVNRFSDGQTLLF

SEQ ID NO: 177568 - protein, 12 aa, Homo sapiens
  CDR3 for beta chain variable domain of TCR clone 88784 (TRBV11-2, TRBJ2-2)
CASSLGGGELFF

SEQ ID NO: 177569 - protein, 14 aa, Homo sapiens
  CDR3 for alpha chain variable domain of TCR clone 88785 (TRAV12-2, TRAJ13)
CAVKKTGGYQKVTF

SEQ ID NO: 177570 - protein, 14 aa, Homo sapiens
  CDR3 for beta chain variable domain of TCR clone 88785 (TRBV11-1, TRBJ2-7)
CASTFAVPSYEQYF

SEQ ID NO: 177571 - protein, 18 aa, Homo sapiens
  CDR3 for alpha chain variable domain of TCR clone 88786 (TRAV26-2, TRAJ45)
CILRLWGYSGGGADGLTF

SEQ ID NO: 177572 - protein, 17 aa, Homo sapiens
  CDR3 for beta chain variable domain of TCR clone 88786 (TRBV28, TRBJ2-3)
CASSHTPAGGRVDTQYF

SEQ ID NO: 177573 - protein, 12 aa, Homo sapiens
  CDR3 for alpha chain variable domain of TCR clone 88787 (TRAV30, TRAJ31)
CGTAKHNARLMF

SEQ ID NO: 177574 - protein, 13 aa, Homo sapiens
  CDR3 for beta chain variable domain of TCR clone 88787 (TRBV20-1, TRBJ1-1)
CSAPLGGGTEAFF

SEQ ID NO: 177575 - protein, 13 aa, Homo sapiens
  CDR3 for alpha chain variable domain of TCR clone 88788 (TRAV17, TRAJ54)
CATVIQGAKKLVF

SEQ ID NO: 177576 - protein, 15 aa, Homo sapiens
  CDR3 for beta chain variable domain of TCR clone 88788 (TRBV13, TRBJ2-1)
CASSLLSGLNNEQFF

SEQ ID NO: 177577 - protein, 15 aa, Homo sapiens
  CDR3 for alpha chain variable domain of TCR clone 88789 (TRAV12-2, TRAJ43)
CAFDMRFGAGTRLTV

SEQ ID NO: 177578 - protein, 14 aa, Homo sapiens
  CDR3 for beta chain variable domain of TCR clone 88789 (TRBV12-5, TRBJ2-5)
CASGSRTHQETQYF

SEQ ID NO: 177579 - protein, 13 aa, Homo sapiens
  CDR3 for alpha chain variable domain of TCR clone 88790 (TRAV2, TRAJ40)
CAVVTSGTYKYIF

SEQ ID NO: 177580 - protein, 14 aa, Homo sapiens
  CDR3 for beta chain variable domain of TCR clone 88790 (TRBV18, TRBJ2-3)
CASSGLADTDTQYF

SEQ ID NO: 177581 - protein, 16 aa, Homo sapiens
  CDR3 for alpha chain variable domain of TCR clone 88791 (TRAV16, TRAJ4)
CALSRMFSGGYNKLIF

SEQ ID NO: 177582 - protein, 11 aa, Homo sapiens
  CDR3 for beta chain variable domain of TCR clone 88791 (TRBV12-4, TRBJ2-3)
CASTATDTQYF

SEQ ID NO: 177583 - protein, 14 aa, Homo sapiens
  CDR3 for alpha chain variable domain of TCR clone 88792 (TRAV2, TRAJ9)
CAVDPHTGGFKTIF

SEQ ID NO: 177584 - protein, 14 aa, Homo sapiens
  CDR3 for beta chain variable domain of TCR clone 88792 (TRBV7-2, TRBJ2-7)
CASSPKTSFYEQYF

SEQ ID NO: 177585 - protein, 12 aa, Homo sapiens
  CDR3 for alpha chain variable domain of TCR clone 88793 (TRAV23/DV6, TRAJ17)
CAAKAAGNKLTF

SEQ ID NO: 177586 - protein, 14 aa, Homo sapiens
  CDR3 for beta chain variable domain of TCR clone 88793 (TRBV7-3, TRBJ1-1)
CASSLKGGNTEAFF

SEQ ID NO: 177587 - protein, 11 aa, Homo sapiens
  CDR3 for alpha chain variable domain of TCR clone 88794 (TRAV21, TRAJ41)
CAVRSGYALKF

SEQ ID NO: 177588 - protein, 14 aa, Homo sapiens
  CDR3 for beta chain variable domain of TCR clone 88794 (TRBV25-1, TRBJ1-1)
CASTHLGGNTEAFF

SEQ ID NO: 177589 - protein, 15 aa, Homo sapiens
  CDR3 for alpha chain variable domain of TCR clone 88795 (TRAV30, TRAJ13)
CGTQGVTGGYQKVTF

SEQ ID NO: 177590 - protein, 17 aa, Homo sapiens
  CDR3 for beta chain variable domain of TCR clone 88795 (TRBV20-1, TRBJ2-2)
CSARVERTHVRSGELFF

SEQ ID NO: 177591 - protein, 12 aa, Homo sapiens
  CDR3 for alpha chain variable domain of TCR clone 88796 (TRAV4, TRAJ26)
CLVGDYGQNFVF

SEQ ID NO: 177592 - protein, 16 aa, Homo sapiens
  CDR3 for beta chain variable domain of TCR clone 88796 (TRBV7-2, TRBJ1-2)
RASSSNQDRRGHGYTF

SEQ ID NO: 177593 - protein, 11 aa, Homo sapiens
  CDR3 for alpha chain variable domain of TCR clone 88797 (TRAV1-2, TRAJ20)
CAVANDYKLSF

SEQ ID NO: 177594 - protein, 18 aa, Homo sapiens
  CDR3 for beta chain variable domain of TCR clone 88797 (TRBV20-1, TRBJ2-6)
CSAETTPSHGSGANVLTF

SEQ ID NO: 177595 - protein, 12 aa, Homo sapiens
  CDR3 for alpha chain variable domain of TCR clone 88798 (TRAV17, TRAJ39)
CAINNAGNMLTF

SEQ ID NO: 177596 - protein, 15 aa, Homo sapiens
  CDR3 for beta chain variable domain of TCR clone 88798 (TRBV28, TRBJ2-3)
CASSPDRQGANTQYF

SEQ ID NO: 177597 - protein, 13 aa, Homo sapiens
  CDR3 for alpha chain variable domain of TCR clone 88799 (TRAV26-1, TRAJ29)
CIVRRSRNTPLVF

SEQ ID NO: 177598 - protein, 16 aa, Homo sapiens
  CDR3 for beta chain variable domain of TCR clone 88799 (TRBV11-2, TRBJ2-7)
CASSLAPTGVNYEQYF

SEQ ID NO: 177599 - protein, 12 aa, Homo sapiens
  CDR3 for alpha chain variable domain of TCR clone 88800 (TRAV9-2, TRAJ26)
CALRGYGQNFVF

SEQ ID NO: 177600 - protein, 16 aa, Homo sapiens
  CDR3 for beta chain variable domain of TCR clone 88800 (TRBV27, TRBJ2-2)
CASSLSGFWVTGELFF

SEQ ID NO: 177601 - protein, 14 aa, Homo sapiens
  CDR3 for alpha chain variable domain of TCR clone 88801 (TRAV13-1, TRAJ35)
CAASKGGFGNVLHC

SEQ ID NO: 177602 - protein, 15 aa, Homo sapiens
  CDR3 for beta chain variable domain of TCR clone 88801 (TRBV28, TRBJ2-1)
CASSRLAEVDNEQFF

SEQ ID NO: 177603 - protein, 15 aa, Homo sapiens
  CDR3 for alpha chain variable domain of TCR clone 88802 (TRAV3, TRAJ22)
CAVRDRGGSARQLTF

SEQ ID NO: 177604 - protein, 16 aa, Homo sapiens
  CDR3 for beta chain variable domain of TCR clone 88802 (TRBV25-1, TRBJ1-1)
CASSGDRDRGRSEAFF

SEQ ID NO: 177605 - protein, 14 aa, Homo sapiens
  CDR3 for alpha chain variable domain of TCR clone 88803 (TRAV12-1, TRAJ43)
CVVNGRSNNNDMRF

SEQ ID NO: 177606 - protein, 13 aa, Homo sapiens
  CDR3 for beta chain variable domain of TCR clone 88803 (TRBV10-3, TRBJ2-7)
CASTLAVNYEQYF

SEQ ID NO: 177607 - protein, 12 aa, Homo sapiens
  CDR3 for alpha chain variable domain of TCR clone 88804 (TRAV21, TRAJ13)
PGPSGGYQKVTF

SEQ ID NO: 177608 - protein, 14 aa, Homo sapiens
  CDR3 for beta chain variable domain of TCR clone 88804 (TRBV20-1, TRBJ2-7)
CSAKDRKVAYEQYF

SEQ ID NO: 177609 - protein, 16 aa, Homo sapiens
  CDR3 for alpha chain variable domain of TCR clone 88805 (TRAV38-2/DV8, TRAJ45)
CAYTTTSGGGADGLTF

SEQ ID NO: 177610 - protein, 13 aa, Homo sapiens
  CDR3 for beta chain variable domain of TCR clone 88805 (TRBV19, TRBJ2-3)
CASMGASSDTQYF

SEQ ID NO: 177611 - protein, 14 aa, Homo sapiens
  CDR3 for alpha chain variable domain of TCR clone 88806 (TRAV12-3, TRAJ33)
CAMSAGDSNYQLIW

SEQ ID NO: 177612 - protein, 12 aa, Homo sapiens
  CDR3 for beta chain variable domain of TCR clone 88806 (TRBV11-2, TRBJ2-2)
CASSLGGGELFF

SEQ ID NO: 177613 - protein, 15 aa, Homo sapiens
  CDR3 for alpha chain variable domain of TCR clone 88807 (TRAV25, TRAJ52)
CAGRPGGTSYGKLTF

SEQ ID NO: 177614 - protein, 16 aa, Homo sapiens
  CDR3 for beta chain variable domain of TCR clone 88807 (TRBV9, TRBJ2-1)
CASSVGGGGNYNEQFF

SEQ ID NO: 177615 - protein, 17 aa, Homo sapiens
  CDR3 for alpha chain variable domain of TCR clone 88808 (TRAV26-1, TRAJ37)
CIVRVITVSSNTGKLIF

SEQ ID NO: 177616 - protein, 14 aa, Homo sapiens
  CDR3 for beta chain variable domain of TCR clone 88808 (TRBV5-1, TRBJ2-7)
CASSRGESLYEQYF

SEQ ID NO: 177617 - protein, 14 aa, Homo sapiens
  CDR3 for alpha chain variable domain of TCR clone 88809 (TRAV1-2, TRAJ16)
CAVRGFSDGQKLLF

SEQ ID NO: 177618 - protein, 15 aa, Homo sapiens
  CDR3 for beta chain variable domain of TCR clone 88809 (TRBV2, TRBJ2-1)
CASSELAGSYNEQFF

SEQ ID NO: 177619 - protein, 13 aa, Homo sapiens
  CDR3 for alpha chain variable domain of TCR clone 88810 (TRAV29/DV5, TRAJ31)
CAASRNNNARLSF

SEQ ID NO: 177620 - protein, 12 aa, Homo sapiens
  CDR3 for beta chain variable domain of TCR clone 88810 (TRBV14, TRBJ1-1)
CASSQLKGLAFF

SEQ ID NO: 177621 - protein, 13 aa, Homo sapiens
  CDR3 for alpha chain variable domain of TCR clone 88811 (TRAV2, TRAJ40)
CAVVTSGAYTYIF

SEQ ID NO: 177622 - protein, 14 aa, Homo sapiens
  CDR3 for beta chain variable domain of TCR clone 88811 (TRBV19, TRBJ2-1)
CASPTFVLSGEQFF

SEQ ID NO: 177623 - protein, 13 aa, Homo sapiens
  CDR3 for alpha chain variable domain of TCR clone 88812 (TRAV6, TRAJ20)
CALAVSNDYKLSF

SEQ ID NO: 177624 - protein, 16 aa, Homo sapiens
  CDR3 for beta chain variable domain of TCR clone 88812 (TRBV7-9, TRBJ2-1)
CASSDVAGGAYNEQFF

SEQ ID NO: 177625 - protein, 14 aa, Homo sapiens
  CDR3 for alpha chain variable domain of TCR clone 88813 (TRAV12-3, TRAJ22)
CAMSLFGSARQLTF

SEQ ID NO: 177626 - protein, 13 aa, Homo sapiens
  CDR3 for beta chain variable domain of TCR clone 88813 (TRBV11-2, TRBJ2-5)
CASSSTGEETQYF

SEQ ID NO: 177627 - protein, 13 aa, Homo sapiens
  CDR3 for alpha chain variable domain of TCR clone 88814 (TRAV3, TRAJ21)
CAVREPDFNKFYF

SEQ ID NO: 177628 - protein, 18 aa, Homo sapiens
  CDR3 for beta chain variable domain of TCR clone 88814 (TRBV18, TRBJ1-1)
CASSLPGAPQGAGTEAFF

SEQ ID NO: 177629 - protein, 14 aa, Homo sapiens
  CDR3 for alpha chain variable domain of TCR clone 88815 (TRAV12-3, TRAJ10)
SNLPLTGGGNKLTF

SEQ ID NO: 177630 - protein, 14 aa, Homo sapiens
  CDR3 for beta chain variable domain of TCR clone 88815 (TRBV6-1, TRBJ1-3)
CASVQGGGGNTIYL

SEQ ID NO: 177631 - protein, 17 aa, Homo sapiens
  CDR3 for alpha chain variable domain of TCR clone 88816 (TRAV36/DV7, TRAJ52)
RAVAQRAGGTSYGKLTF

SEQ ID NO: 177632 - protein, 15 aa, Homo sapiens
  CDR3 for beta chain variable domain of TCR clone 88816 (TRBV6-5, TRBJ1-2)
CASSYSQAFNYGYTF

SEQ ID NO: 177633 - protein, 14 aa, Homo sapiens
  CDR3 for alpha chain variable domain of TCR clone 88817 (TRAV12-1, TRAJ17)
CVVNYKPAGNKLTF

SEQ ID NO: 177634 - protein, 17 aa, Homo sapiens
  CDR3 for beta chain variable domain of TCR clone 88817 (TRBV20-1, TRBJ2-1)
CSASSSGLAGSYNEQFF

SEQ ID NO: 177635 - protein, 13 aa, Homo sapiens
  CDR3 for alpha chain variable domain of TCR clone 88818 (TRAV8-1, TRAJ28)
CAVSGAGSYQLTF

SEQ ID NO: 177636 - protein, 12 aa, Homo sapiens
  CDR3 for beta chain variable domain of TCR clone 88818 (TRBV27, TRBJ2-1)
EPGTSGDNEQFF

SEQ ID NO: 177637 - protein, 15 aa, Homo sapiens
  CDR3 for alpha chain variable domain of TCR clone 88819 (TRAV13-2, TRAJ32)
CREMNYGGATNKLIF

SEQ ID NO: 177638 - protein, 14 aa, Homo sapiens
  CDR3 for beta chain variable domain of TCR clone 88819 (TRBV15, TRBJ2-5)
CATSSTGYQETQYF

SEQ ID NO: 177639 - protein, 18 aa, Homo sapiens
  CDR3 for alpha chain variable domain of TCR clone 88820 (TRAV12-3, TRAJ52)
CAMSRTNAGGSSYGKLTF

SEQ ID NO: 177640 - protein, 17 aa, Homo sapiens
  CDR3 for beta chain variable domain of TCR clone 88820 (TRBV7-3, TRBJ2-3)
CASSLMKRMRGADTQYF

SEQ ID NO: 177641 - protein, 15 aa, Homo sapiens
  CDR3 for alpha chain variable domain of TCR clone 88821 (TRAV4, TRAJ36)
CLVGDRQTGANNLFF

SEQ ID NO: 177642 - protein, 17 aa, Homo sapiens
  CDR3 for beta chain variable domain of TCR clone 88821 (TRBV28, TRBJ2-5)
CASSRQGGLAGAETQYF

SEQ ID NO: 177643 - protein, 14 aa, Homo sapiens
  CDR3 for alpha chain variable domain of TCR clone 88822 (TRAV17, TRAJ35)
CATDRPCFGNVLHC

SEQ ID NO: 177644 - protein, 19 aa, Homo sapiens
  CDR3 for beta chain variable domain of TCR clone 88822 (TRBV11-3, TRBJ2-2)
CASSTRPGAKTTNTGELFF

SEQ ID NO: 177645 - protein, 16 aa, Homo sapiens
  CDR3 for alpha chain variable domain of TCR clone 88823 (TRAV12-3, TRAJ45)
CAMGWGSGGGADGLTL

SEQ ID NO: 177646 - protein, 15 aa, Homo sapiens
  CDR3 for beta chain variable domain of TCR clone 88823 (TRBV3-1, TRBJ1-2)
CASSHPGTPGYGYTF

SEQ ID NO: 177647 - protein, 12 aa, Homo sapiens
  CDR3 for alpha chain variable domain of TCR clone 88824 (TRAV17, TRAJ30)
CVLERRDDKIIF

SEQ ID NO: 177648 - protein, 14 aa, Homo sapiens
  CDR3 for beta chain variable domain of TCR clone 88824 (TRBV7-7, TRBJ2-2)
CASSRDRSTGELFF

SEQ ID NO: 177649 - protein, 10 aa, Homo sapiens
  CDR3 for alpha chain variable domain of TCR clone 88825 (TRAV1-2, TRAJ18)
CAVRGEAQPW

SEQ ID NO: 177650 - protein, 13 aa, Homo sapiens
  CDR3 for beta chain variable domain of TCR clone 88825 (TRBV7-9, TRBJ1-2)
CASSLKQNYGYTF

SEQ ID NO: 177651 - protein, 16 aa, Homo sapiens
  CDR3 for alpha chain variable domain of TCR clone 88826 (TRAV30, TRAJ24)
CGTEIVDADSWGKFQF

SEQ ID NO: 177652 - protein, 16 aa, Homo sapiens
  CDR3 for beta chain variable domain of TCR clone 88826 (TRBV4-2, TRBJ1-5)
CASSQGQGASNQPQHF

SEQ ID NO: 177653 - protein, 11 aa, Homo sapiens
  CDR3 for alpha chain variable domain of TCR clone 88827 (TRAV27, TRAJ47)
CRSNQGNKLVF

SEQ ID NO: 177654 - protein, 16 aa, Homo sapiens
  CDR3 for beta chain variable domain of TCR clone 88827 (TRBV7-9, TRBJ2-1)
CASSDVAGCSYNEQFF

SEQ ID NO: 177655 - protein, 12 aa, Homo sapiens
  CDR3 for alpha chain variable domain of TCR clone 88828 (TRAV2, TRAJ9)
CAVGAGGFKTIF

SEQ ID NO: 177656 - protein, 16 aa, Homo sapiens
  CDR3 for beta chain variable domain of TCR clone 88828 (TRBV13, TRBJ2-2)
CGSSPRTGEHTGELFF

SEQ ID NO: 177657 - protein, 17 aa, Homo sapiens
  CDR3 for alpha chain variable domain of TCR clone 88829 (TRAV17, TRAJ28)
CATDPRRGGAGSYKLTF

SEQ ID NO: 177658 - protein, 16 aa, Homo sapiens
  CDR3 for beta chain variable domain of TCR clone 88829 (TRBV25-1, TRBJ1-1)
CASSGDRDRGRIEAFF

SEQ ID NO: 177659 - protein, 17 aa, Homo sapiens
  CDR3 for alpha chain variable domain of TCR clone 88830 (TRAV17, TRAJ28)
CATDPLRGGAGSYQLTF

SEQ ID NO: 177660 - protein, 16 aa, Homo sapiens
  CDR3 for beta chain variable domain of TCR clone 88830 (TRBV25-1, TRBJ1-1)
CASSGDRDRGRIEAFF

SEQ ID NO: 177661 - protein, 13 aa, Homo sapiens
  CDR3 for alpha chain variable domain of TCR clone 88831 (TRAV12-2, TRAJ13)
CAVTAGGYQKVTF

SEQ ID NO: 177662 - protein, 13 aa, Homo sapiens
  CDR3 for beta chain variable domain of TCR clone 88831 (TRBV18, TRBJ1-1)
CASSGGRNTEAFF

SEQ ID NO: 177663 - protein, 12 aa, Homo sapiens
  CDR3 for alpha chain variable domain of TCR clone 88832 (TRAV13-1, TRAJ21)
CAAKEGFNKFYF

SEQ ID NO: 177664 - protein, 11 aa, Homo sapiens
  CDR3 for beta chain variable domain of TCR clone 88832 (TRBV6-3, TRBJ2-3)
CATGQADTQYF

SEQ ID NO: 177665 - protein, 14 aa, Homo sapiens
  CDR3 for alpha chain variable domain of TCR clone 88833 (TRAV13-1, TRAJ44)
CAAKATGTASELNF

SEQ ID NO: 177666 - protein, 14 aa, Homo sapiens
  CDR3 for beta chain variable domain of TCR clone 88833 (TRBV19, TRBJ2-2)
CASSTLHRSGELFF

SEQ ID NO: 177667 - protein, 14 aa, Homo sapiens
  CDR3 for alpha chain variable domain of TCR clone 88834 (TRAV17, TRAJ34)
CATDSLEGTDKLIF

SEQ ID NO: 177668 - protein, 16 aa, Homo sapiens
  CDR3 for beta chain variable domain of TCR clone 88834 (TRBV20-1, TRBJ1-4)
CSAPGQGLLTNEKLFF

SEQ ID NO: 177669 - protein, 16 aa, Homo sapiens
  CDR3 for alpha chain variable domain of TCR clone 88835 (TRAV12-2, TRAJ50)
CAVGTATKTSYDKVIF

SEQ ID NO: 177670 - protein, 12 aa, Homo sapiens
  CDR3 for beta chain variable domain of TCR clone 88835 (TRBV12-4, TRBJ1-5)
CASSVGRQPQHF

SEQ ID NO: 177671 - protein, 13 aa, Homo sapiens
  CDR3 for alpha chain variable domain of TCR clone 88836 (TRAV1-2, TRAJ9)
CAVLNTGVFKTIF

SEQ ID NO: 177672 - protein, 14 aa, Homo sapiens
  CDR3 for beta chain variable domain of TCR clone 88836 (TRBV20-1, TRBJ2-3)
CSARGGTSTDTQYF

SEQ ID NO: 177673 - protein, 14 aa, Homo sapiens
  CDR3 for alpha chain variable domain of TCR clone 88837 (TRAV12-2, TRAJ13)
CAVKKTGGYQKVTF

SEQ ID NO: 177674 - protein, 18 aa, Homo sapiens
  CDR3 for beta chain variable domain of TCR clone 88837 (TRBV5-1, TRBJ2-5)
CASSLAETRDPVLRARHA

SEQ ID NO: 177675 - protein, 14 aa, Homo sapiens
  CDR3 for alpha chain variable domain of TCR clone 88838 (TRAV12-1, TRAJ17)
CVVNYKAAGNKLTF

SEQ ID NO: 177676 - protein, 12 aa, Homo sapiens
  CDR3 for beta chain variable domain of TCR clone 88838 (TRBV7-9, TRBJ2-1)
CASDTSYNEQFF

SEQ ID NO: 177677 - protein, 12 aa, Homo sapiens
  CDR3 for alpha chain variable domain of TCR clone 88839 (TRAV2, TRAJ37)
CAVTMDTGKLIF

SEQ ID NO: 177678 - protein, 15 aa, Homo sapiens
  CDR3 for beta chain variable domain of TCR clone 88839 (TRBV5-1, TRBJ2-5)
CASSFGGPPQETQYF

SEQ ID NO: 177679 - protein, 11 aa, Homo sapiens
  CDR3 for alpha chain variable domain of TCR clone 88840 (TRAV12-2, TRAJ33)
CALTSNYQLIW

SEQ ID NO: 177680 - protein, 14 aa, Homo sapiens
  CDR3 for beta chain variable domain of TCR clone 88840 (TRBV12-4, TRBJ2-2)
CASNQGANTGELFF

SEQ ID NO: 177681 - protein, 17 aa, Homo sapiens
  CDR3 for alpha chain variable domain of TCR clone 88841 (TRAV13-1, TRAJ52)
CAASSGAGGTSYGKLTF

SEQ ID NO: 177682 - protein, 15 aa, Homo sapiens
  CDR3 for beta chain variable domain of TCR clone 88841 (TRBV2, TRBJ2-1)
CASSELAGSYNAQFF

SEQ ID NO: 177683 - protein, 15 aa, Homo sapiens
  CDR3 for alpha chain variable domain of TCR clone 88842 (TRAV8-2, TRAJ16)
CVVSDGFSDGQKLPF

SEQ ID NO: 177684 - protein, 15 aa, Homo sapiens
  CDR3 for beta chain variable domain of TCR clone 88842 (TRBV7-2, TRBJ2-1)
CASSSGLAGGNEQFF

SEQ ID NO: 177685 - protein, 14 aa, Homo sapiens
  CDR3 for alpha chain variable domain of TCR clone 88843 (TRAV17, TRAJ16)
CATADFSDGQKLLF

SEQ ID NO: 177686 - protein, 15 aa, Homo sapiens
  CDR3 for beta chain variable domain of TCR clone 88843 (TRBV9, TRBJ1-6)
CASSVAGTGDSPLHF

SEQ ID NO: 177687 - protein, 13 aa, Homo sapiens
  CDR3 for alpha chain variable domain of TCR clone 88844 (TRAV12-2, TRAJ20)
CAVYPSNDYKLSF

SEQ ID NO: 177688 - protein, 14 aa, Homo sapiens
  CDR3 for beta chain variable domain of TCR clone 88844 (TRBV19, TRBJ2-7)
CASTVQGRPYEQYF

SEQ ID NO: 177689 - protein, 12 aa, Homo sapiens
  CDR3 for alpha chain variable domain of TCR clone 88845 (TRAV26-1, TRAJ26)
CIVYNYGQNFVF

SEQ ID NO: 177690 - protein, 15 aa, Homo sapiens
  CDR3 for beta chain variable domain of TCR clone 88845 (TRBV7-2, TRBJ2-3)
CASSLRGGSTYTQYF

SEQ ID NO: 177691 - protein, 16 aa, Homo sapiens
  CDR3 for alpha chain variable domain of TCR clone 88846 (TRAV22, TRAJ45)
CAVDRGKRGGADGLTF

SEQ ID NO: 177692 - protein, 13 aa, Homo sapiens
  CDR3 for beta chain variable domain of TCR clone 88846 (TRBV27, TRBJ1-1)
CASSLSIGAEAFF

SEQ ID NO: 177693 - protein, 14 aa, Homo sapiens
  CDR3 for alpha chain variable domain of TCR clone 88847 (TRAV12-2, TRAJ40)
CAVKIPSGTYKYIF

SEQ ID NO: 177694 - protein, 15 aa, Homo sapiens
  CDR3 for beta chain variable domain of TCR clone 88847 (TRBV19, TRBJ2-2)
CASSLNRGVTGELFF

SEQ ID NO: 177695 - protein, 18 aa, Homo sapiens
  CDR3 for alpha chain variable domain of TCR clone 88848 (TRAV35, TRAJ28)
CAGHNYPLSGAGSYQLTF

SEQ ID NO: 177696 - protein, 12 aa, Homo sapiens
  CDR3 for beta chain variable domain of TCR clone 88848 (TRBV7-9, TRBJ1-1)
CAGSLEGTEAFF

SEQ ID NO: 177697 - protein, 15 aa, Homo sapiens
  CDR3 for alpha chain variable domain of TCR clone 88849 (TRAV26-1, TRAJ44)
CIVRANTGTAGKLTF

SEQ ID NO: 177698 - protein, 13 aa, Homo sapiens
  CDR3 for beta chain variable domain of TCR clone 88849 (TRBV29-1, TRBJ1-1)
CSVGDSRNTEAFF

SEQ ID NO: 177699 - protein, 14 aa, Homo sapiens
  CDR3 for alpha chain variable domain of TCR clone 88850 (TRAV1-2, TRAJ16)
CAANRFSDGQKLLF

SEQ ID NO: 177700 - protein, 15 aa, Homo sapiens
  CDR3 for beta chain variable domain of TCR clone 88850 (TRBV5-1, TRBJ2-7)
CASSLDLTSSYEQYF

SEQ ID NO: 177701 - protein, 17 aa, Homo sapiens
  CDR3 for alpha chain variable domain of TCR clone 88851 (TRAV12-3, TRAJ26)
CAMSGGRWDNYGLNFVF

SEQ ID NO: 177702 - protein, 12 aa, Homo sapiens
  CDR3 for beta chain variable domain of TCR clone 88851 (TRBV19, TRBJ1-1)
CASSTTGIEAFF

SEQ ID NO: 177703 - protein, 12 aa, Homo sapiens
  CDR3 for alpha chain variable domain of TCR clone 88852 (TRAV8-3, TRAJ41)
CAVGALGYGLNF

SEQ ID NO: 177704 - protein, 16 aa, Homo sapiens
  CDR3 for beta chain variable domain of TCR clone 88852 (TRBV7-6, TRBJ2-3)
CASSDSRGEGTDTQYF

SEQ ID NO: 177705 - protein, 16 aa, Homo sapiens
  CDR3 for alpha chain variable domain of TCR clone 88853 (TRAV3, TRAJ21)
CAVRDIERGNFNKFYF

SEQ ID NO: 177706 - protein, 13 aa, Homo sapiens
  CDR3 for beta chain variable domain of TCR clone 88853 (TRBV12-4, TRBJ2-5)
CASRLAVQETQYF

SEQ ID NO: 177707 - protein, 13 aa, Homo sapiens
  CDR3 for alpha chain variable domain of TCR clone 88854 (TRAV21, TRAJ27)
CAARPGSAGKSTF

SEQ ID NO: 177708 - protein, 14 aa, Homo sapiens
  CDR3 for beta chain variable domain of TCR clone 88854 (TRBV7-6, TRBJ2-3)
CASSLGTVTHTQYF

SEQ ID NO: 177709 - protein, 14 aa, Homo sapiens
  CDR3 for alpha chain variable domain of TCR clone 88855 (TRAV38-1, TRAJ45)
CASHSGGGADGLTF

SEQ ID NO: 177710 - protein, 15 aa, Homo sapiens
  CDR3 for beta chain variable domain of TCR clone 88855 (TRBV6-5, TRBJ2-1)
CASSYDAGAGNEQFF

SEQ ID NO: 177711 - protein, 10 aa, Homo sapiens
  CDR3 for alpha chain variable domain of TCR clone 88856 (TRAV12-1, TRAJ37)
ARGNTGKLIF

SEQ ID NO: 177712 - protein, 15 aa, Homo sapiens
  CDR3 for beta chain variable domain of TCR clone 88856 (TRBV7-2, TRBJ2-3)
CASSLEHGGTDTQYF

SEQ ID NO: 177713 - protein, 14 aa, Homo sapiens
  CDR3 for alpha chain variable domain of TCR clone 88857 (TRAV12-2, TRAJ17)
CAVLFKAAGNKLTF

SEQ ID NO: 177714 - protein, 14 aa, Homo sapiens
  CDR3 for beta chain variable domain of TCR clone 88857 (TRBV4-2, TRBJ2-1)
CTSGLDRAYNEQFF

SEQ ID NO: 177715 - protein, 15 aa, Homo sapiens
  CDR3 for alpha chain variable domain of TCR clone 88858 (TRAV20, TRAJ50)
CAVRQMKTSYDKVIF

SEQ ID NO: 177716 - protein, 15 aa, Homo sapiens
  CDR3 for beta chain variable domain of TCR clone 88858 (TRBV11-3, TRBJ2-7)
CASSPGPASSYEQYF

SEQ ID NO: 177717 - protein, 12 aa, Homo sapiens
  CDR3 for alpha chain variable domain of TCR clone 88859 (TRAV13-1, TRAJ42)
SVLRGSQGNLIF

SEQ ID NO: 177718 - protein, 16 aa, Homo sapiens
  CDR3 for beta chain variable domain of TCR clone 88859 (TRBV7-3, TRBJ2-2)
CASSLKRGTLSGELFF

SEQ ID NO: 177719 - protein, 14 aa, Homo sapiens
  CDR3 for alpha chain variable domain of TCR clone 88860 (TRAV16, TRAJ37)
CALDISGNTGKLIF

SEQ ID NO: 177720 - protein, 12 aa, Homo sapiens
  CDR3 for beta chain variable domain of TCR clone 88860 (TRBV11-2, TRBJ2-2)
CASSLGGGELFF

SEQ ID NO: 177721 - protein, 13 aa, Homo sapiens
  CDR3 for alpha chain variable domain of TCR clone 88861 (TRAV3, TRAJ30)
CAVRDRGDDKIIF

SEQ ID NO: 177722 - protein, 13 aa, Homo sapiens
  CDR3 for beta chain variable domain of TCR clone 88861 (TRBV12-4, TRBJ2-7)
CASSLSGVYEQYF

SEQ ID NO: 177723 - protein, 14 aa, Homo sapiens
  CDR3 for alpha chain variable domain of TCR clone 88862 (TRAV23/DV6, TRAJ8)
CAASKNTGFQKLEF

SEQ ID NO: 177724 - protein, 16 aa, Homo sapiens
  CDR3 for beta chain variable domain of TCR clone 88862 (TRBV4-1, TRBJ2-6)
CASSQVGDPGANVLTF

SEQ ID NO: 177725 - protein, 15 aa, Homo sapiens
  CDR3 for alpha chain variable domain of TCR clone 88863 (TRAV4, TRAJ32)
CLVGEDGGATNKPIF

SEQ ID NO: 177726 - protein, 14 aa, Homo sapiens
  CDR3 for beta chain variable domain of TCR clone 88863 (TRBV7-2, TRBJ2-5)
CASSPRGSSETQYF

SEQ ID NO: 177727 - protein, 12 aa, Homo sapiens
  CDR3 for alpha chain variable domain of TCR clone 88864 (TRAV13-2, TRAJ23)
CAERHRGGKLVF

SEQ ID NO: 177728 - protein, 16 aa, Homo sapiens
  CDR3 for beta chain variable domain of TCR clone 88864 (TRBV7-2, TRBJ2-6)
CAILSGVSSGANVLTF

SEQ ID NO: 177729 - protein, 13 aa, Homo sapiens
  CDR3 for alpha chain variable domain of TCR clone 88865 (TRAV12-1, TRAJ26)
SATYLYYGQNFVF

SEQ ID NO: 177730 - protein, 15 aa, Homo sapiens
  CDR3 for beta chain variable domain of TCR clone 88865 (TRBV5-1, TRBJ2-6)
CASSLDTSGANVLTF

SEQ ID NO: 177731 - protein, 15 aa, Homo sapiens
  CDR3 for alpha chain variable domain of TCR clone 88866 (TRAV13-1, TRAJ44)
CAASKGGGTASKLTF

SEQ ID NO: 177732 - protein, 14 aa, Homo sapiens
  CDR3 for beta chain variable domain of TCR clone 88866 (TRBV7-2, TRBJ2-5)
CASSPRGSSETQYF

SEQ ID NO: 177733 - protein, 14 aa, Homo sapiens
  CDR3 for alpha chain variable domain of TCR clone 88867 (TRAV8-4, TRAJ13)
CAVTLSGGYQKVTF

SEQ ID NO: 177734 - protein, 14 aa, Homo sapiens
  CDR3 for beta chain variable domain of TCR clone 88867 (TRBV7-2, TRBJ1-2)
CASSQPGSTYGYTF

SEQ ID NO: 177735 - protein, 13 aa, Homo sapiens
  CDR3 for alpha chain variable domain of TCR clone 88868 (TRAV3, TRAJ27)
CAVRPLGAGKSTV

SEQ ID NO: 177736 - protein, 13 aa, Homo sapiens
  CDR3 for beta chain variable domain of TCR clone 88868 (TRBV7-9, TRBJ2-3)
CASSPGSTDKQYF

SEQ ID NO: 177737 - protein, 16 aa, Homo sapiens
  CDR3 for alpha chain variable domain of TCR clone 88869 (TRAV4, TRAJ5)
CLVGPDHGHGPESTYF

SEQ ID NO: 177738 - protein, 15 aa, Homo sapiens
  CDR3 for beta chain variable domain of TCR clone 88869 (TRBV27, TRBJ2-5)
CASSLIPSGGETQYF

SEQ ID NO: 177739 - protein, 14 aa, Homo sapiens
  CDR3 for alpha chain variable domain of TCR clone 88870 (TRAV12-3, TRAJ10)
SHLPLTGGGNKLTF

SEQ ID NO: 177740 - protein, 13 aa, Homo sapiens
  CDR3 for beta chain variable domain of TCR clone 88870 (TRBV19, TRBJ2-7)
CASSPRQSYEQYF

SEQ ID NO: 177741 - protein, 12 aa, Homo sapiens
  CDR3 for alpha chain variable domain of TCR clone 88871 (TRAV17, TRAJ4)
CATDGGYNKLIF

SEQ ID NO: 177742 - protein, 13 aa, Homo sapiens
  CDR3 for beta chain variable domain of TCR clone 88871 (TRBV29-1, TRBJ2-2)
CSTTGVNTGEPFF

SEQ ID NO: 177743 - protein, 12 aa, Homo sapiens
  CDR3 for alpha chain variable domain of TCR clone 88872 (TRAV12-2, TRAJ36)
CAAPRGANNLFF

SEQ ID NO: 177744 - protein, 12 aa, Homo sapiens
  CDR3 for beta chain variable domain of TCR clone 88872 (TRBV28, TRBJ2-1)
CASSRLVGEQFF

SEQ ID NO: 177745 - protein, 15 aa, Homo sapiens
  CDR3 for alpha chain variable domain of TCR clone 88873 (TRAV26-1, TRAJ44)
CIVRIGTGTTSKLTF

SEQ ID NO: 177746 - protein, 15 aa, Homo sapiens
  CDR3 for beta chain variable domain of TCR clone 88873 (TRBV7-6, TRBJ2-1)
CASSSLAGEGNEQFF

SEQ ID NO: 177747 - protein, 14 aa, Homo sapiens
  CDR3 for alpha chain variable domain of TCR clone 88874 (TRAV29/DV5, TRAJ45)
CAASFRGGADGLTF

SEQ ID NO: 177748 - protein, 11 aa, Homo sapiens
  CDR3 for beta chain variable domain of TCR clone 88874 (TRBV11-2, TRBJ2-2)
CASSLTGELFF

SEQ ID NO: 177749 - protein, 17 aa, Homo sapiens
  CDR3 for alpha chain variable domain of TCR clone 88875 (TRAV3, TRAJ6)
CAVRDGPRAGGSYIPTF

SEQ ID NO: 177750 - protein, 13 aa, Homo sapiens
  CDR3 for beta chain variable domain of TCR clone 88875 (TRBV12-4, TRBJ1-5)
CASSPDRAQPQHF

SEQ ID NO: 177751 - protein, 14 aa, Homo sapiens
  CDR3 for alpha chain variable domain of TCR clone 88876 (TRAV14/DV4, TRAJ54)
CAMREAPGAQKLVF

SEQ ID NO: 177752 - protein, 15 aa, Homo sapiens
  CDR3 for beta chain variable domain of TCR clone 88876 (TRBV5-1, TRBJ2-7)
CASSLNGGSAREQYF

SEQ ID NO: 177753 - protein, 13 aa, Homo sapiens
  CDR3 for alpha chain variable domain of TCR clone 88877 (TRAV2, TRAJ40)
CTVVTSGTYKYIF

SEQ ID NO: 177754 - protein, 14 aa, Homo sapiens
  CDR3 for beta chain variable domain of TCR clone 88877 (TRBV19, TRBJ2-1)
CASPTVVLSGEQFF

SEQ ID NO: 177755 - protein, 14 aa, Homo sapiens
  CDR3 for alpha chain variable domain of TCR clone 88878 (TRAV13-1, TRAJ44)
CAAKATGTASKLTF

SEQ ID NO: 177756 - protein, 13 aa, Homo sapiens
  CDR3 for beta chain variable domain of TCR clone 88878 (TRBV10-3, TRBJ1-2)
CAISERDSYGYTF

SEQ ID NO: 177757 - protein, 16 aa, Homo sapiens
  CDR3 for alpha chain variable domain of TCR clone 88879 (TRAV3, TRAJ37)
CAVRGKGSGNTGKLIF

SEQ ID NO: 177758 - protein, 20 aa, Homo sapiens
  CDR3 for beta chain variable domain of TCR clone 88879 (TRBV7-8, TRBJ2-2)
CASSHLFPGPTIHITGELFL

SEQ ID NO: 177759 - protein, 15 aa, Homo sapiens
  CDR3 for alpha chain variable domain of TCR clone 88880 (TRAV21, TRAJ32)
CAAAPYGGATHKLIF

SEQ ID NO: 177760 - protein, 17 aa, Homo sapiens
  CDR3 for beta chain variable domain of TCR clone 88880 (TRBV18, TRBJ2-3)
CASSPFGDGGFTDTQYF

SEQ ID NO: 177761 - protein, 17 aa, Homo sapiens
  CDR3 for alpha chain variable domain of TCR clone 88881 (TRAV4, TRAJ18)
CLVGERSVGSTLGRLYF

SEQ ID NO: 177762 - protein, 12 aa, Homo sapiens
  CDR3 for beta chain variable domain of TCR clone 88881 (TRBV11-2, TRBJ2-2)
CASSLGGGELFF

SEQ ID NO: 177763 - protein, 17 aa, Homo sapiens
  CDR3 for alpha chain variable domain of TCR clone 88882 (TRAV13-1, TRAJ52)
CAAGRNAGGTNYGKLTF

SEQ ID NO: 177764 - protein, 13 aa, Homo sapiens
  CDR3 for beta chain variable domain of TCR clone 88882 (TRBV7-2, TRBJ1-1)
CASNLKGAKVASF

SEQ ID NO: 177765 - protein, 14 aa, Homo sapiens
  CDR3 for alpha chain variable domain of TCR clone 88883 (TRAV1-2, TRAJ8)
CAVREDTGFQKLVF

SEQ ID NO: 177766 - protein, 16 aa, Homo sapiens
  CDR3 for beta chain variable domain of TCR clone 88883 (TRBV29-1, TRBJ1-2)
CSVEANRDIANYGYAF

SEQ ID NO: 177767 - protein, 14 aa, Homo sapiens
  CDR3 for alpha chain variable domain of TCR clone 88884 (TRAV12-1, TRAJ54)
CVVNIYQGAQKLVF

SEQ ID NO: 177768 - protein, 16 aa, Homo sapiens
  CDR3 for beta chain variable domain of TCR clone 88884 (TRBV20-1, TRBJ2-3)
CSAVRDRGPIADTQYF

SEQ ID NO: 177769 - protein, 12 aa, Homo sapiens
  CDR3 for alpha chain variable domain of TCR clone 88885 (TRAV8-4, TRAJ37)
CAKSSNTGKLIF

SEQ ID NO: 177770 - protein, 16 aa, Homo sapiens
  CDR3 for beta chain variable domain of TCR clone 88885 (TRBV5-5, TRBJ1-2)
CASSPTWGRGLYGYTF

SEQ ID NO: 177771 - protein, 15 aa, Homo sapiens
  CDR3 for alpha chain variable domain of TCR clone 88886 (TRAV26-1, TRAJ29)
CIVRVEGSGNTPLVF

SEQ ID NO: 177772 - protein, 18 aa, Homo sapiens
  CDR3 for beta chain variable domain of TCR clone 88886 (TRBV15, TRBJ2-3)
CATSRDGARSWDTDTQYF

SEQ ID NO: 177773 - protein, 17 aa, Homo sapiens
  CDR3 for alpha chain variable domain of TCR clone 88887 (TRAV17, TRAJ7)
CATLGRRAFGKGNQVVV

SEQ ID NO: 177774 - protein, 13 aa, Homo sapiens
  CDR3 for beta chain variable domain of TCR clone 88887 (TRBV12-4, TRBJ2-7)
CASSLERVREQYF

SEQ ID NO: 177775 - protein, 16 aa, Homo sapiens
  CDR3 for alpha chain variable domain of TCR clone 88888 (TRAV3, TRAJ21)
CAVRDIERGNFNKFHF

SEQ ID NO: 177776 - protein, 16 aa, Homo sapiens
  CDR3 for beta chain variable domain of TCR clone 88888 (TRBV12-4, TRBJ1-5)
CASSRPVGGSNQPQHF

SEQ ID NO: 177777 - protein, 14 aa, Homo sapiens
  CDR3 for alpha chain variable domain of TCR clone 88889 (TRAV17, TRAJ22)
CATSPSGSARQLTF

SEQ ID NO: 177778 - protein, 15 aa, Homo sapiens
  CDR3 for beta chain variable domain of TCR clone 88889 (TRBV6-3, TRBJ2-7)
RASSSPGTVFYEQYF

SEQ ID NO: 177779 - protein, 12 aa, Homo sapiens
  CDR3 for alpha chain variable domain of TCR clone 88890 (TRAV2, TRAJ9)
CAVGAGGFKTIF

SEQ ID NO: 177780 - protein, 16 aa, Homo sapiens
  CDR3 for beta chain variable domain of TCR clone 88890 (TRBV13, TRBJ2-2)
CATSPRTGEHTGELFF

SEQ ID NO: 177781 - protein, 18 aa, Homo sapiens
  CDR3 for alpha chain variable domain of TCR clone 88891 (TRAV26-1, TRAJ23)
CIVRVGLEVWNQGRKLIF

SEQ ID NO: 177782 - protein, 13 aa, Homo sapiens
  CDR3 for beta chain variable domain of TCR clone 88891 (TRBV7-2, TRBJ2-2)
CASSLAVTGELFF

SEQ ID NO: 177783 - protein, 16 aa, Homo sapiens
  CDR3 for alpha chain variable domain of TCR clone 88892 (TRAV30, TRAJ24)
CGKEIVDAGSWGKFQF

SEQ ID NO: 177784 - protein, 14 aa, Homo sapiens
  CDR3 for beta chain variable domain of TCR clone 88892 (TRBV12-5, TRBJ2-5)
CASGSRTHQETQYF

SEQ ID NO: 177785 - protein, 15 aa, Homo sapiens
  CDR3 for alpha chain variable domain of TCR clone 88893 (TRAV20, TRAJ53)
CAVQASGGSNYKLTF

SEQ ID NO: 177786 - protein, 12 aa, Homo sapiens
  CDR3 for beta chain variable domain of TCR clone 88893 (TRBV7-7, TRBJ2-5)
CASSLSQETQYF

SEQ ID NO: 177787 - protein, 13 aa, Homo sapiens
  CDR3 for alpha chain variable domain of TCR clone 88894 (TRAV1-2, TRAJ9)
CAALNTGGFKTSF

SEQ ID NO: 177788 - protein, 13 aa, Homo sapiens
  CDR3 for beta chain variable domain of TCR clone 88894 (TRBV19, TRBJ1-2)
CASSVPGQDGYTF

SEQ ID NO: 177789 - protein, 13 aa, Homo sapiens
  CDR3 for alpha chain variable domain of TCR clone 88895 (TRAV27, TRAJ49)
SAPRPYTGNQFYF

SEQ ID NO: 177790 - protein, 18 aa, Homo sapiens
  CDR3 for beta chain variable domain of TCR clone 88895 (TRBV7-3, TRBJ2-5)
CASSLGGAAQGRWETQYF

SEQ ID NO: 177791 - protein, 13 aa, Homo sapiens
  CDR3 for alpha chain variable domain of TCR clone 88896 (TRAV36/DV7, TRAJ53)
CALSGGSNDKLTF

SEQ ID NO: 177792 - protein, 13 aa, Homo sapiens
  CDR3 for beta chain variable domain of TCR clone 88896 (TRBV28, TRBJ2-7)
CASSLPSRYEQYF

SEQ ID NO: 177793 - protein, 13 aa, Homo sapiens
  CDR3 for alpha chain variable domain of TCR clone 88897 (TRAV8-2, TRAJ49)
CVVTPNTGNQFYF

SEQ ID NO: 177794 - protein, 15 aa, Homo sapiens
  CDR3 for beta chain variable domain of TCR clone 88897 (TRBV11-2, TRBJ2-1)
CASGLTSGGYNEQFF

SEQ ID NO: 177795 - protein, 14 aa, Homo sapiens
  CDR3 for alpha chain variable domain of TCR clone 88898 (TRAV8-4, TRAJ48)
CAVSETFGNEKLTF

SEQ ID NO: 177796 - protein, 14 aa, Homo sapiens
  CDR3 for beta chain variable domain of TCR clone 88898 (TRBV13, TRBJ2-7)
CASSLKGASYEHYF

SEQ ID NO: 177797 - protein, 16 aa, Homo sapiens
  CDR3 for alpha chain variable domain of TCR clone 88899 (TRAV17, TRAJ53)
CATDALSGGSNYKLTF

SEQ ID NO: 177798 - protein, 12 aa, Homo sapiens
  CDR3 for beta chain variable domain of TCR clone 88899 (TRBV5-1, TRBJ2-7)
CASSFRGYEQYL

SEQ ID NO: 177799 - protein, 12 aa, Homo sapiens
  CDR3 for alpha chain variable domain of TCR clone 88900 (TRAV12-3, TRAJ40)
CAMSSGTYKYIF

SEQ ID NO: 177800 - protein, 15 aa, Homo sapiens
  CDR3 for beta chain variable domain of TCR clone 88900 (TRBV7-3, TRBJ2-2)
CASSETGQGTGKLFF

SEQ ID NO: 177801 - protein, 14 aa, Homo sapiens
  CDR3 for alpha chain variable domain of TCR clone 88901 (TRAV26-1, TRAJ38)
CIADNAGNNRKLIG

SEQ ID NO: 177802 - protein, 14 aa, Homo sapiens
  CDR3 for beta chain variable domain of TCR clone 88901 (TRBV4-1, TRBJ2-2)
CASSQAVNTGELFF

SEQ ID NO: 177803 - protein, 12 aa, Homo sapiens
  CDR3 for alpha chain variable domain of TCR clone 88902 (TRAV12-2, TRAJ10)
WGVTGGGNKLTF

SEQ ID NO: 177804 - protein, 14 aa, Homo sapiens
  CDR3 for beta chain variable domain of TCR clone 88902 (TRBV4-2, TRBJ2-1)
CASGLDRAYNEQFF

SEQ ID NO: 177805 - protein, 15 aa, Homo sapiens
  CDR3 for alpha chain variable domain of TCR clone 88903 (TRAV26-1, TRAJ29)
CVVRVEGSGNTPLVF

SEQ ID NO: 177806 - protein, 15 aa, Homo sapiens
  CDR3 for beta chain variable domain of TCR clone 88903 (TRBV7-9, TRBJ1-5)
CARGQGHQPNQPQHF

SEQ ID NO: 177807 - protein, 15 aa, Homo sapiens
  CDR3 for alpha chain variable domain of TCR clone 88904 (TRAV4, TRAJ39)
CLVGPNNNAGNMLTF

SEQ ID NO: 177808 - protein, 13 aa, Homo sapiens
  CDR3 for beta chain variable domain of TCR clone 88904 (TRBV11-2, TRBJ2-5)
CASSSRGEETQYF

SEQ ID NO: 177809 - protein, 14 aa, Homo sapiens
  CDR3 for alpha chain variable domain of TCR clone 88905 (TRAV9-2, TRAJ39)
CALYIYNAGNMLTF

SEQ ID NO: 177810 - protein, 17 aa, Homo sapiens
  CDR3 for beta chain variable domain of TCR clone 88905 (TRBV11-2, TRBJ2-1)
CASSLYPPGVGYNEQFF

SEQ ID NO: 177811 - protein, 13 aa, Homo sapiens
  CDR3 for alpha chain variable domain of TCR clone 88906 (TRAV12-1, TRAJ39)
CVALNNAGNMLTF

SEQ ID NO: 177812 - protein, 18 aa, Homo sapiens
  CDR3 for beta chain variable domain of TCR clone 88906 (TRBV4-1, TRBJ1-5)
CASSQDPRGQGLNQPQHF

SEQ ID NO: 177813 - protein, 12 aa, Homo sapiens
  CDR3 for alpha chain variable domain of TCR clone 88907 (TRAV5, TRAJ27)
CAEITNAGKSPF

SEQ ID NO: 177814 - protein, 15 aa, Homo sapiens
  CDR3 for beta chain variable domain of TCR clone 88907 (TRBV11-2, TRBJ1-2)
CASSLEGVQRNGYTF

SEQ ID NO: 177815 - protein, 14 aa, Homo sapiens
  CDR3 for alpha chain variable domain of TCR clone 88908 (TRAV13-1, TRAJ9)
CAASALTGGFKTIV

SEQ ID NO: 177816 - protein, 16 aa, Homo sapiens
  CDR3 for beta chain variable domain of TCR clone 88908 (TRBV7-8, TRBJ2-4)
CASSAERTLAKNIQYF

SEQ ID NO: 177817 - protein, 15 aa, Homo sapiens
  CDR3 for alpha chain variable domain of TCR clone 88909 (TRAV3, TRAJ13)
CAVGVYSGGYQKVTF

SEQ ID NO: 177818 - protein, 14 aa, Homo sapiens
  CDR3 for beta chain variable domain of TCR clone 88909 (TRBV6-1, TRBJ1-3)
CASVQGGGGNTIYF

SEQ ID NO: 177819 - protein, 13 aa, Homo sapiens
  CDR3 for alpha chain variable domain of TCR clone 88910 (TRAV16, TRAJ10)
CAPAREEETNSPL

SEQ ID NO: 177820 - protein, 12 aa, Homo sapiens
  CDR3 for beta chain variable domain of TCR clone 88910 (TRBV11-3, TRBJ1-1)
CASSHRQGEAFF

SEQ ID NO: 177821 - protein, 12 aa, Homo sapiens
  CDR3 for alpha chain variable domain of TCR clone 88911 (TRAV16, TRAJ10)
CAFTGGGNKLTL

SEQ ID NO: 177822 - protein, 14 aa, Homo sapiens
  CDR3 for beta chain variable domain of TCR clone 88911 (TRBV12-4, TRBJ1-5)
CASSPTGPRGGTYF

SEQ ID NO: 177823 - protein, 14 aa, Homo sapiens
  CDR3 for alpha chain variable domain of TCR clone 88912 (TRAV20, TRAJ56)
CAVQFGGANSKLTF

SEQ ID NO: 177824 - protein, 14 aa, Homo sapiens
  CDR3 for beta chain variable domain of TCR clone 88912 (TRBV20-1, TRBJ2-7)
CSAKRGRSAYEQFF

SEQ ID NO: 177825 - protein, 13 aa, Homo sapiens
  CDR3 for alpha chain variable domain of TCR clone 88913 (TRAV12-3, TRAJ48)
SAMSLVGNEKLTF

SEQ ID NO: 177826 - protein, 11 aa, Homo sapiens
  CDR3 for beta chain variable domain of TCR clone 88913 (TRBV7-2, TRBJ2-7)
CASSSGLWQYF

SEQ ID NO: 177827 - protein, 16 aa, Homo sapiens
  CDR3 for alpha chain variable domain of TCR clone 88914 (TRAV8-3, TRAJ22)
CAVDLLDPGSARQLTF

SEQ ID NO: 177828 - protein, 14 aa, Homo sapiens
  CDR3 for beta chain variable domain of TCR clone 88914 (TRBV11-2, TRBJ2-7)
CASSLELEGYEQYF

SEQ ID NO: 177829 - protein, 14 aa, Homo sapiens
  CDR3 for alpha chain variable domain of TCR clone 88915 (TRAV12-2, TRAJ13)
CAVKKTGGYQKVTF

SEQ ID NO: 177830 - protein, 13 aa, Homo sapiens
  CDR3 for beta chain variable domain of TCR clone 88915 (TRBV13, TRBJ2-5)
CASSPEVGETQYF

SEQ ID NO: 177831 - protein, 11 aa, Homo sapiens
  CDR3 for alpha chain variable domain of TCR clone 88916 (TRAV17, TRAJ9)
CGFTGGFITIF

SEQ ID NO: 177832 - protein, 14 aa, Homo sapiens
  CDR3 for beta chain variable domain of TCR clone 88916 (TRBV7-9, TRBJ2-2)
CASSLVQDTGELFF

SEQ ID NO: 177833 - protein, 13 aa, Homo sapiens
  CDR3 for alpha chain variable domain of TCR clone 88917 (TRAV16, TRAJ28)
FAPTGAGSYQLTF

SEQ ID NO: 177834 - protein, 16 aa, Homo sapiens
  CDR3 for beta chain variable domain of TCR clone 88917 (TRBV28, TRBJ1-5)
CASSLTGQGWNQPQHF

SEQ ID NO: 177835 - protein, 13 aa, Homo sapiens
  CDR3 for alpha chain variable domain of TCR clone 88918 (TRAV26-1, )
CIVSHRVEGFWNQ

SEQ ID NO: 177836 - protein, 14 aa, Homo sapiens
  CDR3 for beta chain variable domain of TCR clone 88918 (TRBV19, TRBJ2-1)
CASPTFVLSGEQFF

SEQ ID NO: 177837 - protein, 20 aa, Homo sapiens
  CDR3 for alpha chain variable domain of TCR clone 88919 (TRAV25, TRAJ21)
TATQTTDVGTYPLSFNKFYF

SEQ ID NO: 177838 - protein, 14 aa, Homo sapiens
  CDR3 for beta chain variable domain of TCR clone 88919 (TRBV6-1, TRBJ2-1)
CASAKDGFHNEQFF

SEQ ID NO: 177839 - protein, 14 aa, Homo sapiens
  CDR3 for alpha chain variable domain of TCR clone 88920 (TRAV13-1, TRAJ44)
CAAKAASTASKLTF

SEQ ID NO: 177840 - protein, 13 aa, Homo sapiens
  CDR3 for beta chain variable domain of TCR clone 88920 (TRBV5-5, TRBJ1-2)
CASSFWRGEDYTF

SEQ ID NO: 177841 - protein, 12 aa, Homo sapiens
  CDR3 for alpha chain variable domain of TCR clone 88921 (TRAV35, TRAJ31)
CAAASNNARLMF

SEQ ID NO: 177842 - protein, 14 aa, Homo sapiens
  CDR3 for beta chain variable domain of TCR clone 88921 (TRBV12-4, TRBJ2-7)
CASSLTGRAYEQYF

SEQ ID NO: 177843 - protein, 12 aa, Homo sapiens
  CDR3 for alpha chain variable domain of TCR clone 88922 (TRAV2, TRAJ34)
CSVERNTDKLIF

SEQ ID NO: 177844 - protein, 14 aa, Homo sapiens
  CDR3 for beta chain variable domain of TCR clone 88922 (TRBV7-9, TRBJ2-1)
CASSDNSGYNEQFF

SEQ ID NO: 177845 - protein, 16 aa, Homo sapiens
  CDR3 for alpha chain variable domain of TCR clone 88923 (TRAV3, TRAJ21)
CAVRDIERGNFNKFYF

SEQ ID NO: 177846 - protein, 13 aa, Homo sapiens
  CDR3 for beta chain variable domain of TCR clone 88923 (TRBV27, TRBJ2-7)
CASSLTTGYEQYS

SEQ ID NO: 177847 - protein, 17 aa, Homo sapiens
  CDR3 for alpha chain variable domain of TCR clone 88924 (TRAV26-2, TRAJ42)
CILRDVGYGGSQGNLIF

SEQ ID NO: 177848 - protein, 16 aa, Homo sapiens
  CDR3 for beta chain variable domain of TCR clone 88924 (TRBV12-4, TRBJ2-7)
CASSLLGGTGTYEQYF

SEQ ID NO: 177849 - protein, 14 aa, Homo sapiens
  CDR3 for alpha chain variable domain of TCR clone 88925 (TRAV16, TRAJ42)
FALLAGGSQGNLIF

SEQ ID NO: 177850 - protein, 13 aa, Homo sapiens
  CDR3 for beta chain variable domain of TCR clone 88925 (TRBV7-9, TRBJ1-2)
CASSLKQNYGYTF

SEQ ID NO: 177851 - protein, 14 aa, Homo sapiens
  CDR3 for alpha chain variable domain of TCR clone 88926 (TRAV23/DV6, TRAJ40)
CAASLTSGTYKYIF

SEQ ID NO: 177852 - protein, 14 aa, Homo sapiens
  CDR3 for beta chain variable domain of TCR clone 88926 (TRBV7-3, TRBJ2-2)
CASSSGGYTGELFF

SEQ ID NO: 177853 - protein, 12 aa, Homo sapiens
  CDR3 for alpha chain variable domain of TCR clone 88927 (TRAV12-3, TRAJ17)
CAMTLTGNKLTF

SEQ ID NO: 177854 - protein, 15 aa, Homo sapiens
  CDR3 for beta chain variable domain of TCR clone 88927 (TRBV5-1, TRBJ2-3)
CASSVTSGPTDTQYF

SEQ ID NO: 177855 - protein, 12 aa, Homo sapiens
  CDR3 for alpha chain variable domain of TCR clone 88928 (TRAV3, TRAJ26)
CAVRDYGQNFVF

SEQ ID NO: 177856 - protein, 16 aa, Homo sapiens
  CDR3 for beta chain variable domain of TCR clone 88928 (TRBV11-2, TRBJ1-2)
CASSPSGREANYRYTF

SEQ ID NO: 177857 - protein, 15 aa, Homo sapiens
  CDR3 for alpha chain variable domain of TCR clone 88929 (TRAV27, TRAJ38)
CAARRNAGNNRKLIW

SEQ ID NO: 177858 - protein, 13 aa, Homo sapiens
  CDR3 for beta chain variable domain of TCR clone 88929 (TRBV12-5, TRBJ2-3)
CASGDRQSETQYF

SEQ ID NO: 177859 - protein, 15 aa, Homo sapiens
  CDR3 for alpha chain variable domain of TCR clone 88930 (TRAV34, TRAJ38)
CGADFTPGNNRKLIW

SEQ ID NO: 177860 - protein, 16 aa, Homo sapiens
  CDR3 for beta chain variable domain of TCR clone 88930 (TRBV12-5, TRBJ2-5)
CASGPRTSGNRETQYF

SEQ ID NO: 177861 - protein, 11 aa, Homo sapiens
  CDR3 for alpha chain variable domain of TCR clone 88931 (TRAV3, TRAJ21)
CAVGNFNKFYF

SEQ ID NO: 177862 - protein, 16 aa, Homo sapiens
  CDR3 for beta chain variable domain of TCR clone 88931 (TRBV2, TRBJ2-1)
CASSVGGSLSYNEQFF

SEQ ID NO: 177863 - protein, 14 aa, Homo sapiens
  CDR3 for alpha chain variable domain of TCR clone 88932 (TRAV12-3, TRAJ5)
CAMSADTGRRALTF

SEQ ID NO: 177864 - protein, 14 aa, Homo sapiens
  CDR3 for beta chain variable domain of TCR clone 88932 (TRBV13, TRBJ2-1)
CASSTALSYNEQFF

SEQ ID NO: 177865 - protein, 17 aa, Homo sapiens
  CDR3 for alpha chain variable domain of TCR clone 88933 (TRAV3, TRAJ38)
CAVRDCLNAGNNRKLIW

SEQ ID NO: 177866 - protein, 20 aa, Homo sapiens
  CDR3 for beta chain variable domain of TCR clone 88933 (TRBV19, TRBJ2-1)
CASSISRTVTSTRLNNEQFF

SEQ ID NO: 177867 - protein, 21 aa, Homo sapiens
  CDR3 for alpha chain variable domain of TCR clone 88934 (TRAV8-4, TRAJ26)
CAVSSSMVRILSLVPEPDCPF

SEQ ID NO: 177868 - protein, 14 aa, Homo sapiens
  CDR3 for beta chain variable domain of TCR clone 88934 (TRBV18, TRBJ2-5)
CASSPRASSETQYF

SEQ ID NO: 177869 - protein, 12 aa, Homo sapiens
  CDR3 for alpha chain variable domain of TCR clone 88935 (TRAV13-1, TRAJ11)
CAASKGYSTLTF

SEQ ID NO: 177870 - protein, 14 aa, Homo sapiens
  CDR3 for beta chain variable domain of TCR clone 88935 (TRBV12-4, TRBJ2-7)
CASSPRQELYEQYF

SEQ ID NO: 177871 - protein, 13 aa, Homo sapiens
  CDR3 for alpha chain variable domain of TCR clone 88936 (TRAV12-2, TRAJ3)
CAGCESSASKIIF

SEQ ID NO: 177872 - protein, 16 aa, Homo sapiens
  CDR3 for beta chain variable domain of TCR clone 88936 (TRBV13, TRBJ2-2)
CASSPRTGEHTGELFF

SEQ ID NO: 177873 - protein, 17 aa, Homo sapiens
  CDR3 for alpha chain variable domain of TCR clone 88937 (TRAV8-6, TRAJ58)
CAVSSWVGETSGSRLTF

SEQ ID NO: 177874 - protein, 14 aa, Homo sapiens
  CDR3 for beta chain variable domain of TCR clone 88937 (TRBV4-2, TRBJ2-1)
CASGQDRAYNEQFF

SEQ ID NO: 177875 - protein, 15 aa, Homo sapiens
  CDR3 for alpha chain variable domain of TCR clone 88938 (TRAV8-3, TRAJ23)
CAVGDRYNQGGKLIF

SEQ ID NO: 177876 - protein, 22 aa, Homo sapiens
  CDR3 for beta chain variable domain of TCR clone 88938 (TRBV29-1, TRBJ2-5)
TVSNMSPEDSSIYLGSAGTQYF

SEQ ID NO: 177877 - protein, 16 aa, Homo sapiens
  CDR3 for alpha chain variable domain of TCR clone 88939 (TRAV23/DV6, TRAJ9)
CAASIGGNTGGFKTIF

SEQ ID NO: 177878 - protein, 16 aa, Homo sapiens
  CDR3 for beta chain variable domain of TCR clone 88939 (TRBV7-3, TRBJ2-1)
CASSLEGYRSYNEQFF

SEQ ID NO: 177879 - protein, 12 aa, Homo sapiens
  CDR3 for alpha chain variable domain of TCR clone 88940 (TRAV3, TRAJ31)
CALRDGNARLMF

SEQ ID NO: 177880 - protein, 18 aa, Homo sapiens
  CDR3 for beta chain variable domain of TCR clone 88940 (TRBV7-2, TRBJ2-3)
CASSLKREGSGITDTQYF

SEQ ID NO: 177881 - protein, 15 aa, Homo sapiens
  CDR3 for alpha chain variable domain of TCR clone 88941 (TRAV27, TRAJ38)
CAGRFNAGNNRKLIW

SEQ ID NO: 177882 - protein, 14 aa, Homo sapiens
  CDR3 for beta chain variable domain of TCR clone 88941 (TRBV5-4, TRBJ1-1)
CASSLDSRRDEAFF

SEQ ID NO: 177883 - protein, 13 aa, Homo sapiens
  CDR3 for alpha chain variable domain of TCR clone 88942 (TRAV3, TRAJ21)
CAVREPDFNKFYF

SEQ ID NO: 177884 - protein, 16 aa, Homo sapiens
  CDR3 for beta chain variable domain of TCR clone 88942 (TRBV6-1, TRBJ1-2)
CASSGAWQGRSHGYTF

SEQ ID NO: 177885 - protein, 14 aa, Homo sapiens
  CDR3 for alpha chain variable domain of TCR clone 88943 (TRAV29/DV5, TRAJ32)
CAAAYGGATNKLIF

SEQ ID NO: 177886 - protein, 15 aa, Homo sapiens
  CDR3 for beta chain variable domain of TCR clone 88943 (TRBV27, TRBJ2-7)
CAGSTAGTGSYEQYF

SEQ ID NO: 177887 - protein, 17 aa, Homo sapiens
  CDR3 for alpha chain variable domain of TCR clone 88944 (TRAV3, TRAJ6)
CAVRDGPRAGGSYIPTF

SEQ ID NO: 177888 - protein, 16 aa, Homo sapiens
  CDR3 for beta chain variable domain of TCR clone 88944 (TRBV7-8, TRBJ2-3)
CASNTEGQRETDTQYF

SEQ ID NO: 177889 - protein, 13 aa, Homo sapiens
  CDR3 for alpha chain variable domain of TCR clone 88945 (TRAV21, TRAJ20)
CAVGLRVDYKLSF

SEQ ID NO: 177890 - protein, 12 aa, Homo sapiens
  CDR3 for beta chain variable domain of TCR clone 88945 (TRBV3-1, TRBJ2-2)
CASSLFPGELFF

SEQ ID NO: 177891 - protein, 11 aa, Homo sapiens
  CDR3 for alpha chain variable domain of TCR clone 88946 (TRAV3, TRAJ13)
CAVTSYQKVTF

SEQ ID NO: 177892 - protein, 14 aa, Homo sapiens
  CDR3 for beta chain variable domain of TCR clone 88946 (TRBV25-1, TRBJ1-1)
CASTHLGGNTEAFF

SEQ ID NO: 177893 - protein, 14 aa, Homo sapiens
  CDR3 for alpha chain variable domain of TCR clone 88947 (TRAV2, TRAJ9)
CAVEDRSGGFKTIF

SEQ ID NO: 177894 - protein, 16 aa, Homo sapiens
  CDR3 for beta chain variable domain of TCR clone 88947 (TRBV12-5, TRBJ2-5)
CASGPQTSGNQETQYF

SEQ ID NO: 177895 - protein, 17 aa, Homo sapiens
  CDR3 for alpha chain variable domain of TCR clone 88948 (TRAV1-1, TRAJ11)
CAGYSTLTFGKWTMLLV

SEQ ID NO: 177896 - protein, 15 aa, Homo sapiens
  CDR3 for beta chain variable domain of TCR clone 88948 (TRBV6-5, TRBJ2-1)
CASRGDFDSYNEQFF

SEQ ID NO: 177897 - protein, 14 aa, Homo sapiens
  CDR3 for alpha chain variable domain of TCR clone 88949 (TRAV12-1, TRAJ43)
CVVNGRSNNNDMRF

SEQ ID NO: 177898 - protein, 13 aa, Homo sapiens
  CDR3 for beta chain variable domain of TCR clone 88949 (TRBV27, TRBJ1-1)
CASSLSIGDEAFF

SEQ ID NO: 177899 - protein, 17 aa, Homo sapiens
  CDR3 for alpha chain variable domain of TCR clone 88950 (TRAV3, TRAJ6)
CAVRDGPRAGGSYIPTF

SEQ ID NO: 177900 - protein, 16 aa, Homo sapiens
  CDR3 for beta chain variable domain of TCR clone 88950 (TRBV6-1, TRBJ1-2)
CASSGAWQGRSHGYTF

SEQ ID NO: 177901 - protein, 16 aa, Homo sapiens
  CDR3 for alpha chain variable domain of TCR clone 88951 (TRAV4, TRAJ9)
CLVGDPNRPGGFKTIF

SEQ ID NO: 177902 - protein, 14 aa, Homo sapiens
  CDR3 for beta chain variable domain of TCR clone 88951 (TRBV11-2, TRBJ1-2)
CASSLYRGNYGYTF

SEQ ID NO: 177903 - protein, 15 aa, Homo sapiens
  CDR3 for alpha chain variable domain of TCR clone 88952 (TRAV3, TRAJ20)
CAVRDIKLSDYKLSF

SEQ ID NO: 177904 - protein, 17 aa, Homo sapiens
  CDR3 for beta chain variable domain of TCR clone 88952 (TRBV7-9, TRBJ1-6)
CAAAPRDVEIHPSTLGT

SEQ ID NO: 177905 - protein, 17 aa, Homo sapiens
  CDR3 for alpha chain variable domain of TCR clone 88953 (TRAV3, TRAJ6)
CAVRDGPRAGGSYIPTV

SEQ ID NO: 177906 - protein, 20 aa, Homo sapiens
  CDR3 for beta chain variable domain of TCR clone 88953 (TRBV28, TRBJ2-1)
CASTPIGRSPGLAGGNEQFF

SEQ ID NO: 177907 - protein, 11 aa, Homo sapiens
  CDR3 for alpha chain variable domain of TCR clone 88954 (TRAV8-3, TRAJ15)
WAVGPGTALIF

SEQ ID NO: 177908 - protein, 18 aa, Homo sapiens
  CDR3 for beta chain variable domain of TCR clone 88954 (TRBV18, TRBJ2-3)
CASSYTSGAAGGTDTQYF

SEQ ID NO: 177909 - protein, 14 aa, Homo sapiens
  CDR3 for alpha chain variable domain of TCR clone 88955 (TRAV8-2, TRAJ4)
CVVSPSGGYNKLIF

SEQ ID NO: 177910 - protein, 16 aa, Homo sapiens
  CDR3 for beta chain variable domain of TCR clone 88955 (TRBV5-1, TRBJ1-3)
CASSPWAPSSGNTIYF

SEQ ID NO: 177911 - protein, 15 aa, Homo sapiens
  CDR3 for alpha chain variable domain of TCR clone 88956 (TRAV21, TRAJ45)
CAVSYSGGGDDGLTF

SEQ ID NO: 177912 - protein, 13 aa, Homo sapiens
  CDR3 for beta chain variable domain of TCR clone 88956 (TRBV20-1, TRBJ2-5)
CSAATELQETQYF

SEQ ID NO: 177913 - protein, 12 aa, Homo sapiens
  CDR3 for alpha chain variable domain of TCR clone 88957 (TRAV3, TRAJ43)
CAVRDPNNDMRF

SEQ ID NO: 177914 - protein, 15 aa, Homo sapiens
  CDR3 for beta chain variable domain of TCR clone 88957 (TRBV7-2, TRBJ1-3)
CASSLQAGGENTIYF

SEQ ID NO: 177915 - protein, 13 aa, Homo sapiens
  CDR3 for alpha chain variable domain of TCR clone 88958 (TRAV12-3, TRAJ9)
CAMSADGGFKTIF

SEQ ID NO: 177916 - protein, 13 aa, Homo sapiens
  CDR3 for beta chain variable domain of TCR clone 88958 (TRBV5-5, TRBJ1-2)
CASSFWRGEDYTF

SEQ ID NO: 177917 - protein, 11 aa, Homo sapiens
  CDR3 for alpha chain variable domain of TCR clone 88959 (TRAV12-1, TRAJ3)
CVVNRQQCFQD

SEQ ID NO: 177918 - protein, 20 aa, Homo sapiens
  CDR3 for beta chain variable domain of TCR clone 88959 (TRBV11-2, TRBJ2-7)
CASSPVGRERAGGPSYEQYF

SEQ ID NO: 177919 - protein, 18 aa, Homo sapiens
  CDR3 for alpha chain variable domain of TCR clone 88960 (TRAV13-1, TRAJ52)
CAAKNPNAGGTSYGKLTF

SEQ ID NO: 177920 - protein, 17 aa, Homo sapiens
  CDR3 for beta chain variable domain of TCR clone 88960 (TRBV11-2, TRBJ2-4)
CASSFLALGGAGDIQYF

SEQ ID NO: 177921 - protein, 11 aa, Homo sapiens
  CDR3 for alpha chain variable domain of TCR clone 88961 (TRAV12-1, TRAJ8)
CVVTGFQKLVF

SEQ ID NO: 177922 - protein, 14 aa, Homo sapiens
  CDR3 for beta chain variable domain of TCR clone 88961 (TRBV19, TRBJ2-1)
CASGKSTQYSEQFF

SEQ ID NO: 177923 - protein, 15 aa, Homo sapiens
  CDR3 for alpha chain variable domain of TCR clone 88962 (TRAV13-1, TRAJ44)
CAASRNTGTASKRTF

SEQ ID NO: 177924 - protein, 14 aa, Homo sapiens
  CDR3 for beta chain variable domain of TCR clone 88962 (TRBV11-2, TRBJ1-2)
CASSLYRGNYGYTF

SEQ ID NO: 177925 - protein, 15 aa, Homo sapiens
  CDR3 for alpha chain variable domain of TCR clone 88963 (TRAV21, TRAJ52)
CAVRGGGTSYGKLPF

SEQ ID NO: 177926 - protein, 15 aa, Homo sapiens
  CDR3 for beta chain variable domain of TCR clone 88963 (TRBV18, TRBJ1-5)
CASSPSDRSNQPQHF

SEQ ID NO: 177927 - protein, 12 aa, Homo sapiens
  CDR3 for alpha chain variable domain of TCR clone 88964 (TRAV12-1, TRAJ15)
CVVNQAGTALIF

SEQ ID NO: 177928 - protein, 13 aa, Homo sapiens
  CDR3 for beta chain variable domain of TCR clone 88964 (TRBV11-3, TRBJ1-2)
CASSLKQNYGYTF

SEQ ID NO: 177929 - protein, 11 aa, Homo sapiens
  CDR3 for alpha chain variable domain of TCR clone 88965 (TRAV12-2, TRAJ43)
CASPVGNDMRF

SEQ ID NO: 177930 - protein, 13 aa, Homo sapiens
  CDR3 for beta chain variable domain of TCR clone 88965 (TRBV7-3, TRBJ1-2)
CASSLKRGYGYTF

SEQ ID NO: 177931 - protein, 13 aa, Homo sapiens
  CDR3 for alpha chain variable domain of TCR clone 88966 (TRAV29/DV5, TRAJ31)
CAASRNNNARLMF

SEQ ID NO: 177932 - protein, 15 aa, Homo sapiens
  CDR3 for beta chain variable domain of TCR clone 88966 (TRBV12-4, TRBJ1-5)
CASSFFGGRDQPQHF

SEQ ID NO: 177933 - protein, 11 aa, Homo sapiens
  CDR3 for alpha chain variable domain of TCR clone 88967 (TRAV21, TRAJ27)
CAVRMQANQPL

SEQ ID NO: 177934 - protein, 14 aa, Homo sapiens
  CDR3 for beta chain variable domain of TCR clone 88967 (TRBV2, TRBJ2-1)
CASSDRAYYNEQFF

SEQ ID NO: 177935 - protein, 14 aa, Homo sapiens
  CDR3 for alpha chain variable domain of TCR clone 88968 (TRAV12-2, TRAJ13)
CAVKKTGGYQKVTF

SEQ ID NO: 177936 - protein, 16 aa, Homo sapiens
  CDR3 for beta chain variable domain of TCR clone 88968 (TRBV12-5, TRBJ2-5)
CASGPRTSGNQETQYL

SEQ ID NO: 177937 - protein, 14 aa, Homo sapiens
  CDR3 for alpha chain variable domain of TCR clone 88969 (TRAV8-3, TRAJ4)
CAVGAAGGYNKLIF

SEQ ID NO: 177938 - protein, 15 aa, Homo sapiens
  CDR3 for beta chain variable domain of TCR clone 88969 (TRBV2, TRBJ2-1)
CASSEEREGDNEQFF

SEQ ID NO: 177939 - protein, 16 aa, Homo sapiens
  CDR3 for alpha chain variable domain of TCR clone 88970 (TRAV13-1, TRAJ10)
CAAGYILTGGGNKLTF

SEQ ID NO: 177940 - protein, 15 aa, Homo sapiens
  CDR3 for beta chain variable domain of TCR clone 88970 (TRBV12-4, TRBJ2-7)
CASSQTGAISYGQYF

SEQ ID NO: 177941 - protein, 13 aa, Homo sapiens
  CDR3 for alpha chain variable domain of TCR clone 88971 (TRAV27, TRAJ49)
CAPRPYTGNQFYF

SEQ ID NO: 177942 - protein, 16 aa, Homo sapiens
  CDR3 for beta chain variable domain of TCR clone 88971 (TRBV4-1, TRBJ1-2)
SASSQDAGQVLYGYTF

SEQ ID NO: 177943 - protein, 18 aa, Homo sapiens
  CDR3 for alpha chain variable domain of TCR clone 88972 (TRAV21, TRAJ52)
CAVRPSPAGGTSYGKLTF

SEQ ID NO: 177944 - protein, 15 aa, Homo sapiens
  CDR3 for beta chain variable domain of TCR clone 88972 (TRBV19, TRBJ2-7)
CASSTSPTGSGEQYF

SEQ ID NO: 177945 - protein, 13 aa, Homo sapiens
  CDR3 for alpha chain variable domain of TCR clone 88973 (TRAV17, TRAJ15)
CATDARAGTALIF

SEQ ID NO: 177946 - protein, 15 aa, Homo sapiens
  CDR3 for beta chain variable domain of TCR clone 88973 (TRBV3-1, TRBJ1-2)
CASSPTRLPEGGYTF

SEQ ID NO: 177947 - protein, 12 aa, Homo sapiens
  CDR3 for alpha chain variable domain of TCR clone 88974 (TRAV12-3, TRAJ17)
CAMTLTGNKLTF

SEQ ID NO: 177948 - protein, 13 aa, Homo sapiens
  CDR3 for beta chain variable domain of TCR clone 88974 (TRBV7-2, TRBJ2-4)
CASSREHANIQYF

SEQ ID NO: 177949 - protein, 13 aa, Homo sapiens
  CDR3 for alpha chain variable domain of TCR clone 88975 (TRAV21, TRAJ36)
CAVIKTGVNNLFF

SEQ ID NO: 177950 - protein, 13 aa, Homo sapiens
  CDR3 for beta chain variable domain of TCR clone 88975 (TRBV29-1, TRBJ2-3)
CSATRGGRDTQYF

SEQ ID NO: 177951 - protein, 13 aa, Homo sapiens
  CDR3 for alpha chain variable domain of TCR clone 88976 (TRAV8-2, TRAJ49)
CVVSPSTGNQFYF

SEQ ID NO: 177952 - protein, 14 aa, Homo sapiens
  CDR3 for beta chain variable domain of TCR clone 88976 (TRBV11-2, TRBJ2-7)
CASSRSGGAGEHYF

SEQ ID NO: 177953 - protein, 11 aa, Homo sapiens
  CDR3 for alpha chain variable domain of TCR clone 88977 (TRAV35, TRAJ34)
CWARNTDKLIF

SEQ ID NO: 177954 - protein, 13 aa, Homo sapiens
  CDR3 for beta chain variable domain of TCR clone 88977 (TRBV4-1, TRBJ2-1)
CASSQAGGDEQFF

SEQ ID NO: 177955 - protein, 13 aa, Homo sapiens
  CDR3 for alpha chain variable domain of TCR clone 88978 (TRAV3, TRAJ27)
CAVRPLGAGKSTF

SEQ ID NO: 177956 - protein, 12 aa, Homo sapiens
  CDR3 for beta chain variable domain of TCR clone 88978 (TRBV7-9, TRBJ2-7)
CATGTDAYEQYF

SEQ ID NO: 177957 - protein, 12 aa, Homo sapiens
  CDR3 for alpha chain variable domain of TCR clone 88979 (TRAV13-1, TRAJ49)
CAAPNTGNQFYF

SEQ ID NO: 177958 - protein, 17 aa, Homo sapiens
  CDR3 for beta chain variable domain of TCR clone 88979 (TRBV25-1, TRBJ2-7)
CASSDAGVVFSSYEQYF

SEQ ID NO: 177959 - protein, 11 aa, Homo sapiens
  CDR3 for alpha chain variable domain of TCR clone 88980 (TRAV17, TRAJ43)
CATDNNNDMRF

SEQ ID NO: 177960 - protein, 13 aa, Homo sapiens
  CDR3 for beta chain variable domain of TCR clone 88980 (TRBV19, TRBJ1-5)
CASSMRGYQPQHF

SEQ ID NO: 177961 - protein, 12 aa, Homo sapiens
  CDR3 for alpha chain variable domain of TCR clone 88981 (TRAV21, TRAJ33)
CAKMDSNYQLIW

SEQ ID NO: 177962 - protein, 15 aa, Homo sapiens
  CDR3 for beta chain variable domain of TCR clone 88981 (TRBV28, TRBJ1-2)
CASIPQGSDDYGYTF

SEQ ID NO: 177963 - protein, 14 aa, Homo sapiens
  CDR3 for alpha chain variable domain of TCR clone 88982 (TRAV12-2, TRAJ13)
CAVKKTGGYQKVTL

SEQ ID NO: 177964 - protein, 15 aa, Homo sapiens
  CDR3 for beta chain variable domain of TCR clone 88982 (TRBV12-4, TRBJ2-5)
CASSPPTGLQETQYF

SEQ ID NO: 177965 - protein, 17 aa, Homo sapiens
  CDR3 for alpha chain variable domain of TCR clone 88983 (TRAV1-1, TRAJ31)
CLLLLRSYLNNNARLMF

SEQ ID NO: 177966 - protein, 13 aa, Homo sapiens
  CDR3 for beta chain variable domain of TCR clone 88983 (TRBV15, TRBJ1-6)
CATSGGLNSPLHF

SEQ ID NO: 177967 - protein, 13 aa, Homo sapiens
  CDR3 for alpha chain variable domain of TCR clone 88984 (TRAV12-3, TRAJ33)
CAMSVNSNYQLIW

SEQ ID NO: 177968 - protein, 14 aa, Homo sapiens
  CDR3 for beta chain variable domain of TCR clone 88984 (TRBV7-2, TRBJ1-5)
CASSTQGAGQPQHF

SEQ ID NO: 177969 - protein, 13 aa, Homo sapiens
  CDR3 for alpha chain variable domain of TCR clone 88985 (TRAV35, TRAJ42)
CAGFPGSQGNLIF

SEQ ID NO: 177970 - protein, 15 aa, Homo sapiens
  CDR3 for beta chain variable domain of TCR clone 88985 (TRBV4-1, TRBJ1-4)
CASSDTGGTNEKLFF

SEQ ID NO: 177971 - protein, 12 aa, Homo sapiens
  CDR3 for alpha chain variable domain of TCR clone 88986 (TRAV12-3, TRAJ40)
CAVSSGTSKYIF

SEQ ID NO: 177972 - protein, 15 aa, Homo sapiens
  CDR3 for beta chain variable domain of TCR clone 88986 (TRBV7-9, TRBJ2-7)
CASSPGGGLTYEQYF

SEQ ID NO: 177973 - protein, 17 aa, Homo sapiens
  CDR3 for alpha chain variable domain of TCR clone 88987 (TRAV13-1, TRAJ31)
CAPRNRLMFGDGTQLVV

SEQ ID NO: 177974 - protein, 12 aa, Homo sapiens
  CDR3 for beta chain variable domain of TCR clone 88987 (TRBV7-9, TRBJ2-7)
CASSLEGYEQYF

SEQ ID NO: 177975 - protein, 12 aa, Homo sapiens
  CDR3 for alpha chain variable domain of TCR clone 88988 (TRAV2, TRAJ31)
CAVEDNNARLML

SEQ ID NO: 177976 - protein, 16 aa, Homo sapiens
  CDR3 for beta chain variable domain of TCR clone 88988 (TRBV10-3, TRBJ2-1)
CAISGVGDGGGGEQFF

SEQ ID NO: 177977 - protein, 15 aa, Homo sapiens
  CDR3 for alpha chain variable domain of TCR clone 88989 (TRAV8-3, TRAJ45)
CASSYSGGGADGLTF

SEQ ID NO: 177978 - protein, 15 aa, Homo sapiens
  CDR3 for beta chain variable domain of TCR clone 88989 (TRBV10-3, TRBJ2-1)
CAIRNGTSGHNEQFF

SEQ ID NO: 177979 - protein, 13 aa, Homo sapiens
  CDR3 for alpha chain variable domain of TCR clone 88990 (TRAV12-1, TRAJ26)
CVVRRNYGQNFVF

SEQ ID NO: 177980 - protein, 14 aa, Homo sapiens
  CDR3 for beta chain variable domain of TCR clone 88990 (TRBV12-5, TRBJ2-5)
CASGSRTHQETQYF

SEQ ID NO: 177981 - protein, 14 aa, Homo sapiens
  CDR3 for alpha chain variable domain of TCR clone 88991 (TRAV12-2, TRAJ45)
CAVNKGGGADGLTF

SEQ ID NO: 177982 - protein, 14 aa, Homo sapiens
  CDR3 for beta chain variable domain of TCR clone 88991 (TRBV20-1, TRBJ1-1)
CSAKGGTANTEAFF

SEQ ID NO: 177983 - protein, 14 aa, Homo sapiens
  CDR3 for alpha chain variable domain of TCR clone 88992 (TRAV12-3, TRAJ29)
CAMSPYSGNTPLVF

SEQ ID NO: 177984 - protein, 15 aa, Homo sapiens
  CDR3 for beta chain variable domain of TCR clone 88992 (TRBV10-2, TRBJ2-6)
CASSEQGTGANVLTF

SEQ ID NO: 177985 - protein, 12 aa, Homo sapiens
  CDR3 for alpha chain variable domain of TCR clone 88993 (TRAV1-1, TRAJ39)
CAVPVVGNMLTF

SEQ ID NO: 177986 - protein, 15 aa, Homo sapiens
  CDR3 for beta chain variable domain of TCR clone 88993 (TRBV19, TRBJ1-6)
CASSTQGAVGTPLHF

SEQ ID NO: 177987 - protein, 15 aa, Homo sapiens
  CDR3 for alpha chain variable domain of TCR clone 88994 (TRAV21, TRAJ24)
CAARSSTDSWGKLRF

SEQ ID NO: 177988 - protein, 13 aa, Homo sapiens
  CDR3 for beta chain variable domain of TCR clone 88994 (TRBV11-3, TRBJ2-5)
CASSSTGEETQYF

SEQ ID NO: 177989 - protein, 15 aa, Homo sapiens
  CDR3 for alpha chain variable domain of TCR clone 88995 (TRAV26-1, TRAJ23)
CIVRVAGYQGGELIF

SEQ ID NO: 177990 - protein, 18 aa, Homo sapiens
  CDR3 for beta chain variable domain of TCR clone 88995 (TRBV28, TRBJ2-1)
CASSSTSGRANSYNEQFF

SEQ ID NO: 177991 - protein, 13 aa, Homo sapiens
  CDR3 for alpha chain variable domain of TCR clone 88996 (TRAV8-3, TRAJ4)
WVFYSGGYNKLIF

SEQ ID NO: 177992 - protein, 16 aa, Homo sapiens
  CDR3 for beta chain variable domain of TCR clone 88996 (TRBV7-8, TRBJ2-3)
CASSTEGQREADTQYF

SEQ ID NO: 177993 - protein, 14 aa, Homo sapiens
  CDR3 for alpha chain variable domain of TCR clone 88997 (TRAV25, TRAJ23)
CAGQGDNQGGKLIF

SEQ ID NO: 177994 - protein, 12 aa, Homo sapiens
  CDR3 for beta chain variable domain of TCR clone 88997 (TRBV7-9, TRBJ1-1)
CASRLVRGEASF

SEQ ID NO: 177995 - protein, 16 aa, Homo sapiens
  CDR3 for alpha chain variable domain of TCR clone 88998 (TRAV23/DV6, TRAJ48)
CAASGVVNFGNEKLTF

SEQ ID NO: 177996 - protein, 15 aa, Homo sapiens
  CDR3 for beta chain variable domain of TCR clone 88998 (TRBV20-1, TRBJ2-5)
CSAGLAGVSQATQYF

SEQ ID NO: 177997 - protein, 15 aa, Homo sapiens
  CDR3 for alpha chain variable domain of TCR clone 88999 (TRAV2, TRAJ11)
CAMGGRNSGYSTLTF

SEQ ID NO: 177998 - protein, 14 aa, Homo sapiens
  CDR3 for beta chain variable domain of TCR clone 88999 (TRBV4-1, TRBJ2-2)
CASSQAVNTGELFF

SEQ ID NO: 177999 - protein, 14 aa, Homo sapiens
  CDR3 for alpha chain variable domain of TCR clone 89000 (TRAV16, TRAJ33)
CALSAMDSNYQLIW

SEQ ID NO: 178000 - protein, 15 aa, Homo sapiens
  CDR3 for beta chain variable domain of TCR clone 89000 (TRBV7-9, TRBJ2-7)
CASSSSGLAVYEQYF

SEQ ID NO: 178001 - protein, 13 aa, Homo sapiens
  CDR3 for alpha chain variable domain of TCR clone 89001 (TRAV12-2, TRAJ20)
CAVYPSNDYKLSF

SEQ ID NO: 178002 - protein, 16 aa, Homo sapiens
  CDR3 for beta chain variable domain of TCR clone 89001 (TRBV7-2, TRBJ2-7)
CASSLVMGVGSYEQYF

SEQ ID NO: 178003 - protein, 14 aa, Homo sapiens
  CDR3 for alpha chain variable domain of TCR clone 89002 (TRAV12-2, TRAJ13)
CAVKKTGGYQKVTF

SEQ ID NO: 178004 - protein, 14 aa, Homo sapiens
  CDR3 for beta chain variable domain of TCR clone 89002 (TRBV7-9, TRBJ2-7)
CASSLSQGSYEQYF

SEQ ID NO: 178005 - protein, 12 aa, Homo sapiens
  CDR3 for alpha chain variable domain of TCR clone 89003 (TRAV13-2, TRAJ49)
CAETDTGNQFYF

SEQ ID NO: 178006 - protein, 11 aa, Homo sapiens
  CDR3 for beta chain variable domain of TCR clone 89003 (TRBV29-1, TRBJ2-5)
CSEDRTGTQYF

SEQ ID NO: 178007 - protein, 13 aa, Homo sapiens
  CDR3 for alpha chain variable domain of TCR clone 89004 (TRAV1-2, TRAJ9)
CAVLNTGGFKTIF

SEQ ID NO: 178008 - protein, 13 aa, Homo sapiens
  CDR3 for beta chain variable domain of TCR clone 89004 (TRBV10-3, TRBJ1-2)
CAISERDSYGYTF

SEQ ID NO: 178009 - protein, 13 aa, Homo sapiens
  CDR3 for alpha chain variable domain of TCR clone 89005 (TRAV26-2, TRAJ43)
CILRAINNNDMRF

SEQ ID NO: 178010 - protein, 15 aa, Homo sapiens
  CDR3 for beta chain variable domain of TCR clone 89005 (TRBV7-2, TRBJ2-1)
CASTHGTGIYNEQFF

SEQ ID NO: 178011 - protein, 16 aa, Homo sapiens
  CDR3 for alpha chain variable domain of TCR clone 89006 (TRAV1-2, TRAJ10)
CAVRGVLTGGGNKLTF

SEQ ID NO: 178012 - protein, 16 aa, Homo sapiens
  CDR3 for beta chain variable domain of TCR clone 89006 (TRBV7-7, TRBJ2-1)
CASSLASGTSYNEQFF

SEQ ID NO: 178013 - protein, 16 aa, Homo sapiens
  CDR3 for alpha chain variable domain of TCR clone 89007 (TRAV21, TRAJ37)
CAVRTAGSSNTGKLIF

SEQ ID NO: 178014 - protein, 14 aa, Homo sapiens
  CDR3 for beta chain variable domain of TCR clone 89007 (TRBV4-2, TRBJ2-1)
CASGLDRAYNEQFF

SEQ ID NO: 178015 - protein, 13 aa, Homo sapiens
  CDR3 for alpha chain variable domain of TCR clone 89008 (TRAV12-2, TRAJ39)
CAVNNNAGNMLTF

SEQ ID NO: 178016 - protein, 13 aa, Homo sapiens
  CDR3 for beta chain variable domain of TCR clone 89008 (TRBV7-3, TRBJ1-1)
CASSQDWGAEAFF

SEQ ID NO: 178017 - protein, 11 aa, Homo sapiens
  CDR3 for alpha chain variable domain of TCR clone 89009 (TRAV12-1, TRAJ8)
CVVTGFQKLVF

SEQ ID NO: 178018 - protein, 14 aa, Homo sapiens
  CDR3 for beta chain variable domain of TCR clone 89009 (TRBV12-4, TRBJ2-3)
CASSGQGSTDTQYF

SEQ ID NO: 178019 - protein, 13 aa, Homo sapiens
  CDR3 for alpha chain variable domain of TCR clone 89010 (TRAV29/DV5, TRAJ31)
CAASRNNNARLMF

SEQ ID NO: 178020 - protein, 12 aa, Homo sapiens
  CDR3 for beta chain variable domain of TCR clone 89010 (TRBV14, TRBJ2-7)
CASSLYKDAQYF

SEQ ID NO: 178021 - protein, 14 aa, Homo sapiens
  CDR3 for alpha chain variable domain of TCR clone 89011 (TRAV20, TRAJ56)
CAVQFGGANSKLTF

SEQ ID NO: 178022 - protein, 17 aa, Homo sapiens
  CDR3 for beta chain variable domain of TCR clone 89011 (TRBV20-1, TRBJ2-2)
CSASGSGQGGLTGELFF

SEQ ID NO: 178023 - protein, 12 aa, Homo sapiens
  CDR3 for alpha chain variable domain of TCR clone 89012 (TRAV21, TRAJ37)
CAARGNTGKLIF

SEQ ID NO: 178024 - protein, 14 aa, Homo sapiens
  CDR3 for beta chain variable domain of TCR clone 89012 (TRBV19, TRBJ2-1)
CASEVTGARNEQFF

SEQ ID NO: 178025 - protein, 12 aa, Homo sapiens
  CDR3 for alpha chain variable domain of TCR clone 89013 (TRAV13-1, TRAJ21)
CAAKEGFNKFYF

SEQ ID NO: 178026 - protein, 16 aa, Homo sapiens
  CDR3 for beta chain variable domain of TCR clone 89013 (TRBV5-1, TRBJ2-7)
CASSYASTSSGGEQYF

SEQ ID NO: 178027 - protein, 12 aa, Homo sapiens
  CDR3 for alpha chain variable domain of TCR clone 89014 (TRAV12-3, TRAJ17)
CAMTLTGNKLTF

SEQ ID NO: 178028 - protein, 16 aa, Homo sapiens
  CDR3 for beta chain variable domain of TCR clone 89014 (TRBV7-8, TRBJ2-1)
CASSLAGTGRYNEQFF

SEQ ID NO: 178029 - protein, 10 aa, Homo sapiens
  CDR3 for alpha chain variable domain of TCR clone 89015 (TRAV30, TRAJ48)
CGIGNEKLTF

SEQ ID NO: 178030 - protein, 14 aa, Homo sapiens
  CDR3 for beta chain variable domain of TCR clone 89015 (TRBV7-6, TRBJ2-3)
CASSVAGGKDTQYF

SEQ ID NO: 178031 - protein, 17 aa, Homo sapiens
  CDR3 for alpha chain variable domain of TCR clone 89016 (TRAV2, TRAJ36)
CAVEDRGSWGKQPLLWD

SEQ ID NO: 178032 - protein, 14 aa, Homo sapiens
  CDR3 for beta chain variable domain of TCR clone 89016 (TRBV7-9, TRBJ2-5)
CASSLDTAQETQYF

SEQ ID NO: 178033 - protein, 18 aa, Homo sapiens
  CDR3 for alpha chain variable domain of TCR clone 89017 (TRAV26-1, TRAJ27)
FIVRPSFNYNTNAGKSTF

SEQ ID NO: 178034 - protein, 14 aa, Homo sapiens
  CDR3 for beta chain variable domain of TCR clone 89017 (TRBV10-3, TRBJ1-6)
CAISVDGDESPLHF

SEQ ID NO: 178035 - protein, 14 aa, Homo sapiens
  CDR3 for alpha chain variable domain of TCR clone 89018 (TRAV17, TRAJ37)
CATYGSSNTGKLIF

SEQ ID NO: 178036 - protein, 13 aa, Homo sapiens
  CDR3 for beta chain variable domain of TCR clone 89018 (TRBV11-2, TRBJ2-1)
CASSLDLVNEQFF

SEQ ID NO: 178037 - protein, 14 aa, Homo sapiens
  CDR3 for alpha chain variable domain of TCR clone 89019 (TRAV4, TRAJ20)
CPVGRRSNDYKLSF

SEQ ID NO: 178038 - protein, 13 aa, Homo sapiens
  CDR3 for beta chain variable domain of TCR clone 89019 (TRBV19, TRBJ1-2)
CASSVPGQDGYTF

SEQ ID NO: 178039 - protein, 16 aa, Homo sapiens
  CDR3 for alpha chain variable domain of TCR clone 89020 (TRAV1-2, TRAJ10)
CAVRGVLTGGGNKLAF

SEQ ID NO: 178040 - protein, 15 aa, Homo sapiens
  CDR3 for beta chain variable domain of TCR clone 89020 (TRBV28, TRBJ2-7)
CASSLISGGSYEQYF

SEQ ID NO: 178041 - protein, 11 aa, Homo sapiens
  CDR3 for alpha chain variable domain of TCR clone 89021 (TRAV26-1, TRAJ27)
CIDPNAGKSTF

SEQ ID NO: 178042 - protein, 11 aa, Homo sapiens
  CDR3 for beta chain variable domain of TCR clone 89021 (TRBV7-9, TRBJ2-3)
CASSYTDTQYF

SEQ ID NO: 178043 - protein, 14 aa, Homo sapiens
  CDR3 for alpha chain variable domain of TCR clone 89022 (TRAV21, TRAJ35)
CAVMPIGFGNVLHC

SEQ ID NO: 178044 - protein, 13 aa, Homo sapiens
  CDR3 for beta chain variable domain of TCR clone 89022 (TRBV10-3, TRBJ2-7)
CASKLAVNYEQYF

SEQ ID NO: 178045 - protein, 13 aa, Homo sapiens
  CDR3 for alpha chain variable domain of TCR clone 89023 (TRAV12-2, TRAJ49)
CAVKPNTGNQFYF

SEQ ID NO: 178046 - protein, 14 aa, Homo sapiens
  CDR3 for beta chain variable domain of TCR clone 89023 (TRBV18, TRBJ2-5)
CASSPGVSQETQYF

SEQ ID NO: 178047 - protein, 11 aa, Homo sapiens
  CDR3 for alpha chain variable domain of TCR clone 89024 (TRAV12-3, TRAJ27)
CAMANAGKSTF

SEQ ID NO: 178048 - protein, 15 aa, Homo sapiens
  CDR3 for beta chain variable domain of TCR clone 89024 (TRBV5-1, TRBJ2-7)
CASSLNGGPAREQYF

SEQ ID NO: 178049 - protein, 12 aa, Homo sapiens
  CDR3 for alpha chain variable domain of TCR clone 89025 (TRAV2, TRAJ31)
CAVEDGNARLMF

SEQ ID NO: 178050 - protein, 18 aa, Homo sapiens
  CDR3 for beta chain variable domain of TCR clone 89025 (TRBV7-9, TRBJ2-3)
CASSLDLAGLATPDTQYF

SEQ ID NO: 178051 - protein, 15 aa, Homo sapiens
  CDR3 for alpha chain variable domain of TCR clone 89026 (TRAV17, TRAJ52)
CATEAGGTCYGKLTF

SEQ ID NO: 178052 - protein, 14 aa, Homo sapiens
  CDR3 for beta chain variable domain of TCR clone 89026 (TRBV28, TRBJ1-5)
CASSLGVLVKPQHF

SEQ ID NO: 178053 - protein, 11 aa, Homo sapiens
  CDR3 for alpha chain variable domain of TCR clone 89027 (TRAV21, TRAJ34)
CAHYNTDKLIF

SEQ ID NO: 178054 - protein, 14 aa, Homo sapiens
  CDR3 for beta chain variable domain of TCR clone 89027 (TRBV18, TRBJ2-7)
CASSPRGGAYEQYF

SEQ ID NO: 178055 - protein, 12 aa, Homo sapiens
  CDR3 for alpha chain variable domain of TCR clone 89028 (TRAV1-1, TRAJ30)
CAVRGRDDKLIF

SEQ ID NO: 178056 - protein, 13 aa, Homo sapiens
  CDR3 for beta chain variable domain of TCR clone 89028 (TRBV11-3, TRBJ2-7)
CASSLDKLYEQYF

SEQ ID NO: 178057 - protein, 12 aa, Homo sapiens
  CDR3 for alpha chain variable domain of TCR clone 89029 (TRAV25, TRAJ7)
CAGSYGNNRLAF

SEQ ID NO: 178058 - protein, 12 aa, Homo sapiens
  CDR3 for beta chain variable domain of TCR clone 89029 (TRBV5-1, TRBJ1-2)
CASSQDTYGDTF

SEQ ID NO: 178059 - protein, 13 aa, Homo sapiens
  CDR3 for alpha chain variable domain of TCR clone 89030 (TRAV3, TRAJ21)
CAVREPDFNTFYF

SEQ ID NO: 178060 - protein, 15 aa, Homo sapiens
  CDR3 for beta chain variable domain of TCR clone 89030 (TRBV2, TRBJ2-1)
CASSELAGGYNEQFF

SEQ ID NO: 178061 - protein, 16 aa, Homo sapiens
  CDR3 for alpha chain variable domain of TCR clone 89031 (TRAV8-3, TRAJ13)
CAVGAYPSGGYQKVTF

SEQ ID NO: 178062 - protein, 17 aa, Homo sapiens
  CDR3 for beta chain variable domain of TCR clone 89031 (TRBV19, TRBJ1-5)
CASSIVWADNQPSILVM

SEQ ID NO: 178063 - protein, 19 aa, Homo sapiens
  CDR3 for alpha chain variable domain of TCR clone 89032 (TRAV3, TRAJ6)
YAVRDRNPSRSGGSYIPTF

SEQ ID NO: 178064 - protein, 15 aa, Homo sapiens
  CDR3 for beta chain variable domain of TCR clone 89032 (TRBV18, TRBJ2-7)
CASSPTFMDSYEQYF

SEQ ID NO: 178065 - protein, 12 aa, Homo sapiens
  CDR3 for alpha chain variable domain of TCR clone 89033 (TRAV8-3, TRAJ41)
CAVGAFGYALNF

SEQ ID NO: 178066 - protein, 16 aa, Homo sapiens
  CDR3 for beta chain variable domain of TCR clone 89033 (TRBV7-6, TRBJ2-3)
CASSDSRGEGTDTQYF

SEQ ID NO: 178067 - protein, 13 aa, Homo sapiens
  CDR3 for alpha chain variable domain of TCR clone 89034 (TRAV8-3, TRAJ37)
CAVPSSNTGKLIF

SEQ ID NO: 178068 - protein, 12 aa, Homo sapiens
  CDR3 for beta chain variable domain of TCR clone 89034 (TRBV11-2, TRBJ2-2)
CASSLGGGELFF

SEQ ID NO: 178069 - protein, 12 aa, Homo sapiens
  CDR3 for alpha chain variable domain of TCR clone 89035 (TRAV23/DV6, TRAJ30)
CAASKGDEKIIF

SEQ ID NO: 178070 - protein, 13 aa, Homo sapiens
  CDR3 for beta chain variable domain of TCR clone 89035 (TRBV19, TRBJ1-2)
CASSVPGQDGYTF

SEQ ID NO: 178071 - protein, 11 aa, Homo sapiens
  CDR3 for alpha chain variable domain of TCR clone 89036 (TRAV1-1, TRAJ23)
CAVRQGGKLIF

SEQ ID NO: 178072 - protein, 13 aa, Homo sapiens
  CDR3 for beta chain variable domain of TCR clone 89036 (TRBV29-1, TRBJ2-2)
CSTTGVNTGELFF

SEQ ID NO: 178073 - protein, 12 aa, Homo sapiens
  CDR3 for alpha chain variable domain of TCR clone 89037 (TRAV12-2, TRAJ20)
CAVRPSDYKLSF

SEQ ID NO: 178074 - protein, 15 aa, Homo sapiens
  CDR3 for beta chain variable domain of TCR clone 89037 (TRBV12-4, TRBJ2-5)
CASSPPTGLQETQYF

SEQ ID NO: 178075 - protein, 13 aa, Homo sapiens
  CDR3 for alpha chain variable domain of TCR clone 89038 (TRAV8-1, TRAJ28)
CAVSGAGSYQLTF

SEQ ID NO: 178076 - protein, 14 aa, Homo sapiens
  CDR3 for beta chain variable domain of TCR clone 89038 (TRBV7-2, TRBJ2-2)
RASRGQGAAGELFF

SEQ ID NO: 178077 - protein, 15 aa, Homo sapiens
  CDR3 for alpha chain variable domain of TCR clone 89039 (TRAV21, TRAJ53)
CATLNSGGSNYKLTF

SEQ ID NO: 178078 - protein, 16 aa, Homo sapiens
  CDR3 for beta chain variable domain of TCR clone 89039 (TRBV7-2, TRBJ2-5)
CASSPRGRGGGETQYF

SEQ ID NO: 178079 - protein, 13 aa, Homo sapiens
  CDR3 for alpha chain variable domain of TCR clone 89040 (TRAV39, TRAJ58)
CAGEATSGSRLTF

SEQ ID NO: 178080 - protein, 13 aa, Homo sapiens
  CDR3 for beta chain variable domain of TCR clone 89040 (TRBV15, TRBJ2-7)
CATSTTGHYEQYF

SEQ ID NO: 178081 - protein, 13 aa, Homo sapiens
  CDR3 for alpha chain variable domain of TCR clone 89041 (TRAV12-1, TRAJ39)
CVVNYNAGNMLTF

SEQ ID NO: 178082 - protein, 14 aa, Homo sapiens
  CDR3 for beta chain variable domain of TCR clone 89041 (TRBV27, TRBJ2-3)
CASSPVGTTDTQYF

SEQ ID NO: 178083 - protein, 12 aa, Homo sapiens
  CDR3 for alpha chain variable domain of TCR clone 89042 (TRAV1-1, TRAJ24)
CAVRGSCGKFQF

SEQ ID NO: 178084 - protein, 16 aa, Homo sapiens
  CDR3 for beta chain variable domain of TCR clone 89042 (TRBV27, TRBJ2-5)
CASSSQTSGFQETQYF

SEQ ID NO: 178085 - protein, 18 aa, Homo sapiens
  CDR3 for alpha chain variable domain of TCR clone 89043 (TRAV3, TRAJ17)
CAVRARRGGRSCRQQANF

SEQ ID NO: 178086 - protein, 14 aa, Homo sapiens
  CDR3 for beta chain variable domain of TCR clone 89043 (TRBV4-1, TRBJ2-2)
RASSQAVNTGELFF

SEQ ID NO: 178087 - protein, 16 aa, Homo sapiens
  CDR3 for alpha chain variable domain of TCR clone 89044 (TRAV30, TRAJ24)
CGTEIVAADSWGKFQF

SEQ ID NO: 178088 - protein, 15 aa, Homo sapiens
  CDR3 for beta chain variable domain of TCR clone 89044 (TRBV20-1, TRBJ2-7)
CSARDRVSGMDEQYF

SEQ ID NO: 178089 - protein, 13 aa, Homo sapiens
  CDR3 for alpha chain variable domain of TCR clone 89045 (TRAV13-2, TRAJ40)
CAEFTTGTYKYIF

SEQ ID NO: 178090 - protein, 14 aa, Homo sapiens
  CDR3 for beta chain variable domain of TCR clone 89045 (TRBV10-2, TRBJ1-5)
CASSSTGRNQPQHF

SEQ ID NO: 178091 - protein, 13 aa, Homo sapiens
  CDR3 for alpha chain variable domain of TCR clone 89046 (TRAV21, TRAJ27)
CAARPSNAGKSTF

SEQ ID NO: 178092 - protein, 20 aa, Homo sapiens
  CDR3 for beta chain variable domain of TCR clone 89046 (TRBV7-8, TRBJ2-2)
CASSHLFPGPTIHITGELFF

SEQ ID NO: 178093 - protein, 12 aa, Homo sapiens
  CDR3 for alpha chain variable domain of TCR clone 89047 (TRAV12-3, TRAJ43)
CAISSNNNDVRF

SEQ ID NO: 178094 - protein, 15 aa, Homo sapiens
  CDR3 for beta chain variable domain of TCR clone 89047 (TRBV27, TRBJ1-4)
CASSPRHATNEKLFF

SEQ ID NO: 178095 - protein, 14 aa, Homo sapiens
  CDR3 for alpha chain variable domain of TCR clone 89048 (TRAV27, TRAJ15)
CAGFDNQAGTALIF

SEQ ID NO: 178096 - protein, 11 aa, Homo sapiens
  CDR3 for beta chain variable domain of TCR clone 89048 (TRBV29-1, TRBJ1-1)
CNVEVGTRTFF

SEQ ID NO: 178097 - protein, 12 aa, Homo sapiens
  CDR3 for alpha chain variable domain of TCR clone 89049 (TRAV12-3, TRAJ40)
CAMSSGTYKYVF

SEQ ID NO: 178098 - protein, 15 aa, Homo sapiens
  CDR3 for beta chain variable domain of TCR clone 89049 (TRBV7-3, TRBJ2-2)
CASSETGQGTGELFF

SEQ ID NO: 178099 - protein, 14 aa, Homo sapiens
  CDR3 for alpha chain variable domain of TCR clone 89050 (TRAV12-3, TRAJ6)
CAMSATGGSYIPTF

SEQ ID NO: 178100 - protein, 15 aa, Homo sapiens
  CDR3 for beta chain variable domain of TCR clone 89050 (TRBV19, TRBJ1-5)
CASSIVWADNQPQHF

SEQ ID NO: 178101 - protein, 13 aa, Homo sapiens
  CDR3 for alpha chain variable domain of TCR clone 89051 (TRAV23/DV6, TRAJ16)
CAASISDGQKLLF

SEQ ID NO: 178102 - protein, 15 aa, Homo sapiens
  CDR3 for beta chain variable domain of TCR clone 89051 (TRBV10-1, TRBJ2-3)
CASSATSGGFDTQYF

SEQ ID NO: 178103 - protein, 15 aa, Homo sapiens
  CDR3 for alpha chain variable domain of TCR clone 89052 (TRAV21, TRAJ45)
CAVSYSGVGADGLTF

SEQ ID NO: 178104 - protein, 13 aa, Homo sapiens
  CDR3 for beta chain variable domain of TCR clone 89052 (TRBV20-1, TRBJ2-5)
CSAATELQETQYF

SEQ ID NO: 178105 - protein, 13 aa, Homo sapiens
  CDR3 for alpha chain variable domain of TCR clone 89053 (TRAV1-1, TRAJ11)
CAVLNSGYSTLTF

SEQ ID NO: 178106 - protein, 14 aa, Homo sapiens
  CDR3 for beta chain variable domain of TCR clone 89053 (TRBV25-1, TRBJ1-1)
CASTHLGGNTEAFF

SEQ ID NO: 178107 - protein, 15 aa, Homo sapiens
  CDR3 for alpha chain variable domain of TCR clone 89054 (TRAV8-3, TRAJ11)
CAVGLLNSGYSTLTF

SEQ ID NO: 178108 - protein, 15 aa, Homo sapiens
  CDR3 for beta chain variable domain of TCR clone 89054 (TRBV7-2, TRBJ2-1)
CASSSGLAGGNEQFF

SEQ ID NO: 178109 - protein, 16 aa, Homo sapiens
  CDR3 for alpha chain variable domain of TCR clone 89055 (TRAV22, TRAJ45)
CAVERGKRGGADGLTF

SEQ ID NO: 178110 - protein, 14 aa, Homo sapiens
  CDR3 for beta chain variable domain of TCR clone 89055 (TRBV18, TRBJ2-3)
CASSGLADTDTQYF

SEQ ID NO: 178111 - protein, 13 aa, Homo sapiens
  CDR3 for alpha chain variable domain of TCR clone 89056 (TRAV8-3, TRAJ43)
CAVGPDNNNDMRF

SEQ ID NO: 178112 - protein, 13 aa, Homo sapiens
  CDR3 for beta chain variable domain of TCR clone 89056 (TRBV29-1, TRBJ2-1)
CSVEGGGVNEQFF

SEQ ID NO: 178113 - protein, 17 aa, Homo sapiens
  CDR3 for alpha chain variable domain of TCR clone 89057 (TRAV3, TRAJ6)
CAVRDGPRAGGSYIPTF

SEQ ID NO: 178114 - protein, 13 aa, Homo sapiens
  CDR3 for beta chain variable domain of TCR clone 89057 (TRBV4-1, TRBJ1-1)
CASSRKMNTEAFF

SEQ ID NO: 178115 - protein, 14 aa, Homo sapiens
  CDR3 for alpha chain variable domain of TCR clone 89058 (TRAV35, TRAJ22)
CAGLRPGSARQLTF

SEQ ID NO: 178116 - protein, 13 aa, Homo sapiens
  CDR3 for beta chain variable domain of TCR clone 89058 (TRBV7-2, TRBJ2-7)
CASSSPSGSEQYF

SEQ ID NO: 178117 - protein, 14 aa, Homo sapiens
  CDR3 for alpha chain variable domain of TCR clone 89059 (TRAV12-3, TRAJ12)
CAMSEVDSSYKLLF

SEQ ID NO: 178118 - protein, 12 aa, Homo sapiens
  CDR3 for beta chain variable domain of TCR clone 89059 (TRBV18, TRBJ1-4)
CASSPSREKLFF

SEQ ID NO: 178119 - protein, 13 aa, Homo sapiens
  CDR3 for alpha chain variable domain of TCR clone 89060 (TRAV2, TRAJ24)
CAVTTDSWGKLPF

SEQ ID NO: 178120 - protein, 14 aa, Homo sapiens
  CDR3 for beta chain variable domain of TCR clone 89060 (TRBV13, TRBJ2-5)
CASSLGRGQETQYF

SEQ ID NO: 178121 - protein, 16 aa, Homo sapiens
  CDR3 for alpha chain variable domain of TCR clone 89061 (TRAV20, TRAJ52)
CAVLPDGGTSYGKLTF

SEQ ID NO: 178122 - protein, 14 aa, Homo sapiens
  CDR3 for beta chain variable domain of TCR clone 89061 (TRBV19, TRBJ2-1)
CASPTFVLSGEQFF

SEQ ID NO: 178123 - protein, 14 aa, Homo sapiens
  CDR3 for alpha chain variable domain of TCR clone 89062 (TRAV17, TRAJ6)
CATDASGRSYIPTF

SEQ ID NO: 178124 - protein, 19 aa, Homo sapiens
  CDR3 for beta chain variable domain of TCR clone 89062 (TRBV4-3, TRBJ2-7)
CASSQEFIGWQVTPYEQYS

SEQ ID NO: 178125 - protein, 14 aa, Homo sapiens
  CDR3 for alpha chain variable domain of TCR clone 89063 (TRAV23/DV6, TRAJ27)
CAASRDTKAGKSTF

SEQ ID NO: 178126 - protein, 13 aa, Homo sapiens
  CDR3 for beta chain variable domain of TCR clone 89063 (TRBV20-1, TRBJ1-5)
CSASGRGNQPQHF

SEQ ID NO: 178127 - protein, 18 aa, Homo sapiens
  CDR3 for alpha chain variable domain of TCR clone 89064 (TRAV29/DV5, TRAJ37)
CSVLLCSEGSGNTGKLIF

SEQ ID NO: 178128 - protein, 16 aa, Homo sapiens
  CDR3 for beta chain variable domain of TCR clone 89064 (TRBV5-7, TRBJ2-7)
CASSSPGGRTPYEQYF

SEQ ID NO: 178129 - protein, 16 aa, Homo sapiens
  CDR3 for alpha chain variable domain of TCR clone 89065 (TRAV12-1, TRAJ12)
CVVNTLLMDSSYKLIF

SEQ ID NO: 178130 - protein, 13 aa, Homo sapiens
  CDR3 for beta chain variable domain of TCR clone 89065 (TRBV11-2, TRBJ2-1)
CASSSEAYNEQFC

SEQ ID NO: 178131 - protein, 11 aa, Homo sapiens
  CDR3 for alpha chain variable domain of TCR clone 89066 (TRAV13-2, TRAJ17)
CRGAAGNKLTF

SEQ ID NO: 178132 - protein, 16 aa, Homo sapiens
  CDR3 for beta chain variable domain of TCR clone 89066 (TRBV7-6, TRBJ2-1)
CASSAPGPSSYNEQFF

SEQ ID NO: 178133 - protein, 13 aa, Homo sapiens
  CDR3 for alpha chain variable domain of TCR clone 89067 (TRAV12-3, TRAJ5)
CAMIPTGRRALTF

SEQ ID NO: 178134 - protein, 13 aa, Homo sapiens
  CDR3 for beta chain variable domain of TCR clone 89067 (TRBV2, TRBJ2-7)
CTSSVVEAYEQYF

SEQ ID NO: 178135 - protein, 15 aa, Homo sapiens
  CDR3 for alpha chain variable domain of TCR clone 89068 (TRAV12-1, TRAJ44)
CVADLPTGTASKLTF

SEQ ID NO: 178136 - protein, 16 aa, Homo sapiens
  CDR3 for beta chain variable domain of TCR clone 89068 (TRBV19, TRBJ2-1)
CASSKAGPSSYNEQFF

SEQ ID NO: 178137 - protein, 18 aa, Homo sapiens
  CDR3 for alpha chain variable domain of TCR clone 89069 (TRAV13-2, TRAJ52)
CAETPLNAGGTSYGKLTF

SEQ ID NO: 178138 - protein, 13 aa, Homo sapiens
  CDR3 for beta chain variable domain of TCR clone 89069 (TRBV7-9, TRBJ1-2)
CASSLKQNYGYTF

SEQ ID NO: 178139 - protein, 13 aa, Homo sapiens
  CDR3 for alpha chain variable domain of TCR clone 89070 (TRAV12-3, TRAJ41)
CAITPNSGYALNF

SEQ ID NO: 178140 - protein, 14 aa, Homo sapiens
  CDR3 for beta chain variable domain of TCR clone 89070 (TRBV7-2, TRBJ1-3)
CASSLGTAGNTIYF

SEQ ID NO: 178141 - protein, 15 aa, Homo sapiens
  CDR3 for alpha chain variable domain of TCR clone 89071 (TRAV13-2, TRAJ8)
CAPGGRNTGFQKLVF

SEQ ID NO: 178142 - protein, 14 aa, Homo sapiens
  CDR3 for beta chain variable domain of TCR clone 89071 (TRBV4-1, TRBJ2-2)
CASSQAVNTGELFF

SEQ ID NO: 178143 - protein, 16 aa, Homo sapiens
  CDR3 for alpha chain variable domain of TCR clone 89072 (TRAV8-3, TRAJ8)
CAVPRDGNTGLQKLVF

SEQ ID NO: 178144 - protein, 14 aa, Homo sapiens
  CDR3 for beta chain variable domain of TCR clone 89072 (TRBV4-1, TRBJ2-2)
CASSQAVNTGELFF

SEQ ID NO: 178145 - protein, 13 aa, Homo sapiens
  CDR3 for alpha chain variable domain of TCR clone 89073 (TRAV8-3, TRAJ44)
CAVVPGTASKLTF

SEQ ID NO: 178146 - protein, 14 aa, Homo sapiens
  CDR3 for beta chain variable domain of TCR clone 89073 (TRBV11-2, TRBJ2-3)
CASSRLARTDTRYF

SEQ ID NO: 178147 - protein, 14 aa, Homo sapiens
  CDR3 for alpha chain variable domain of TCR clone 89074 (TRAV9-2, TRAJ39)
CALYIYNAGNMLTF

SEQ ID NO: 178148 - protein, 15 aa, Homo sapiens
  CDR3 for beta chain variable domain of TCR clone 89074 (TRBV27, TRBJ1-6)
CASSFDRGLGSPLLF

SEQ ID NO: 178149 - protein, 11 aa, Homo sapiens
  CDR3 for alpha chain variable domain of TCR clone 89075 (TRAV13-2, TRAJ20)
CADSNDYKLRF

SEQ ID NO: 178150 - protein, 14 aa, Homo sapiens
  CDR3 for beta chain variable domain of TCR clone 89075 (TRBV11-2, TRBJ1-5)
CASSLDRGRQPQHF

SEQ ID NO: 178151 - protein, 18 aa, Homo sapiens
  CDR3 for alpha chain variable domain of TCR clone 89076 (TRAV12-3, TRAJ52)
CAMSVGGAGGTSYGKLTF

SEQ ID NO: 178152 - protein, 15 aa, Homo sapiens
  CDR3 for beta chain variable domain of TCR clone 89076 (TRBV28, TRBJ2-5)
CASSSGRTIQETQYF

SEQ ID NO: 178153 - protein, 14 aa, Homo sapiens
  CDR3 for alpha chain variable domain of TCR clone 89077 (TRAV23/DV6, TRAJ22)
CAAFSSGSARRLTF

SEQ ID NO: 178154 - protein, 14 aa, Homo sapiens
  CDR3 for beta chain variable domain of TCR clone 89077 (TRBV19, TRBJ2-5)
CASSPPGVRETQYF

SEQ ID NO: 178155 - protein, 11 aa, Homo sapiens
  CDR3 for alpha chain variable domain of TCR clone 89078 (TRAV27, TRAJ45)
CAGAQEGVLTD

SEQ ID NO: 178156 - protein, 17 aa, Homo sapiens
  CDR3 for beta chain variable domain of TCR clone 89078 (TRBV11-2, TRBJ2-1)
CASSLYPPGVEYNEQFF

SEQ ID NO: 178157 - protein, 13 aa, Homo sapiens
  CDR3 for alpha chain variable domain of TCR clone 89079 (TRAV17, TRAJ5)
CAPMDTGRRALTF

SEQ ID NO: 178158 - protein, 13 aa, Homo sapiens
  CDR3 for beta chain variable domain of TCR clone 89079 (TRBV10-3, TRBJ2-7)
CASKLAVNYEQYF

SEQ ID NO: 178159 - protein, 12 aa, Homo sapiens
  CDR3 for alpha chain variable domain of TCR clone 89080 (TRAV21, TRAJ52)
CAVRPSPAGGTR

SEQ ID NO: 178160 - protein, 17 aa, Homo sapiens
  CDR3 for beta chain variable domain of TCR clone 89080 (TRBV13, TRBJ2-3)
CASSLSRVAGGRNTQYF

SEQ ID NO: 178161 - protein, 17 aa, Homo sapiens
  CDR3 for alpha chain variable domain of TCR clone 89081 (TRAV2, TRAJ22)
ILQVRESDAAEQRQLTF

SEQ ID NO: 178162 - protein, 16 aa, Homo sapiens
  CDR3 for beta chain variable domain of TCR clone 89081 (TRBV2, TRBJ2-5)
CASSETQGVGEETQYF

SEQ ID NO: 178163 - protein, 15 aa, Homo sapiens
  CDR3 for alpha chain variable domain of TCR clone 89082 (TRAV8-3, TRAJ27)
CAVGPSKTNAGKSTF

SEQ ID NO: 178164 - protein, 14 aa, Homo sapiens
  CDR3 for beta chain variable domain of TCR clone 89082 (TRBV11-2, TRBJ2-3)
CASSRLARTGTQYF

SEQ ID NO: 178165 - protein, 13 aa, Homo sapiens
  CDR3 for alpha chain variable domain of TCR clone 89083 (TRAV25, TRAJ26)
CAGMDNYGQNFVF

SEQ ID NO: 178166 - protein, 15 aa, Homo sapiens
  CDR3 for beta chain variable domain of TCR clone 89083 (TRBV18, TRBJ2-1)
CASSPPSASYNEQFF

SEQ ID NO: 178167 - protein, 17 aa, Homo sapiens
  CDR3 for alpha chain variable domain of TCR clone 89084 (TRAV3, TRAJ42)
CAVRDRDYGGSQGNIIF

SEQ ID NO: 178168 - protein, 14 aa, Homo sapiens
  CDR3 for beta chain variable domain of TCR clone 89084 (TRBV19, TRBJ2-5)
CASSMTGQQETQYF

SEQ ID NO: 178169 - protein, 12 aa, Homo sapiens
  CDR3 for alpha chain variable domain of TCR clone 89085 (TRAV21, TRAJ13)
PGPAGGYQKVTF

SEQ ID NO: 178170 - protein, 13 aa, Homo sapiens
  CDR3 for beta chain variable domain of TCR clone 89085 (TRBV7-9, TRBJ1-2)
CASSLKQNYGYTF

SEQ ID NO: 178171 - protein, 13 aa, Homo sapiens
  CDR3 for alpha chain variable domain of TCR clone 89086 (TRAV2, TRAJ40)
CAVVTSVTYKYIF

SEQ ID NO: 178172 - protein, 16 aa, Homo sapiens
  CDR3 for beta chain variable domain of TCR clone 89086 (TRBV29-1, TRBJ1-2)
CSVEANRDIANYGYTF

SEQ ID NO: 178173 - protein, 14 aa, Homo sapiens
  CDR3 for alpha chain variable domain of TCR clone 89087 (TRAV12-2, TRAJ13)
CAVKKTGGYQKVTF

SEQ ID NO: 178174 - protein, 13 aa, Homo sapiens
  CDR3 for beta chain variable domain of TCR clone 89087 (TRBV4-2, TRBJ2-3)
CASSLTSTDTQYF

SEQ ID NO: 178175 - protein, 17 aa, Homo sapiens
  CDR3 for alpha chain variable domain of TCR clone 89088 (TRAV3, TRAJ42)
CAVRDRDYGGSQGNLIF

SEQ ID NO: 178176 - protein, 14 aa, Homo sapiens
  CDR3 for beta chain variable domain of TCR clone 89088 (TRBV7-2, TRBJ2-5)
CAGSPRGSSETQYF

SEQ ID NO: 178177 - protein, 13 aa, Homo sapiens
  CDR3 for alpha chain variable domain of TCR clone 89089 (TRAV8-1, TRAJ47)
CAVGMEYGNKRVF

SEQ ID NO: 178178 - protein, 13 aa, Homo sapiens
  CDR3 for beta chain variable domain of TCR clone 89089 (TRBV20-1, TRBJ2-2)
CSARVANTGELFF

SEQ ID NO: 178179 - protein, 12 aa, Homo sapiens
  CDR3 for alpha chain variable domain of TCR clone 89090 (TRAV27, TRAJ36)
ASTPAGANNLFF

SEQ ID NO: 178180 - protein, 13 aa, Homo sapiens
  CDR3 for beta chain variable domain of TCR clone 89090 (TRBV7-9, TRBJ2-3)
CASSPGSKDTQYF

SEQ ID NO: 178181 - protein, 18 aa, Homo sapiens
  CDR3 for alpha chain variable domain of TCR clone 89091 (TRAV26-2, TRAJ54)
CILRDVEVGIQGAQKLVF

SEQ ID NO: 178182 - protein, 12 aa, Homo sapiens
  CDR3 for beta chain variable domain of TCR clone 89091 (TRBV7-8, TRBJ2-7)
CASSLGDREQYF

SEQ ID NO: 178183 - protein, 10 aa, Homo sapiens
  CDR3 for alpha chain variable domain of TCR clone 89092 (TRAV21, TRAJ31)
CAVDNSRLMF

SEQ ID NO: 178184 - protein, 13 aa, Homo sapiens
  CDR3 for beta chain variable domain of TCR clone 89092 (TRBV4-1, TRBJ1-1)
CASSRKMNTEAFF

SEQ ID NO: 178185 - protein, 13 aa, Homo sapiens
  CDR3 for alpha chain variable domain of TCR clone 89093 (TRAV2, TRAJ32)
CLHYGGATNKLIF

SEQ ID NO: 178186 - protein, 16 aa, Homo sapiens
  CDR3 for beta chain variable domain of TCR clone 89093 (TRBV7-9, TRBJ2-7)
CASSYPDREGGYEQYF

SEQ ID NO: 178187 - protein, 10 aa, Homo sapiens
  CDR3 for alpha chain variable domain of TCR clone 89094 (TRAV12-3, TRAJ49)
CAMNDDQFYF

SEQ ID NO: 178188 - protein, 15 aa, Homo sapiens
  CDR3 for beta chain variable domain of TCR clone 89094 (TRBV7-9, TRBJ1-5)
CASSQGHQPNQPQHF

SEQ ID NO: 178189 - protein, 14 aa, Homo sapiens
  CDR3 for alpha chain variable domain of TCR clone 89095 (TRAV12-3, TRAJ53)
CGATSGGSNYKLTF

SEQ ID NO: 178190 - protein, 13 aa, Homo sapiens
  CDR3 for beta chain variable domain of TCR clone 89095 (TRBV19, TRBJ1-5)
SASSTQDGQPQHF

SEQ ID NO: 178191 - protein, 15 aa, Homo sapiens
  CDR3 for alpha chain variable domain of TCR clone 89096 (TRAV25, TRAJ52)
CAGRPGGTSYGKLTF

SEQ ID NO: 178192 - protein, 14 aa, Homo sapiens
  CDR3 for beta chain variable domain of TCR clone 89096 (TRBV4-1, TRBJ2-2)
CASNQAVNTGELFF

SEQ ID NO: 178193 - protein, 14 aa, Homo sapiens
  CDR3 for alpha chain variable domain of TCR clone 89097 (TRAV26-2, TRAJ32)
CCVGYGGATNKLIF

SEQ ID NO: 178194 - protein, 14 aa, Homo sapiens
  CDR3 for beta chain variable domain of TCR clone 89097 (TRBV19, TRBJ2-1)
CASPTFVLSGEQFF

SEQ ID NO: 178195 - protein, 11 aa, Homo sapiens
  CDR3 for alpha chain variable domain of TCR clone 89098 (TRAV12-2, TRAJ23)
CARGRGGKLIF

SEQ ID NO: 178196 - protein, 14 aa, Homo sapiens
  CDR3 for beta chain variable domain of TCR clone 89098 (TRBV28, TRBJ2-5)
CASSLGDRAETHYF

SEQ ID NO: 178197 - protein, 17 aa, Homo sapiens
  CDR3 for alpha chain variable domain of TCR clone 89099 (TRAV36/DV7, TRAJ52)
CAVAQRAGGTSYGKLTF

SEQ ID NO: 178198 - protein, 14 aa, Homo sapiens
  CDR3 for beta chain variable domain of TCR clone 89099 (TRBV19, TRBJ2-5)
CASSMTGQQETQYF

SEQ ID NO: 178199 - protein, 12 aa, Homo sapiens
  CDR3 for alpha chain variable domain of TCR clone 89100 (TRAV8-3, TRAJ26)
CAGDNYGQNFVF

SEQ ID NO: 178200 - protein, 19 aa, Homo sapiens
  CDR3 for beta chain variable domain of TCR clone 89100 (TRBV25-1, TRBJ2-2)
CAILVYRVDRGRKTGELFF

SEQ ID NO: 178201 - protein, 14 aa, Homo sapiens
  CDR3 for alpha chain variable domain of TCR clone 89101 (TRAV9-2, TRAJ38)
CALSRAGNNRKLIW

SEQ ID NO: 178202 - protein, 12 aa, Homo sapiens
  CDR3 for beta chain variable domain of TCR clone 89101 (TRBV7-2, TRBJ2-5)
CASSQYQETQYF

SEQ ID NO: 178203 - protein, 12 aa, Homo sapiens
  CDR3 for alpha chain variable domain of TCR clone 89102 (TRAV12-1, TRAJ31)
CVSWNNNARLMF

SEQ ID NO: 178204 - protein, 16 aa, Homo sapiens
  CDR3 for beta chain variable domain of TCR clone 89102 (TRBV7-9, TRBJ2-1)
CASSDVAGGSYNEQFF

SEQ ID NO: 178205 - protein, 15 aa, Homo sapiens
  CDR3 for alpha chain variable domain of TCR clone 89103 (TRAV3, TRAJ4)
CAVRDGTGGYNKLIF

SEQ ID NO: 178206 - protein, 14 aa, Homo sapiens
  CDR3 for beta chain variable domain of TCR clone 89103 (TRBV5-1, TRBJ2-3)
CASSRGQGGGTQYF

SEQ ID NO: 178207 - protein, 12 aa, Homo sapiens
  CDR3 for alpha chain variable domain of TCR clone 89104 (TRAV13-1, TRAJ48)
CAANFGNEKLTF

SEQ ID NO: 178208 - protein, 13 aa, Homo sapiens
  CDR3 for beta chain variable domain of TCR clone 89104 (TRBV7-2, TRBJ2-7)
CASSSPSGSEQYF

SEQ ID NO: 178209 - protein, 14 aa, Homo sapiens
  CDR3 for alpha chain variable domain of TCR clone 89105 (TRAV1-2, TRAJ16)
CAVNRFSEGQKLLF

SEQ ID NO: 178210 - protein, 13 aa, Homo sapiens
  CDR3 for beta chain variable domain of TCR clone 89105 (TRBV7-9, TRBJ1-2)
CASSLKQNYGYTF

SEQ ID NO: 178211 - protein, 14 aa, Homo sapiens
  CDR3 for alpha chain variable domain of TCR clone 89106 (TRAV21, TRAJ8)
CAVREDTGFQKLVF

SEQ ID NO: 178212 - protein, 15 aa, Homo sapiens
  CDR3 for beta chain variable domain of TCR clone 89106 (TRBV6-3, TRBJ2-7)
CASSSPGTVFYEQYF

SEQ ID NO: 178213 - protein, 16 aa, Homo sapiens
  CDR3 for alpha chain variable domain of TCR clone 89107 (TRAV30, TRAJ24)
CGTEIVDADSWGQFQF

SEQ ID NO: 178214 - protein, 13 aa, Homo sapiens
  CDR3 for beta chain variable domain of TCR clone 89107 (TRBV11-2, TRBJ2-5)
CASSSTGEETQYF

SEQ ID NO: 178215 - protein, 14 aa, Homo sapiens
  CDR3 for alpha chain variable domain of TCR clone 89108 (TRAV1-2, TRAJ16)
CAVNRFSDGQKLLF

SEQ ID NO: 178216 - protein, 11 aa, Homo sapiens
  CDR3 for beta chain variable domain of TCR clone 89108 (TRBV12-4, TRBJ2-2)
CASSYTGELFF

SEQ ID NO: 178217 - protein, 13 aa, Homo sapiens
  CDR3 for alpha chain variable domain of TCR clone 89109 (TRAV29/DV5, TRAJ31)
CAASRNNNARIMF

SEQ ID NO: 178218 - protein, 13 aa, Homo sapiens
  CDR3 for beta chain variable domain of TCR clone 89109 (TRBV7-2, TRBJ2-4)
CASSREHANIQYF

SEQ ID NO: 178219 - protein, 18 aa, Homo sapiens
  CDR3 for alpha chain variable domain of TCR clone 89110 (TRAV21, TRAJ52)
CAVRPSPAGGTSYGKLTF

SEQ ID NO: 178220 - protein, 10 aa, Homo sapiens
  CDR3 for beta chain variable domain of TCR clone 89110 (TRBV13, TRBJ2-3)
CASSLSRVAG

SEQ ID NO: 178221 - protein, 14 aa, Homo sapiens
  CDR3 for alpha chain variable domain of TCR clone 89111 (TRAV38-1, TRAJ28)
CAFTSGAGSYQLTF

SEQ ID NO: 178222 - protein, 13 aa, Homo sapiens
  CDR3 for beta chain variable domain of TCR clone 89111 (TRBV12-4, TRBJ2-7)
CASSPTETYEQYF

SEQ ID NO: 178223 - protein, 14 aa, Homo sapiens
  CDR3 for alpha chain variable domain of TCR clone 89112 (TRAV8-4, TRAJ15)
CAVTIREAGTALIF

SEQ ID NO: 178224 - protein, 13 aa, Homo sapiens
  CDR3 for beta chain variable domain of TCR clone 89112 (TRBV10-3, TRBJ2-7)
CTISEKGGYEQYF

SEQ ID NO: 178225 - protein, 14 aa, Homo sapiens
  CDR3 for alpha chain variable domain of TCR clone 89113 (TRAV3, TRAJ27)
CAVRDDTNAGKSTF

SEQ ID NO: 178226 - protein, 15 aa, Homo sapiens
  CDR3 for beta chain variable domain of TCR clone 89113 (TRBV7-7, TRBJ2-2)
CATSKPAKNTGELFF

SEQ ID NO: 178227 - protein, 16 aa, Homo sapiens
  CDR3 for alpha chain variable domain of TCR clone 89114 (TRAV21, TRAJ52)
CAVTNAGGTSYVKLTF

SEQ ID NO: 178228 - protein, 13 aa, Homo sapiens
  CDR3 for beta chain variable domain of TCR clone 89114 (TRBV20-1, TRBJ2-3)
CSARLAGTDTQYF

SEQ ID NO: 178229 - protein, 13 aa, Homo sapiens
  CDR3 for alpha chain variable domain of TCR clone 89115 (TRAV8-6, TRAJ49)
CAVITNTGNQFYF

SEQ ID NO: 178230 - protein, 15 aa, Homo sapiens
  CDR3 for beta chain variable domain of TCR clone 89115 (TRBV7-2, TRBJ2-1)
CASSSGLAGGNEQFF

SEQ ID NO: 178231 - protein, 16 aa, Homo sapiens
  CDR3 for alpha chain variable domain of TCR clone 89116 (TRAV27, TRAJ13)
CAGAKSDSGGYQKVTF

SEQ ID NO: 178232 - protein, 15 aa, Homo sapiens
  CDR3 for beta chain variable domain of TCR clone 89116 (TRBV29-1, TRBJ2-1)
CSVGRQALFYNEQFF

SEQ ID NO: 178233 - protein, 20 aa, Homo sapiens
  CDR3 for alpha chain variable domain of TCR clone 89117 (TRAV13-1, )
CAASPMDIQNPDPAGYQLRD

SEQ ID NO: 178234 - protein, 13 aa, Homo sapiens
  CDR3 for beta chain variable domain of TCR clone 89117 (TRBV20-1, TRBJ2-2)
CSASAAGTGELFF

SEQ ID NO: 178235 - protein, 17 aa, Homo sapiens
  CDR3 for alpha chain variable domain of TCR clone 89118 (TRAV13-1, TRAJ52)
CAAGRNAGGTSYGKLTF

SEQ ID NO: 178236 - protein, 13 aa, Homo sapiens
  CDR3 for beta chain variable domain of TCR clone 89118 (TRBV7-2, TRBJ1-1)
CASNRKGAKVAFF

SEQ ID NO: 178237 - protein, 14 aa, Homo sapiens
  CDR3 for alpha chain variable domain of TCR clone 89119 (TRAV8-4, TRAJ8)
CAVSLNTGFQELVF

SEQ ID NO: 178238 - protein, 13 aa, Homo sapiens
  CDR3 for beta chain variable domain of TCR clone 89119 (TRBV7-9, TRBJ2-3)
CASSPGSTDTQYF

SEQ ID NO: 178239 - protein, 12 aa, Homo sapiens
  CDR3 for alpha chain variable domain of TCR clone 89120 (TRAV17, TRAJ12)
CATLRSSYKLNF

SEQ ID NO: 178240 - protein, 16 aa, Homo sapiens
  CDR3 for beta chain variable domain of TCR clone 89120 (TRBV28, TRBJ2-7)
CASSLFFETGGPEQYF

SEQ ID NO: 178241 - protein, 14 aa, Homo sapiens
  CDR3 for alpha chain variable domain of TCR clone 89121 (TRAV12-2, TRAJ13)
CAVKKTGGYQKVTF

SEQ ID NO: 178242 - protein, 15 aa, Homo sapiens
  CDR3 for beta chain variable domain of TCR clone 89121 (TRBV5-1, TRBJ2-5)
CSSSLGLAEQETQYF

SEQ ID NO: 178243 - protein, 14 aa, Homo sapiens
  CDR3 for alpha chain variable domain of TCR clone 89122 (TRAV1-2, TRAJ8)
CAVREDTGFQKLVF

SEQ ID NO: 178244 - protein, 14 aa, Homo sapiens
  CDR3 for beta chain variable domain of TCR clone 89122 (TRBV7-2, TRBJ2-7)
CASSPKTSFYEQCF

SEQ ID NO: 178245 - protein, 16 aa, Homo sapiens
  CDR3 for alpha chain variable domain of TCR clone 89123 (TRAV12-3, TRAJ53)
CAMCPGSGGSNYKLTF

SEQ ID NO: 178246 - protein, 11 aa, Homo sapiens
  CDR3 for beta chain variable domain of TCR clone 89123 (TRBV29-1, TRBJ2-5)
CSEDRTGTQYF

SEQ ID NO: 178247 - protein, 14 aa, Homo sapiens
  CDR3 for alpha chain variable domain of TCR clone 89124 (TRAV9-2, TRAJ39)
CALYIYNAGNMLTF

SEQ ID NO: 178248 - protein, 21 aa, Homo sapiens
  CDR3 for beta chain variable domain of TCR clone 89124 (TRBV28, TRBJ2-7)
CASSANRNLRGPSGRVNEQYF

SEQ ID NO: 178249 - protein, 14 aa, Homo sapiens
  CDR3 for alpha chain variable domain of TCR clone 89125 (TRAV20, TRAJ56)
CAVQFGGANSKLTF

SEQ ID NO: 178250 - protein, 14 aa, Homo sapiens
  CDR3 for beta chain variable domain of TCR clone 89125 (TRBV20-1, TRBJ2-7)
CSAKLGRSSYEQYF

SEQ ID NO: 178251 - protein, 14 aa, Homo sapiens
  CDR3 for alpha chain variable domain of TCR clone 89126 (TRAV26-1, TRAJ44)
CIVKSTGTASKLTF

SEQ ID NO: 178252 - protein, 14 aa, Homo sapiens
  CDR3 for beta chain variable domain of TCR clone 89126 (TRBV7-8, TRBJ2-7)
CASSPRDRVYEQYF

SEQ ID NO: 178253 - protein, 12 aa, Homo sapiens
  CDR3 for alpha chain variable domain of TCR clone 89127 (TRAV38-2/DV8, TRAJ48)
CALLSGNEKLTF

SEQ ID NO: 178254 - protein, 15 aa, Homo sapiens
  CDR3 for beta chain variable domain of TCR clone 89127 (TRBV6-1, TRBJ2-1)
CASSELGGQYNEQFF

SEQ ID NO: 178255 - protein, 13 aa, Homo sapiens
  CDR3 for alpha chain variable domain of TCR clone 89128 (TRAV35, TRAJ48)
CAGHECGNEKLTF

SEQ ID NO: 178256 - protein, 14 aa, Homo sapiens
  CDR3 for beta chain variable domain of TCR clone 89128 (TRBV19, TRBJ2-1)
CASPTFVLSGEQFF

SEQ ID NO: 178257 - protein, 18 aa, Homo sapiens
  CDR3 for alpha chain variable domain of TCR clone 89129 (TRAV26-2, TRAJ45)
CILRVDKYSGGGADGLTF

SEQ ID NO: 178258 - protein, 16 aa, Homo sapiens
  CDR3 for beta chain variable domain of TCR clone 89129 (TRBV2, TRBJ1-4)
CASNLLQGATNENLFF

SEQ ID NO: 178259 - protein, 16 aa, Homo sapiens
  CDR3 for alpha chain variable domain of TCR clone 89130 (TRAV23/DV6, TRAJ34)
CAASGALSYNTDKLIF

SEQ ID NO: 178260 - protein, 14 aa, Homo sapiens
  CDR3 for beta chain variable domain of TCR clone 89130 (TRBV19, TRBJ2-1)
CASPTFVLSGEQFF

SEQ ID NO: 178261 - protein, 11 aa, Homo sapiens
  CDR3 for alpha chain variable domain of TCR clone 89131 (TRAV4, TRAJ28)
CPVGDNRAETL

SEQ ID NO: 178262 - protein, 13 aa, Homo sapiens
  CDR3 for beta chain variable domain of TCR clone 89131 (TRBV20-1, TRBJ2-7)
CSATHTSGYEQYF

SEQ ID NO: 178263 - protein, 15 aa, Homo sapiens
  CDR3 for alpha chain variable domain of TCR clone 89132 (TRAV8-1, TRAJ6)
CAVNAGAGGSYIPTF

SEQ ID NO: 178264 - protein, 13 aa, Homo sapiens
  CDR3 for beta chain variable domain of TCR clone 89132 (TRBV12-4, TRBJ2-5)
CASSPGTEETQYF

SEQ ID NO: 178265 - protein, 14 aa, Homo sapiens
  CDR3 for alpha chain variable domain of TCR clone 89133 (TRAV12-2, TRAJ17)
CAVLFKAAGTKLTF

SEQ ID NO: 178266 - protein, 15 aa, Homo sapiens
  CDR3 for beta chain variable domain of TCR clone 89133 (TRBV20-1, TRBJ2-7)
CSARDRVSGMDEQYF

SEQ ID NO: 178267 - protein, 15 aa, Homo sapiens
  CDR3 for alpha chain variable domain of TCR clone 89134 (TRAV17, TRAJ13)
CPTDAGSGGYQKVTF

SEQ ID NO: 178268 - protein, 17 aa, Homo sapiens
  CDR3 for beta chain variable domain of TCR clone 89134 (TRBV11-2, TRBJ2-1)
CASSLYPPGVEYNEQFF

SEQ ID NO: 178269 - protein, 10 aa, Homo sapiens
  CDR3 for alpha chain variable domain of TCR clone 89135 (TRAV23/DV6, TRAJ57)
CPASSTLSQV

SEQ ID NO: 178270 - protein, 14 aa, Homo sapiens
  CDR3 for beta chain variable domain of TCR clone 89135 (TRBV25-1, TRBJ1-1)
CASTHLGGNTEAFF

SEQ ID NO: 178271 - protein, 16 aa, Homo sapiens
  CDR3 for alpha chain variable domain of TCR clone 89136 (TRAV8-3, TRAJ13)
CAVGAYPSGDYQKVTF

SEQ ID NO: 178272 - protein, 15 aa, Homo sapiens
  CDR3 for beta chain variable domain of TCR clone 89136 (TRBV19, TRBJ1-5)
CASSIVWADNQPQHF

SEQ ID NO: 178273 - protein, 15 aa, Homo sapiens
  CDR3 for alpha chain variable domain of TCR clone 89137 (TRAV26-2, TRAJ28)
CILVESGAGSCQLTF

SEQ ID NO: 178274 - protein, 16 aa, Homo sapiens
  CDR3 for beta chain variable domain of TCR clone 89137 (TRBV4-2, TRBJ1-2)
CASSQEIGGASYGYTF

SEQ ID NO: 178275 - protein, 12 aa, Homo sapiens
  CDR3 for alpha chain variable domain of TCR clone 89138 (TRAV2, TRAJ10)
CASTGGGNKLTF

SEQ ID NO: 178276 - protein, 14 aa, Homo sapiens
  CDR3 for beta chain variable domain of TCR clone 89138 (TRBV7-2, TRBJ2-2)
CASKGQGAAGELFF

SEQ ID NO: 178277 - protein, 14 aa, Homo sapiens
  CDR3 for alpha chain variable domain of TCR clone 89139 (TRAV13-1, TRAJ48)
CAASRSFGNEKLTF

SEQ ID NO: 178278 - protein, 13 aa, Homo sapiens
  CDR3 for beta chain variable domain of TCR clone 89139 (TRBV7-3, TRBJ1-1)
CASSQDWGAEAFF

SEQ ID NO: 178279 - protein, 13 aa, Homo sapiens
  CDR3 for alpha chain variable domain of TCR clone 89140 (TRAV2, TRAJ15)
CAVASQAGTALIF

SEQ ID NO: 178280 - protein, 14 aa, Homo sapiens
  CDR3 for beta chain variable domain of TCR clone 89140 (TRBV19, TRBJ1-5)
CASSLGTGGQPQHF

SEQ ID NO: 178281 - protein, 14 aa, Homo sapiens
  CDR3 for alpha chain variable domain of TCR clone 89141 (TRAV13-1, TRAJ20)
CAARPGSNDHKLSF

SEQ ID NO: 178282 - protein, 13 aa, Homo sapiens
  CDR3 for beta chain variable domain of TCR clone 89141 (TRBV20-1, TRBJ1-1)
CSAPPGGHTEAFF

SEQ ID NO: 178283 - protein, 15 aa, Homo sapiens
  CDR3 for alpha chain variable domain of TCR clone 89142 (TRAV3, TRAJ5)
CAVRDRKTGRRALTF

SEQ ID NO: 178284 - protein, 11 aa, Homo sapiens
  CDR3 for beta chain variable domain of TCR clone 89142 (TRBV12-4, TRBJ2-2)
CASSSAGELFF

SEQ ID NO: 178285 - protein, 13 aa, Homo sapiens
  CDR3 for alpha chain variable domain of TCR clone 89143 (TRAV21, TRAJ20)
CAVGLRVDYKLSF

SEQ ID NO: 178286 - protein, 11 aa, Homo sapiens
  CDR3 for beta chain variable domain of TCR clone 89143 (TRBV25-1, TRBJ2-1)
YATTRISEQFF

SEQ ID NO: 178287 - protein, 14 aa, Homo sapiens
  CDR3 for alpha chain variable domain of TCR clone 89144 (TRAV8-2, TRAJ11)
CVVSEKSGYSTLTF

SEQ ID NO: 178288 - protein, 16 aa, Homo sapiens
  CDR3 for beta chain variable domain of TCR clone 89144 (TRBV28, TRBJ2-1)
CASSSPEYPRDNEQFL

SEQ ID NO: 178289 - protein, 13 aa, Homo sapiens
  CDR3 for alpha chain variable domain of TCR clone 89145 (TRAV12-1, TRAJ33)
CGDAPDSNYQLIW

SEQ ID NO: 178290 - protein, 13 aa, Homo sapiens
  CDR3 for beta chain variable domain of TCR clone 89145 (TRBV27, TRBJ1-4)
CASSLMGDEKLFF

SEQ ID NO: 178291 - protein, 15 aa, Homo sapiens
  CDR3 for alpha chain variable domain of TCR clone 89146 (TRAV12-2, TRAJ53)
CAVNGGGGSNYKLTF

SEQ ID NO: 178292 - protein, 17 aa, Homo sapiens
  CDR3 for beta chain variable domain of TCR clone 89146 (TRBV7-3, TRBJ2-3)
RARSLMKRMRGADTQYF

SEQ ID NO: 178293 - protein, 13 aa, Homo sapiens
  CDR3 for alpha chain variable domain of TCR clone 89147 (TRAV13-2, TRAJ48)
FAEMDFGNEKLNF

SEQ ID NO: 178294 - protein, 15 aa, Homo sapiens
  CDR3 for beta chain variable domain of TCR clone 89147 (TRBV7-9, TRBJ1-6)
CASSSPGRGNSPLHF

SEQ ID NO: 178295 - protein, 10 aa, Homo sapiens
  CDR3 for alpha chain variable domain of TCR clone 89148 (TRAV36/DV7, TRAJ48)
CAVGNEKLTF

SEQ ID NO: 178296 - protein, 16 aa, Homo sapiens
  CDR3 for beta chain variable domain of TCR clone 89148 (TRBV12-5, TRBJ2-5)
CASGPRTGGNQETQYF

SEQ ID NO: 178297 - protein, 13 aa, Homo sapiens
  CDR3 for alpha chain variable domain of TCR clone 89149 (TRAV21, TRAJ36)
CAVIKTGANNLFF

SEQ ID NO: 178298 - protein, 13 aa, Homo sapiens
  CDR3 for beta chain variable domain of TCR clone 89149 (TRBV29-1, TRBJ2-3)
CSATRGGRDTQYF

SEQ ID NO: 178299 - protein, 13 aa, Homo sapiens
  CDR3 for alpha chain variable domain of TCR clone 89150 (TRAV1-1, TRAJ11)
CAVLNSGYSTLTF

SEQ ID NO: 178300 - protein, 14 aa, Homo sapiens
  CDR3 for beta chain variable domain of TCR clone 89150 (TRBV19, TRBJ2-1)
CASPTFVLSGEQFF

SEQ ID NO: 178301 - protein, 13 aa, Homo sapiens
  CDR3 for alpha chain variable domain of TCR clone 89151 (TRAV13-1, TRAJ21)
CAASIYNFNKFYF

SEQ ID NO: 178302 - protein, 15 aa, Homo sapiens
  CDR3 for beta chain variable domain of TCR clone 89151 (TRBV5-5, TRBJ1-5)
CASSLKGGGEQHQHF

SEQ ID NO: 178303 - protein, 15 aa, Homo sapiens
  CDR3 for alpha chain variable domain of TCR clone 89152 (TRAV26-1, TRAJ15)
CIVRAANQAGTALIF

SEQ ID NO: 178304 - protein, 13 aa, Homo sapiens
  CDR3 for beta chain variable domain of TCR clone 89152 (TRBV24-1, TRBJ2-3)
CATSTGGTDTQYF

SEQ ID NO: 178305 - protein, 15 aa, Homo sapiens
  CDR3 for alpha chain variable domain of TCR clone 89153 (TRAV27, TRAJ38)
CAARRNAGNNRKLIG

SEQ ID NO: 178306 - protein, 14 aa, Homo sapiens
  CDR3 for beta chain variable domain of TCR clone 89153 (TRBV7-8, TRBJ2-3)
CASSLEAGTDTQYF

SEQ ID NO: 178307 - protein, 10 aa, Homo sapiens
  CDR3 for alpha chain variable domain of TCR clone 89154 (TRAV1-2, TRAJ20)
CACNDYKLSF

SEQ ID NO: 178308 - protein, 16 aa, Homo sapiens
  CDR3 for beta chain variable domain of TCR clone 89154 (TRBV7-3, TRBJ2-2)
CASSLKRGTLSGELFL

SEQ ID NO: 178309 - protein, 13 aa, Homo sapiens
  CDR3 for alpha chain variable domain of TCR clone 89155 (TRAV14/DV4, TRAJ23)
CAMREVKGGKLIF

SEQ ID NO: 178310 - protein, 15 aa, Homo sapiens
  CDR3 for beta chain variable domain of TCR clone 89155 (TRBV20-1, TRBJ2-7)
CSARDRVSGMDEQYF

SEQ ID NO: 178311 - protein, 11 aa, Homo sapiens
  CDR3 for alpha chain variable domain of TCR clone 89156 (TRAV23/DV6, TRAJ48)
CSPRWGEKLTF

SEQ ID NO: 178312 - protein, 14 aa, Homo sapiens
  CDR3 for beta chain variable domain of TCR clone 89156 (TRBV29-1, TRBJ1-3)
CSVADRVVGNTIYF

SEQ ID NO: 178313 - protein, 12 aa, Homo sapiens
  CDR3 for alpha chain variable domain of TCR clone 89157 (TRAV12-1, TRAJ40)
CVVPSGTYKYIF

SEQ ID NO: 178314 - protein, 15 aa, Homo sapiens
  CDR3 for beta chain variable domain of TCR clone 89157 (TRBV12-4, TRBJ2-1)
CASGPLSGRNSEQFF

SEQ ID NO: 178315 - protein, 14 aa, Homo sapiens
  CDR3 for alpha chain variable domain of TCR clone 89158 (TRAV12-2, TRAJ17)
CAVLFKAAGNKLTF

SEQ ID NO: 178316 - protein, 13 aa, Homo sapiens
  CDR3 for beta chain variable domain of TCR clone 89158 (TRBV20-1, TRBJ2-1)
TSGALPPGNEQFF

SEQ ID NO: 178317 - protein, 16 aa, Homo sapiens
  CDR3 for alpha chain variable domain of TCR clone 89159 (TRAV17, TRAJ22)
CATGPISSGSARQLTF

SEQ ID NO: 178318 - protein, 19 aa, Homo sapiens
  CDR3 for beta chain variable domain of TCR clone 89159 (TRBV11-3, TRBJ2-2)
CASSTRPGAKTTNTGELFF

SEQ ID NO: 178319 - protein, 22 aa, Homo sapiens
  CDR3 for alpha chain variable domain of TCR clone 89160 (TRAV13-1, TRAJ41)
CAASGPRRTQIPDIQNPDPAVY

SEQ ID NO: 178320 - protein, 16 aa, Homo sapiens
  CDR3 for beta chain variable domain of TCR clone 89160 (TRBV18, TRBJ2-3)
CASSPPAGGPRKYAVF

SEQ ID NO: 178321 - protein, 10 aa, Homo sapiens
  CDR3 for alpha chain variable domain of TCR clone 89161 (TRAV23/DV6, TRAJ31)
CSRGGARLMF

SEQ ID NO: 178322 - protein, 14 aa, Homo sapiens
  CDR3 for beta chain variable domain of TCR clone 89161 (TRBV7-8, TRBJ1-2)
CASSPDSLSYGYTF

SEQ ID NO: 178323 - protein, 14 aa, Homo sapiens
  CDR3 for alpha chain variable domain of TCR clone 89162 (TRAV9-2, TRAJ39)
CALYIYNAGNMLTF

SEQ ID NO: 178324 - protein, 16 aa, Homo sapiens
  CDR3 for beta chain variable domain of TCR clone 89162 (TRBV6-1, TRBJ2-1)
CASSGSGTGFRYEQFF

SEQ ID NO: 178325 - protein, 13 aa, Homo sapiens
  CDR3 for alpha chain variable domain of TCR clone 89163 (TRAV20, TRAJ37)
CAGCSSNTGKLIF

SEQ ID NO: 178326 - protein, 11 aa, Homo sapiens
  CDR3 for beta chain variable domain of TCR clone 89163 (TRBV12-4, TRBJ2-3)
RAITATDTQYF

SEQ ID NO: 178327 - protein, 15 aa, Homo sapiens
  CDR3 for alpha chain variable domain of TCR clone 89164 (TRAV17, TRAJ22)
CATVAPSGSARQLTF

SEQ ID NO: 178328 - protein, 17 aa, Homo sapiens
  CDR3 for beta chain variable domain of TCR clone 89164 (TRBV10-3, TRBJ2-6)
CAISESTAPSGANVLTF

SEQ ID NO: 178329 - protein, 15 aa, Homo sapiens
  CDR3 for alpha chain variable domain of TCR clone 89165 (TRAV8-3, TRAJ45)
CASSYSGGGADGLTL

SEQ ID NO: 178330 - protein, 13 aa, Homo sapiens
  CDR3 for beta chain variable domain of TCR clone 89165 (TRBV10-3, TRBJ2-7)
CASKLAVKYEQYF

SEQ ID NO: 178331 - protein, 11 aa, Homo sapiens
  CDR3 for alpha chain variable domain of TCR clone 89166 (TRAV12-1, TRAJ8)
CVVTGFQKLVF

SEQ ID NO: 178332 - protein, 12 aa, Homo sapiens
  CDR3 for beta chain variable domain of TCR clone 89166 (TRBV2, TRBJ2-1)
CAYGPPGNEQFF

SEQ ID NO: 178333 - protein, 17 aa, Homo sapiens
  CDR3 for alpha chain variable domain of TCR clone 89167 (TRAV3, TRAJ6)
CAVRDGPRAGGSYIPTF

SEQ ID NO: 178334 - protein, 17 aa, Homo sapiens
  CDR3 for beta chain variable domain of TCR clone 89167 (TRBV4-1, TRBJ2-7)
CASSRDPLGVRGGEQYF

SEQ ID NO: 178335 - protein, 12 aa, Homo sapiens
  CDR3 for alpha chain variable domain of TCR clone 89168 (TRAV35, TRAJ30)
FAGLNRDDKIIF

SEQ ID NO: 178336 - protein, 15 aa, Homo sapiens
  CDR3 for beta chain variable domain of TCR clone 89168 (TRBV9, TRBJ1-6)
CASSVAGTGDSPLHF

SEQ ID NO: 178337 - protein, 15 aa, Homo sapiens
  CDR3 for alpha chain variable domain of TCR clone 89169 (TRAV16, TRAJ53)
CALIDSGGSNYKLTF

SEQ ID NO: 178338 - protein, 15 aa, Homo sapiens
  CDR3 for beta chain variable domain of TCR clone 89169 (TRBV7-2, TRBJ1-2)
CASSSRAGWNYGYTF

SEQ ID NO: 178339 - protein, 12 aa, Homo sapiens
  CDR3 for alpha chain variable domain of TCR clone 89170 (TRAV35, TRAJ34)
CWAFYNTDKLIF

SEQ ID NO: 178340 - protein, 15 aa, Homo sapiens
  CDR3 for beta chain variable domain of TCR clone 89170 (TRBV28, TRBJ2-5)
CASSSGRTIQETQYF

SEQ ID NO: 178341 - protein, 14 aa, Homo sapiens
  CDR3 for alpha chain variable domain of TCR clone 89171 (TRAV8-2, TRAJ11)
CVASEKSGYSTLTF

SEQ ID NO: 178342 - protein, 16 aa, Homo sapiens
  CDR3 for beta chain variable domain of TCR clone 89171 (TRBV28, TRBJ2-1)
CASSSPEYPRDNEQFF

SEQ ID NO: 178343 - protein, 14 aa, Homo sapiens
  CDR3 for alpha chain variable domain of TCR clone 89172 (TRAV1-1, TRAJ35)
CAVRSIGFGTVLHC

SEQ ID NO: 178344 - protein, 14 aa, Homo sapiens
  CDR3 for beta chain variable domain of TCR clone 89172 (TRBV5-7, TRBJ2-7)
CASSGGLSSYEQYF

SEQ ID NO: 178345 - protein, 12 aa, Homo sapiens
  CDR3 for alpha chain variable domain of TCR clone 89173 (TRAV23/DV6, TRAJ30)
CAASKGDDKIIF

SEQ ID NO: 178346 - protein, 16 aa, Homo sapiens
  CDR3 for beta chain variable domain of TCR clone 89173 (TRBV20-1, TRBJ1-4)
CSAPGQGLLTNEKLFF

SEQ ID NO: 178347 - protein, 14 aa, Homo sapiens
  CDR3 for alpha chain variable domain of TCR clone 89174 (TRAV1-1, TRAJ30)
CAVRSLNRDDRIIF

SEQ ID NO: 178348 - protein, 15 aa, Homo sapiens
  CDR3 for beta chain variable domain of TCR clone 89174 (TRBV27, TRBJ1-4)
CASSAQQDLNEKLFF

SEQ ID NO: 178349 - protein, 16 aa, Homo sapiens
  CDR3 for alpha chain variable domain of TCR clone 89175 (TRAV23/DV6, TRAJ9)
CAASIVGNTGGFKTIF

SEQ ID NO: 178350 - protein, 11 aa, Homo sapiens
  CDR3 for beta chain variable domain of TCR clone 89175 (TRBV11-2, TRBJ2-2)
CASSLPGELFF

SEQ ID NO: 178351 - protein, 14 aa, Homo sapiens
  CDR3 for alpha chain variable domain of TCR clone 89176 (TRAV12-3, TRAJ9)
CAMSPNTGGFKTIF

SEQ ID NO: 178352 - protein, 14 aa, Homo sapiens
  CDR3 for beta chain variable domain of TCR clone 89176 (TRBV5-1, TRBJ2-5)
CASSLAGKQETQYF

SEQ ID NO: 178353 - protein, 13 aa, Homo sapiens
  CDR3 for alpha chain variable domain of TCR clone 89177 (TRAV8-3, TRAJ36)
CGVGATGANNLFF

SEQ ID NO: 178354 - protein, 15 aa, Homo sapiens
  CDR3 for beta chain variable domain of TCR clone 89177 (TRBV7-2, TRBJ1-2)
CASSPRAGWNYGYTF

SEQ ID NO: 178355 - protein, 12 aa, Homo sapiens
  CDR3 for alpha chain variable domain of TCR clone 89178 (TRAV12-3, TRAJ3)
CAIDISASKIIF

SEQ ID NO: 178356 - protein, 17 aa, Homo sapiens
  CDR3 for beta chain variable domain of TCR clone 89178 (TRBV7-9, TRBJ2-3)
CASSLEEAGAYPDTQYF

SEQ ID NO: 178357 - protein, 13 aa, Homo sapiens
  CDR3 for alpha chain variable domain of TCR clone 89179 (TRAV27, TRAJ41)
CAGEGNSGYALNF

SEQ ID NO: 178358 - protein, 15 aa, Homo sapiens
  CDR3 for beta chain variable domain of TCR clone 89179 (TRBV7-2, TRBJ1-6)
CASTLRGTGNSPLHF

SEQ ID NO: 178359 - protein, 12 aa, Homo sapiens
  CDR3 for alpha chain variable domain of TCR clone 89180 (TRAV2, TRAJ31)
CAAEDNNARLMF

SEQ ID NO: 178360 - protein, 14 aa, Homo sapiens
  CDR3 for beta chain variable domain of TCR clone 89180 (TRBV7-3, TRBJ1-1)
CASSLGTGYTEAFF

SEQ ID NO: 178361 - protein, 16 aa, Homo sapiens
  CDR3 for alpha chain variable domain of TCR clone 89181 (TRAV3, TRAJ21)
CAVRDIERGNFNKFYF

SEQ ID NO: 178362 - protein, 14 aa, Homo sapiens
  CDR3 for beta chain variable domain of TCR clone 89181 (TRBV2, TRBJ2-1)
CASSLSGSQGEQFF

SEQ ID NO: 178363 - protein, 15 aa, Homo sapiens
  CDR3 for alpha chain variable domain of TCR clone 89182 (TRAV2, TRAJ15)
CAVEDRGQAGTAQIF

SEQ ID NO: 178364 - protein, 15 aa, Homo sapiens
  CDR3 for beta chain variable domain of TCR clone 89182 (TRBV7-2, TRBJ2-3)
CASSLVVRGPDTQYF

SEQ ID NO: 178365 - protein, 16 aa, Homo sapiens
  CDR3 for alpha chain variable domain of TCR clone 89183 (TRAV30, TRAJ24)
CGTEIVDADSWGQFQF

SEQ ID NO: 178366 - protein, 13 aa, Homo sapiens
  CDR3 for beta chain variable domain of TCR clone 89183 (TRBV18, TRBJ1-1)
CASSGGRNTEAFF

SEQ ID NO: 178367 - protein, 17 aa, Homo sapiens
  CDR3 for alpha chain variable domain of TCR clone 89184 (TRAV3, TRAJ42)
CAVRDRDYGGSQGNIIF

SEQ ID NO: 178368 - protein, 18 aa, Homo sapiens
  CDR3 for beta chain variable domain of TCR clone 89184 (TRBV20-1, TRBJ2-3)
CSASGLAGGPGTTDTQYF

SEQ ID NO: 178369 - protein, 11 aa, Homo sapiens
  CDR3 for alpha chain variable domain of TCR clone 89185 (TRAV17, TRAJ31)
CATSNNARLMF

SEQ ID NO: 178370 - protein, 13 aa, Homo sapiens
  CDR3 for beta chain variable domain of TCR clone 89185 (TRBV12-4, TRBJ2-5)
CASSPGTVETQYF

SEQ ID NO: 178371 - protein, 12 aa, Homo sapiens
  CDR3 for alpha chain variable domain of TCR clone 89186 (TRAV21, TRAJ33)
CAKMDSNYQLIW

SEQ ID NO: 178372 - protein, 18 aa, Homo sapiens
  CDR3 for beta chain variable domain of TCR clone 89186 (TRBV12-4, TRBJ2-2)
CASSLVAGTRGRTGELFF

SEQ ID NO: 178373 - protein, 12 aa, Homo sapiens
  CDR3 for alpha chain variable domain of TCR clone 89187 (TRAV13-2, TRAJ47)
CAEALYGNKLVF

SEQ ID NO: 178374 - protein, 15 aa, Homo sapiens
  CDR3 for beta chain variable domain of TCR clone 89187 (TRBV3-1, TRBJ2-5)
CASSANLGGPETQYF

SEQ ID NO: 178375 - protein, 13 aa, Homo sapiens
  CDR3 for alpha chain variable domain of TCR clone 89188 (TRAV5, TRAJ30)
CAGIANRDDKIIF

SEQ ID NO: 178376 - protein, 14 aa, Homo sapiens
  CDR3 for beta chain variable domain of TCR clone 89188 (TRBV4-1, TRBJ2-2)
CASSQAVNTGELFF

SEQ ID NO: 178377 - protein, 14 aa, Homo sapiens
  CDR3 for alpha chain variable domain of TCR clone 89189 (TRAV12-2, TRAJ13)
CAVKKTGGYQKVTF

SEQ ID NO: 178378 - protein, 12 aa, Homo sapiens
  CDR3 for beta chain variable domain of TCR clone 89189 (TRBV11-3, TRBJ2-1)
CASSPGNNEQFF

SEQ ID NO: 178379 - protein, 18 aa, Homo sapiens
  CDR3 for alpha chain variable domain of TCR clone 89190 (TRAV26-1, TRAJ52)
CIVRVEGAGGTSYGKLTF

SEQ ID NO: 178380 - protein, 14 aa, Homo sapiens
  CDR3 for beta chain variable domain of TCR clone 89190 (TRBV19, TRBJ1-4)
CASSMGRHNEKLFF

SEQ ID NO: 178381 - protein, 14 aa, Homo sapiens
  CDR3 for alpha chain variable domain of TCR clone 89191 (TRAV14/DV4, TRAJ16)
CAVNRFSDGQKLLF

SEQ ID NO: 178382 - protein, 13 aa, Homo sapiens
  CDR3 for beta chain variable domain of TCR clone 89191 (TRBV10-3, TRBJ2-7)
CASKLAVNYEQYF

SEQ ID NO: 178383 - protein, 15 aa, Homo sapiens
  CDR3 for alpha chain variable domain of TCR clone 89192 (TRAV17, TRAJ28)
CATVDSGAGRYQLTF

SEQ ID NO: 178384 - protein, 13 aa, Homo sapiens
  CDR3 for beta chain variable domain of TCR clone 89192 (TRBV5-4, TRBJ2-5)
CASSRQEGETQYF

SEQ ID NO: 178385 - protein, 15 aa, Homo sapiens
  CDR3 for alpha chain variable domain of TCR clone 89193 (TRAV8-1, TRAJ34)
CAVNSRTYNTDKLIF

SEQ ID NO: 178386 - protein, 14 aa, Homo sapiens
  CDR3 for beta chain variable domain of TCR clone 89193 (TRBV11-2, TRBJ2-3)
CASSRLARTDTQYF

SEQ ID NO: 178387 - protein, 11 aa, Homo sapiens
  CDR3 for alpha chain variable domain of TCR clone 89194 (TRAV8-3, TRAJ15)
CAVGLGTALIF

SEQ ID NO: 178388 - protein, 18 aa, Homo sapiens
  CDR3 for beta chain variable domain of TCR clone 89194 (TRBV18, TRBJ2-3)
CASSYTSGAAGGTDTQYF

SEQ ID NO: 178389 - protein, 12 aa, Homo sapiens
  CDR3 for alpha chain variable domain of TCR clone 89195 (TRAV12-3, TRAJ17)
CAMTLTGNKPPF

SEQ ID NO: 178390 - protein, 15 aa, Homo sapiens
  CDR3 for beta chain variable domain of TCR clone 89195 (TRBV20-1, TRBJ2-7)
CSARDRVSGMDEQYF

SEQ ID NO: 178391 - protein, 11 aa, Homo sapiens
  CDR3 for alpha chain variable domain of TCR clone 89196 (TRAV12-2, TRAJ31)
CAVTGWARLIF

SEQ ID NO: 178392 - protein, 16 aa, Homo sapiens
  CDR3 for beta chain variable domain of TCR clone 89196 (TRBV5-1, TRBJ2-3)
CASSLALAVVSDTQYF

SEQ ID NO: 178393 - protein, 10 aa, Homo sapiens
  CDR3 for alpha chain variable domain of TCR clone 89197 (TRAV8-4, TRAJ43)
CAVSADDMRF

SEQ ID NO: 178394 - protein, 13 aa, Homo sapiens
  CDR3 for beta chain variable domain of TCR clone 89197 (TRBV4-1, TRBJ2-3)
CASSQPPTDTQYF

SEQ ID NO: 178395 - protein, 13 aa, Homo sapiens
  CDR3 for alpha chain variable domain of TCR clone 89198 (TRAV12-2, TRAJ50)
CAVIVTSYDKVIF

SEQ ID NO: 178396 - protein, 14 aa, Homo sapiens
  CDR3 for beta chain variable domain of TCR clone 89198 (TRBV9, TRBJ2-1)
CASSVDPRGREQFF

SEQ ID NO: 178397 - protein, 15 aa, Homo sapiens
  CDR3 for alpha chain variable domain of TCR clone 89199 (TRAV21, TRAJ53)
CATLNSGGSNYKLTF

SEQ ID NO: 178398 - protein, 15 aa, Homo sapiens
  CDR3 for beta chain variable domain of TCR clone 89199 (TRBV27, TRBJ2-1)
CASNNGGGSSNEQFF

SEQ ID NO: 178399 - protein, 17 aa, Homo sapiens
  CDR3 for alpha chain variable domain of TCR clone 89200 (TRAV3, TRAJ42)
CAVRDRDYGGSQGNLIF

SEQ ID NO: 178400 - protein, 15 aa, Homo sapiens
  CDR3 for beta chain variable domain of TCR clone 89200 (TRBV27, TRBJ1-6)
CASSFDRGLGSTLHF

SEQ ID NO: 178401 - protein, 14 aa, Homo sapiens
  CDR3 for alpha chain variable domain of TCR clone 89201 (TRAV20, TRAJ32)
CCGRYGGATNKLIF

SEQ ID NO: 178402 - protein, 15 aa, Homo sapiens
  CDR3 for beta chain variable domain of TCR clone 89201 (TRBV6-3, TRBJ2-2)
CASRGMTVDTGELFF

SEQ ID NO: 178403 - protein, 15 aa, Homo sapiens
  CDR3 for alpha chain variable domain of TCR clone 89202 (TRAV3, TRAJ5)
CAVRDLDTGRRALTF

SEQ ID NO: 178404 - protein, 15 aa, Homo sapiens
  CDR3 for beta chain variable domain of TCR clone 89202 (TRBV20-1, TRBJ2-1)
CGARSPGGPGNEQFF

SEQ ID NO: 178405 - protein, 12 aa, Homo sapiens
  CDR3 for alpha chain variable domain of TCR clone 89203 (TRAV23/DV6, TRAJ30)
CAASKGDDKIIF

SEQ ID NO: 178406 - protein, 13 aa, Homo sapiens
  CDR3 for beta chain variable domain of TCR clone 89203 (TRBV19, TRBJ1-2)
CASSVPGKDGYTF

SEQ ID NO: 178407 - protein, 13 aa, Homo sapiens
  CDR3 for alpha chain variable domain of TCR clone 89204 (TRAV8-3, TRAJ43)
CSVGPDNNNDMRF

SEQ ID NO: 178408 - protein, 12 aa, Homo sapiens
  CDR3 for beta chain variable domain of TCR clone 89204 (TRBV7-2, TRBJ1-6)
CASSLSSSPLHF

SEQ ID NO: 178409 - protein, 13 aa, Homo sapiens
  CDR3 for alpha chain variable domain of TCR clone 89205 (TRAV26-1, TRAJ9)
CIVRPRKDWRLQN

SEQ ID NO: 178410 - protein, 13 aa, Homo sapiens
  CDR3 for beta chain variable domain of TCR clone 89205 (TRBV12-4, TRBJ1-2)
CASSLRQGKGYTF

SEQ ID NO: 178411 - protein, 14 aa, Homo sapiens
  CDR3 for alpha chain variable domain of TCR clone 89206 (TRAV35, TRAJ13)
CAGRSPGGYQKVTF

SEQ ID NO: 178412 - protein, 14 aa, Homo sapiens
  CDR3 for beta chain variable domain of TCR clone 89206 (TRBV20-1, TRBJ1-1)
CSAQTRIGGTEAFF

SEQ ID NO: 178413 - protein, 16 aa, Homo sapiens
  CDR3 for alpha chain variable domain of TCR clone 89207 (TRAV8-3, TRAJ44)
CAVGASNTGTASKLTF

SEQ ID NO: 178414 - protein, 15 aa, Homo sapiens
  CDR3 for beta chain variable domain of TCR clone 89207 (TRBV27, TRBJ1-5)
CASTFNRGSNQAQHF

SEQ ID NO: 178415 - protein, 14 aa, Homo sapiens
  CDR3 for alpha chain variable domain of TCR clone 89208 (TRAV2, TRAJ9)
CAVEDRSGGFKTIF

SEQ ID NO: 178416 - protein, 14 aa, Homo sapiens
  CDR3 for beta chain variable domain of TCR clone 89208 (TRBV2, TRBJ1-5)
CASSENRGGQPQHF

SEQ ID NO: 178417 - protein, 15 aa, Homo sapiens
  CDR3 for alpha chain variable domain of TCR clone 89209 (TRAV12-1, TRAJ45)
CVVLSGGGGADGLTF

SEQ ID NO: 178418 - protein, 12 aa, Homo sapiens
  CDR3 for beta chain variable domain of TCR clone 89209 (TRBV7-6, TRBJ2-5)
CASSLSQETQYF

SEQ ID NO: 178419 - protein, 22 aa, Homo sapiens
  CDR3 for alpha chain variable domain of TCR clone 89210 (TRAV8-3, TRAJ32)
CAVEVVLQTSSSLELSLCLLSS

SEQ ID NO: 178420 - protein, 15 aa, Homo sapiens
  CDR3 for beta chain variable domain of TCR clone 89210 (TRBV7-2, TRBJ2-1)
CASSSRTSREDEQFF

SEQ ID NO: 178421 - protein, 15 aa, Homo sapiens
  CDR3 for alpha chain variable domain of TCR clone 89211 (TRAV3, TRAJ3)
CAVRDGHSSASKIIF

SEQ ID NO: 178422 - protein, 14 aa, Homo sapiens
  CDR3 for beta chain variable domain of TCR clone 89211 (TRBV28, TRBJ1-4)
CASGFGTFDEKLFF

SEQ ID NO: 178423 - protein, 11 aa, Homo sapiens
  CDR3 for alpha chain variable domain of TCR clone 89212 (TRAV1-2, TRAJ20)
CAVANDYQLSF

SEQ ID NO: 178424 - protein, 18 aa, Homo sapiens
  CDR3 for beta chain variable domain of TCR clone 89212 (TRBV20-1, TRBJ2-6)
CSAETTTTHGSGANVLTF

SEQ ID NO: 178425 - protein, 17 aa, Homo sapiens
  CDR3 for alpha chain variable domain of TCR clone 89213 (TRAV8-6, TRAJ58)
CAVSSWVGETSGSRLTF

SEQ ID NO: 178426 - protein, 19 aa, Homo sapiens
  CDR3 for beta chain variable domain of TCR clone 89213 (TRBV19, TRBJ2-5)
CASSIGQVTDFFLGETQYF

SEQ ID NO: 178427 - protein, 12 aa, Homo sapiens
  CDR3 for alpha chain variable domain of TCR clone 89214 (TRAV13-2, TRAJ23)
CAERHRGGKLIF

SEQ ID NO: 178428 - protein, 15 aa, Homo sapiens
  CDR3 for beta chain variable domain of TCR clone 89214 (TRBV2, TRBJ2-1)
CASSELAGSYNEQFF

SEQ ID NO: 178429 - protein, 18 aa, Homo sapiens
  CDR3 for alpha chain variable domain of TCR clone 89215 (TRAV35, TRAJ28)
CAGHNYPLSGAGSYQLTF

SEQ ID NO: 178430 - protein, 12 aa, Homo sapiens
  CDR3 for beta chain variable domain of TCR clone 89215 (TRBV7-9, TRBJ1-1)
CANSLEGTEAFF

SEQ ID NO: 178431 - protein, 13 aa, Homo sapiens
  CDR3 for alpha chain variable domain of TCR clone 89216 (TRAV3, TRAJ3)
CAVADSSASKTIF

SEQ ID NO: 178432 - protein, 12 aa, Homo sapiens
  CDR3 for beta chain variable domain of TCR clone 89216 (TRBV7-8, TRBJ2-7)
CASEGGPHGQYF

SEQ ID NO: 178433 - protein, 15 aa, Homo sapiens
  CDR3 for alpha chain variable domain of TCR clone 89217 (TRAV3, TRAJ5)
CAVSDLDTGRRALTF

SEQ ID NO: 178434 - protein, 14 aa, Homo sapiens
  CDR3 for beta chain variable domain of TCR clone 89217 (TRBV25-1, TRBJ1-1)
CASTHLGGNTEAFF

SEQ ID NO: 178435 - protein, 14 aa, Homo sapiens
  CDR3 for alpha chain variable domain of TCR clone 89218 (TRAV26-2, TRAJ27)
CILRDISDAGKSTF

SEQ ID NO: 178436 - protein, 17 aa, Homo sapiens
  CDR3 for beta chain variable domain of TCR clone 89218 (TRBV13, TRBJ2-3)
CASSLSRVAGGRNTQYF

SEQ ID NO: 178437 - protein, 12 aa, Homo sapiens
  CDR3 for alpha chain variable domain of TCR clone 89219 (TRAV12-2, TRAJ10)
WGVTGGGDKLTF

SEQ ID NO: 178438 - protein, 16 aa, Homo sapiens
  CDR3 for beta chain variable domain of TCR clone 89219 (TRBV24-1, TRBJ2-3)
CATSDRRQDLTDTQYF

SEQ ID NO: 178439 - protein, 14 aa, Homo sapiens
  CDR3 for alpha chain variable domain of TCR clone 89220 (TRAV3, TRAJ37)
CAVKESGNTGKLIF

SEQ ID NO: 178440 - protein, 14 aa, Homo sapiens
  CDR3 for beta chain variable domain of TCR clone 89220 (TRBV7-9, TRBJ2-7)
CASSLDRPTDEQYF

SEQ ID NO: 178441 - protein, 17 aa, Homo sapiens
  CDR3 for alpha chain variable domain of TCR clone 89221 (TRAV3, TRAJ6)
CAVRDGPRAGGSDIPTF

SEQ ID NO: 178442 - protein, 14 aa, Homo sapiens
  CDR3 for beta chain variable domain of TCR clone 89221 (TRBV11-2, TRBJ2-3)
CASSRLARTDTQYF

SEQ ID NO: 178443 - protein, 19 aa, Homo sapiens
  CDR3 for alpha chain variable domain of TCR clone 89222 (TRAV26-1, TRAJ52)
CIVRAHRNAGGTSYGKLTF

SEQ ID NO: 178444 - protein, 13 aa, Homo sapiens
  CDR3 for beta chain variable domain of TCR clone 89222 (TRBV7-9, TRBJ2-7)
CASSFAGAYEQYF

SEQ ID NO: 178445 - protein, 11 aa, Homo sapiens
  CDR3 for alpha chain variable domain of TCR clone 89223 (TRAV4, TRAJ31)
CLVGDNAGLMF

SEQ ID NO: 178446 - protein, 14 aa, Homo sapiens
  CDR3 for beta chain variable domain of TCR clone 89223 (TRBV4-1, TRBJ2-2)
CASSQAVNTGELFF

SEQ ID NO: 178447 - protein, 17 aa, Homo sapiens
  CDR3 for alpha chain variable domain of TCR clone 89224 (TRAV3, TRAJ6)
CAVSSRTDTGGSYIPTF

SEQ ID NO: 178448 - protein, 18 aa, Homo sapiens
  CDR3 for beta chain variable domain of TCR clone 89224 (TRBV7-2, TRBJ2-3)
CASSLETSRGRKADTQYF

SEQ ID NO: 178449 - protein, 17 aa, Homo sapiens
  CDR3 for alpha chain variable domain of TCR clone 89225 (TRAV1-2, TRAJ8)
CAVRDPDENTCFQKLVF

SEQ ID NO: 178450 - protein, 16 aa, Homo sapiens
  CDR3 for beta chain variable domain of TCR clone 89225 (TRBV7-9, TRBJ2-2)
CASSGFGGANTGELFF

SEQ ID NO: 178451 - protein, 17 aa, Homo sapiens
  CDR3 for alpha chain variable domain of TCR clone 89226 (TRAV4, TRAJ13)
CLVGVQGSSGGYQKVTF

SEQ ID NO: 178452 - protein, 18 aa, Homo sapiens
  CDR3 for beta chain variable domain of TCR clone 89226 (TRBV15, TRBJ2-3)
CATSRDGAKSWDTDTQYF

SEQ ID NO: 178453 - protein, 14 aa, Homo sapiens
  CDR3 for alpha chain variable domain of TCR clone 89227 (TRAV8-2, TRAJ11)
CVVSEKSGYSTLTF

SEQ ID NO: 178454 - protein, 15 aa, Homo sapiens
  CDR3 for beta chain variable domain of TCR clone 89227 (TRBV28, TRBJ2-1)
CQQFPEYPRDNEQFF

SEQ ID NO: 178455 - protein, 16 aa, Homo sapiens
  CDR3 for alpha chain variable domain of TCR clone 89228 (TRAV30, TRAJ24)
CGTEIVDADSWGKFQF

SEQ ID NO: 178456 - protein, 14 aa, Homo sapiens
  CDR3 for beta chain variable domain of TCR clone 89228 (TRBV18, TRBJ2-7)
CASSPGGGAYEQYF

SEQ ID NO: 178457 - protein, 13 aa, Homo sapiens
  CDR3 for alpha chain variable domain of TCR clone 89229 (TRAV2, TRAJ40)
CAVVTSGTYKYIF

SEQ ID NO: 178458 - protein, 12 aa, Homo sapiens
  CDR3 for beta chain variable domain of TCR clone 89229 (TRBV3-1, TRBJ1-5)
CASSQPNQPQHF

SEQ ID NO: 178459 - protein, 13 aa, Homo sapiens
  CDR3 for alpha chain variable domain of TCR clone 89230 (TRAV8-3, TRAJ43)
CAVGPDNNHDMRF

SEQ ID NO: 178460 - protein, 12 aa, Homo sapiens
  CDR3 for beta chain variable domain of TCR clone 89230 (TRBV7-2, TRBJ1-6)
CASSLSSSPLHF

SEQ ID NO: 178461 - protein, 17 aa, Homo sapiens
  CDR3 for alpha chain variable domain of TCR clone 89231 (TRAV3, TRAJ6)
CAVRDGPRAGGSYIPTF

SEQ ID NO: 178462 - protein, 16 aa, Homo sapiens
  CDR3 for beta chain variable domain of TCR clone 89231 (TRBV7-6, TRBJ1-6)
CASSLSSRIGDSPLHF

SEQ ID NO: 178463 - protein, 17 aa, Homo sapiens
  CDR3 for alpha chain variable domain of TCR clone 89232 (TRAV13-1, )
CAANIQNPDPAVYQMRD

SEQ ID NO: 178464 - protein, 14 aa, Homo sapiens
  CDR3 for beta chain variable domain of TCR clone 89232 (TRBV19, TRBJ2-7)
CASSIGPNSYEQYF

SEQ ID NO: 178465 - protein, 13 aa, Homo sapiens
  CDR3 for alpha chain variable domain of TCR clone 89233 (TRAV13-1, TRAJ6)
CAASKGGSYIHTF

SEQ ID NO: 178466 - protein, 13 aa, Homo sapiens
  CDR3 for beta chain variable domain of TCR clone 89233 (TRBV7-9, TRBJ2-5)
CASLPSGRETQYF

SEQ ID NO: 178467 - protein, 15 aa, Homo sapiens
  CDR3 for alpha chain variable domain of TCR clone 89234 (TRAV2, TRAJ9)
CAVEDRGTGGFKTIF

SEQ ID NO: 178468 - protein, 13 aa, Homo sapiens
  CDR3 for beta chain variable domain of TCR clone 89234 (TRBV7-6, TRBJ1-2)
CASSLVADYGYTF

SEQ ID NO: 178469 - protein, 14 aa, Homo sapiens
  CDR3 for alpha chain variable domain of TCR clone 89235 (TRAV29/DV5, TRAJ45)
CAASFRGGADGLTF

SEQ ID NO: 178470 - protein, 16 aa, Homo sapiens
  CDR3 for beta chain variable domain of TCR clone 89235 (TRBV6-5, TRBJ2-1)
CASSYSLSGGYNEQFF

SEQ ID NO: 178471 - protein, 14 aa, Homo sapiens
  CDR3 for alpha chain variable domain of TCR clone 89236 (TRAV12-3, TRAJ10)
SHLPLPGGGNKLTF

SEQ ID NO: 178472 - protein, 15 aa, Homo sapiens
  CDR3 for beta chain variable domain of TCR clone 89236 (TRBV4-1, TRBJ1-4)
CASSDTGGTNEKLFF

SEQ ID NO: 178473 - protein, 13 aa, Homo sapiens
  CDR3 for alpha chain variable domain of TCR clone 89237 (TRAV17, TRAJ34)
CATDLYNTDKLIF

SEQ ID NO: 178474 - protein, 12 aa, Homo sapiens
  CDR3 for beta chain variable domain of TCR clone 89237 (TRBV11-2, TRBJ2-2)
CASSLGGGELLF

SEQ ID NO: 178475 - protein, 14 aa, Homo sapiens
  CDR3 for alpha chain variable domain of TCR clone 89238 (TRAV26-1, TRAJ34)
CLVRVAYNTDKLIF

SEQ ID NO: 178476 - protein, 15 aa, Homo sapiens
  CDR3 for beta chain variable domain of TCR clone 89238 (TRBV20-1, TRBJ2-7)
CSARVPAAYFYEQYF

SEQ ID NO: 178477 - protein, 14 aa, Homo sapiens
  CDR3 for alpha chain variable domain of TCR clone 89239 (TRAV9-2, TRAJ39)
CALYIYNAGNMLTF

SEQ ID NO: 178478 - protein, 18 aa, Homo sapiens
  CDR3 for beta chain variable domain of TCR clone 89239 (TRBV12-4, TRBJ2-4)
CASSRTGAVDVAKNIQYF

SEQ ID NO: 178479 - protein, 14 aa, Homo sapiens
  CDR3 for alpha chain variable domain of TCR clone 89240 (TRAV26-1, TRAJ38)
CIADNAGNNRKLIW

SEQ ID NO: 178480 - protein, 14 aa, Homo sapiens
  CDR3 for beta chain variable domain of TCR clone 89240 (TRBV11-3, TRBJ1-6)
CASSFSGGDSPLHF

SEQ ID NO: 178481 - protein, 14 aa, Homo sapiens
  CDR3 for alpha chain variable domain of TCR clone 89241 (TRAV35, TRAJ13)
CAGSPSGGYQKVTF

SEQ ID NO: 178482 - protein, 13 aa, Homo sapiens
  CDR3 for beta chain variable domain of TCR clone 89241 (TRBV29-1, TRBJ1-1)
CSVWDSRNTEAFF

SEQ ID NO: 178483 - protein, 14 aa, Homo sapiens
  CDR3 for alpha chain variable domain of TCR clone 89242 (TRAV21, TRAJ23)
WAIMIYNQGGKLIF

SEQ ID NO: 178484 - protein, 18 aa, Homo sapiens
  CDR3 for beta chain variable domain of TCR clone 89242 (TRBV20-1, TRBJ2-6)
CSAETTPTHGSGANVLTF

SEQ ID NO: 178485 - protein, 16 aa, Homo sapiens
  CDR3 for alpha chain variable domain of TCR clone 89243 (TRAV30, TRAJ24)
CGTEIVDADSWGKFQF

SEQ ID NO: 178486 - protein, 17 aa, Homo sapiens
  CDR3 for beta chain variable domain of TCR clone 89243 (TRBV20-1, TRBJ2-1)
CSARDRRRASSYNEQFF

SEQ ID NO: 178487 - protein, 10 aa, Homo sapiens
  CDR3 for alpha chain variable domain of TCR clone 89244 (TRAV13-1, TRAJ43)
CAASKNDIRF

SEQ ID NO: 178488 - protein, 13 aa, Homo sapiens
  CDR3 for beta chain variable domain of TCR clone 89244 (TRBV20-1, TRBJ1-5)
CSARTGVNQPQHF

SEQ ID NO: 178489 - protein, 13 aa, Homo sapiens
  CDR3 for alpha chain variable domain of TCR clone 89245 (TRAV21, TRAJ11)
CAVPNSGYSTLTF

SEQ ID NO: 178490 - protein, 13 aa, Homo sapiens
  CDR3 for beta chain variable domain of TCR clone 89245 (TRBV3-1, TRBJ2-7)
CASSLLDGYEQYF

SEQ ID NO: 178491 - protein, 13 aa, Homo sapiens
  CDR3 for alpha chain variable domain of TCR clone 89246 (TRAV8-3, TRAJ44)
CAVVPGTASKLTF

SEQ ID NO: 178492 - protein, 14 aa, Homo sapiens
  CDR3 for beta chain variable domain of TCR clone 89246 (TRBV11-2, TRBJ2-3)
CAGRRLARTDTQYF

SEQ ID NO: 178493 - protein, 13 aa, Homo sapiens
  CDR3 for alpha chain variable domain of TCR clone 89247 (TRAV3, TRAJ20)
CAVRDAGGYKLSF

SEQ ID NO: 178494 - protein, 15 aa, Homo sapiens
  CDR3 for beta chain variable domain of TCR clone 89247 (TRBV6-1, TRBJ2-7)
CASSEGGGVSYEQYF

SEQ ID NO: 178495 - protein, 11 aa, Homo sapiens
  CDR3 for alpha chain variable domain of TCR clone 89248 (TRAV1-1, TRAJ23)
CAVRQVGKLIF

SEQ ID NO: 178496 - protein, 20 aa, Homo sapiens
  CDR3 for beta chain variable domain of TCR clone 89248 (TRBV7-8, TRBJ2-2)
CASSHLFPGPAIHITGELFF

SEQ ID NO: 178497 - protein, 14 aa, Homo sapiens
  CDR3 for alpha chain variable domain of TCR clone 89249 (TRAV3, TRAJ21)
CAVESQANFNKFYF

SEQ ID NO: 178498 - protein, 12 aa, Homo sapiens
  CDR3 for beta chain variable domain of TCR clone 89249 (TRBV6-3, TRBJ2-7)
CVSSLTPYEQYF

SEQ ID NO: 178499 - protein, 13 aa, Homo sapiens
  CDR3 for alpha chain variable domain of TCR clone 89250 (TRAV21, TRAJ27)
CAARPGNAGKSTF

SEQ ID NO: 178500 - protein, 14 aa, Homo sapiens
  CDR3 for beta chain variable domain of TCR clone 89250 (TRBV2, TRBJ2-7)
CASSLTSGGYEQYF

SEQ ID NO: 178501 - protein, 16 aa, Homo sapiens
  CDR3 for alpha chain variable domain of TCR clone 89251 (TRAV12-3, TRAJ53)
CAMSPGSGGSNYKLTF

SEQ ID NO: 178502 - protein, 12 aa, Homo sapiens
  CDR3 for beta chain variable domain of TCR clone 89251 (TRBV27, TRBJ2-7)
CASSGGFYEQYF

SEQ ID NO: 178503 - protein, 12 aa, Homo sapiens
  CDR3 for alpha chain variable domain of TCR clone 89252 (TRAV12-3, TRAJ40)
CAMSSGTYKYIF

SEQ ID NO: 178504 - protein, 15 aa, Homo sapiens
  CDR3 for beta chain variable domain of TCR clone 89252 (TRBV7-3, TRBJ2-2)
CASSETGQGTGQLFF

SEQ ID NO: 178505 - protein, 15 aa, Homo sapiens
  CDR3 for alpha chain variable domain of TCR clone 89253 (TRAV3, TRAJ22)
CAVRDRGGSARQLTF

SEQ ID NO: 178506 - protein, 15 aa, Homo sapiens
  CDR3 for beta chain variable domain of TCR clone 89253 (TRBV4-1, TRBJ2-1)
CASSQVLAGRDEQFF

SEQ ID NO: 178507 - protein, 12 aa, Homo sapiens
  CDR3 for alpha chain variable domain of TCR clone 89254 (TRAV12-3, TRAJ17)
CAMTLTGNKLTF

SEQ ID NO: 178508 - protein, 13 aa, Homo sapiens
  CDR3 for beta chain variable domain of TCR clone 89254 (TRBV7-3, TRBJ1-1)
CASSQDWGAEALF

SEQ ID NO: 178509 - protein, 16 aa, Homo sapiens
  CDR3 for alpha chain variable domain of TCR clone 89255 (TRAV3, TRAJ37)
CAFRPHGSGNTGKLIF

SEQ ID NO: 178510 - protein, 16 aa, Homo sapiens
  CDR3 for beta chain variable domain of TCR clone 89255 (TRBV9, TRBJ1-2)
CASSVEEKVSPYGYTF

SEQ ID NO: 178511 - protein, 14 aa, Homo sapiens
  CDR3 for alpha chain variable domain of TCR clone 89256 (TRAV13-1, TRAJ44)
CAAKATCTASKLTF

SEQ ID NO: 178512 - protein, 13 aa, Homo sapiens
  CDR3 for beta chain variable domain of TCR clone 89256 (TRBV5-5, TRBJ1-2)
CASSFWRGEDYTF

SEQ ID NO: 178513 - protein, 18 aa, Homo sapiens
  CDR3 for alpha chain variable domain of TCR clone 89257 (TRAV26-2, TRAJ45)
CILRVDKYSGGGADGLTF

SEQ ID NO: 178514 - protein, 16 aa, Homo sapiens
  CDR3 for beta chain variable domain of TCR clone 89257 (TRBV2, TRBJ1-4)
CASNLLHGATNEKLFF

SEQ ID NO: 178515 - protein, 17 aa, Homo sapiens
  CDR3 for alpha chain variable domain of TCR clone 89258 (TRAV26-1, TRAJ53)
CLVRVDDSGGSNYKLTF

SEQ ID NO: 178516 - protein, 15 aa, Homo sapiens
  CDR3 for beta chain variable domain of TCR clone 89258 (TRBV20-1, TRBJ2-7)
CSARVPAAYFYEQYF

SEQ ID NO: 178517 - protein, 14 aa, Homo sapiens
  CDR3 for alpha chain variable domain of TCR clone 89259 (TRAV1-2, TRAJ16)
CAVNRFSDGQKLPF

SEQ ID NO: 178518 - protein, 17 aa, Homo sapiens
  CDR3 for beta chain variable domain of TCR clone 89259 (TRBV5-5, TRBJ1-2)
CASSLGSLDGQSEGYTF

SEQ ID NO: 178519 - protein, 15 aa, Homo sapiens
  CDR3 for alpha chain variable domain of TCR clone 89260 (TRAV17, TRAJ16)
CATALRFSDGQKRLF

SEQ ID NO: 178520 - protein, 15 aa, Homo sapiens
  CDR3 for beta chain variable domain of TCR clone 89260 (TRBV20-1, TRBJ1-1)
CSASRGVTGNTEAFF

SEQ ID NO: 178521 - protein, 14 aa, Homo sapiens
  CDR3 for alpha chain variable domain of TCR clone 89261 (TRAV27, TRAJ23)
CAGAFDNQGGKLIF

SEQ ID NO: 178522 - protein, 15 aa, Homo sapiens
  CDR3 for beta chain variable domain of TCR clone 89261 (TRBV7-3, TRBJ2-7)
CASSLTGQGKYKQYF

SEQ ID NO: 178523 - protein, 18 aa, Homo sapiens
  CDR3 for alpha chain variable domain of TCR clone 89262 (TRAV26-1, TRAJ23)
CIVRVGLEVWNQGGKLIF

SEQ ID NO: 178524 - protein, 14 aa, Homo sapiens
  CDR3 for beta chain variable domain of TCR clone 89262 (TRBV12-4, TRBJ1-2)
CASSNLRGNYGYTF

SEQ ID NO: 178525 - protein, 13 aa, Homo sapiens
  CDR3 for alpha chain variable domain of TCR clone 89263 (TRAV16, TRAJ9)
CALRATGGFKTIS

SEQ ID NO: 178526 - protein, 16 aa, Homo sapiens
  CDR3 for beta chain variable domain of TCR clone 89263 (TRBV5-1, TRBJ1-3)
CASSRSGEDSGNTIYF

SEQ ID NO: 178527 - protein, 13 aa, Homo sapiens
  CDR3 for alpha chain variable domain of TCR clone 89264 (TRAV13-1, TRAJ5)
CAASDTGRRAVTF

SEQ ID NO: 178528 - protein, 12 aa, Homo sapiens
  CDR3 for beta chain variable domain of TCR clone 89264 (TRBV28, TRBJ2-3)
CASSLYRDTQYF

SEQ ID NO: 178529 - protein, 12 aa, Homo sapiens
  CDR3 for alpha chain variable domain of TCR clone 89265 (TRAV17, TRAJ12)
CATLRSSCKLIF

SEQ ID NO: 178530 - protein, 14 aa, Homo sapiens
  CDR3 for beta chain variable domain of TCR clone 89265 (TRBV19, TRBJ2-1)
CARGARSFQWEQFF

SEQ ID NO: 178531 - protein, 12 aa, Homo sapiens
  CDR3 for alpha chain variable domain of TCR clone 89266 (TRAV1-1, TRAJ20)
CAVREDDYKLSF

SEQ ID NO: 178532 - protein, 15 aa, Homo sapiens
  CDR3 for beta chain variable domain of TCR clone 89266 (TRBV6-4, TRBJ2-1)
CASSDSTGGYNEQFF

SEQ ID NO: 178533 - protein, 14 aa, Homo sapiens
  CDR3 for alpha chain variable domain of TCR clone 89267 (TRAV29/DV5, TRAJ44)
CAAFLVGTASKLTF

SEQ ID NO: 178534 - protein, 16 aa, Homo sapiens
  CDR3 for beta chain variable domain of TCR clone 89267 (TRBV12-5, TRBJ2-5)
CASGPRTSGNQETQYF

SEQ ID NO: 178535 - protein, 12 aa, Homo sapiens
  CDR3 for alpha chain variable domain of TCR clone 89268 (TRAV2, TRAJ33)
CAVWGSNFQLIW

SEQ ID NO: 178536 - protein, 16 aa, Homo sapiens
  CDR3 for beta chain variable domain of TCR clone 89268 (TRBV20-1, TRBJ1-4)
CSAPGQGLLTNEKLFF

SEQ ID NO: 178537 - protein, 12 aa, Homo sapiens
  CDR3 for alpha chain variable domain of TCR clone 89269 (TRAV13-2, TRAJ23)
CAERHRGGKLIF

SEQ ID NO: 178538 - protein, 16 aa, Homo sapiens
  CDR3 for beta chain variable domain of TCR clone 89269 (TRBV7-2, TRBJ2-6)
CAILSGVSPGANVLTF

SEQ ID NO: 178539 - protein, 14 aa, Homo sapiens
  CDR3 for alpha chain variable domain of TCR clone 89270 (TRAV12-1, TRAJ22)
CVVTTSGSARQLTF

SEQ ID NO: 178540 - protein, 14 aa, Homo sapiens
  CDR3 for beta chain variable domain of TCR clone 89270 (TRBV7-9, TRBJ2-2)
CASSGLADTGELFF

SEQ ID NO: 178541 - protein, 11 aa, Homo sapiens
  CDR3 for alpha chain variable domain of TCR clone 89271 (TRAV2, TRAJ13)
CASGGYQTVTF

SEQ ID NO: 178542 - protein, 18 aa, Homo sapiens
  CDR3 for beta chain variable domain of TCR clone 89271 (TRBV19, TRBJ2-6)
CASIGPTSGGSGANVLTF

SEQ ID NO: 178543 - protein, 15 aa, Homo sapiens
  CDR3 for alpha chain variable domain of TCR clone 89272 (TRAV16, TRAJ48)
CALFISNFGNEKLTF

SEQ ID NO: 178544 - protein, 18 aa, Homo sapiens
  CDR3 for beta chain variable domain of TCR clone 89272 (TRBV11-2, TRBJ2-3)
CASSLGGASRGAPNTQYF

SEQ ID NO: 178545 - protein, 14 aa, Homo sapiens
  CDR3 for alpha chain variable domain of TCR clone 89273 (TRAV16, TRAJ39)
CALSKNNAGNMITF

SEQ ID NO: 178546 - protein, 16 aa, Homo sapiens
  CDR3 for beta chain variable domain of TCR clone 89273 (TRBV6-6, TRBJ2-1)
CASSYSFSGSYNEQFF

SEQ ID NO: 178547 - protein, 14 aa, Homo sapiens
  CDR3 for alpha chain variable domain of TCR clone 89274 (TRAV12-3, TRAJ58)
CAMSTETSGARLTF

SEQ ID NO: 178548 - protein, 13 aa, Homo sapiens
  CDR3 for beta chain variable domain of TCR clone 89274 (TRBV27, TRBJ2-3)
CASSWGRTDTQYF

SEQ ID NO: 178549 - protein, 14 aa, Homo sapiens
  CDR3 for alpha chain variable domain of TCR clone 89275 (TRAV17, TRAJ57)
CATDPQGGSEKLVF

SEQ ID NO: 178550 - protein, 15 aa, Homo sapiens
  CDR3 for beta chain variable domain of TCR clone 89275 (TRBV7-8, TRBJ2-1)
CASSLAGGLYNEQFF

SEQ ID NO: 178551 - protein, 15 aa, Homo sapiens
  CDR3 for alpha chain variable domain of TCR clone 89276 (TRAV2, TRAJ9)
CAVEDRGTGGFKTIF

SEQ ID NO: 178552 - protein, 15 aa, Homo sapiens
  CDR3 for beta chain variable domain of TCR clone 89276 (TRBV2, TRBJ2-7)
CASTLLGSGATEQYF

SEQ ID NO: 178553 - protein, 14 aa, Homo sapiens
  CDR3 for alpha chain variable domain of TCR clone 89277 (TRAV12-2, TRAJ40)
CAVMIPSGTYKYIF

SEQ ID NO: 178554 - protein, 13 aa, Homo sapiens
  CDR3 for beta chain variable domain of TCR clone 89277 (TRBV7-9, TRBJ1-2)
CASSLKQNYGYTF

SEQ ID NO: 178555 - protein, 12 aa, Homo sapiens
  CDR3 for alpha chain variable domain of TCR clone 89278 (TRAV12-3, TRAJ17)
CAMTLTGNKLTF

SEQ ID NO: 178556 - protein, 17 aa, Homo sapiens
  CDR3 for beta chain variable domain of TCR clone 89278 (TRBV11-3, TRBJ2-6)
CASKWGQGLSGANVLTF

SEQ ID NO: 178557 - protein, 17 aa, Homo sapiens
  CDR3 for alpha chain variable domain of TCR clone 89279 (TRAV13-1, TRAJ52)
CAAGRNAGGTSYGKLTF

SEQ ID NO: 178558 - protein, 15 aa, Homo sapiens
  CDR3 for beta chain variable domain of TCR clone 89279 (TRBV5-1, TRBJ2-3)
CASSVTSGSTDTQYF

SEQ ID NO: 178559 - protein, 14 aa, Homo sapiens
  CDR3 for alpha chain variable domain of TCR clone 89280 (TRAV14/DV4, TRAJ54)
CAMREAPGAQKLVF

SEQ ID NO: 178560 - protein, 14 aa, Homo sapiens
  CDR3 for beta chain variable domain of TCR clone 89280 (TRBV19, TRBJ2-7)
CASTVQGRPYEQYF

SEQ ID NO: 178561 - protein, 14 aa, Homo sapiens
  CDR3 for alpha chain variable domain of TCR clone 89281 (TRAV1-2, TRAJ8)
CAVREDTGFQKLVF

SEQ ID NO: 178562 - protein, 15 aa, Homo sapiens
  CDR3 for beta chain variable domain of TCR clone 89281 (TRBV7-9, TRBJ2-7)
CASSLAPAEAYEQYF

SEQ ID NO: 178563 - protein, 12 aa, Homo sapiens
  CDR3 for alpha chain variable domain of TCR clone 89282 (TRAV8-3, TRAJ26)
CAGDNYGQHFVF

SEQ ID NO: 178564 - protein, 15 aa, Homo sapiens
  CDR3 for beta chain variable domain of TCR clone 89282 (TRBV11-2, TRBJ2-1)
CASSLGTSGLNEQFF

SEQ ID NO: 178565 - protein, 16 aa, Homo sapiens
  CDR3 for alpha chain variable domain of TCR clone 89283 (TRAV12-2, TRAJ18)
CAVTTDRGSTLGRLYF

SEQ ID NO: 178566 - protein, 14 aa, Homo sapiens
  CDR3 for beta chain variable domain of TCR clone 89283 (TRBV4-2, TRBJ1-5)
CASSQDSINQAQHF

SEQ ID NO: 178567 - protein, 14 aa, Homo sapiens
  CDR3 for alpha chain variable domain of TCR clone 89284 (TRAV25, TRAJ27)
CAGEHLTNAGKSTF

SEQ ID NO: 178568 - protein, 12 aa, Homo sapiens
  CDR3 for beta chain variable domain of TCR clone 89284 (TRBV11-2, TRBJ2-1)
CASSPGNNEQFF

SEQ ID NO: 178569 - protein, 14 aa, Homo sapiens
  CDR3 for alpha chain variable domain of TCR clone 89285 (TRAV12-1, TRAJ23)
CVVAGYNQGGKLIF

SEQ ID NO: 178570 - protein, 10 aa, Homo sapiens
  CDR3 for beta chain variable domain of TCR clone 89285 (TRBV2, TRBJ2-5)
CASSAATQYF

SEQ ID NO: 178571 - protein, 17 aa, Homo sapiens
  CDR3 for alpha chain variable domain of TCR clone 89286 (TRAV4, TRAJ13)
CLVSVQGSSGGYQKVTF

SEQ ID NO: 178572 - protein, 18 aa, Homo sapiens
  CDR3 for beta chain variable domain of TCR clone 89286 (TRBV15, TRBJ2-3)
CATSRDGARSWDTDTQYF

SEQ ID NO: 178573 - protein, 15 aa, Homo sapiens
  CDR3 for alpha chain variable domain of TCR clone 89287 (TRAV12-2, TRAJ53)
CAVNGGGGSNYKLTF

SEQ ID NO: 178574 - protein, 14 aa, Homo sapiens
  CDR3 for beta chain variable domain of TCR clone 89287 (TRBV5-4, TRBJ2-1)
CASSLSGSYNEQFF

SEQ ID NO: 178575 - protein, 18 aa, Homo sapiens
  CDR3 for alpha chain variable domain of TCR clone 89288 (TRAV12-3, TRAJ52)
CAVSVGGAGGTSYGKLTF

SEQ ID NO: 178576 - protein, 15 aa, Homo sapiens
  CDR3 for beta chain variable domain of TCR clone 89288 (TRBV27, TRBJ1-6)
CASSFDRGLGSPLHF

SEQ ID NO: 178577 - protein, 15 aa, Homo sapiens
  CDR3 for alpha chain variable domain of TCR clone 89289 (TRAV8-2, TRAJ42)
CVVLGYGGSQGNLIF

SEQ ID NO: 178578 - protein, 12 aa, Homo sapiens
  CDR3 for beta chain variable domain of TCR clone 89289 (TRBV5-1, TRBJ1-5)
CASRPDNQPQHF

SEQ ID NO: 178579 - protein, 13 aa, Homo sapiens
  CDR3 for alpha chain variable domain of TCR clone 89290 (TRAV13-1, TRAJ21)
CAASIYNFNKFYF

SEQ ID NO: 178580 - protein, 16 aa, Homo sapiens
  CDR3 for beta chain variable domain of TCR clone 89290 (TRBV2, TRBJ2-7)
CASSEPWTGPSYEQYF

SEQ ID NO: 178581 - protein, 15 aa, Homo sapiens
  CDR3 for alpha chain variable domain of TCR clone 89291 (TRAV16, TRAJ17)
CALSQIKAAGNKLTF

SEQ ID NO: 178582 - protein, 16 aa, Homo sapiens
  CDR3 for beta chain variable domain of TCR clone 89291 (TRBV11-2, TRBJ1-2)
CASSLDTGGADYGYTF

SEQ ID NO: 178583 - protein, 15 aa, Homo sapiens
  CDR3 for alpha chain variable domain of TCR clone 89292 (TRAV21, TRAJ38)
CAVWQDAGNNRKLIW

SEQ ID NO: 178584 - protein, 16 aa, Homo sapiens
  CDR3 for beta chain variable domain of TCR clone 89292 (TRBV4-2, TRBJ1-1)
CASRPLDGGGDTEAFF

SEQ ID NO: 178585 - protein, 10 aa, Homo sapiens
  CDR3 for alpha chain variable domain of TCR clone 89293 (TRAV30, TRAJ32)
CGTEKDRVVL

SEQ ID NO: 178586 - protein, 13 aa, Homo sapiens
  CDR3 for beta chain variable domain of TCR clone 89293 (TRBV10-3, TRBJ2-7)
CASKLAVNYEQYF

SEQ ID NO: 178587 - protein, 13 aa, Homo sapiens
  CDR3 for alpha chain variable domain of TCR clone 89294 (TRAV27, TRAJ45)
CRSSGGGADGLTF

SEQ ID NO: 178588 - protein, 14 aa, Homo sapiens
  CDR3 for beta chain variable domain of TCR clone 89294 (TRBV11-2, TRBJ2-1)
CASSLDSNYNEQVF

SEQ ID NO: 178589 - protein, 13 aa, Homo sapiens
  CDR3 for alpha chain variable domain of TCR clone 89295 (TRAV27, TRAJ57)
CRSAQGGSEKLVF

SEQ ID NO: 178590 - protein, 16 aa, Homo sapiens
  CDR3 for beta chain variable domain of TCR clone 89295 (TRBV10-3, TRBJ2-1)
CAISGEGDGGGGEQFF

SEQ ID NO: 178591 - protein, 15 aa, Homo sapiens
  CDR3 for alpha chain variable domain of TCR clone 89296 (TRAV21, TRAJ40)
CAVRPQTSGTYKYIF

SEQ ID NO: 178592 - protein, 16 aa, Homo sapiens
  CDR3 for beta chain variable domain of TCR clone 89296 (TRBV4-1, TRBJ1-1)
CASSQDAGMGNTEAFF

SEQ ID NO: 178593 - protein, 16 aa, Homo sapiens
  CDR3 for alpha chain variable domain of TCR clone 89297 (TRAV27, TRAJ53)
CAAPAGSGGSNYKLTF

SEQ ID NO: 178594 - protein, 14 aa, Homo sapiens
  CDR3 for beta chain variable domain of TCR clone 89297 (TRBV4-3, TRBJ1-5)
CASSQGGQGWPQHF

SEQ ID NO: 178595 - protein, 18 aa, Homo sapiens
  CDR3 for alpha chain variable domain of TCR clone 89298 (TRAV21, TRAJ52)
CAVRPSPAGGTSYGKLTV

SEQ ID NO: 178596 - protein, 14 aa, Homo sapiens
  CDR3 for beta chain variable domain of TCR clone 89298 (TRBV4-1, TRBJ2-2)
CASSQAVNTGELFF

SEQ ID NO: 178597 - protein, 12 aa, Homo sapiens
  CDR3 for alpha chain variable domain of TCR clone 89299 (TRAV13-2, TRAJ23)
FSERHRGGKLIF

SEQ ID NO: 178598 - protein, 16 aa, Homo sapiens
  CDR3 for beta chain variable domain of TCR clone 89299 (TRBV20-1, TRBJ1-4)
CSAPGQGLLTNEKLFF

SEQ ID NO: 178599 - protein, 13 aa, Homo sapiens
  CDR3 for alpha chain variable domain of TCR clone 89300 (TRAV13-1, TRAJ5)
CAASDTGRRALTF

SEQ ID NO: 178600 - protein, 11 aa, Homo sapiens
  CDR3 for beta chain variable domain of TCR clone 89300 (TRBV7-9, TRBJ2-3)
CASSPTDTQYF

SEQ ID NO: 178601 - protein, 11 aa, Homo sapiens
  CDR3 for alpha chain variable domain of TCR clone 89301 (TRAV12-3, TRAJ49)
CAANTGNQFYF

SEQ ID NO: 178602 - protein, 12 aa, Homo sapiens
  CDR3 for beta chain variable domain of TCR clone 89301 (TRBV6-3, TRBJ2-7)
CASREPGFEQYF

SEQ ID NO: 178603 - protein, 14 aa, Homo sapiens
  CDR3 for alpha chain variable domain of TCR clone 89302 (TRAV3, TRAJ9)
CAVRLNTGGFKTIF

SEQ ID NO: 178604 - protein, 15 aa, Homo sapiens
  CDR3 for beta chain variable domain of TCR clone 89302 (TRBV6-3, TRBJ2-7)
CASSSPGTVFYEQYF

SEQ ID NO: 178605 - protein, 14 aa, Homo sapiens
  CDR3 for alpha chain variable domain of TCR clone 89303 (TRAV8-2, TRAJ37)
CVVSISGNTGKLIF

SEQ ID NO: 178606 - protein, 20 aa, Homo sapiens
  CDR3 for beta chain variable domain of TCR clone 89303 (TRBV7-8, TRBJ2-1)
CASSLAHRLAGVRSYNEQFF

SEQ ID NO: 178607 - protein, 14 aa, Homo sapiens
  CDR3 for alpha chain variable domain of TCR clone 89304 (TRAV13-1, TRAJ32)
CAARGSGATNKLIF

SEQ ID NO: 178608 - protein, 14 aa, Homo sapiens
  CDR3 for beta chain variable domain of TCR clone 89304 (TRBV4-1, TRBJ2-2)
CASSQAVNTGELFF

SEQ ID NO: 178609 - protein, 11 aa, Homo sapiens
  CDR3 for alpha chain variable domain of TCR clone 89305 (TRAV17, TRAJ9)
CATTGGFKTII

SEQ ID NO: 178610 - protein, 14 aa, Homo sapiens
  CDR3 for beta chain variable domain of TCR clone 89305 (TRBV7-9, TRBJ2-2)
CASSGLADTGELFF

SEQ ID NO: 178611 - protein, 14 aa, Homo sapiens
  CDR3 for alpha chain variable domain of TCR clone 89306 (TRAV27, TRAJ36)
CAGPPKRGANNLFF

SEQ ID NO: 178612 - protein, 15 aa, Homo sapiens
  CDR3 for beta chain variable domain of TCR clone 89306 (TRBV18, TRBJ2-7)
CASSHASTPNYEQYF

SEQ ID NO: 178613 - protein, 14 aa, Homo sapiens
  CDR3 for alpha chain variable domain of TCR clone 89307 (TRAV13-1, TRAJ3)
CAASKSSSASKIIF

SEQ ID NO: 178614 - protein, 13 aa, Homo sapiens
  CDR3 for beta chain variable domain of TCR clone 89307 (TRBV18, TRBJ1-1)
CASSGGRNTEAFF

SEQ ID NO: 178615 - protein, 16 aa, Homo sapiens
  CDR3 for alpha chain variable domain of TCR clone 89308 (TRAV12-2, TRAJ32)
CAVNLGQGGATNKLIF

SEQ ID NO: 178616 - protein, 16 aa, Homo sapiens
  CDR3 for beta chain variable domain of TCR clone 89308 (TRBV9, TRBJ2-7)
CASSVGLGGGTYEQYF

SEQ ID NO: 178617 - protein, 18 aa, Homo sapiens
  CDR3 for alpha chain variable domain of TCR clone 89309 (TRAV21, TRAJ52)
CAVRPSPAGGTSYGKLTF

SEQ ID NO: 178618 - protein, 14 aa, Homo sapiens
  CDR3 for beta chain variable domain of TCR clone 89309 (TRBV7-2, TRBJ2-7)
CASSLPPGQGPQYF

SEQ ID NO: 178619 - protein, 15 aa, Homo sapiens
  CDR3 for alpha chain variable domain of TCR clone 89310 (TRAV16, TRAJ17)
CALSGNKAAGNKLTF

SEQ ID NO: 178620 - protein, 16 aa, Homo sapiens
  CDR3 for beta chain variable domain of TCR clone 89310 (TRBV7-6, TRBJ1-6)
CASSSLPAGEYSTLHF

SEQ ID NO: 178621 - protein, 13 aa, Homo sapiens
  CDR3 for alpha chain variable domain of TCR clone 89311 (TRAV8-3, TRAJ36)
CAVGATGANNLFF

SEQ ID NO: 178622 - protein, 15 aa, Homo sapiens
  CDR3 for beta chain variable domain of TCR clone 89311 (TRBV19, TRBJ1-2)
CASSVGQVLNYGYTF

SEQ ID NO: 178623 - protein, 15 aa, Homo sapiens
  CDR3 for alpha chain variable domain of TCR clone 89312 (TRAV27, TRAJ38)
CAARRNAGNNRKLIW

SEQ ID NO: 178624 - protein, 17 aa, Homo sapiens
  CDR3 for beta chain variable domain of TCR clone 89312 (TRBV20-1, TRBJ2-4)
CSARDWASGGRENIQYF

SEQ ID NO: 178625 - protein, 14 aa, Homo sapiens
  CDR3 for alpha chain variable domain of TCR clone 89313 (TRAV1-2, TRAJ16)
CAVNRFSDVQKLLF

SEQ ID NO: 178626 - protein, 13 aa, Homo sapiens
  CDR3 for beta chain variable domain of TCR clone 89313 (TRBV19, TRBJ2-7)
CASRKAGGSEQYF

SEQ ID NO: 178627 - protein, 14 aa, Homo sapiens
  CDR3 for alpha chain variable domain of TCR clone 89314 (TRAV27, TRAJ37)
CAGERSSNSGKLIF

SEQ ID NO: 178628 - protein, 15 aa, Homo sapiens
  CDR3 for beta chain variable domain of TCR clone 89314 (TRBV11-3, TRBJ1-6)
CASSLDWGANSPLHF

SEQ ID NO: 178629 - protein, 14 aa, Homo sapiens
  CDR3 for alpha chain variable domain of TCR clone 89315 (TRAV3, TRAJ17)
CAVRDAAAGNTLTF

SEQ ID NO: 178630 - protein, 13 aa, Homo sapiens
  CDR3 for beta chain variable domain of TCR clone 89315 (TRBV2, TRBJ1-1)
CASSVSGYTEAFF

SEQ ID NO: 178631 - protein, 12 aa, Homo sapiens
  CDR3 for alpha chain variable domain of TCR clone 89316 (TRAV27, TRAJ9)
CAGESGGFKTIF

SEQ ID NO: 178632 - protein, 14 aa, Homo sapiens
  CDR3 for beta chain variable domain of TCR clone 89316 (TRBV6-1, TRBJ2-1)
CASAKEGFYNEQFF

SEQ ID NO: 178633 - protein, 17 aa, Homo sapiens
  CDR3 for alpha chain variable domain of TCR clone 89317 (TRAV3, TRAJ6)
CAVRDGPRAGGSYIPTF

SEQ ID NO: 178634 - protein, 14 aa, Homo sapiens
  CDR3 for beta chain variable domain of TCR clone 89317 (TRBV4-1, TRBJ1-1)
CASSRSGQSFEAFF

SEQ ID NO: 178635 - protein, 14 aa, Homo sapiens
  CDR3 for alpha chain variable domain of TCR clone 89318 (TRAV38-1, TRAJ45)
CAYYSGGGADGLTF

SEQ ID NO: 178636 - protein, 16 aa, Homo sapiens
  CDR3 for beta chain variable domain of TCR clone 89318 (TRBV29-1, TRBJ2-7)
CSVEVVGTSGSYEQYF

SEQ ID NO: 178637 - protein, 14 aa, Homo sapiens
  CDR3 for alpha chain variable domain of TCR clone 89319 (TRAV35, TRAJ22)
CAGLRPGSARQLTF

SEQ ID NO: 178638 - protein, 13 aa, Homo sapiens
  CDR3 for beta chain variable domain of TCR clone 89319 (TRBV7-3, TRBJ1-2)
CASSLKRGYGYTF

SEQ ID NO: 178639 - protein, 13 aa, Homo sapiens
  CDR3 for alpha chain variable domain of TCR clone 89320 (TRAV1-1, TRAJ11)
CAVLNSGYRTLTF

SEQ ID NO: 178640 - protein, 17 aa, Homo sapiens
  CDR3 for beta chain variable domain of TCR clone 89320 (TRBV6-3, TRBJ2-2)
CASSYAGQGINTGELFF

SEQ ID NO: 178641 - protein, 14 aa, Homo sapiens
  CDR3 for alpha chain variable domain of TCR clone 89321 (TRAV8-4, TRAJ13)
CAVTLSGGYQKVTF

SEQ ID NO: 178642 - protein, 16 aa, Homo sapiens
  CDR3 for beta chain variable domain of TCR clone 89321 (TRBV6-1, TRBJ2-5)
CASSETLDRGAETQYF

SEQ ID NO: 178643 - protein, 17 aa, Homo sapiens
  CDR3 for alpha chain variable domain of TCR clone 89322 (TRAV13-1, TRAJ52)
CAASSGAGGTSYGKLTF

SEQ ID NO: 178644 - protein, 14 aa, Homo sapiens
  CDR3 for beta chain variable domain of TCR clone 89322 (TRBV12-4, TRBJ2-3)
CASTIAGWRDTQYF

SEQ ID NO: 178645 - protein, 14 aa, Homo sapiens
  CDR3 for alpha chain variable domain of TCR clone 89323 (TRAV17, TRAJ57)
CATDPQGGSEKLVF

SEQ ID NO: 178646 - protein, 15 aa, Homo sapiens
  CDR3 for beta chain variable domain of TCR clone 89323 (TRBV7-9, TRBJ1-4)
CASSRTGGFNEKLFF

SEQ ID NO: 178647 - protein, 14 aa, Homo sapiens
  CDR3 for alpha chain variable domain of TCR clone 89324 (TRAV16, TRAJ42)
CALLAGGSQGNLIF

SEQ ID NO: 178648 - protein, 16 aa, Homo sapiens
  CDR3 for beta chain variable domain of TCR clone 89324 (TRBV20-1, TRBJ1-4)
CSAPGQGLLTNEKLFF

SEQ ID NO: 178649 - protein, 18 aa, Homo sapiens
  CDR3 for alpha chain variable domain of TCR clone 89325 (TRAV21, TRAJ52)
CAVRPSPAGGTSYVKLTF

SEQ ID NO: 178650 - protein, 14 aa, Homo sapiens
  CDR3 for beta chain variable domain of TCR clone 89325 (TRBV4-1, TRBJ2-2)
CASSQAVNTGELFF

SEQ ID NO: 178651 - protein, 16 aa, Homo sapiens
  CDR3 for alpha chain variable domain of TCR clone 89326 (TRAV3, TRAJ37)
CAVRGKGSGNTGKLIF

SEQ ID NO: 178652 - protein, 14 aa, Homo sapiens
  CDR3 for beta chain variable domain of TCR clone 89326 (TRBV7-9, TRBJ1-2)
CASSLGPPQWPATF

SEQ ID NO: 178653 - protein, 16 aa, Homo sapiens
  CDR3 for alpha chain variable domain of TCR clone 89327 (TRAV13-1, TRAJ48)
CAASIFGNFGNEKLTF

SEQ ID NO: 178654 - protein, 14 aa, Homo sapiens
  CDR3 for beta chain variable domain of TCR clone 89327 (TRBV24-1, TRBJ1-1)
CATSIPRGDTEAVF

SEQ ID NO: 178655 - protein, 17 aa, Homo sapiens
  CDR3 for alpha chain variable domain of TCR clone 89328 (TRAV23/DV6, TRAJ57)
CAASSTLSQGGSEQLVF

SEQ ID NO: 178656 - protein, 14 aa, Homo sapiens
  CDR3 for beta chain variable domain of TCR clone 89328 (TRBV7-8, TRBJ2-5)
CASSATGGQETQYF

SEQ ID NO: 178657 - protein, 21 aa, Homo sapiens
  CDR3 for alpha chain variable domain of TCR clone 89329 (TRAV21, TRAJ27)
CAARPGNAGKSTHVDGTTLTV

SEQ ID NO: 178658 - protein, 20 aa, Homo sapiens
  CDR3 for beta chain variable domain of TCR clone 89329 (TRBV7-8, TRBJ2-2)
CASSHLFPGPTIHITGELFF

SEQ ID NO: 178659 - protein, 15 aa, Homo sapiens
  CDR3 for alpha chain variable domain of TCR clone 89330 (TRAV3, TRAJ22)
CAVRDRGGSARPLTF

SEQ ID NO: 178660 - protein, 13 aa, Homo sapiens
  CDR3 for beta chain variable domain of TCR clone 89330 (TRBV20-1, TRBJ1-1)
CSARVGGNTEAFF

SEQ ID NO: 178661 - protein, 16 aa, Homo sapiens
  CDR3 for alpha chain variable domain of TCR clone 89331 (TRAV12-2, TRAJ6)
CASPLAGSGGSYIPTF

SEQ ID NO: 178662 - protein, 10 aa, Homo sapiens
  CDR3 for beta chain variable domain of TCR clone 89331 (TRBV28, TRBJ1-2)
CASSSDRAVF

SEQ ID NO: 178663 - protein, 16 aa, Homo sapiens
  CDR3 for alpha chain variable domain of TCR clone 89332 (TRAV21, TRAJ52)
CAVTNAGGTSYGKLTF

SEQ ID NO: 178664 - protein, 13 aa, Homo sapiens
  CDR3 for beta chain variable domain of TCR clone 89332 (TRBV20-1, TRBJ1-1)
CSARGGGNTEAFF

SEQ ID NO: 178665 - protein, 12 aa, Homo sapiens
  CDR3 for alpha chain variable domain of TCR clone 89333 (TRAV13-2, TRAJ23)
CAERHRGGKLIF

SEQ ID NO: 178666 - protein, 15 aa, Homo sapiens
  CDR3 for beta chain variable domain of TCR clone 89333 (TRBV9, TRBJ1-6)
WASSVAGTGDSPLHF

SEQ ID NO: 178667 - protein, 12 aa, Homo sapiens
  CDR3 for alpha chain variable domain of TCR clone 89334 (TRAV12-3, TRAJ17)
CAMTLTGNKLTF

SEQ ID NO: 178668 - protein, 15 aa, Homo sapiens
  CDR3 for beta chain variable domain of TCR clone 89334 (TRBV20-1, TRBJ2-7)
FSARDRVSGMDEQYF

SEQ ID NO: 178669 - protein, 11 aa, Homo sapiens
  CDR3 for alpha chain variable domain of TCR clone 89335 (TRAV12-1, TRAJ30)
CVMNGQDKIIF

SEQ ID NO: 178670 - protein, 12 aa, Homo sapiens
  CDR3 for beta chain variable domain of TCR clone 89335 (TRBV27, TRBJ2-2)
CASKLFTGELFF

SEQ ID NO: 178671 - protein, 14 aa, Homo sapiens
  CDR3 for alpha chain variable domain of TCR clone 89336 (TRAV1-2, TRAJ16)
CAVNRFSDGQTLLF

SEQ ID NO: 178672 - protein, 16 aa, Homo sapiens
  CDR3 for beta chain variable domain of TCR clone 89336 (TRBV20-1, TRBJ1-4)
CSAPGQGLLTNEKLFF

SEQ ID NO: 178673 - protein, 16 aa, Homo sapiens
  CDR3 for alpha chain variable domain of TCR clone 89337 (TRAV26-1, TRAJ31)
CIVRPPVLNNNARLML

SEQ ID NO: 178674 - protein, 11 aa, Homo sapiens
  CDR3 for beta chain variable domain of TCR clone 89337 (TRBV7-8, TRBJ2-7)
CASSLSLEQYF

SEQ ID NO: 178675 - protein, 14 aa, Homo sapiens
  CDR3 for alpha chain variable domain of TCR clone 89338 (TRAV26-2, TRAJ32)
CCVGSGGATNKLIF

SEQ ID NO: 178676 - protein, 14 aa, Homo sapiens
  CDR3 for beta chain variable domain of TCR clone 89338 (TRBV4-2, TRBJ2-1)
CASGLDRAYNEQFF

SEQ ID NO: 178677 - protein, 13 aa, Homo sapiens
  CDR3 for alpha chain variable domain of TCR clone 89339 (TRAV27, TRAJ15)
CAGAGQAGTALIF

SEQ ID NO: 178678 - protein, 14 aa, Homo sapiens
  CDR3 for beta chain variable domain of TCR clone 89339 (TRBV19, TRBJ2-7)
CASSIFAGTYEQYF

SEQ ID NO: 178679 - protein, 15 aa, Homo sapiens
  CDR3 for alpha chain variable domain of TCR clone 89340 (TRAV8-2, TRAJ40)
CVVLGTTSGTYKYVF

SEQ ID NO: 178680 - protein, 14 aa, Homo sapiens
  CDR3 for beta chain variable domain of TCR clone 89340 (TRBV19, TRBJ2-1)
CASPTFVLSGEQFF

SEQ ID NO: 178681 - protein, 14 aa, Homo sapiens
  CDR3 for alpha chain variable domain of TCR clone 89341 (TRAV2, TRAJ9)
CAVEDRSGGFKTIF

SEQ ID NO: 178682 - protein, 13 aa, Homo sapiens
  CDR3 for beta chain variable domain of TCR clone 89341 (TRBV28, TRBJ2-5)
CASSFAGGETQYF

SEQ ID NO: 178683 - protein, 12 aa, Homo sapiens
  CDR3 for alpha chain variable domain of TCR clone 89342 (TRAV35, TRAJ31)
CAAASNNARLMF

SEQ ID NO: 178684 - protein, 17 aa, Homo sapiens
  CDR3 for beta chain variable domain of TCR clone 89342 (TRBV4-1, TRBJ1-3)
CASSPQRGIRFGNTIYF

SEQ ID NO: 178685 - protein, 16 aa, Homo sapiens
  CDR3 for alpha chain variable domain of TCR clone 89343 (TRAV30, TRAJ24)
CGTEIVDADSWGKFQF

SEQ ID NO: 178686 - protein, 18 aa, Homo sapiens
  CDR3 for beta chain variable domain of TCR clone 89343 (TRBV7-9, TRBJ2-7)
CASSLTTSRSRTWYEQYF

SEQ ID NO: 178687 - protein, 13 aa, Homo sapiens
  CDR3 for alpha chain variable domain of TCR clone 89344 (TRAV21, TRAJ52)
CAVRPSPAGGTSY

SEQ ID NO: 178688 - protein, 12 aa, Homo sapiens
  CDR3 for beta chain variable domain of TCR clone 89344 (TRBV11-2, TRBJ2-2)
CASSLGGGELFF

SEQ ID NO: 178689 - protein, 14 aa, Homo sapiens
  CDR3 for alpha chain variable domain of TCR clone 89345 (TRAV13-1, TRAJ44)
CAAKATGTAIKLTF

SEQ ID NO: 178690 - protein, 13 aa, Homo sapiens
  CDR3 for beta chain variable domain of TCR clone 89345 (TRBV5-5, TRBJ1-2)
CASSFWRGEDYTF

SEQ ID NO: 178691 - protein, 13 aa, Homo sapiens
  CDR3 for alpha chain variable domain of TCR clone 89346 (TRAV26-2, TRAJ54)
CIPRVGGAQKMVF

SEQ ID NO: 178692 - protein, 16 aa, Homo sapiens
  CDR3 for beta chain variable domain of TCR clone 89346 (TRBV4-1, TRBJ1-1)
CASSSMSERPNTEAFF

SEQ ID NO: 178693 - protein, 12 aa, Homo sapiens
  CDR3 for alpha chain variable domain of TCR clone 89347 (TRAV36/DV7, TRAJ54)
CAVVRGAQKLVF

SEQ ID NO: 178694 - protein, 12 aa, Homo sapiens
  CDR3 for beta chain variable domain of TCR clone 89347 (TRBV11-2, TRBJ2-2)
CASSLGGGELFF

SEQ ID NO: 178695 - protein, 11 aa, Homo sapiens
  CDR3 for alpha chain variable domain of TCR clone 89348 (TRAV20, TRAJ34)
CTRDNTDKPIF

SEQ ID NO: 178696 - protein, 15 aa, Homo sapiens
  CDR3 for beta chain variable domain of TCR clone 89348 (TRBV2, TRBJ2-1)
CASSVTSEGTDEQFF

SEQ ID NO: 178697 - protein, 14 aa, Homo sapiens
  CDR3 for alpha chain variable domain of TCR clone 89349 (TRAV1-2, TRAJ16)
CAVNRFSDGQKLLF

SEQ ID NO: 178698 - protein, 15 aa, Homo sapiens
  CDR3 for beta chain variable domain of TCR clone 89349 (TRBV3-1, TRBJ2-5)
CASSANRGGPETQYF

SEQ ID NO: 178699 - protein, 15 aa, Homo sapiens
  CDR3 for alpha chain variable domain of TCR clone 89350 (TRAV8-4, TRAJ37)
CAVTYGSSNTGKLIF

SEQ ID NO: 178700 - protein, 13 aa, Homo sapiens
  CDR3 for beta chain variable domain of TCR clone 89350 (TRBV12-4, TRBJ2-5)
CASRLGGSRTQYF

SEQ ID NO: 178701 - protein, 13 aa, Homo sapiens
  CDR3 for alpha chain variable domain of TCR clone 89351 (TRAV27, TRAJ29)
CAGAHSGNTPLGF

SEQ ID NO: 178702 - protein, 15 aa, Homo sapiens
  CDR3 for beta chain variable domain of TCR clone 89351 (TRBV15, TRBJ1-4)
CATSRDMGSYEKLFF

SEQ ID NO: 178703 - protein, 16 aa, Homo sapiens
  CDR3 for alpha chain variable domain of TCR clone 89352 (TRAV12-3, TRAJ53)
CAVSPGSGGSNYELTF

SEQ ID NO: 178704 - protein, 13 aa, Homo sapiens
  CDR3 for beta chain variable domain of TCR clone 89352 (TRBV12-5, TRBJ2-3)
CASGDRQSDTQYF

SEQ ID NO: 178705 - protein, 11 aa, Homo sapiens
  CDR3 for alpha chain variable domain of TCR clone 89353 (TRAV12-1, TRAJ30)
CVVNGQDKIIF

SEQ ID NO: 178706 - protein, 15 aa, Homo sapiens
  CDR3 for beta chain variable domain of TCR clone 89353 (TRBV7-9, TRBJ1-4)
CASSRTGGFNEKLFF

SEQ ID NO: 178707 - protein, 13 aa, Homo sapiens
  CDR3 for alpha chain variable domain of TCR clone 89354 (TRAV27, TRAJ41)
CAGEGNSGYALNF

SEQ ID NO: 178708 - protein, 14 aa, Homo sapiens
  CDR3 for beta chain variable domain of TCR clone 89354 (TRBV7-2, TRBJ1-1)
CASSFLTGTTEAFV

SEQ ID NO: 178709 - protein, 18 aa, Homo sapiens
  CDR3 for alpha chain variable domain of TCR clone 89355 (TRAV13-1, TRAJ52)
CAAKNPNAGGTSYGKLTF

SEQ ID NO: 178710 - protein, 14 aa, Homo sapiens
  CDR3 for beta chain variable domain of TCR clone 89355 (TRBV20-1, TRBJ1-1)
CSAQTRIGGTEAFF

SEQ ID NO: 178711 - protein, 13 aa, Homo sapiens
  CDR3 for alpha chain variable domain of TCR clone 89356 (TRAV8-3, TRAJ44)
CAVVPGTASKLNF

SEQ ID NO: 178712 - protein, 14 aa, Homo sapiens
  CDR3 for beta chain variable domain of TCR clone 89356 (TRBV11-2, TRBJ2-3)
CASRRLARTDTQYF

SEQ ID NO: 178713 - protein, 12 aa, Homo sapiens
  CDR3 for alpha chain variable domain of TCR clone 89357 (TRAV13-2, TRAJ23)
CADRHRGGKLIF

SEQ ID NO: 178714 - protein, 15 aa, Homo sapiens
  CDR3 for beta chain variable domain of TCR clone 89357 (TRBV9, TRBJ1-6)
CASSVAGTGDSPLHF

SEQ ID NO: 178715 - protein, 17 aa, Homo sapiens
  CDR3 for alpha chain variable domain of TCR clone 89358 (TRAV3, TRAJ42)
CAVRDRDYGGSQGNLIF

SEQ ID NO: 178716 - protein, 14 aa, Homo sapiens
  CDR3 for beta chain variable domain of TCR clone 89358 (TRBV28, TRBJ2-5)
CASSLYRGTETQYF

SEQ ID NO: 178717 - protein, 13 aa, Homo sapiens
  CDR3 for alpha chain variable domain of TCR clone 89359 (TRAV12-3, TRAJ43)
CAMIRPNNNDMRF

SEQ ID NO: 178718 - protein, 12 aa, Homo sapiens
  CDR3 for beta chain variable domain of TCR clone 89359 (TRBV11-2, TRBJ2-2)
CASSLGGGELFF

SEQ ID NO: 178719 - protein, 13 aa, Homo sapiens
  CDR3 for alpha chain variable domain of TCR clone 89360 (TRAV38-2/DV8, TRAJ53)
CAPGGGSNYKLTF

SEQ ID NO: 178720 - protein, 16 aa, Homo sapiens
  CDR3 for beta chain variable domain of TCR clone 89360 (TRBV28, TRBJ1-5)
CASRFRGAVQNQPQHF

SEQ ID NO: 178721 - protein, 14 aa, Homo sapiens
  CDR3 for alpha chain variable domain of TCR clone 89361 (TRAV1-2, TRAJ15)
CAVRDRQAGTALIF

SEQ ID NO: 178722 - protein, 16 aa, Homo sapiens
  CDR3 for beta chain variable domain of TCR clone 89361 (TRBV7-9, TRBJ2-3)
CASSPWREVGTDTQYF

SEQ ID NO: 178723 - protein, 18 aa, Homo sapiens
  CDR3 for alpha chain variable domain of TCR clone 89362 (TRAV9-2, TRAJ10)
CALSDGALASGGGNKRTF

SEQ ID NO: 178724 - protein, 16 aa, Homo sapiens
  CDR3 for beta chain variable domain of TCR clone 89362 (TRBV28, TRBJ2-7)
CASSSSGTSGSYEQYF

SEQ ID NO: 178725 - protein, 14 aa, Homo sapiens
  CDR3 for alpha chain variable domain of TCR clone 89363 (TRAV1-1, TRAJ27)
CAVIYNTNAGKSTF

SEQ ID NO: 178726 - protein, 11 aa, Homo sapiens
  CDR3 for beta chain variable domain of TCR clone 89363 (TRBV12-4, TRBJ2-3)
CASSSVRGRYF

SEQ ID NO: 178727 - protein, 14 aa, Homo sapiens
  CDR3 for alpha chain variable domain of TCR clone 89364 (TRAV12-2, TRAJ40)
CAVKIPSGTYKYIF

SEQ ID NO: 178728 - protein, 13 aa, Homo sapiens
  CDR3 for beta chain variable domain of TCR clone 89364 (TRBV6-3, TRBJ1-2)
CASSLTGDYGYTF

SEQ ID NO: 178729 - protein, 17 aa, Homo sapiens
  CDR3 for alpha chain variable domain of TCR clone 89365 (TRAV3, TRAJ6)
CAVRDGPRAGGSYIPTF

SEQ ID NO: 178730 - protein, 14 aa, Homo sapiens
  CDR3 for beta chain variable domain of TCR clone 89365 (TRBV9, TRBJ2-7)
CASSVGVGSYEQYF

SEQ ID NO: 178731 - protein, 14 aa, Homo sapiens
  CDR3 for alpha chain variable domain of TCR clone 89366 (TRAV21, TRAJ35)
CAVMPIRFGNVLHC

SEQ ID NO: 178732 - protein, 12 aa, Homo sapiens
  CDR3 for beta chain variable domain of TCR clone 89366 (TRBV7-9, TRBJ2-7)
CASSIKREEQYF

SEQ ID NO: 178733 - protein, 17 aa, Homo sapiens
  CDR3 for alpha chain variable domain of TCR clone 89367 (TRAV16, TRAJ58)
CITLLSNGETSGSRLTF

SEQ ID NO: 178734 - protein, 13 aa, Homo sapiens
  CDR3 for beta chain variable domain of TCR clone 89367 (TRBV20-1, TRBJ2-2)
CSASAAGTGELFF

SEQ ID NO: 178735 - protein, 13 aa, Homo sapiens
  CDR3 for alpha chain variable domain of TCR clone 89368 (TRAV8-6, TRAJ8)
CAVSKTGFQKLVF

SEQ ID NO: 178736 - protein, 15 aa, Homo sapiens
  CDR3 for beta chain variable domain of TCR clone 89368 (TRBV28, TRBJ2-5)
CASSSGRTIQETQYF

SEQ ID NO: 178737 - protein, 15 aa, Homo sapiens
  CDR3 for alpha chain variable domain of TCR clone 89369 (TRAV34, TRAJ38)
CGADFTPGNNRKLIW

SEQ ID NO: 178738 - protein, 16 aa, Homo sapiens
  CDR3 for beta chain variable domain of TCR clone 89369 (TRBV12-5, TRBJ2-5)
CASGPWTSGNQETQYV

SEQ ID NO: 178739 - protein, 11 aa, Homo sapiens
  CDR3 for alpha chain variable domain of TCR clone 89370 (TRAV21, TRAJ34)
CAVTNTDKLIF

SEQ ID NO: 178740 - protein, 14 aa, Homo sapiens
  CDR3 for beta chain variable domain of TCR clone 89370 (TRBV19, TRBJ2-5)
CASSMTGQQETQYF

SEQ ID NO: 178741 - protein, 18 aa, Homo sapiens
  CDR3 for alpha chain variable domain of TCR clone 89371 (TRAV21, TRAJ52)
CAVRPSPAGGTSYGKLTF

SEQ ID NO: 178742 - protein, 14 aa, Homo sapiens
  CDR3 for beta chain variable domain of TCR clone 89371 (TRBV4-1, TRBJ2-2)
CASSHAVNTGELFF

SEQ ID NO: 178743 - protein, 14 aa, Homo sapiens
  CDR3 for alpha chain variable domain of TCR clone 89372 (TRAV12-2, TRAJ40)
CAVKIPSGTYKCIF

SEQ ID NO: 178744 - protein, 15 aa, Homo sapiens
  CDR3 for beta chain variable domain of TCR clone 89372 (TRBV2, TRBJ2-7)
CASSEGLARSYEQYF

SEQ ID NO: 178745 - protein, 13 aa, Homo sapiens
  CDR3 for alpha chain variable domain of TCR clone 89373 (TRAV1-2, TRAJ34)
CAVRGYNTDKLIF

SEQ ID NO: 178746 - protein, 14 aa, Homo sapiens
  CDR3 for beta chain variable domain of TCR clone 89373 (TRBV19, TRBJ2-1)
CASPTFVLSGEQFF

SEQ ID NO: 178747 - protein, 13 aa, Homo sapiens
  CDR3 for alpha chain variable domain of TCR clone 89374 (TRAV3, TRAJ21)
CAVREPDFNKFYF

SEQ ID NO: 178748 - protein, 12 aa, Homo sapiens
  CDR3 for beta chain variable domain of TCR clone 89374 (TRBV7-3, TRBJ2-1)
CASSLGFNEQFF

SEQ ID NO: 178749 - protein, 14 aa, Homo sapiens
  CDR3 for alpha chain variable domain of TCR clone 89375 (TRAV1-1, TRAJ28)
CAAPSGAGSYKLTF

SEQ ID NO: 178750 - protein, 15 aa, Homo sapiens
  CDR3 for beta chain variable domain of TCR clone 89375 (TRBV7-2, TRBJ1-2)
CASSLVSGGDYGYTF

SEQ ID NO: 178751 - protein, 14 aa, Homo sapiens
  CDR3 for alpha chain variable domain of TCR clone 89376 (TRAV1-2, TRAJ16)
CAVNRFSDGQKLLF

SEQ ID NO: 178752 - protein, 14 aa, Homo sapiens
  CDR3 for beta chain variable domain of TCR clone 89376 (TRBV7-9, TRBJ2-7)
CASSLSQRSYEQYF

SEQ ID NO: 178753 - protein, 17 aa, Homo sapiens
  CDR3 for alpha chain variable domain of TCR clone 89377 (TRAV1-2, TRAJ27)
CAVRDKTGDTNAGKSTF

SEQ ID NO: 178754 - protein, 13 aa, Homo sapiens
  CDR3 for beta chain variable domain of TCR clone 89377 (TRBV7-9, TRBJ1-2)
CASSLKQNYGYTF

SEQ ID NO: 178755 - protein, 15 aa, Homo sapiens
  CDR3 for alpha chain variable domain of TCR clone 89378 (TRAV26-1, TRAJ15)
CIVRAANQAGTALIF

SEQ ID NO: 178756 - protein, 15 aa, Homo sapiens
  CDR3 for beta chain variable domain of TCR clone 89378 (TRBV20-1, TRBJ1-1)
CSAGSAATSNTEAFF

SEQ ID NO: 178757 - protein, 15 aa, Homo sapiens
  CDR3 for alpha chain variable domain of TCR clone 89379 (TRAV8-3, TRAJ45)
CASSYSGGGSDGLTF

SEQ ID NO: 178758 - protein, 18 aa, Homo sapiens
  CDR3 for beta chain variable domain of TCR clone 89379 (TRBV18, TRBJ1-3)
CASSPRGGAGPSGNTIYF

SEQ ID NO: 178759 - protein, 15 aa, Homo sapiens
  CDR3 for alpha chain variable domain of TCR clone 89380 (TRAV1-2, TRAJ28)
CAVQYSGAGSCQLTF

SEQ ID NO: 178760 - protein, 13 aa, Homo sapiens
  CDR3 for beta chain variable domain of TCR clone 89380 (TRBV20-1, TRBJ2-7)
CSATHTSGYEQYF

SEQ ID NO: 178761 - protein, 18 aa, Homo sapiens
  CDR3 for alpha chain variable domain of TCR clone 89381 (TRAV13-2, TRAJ52)
CAETPLNAGGTSYGKLTF

SEQ ID NO: 178762 - protein, 15 aa, Homo sapiens
  CDR3 for beta chain variable domain of TCR clone 89381 (TRBV7-2, TRBJ2-7)
CASSLKGALTYDQYF

SEQ ID NO: 178763 - protein, 15 aa, Homo sapiens
  CDR3 for alpha chain variable domain of TCR clone 89382 (TRAV12-1, TRAJ45)
CVVLSGGGGADGRTF

SEQ ID NO: 178764 - protein, 12 aa, Homo sapiens
  CDR3 for beta chain variable domain of TCR clone 89382 (TRBV12-5, TRBJ2-5)
CASGQGVETQYF

SEQ ID NO: 178765 - protein, 14 aa, Homo sapiens
  CDR3 for alpha chain variable domain of TCR clone 89383 (TRAV1-1, TRAJ27)
CAVIYNTNAGKSTF

SEQ ID NO: 178766 - protein, 15 aa, Homo sapiens
  CDR3 for beta chain variable domain of TCR clone 89383 (TRBV6-3, TRBJ2-7)
CASSSPGTVFYDQYF

SEQ ID NO: 178767 - protein, 14 aa, Homo sapiens
  CDR3 for alpha chain variable domain of TCR clone 89384 (TRAV14/DV4, TRAJ23)
CAMRYYNQGGKLIF

SEQ ID NO: 178768 - protein, 17 aa, Homo sapiens
  CDR3 for beta chain variable domain of TCR clone 89384 (TRBV7-2, TRBJ2-2)
CASSPRGVGEGTGELFF

SEQ ID NO: 178769 - protein, 14 aa, Homo sapiens
  CDR3 for alpha chain variable domain of TCR clone 89385 (TRAV21, TRAJ52)
CGRAGGTSYGKLTF

SEQ ID NO: 178770 - protein, 14 aa, Homo sapiens
  CDR3 for beta chain variable domain of TCR clone 89385 (TRBV19, TRBJ1-2)
CASSVSGYNYGYTF

SEQ ID NO: 178771 - protein, 14 aa, Homo sapiens
  CDR3 for alpha chain variable domain of TCR clone 89386 (TRAV12-1, TRAJ20)
CVVNPLSNDYKLSF

SEQ ID NO: 178772 - protein, 14 aa, Homo sapiens
  CDR3 for beta chain variable domain of TCR clone 89386 (TRBV20-1, TRBJ1-1)
CSAQTRIGGTEAFF

SEQ ID NO: 178773 - protein, 15 aa, Homo sapiens
  CDR3 for alpha chain variable domain of TCR clone 89387 (TRAV12-2, TRAJ53)
GAVNGGGGSNYKLTF

SEQ ID NO: 178774 - protein, 14 aa, Homo sapiens
  CDR3 for beta chain variable domain of TCR clone 89387 (TRBV19, TRBJ2-2)
CASSTLHRSGELFF

SEQ ID NO: 178775 - protein, 20 aa, Homo sapiens
  CDR3 for alpha chain variable domain of TCR clone 89388 (TRAV12-3, TRAJ41)
SLFIRDSQPSDSATPEALNF

SEQ ID NO: 178776 - protein, 15 aa, Homo sapiens
  CDR3 for beta chain variable domain of TCR clone 89388 (TRBV5-1, TRBJ2-7)
CASSLDVTSSYEQYF

SEQ ID NO: 178777 - protein, 15 aa, Homo sapiens
  CDR3 for alpha chain variable domain of TCR clone 89389 (TRAV21, TRAJ53)
CATLNSGGSNYKLTF

SEQ ID NO: 178778 - protein, 15 aa, Homo sapiens
  CDR3 for beta chain variable domain of TCR clone 89389 (TRBV5-1, TRBJ2-1)
GASSPPRAPYNEQFF

SEQ ID NO: 178779 - protein, 12 aa, Homo sapiens
  CDR3 for alpha chain variable domain of TCR clone 89390 (TRAV12-3, TRAJ17)
CAMTLTGNKLTF

SEQ ID NO: 178780 - protein, 15 aa, Homo sapiens
  CDR3 for beta chain variable domain of TCR clone 89390 (TRBV20-1, TRBJ2-7)
CGARERVSGMDEQYF

SEQ ID NO: 178781 - protein, 14 aa, Homo sapiens
  CDR3 for alpha chain variable domain of TCR clone 89391 (TRAV13-1, TRAJ39)
CASSYNNAGNMLTF

SEQ ID NO: 178782 - protein, 13 aa, Homo sapiens
  CDR3 for beta chain variable domain of TCR clone 89391 (TRBV24-1, TRBJ1-4)
CATNNGRSEKLFF

SEQ ID NO: 178783 - protein, 13 aa, Homo sapiens
  CDR3 for alpha chain variable domain of TCR clone 89392 (TRAV17, TRAJ9)
CATDYTGGFKTIF

SEQ ID NO: 178784 - protein, 14 aa, Homo sapiens
  CDR3 for beta chain variable domain of TCR clone 89392 (TRBV7-2, TRBJ2-7)
CASRSQGAAYEQYF

SEQ ID NO: 178785 - protein, 15 aa, Homo sapiens
  CDR3 for alpha chain variable domain of TCR clone 89393 (TRAV34, TRAJ38)
CGADFTPGNNRKLIW

SEQ ID NO: 178786 - protein, 13 aa, Homo sapiens
  CDR3 for beta chain variable domain of TCR clone 89393 (TRBV4-2, TRBJ1-1)
CASSQAGNTEAFF

SEQ ID NO: 178787 - protein, 23 aa, Homo sapiens
  CDR3 for alpha chain variable domain of TCR clone 89394 (TRAV26-1, TRAJ38)
CIADNAGNNHIQNPDPAVYKLRD

SEQ ID NO: 178788 - protein, 14 aa, Homo sapiens
  CDR3 for beta chain variable domain of TCR clone 89394 (TRBV7-3, TRBJ1-1)
CASSLKGGNTEAFF

SEQ ID NO: 178789 - protein, 23 aa, Homo sapiens
  CDR3 for alpha chain variable domain of TCR clone 89395 (TRAV1-1, TRAJ11)
LLQELQMKDSASYFCAGYRTLTF

SEQ ID NO: 178790 - protein, 15 aa, Homo sapiens
  CDR3 for beta chain variable domain of TCR clone 89395 (TRBV6-5, TRBJ2-1)
CASRGDFDSYNEQFF

SEQ ID NO: 178791 - protein, 15 aa, Homo sapiens
  CDR3 for alpha chain variable domain of TCR clone 89396 (TRAV13-2, TRAJ5)
CAENPHWTGRRALTF

SEQ ID NO: 178792 - protein, 16 aa, Homo sapiens
  CDR3 for beta chain variable domain of TCR clone 89396 (TRBV7-9, TRBJ1-3)
CASSQTSGLRLGTIYF

SEQ ID NO: 178793 - protein, 18 aa, Homo sapiens
  CDR3 for alpha chain variable domain of TCR clone 89397 (TRAV21, TRAJ52)
CAVRPSPAGGPSYGKLTF

SEQ ID NO: 178794 - protein, 17 aa, Homo sapiens
  CDR3 for beta chain variable domain of TCR clone 89397 (TRBV25-1, TRBJ2-1)
CASSAYGQGRGVYEQFF

SEQ ID NO: 178795 - protein, 14 aa, Homo sapiens
  CDR3 for alpha chain variable domain of TCR clone 89398 (TRAV12-2, TRAJ13)
CAVKKTGGYQKVTF

SEQ ID NO: 178796 - protein, 16 aa, Homo sapiens
  CDR3 for beta chain variable domain of TCR clone 89398 (TRBV7-2, TRBJ2-6)
CASSERRASGANVLTF

SEQ ID NO: 178797 - protein, 17 aa, Homo sapiens
  CDR3 for alpha chain variable domain of TCR clone 89399 (TRAV3, TRAJ6)
CAVREGPRAGGSYIPTF

SEQ ID NO: 178798 - protein, 15 aa, Homo sapiens
  CDR3 for beta chain variable domain of TCR clone 89399 (TRBV20-1, TRBJ1-1)
CSASWDRFLNTEAFF

SEQ ID NO: 178799 - protein, 14 aa, Homo sapiens
  CDR3 for alpha chain variable domain of TCR clone 89400 (TRAV6, TRAJ8)
CALERGTGFQKLVF

SEQ ID NO: 178800 - protein, 16 aa, Homo sapiens
  CDR3 for beta chain variable domain of TCR clone 89400 (TRBV4-1, TRBJ2-5)
CASSQTFYGDQETQYF

SEQ ID NO: 178801 - protein, 13 aa, Homo sapiens
  CDR3 for alpha chain variable domain of TCR clone 89401 (TRAV26-2, TRAJ43)
CILRAVNNNDMRF

SEQ ID NO: 178802 - protein, 11 aa, Homo sapiens
  CDR3 for beta chain variable domain of TCR clone 89401 (TRBV12-4, TRBJ2-3)
CASTATDTQYF

SEQ ID NO: 178803 - protein, 11 aa, Homo sapiens
  CDR3 for alpha chain variable domain of TCR clone 89402 (TRAV21, TRAJ11)
CAVNGYSTLTF

SEQ ID NO: 178804 - protein, 16 aa, Homo sapiens
  CDR3 for beta chain variable domain of TCR clone 89402 (TRBV3-1, TRBJ2-5)
CASSPGQFNGFGTQYF

SEQ ID NO: 178805 - protein, 17 aa, Homo sapiens
  CDR3 for alpha chain variable domain of TCR clone 89403 (TRAV12-2, TRAJ4)
CAVNVRPVSGGYNKLIF

SEQ ID NO: 178806 - protein, 17 aa, Homo sapiens
  CDR3 for beta chain variable domain of TCR clone 89403 (TRBV6-3, TRBJ2-1)
CASSYPSGTRGLDEQFF

SEQ ID NO: 178807 - protein, 12 aa, Homo sapiens
  CDR3 for alpha chain variable domain of TCR clone 89404 (TRAV3, TRAJ20)
CAVRDGDYKLSF

SEQ ID NO: 178808 - protein, 12 aa, Homo sapiens
  CDR3 for beta chain variable domain of TCR clone 89404 (TRBV5-1, TRBJ2-7)
CASSFRGYEQYF

SEQ ID NO: 178809 - protein, 15 aa, Homo sapiens
  CDR3 for alpha chain variable domain of TCR clone 89405 (TRAV2, TRAJ9)
CAVAALNTGGFKTIF

SEQ ID NO: 178810 - protein, 14 aa, Homo sapiens
  CDR3 for beta chain variable domain of TCR clone 89405 (TRBV7-2, TRBJ1-1)
CASSFLTGTTEASF

SEQ ID NO: 178811 - protein, 14 aa, Homo sapiens
  CDR3 for alpha chain variable domain of TCR clone 89406 (TRAV4, TRAJ26)
CLVGPHNYGKNFVF

SEQ ID NO: 178812 - protein, 17 aa, Homo sapiens
  CDR3 for beta chain variable domain of TCR clone 89406 (TRBV24-1, TRBJ2-1)
CATSDVSTSGTYNEQFF

SEQ ID NO: 178813 - protein, 18 aa, Homo sapiens
  CDR3 for alpha chain variable domain of TCR clone 89407 (TRAV26-1, TRAJ52)
CIVRVEGAGGTSYGKLAF

SEQ ID NO: 178814 - protein, 13 aa, Homo sapiens
  CDR3 for beta chain variable domain of TCR clone 89407 (TRBV7-3, TRBJ1-2)
CASSLKRGYGYTF

SEQ ID NO: 178815 - protein, 15 aa, Homo sapiens
  CDR3 for alpha chain variable domain of TCR clone 89408 (TRAV27, TRAJ24)
CAGGTSADSWGKLQF

SEQ ID NO: 178816 - protein, 11 aa, Homo sapiens
  CDR3 for beta chain variable domain of TCR clone 89408 (TRBV25-1, TRBJ1-1)
PTWGGNTEAFF

SEQ ID NO: 178817 - protein, 15 aa, Homo sapiens
  CDR3 for alpha chain variable domain of TCR clone 89409 (TRAV26-1, TRAJ44)
CIVRANTGTASKLTF

SEQ ID NO: 178818 - protein, 16 aa, Homo sapiens
  CDR3 for beta chain variable domain of TCR clone 89409 (TRBV7-7, TRBJ2-1)
CASSFASGTSYNEQFF

SEQ ID NO: 178819 - protein, 13 aa, Homo sapiens
  CDR3 for alpha chain variable domain of TCR clone 89410 (TRAV12-1, TRAJ11)
CVVTRGGYSSLTF

SEQ ID NO: 178820 - protein, 13 aa, Homo sapiens
  CDR3 for beta chain variable domain of TCR clone 89410 (TRBV20-1, TRBJ1-2)
CSARDQGAYGYTF

SEQ ID NO: 178821 - protein, 13 aa, Homo sapiens
  CDR3 for alpha chain variable domain of TCR clone 89411 (TRAV4, TRAJ20)
CLVGSSNDYELSF

SEQ ID NO: 178822 - protein, 13 aa, Homo sapiens
  CDR3 for beta chain variable domain of TCR clone 89411 (TRBV7-3, TRBJ1-1)
CASSQDWGAEAFF

SEQ ID NO: 178823 - protein, 14 aa, Homo sapiens
  CDR3 for alpha chain variable domain of TCR clone 89412 (TRAV17, TRAJ22)
CATSPSGSARQLTF

SEQ ID NO: 178824 - protein, 15 aa, Homo sapiens
  CDR3 for beta chain variable domain of TCR clone 89412 (TRBV4-1, TRBJ2-5)
CASSQWDLYQETQFF

SEQ ID NO: 178825 - protein, 13 aa, Homo sapiens
  CDR3 for alpha chain variable domain of TCR clone 89413 (TRAV20, TRAJ37)
CAGCSSNTGKLIF

SEQ ID NO: 178826 - protein, 15 aa, Homo sapiens
  CDR3 for beta chain variable domain of TCR clone 89413 (TRBV11-2, TRBJ1-2)
CASSLEGVQRNGYTF

SEQ ID NO: 178827 - protein, 14 aa, Homo sapiens
  CDR3 for alpha chain variable domain of TCR clone 89414 (TRAV34, TRAJ44)
RGADGTGTASKLTF

SEQ ID NO: 178828 - protein, 15 aa, Homo sapiens
  CDR3 for beta chain variable domain of TCR clone 89414 (TRBV5-1, TRBJ2-1)
CASSPPRAPYNEQFF

SEQ ID NO: 178829 - protein, 12 aa, Homo sapiens
  CDR3 for alpha chain variable domain of TCR clone 89415 (TRAV13-1, TRAJ49)
CAASPMGNQFYF

SEQ ID NO: 178830 - protein, 17 aa, Homo sapiens
  CDR3 for beta chain variable domain of TCR clone 89415 (TRBV11-2, TRBJ2-1)
CASSLYPPGVECNEQFF

SEQ ID NO: 178831 - protein, 14 aa, Homo sapiens
  CDR3 for alpha chain variable domain of TCR clone 89416 (TRAV12-2, TRAJ53)
CAVKGGGRNYKLTF

SEQ ID NO: 178832 - protein, 15 aa, Homo sapiens
  CDR3 for beta chain variable domain of TCR clone 89416 (TRBV10-3, TRBJ2-3)
CAISLTSGGTDTQYF

SEQ ID NO: 178833 - protein, 15 aa, Homo sapiens
  CDR3 for alpha chain variable domain of TCR clone 89417 (TRAV17, TRAJ16)
CATALRFADGQKLLF

SEQ ID NO: 178834 - protein, 15 aa, Homo sapiens
  CDR3 for beta chain variable domain of TCR clone 89417 (TRBV20-1, TRBJ1-1)
CSASRGVTGNTEAFF

SEQ ID NO: 178835 - protein, 13 aa, Homo sapiens
  CDR3 for alpha chain variable domain of TCR clone 89418 (TRAV3, TRAJ20)
CCEAFCNDYKLSF

SEQ ID NO: 178836 - protein, 13 aa, Homo sapiens
  CDR3 for beta chain variable domain of TCR clone 89418 (TRBV7-9, TRBJ2-3)
CASSAAGSDTQYF

SEQ ID NO: 178837 - protein, 13 aa, Homo sapiens
  CDR3 for alpha chain variable domain of TCR clone 89419 (TRAV12-1, TRAJ34)
CVVTGYNTDKLIF

SEQ ID NO: 178838 - protein, 13 aa, Homo sapiens
  CDR3 for beta chain variable domain of TCR clone 89419 (TRBV28, TRBJ2-7)
CASKAGGVYERYF

SEQ ID NO: 178839 - protein, 16 aa, Homo sapiens
  CDR3 for alpha chain variable domain of TCR clone 89420 (TRAV22, TRAJ45)
CAVERGKRGGAGGLTF

SEQ ID NO: 178840 - protein, 13 aa, Homo sapiens
  CDR3 for beta chain variable domain of TCR clone 89420 (TRBV27, TRBJ1-1)
CASSLSIGAEAFF

SEQ ID NO: 178841 - protein, 12 aa, Homo sapiens
  CDR3 for alpha chain variable domain of TCR clone 89421 (TRAV23/DV6, TRAJ17)
CARGSCRQQASF

SEQ ID NO: 178842 - protein, 14 aa, Homo sapiens
  CDR3 for beta chain variable domain of TCR clone 89421 (TRBV7-2, TRBJ1-2)
CASSQTGSTYGYTF

SEQ ID NO: 178843 - protein, 14 aa, Homo sapiens
  CDR3 for alpha chain variable domain of TCR clone 89422 (TRAV2, TRAJ9)
CAVDPNTGGFKTIF

SEQ ID NO: 178844 - protein, 11 aa, Homo sapiens
  CDR3 for beta chain variable domain of TCR clone 89422 (TRBV12-4, TRBJ2-5)
CASSFQGAQYF

SEQ ID NO: 178845 - protein, 17 aa, Homo sapiens
  CDR3 for alpha chain variable domain of TCR clone 89423 (TRAV3, TRAJ6)
CAVRDGPRAGGSYIPTF

SEQ ID NO: 178846 - protein, 15 aa, Homo sapiens
  CDR3 for beta chain variable domain of TCR clone 89423 (TRBV7-6, TRBJ1-5)
CASSQSSGINQPQHF

SEQ ID NO: 178847 - protein, 14 aa, Homo sapiens
  CDR3 for alpha chain variable domain of TCR clone 89424 (TRAV12-3, TRAJ9)
CAMSPNTGGFKTIF

SEQ ID NO: 178848 - protein, 15 aa, Homo sapiens
  CDR3 for beta chain variable domain of TCR clone 89424 (TRBV4-3, TRBJ1-1)
CASSQELGRGTEAFF

SEQ ID NO: 178849 - protein, 13 aa, Homo sapiens
  CDR3 for alpha chain variable domain of TCR clone 89425 (TRAV12-1, TRAJ9)
CVVLNTGGFKTIF

SEQ ID NO: 178850 - protein, 16 aa, Homo sapiens
  CDR3 for beta chain variable domain of TCR clone 89425 (TRBV7-6, TRBJ2-3)
CASSPLAGGSTDTQYF

SEQ ID NO: 178851 - protein, 13 aa, Homo sapiens
  CDR3 for alpha chain variable domain of TCR clone 89426 (TRAV13-2, TRAJ48)
CAEMDFGNEKITF

SEQ ID NO: 178852 - protein, 15 aa, Homo sapiens
  CDR3 for beta chain variable domain of TCR clone 89426 (TRBV7-9, TRBJ1-6)
CASSSPGRGNSPLHF

SEQ ID NO: 178853 - protein, 15 aa, Homo sapiens
  CDR3 for alpha chain variable domain of TCR clone 89427 (TRAV1-2, TRAJ30)
CAVRPHGNRDDNIIF

SEQ ID NO: 178854 - protein, 13 aa, Homo sapiens
  CDR3 for beta chain variable domain of TCR clone 89427 (TRBV4-1, TRBJ2-7)
CASSQGQAYEQYF

SEQ ID NO: 178855 - protein, 12 aa, Homo sapiens
  CDR3 for alpha chain variable domain of TCR clone 89428 (TRAV21, TRAJ33)
CAKMDSNYQLIW

SEQ ID NO: 178856 - protein, 13 aa, Homo sapiens
  CDR3 for beta chain variable domain of TCR clone 89428 (TRBV9, TRBJ2-1)
CASSPSGGNEQFF

SEQ ID NO: 178857 - protein, 14 aa, Homo sapiens
  CDR3 for alpha chain variable domain of TCR clone 89429 (TRAV1-2, TRAJ8)
CAVSEDTGFQKLVF

SEQ ID NO: 178858 - protein, 17 aa, Homo sapiens
  CDR3 for beta chain variable domain of TCR clone 89429 (TRBV11-2, TRBJ2-1)
CASSLYPPGVEYNEQFF

SEQ ID NO: 178859 - protein, 12 aa, Homo sapiens
  CDR3 for alpha chain variable domain of TCR clone 89430 (TRAV12-2, TRAJ7)
CAVMRGNNRLAF

SEQ ID NO: 178860 - protein, 12 aa, Homo sapiens
  CDR3 for beta chain variable domain of TCR clone 89430 (TRBV7-8, TRBJ2-7)
CASRLGDREQYF

SEQ ID NO: 178861 - protein, 14 aa, Homo sapiens
  CDR3 for alpha chain variable domain of TCR clone 89431 (TRAV1-2, TRAJ16)
CAVNRFSDVQKLLF

SEQ ID NO: 178862 - protein, 14 aa, Homo sapiens
  CDR3 for beta chain variable domain of TCR clone 89431 (TRBV4-1, TRBJ2-2)
CASSQAVNTGELFF

SEQ ID NO: 178863 - protein, 16 aa, Homo sapiens
  CDR3 for alpha chain variable domain of TCR clone 89432 (TRAV3, TRAJ37)
CAVRGKGSGNTGKLIL

SEQ ID NO: 178864 - protein, 15 aa, Homo sapiens
  CDR3 for beta chain variable domain of TCR clone 89432 (TRBV9, TRBJ1-4)
CASSVGGSTNEKLFF

SEQ ID NO: 178865 - protein, 14 aa, Homo sapiens
  CDR3 for alpha chain variable domain of TCR clone 89433 (TRAV38-1, TRAJ45)
CASHSVGGADGLTF

SEQ ID NO: 178866 - protein, 16 aa, Homo sapiens
  CDR3 for beta chain variable domain of TCR clone 89433 (TRBV27, TRBJ2-2)
CASSFRGLVRTGELFF

SEQ ID NO: 178867 - protein, 15 aa, Homo sapiens
  CDR3 for alpha chain variable domain of TCR clone 89434 (TRAV8-3, TRAJ45)
GASSYSGGGADGLTF

SEQ ID NO: 178868 - protein, 14 aa, Homo sapiens
  CDR3 for beta chain variable domain of TCR clone 89434 (TRBV11-2, TRBJ2-3)
CASSRLARTDTQYF

SEQ ID NO: 178869 - protein, 14 aa, Homo sapiens
  CDR3 for alpha chain variable domain of TCR clone 89435 (TRAV12-2, TRAJ17)
CAVLFKAAGNKLTF

SEQ ID NO: 178870 - protein, 16 aa, Homo sapiens
  CDR3 for beta chain variable domain of TCR clone 89435 (TRBV2, TRBJ2-1)
CASSVGGSLSYNEQFF

SEQ ID NO: 178871 - protein, 11 aa, Homo sapiens
  CDR3 for alpha chain variable domain of TCR clone 89436 (TRAV17, TRAJ9)
CGFTGGFKTIF

SEQ ID NO: 178872 - protein, 15 aa, Homo sapiens
  CDR3 for beta chain variable domain of TCR clone 89436 (TRBV9, TRBJ1-6)
CASSVAGTGDSPLHF

SEQ ID NO: 178873 - protein, 13 aa, Homo sapiens
  CDR3 for alpha chain variable domain of TCR clone 89437 (TRAV12-3, TRAJ13)
CAMSSVGYQKVTF

SEQ ID NO: 178874 - protein, 13 aa, Homo sapiens
  CDR3 for beta chain variable domain of TCR clone 89437 (TRBV20-1, TRBJ1-1)
CSAPPGGHTEAFF

SEQ ID NO: 178875 - protein, 11 aa, Homo sapiens
  CDR3 for alpha chain variable domain of TCR clone 89438 (TRAV1-2, TRAJ40)
CVVPGTYKYIF

SEQ ID NO: 178876 - protein, 16 aa, Homo sapiens
  CDR3 for beta chain variable domain of TCR clone 89438 (TRBV29-1, TRBJ2-7)
CSVEVVGTSGSYEQYF

SEQ ID NO: 178877 - protein, 13 aa, Homo sapiens
  CDR3 for alpha chain variable domain of TCR clone 89439 (TRAV27, TRAJ41)
CAGEGNSGYALSF

SEQ ID NO: 178878 - protein, 15 aa, Homo sapiens
  CDR3 for beta chain variable domain of TCR clone 89439 (TRBV6-3, TRBJ2-7)
CASSSPGTVFYEQYF

SEQ ID NO: 178879 - protein, 13 aa, Homo sapiens
  CDR3 for alpha chain variable domain of TCR clone 89440 (TRAV25, TRAJ24)
CAGGTDSWGKFQF

SEQ ID NO: 178880 - protein, 18 aa, Homo sapiens
  CDR3 for beta chain variable domain of TCR clone 89440 (TRBV23-1, TRBJ2-1)
CASGMFRLALRSYNEQFF

SEQ ID NO: 178881 - protein, 11 aa, Homo sapiens
  CDR3 for alpha chain variable domain of TCR clone 89441 (TRAV17, TRAJ9)
CATTGGFKTIF

SEQ ID NO: 178882 - protein, 15 aa, Homo sapiens
  CDR3 for beta chain variable domain of TCR clone 89441 (TRBV28, TRBJ2-1)
CASSIIAGGRSEQFF

SEQ ID NO: 178883 - protein, 12 aa, Homo sapiens
  CDR3 for alpha chain variable domain of TCR clone 89442 (TRAV2, TRAJ31)
CAVEDINARLMF

SEQ ID NO: 178884 - protein, 16 aa, Homo sapiens
  CDR3 for beta chain variable domain of TCR clone 89442 (TRBV10-3, TRBJ2-1)
CAISGVGDGGGGEQFF

SEQ ID NO: 178885 - protein, 16 aa, Homo sapiens
  CDR3 for alpha chain variable domain of TCR clone 89443 (TRAV1-2, TRAJ10)
CAVRGVLTGGGNKLTF

SEQ ID NO: 178886 - protein, 16 aa, Homo sapiens
  CDR3 for beta chain variable domain of TCR clone 89443 (TRBV7-3, TRBJ2-1)
CASSLEGYRSYNEQFF

SEQ ID NO: 178887 - protein, 13 aa, Homo sapiens
  CDR3 for alpha chain variable domain of TCR clone 89444 (TRAV27, TRAJ29)
CAGAHSGNTPLVF

SEQ ID NO: 178888 - protein, 14 aa, Homo sapiens
  CDR3 for beta chain variable domain of TCR clone 89444 (TRBV7-9, TRBJ2-7)
CASSIGQGVGEQYF

SEQ ID NO: 178889 - protein, 22 aa, Homo sapiens
  CDR3 for alpha chain variable domain of TCR clone 89445 (TRAV3, TRAJ38)
CAVRDCLNAGNNHIQNPDPAVY

SEQ ID NO: 178890 - protein, 15 aa, Homo sapiens
  CDR3 for beta chain variable domain of TCR clone 89445 (TRBV19, TRBJ2-1)
CASSRPGQNYNEQFF

SEQ ID NO: 178891 - protein, 16 aa, Homo sapiens
  CDR3 for alpha chain variable domain of TCR clone 89446 (TRAV20, TRAJ22)
CAVQASSSGSARQLTF

SEQ ID NO: 178892 - protein, 16 aa, Homo sapiens
  CDR3 for beta chain variable domain of TCR clone 89446 (TRBV20-1, TRBJ1-5)
CSASRGTGYSNQHQHF

SEQ ID NO: 178893 - protein, 11 aa, Homo sapiens
  CDR3 for alpha chain variable domain of TCR clone 89447 (TRAV3, TRAJ17)
PRGAAGNKLTF

SEQ ID NO: 178894 - protein, 14 aa, Homo sapiens
  CDR3 for beta chain variable domain of TCR clone 89447 (TRBV7-6, TRBJ2-3)
CASSLGTVTDTQYF

SEQ ID NO: 178895 - protein, 15 aa, Homo sapiens
  CDR3 for alpha chain variable domain of TCR clone 89448 (TRAV2, TRAJ9)
CAVEDRGTGGFKTTF

SEQ ID NO: 178896 - protein, 12 aa, Homo sapiens
  CDR3 for beta chain variable domain of TCR clone 89448 (TRBV24-1, TRBJ1-1)
CATSDSDRGAFF

SEQ ID NO: 178897 - protein, 14 aa, Homo sapiens
  CDR3 for alpha chain variable domain of TCR clone 89449 (TRAV1-2, TRAJ8)
CAVREDTGFKKLVF

SEQ ID NO: 178898 - protein, 16 aa, Homo sapiens
  CDR3 for beta chain variable domain of TCR clone 89449 (TRBV5-7, TRBJ2-5)
CASTLAPAGGRETQYF

SEQ ID NO: 178899 - protein, 19 aa, Homo sapiens
  CDR3 for alpha chain variable domain of TCR clone 89450 (TRAV1-2, TRAJ26)
CLLPLCCERPDNYGQNFVF

SEQ ID NO: 178900 - protein, 13 aa, Homo sapiens
  CDR3 for beta chain variable domain of TCR clone 89450 (TRBV7-3, TRBJ1-1)
CASSQDWGAEAFF

SEQ ID NO: 178901 - protein, 13 aa, Homo sapiens
  CDR3 for alpha chain variable domain of TCR clone 89451 (TRAV27, TRAJ3)
ASLRGSSASKIIF

SEQ ID NO: 178902 - protein, 13 aa, Homo sapiens
  CDR3 for beta chain variable domain of TCR clone 89451 (TRBV7-9, TRBJ1-2)
CASSLKQNYGYTF

SEQ ID NO: 178903 - protein, 16 aa, Homo sapiens
  CDR3 for alpha chain variable domain of TCR clone 89452 (TRAV3, TRAJ10)
CAVRDMRAGGGNKPTF

SEQ ID NO: 178904 - protein, 13 aa, Homo sapiens
  CDR3 for beta chain variable domain of TCR clone 89452 (TRBV12-4, TRBJ2-7)
CASSPTETYEQYF

SEQ ID NO: 178905 - protein, 12 aa, Homo sapiens
  CDR3 for alpha chain variable domain of TCR clone 89453 (TRAV17, TRAJ20)
CATQAKDYKLSF

SEQ ID NO: 178906 - protein, 12 aa, Homo sapiens
  CDR3 for beta chain variable domain of TCR clone 89453 (TRBV6-1, TRBJ1-1)
CASNSPTAEAFF

SEQ ID NO: 178907 - protein, 15 aa, Homo sapiens
  CDR3 for alpha chain variable domain of TCR clone 89454 (TRAV17, TRAJ16)
CATALRFSDCQKLLF

SEQ ID NO: 178908 - protein, 12 aa, Homo sapiens
  CDR3 for beta chain variable domain of TCR clone 89454 (TRBV2, TRBJ2-7)
CASSDPDYEQYF

SEQ ID NO: 178909 - protein, 17 aa, Homo sapiens
  CDR3 for alpha chain variable domain of TCR clone 89455 (TRAV3, TRAJ6)
CAVRDGPRAGGSYIPTF

SEQ ID NO: 178910 - protein, 13 aa, Homo sapiens
  CDR3 for beta chain variable domain of TCR clone 89455 (TRBV12-5, TRBJ2-3)
CAIGDRQSDTQYF

SEQ ID NO: 178911 - protein, 15 aa, Homo sapiens
  CDR3 for alpha chain variable domain of TCR clone 89456 (TRAV26-2, TRAJ57)
CILRDIRGGSEKLVF

SEQ ID NO: 178912 - protein, 15 aa, Homo sapiens
  CDR3 for beta chain variable domain of TCR clone 89456 (TRBV2, TRBJ2-1)
CASDIVLAGEGEQFF

SEQ ID NO: 178913 - protein, 18 aa, Homo sapiens
  CDR3 for alpha chain variable domain of TCR clone 89457 (TRAV1-2, TRAJ18)
CAVRDMGDRGSTLGRLYF

SEQ ID NO: 178914 - protein, 16 aa, Homo sapiens
  CDR3 for beta chain variable domain of TCR clone 89457 (TRBV29-1, TRBJ1-2)
FSVEANRDIANYGYTF

SEQ ID NO: 178915 - protein, 13 aa, Homo sapiens
  CDR3 for alpha chain variable domain of TCR clone 89458 (TRAV12-2, TRAJ52)
CAVSGTSYGRLTF

SEQ ID NO: 178916 - protein, 17 aa, Homo sapiens
  CDR3 for beta chain variable domain of TCR clone 89458 (TRBV11-2, TRBJ2-1)
CASSLYPPGVEYNEQFF

SEQ ID NO: 178917 - protein, 14 aa, Homo sapiens
  CDR3 for alpha chain variable domain of TCR clone 89459 (TRAV1-2, TRAJ16)
CAVNRFSDGQKLLF

SEQ ID NO: 178918 - protein, 16 aa, Homo sapiens
  CDR3 for beta chain variable domain of TCR clone 89459 (TRBV19, TRBJ2-3)
CACSPEWDRGTDTQYF

SEQ ID NO: 178919 - protein, 13 aa, Homo sapiens
  CDR3 for alpha chain variable domain of TCR clone 89460 (TRAV2, TRAJ20)
CAVEDPSEYKLSF

SEQ ID NO: 178920 - protein, 20 aa, Homo sapiens
  CDR3 for beta chain variable domain of TCR clone 89460 (TRBV7-8, TRBJ2-2)
CASSHLFPGPTIHITGELFF

SEQ ID NO: 178921 - protein, 15 aa, Homo sapiens
  CDR3 for alpha chain variable domain of TCR clone 89461 (TRAV3, TRAJ47)
CAVRDIGEYGNKLVF

SEQ ID NO: 178922 - protein, 15 aa, Homo sapiens
  CDR3 for beta chain variable domain of TCR clone 89461 (TRBV20-1, TRBJ1-1)
CSASRGVTGNTEAFF

SEQ ID NO: 178923 - protein, 17 aa, Homo sapiens
  CDR3 for alpha chain variable domain of TCR clone 89462 (TRAV3, TRAJ6)
CAVRDGPRAGGSYIPTF

SEQ ID NO: 178924 - protein, 17 aa, Homo sapiens
  CDR3 for beta chain variable domain of TCR clone 89462 (TRBV18, TRBJ1-5)
CASSPTMGQGTNQPQHF

SEQ ID NO: 178925 - protein, 13 aa, Homo sapiens
  CDR3 for alpha chain variable domain of TCR clone 89463 (TRAV13-1, TRAJ6)
CAASKGGSYLPTF

SEQ ID NO: 178926 - protein, 14 aa, Homo sapiens
  CDR3 for beta chain variable domain of TCR clone 89463 (TRBV7-2, TRBJ2-1)
CASSLGVGYNEQFF

SEQ ID NO: 178927 - protein, 12 aa, Homo sapiens
  CDR3 for alpha chain variable domain of TCR clone 89464 (TRAV26-1, TRAJ13)
CIVSRGYQKVTF

SEQ ID NO: 178928 - protein, 15 aa, Homo sapiens
  CDR3 for beta chain variable domain of TCR clone 89464 (TRBV20-1, TRBJ2-7)
CSARDRVSGMDEQYF

SEQ ID NO: 178929 - protein, 14 aa, Homo sapiens
  CDR3 for alpha chain variable domain of TCR clone 89465 (TRAV21, TRAJ32)
CCGDHGGATNKLIF

SEQ ID NO: 178930 - protein, 13 aa, Homo sapiens
  CDR3 for beta chain variable domain of TCR clone 89465 (TRBV2, TRBJ1-6)
CASGRGGISPLHF

SEQ ID NO: 178931 - protein, 13 aa, Homo sapiens
  CDR3 for alpha chain variable domain of TCR clone 89466 (TRAV12-1, TRAJ33)
CGDAPDSNYQLIW

SEQ ID NO: 178932 - protein, 16 aa, Homo sapiens
  CDR3 for beta chain variable domain of TCR clone 89466 (TRBV7-8, TRBJ2-1)
CASSRLPGILYNEQFF

SEQ ID NO: 178933 - protein, 14 aa, Homo sapiens
  CDR3 for alpha chain variable domain of TCR clone 89467 (TRAV17, TRAJ57)
CATDPQGGSEKLVF

SEQ ID NO: 178934 - protein, 18 aa, Homo sapiens
  CDR3 for beta chain variable domain of TCR clone 89467 (TRBV6-6, TRBJ1-3)
CASNYSKWDSISGNTIYF

SEQ ID NO: 178935 - protein, 14 aa, Homo sapiens
  CDR3 for alpha chain variable domain of TCR clone 89468 (TRAV13-1, TRAJ13)
CAAGRVGGYQKVTF

SEQ ID NO: 178936 - protein, 17 aa, Homo sapiens
  CDR3 for beta chain variable domain of TCR clone 89468 (TRBV15, TRBJ1-5)
CATSRAPPGTRNQPQHF

SEQ ID NO: 178937 - protein, 14 aa, Homo sapiens
  CDR3 for alpha chain variable domain of TCR clone 89469 (TRAV26-1, TRAJ34)
CIVIVAYNTDKLIF

SEQ ID NO: 178938 - protein, 15 aa, Homo sapiens
  CDR3 for beta chain variable domain of TCR clone 89469 (TRBV20-1, TRBJ2-7)
CSARVPAAYLYEQYF

SEQ ID NO: 178939 - protein, 15 aa, Homo sapiens
  CDR3 for alpha chain variable domain of TCR clone 89470 (TRAV3, TRAJ11)
CAVRDRGSRYSTLTF

SEQ ID NO: 178940 - protein, 13 aa, Homo sapiens
  CDR3 for beta chain variable domain of TCR clone 89470 (TRBV7-9, TRBJ1-2)
CASSLKQNYGYTF

SEQ ID NO: 178941 - protein, 15 aa, Homo sapiens
  CDR3 for alpha chain variable domain of TCR clone 89471 (TRAV8-4, TRAJ37)
CAVTYGSSNTGKLIF

SEQ ID NO: 178942 - protein, 13 aa, Homo sapiens
  CDR3 for beta chain variable domain of TCR clone 89471 (TRBV12-4, TRBJ2-5)
CASSVGGSRTQYF

SEQ ID NO: 178943 - protein, 14 aa, Homo sapiens
  CDR3 for alpha chain variable domain of TCR clone 89472 (TRAV3, TRAJ37)
CAVKESGNTGKLIF

SEQ ID NO: 178944 - protein, 14 aa, Homo sapiens
  CDR3 for beta chain variable domain of TCR clone 89472 (TRBV2, TRBJ1-5)
CASSENRGGQPQYF

SEQ ID NO: 178945 - protein, 15 aa, Homo sapiens
  CDR3 for alpha chain variable domain of TCR clone 89473 (TRAV17, TRAJ22)
CATVAPSGSARQLTF

SEQ ID NO: 178946 - protein, 18 aa, Homo sapiens
  CDR3 for beta chain variable domain of TCR clone 89473 (TRBV18, TRBJ2-3)
CASSYTSGAAGGTDTQYF

SEQ ID NO: 178947 - protein, 18 aa, Homo sapiens
  CDR3 for alpha chain variable domain of TCR clone 89474 (TRAV13-1, TRAJ52)
CAAINPNAGGTSYGKLTF

SEQ ID NO: 178948 - protein, 15 aa, Homo sapiens
  CDR3 for beta chain variable domain of TCR clone 89474 (TRBV6-1, TRBJ2-3)
CASSERGGITDTQYF

SEQ ID NO: 178949 - protein, 12 aa, Homo sapiens
  CDR3 for alpha chain variable domain of TCR clone 89475 (TRAV12-2, TRAJ15)
CAVNQAGTALIF

SEQ ID NO: 178950 - protein, 16 aa, Homo sapiens
  CDR3 for beta chain variable domain of TCR clone 89475 (TRBV7-8, TRBJ2-1)
CASSFRLAGGHNEQFF

SEQ ID NO: 178951 - protein, 11 aa, Homo sapiens
  CDR3 for alpha chain variable domain of TCR clone 89476 (TRAV12-3, TRAJ49)
CAASTGNQFYF

SEQ ID NO: 178952 - protein, 15 aa, Homo sapiens
  CDR3 for beta chain variable domain of TCR clone 89476 (TRBV20-1, TRBJ2-7)
CSARVPAAYFYEQYF

SEQ ID NO: 178953 - protein, 12 aa, Homo sapiens
  CDR3 for alpha chain variable domain of TCR clone 89477 (TRAV13-1, TRAJ21)
CAAKEGFNKFYF

SEQ ID NO: 178954 - protein, 14 aa, Homo sapiens
  CDR3 for beta chain variable domain of TCR clone 89477 (TRBV11-2, TRBJ2-1)
CASTTGQGNNEQFF

SEQ ID NO: 178955 - protein, 12 aa, Homo sapiens
  CDR3 for alpha chain variable domain of TCR clone 89478 (TRAV12-1, TRAJ23)
CVVNIPGGKLIF

SEQ ID NO: 178956 - protein, 15 aa, Homo sapiens
  CDR3 for beta chain variable domain of TCR clone 89478 (TRBV7-2, TRBJ2-7)
CASSLVSSGYYEQYF

SEQ ID NO: 178957 - protein, 11 aa, Homo sapiens
  CDR3 for alpha chain variable domain of TCR clone 89479 (TRAV29/DV5, TRAJ37)
CAASNTGKLIF

SEQ ID NO: 178958 - protein, 18 aa, Homo sapiens
  CDR3 for beta chain variable domain of TCR clone 89479 (TRBV20-1, TRBJ2-6)
CSARTLAGGPSGANVLTF

SEQ ID NO: 178959 - protein, 14 aa, Homo sapiens
  CDR3 for alpha chain variable domain of TCR clone 89480 (TRAV1-2, TRAJ16)
CAVNRFSDGQKLLF

SEQ ID NO: 178960 - protein, 12 aa, Homo sapiens
  CDR3 for beta chain variable domain of TCR clone 89480 (TRBV14, TRBJ2-7)
CARSRLKGEQYF

SEQ ID NO: 178961 - protein, 15 aa, Homo sapiens
  CDR3 for alpha chain variable domain of TCR clone 89481 (TRAV8-4, TRAJ3)
CAVTGENLVQQCFQD

SEQ ID NO: 178962 - protein, 16 aa, Homo sapiens
  CDR3 for beta chain variable domain of TCR clone 89481 (TRBV4-2, TRBJ1-1)
CASGQAGFGMNTEAFF

SEQ ID NO: 178963 - protein, 12 aa, Homo sapiens
  CDR3 for alpha chain variable domain of TCR clone 89482 (TRAV3, TRAJ43)
CAVRDPNNAMRF

SEQ ID NO: 178964 - protein, 15 aa, Homo sapiens
  CDR3 for beta chain variable domain of TCR clone 89482 (TRBV6-5, TRBJ2-1)
CASSYDAGAGNEQFF

SEQ ID NO: 178965 - protein, 14 aa, Homo sapiens
  CDR3 for alpha chain variable domain of TCR clone 89483 (TRAV1-2, TRAJ8)
CAVREDTGFQKLVF

SEQ ID NO: 178966 - protein, 15 aa, Homo sapiens
  CDR3 for beta chain variable domain of TCR clone 89483 (TRBV6-3, TRBJ2-7)
CASSSPGTVFFEQYF

SEQ ID NO: 178967 - protein, 14 aa, Homo sapiens
  CDR3 for alpha chain variable domain of TCR clone 89484 (TRAV1-2, TRAJ16)
CAVNRFSDGQKLLF

SEQ ID NO: 178968 - protein, 13 aa, Homo sapiens
  CDR3 for beta chain variable domain of TCR clone 89484 (TRBV10-2, TRBJ2-5)
CASGRLARETQYF

SEQ ID NO: 178969 - protein, 15 aa, Homo sapiens
  CDR3 for alpha chain variable domain of TCR clone 89485 (TRAV8-3, TRAJ11)
CAVGLLNSGYSTLTF

SEQ ID NO: 178970 - protein, 12 aa, Homo sapiens
  CDR3 for beta chain variable domain of TCR clone 89485 (TRBV7-9, TRBJ2-7)
CASSLEGYEQYF

SEQ ID NO: 178971 - protein, 11 aa, Homo sapiens
  CDR3 for alpha chain variable domain of TCR clone 89486 (TRAV2, TRAJ23)
CAVETRGKLIF

SEQ ID NO: 178972 - protein, 14 aa, Homo sapiens
  CDR3 for beta chain variable domain of TCR clone 89486 (TRBV2, TRBJ2-3)
CASSEGQNTDTHYF

SEQ ID NO: 178973 - protein, 13 aa, Homo sapiens
  CDR3 for alpha chain variable domain of TCR clone 89487 (TRAV8-3, TRAJ48)
CAGVPFGNEKLTF

SEQ ID NO: 178974 - protein, 19 aa, Homo sapiens
  CDR3 for beta chain variable domain of TCR clone 89487 (TRBV25-1, TRBJ2-2)
CAILVYRVDRGRKTGELFF

SEQ ID NO: 178975 - protein, 13 aa, Homo sapiens
  CDR3 for alpha chain variable domain of TCR clone 89488 (TRAV2, TRAJ40)
CAVVTSGTYKYIF

SEQ ID NO: 178976 - protein, 18 aa, Homo sapiens
  CDR3 for beta chain variable domain of TCR clone 89488 (TRBV3-1, TRBJ2-5)
CASSEGTSLAEGWETQYF

SEQ ID NO: 178977 - protein, 11 aa, Homo sapiens
  CDR3 for alpha chain variable domain of TCR clone 89489 (TRAV21, TRAJ11)
CAVNGYSTLTF

SEQ ID NO: 178978 - protein, 11 aa, Homo sapiens
  CDR3 for beta chain variable domain of TCR clone 89489 (TRBV19, TRBJ1-1)
CAVSIGSEAFF

SEQ ID NO: 178979 - protein, 13 aa, Homo sapiens
  CDR3 for alpha chain variable domain of TCR clone 89490 (TRAV21, TRAJ27)
CAAPNTNAGKSTF

SEQ ID NO: 178980 - protein, 15 aa, Homo sapiens
  CDR3 for beta chain variable domain of TCR clone 89490 (TRBV18, TRBJ1-2)
CASSPGNGLGYGYTF

SEQ ID NO: 178981 - protein, 14 aa, Homo sapiens
  CDR3 for alpha chain variable domain of TCR clone 89491 (TRAV8-3, TRAJ9)
CAVVYNTGGFKTIF

SEQ ID NO: 178982 - protein, 15 aa, Homo sapiens
  CDR3 for beta chain variable domain of TCR clone 89491 (TRBV4-1, TRBJ2-7)
CASSQNTGRLYEQYF

SEQ ID NO: 178983 - protein, 15 aa, Homo sapiens
  CDR3 for alpha chain variable domain of TCR clone 89492 (TRAV22, TRAJ56)
CAVEEYTGANSKLTF

SEQ ID NO: 178984 - protein, 14 aa, Homo sapiens
  CDR3 for beta chain variable domain of TCR clone 89492 (TRBV5-1, TRBJ2-3)
CASSRGQGGGTQYF

SEQ ID NO: 178985 - protein, 15 aa, Homo sapiens
  CDR3 for alpha chain variable domain of TCR clone 89493 (TRAV38-1, TRAJ54)
CAFNYLIQGAQKLVF

SEQ ID NO: 178986 - protein, 15 aa, Homo sapiens
  CDR3 for beta chain variable domain of TCR clone 89493 (TRBV7-2, TRBJ2-7)
CASSLKGALTYEQYF

SEQ ID NO: 178987 - protein, 13 aa, Homo sapiens
  CDR3 for alpha chain variable domain of TCR clone 89494 (TRAV8-4, TRAJ10)
CAAFTGGGNKLTF

SEQ ID NO: 178988 - protein, 15 aa, Homo sapiens
  CDR3 for beta chain variable domain of TCR clone 89494 (TRBV2, TRBJ2-3)
CASSDFEKVTDTQYF

SEQ ID NO: 178989 - protein, 16 aa, Homo sapiens
  CDR3 for alpha chain variable domain of TCR clone 89495 (TRAV14/DV4, TRAJ15)
CAMREGSFQAGTALIF

SEQ ID NO: 178990 - protein, 14 aa, Homo sapiens
  CDR3 for beta chain variable domain of TCR clone 89495 (TRBV7-3, TRBJ1-1)
CASSLKGGNTEAFF

SEQ ID NO: 178991 - protein, 11 aa, Homo sapiens
  CDR3 for alpha chain variable domain of TCR clone 89496 (TRAV1-1, TRAJ39)
CAVSVVGNMLT

SEQ ID NO: 178992 - protein, 15 aa, Homo sapiens
  CDR3 for beta chain variable domain of TCR clone 89496 (TRBV19, TRBJ1-6)
CASSTQGAVGSPLHF

SEQ ID NO: 178993 - protein, 14 aa, Homo sapiens
  CDR3 for alpha chain variable domain of TCR clone 89497 (TRAV35, TRAJ33)
CAGSSQDSNYQLIC

SEQ ID NO: 178994 - protein, 15 aa, Homo sapiens
  CDR3 for beta chain variable domain of TCR clone 89497 (TRBV12-4, TRBJ2-5)
CASSPPTGLQETQYF

SEQ ID NO: 178995 - protein, 13 aa, Homo sapiens
  CDR3 for alpha chain variable domain of TCR clone 89498 (TRAV8-1, TRAJ28)
CAVSGAGCYQLTF

SEQ ID NO: 178996 - protein, 14 aa, Homo sapiens
  CDR3 for beta chain variable domain of TCR clone 89498 (TRBV7-2, TRBJ2-2)
CASRGQGAAGELFF

SEQ ID NO: 178997 - protein, 12 aa, Homo sapiens
  CDR3 for alpha chain variable domain of TCR clone 89499 (TRAV2, TRAJ33)
CAFMDSNYHLIW

SEQ ID NO: 178998 - protein, 16 aa, Homo sapiens
  CDR3 for beta chain variable domain of TCR clone 89499 (TRBV2, TRBJ2-7)
CASSEPWTGPSYEQYF

SEQ ID NO: 178999 - protein, 15 aa, Homo sapiens
  CDR3 for alpha chain variable domain of TCR clone 89500 (TRAV8-3, TRAJ32)
CAVGPYGGATNKLIF

SEQ ID NO: 179000 - protein, 14 aa, Homo sapiens
  CDR3 for beta chain variable domain of TCR clone 89500 (TRBV29-1, TRBJ2-2)
CSVLAGTNTGELFF

SEQ ID NO: 179001 - protein, 14 aa, Homo sapiens
  CDR3 for alpha chain variable domain of TCR clone 89501 (TRAV12-2, TRAJ13)
CAVKKTGGYQKVTF

SEQ ID NO: 179002 - protein, 15 aa, Homo sapiens
  CDR3 for beta chain variable domain of TCR clone 89501 (TRBV11-2, TRBJ2-1)
CASSLGTSGLNEQFF

SEQ ID NO: 179003 - protein, 18 aa, Homo sapiens
  CDR3 for alpha chain variable domain of TCR clone 89502 (TRAV21, TRAJ52)
CAVRPSPAGGTSYGKLTF

SEQ ID NO: 179004 - protein, 14 aa, Homo sapiens
  CDR3 for beta chain variable domain of TCR clone 89502 (TRBV7-2, TRBJ2-1)
CASSLGGGYNEQFF

SEQ ID NO: 179005 - protein, 16 aa, Homo sapiens
  CDR3 for alpha chain variable domain of TCR clone 89503 (TRAV3, TRAJ37)
CAVRGKGSGNTGKLIF

SEQ ID NO: 179006 - protein, 13 aa, Homo sapiens
  CDR3 for beta chain variable domain of TCR clone 89503 (TRBV7-8, TRBJ2-1)
CASTRDAVDEQFF

SEQ ID NO: 179007 - protein, 14 aa, Homo sapiens
  CDR3 for alpha chain variable domain of TCR clone 89504 (TRAV12-3, TRAJ57)
CARALEGGSEKLVF

SEQ ID NO: 179008 - protein, 22 aa, Homo sapiens
  CDR3 for beta chain variable domain of TCR clone 89504 (TRBV11-3, TRBJ2-3)
CASSLGLTGGGHRYAVFWPRHL

SEQ ID NO: 179009 - protein, 14 aa, Homo sapiens
  CDR3 for alpha chain variable domain of TCR clone 89505 (TRAV13-1, TRAJ4)
CAATLPSGYNKLIF

SEQ ID NO: 179010 - protein, 14 aa, Homo sapiens
  CDR3 for beta chain variable domain of TCR clone 89505 (TRBV19, TRBJ2-1)
CASPTVVLSGEQFF

SEQ ID NO: 179011 - protein, 13 aa, Homo sapiens
  CDR3 for alpha chain variable domain of TCR clone 89506 (TRAV16, TRAJ27)
CALRRTNAGKSTF

SEQ ID NO: 179012 - protein, 14 aa, Homo sapiens
  CDR3 for beta chain variable domain of TCR clone 89506 (TRBV12-5, TRBJ2-5)
CASGSRTHQETQYF

SEQ ID NO: 179013 - protein, 14 aa, Homo sapiens
  CDR3 for alpha chain variable domain of TCR clone 89507 (TRAV1-2, TRAJ16)
CAVNRFSDGQKLLF

SEQ ID NO: 179014 - protein, 14 aa, Homo sapiens
  CDR3 for beta chain variable domain of TCR clone 89507 (TRBV13, TRBJ2-5)
CASSLGRGEETQYF

SEQ ID NO: 179015 - protein, 15 aa, Homo sapiens
  CDR3 for alpha chain variable domain of TCR clone 89508 (TRAV8-1, TRAJ6)
CAVNTPPGGSYIPTF

SEQ ID NO: 179016 - protein, 14 aa, Homo sapiens
  CDR3 for beta chain variable domain of TCR clone 89508 (TRBV12-3, TRBJ2-1)
CASSLGQGASEQFF

SEQ ID NO: 179017 - protein, 16 aa, Homo sapiens
  CDR3 for alpha chain variable domain of TCR clone 89509 (TRAV26-1, TRAJ53)
CIVRVAMGGSNYKLTF

SEQ ID NO: 179018 - protein, 11 aa, Homo sapiens
  CDR3 for beta chain variable domain of TCR clone 89509 (TRBV19, TRBJ2-5)
CASSIKETQYF

SEQ ID NO: 179019 - protein, 12 aa, Homo sapiens
  CDR3 for alpha chain variable domain of TCR clone 89510 (TRAV1-1, TRAJ39)
CAVPVVGNMLTF

SEQ ID NO: 179020 - protein, 18 aa, Homo sapiens
  CDR3 for beta chain variable domain of TCR clone 89510 (TRBV7-9, TRBJ2-7)
CASSLTTSGSRTWYEQYF

SEQ ID NO: 179021 - protein, 15 aa, Homo sapiens
  CDR3 for alpha chain variable domain of TCR clone 89511 (TRAV13-1, TRAJ44)
CAASWGGGTASKLTF

SEQ ID NO: 179022 - protein, 12 aa, Homo sapiens
  CDR3 for beta chain variable domain of TCR clone 89511 (TRBV11-2, TRBJ2-2)
CASSLGGGELFF

SEQ ID NO: 179023 - protein, 12 aa, Homo sapiens
  CDR3 for alpha chain variable domain of TCR clone 89512 (TRAV4, TRAJ21)
CLVGDNFNKFYF

SEQ ID NO: 179024 - protein, 17 aa, Homo sapiens
  CDR3 for beta chain variable domain of TCR clone 89512 (TRBV3-1, TRBJ2-7)
CASSQDLTGLSSHEQYF

SEQ ID NO: 179025 - protein, 14 aa, Homo sapiens
  CDR3 for alpha chain variable domain of TCR clone 89513 (TRAV38-1, TRAJ27)
CAFIHNTSAGKSTF

SEQ ID NO: 179026 - protein, 12 aa, Homo sapiens
  CDR3 for beta chain variable domain of TCR clone 89513 (TRBV7-8, TRBJ2-7)
CASSLGDREQYF

SEQ ID NO: 179027 - protein, 11 aa, Homo sapiens
  CDR3 for alpha chain variable domain of TCR clone 89514 (TRAV12-1, TRAJ15)
CVVNAGTALIF

SEQ ID NO: 179028 - protein, 16 aa, Homo sapiens
  CDR3 for beta chain variable domain of TCR clone 89514 (TRBV28, TRBJ2-1)
CASSSRVRDSYNEQFL

SEQ ID NO: 179029 - protein, 14 aa, Homo sapiens
  CDR3 for alpha chain variable domain of TCR clone 89515 (TRAV12-3, TRAJ7)
CAMSEIGGNNRLAF

SEQ ID NO: 179030 - protein, 12 aa, Homo sapiens
  CDR3 for beta chain variable domain of TCR clone 89515 (TRBV12-4, TRBJ1-3)
CASSFSGNTIYF

SEQ ID NO: 179031 - protein, 14 aa, Homo sapiens
  CDR3 for alpha chain variable domain of TCR clone 89516 (TRAV12-2, TRAJ17)
CAVLFKAAGNKLTF

SEQ ID NO: 179032 - protein, 11 aa, Homo sapiens
  CDR3 for beta chain variable domain of TCR clone 89516 (TRBV19, TRBJ2-7)
CASGLSHEQYF

SEQ ID NO: 179033 - protein, 13 aa, Homo sapiens
  CDR3 for alpha chain variable domain of TCR clone 89517 (TRAV1-2, TRAJ9)
CAALNTGCFKTIF

SEQ ID NO: 179034 - protein, 15 aa, Homo sapiens
  CDR3 for beta chain variable domain of TCR clone 89517 (TRBV6-3, TRBJ2-7)
CASSSPGTVFYEQYF

SEQ ID NO: 179035 - protein, 11 aa, Homo sapiens
  CDR3 for alpha chain variable domain of TCR clone 89518 (TRAV2, TRAJ33)
CAVESNYQLIW

SEQ ID NO: 179036 - protein, 17 aa, Homo sapiens
  CDR3 for beta chain variable domain of TCR clone 89518 (TRBV20-1, TRBJ2-1)
CSAPPRLAGTRYNEQFF

SEQ ID NO: 179037 - protein, 15 aa, Homo sapiens
  CDR3 for alpha chain variable domain of TCR clone 89519 (TRAV3, TRAJ20)
CAVRDIKLSDYKLSI

SEQ ID NO: 179038 - protein, 15 aa, Homo sapiens
  CDR3 for beta chain variable domain of TCR clone 89519 (TRBV7-9, TRBJ1-6)
CASSSPGRGNSPLHF

SEQ ID NO: 179039 - protein, 14 aa, Homo sapiens
  CDR3 for alpha chain variable domain of TCR clone 89520 (TRAV13-1, TRAJ44)
CAAKATGTASKLTF

SEQ ID NO: 179040 - protein, 15 aa, Homo sapiens
  CDR3 for beta chain variable domain of TCR clone 89520 (TRBV4-1, TRBJ2-1)
CASSQDAGGLYEQFF

SEQ ID NO: 179041 - protein, 18 aa, Homo sapiens
  CDR3 for alpha chain variable domain of TCR clone 89521 (TRAV13-1, TRAJ52)
CAASKRSAGGTSFGKLTF

SEQ ID NO: 179042 - protein, 13 aa, Homo sapiens
  CDR3 for beta chain variable domain of TCR clone 89521 (TRBV12-4, TRBJ1-2)
CASSLRQGKGYTF

SEQ ID NO: 179043 - protein, 11 aa, Homo sapiens
  CDR3 for alpha chain variable domain of TCR clone 89522 (TRAV8-3, TRAJ49)
CAVNTGNQFYF

SEQ ID NO: 179044 - protein, 17 aa, Homo sapiens
  CDR3 for beta chain variable domain of TCR clone 89522 (TRBV7-8, TRBJ2-6)
CASSAGTGGAGANVLTF

SEQ ID NO: 179045 - protein, 16 aa, Homo sapiens
  CDR3 for alpha chain variable domain of TCR clone 89523 (TRAV29/DV5, TRAJ39)
CAASLLFNNAGNMPTF

SEQ ID NO: 179046 - protein, 16 aa, Homo sapiens
  CDR3 for beta chain variable domain of TCR clone 89523 (TRBV19, TRBJ2-6)
CASSMSGLSGANVLTF

SEQ ID NO: 179047 - protein, 15 aa, Homo sapiens
  CDR3 for alpha chain variable domain of TCR clone 89524 (TRAV27, TRAJ38)
CAARRNAGNNRKLIW

SEQ ID NO: 179048 - protein, 16 aa, Homo sapiens
  CDR3 for beta chain variable domain of TCR clone 89524 (TRBV20-1, TRBJ1-2)
CSASMGQGVANYGYTF

SEQ ID NO: 179049 - protein, 12 aa, Homo sapiens
  CDR3 for alpha chain variable domain of TCR clone 89525 (TRAV13-1, TRAJ53)
AASGGSNYQLTF

SEQ ID NO: 179050 - protein, 15 aa, Homo sapiens
  CDR3 for beta chain variable domain of TCR clone 89525 (TRBV20-1, TRBJ2-7)
CSARDRVSGMDEQYF

SEQ ID NO: 179051 - protein, 17 aa, Homo sapiens
  CDR3 for alpha chain variable domain of TCR clone 89526 (TRAV3, TRAJ6)
CAVRDGPRAGGSYIPTF

SEQ ID NO: 179052 - protein, 15 aa, Homo sapiens
  CDR3 for beta chain variable domain of TCR clone 89526 (TRBV5-1, TRBJ1-1)
CASSFRGQENTEAFF

SEQ ID NO: 179053 - protein, 18 aa, Homo sapiens
  CDR3 for alpha chain variable domain of TCR clone 89527 (TRAV16, TRAJ52)
CALSGVDAGGTSYGKLPF

SEQ ID NO: 179054 - protein, 15 aa, Homo sapiens
  CDR3 for beta chain variable domain of TCR clone 89527 (TRBV11-3, TRBJ2-3)
CASSAGTVVTNTQYF

SEQ ID NO: 179055 - protein, 15 aa, Homo sapiens
  CDR3 for alpha chain variable domain of TCR clone 89528 (TRAV12-2, TRAJ53)
CAVNGGGGSNYKLTF

SEQ ID NO: 179056 - protein, 12 aa, Homo sapiens
  CDR3 for beta chain variable domain of TCR clone 89528 (TRBV3-1, TRBJ1-1)
CQQPGVITEAFF

SEQ ID NO: 179057 - protein, 12 aa, Homo sapiens
  CDR3 for alpha chain variable domain of TCR clone 89529 (TRAV22, TRAJ22)
CAPGGSARQLTF

SEQ ID NO: 179058 - protein, 13 aa, Homo sapiens
  CDR3 for beta chain variable domain of TCR clone 89529 (TRBV15, TRBJ1-6)
CATSGGLNSPLRF

SEQ ID NO: 179059 - protein, 17 aa, Homo sapiens
  CDR3 for alpha chain variable domain of TCR clone 89530 (TRAV38-2/DV8, TRAJ23)
CALSRKLIFGQGTELSV

SEQ ID NO: 179060 - protein, 17 aa, Homo sapiens
  CDR3 for beta chain variable domain of TCR clone 89530 (TRBV5-4, TRBJ2-1)
CASSSAGGRGPYNGQFF

SEQ ID NO: 179061 - protein, 18 aa, Homo sapiens
  CDR3 for alpha chain variable domain of TCR clone 89531 (TRAV2, TRAJ45)
TTVLWRIRSGGGADGLTF

SEQ ID NO: 179062 - protein, 14 aa, Homo sapiens
  CDR3 for beta chain variable domain of TCR clone 89531 (TRBV12-5, TRBJ2-5)
CASGSRTHQETQYF

SEQ ID NO: 179063 - protein, 16 aa, Homo sapiens
  CDR3 for alpha chain variable domain of TCR clone 89532 (TRAV3, TRAJ23)
CAVNIGIYNQGGKLIF

SEQ ID NO: 179064 - protein, 17 aa, Homo sapiens
  CDR3 for beta chain variable domain of TCR clone 89532 (TRBV10-3, TRBJ2-6)
CAISESTAPSGANVLTF

SEQ ID NO: 179065 - protein, 14 aa, Homo sapiens
  CDR3 for alpha chain variable domain of TCR clone 89533 (TRAV9-2, TRAJ39)
CALYIYNAGNMLTF

SEQ ID NO: 179066 - protein, 15 aa, Homo sapiens
  CDR3 for beta chain variable domain of TCR clone 89533 (TRBV12-4, TRBJ2-2)
CASLRRGDLTGELFF

SEQ ID NO: 179067 - protein, 14 aa, Homo sapiens
  CDR3 for alpha chain variable domain of TCR clone 89534 (TRAV1-2, TRAJ16)
CAVNRFSDGQKLLF

SEQ ID NO: 179068 - protein, 17 aa, Homo sapiens
  CDR3 for beta chain variable domain of TCR clone 89534 (TRBV13, TRBJ2-3)
CASSLSRVAGGRKTQYF

SEQ ID NO: 179069 - protein, 17 aa, Homo sapiens
  CDR3 for alpha chain variable domain of TCR clone 89535 (TRAV12-3, TRAJ6)
CAMSARGGAGGSYIPTF

SEQ ID NO: 179070 - protein, 15 aa, Homo sapiens
  CDR3 for beta chain variable domain of TCR clone 89535 (TRBV25-1, TRBJ1-4)
CASSKRIATNEKLFF

SEQ ID NO: 179071 - protein, 14 aa, Homo sapiens
  CDR3 for alpha chain variable domain of TCR clone 89536 (TRAV8-2, TRAJ11)
CAVSEKSGYSTLTF

SEQ ID NO: 179072 - protein, 16 aa, Homo sapiens
  CDR3 for beta chain variable domain of TCR clone 89536 (TRBV28, TRBJ2-1)
CASSSPEYPRDNEQFF

SEQ ID NO: 179073 - protein, 15 aa, Homo sapiens
  CDR3 for alpha chain variable domain of TCR clone 89537 (TRAV3, TRAJ5)
CAVGDLDTGRRALTF

SEQ ID NO: 179074 - protein, 13 aa, Homo sapiens
  CDR3 for beta chain variable domain of TCR clone 89537 (TRBV20-1, TRBJ2-5)
CSARDSKQATQYF

SEQ ID NO: 179075 - protein, 11 aa, Homo sapiens
  CDR3 for alpha chain variable domain of TCR clone 89538 (TRAV16, TRAJ31)
CALFNNARLMF

SEQ ID NO: 179076 - protein, 12 aa, Homo sapiens
  CDR3 for beta chain variable domain of TCR clone 89538 (TRBV7-8, TRBJ2-7)
CASSLGDREQYF

SEQ ID NO: 179077 - protein, 16 aa, Homo sapiens
  CDR3 for alpha chain variable domain of TCR clone 89539 (TRAV23/DV6, TRAJ21)
CAASSGGGTTSTNFTL

SEQ ID NO: 179078 - protein, 11 aa, Homo sapiens
  CDR3 for beta chain variable domain of TCR clone 89539 (TRBV7-8, TRBJ2-7)
CASSLSLGQYF

SEQ ID NO: 179079 - protein, 13 aa, Homo sapiens
  CDR3 for alpha chain variable domain of TCR clone 89540 (TRAV8-3, TRAJ28)
CAVGAVGSYQLTF

SEQ ID NO: 179080 - protein, 15 aa, Homo sapiens
  CDR3 for beta chain variable domain of TCR clone 89540 (TRBV7-6, TRBJ2-1)
CASSLGGQSHNEQFF

SEQ ID NO: 179081 - protein, 14 aa, Homo sapiens
  CDR3 for alpha chain variable domain of TCR clone 89541 (TRAV1-1, TRAJ35)
CAVRSIGFGHVLHC

SEQ ID NO: 179082 - protein, 14 aa, Homo sapiens
  CDR3 for beta chain variable domain of TCR clone 89541 (TRBV5-7, TRBJ2-7)
CASSGGLSSYEQYF

SEQ ID NO: 179083 - protein, 13 aa, Homo sapiens
  CDR3 for alpha chain variable domain of TCR clone 89542 (TRAV21, TRAJ57)
CAVTQGGSEKLVF

SEQ ID NO: 179084 - protein, 15 aa, Homo sapiens
  CDR3 for beta chain variable domain of TCR clone 89542 (TRBV5-1, TRBJ1-1)
CASSSTAGTNTEAFF

SEQ ID NO: 179085 - protein, 15 aa, Homo sapiens
  CDR3 for alpha chain variable domain of TCR clone 89543 (TRAV29/DV5, TRAJ42)
CAAKTDGGSQGNLIF

SEQ ID NO: 179086 - protein, 13 aa, Homo sapiens
  CDR3 for beta chain variable domain of TCR clone 89543 (TRBV7-9, TRBJ1-2)
CASSLKQNYGYTF

SEQ ID NO: 179087 - protein, 15 aa, Homo sapiens
  CDR3 for alpha chain variable domain of TCR clone 89544 (TRAV3, TRAJ5)
CAVRDRKTGRRALTF

SEQ ID NO: 179088 - protein, 20 aa, Homo sapiens
  CDR3 for beta chain variable domain of TCR clone 89544 (TRBV19, TRBJ2-1)
CASSISRTVTSTRLNNEQFF

SEQ ID NO: 179089 - protein, 14 aa, Homo sapiens
  CDR3 for alpha chain variable domain of TCR clone 89545 (TRAV12-3, TRAJ42)
CAMNYGGSQGNLIF

SEQ ID NO: 179090 - protein, 17 aa, Homo sapiens
  CDR3 for beta chain variable domain of TCR clone 89545 (TRBV4-3, TRBJ2-3)
CASSQDPLAGAVDTQYF

SEQ ID NO: 179091 - protein, 12 aa, Homo sapiens
  CDR3 for alpha chain variable domain of TCR clone 89546 (TRAV12-3, TRAJ17)
CAMTLTSNKLTF

SEQ ID NO: 179092 - protein, 14 aa, Homo sapiens
  CDR3 for beta chain variable domain of TCR clone 89546 (TRBV7-2, TRBJ2-7)
CASRSQGAAYEQYF

SEQ ID NO: 179093 - protein, 14 aa, Homo sapiens
  CDR3 for alpha chain variable domain of TCR clone 89547 (TRAV12-2, TRAJ40)
CAVKIPSGTYKYIF

SEQ ID NO: 179094 - protein, 13 aa, Homo sapiens
  CDR3 for beta chain variable domain of TCR clone 89547 (TRBV3-1, TRBJ1-1)
CASSPGVITEAFF

SEQ ID NO: 179095 - protein, 15 aa, Homo sapiens
  CDR3 for alpha chain variable domain of TCR clone 89548 (TRAV23/DV6, TRAJ57)
CAASSTLSQGGSEKL

SEQ ID NO: 179096 - protein, 14 aa, Homo sapiens
  CDR3 for beta chain variable domain of TCR clone 89548 (TRBV19, TRBJ2-1)
CASSKDRGQDEQFF

SEQ ID NO: 179097 - protein, 12 aa, Homo sapiens
  CDR3 for alpha chain variable domain of TCR clone 89549 (TRAV21, TRAJ20)
CCGLRVDYKLSF

SEQ ID NO: 179098 - protein, 13 aa, Homo sapiens
  CDR3 for beta chain variable domain of TCR clone 89549 (TRBV6-1, TRBJ1-1)
CASSRQGNTEAFF

SEQ ID NO: 179099 - protein, 13 aa, Homo sapiens
  CDR3 for alpha chain variable domain of TCR clone 89550 (TRAV12-2, TRAJ20)
CAVYPSNDYKLSF

SEQ ID NO: 179100 - protein, 12 aa, Homo sapiens
  CDR3 for beta chain variable domain of TCR clone 89550 (TRBV29-1, TRBJ2-3)
CSVTGGADTQYF

SEQ ID NO: 179101 - protein, 13 aa, Homo sapiens
  CDR3 for alpha chain variable domain of TCR clone 89551 (TRAV1-2, TRAJ33)
CAVSEDSNYQLVW

SEQ ID NO: 179102 - protein, 16 aa, Homo sapiens
  CDR3 for beta chain variable domain of TCR clone 89551 (TRBV4-2, TRBJ2-7)
CASSQDGVERGYEQYF

SEQ ID NO: 179103 - protein, 13 aa, Homo sapiens
  CDR3 for alpha chain variable domain of TCR clone 89552 (TRAV12-2, TRAJ6)
CAVNEGGSYIPTF

SEQ ID NO: 179104 - protein, 13 aa, Homo sapiens
  CDR3 for beta chain variable domain of TCR clone 89552 (TRBV12-4, TRBJ1-2)
CASSSGLTVISTF

SEQ ID NO: 179105 - protein, 14 aa, Homo sapiens
  CDR3 for alpha chain variable domain of TCR clone 89553 (TRAV1-2, TRAJ8)
CAVREDTGFQKLVF

SEQ ID NO: 179106 - protein, 16 aa, Homo sapiens
  CDR3 for beta chain variable domain of TCR clone 89553 (TRBV7-3, TRBJ2-1)
CASSKPLAGGYNEQFF

SEQ ID NO: 179107 - protein, 14 aa, Homo sapiens
  CDR3 for alpha chain variable domain of TCR clone 89554 (TRAV12-2, TRAJ13)
CAVKKTGGYQKVTF

SEQ ID NO: 179108 - protein, 13 aa, Homo sapiens
  CDR3 for beta chain variable domain of TCR clone 89554 (TRBV28, TRBJ2-7)
CASKAGGVYERYF

SEQ ID NO: 179109 - protein, 11 aa, Homo sapiens
  CDR3 for alpha chain variable domain of TCR clone 89555 (TRAV35, TRAJ30)
CAGPGDDKVIF

SEQ ID NO: 179110 - protein, 18 aa, Homo sapiens
  CDR3 for beta chain variable domain of TCR clone 89555 (TRBV7-6, TRBJ2-1)
CASSPRTSGMSSYNEQFF

SEQ ID NO: 179111 - protein, 14 aa, Homo sapiens
  CDR3 for alpha chain variable domain of TCR clone 89556 (TRAV17, TRAJ39)
CATDPVRAGNMLTF

SEQ ID NO: 179112 - protein, 15 aa, Homo sapiens
  CDR3 for beta chain variable domain of TCR clone 89556 (TRBV13, TRBJ1-5)
CASSFGQGGDQPQHF

SEQ ID NO: 179113 - protein, 15 aa, Homo sapiens
  CDR3 for alpha chain variable domain of TCR clone 89557 (TRAV21, TRAJ45)
CAVSYSGGGADGLTF

SEQ ID NO: 179114 - protein, 13 aa, Homo sapiens
  CDR3 for beta chain variable domain of TCR clone 89557 (TRBV20-1, TRBJ2-5)
CSAATELQDTQYF

SEQ ID NO: 179115 - protein, 10 aa, Homo sapiens
  CDR3 for alpha chain variable domain of TCR clone 89558 (TRAV12-3, TRAJ49)
CAMNDDQFYF

SEQ ID NO: 179116 - protein, 13 aa, Homo sapiens
  CDR3 for beta chain variable domain of TCR clone 89558 (TRBV4-2, TRBJ1-1)
CASSQAGNTEAFF

SEQ ID NO: 179117 - protein, 13 aa, Homo sapiens
  CDR3 for alpha chain variable domain of TCR clone 89559 (TRAV27, TRAJ42)
CAGARGSQGNLIF

SEQ ID NO: 179118 - protein, 14 aa, Homo sapiens
  CDR3 for beta chain variable domain of TCR clone 89559 (TRBV20-1, TRBJ1-1)
CSAQTLIGGTEAFF

SEQ ID NO: 179119 - protein, 19 aa, Homo sapiens
  CDR3 for alpha chain variable domain of TCR clone 89560 (TRAV17, TRAJ52)
CATATSAGAGGTSYGKLTF

SEQ ID NO: 179120 - protein, 16 aa, Homo sapiens
  CDR3 for beta chain variable domain of TCR clone 89560 (TRBV20-1, TRBJ2-2)
CSASASGIPGAGELFF

SEQ ID NO: 179121 - protein, 13 aa, Homo sapiens
  CDR3 for alpha chain variable domain of TCR clone 89561 (TRAV8-6, TRAJ43)
CAVSDLGNNDMRF

SEQ ID NO: 179122 - protein, 14 aa, Homo sapiens
  CDR3 for beta chain variable domain of TCR clone 89561 (TRBV7-3, TRBJ2-3)
CASSSTGVADTQYF

SEQ ID NO: 179123 - protein, 10 aa, Homo sapiens
  CDR3 for alpha chain variable domain of TCR clone 89562 (TRAV12-1, TRAJ20)
CVVNPRKLSF

SEQ ID NO: 179124 - protein, 12 aa, Homo sapiens
  CDR3 for beta chain variable domain of TCR clone 89562 (TRBV11-2, TRBJ2-1)
CASSPGNNEQFF

SEQ ID NO: 179125 - protein, 13 aa, Homo sapiens
  CDR3 for alpha chain variable domain of TCR clone 89563 (TRAV8-4, TRAJ9)
CAVSDTGGFKTIF

SEQ ID NO: 179126 - protein, 12 aa, Homo sapiens
  CDR3 for beta chain variable domain of TCR clone 89563 (TRBV11-2, TRBJ2-2)
CASSLGGGELFF

SEQ ID NO: 179127 - protein, 11 aa, Homo sapiens
  CDR3 for alpha chain variable domain of TCR clone 89564 (TRAV3, TRAJ21)
CAVGNFNKFYF

SEQ ID NO: 179128 - protein, 16 aa, Homo sapiens
  CDR3 for beta chain variable domain of TCR clone 89564 (TRBV19, TRBJ2-1)
CASSKAGPAPTMSSSS

SEQ ID NO: 179129 - protein, 12 aa, Homo sapiens
  CDR3 for alpha chain variable domain of TCR clone 89565 (TRAV12-1, TRAJ40)
CVFYSGTYKYIF

SEQ ID NO: 179130 - protein, 16 aa, Homo sapiens
  CDR3 for beta chain variable domain of TCR clone 89565 (TRBV12-5, TRBJ2-5)
CASGPRTSGNQETQYF

SEQ ID NO: 179131 - protein, 12 aa, Homo sapiens
  CDR3 for alpha chain variable domain of TCR clone 89566 (TRAV30, TRAJ39)
CGRGNAGNMLTF

SEQ ID NO: 179132 - protein, 12 aa, Homo sapiens
  CDR3 for beta chain variable domain of TCR clone 89566 (TRBV10-3, TRBJ1-1)
CATIDRPPEAFF

SEQ ID NO: 179133 - protein, 13 aa, Homo sapiens
  CDR3 for alpha chain variable domain of TCR clone 89567 (TRAV2, TRAJ40)
CAVVISGTYKYIF

SEQ ID NO: 179134 - protein, 15 aa, Homo sapiens
  CDR3 for beta chain variable domain of TCR clone 89567 (TRBV11-3, TRBJ2-3)
CASLKEGREGDTQYF

SEQ ID NO: 179135 - protein, 14 aa, Homo sapiens
  CDR3 for alpha chain variable domain of TCR clone 89568 (TRAV3, TRAJ9)
CAVRLNTGGSKTIF

SEQ ID NO: 179136 - protein, 15 aa, Homo sapiens
  CDR3 for beta chain variable domain of TCR clone 89568 (TRBV7-2, TRBJ2-1)
CASSLTSGRVNEQFF

SEQ ID NO: 179137 - protein, 14 aa, Homo sapiens
  CDR3 for alpha chain variable domain of TCR clone 89569 (TRAV4, TRAJ6)
CLVGEAGGSYIPKF

SEQ ID NO: 179138 - protein, 16 aa, Homo sapiens
  CDR3 for beta chain variable domain of TCR clone 89569 (TRBV7-6, TRBJ2-1)
CASSLNEGPSYNEQFF

SEQ ID NO: 179139 - protein, 23 aa, Homo sapiens
  CDR3 for alpha chain variable domain of TCR clone 89570 (TRAV12-2, TRAJ36)
SLLIRDSQPSDSATLERANNLFF

SEQ ID NO: 179140 - protein, 17 aa, Homo sapiens
  CDR3 for beta chain variable domain of TCR clone 89570 (TRBV24-1, TRBJ2-4)
CATSDAEARGVRNIQYF

SEQ ID NO: 179141 - protein, 13 aa, Homo sapiens
  CDR3 for alpha chain variable domain of TCR clone 89571 (TRAV3, TRAJ40)
CAVRGSGAYKYIF

SEQ ID NO: 179142 - protein, 15 aa, Homo sapiens
  CDR3 for beta chain variable domain of TCR clone 89571 (TRBV27, TRBJ1-5)
CASSSSGTGNQTQHF

SEQ ID NO: 179143 - protein, 17 aa, Homo sapiens
  CDR3 for alpha chain variable domain of TCR clone 89572 (TRAV3, TRAJ6)
CAVRDGPRAGGSYIPTF

SEQ ID NO: 179144 - protein, 14 aa, Homo sapiens
  CDR3 for beta chain variable domain of TCR clone 89572 (TRBV7-2, TRBJ2-7)
CASSPKTSFYEHYL

SEQ ID NO: 179145 - protein, 18 aa, Homo sapiens
  CDR3 for alpha chain variable domain of TCR clone 89573 (TRAV35, TRAJ28)
CAWHNYPLSGAGSYQLTF

SEQ ID NO: 179146 - protein, 12 aa, Homo sapiens
  CDR3 for beta chain variable domain of TCR clone 89573 (TRBV7-9, TRBJ1-1)
CASSLEGTEAFF

SEQ ID NO: 179147 - protein, 15 aa, Homo sapiens
  CDR3 for alpha chain variable domain of TCR clone 89574 (TRAV8-3, TRAJ27)
CAVGPSKTNARKSTF

SEQ ID NO: 179148 - protein, 15 aa, Homo sapiens
  CDR3 for beta chain variable domain of TCR clone 89574 (TRBV7-2, TRBJ2-1)
CASSSGLAGGNEQFF

SEQ ID NO: 179149 - protein, 13 aa, Homo sapiens
  CDR3 for alpha chain variable domain of TCR clone 89575 (TRAV2, TRAJ15)
CAVASQAGTALIF

SEQ ID NO: 179150 - protein, 15 aa, Homo sapiens
  CDR3 for beta chain variable domain of TCR clone 89575 (TRBV4-1, TRBJ2-7)
CASSQNTGRLYVQYF

SEQ ID NO: 179151 - protein, 13 aa, Homo sapiens
  CDR3 for alpha chain variable domain of TCR clone 89576 (TRAV35, TRAJ21)
CAGQLNNFNKFYF

SEQ ID NO: 179152 - protein, 11 aa, Homo sapiens
  CDR3 for beta chain variable domain of TCR clone 89576 (TRBV7-6, TRBJ2-5)
CASSSQETQYF

SEQ ID NO: 179153 - protein, 11 aa, Homo sapiens
  CDR3 for alpha chain variable domain of TCR clone 89577 (TRAV12-2, TRAJ54)
CAVEGAQKMVF

SEQ ID NO: 179154 - protein, 17 aa, Homo sapiens
  CDR3 for beta chain variable domain of TCR clone 89577 (TRBV18, TRBJ1-3)
CASSPYPTGPSGNTIYF

SEQ ID NO: 179155 - protein, 18 aa, Homo sapiens
  CDR3 for alpha chain variable domain of TCR clone 89578 (TRAV26-1, TRAJ23)
CIVRVGLEVLNQGGKLIF

SEQ ID NO: 179156 - protein, 16 aa, Homo sapiens
  CDR3 for beta chain variable domain of TCR clone 89578 (TRBV12-4, TRBJ2-5)
CASSFFVRGRQETQYF

SEQ ID NO: 179157 - protein, 12 aa, Homo sapiens
  CDR3 for alpha chain variable domain of TCR clone 89579 (TRAV12-3, TRAJ17)
CAMTLTGSNLTF

SEQ ID NO: 179158 - protein, 15 aa, Homo sapiens
  CDR3 for beta chain variable domain of TCR clone 89579 (TRBV20-1, TRBJ2-7)
CSARDRVSGMDEQYF

SEQ ID NO: 179159 - protein, 15 aa, Homo sapiens
  CDR3 for alpha chain variable domain of TCR clone 89580 (TRAV3, TRAJ3)
CAVRGMSSSASKIIF

SEQ ID NO: 179160 - protein, 17 aa, Homo sapiens
  CDR3 for beta chain variable domain of TCR clone 89580 (TRBV24-1, TRBJ2-1)
CATSDVSTSGTYNEQFF

SEQ ID NO: 179161 - protein, 17 aa, Homo sapiens
  CDR3 for alpha chain variable domain of TCR clone 89581 (TRAV3, TRAJ6)
CAVRDCPRAGGSYIPTF

SEQ ID NO: 179162 - protein, 15 aa, Homo sapiens
  CDR3 for beta chain variable domain of TCR clone 89581 (TRBV20-1, TRBJ1-1)
CSASWDRFLNTEAFF

SEQ ID NO: 179163 - protein, 16 aa, Homo sapiens
  CDR3 for alpha chain variable domain of TCR clone 89582 (TRAV26-1, TRAJ32)
CIVRTNYGGATNKLIF

SEQ ID NO: 179164 - protein, 14 aa, Homo sapiens
  CDR3 for beta chain variable domain of TCR clone 89582 (TRBV6-1, TRBJ1-3)
CASVQEGGGNTIYF

SEQ ID NO: 179165 - protein, 14 aa, Homo sapiens
  CDR3 for alpha chain variable domain of TCR clone 89583 (TRAV17, TRAJ56)
CATVPAGANSKLTF

SEQ ID NO: 179166 - protein, 15 aa, Homo sapiens
  CDR3 for beta chain variable domain of TCR clone 89583 (TRBV28, TRBJ1-3)
CASSMGWASGNTIYF

SEQ ID NO: 179167 - protein, 13 aa, Homo sapiens
  CDR3 for alpha chain variable domain of TCR clone 89584 (TRAV20, TRAJ31)
CAVQAIGGARLMF

SEQ ID NO: 179168 - protein, 13 aa, Homo sapiens
  CDR3 for beta chain variable domain of TCR clone 89584 (TRBV10-3, TRBJ2-7)
CASKLAVNYEQYF

SEQ ID NO: 179169 - protein, 12 aa, Homo sapiens
  CDR3 for alpha chain variable domain of TCR clone 89585 (TRAV12-1, TRAJ40)
CVVYSGTYKYIF

SEQ ID NO: 179170 - protein, 13 aa, Homo sapiens
  CDR3 for beta chain variable domain of TCR clone 89585 (TRBV20-1, TRBJ1-6)
CSAPLGVGSPLHF

SEQ ID NO: 179171 - protein, 14 aa, Homo sapiens
  CDR3 for alpha chain variable domain of TCR clone 89586 (TRAV1-2, TRAJ16)
CAVNRFSDGQKLLL

SEQ ID NO: 179172 - protein, 20 aa, Homo sapiens
  CDR3 for beta chain variable domain of TCR clone 89586 (TRBV28, TRBJ2-1)
CASTPIGRSPGLAGGNEQFF

SEQ ID NO: 179173 - protein, 16 aa, Homo sapiens
  CDR3 for alpha chain variable domain of TCR clone 89587 (TRAV30, TRAJ24)
CGTEIVDADSWGKFQF

SEQ ID NO: 179174 - protein, 13 aa, Homo sapiens
  CDR3 for beta chain variable domain of TCR clone 89587 (TRBV19, TRBJ1-2)
CASSVPGQDGYTL

SEQ ID NO: 179175 - protein, 14 aa, Homo sapiens
  CDR3 for alpha chain variable domain of TCR clone 89588 (TRAV14/DV4, TRAJ42)
CPRGSLRSQGNLIF

SEQ ID NO: 179176 - protein, 19 aa, Homo sapiens
  CDR3 for beta chain variable domain of TCR clone 89588 (TRBV5-1, TRBJ2-3)
CASSLWLAGGITTTDTQYF

SEQ ID NO: 179177 - protein, 13 aa, Homo sapiens
  CDR3 for alpha chain variable domain of TCR clone 89589 (TRAV13-1, TRAJ20)
CAARVSNDYKLSF

SEQ ID NO: 179178 - protein, 13 aa, Homo sapiens
  CDR3 for beta chain variable domain of TCR clone 89589 (TRBV12-4, TRBJ1-2)
CASSLRQGKGYTF

SEQ ID NO: 179179 - protein, 14 aa, Homo sapiens
  CDR3 for alpha chain variable domain of TCR clone 89590 (TRAV17, TRAJ57)
CATDPQGGSEKLVF

SEQ ID NO: 179180 - protein, 14 aa, Homo sapiens
  CDR3 for beta chain variable domain of TCR clone 89590 (TRBV7-9, TRBJ2-3)
CASSLEDGTDTQYF

SEQ ID NO: 179181 - protein, 14 aa, Homo sapiens
  CDR3 for alpha chain variable domain of TCR clone 89591 (TRAV1-2, TRAJ8)
CAVREDTGFQKLAF

SEQ ID NO: 179182 - protein, 12 aa, Homo sapiens
  CDR3 for beta chain variable domain of TCR clone 89591 (TRBV11-2, TRBJ2-2)
CASSLPTGELFF

SEQ ID NO: 179183 - protein, 13 aa, Homo sapiens
  CDR3 for alpha chain variable domain of TCR clone 89592 (TRAV6, TRAJ45)
SPFSGGGADGLTF

SEQ ID NO: 179184 - protein, 17 aa, Homo sapiens
  CDR3 for beta chain variable domain of TCR clone 89592 (TRBV10-3, TRBJ1-2)
CAISETRDRGLEYGYTF

SEQ ID NO: 179185 - protein, 18 aa, Homo sapiens
  CDR3 for alpha chain variable domain of TCR clone 89593 (TRAV26-1, TRAJ52)
CAASKRSAGGTSYGKLTF

SEQ ID NO: 179186 - protein, 13 aa, Homo sapiens
  CDR3 for beta chain variable domain of TCR clone 89593 (TRBV12-4, TRBJ1-2)
CASSLRQGKGYTF

SEQ ID NO: 179187 - protein, 18 aa, Homo sapiens
  CDR3 for alpha chain variable domain of TCR clone 89594 (TRAV29/DV5, TRAJ53)
CSVLLCSKRGGRNYKLTF

SEQ ID NO: 179188 - protein, 17 aa, Homo sapiens
  CDR3 for beta chain variable domain of TCR clone 89594 (TRBV7-8, TRBJ2-6)
CASSAGTGGAGANVLTF

SEQ ID NO: 179189 - protein, 15 aa, Homo sapiens
  CDR3 for alpha chain variable domain of TCR clone 89595 (TRAV12-1, TRAJ9)
CVVSFGDTGGFKTIF

SEQ ID NO: 179190 - protein, 13 aa, Homo sapiens
  CDR3 for beta chain variable domain of TCR clone 89595 (TRBV2, TRBJ1-4)
CASSERAREKLFF

SEQ ID NO: 179191 - protein, 15 aa, Homo sapiens
  CDR3 for alpha chain variable domain of TCR clone 89596 (TRAV8-3, TRAJ40)
CAVGPYTSGTSKYIF

SEQ ID NO: 179192 - protein, 16 aa, Homo sapiens
  CDR3 for beta chain variable domain of TCR clone 89596 (TRBV7-2, TRBJ2-7)
CASSLDPGGGSGEQYF

SEQ ID NO: 179193 - protein, 15 aa, Homo sapiens
  CDR3 for alpha chain variable domain of TCR clone 89597 (TRAV21, TRAJ40)
CAVRPQTSGTYKYIF

SEQ ID NO: 179194 - protein, 14 aa, Homo sapiens
  CDR3 for beta chain variable domain of TCR clone 89597 (TRBV7-2, TRBJ2-5)
CASSFTQGQETQYF

SEQ ID NO: 179195 - protein, 13 aa, Homo sapiens
  CDR3 for alpha chain variable domain of TCR clone 89598 (TRAV36/DV7, TRAJ49)
CAGDSNTGNQFYF

SEQ ID NO: 179196 - protein, 14 aa, Homo sapiens
  CDR3 for beta chain variable domain of TCR clone 89598 (TRBV19, TRBJ2-1)
CASPTFVLSGEQFF

SEQ ID NO: 179197 - protein, 14 aa, Homo sapiens
  CDR3 for alpha chain variable domain of TCR clone 89599 (TRAV20, TRAJ42)
CAVQAGGSQGNLIF

SEQ ID NO: 179198 - protein, 14 aa, Homo sapiens
  CDR3 for beta chain variable domain of TCR clone 89599 (TRBV7-3, TRBJ2-2)
CASSSGGYTGELFF

SEQ ID NO: 179199 - protein, 18 aa, Homo sapiens
  CDR3 for alpha chain variable domain of TCR clone 89600 (TRAV9-2, TRAJ52)
CALSRHNAGGTSYGKLTF

SEQ ID NO: 179200 - protein, 17 aa, Homo sapiens
  CDR3 for beta chain variable domain of TCR clone 89600 (TRBV7-6, TRBJ2-7)
CASSAIKTSGGRYEQYF

SEQ ID NO: 179201 - protein, 13 aa, Homo sapiens
  CDR3 for alpha chain variable domain of TCR clone 89601 (TRAV35, TRAJ22)
CACLSGSARQLTF

SEQ ID NO: 179202 - protein, 16 aa, Homo sapiens
  CDR3 for beta chain variable domain of TCR clone 89601 (TRBV7-9, TRBJ2-1)
CASSLVLTGQGNEQFF

SEQ ID NO: 179203 - protein, 14 aa, Homo sapiens
  CDR3 for alpha chain variable domain of TCR clone 89602 (TRAV1-2, TRAJ8)
CAVREDTGFQTLVF

SEQ ID NO: 179204 - protein, 16 aa, Homo sapiens
  CDR3 for beta chain variable domain of TCR clone 89602 (TRBV12-4, TRBJ1-5)
CASSRPVGGSNQPQHF

SEQ ID NO: 179205 - protein, 16 aa, Homo sapiens
  CDR3 for alpha chain variable domain of TCR clone 89603 (TRAV30, TRAJ24)
CGTELVDADSWGKSQF

SEQ ID NO: 179206 - protein, 14 aa, Homo sapiens
  CDR3 for beta chain variable domain of TCR clone 89603 (TRBV12-5, TRBJ2-5)
CASGSRTHQETQYF

SEQ ID NO: 179207 - protein, 17 aa, Homo sapiens
  CDR3 for alpha chain variable domain of TCR clone 89604 (TRAV3, TRAJ38)
CAVRDCVNAGNNRKLIW

SEQ ID NO: 179208 - protein, 14 aa, Homo sapiens
  CDR3 for beta chain variable domain of TCR clone 89604 (TRBV5-5, TRBJ1-5)
CASSGQGVDQPQHF

SEQ ID NO: 179209 - protein, 18 aa, Homo sapiens
  CDR3 for alpha chain variable domain of TCR clone 89605 (TRAV21, TRAJ53)
CAVKGGENSGGRNYKLTF

SEQ ID NO: 179210 - protein, 13 aa, Homo sapiens
  CDR3 for beta chain variable domain of TCR clone 89605 (TRBV9, TRBJ2-1)
CASSPSGGSEQFF

SEQ ID NO: 179211 - protein, 14 aa, Homo sapiens
  CDR3 for alpha chain variable domain of TCR clone 89606 (TRAV12-1, TRAJ33)
CVVNPEDSNYQLIW

SEQ ID NO: 179212 - protein, 15 aa, Homo sapiens
  CDR3 for beta chain variable domain of TCR clone 89606 (TRBV7-2, TRBJ2-1)
CASSSGLAGGNEQFF

SEQ ID NO: 179213 - protein, 13 aa, Homo sapiens
  CDR3 for alpha chain variable domain of TCR clone 89607 (TRAV12-3, TRAJ13)
CAMGTGGYQKVTF

SEQ ID NO: 179214 - protein, 13 aa, Homo sapiens
  CDR3 for beta chain variable domain of TCR clone 89607 (TRBV7-3, TRBJ1-1)
CASSQDWGAEAFF

SEQ ID NO: 179215 - protein, 15 aa, Homo sapiens
  CDR3 for alpha chain variable domain of TCR clone 89608 (TRAV2, TRAJ11)
CAVGGRNSGYSTLTF

SEQ ID NO: 179216 - protein, 14 aa, Homo sapiens
  CDR3 for beta chain variable domain of TCR clone 89608 (TRBV4-1, TRBJ2-2)
CARSQAVNTGELFF

SEQ ID NO: 179217 - protein, 16 aa, Homo sapiens
  CDR3 for alpha chain variable domain of TCR clone 89609 (TRAV30, TRAJ24)
CGTEIVDADSWGKFQF

SEQ ID NO: 179218 - protein, 17 aa, Homo sapiens
  CDR3 for beta chain variable domain of TCR clone 89609 (TRBV5-1, TRBJ2-2)
CASSPRTGGMNTGELFF

SEQ ID NO: 179219 - protein, 15 aa, Homo sapiens
  CDR3 for alpha chain variable domain of TCR clone 89610 (TRAV17, TRAJ57)
CATGRSQGGSEKLVF

SEQ ID NO: 179220 - protein, 14 aa, Homo sapiens
  CDR3 for beta chain variable domain of TCR clone 89610 (TRBV12-5, TRBJ2-5)
CASGSRTHQETQYF

SEQ ID NO: 179221 - protein, 14 aa, Homo sapiens
  CDR3 for alpha chain variable domain of TCR clone 89611 (TRAV3, TRAJ21)
CAVESQANFNKFYF

SEQ ID NO: 179222 - protein, 18 aa, Homo sapiens
  CDR3 for beta chain variable domain of TCR clone 89611 (TRBV7-9, TRBJ2-1)
CTSSLAVSGTSGRNEQFF

SEQ ID NO: 179223 - protein, 13 aa, Homo sapiens
  CDR3 for alpha chain variable domain of TCR clone 89612 (TRAV16, TRAJ34)
CALSGRNTDKLIF

SEQ ID NO: 179224 - protein, 14 aa, Homo sapiens
  CDR3 for beta chain variable domain of TCR clone 89612 (TRBV2, TRBJ2-1)
CASRTGSSYNEQFF

SEQ ID NO: 179225 - protein, 11 aa, Homo sapiens
  CDR3 for alpha chain variable domain of TCR clone 89613 (TRAV1-2, TRAJ31)
CAVNNNARPMF

SEQ ID NO: 179226 - protein, 15 aa, Homo sapiens
  CDR3 for beta chain variable domain of TCR clone 89613 (TRBV28, TRBJ2-1)
CASSIIAGGRSEQFF

SEQ ID NO: 179227 - protein, 14 aa, Homo sapiens
  CDR3 for alpha chain variable domain of TCR clone 89614 (TRAV35, TRAJ22)
CAGLRPGSARQLTF

SEQ ID NO: 179228 - protein, 16 aa, Homo sapiens
  CDR3 for beta chain variable domain of TCR clone 89614 (TRBV7-6, TRBJ2-1)
CASSAPGPSSYNEQFF

SEQ ID NO: 179229 - protein, 13 aa, Homo sapiens
  CDR3 for alpha chain variable domain of TCR clone 89615 (TRAV35, TRAJ48)
CAGHEFGNEKLTF

SEQ ID NO: 179230 - protein, 14 aa, Homo sapiens
  CDR3 for beta chain variable domain of TCR clone 89615 (TRBV19, TRBJ2-1)
CAIPTFVLSGEQFF

SEQ ID NO: 179231 - protein, 12 aa, Homo sapiens
  CDR3 for alpha chain variable domain of TCR clone 89616 (TRAV1-1, TRAJ43)
CAPRVSSNDMRF

SEQ ID NO: 179232 - protein, 12 aa, Homo sapiens
  CDR3 for beta chain variable domain of TCR clone 89616 (TRBV19, TRBJ1-5)
CASSIAQQPQHF

SEQ ID NO: 179233 - protein, 13 aa, Homo sapiens
  CDR3 for alpha chain variable domain of TCR clone 89617 (TRAV17, TRAJ9)
CATFLTGGFKTIF

SEQ ID NO: 179234 - protein, 16 aa, Homo sapiens
  CDR3 for beta chain variable domain of TCR clone 89617 (TRBV5-7, TRBJ1-4)
CASSPSGGLETEKLFF

SEQ ID NO: 179235 - protein, 16 aa, Homo sapiens
  CDR3 for alpha chain variable domain of TCR clone 89618 (TRAV35, TRAJ37)
CWAFLRGSSNTGKLIV

SEQ ID NO: 179236 - protein, 13 aa, Homo sapiens
  CDR3 for beta chain variable domain of TCR clone 89618 (TRBV2, TRBJ1-2)
CASSVRGNYGYTF

SEQ ID NO: 179237 - protein, 14 aa, Homo sapiens
  CDR3 for alpha chain variable domain of TCR clone 89619 (TRAV29/DV5, TRAJ36)
CAARRKTGANNLFF

SEQ ID NO: 179238 - protein, 13 aa, Homo sapiens
  CDR3 for beta chain variable domain of TCR clone 89619 (TRBV19, TRBJ1-2)
CASSQGQVYGYTF

SEQ ID NO: 179239 - protein, 13 aa, Homo sapiens
  CDR3 for alpha chain variable domain of TCR clone 89620 (TRAV8-6, TRAJ49)
CDVITNTGNQFYF

SEQ ID NO: 179240 - protein, 14 aa, Homo sapiens
  CDR3 for beta chain variable domain of TCR clone 89620 (TRBV7-2, TRBJ2-7)
CASRSQGAAYEQYF

SEQ ID NO: 179241 - protein, 14 aa, Homo sapiens
  CDR3 for alpha chain variable domain of TCR clone 89621 (TRAV17, TRAJ17)
CATDHRAAGNKLTF

SEQ ID NO: 179242 - protein, 14 aa, Homo sapiens
  CDR3 for beta chain variable domain of TCR clone 89621 (TRBV7-6, TRBJ2-3)
CASSLGTVTDTQYF

SEQ ID NO: 179243 - protein, 12 aa, Homo sapiens
  CDR3 for alpha chain variable domain of TCR clone 89622 (TRAV12-3, TRAJ3)
CAIDSSASKIIF

SEQ ID NO: 179244 - protein, 17 aa, Homo sapiens
  CDR3 for beta chain variable domain of TCR clone 89622 (TRBV7-2, TRBJ2-3)
CASSLGGRAAWRDTQYF

SEQ ID NO: 179245 - protein, 14 aa, Homo sapiens
  CDR3 for alpha chain variable domain of TCR clone 89623 (TRAV12-2, TRAJ44)
CAVNPAGTASKLTF

SEQ ID NO: 179246 - protein, 15 aa, Homo sapiens
  CDR3 for beta chain variable domain of TCR clone 89623 (TRBV29-1, TRBJ1-2)
CSVVLEAGSNYGYTF

SEQ ID NO: 179247 - protein, 17 aa, Homo sapiens
  CDR3 for alpha chain variable domain of TCR clone 89624 (TRAV8-3, TRAJ50)
CAVGAVDTETSYDKVLF

SEQ ID NO: 179248 - protein, 13 aa, Homo sapiens
  CDR3 for beta chain variable domain of TCR clone 89624 (TRBV7-9, TRBJ2-2)
CASSSAGTGELFF

SEQ ID NO: 179249 - protein, 15 aa, Homo sapiens
  CDR3 for alpha chain variable domain of TCR clone 89625 (TRAV12-2, TRAJ53)
CAVNGGGGSNYKLPF

SEQ ID NO: 179250 - protein, 13 aa, Homo sapiens
  CDR3 for beta chain variable domain of TCR clone 89625 (TRBV3-1, TRBJ1-1)
CASSPGVITEAFF

SEQ ID NO: 179251 - protein, 14 aa, Homo sapiens
  CDR3 for alpha chain variable domain of TCR clone 89626 (TRAV17, TRAJ57)
CATDPQGGPEKLVF

SEQ ID NO: 179252 - protein, 14 aa, Homo sapiens
  CDR3 for beta chain variable domain of TCR clone 89626 (TRBV7-8, TRBJ2-7)
CASSPRDRVYEQYF

SEQ ID NO: 179253 - protein, 12 aa, Homo sapiens
  CDR3 for alpha chain variable domain of TCR clone 89627 (TRAV20, TRAJ39)
CAVGNAGNMLTF

SEQ ID NO: 179254 - protein, 16 aa, Homo sapiens
  CDR3 for beta chain variable domain of TCR clone 89627 (TRBV29-1, TRBJ2-7)
CSVEDAEDGTAYEQYF

SEQ ID NO: 179255 - protein, 12 aa, Homo sapiens
  CDR3 for alpha chain variable domain of TCR clone 89628 (TRAV12-2, TRAJ8)
CAVNTGFQKLVF

SEQ ID NO: 179256 - protein, 10 aa, Homo sapiens
  CDR3 for beta chain variable domain of TCR clone 89628 (TRBV28, TRBJ2-5)
CQQSSWTQYF

SEQ ID NO: 179257 - protein, 14 aa, Homo sapiens
  CDR3 for alpha chain variable domain of TCR clone 89629 (TRAV13-1, TRAJ35)
CAASKGGFGNVLHC

SEQ ID NO: 179258 - protein, 11 aa, Homo sapiens
  CDR3 for beta chain variable domain of TCR clone 89629 (TRBV11-2, TRBJ2-2)
CASSLPGELFF

SEQ ID NO: 179259 - protein, 13 aa, Homo sapiens
  CDR3 for alpha chain variable domain of TCR clone 89630 (TRAV35, TRAJ42)
CAAFPGSQGNLIF

SEQ ID NO: 179260 - protein, 13 aa, Homo sapiens
  CDR3 for beta chain variable domain of TCR clone 89630 (TRBV29-1, TRBJ2-1)
CSVEGGRVNEQFF

SEQ ID NO: 179261 - protein, 15 aa, Homo sapiens
  CDR3 for alpha chain variable domain of TCR clone 89631 (TRAV35, TRAJ38)
CAGFSNAGNNRKLIW

SEQ ID NO: 179262 - protein, 18 aa, Homo sapiens
  CDR3 for beta chain variable domain of TCR clone 89631 (TRBV3-1, TRBJ1-2)
CASSHDVIGWNGDYGYTF

SEQ ID NO: 179263 - protein, 15 aa, Homo sapiens
  CDR3 for alpha chain variable domain of TCR clone 89632 (TRAV27, TRAJ38)
CAARRNAGNNRKLIW

SEQ ID NO: 179264 - protein, 16 aa, Homo sapiens
  CDR3 for beta chain variable domain of TCR clone 89632 (TRBV15, TRBJ1-2)
CATSRGPRTGGGGYTF

SEQ ID NO: 179265 - protein, 15 aa, Homo sapiens
  CDR3 for alpha chain variable domain of TCR clone 89633 (TRAV21, TRAJ53)
CATLNSGGSNYKLTF

SEQ ID NO: 179266 - protein, 16 aa, Homo sapiens
  CDR3 for beta chain variable domain of TCR clone 89633 (TRBV20-1, TRBJ1-4)
CSAPGQGLLANEKLFF

SEQ ID NO: 179267 - protein, 11 aa, Homo sapiens
  CDR3 for alpha chain variable domain of TCR clone 89634 (TRAV3, TRAJ21)
CAVGNFNKFYF

SEQ ID NO: 179268 - protein, 15 aa, Homo sapiens
  CDR3 for beta chain variable domain of TCR clone 89634 (TRBV7-2, TRBJ2-7)
CASSLALGSAYEQYF

SEQ ID NO: 179269 - protein, 15 aa, Homo sapiens
  CDR3 for alpha chain variable domain of TCR clone 89635 (TRAV3, TRAJ22)
CAVRDRGGSARQLNF

SEQ ID NO: 179270 - protein, 16 aa, Homo sapiens
  CDR3 for beta chain variable domain of TCR clone 89635 (TRBV11-2, TRBJ2-1)
CASARGSYSHHNEQFF

SEQ ID NO: 179271 - protein, 14 aa, Homo sapiens
  CDR3 for alpha chain variable domain of TCR clone 89636 (TRAV12-1, TRAJ12)
CVVTRMDSSYKLIF

SEQ ID NO: 179272 - protein, 13 aa, Homo sapiens
  CDR3 for beta chain variable domain of TCR clone 89636 (TRBV10-3, TRBJ2-7)
CASKLAVNYEQYF

SEQ ID NO: 179273 - protein, 15 aa, Homo sapiens
  CDR3 for alpha chain variable domain of TCR clone 89637 (TRAV3, TRAJ20)
CAVRDIKLSDYKLSF

SEQ ID NO: 179274 - protein, 15 aa, Homo sapiens
  CDR3 for beta chain variable domain of TCR clone 89637 (TRBV7-9, TRBJ1-6)
CATSSPGRGNSPLHF

SEQ ID NO: 179275 - protein, 13 aa, Homo sapiens
  CDR3 for alpha chain variable domain of TCR clone 89638 (TRAV12-3, TRAJ9)
CAMSADGGFKTIF

SEQ ID NO: 179276 - protein, 12 aa, Homo sapiens
  CDR3 for beta chain variable domain of TCR clone 89638 (TRBV12-4, TRBJ2-3)
CASSTLPDTQYF

SEQ ID NO: 179277 - protein, 16 aa, Homo sapiens
  CDR3 for alpha chain variable domain of TCR clone 89639 (TRAV3, TRAJ37)
CAVRGKGSGNSGKLIF

SEQ ID NO: 179278 - protein, 15 aa, Homo sapiens
  CDR3 for beta chain variable domain of TCR clone 89639 (TRBV5-1, TRBJ2-7)
CASSLNGGPAREQYF

SEQ ID NO: 179279 - protein, 12 aa, Homo sapiens
  CDR3 for alpha chain variable domain of TCR clone 89640 (TRAV12-1, )
CVVNSWISRTLT

SEQ ID NO: 179280 - protein, 13 aa, Homo sapiens
  CDR3 for beta chain variable domain of TCR clone 89640 (TRBV10-2, TRBJ2-7)
CASGASGGYEQYF

SEQ ID NO: 179281 - protein, 13 aa, Homo sapiens
  CDR3 for alpha chain variable domain of TCR clone 89641 (TRAV2, TRAJ40)
CAVVTSGTYKYIF

SEQ ID NO: 179282 - protein, 14 aa, Homo sapiens
  CDR3 for beta chain variable domain of TCR clone 89641 (TRBV15, TRBJ2-5)
CATSSTGYQETQYF

SEQ ID NO: 179283 - protein, 16 aa, Homo sapiens
  CDR3 for alpha chain variable domain of TCR clone 89642 (TRAV14/DV4, TRAJ20)
CAMREGRSRDDYKLSF

SEQ ID NO: 179284 - protein, 13 aa, Homo sapiens
  CDR3 for beta chain variable domain of TCR clone 89642 (TRBV28, TRBJ2-7)
CASKAGGVYEQYF

SEQ ID NO: 179285 - protein, 11 aa, Homo sapiens
  CDR3 for alpha chain variable domain of TCR clone 89643 (TRAV1-2, TRAJ20)
CAVANGYKLSF

SEQ ID NO: 179286 - protein, 18 aa, Homo sapiens
  CDR3 for beta chain variable domain of TCR clone 89643 (TRBV20-1, TRBJ2-6)
CSAETTPTHGSGANDLTF

SEQ ID NO: 179287 - protein, 14 aa, Homo sapiens
  CDR3 for alpha chain variable domain of TCR clone 89644 (TRAV38-1, TRAJ29)
CAFITPSGNTPLVF

SEQ ID NO: 179288 - protein, 15 aa, Homo sapiens
  CDR3 for beta chain variable domain of TCR clone 89644 (TRBV19, TRBJ1-1)
CASTSGQIQNTEAFF

SEQ ID NO: 179289 - protein, 14 aa, Homo sapiens
  CDR3 for alpha chain variable domain of TCR clone 89645 (TRAV35, TRAJ33)
CAGSSQDSNYQLIW

SEQ ID NO: 179290 - protein, 18 aa, Homo sapiens
  CDR3 for beta chain variable domain of TCR clone 89645 (TRBV7-9, TRBJ2-7)
CASSLTTSGSRTWYEQYF

SEQ ID NO: 179291 - protein, 12 aa, Homo sapiens
  CDR3 for alpha chain variable domain of TCR clone 89646 (TRAV25, TRAJ11)
CAGASGYSNLTF

SEQ ID NO: 179292 - protein, 14 aa, Homo sapiens
  CDR3 for beta chain variable domain of TCR clone 89646 (TRBV5-8, TRBJ2-3)
CASSLGQGTDTQYF

SEQ ID NO: 179293 - protein, 14 aa, Homo sapiens
  CDR3 for alpha chain variable domain of TCR clone 89647 (TRAV8-4, TRAJ45)
CASGGGGGADGLTF

SEQ ID NO: 179294 - protein, 20 aa, Homo sapiens
  CDR3 for beta chain variable domain of TCR clone 89647 (TRBV4-3, TRBJ2-3)
CASSPRVEMRARGRPDTQYF

SEQ ID NO: 179295 - protein, 10 aa, Homo sapiens
  CDR3 for alpha chain variable domain of TCR clone 89648 (TRAV12-3, TRAJ49)
CAMNDDQFYF

SEQ ID NO: 179296 - protein, 14 aa, Homo sapiens
  CDR3 for beta chain variable domain of TCR clone 89648 (TRBV4-1, TRBJ2-2)
CASSQAVNTGELFF

SEQ ID NO: 179297 - protein, 15 aa, Homo sapiens
  CDR3 for alpha chain variable domain of TCR clone 89649 (TRAV2, TRAJ9)
CAVEDRGTGGFKTIF

SEQ ID NO: 179298 - protein, 12 aa, Homo sapiens
  CDR3 for beta chain variable domain of TCR clone 89649 (TRBV6-3, TRBJ2-7)
CASSLTPYEQYF

SEQ ID NO: 179299 - protein, 14 aa, Homo sapiens
  CDR3 for alpha chain variable domain of TCR clone 89650 (TRAV12-2, TRAJ40)
CAVKIPSGTYKYIF

SEQ ID NO: 179300 - protein, 14 aa, Homo sapiens
  CDR3 for beta chain variable domain of TCR clone 89650 (TRBV20-1, TRBJ1-1)
CSAQRRIGGTEAFF

SEQ ID NO: 179301 - protein, 14 aa, Homo sapiens
  CDR3 for alpha chain variable domain of TCR clone 89651 (TRAV4, TRAJ26)
CLVGPHNYGQNFVF

SEQ ID NO: 179302 - protein, 17 aa, Homo sapiens
  CDR3 for beta chain variable domain of TCR clone 89651 (TRBV24-1, TRBJ2-1)
CANSDVSTSGTYNEQFF

SEQ ID NO: 179303 - protein, 14 aa, Homo sapiens
  CDR3 for alpha chain variable domain of TCR clone 89652 (TRAV26-1, TRAJ34)
CIVRVAYNTDKLIF

SEQ ID NO: 179304 - protein, 16 aa, Homo sapiens
  CDR3 for beta chain variable domain of TCR clone 89652 (TRBV24-1, TRBJ2-3)
CATSDPGTGATDTQYF

SEQ ID NO: 179305 - protein, 12 aa, Homo sapiens
  CDR3 for alpha chain variable domain of TCR clone 89653 (TRAV21, TRAJ13)
PGPSWGYQKVTF

SEQ ID NO: 179306 - protein, 15 aa, Homo sapiens
  CDR3 for beta chain variable domain of TCR clone 89653 (TRBV20-1, TRBJ2-7)
CSARDRVSGMDEQYF

SEQ ID NO: 179307 - protein, 11 aa, Homo sapiens
  CDR3 for alpha chain variable domain of TCR clone 89654 (TRAV25, TRAJ11)
CRGFRIQPLTF

SEQ ID NO: 179308 - protein, 14 aa, Homo sapiens
  CDR3 for beta chain variable domain of TCR clone 89654 (TRBV5-8, TRBJ2-3)
CASSLGQGTDTQYF

SEQ ID NO: 179309 - protein, 15 aa, Homo sapiens
  CDR3 for alpha chain variable domain of TCR clone 89655 (TRAV3, TRAJ5)
CAVRDRKTGRRALTF

SEQ ID NO: 179310 - protein, 10 aa, Homo sapiens
  CDR3 for beta chain variable domain of TCR clone 89655 (TRBV7-9, TRBJ2-2)
CASGPLDTFP

SEQ ID NO: 179311 - protein, 14 aa, Homo sapiens
  CDR3 for alpha chain variable domain of TCR clone 89656 (TRAV26-2, TRAJ23)
CSRTLYNQGGKLIF

SEQ ID NO: 179312 - protein, 15 aa, Homo sapiens
  CDR3 for beta chain variable domain of TCR clone 89656 (TRBV20-1, TRBJ2-7)
CSARDRASGMDEQYF

SEQ ID NO: 179313 - protein, 15 aa, Homo sapiens
  CDR3 for alpha chain variable domain of TCR clone 89657 (TRAV8-3, TRAJ45)
CASSYSGGGAAGLTF

SEQ ID NO: 179314 - protein, 13 aa, Homo sapiens
  CDR3 for beta chain variable domain of TCR clone 89657 (TRBV10-3, TRBJ2-7)
CASKLTVNYEQYF

SEQ ID NO: 179315 - protein, 16 aa, Homo sapiens
  CDR3 for alpha chain variable domain of TCR clone 89658 (TRAV26-1, TRAJ37)
CIVRGDGSGNTGKLSL

SEQ ID NO: 179316 - protein, 17 aa, Homo sapiens
  CDR3 for beta chain variable domain of TCR clone 89658 (TRBV4-1, TRBJ2-7)
CASSRDPLGVRGGEQYF

SEQ ID NO: 179317 - protein, 11 aa, Homo sapiens
  CDR3 for alpha chain variable domain of TCR clone 89659 (TRAV35, TRAJ22)
CAGPGVGQLTF

SEQ ID NO: 179318 - protein, 14 aa, Homo sapiens
  CDR3 for beta chain variable domain of TCR clone 89659 (TRBV25-1, TRBJ1-1)
CASTHLGGNTEAFF

SEQ ID NO: 179319 - protein, 14 aa, Homo sapiens
  CDR3 for alpha chain variable domain of TCR clone 89660 (TRAV8-3, TRAJ4)
CALGASGGYNKLIF

SEQ ID NO: 179320 - protein, 17 aa, Homo sapiens
  CDR3 for beta chain variable domain of TCR clone 89660 (TRBV11-2, TRBJ2-1)
CASSLYPPGVEYNEQFF

SEQ ID NO: 179321 - protein, 10 aa, Homo sapiens
  CDR3 for alpha chain variable domain of TCR clone 89661 (TRAV30, TRAJ24)
CGTEIVMLTA

SEQ ID NO: 179322 - protein, 13 aa, Homo sapiens
  CDR3 for beta chain variable domain of TCR clone 89661 (TRBV11-2, TRBJ2-5)
CASSSTGEETQYF

SEQ ID NO: 179323 - protein, 16 aa, Homo sapiens
  CDR3 for alpha chain variable domain of TCR clone 89662 (TRAV22, TRAJ45)
CDVERGKRGGADGLTF

SEQ ID NO: 179324 - protein, 13 aa, Homo sapiens
  CDR3 for beta chain variable domain of TCR clone 89662 (TRBV27, TRBJ1-1)
CASSLSIGAEAFF

SEQ ID NO: 179325 - protein, 13 aa, Homo sapiens
  CDR3 for alpha chain variable domain of TCR clone 89663 (TRAV12-2, TRAJ9)
CAVKWAGGLKTIF

SEQ ID NO: 179326 - protein, 15 aa, Homo sapiens
  CDR3 for beta chain variable domain of TCR clone 89663 (TRBV5-1, TRBJ1-4)
CASSLTADSDEKLFF

SEQ ID NO: 179327 - protein, 14 aa, Homo sapiens
  CDR3 for alpha chain variable domain of TCR clone 89664 (TRAV12-2, TRAJ17)
CAVLFKAASNKLTF

SEQ ID NO: 179328 - protein, 14 aa, Homo sapiens
  CDR3 for beta chain variable domain of TCR clone 89664 (TRBV4-1, TRBJ2-2)
CASSQAVNTGELFF

SEQ ID NO: 179329 - protein, 11 aa, Homo sapiens
  CDR3 for alpha chain variable domain of TCR clone 89665 (TRAV8-4, TRAJ20)
CAVTNVLTTTS

SEQ ID NO: 179330 - protein, 16 aa, Homo sapiens
  CDR3 for beta chain variable domain of TCR clone 89665 (TRBV7-9, TRBJ2-5)
CASSPSGQGVKGTQYF

SEQ ID NO: 179331 - protein, 14 aa, Homo sapiens
  CDR3 for alpha chain variable domain of TCR clone 89666 (TRAV1-2, TRAJ16)
CAVNRFSDGQKLLF

SEQ ID NO: 179332 - protein, 17 aa, Homo sapiens
  CDR3 for beta chain variable domain of TCR clone 89666 (TRBV7-9, TRBJ1-6)
CASSSPGRGNSPPTLGT

SEQ ID NO: 179333 - protein, 15 aa, Homo sapiens
  CDR3 for alpha chain variable domain of TCR clone 89667 (TRAV12-3, TRAJ6)
CAMSAASGGNYIPTF

SEQ ID NO: 179334 - protein, 13 aa, Homo sapiens
  CDR3 for beta chain variable domain of TCR clone 89667 (TRBV20-1, TRBJ1-2)
CSASTERIYGYTF

SEQ ID NO: 179335 - protein, 20 aa, Homo sapiens
  CDR3 for alpha chain variable domain of TCR clone 89668 (TRAV12-3, TRAJ41)
SLFIRDSQPSDSATPEARNF

SEQ ID NO: 179336 - protein, 15 aa, Homo sapiens
  CDR3 for beta chain variable domain of TCR clone 89668 (TRBV5-1, TRBJ2-7)
CASSLDLTSSYEQYF

SEQ ID NO: 179337 - protein, 15 aa, Homo sapiens
  CDR3 for alpha chain variable domain of TCR clone 89669 (TRAV8-6, TRAJ57)
CAVSLTQGGSEKLVF

SEQ ID NO: 179338 - protein, 17 aa, Homo sapiens
  CDR3 for beta chain variable domain of TCR clone 89669 (TRBV13, TRBJ2-3)
CASSLSRVAGGRNTQYF

SEQ ID NO: 179339 - protein, 14 aa, Homo sapiens
  CDR3 for alpha chain variable domain of TCR clone 89670 (TRAV17, TRAJ57)
CATDPQGGSEKLVF

SEQ ID NO: 179340 - protein, 12 aa, Homo sapiens
  CDR3 for beta chain variable domain of TCR clone 89670 (TRBV28, TRBJ1-6)
CASSLLRGGIAF

SEQ ID NO: 179341 - protein, 12 aa, Homo sapiens
  CDR3 for alpha chain variable domain of TCR clone 89671 (TRAV25, TRAJ5)
CAGGGGQESTYF

SEQ ID NO: 179342 - protein, 15 aa, Homo sapiens
  CDR3 for beta chain variable domain of TCR clone 89671 (TRBV19, TRBJ2-4)
CASRGPRRGENIQYF

SEQ ID NO: 179343 - protein, 14 aa, Homo sapiens
  CDR3 for alpha chain variable domain of TCR clone 89672 (TRAV12-2, TRAJ40)
CAVKIPSGTYKYIF

SEQ ID NO: 179344 - protein, 20 aa, Homo sapiens
  CDR3 for beta chain variable domain of TCR clone 89672 (TRBV28, TRBJ2-1)
CASTPIGRSLGLAGGNEQFF

SEQ ID NO: 179345 - protein, 13 aa, Homo sapiens
  CDR3 for alpha chain variable domain of TCR clone 89673 (TRAV1-2, TRAJ12)
CAVSMDSSYKLIF

SEQ ID NO: 179346 - protein, 14 aa, Homo sapiens
  CDR3 for beta chain variable domain of TCR clone 89673 (TRBV19, TRBJ2-1)
CASSSGRDYNKQFF

SEQ ID NO: 179347 - protein, 13 aa, Homo sapiens
  CDR3 for alpha chain variable domain of TCR clone 89674 (TRAV27, TRAJ57)
CRSAQGGSEKLVF

SEQ ID NO: 179348 - protein, 13 aa, Homo sapiens
  CDR3 for beta chain variable domain of TCR clone 89674 (TRBV7-9, TRBJ1-2)
CASSLKQNYGYTF

SEQ ID NO: 179349 - protein, 12 aa, Homo sapiens
  CDR3 for alpha chain variable domain of TCR clone 89675 (TRAV12-1, TRAJ40)
CVVYSGTYKYIF

SEQ ID NO: 179350 - protein, 14 aa, Homo sapiens
  CDR3 for beta chain variable domain of TCR clone 89675 (TRBV7-6, TRBJ2-1)
GASSLGGGADEQFF

SEQ ID NO: 179351 - protein, 14 aa, Homo sapiens
  CDR3 for alpha chain variable domain of TCR clone 89676 (TRAV17, TRAJ57)
CATGPQGGSEKLVF

SEQ ID NO: 179352 - protein, 20 aa, Homo sapiens
  CDR3 for beta chain variable domain of TCR clone 89676 (TRBV7-8, TRBJ2-2)
CASSHLFPGPTIHITGELFF

SEQ ID NO: 179353 - protein, 12 aa, Homo sapiens
  CDR3 for alpha chain variable domain of TCR clone 89677 (TRAV1-1, TRAJ39)
CAVPVVGNMLTF

SEQ ID NO: 179354 - protein, 14 aa, Homo sapiens
  CDR3 for beta chain variable domain of TCR clone 89677 (TRBV7-6, TRBJ1-6)
CASSQAGGGSPLHF

SEQ ID NO: 179355 - protein, 15 aa, Homo sapiens
  CDR3 for alpha chain variable domain of TCR clone 89678 (TRAV12-3, TRAJ6)
CAMSATTGGSYIPTF

SEQ ID NO: 179356 - protein, 16 aa, Homo sapiens
  CDR3 for beta chain variable domain of TCR clone 89678 (TRBV20-1, TRBJ1-2)
CSASMGQGVANYGYAL

SEQ ID NO: 179357 - protein, 10 aa, Homo sapiens
  CDR3 for alpha chain variable domain of TCR clone 89679 (TRAV26-1, TRAJ40)
CIAGTYKYII

SEQ ID NO: 179358 - protein, 15 aa, Homo sapiens
  CDR3 for beta chain variable domain of TCR clone 89679 (TRBV19, TRBJ2-1)
CASSSPGVPLDEQFF

SEQ ID NO: 179359 - protein, 16 aa, Homo sapiens
  CDR3 for alpha chain variable domain of TCR clone 89680 (TRAV8-6, TRAJ37)
CAVSGLGSSNTGKLIF

SEQ ID NO: 179360 - protein, 15 aa, Homo sapiens
  CDR3 for beta chain variable domain of TCR clone 89680 (TRBV20-1, TRBJ1-5)
CSARSGPSMNQPHHF

SEQ ID NO: 179361 - protein, 14 aa, Homo sapiens
  CDR3 for alpha chain variable domain of TCR clone 89681 (TRAV2, TRAJ9)
CAVEDLSGGFKTIF

SEQ ID NO: 179362 - protein, 15 aa, Homo sapiens
  CDR3 for beta chain variable domain of TCR clone 89681 (TRBV28, TRBJ2-7)
CASSPGGRGFYEQYF

SEQ ID NO: 179363 - protein, 16 aa, Homo sapiens
  CDR3 for alpha chain variable domain of TCR clone 89682 (TRAV3, TRAJ37)
CAVRPHGSGNTGKLIF

SEQ ID NO: 179364 - protein, 16 aa, Homo sapiens
  CDR3 for beta chain variable domain of TCR clone 89682 (TRBV9, TRBJ1-2)
CASSGEEKVSPYGYTF

SEQ ID NO: 179365 - protein, 13 aa, Homo sapiens
  CDR3 for alpha chain variable domain of TCR clone 89683 (TRAV2, TRAJ40)
CAVVTSGTYKYIS

SEQ ID NO: 179366 - protein, 16 aa, Homo sapiens
  CDR3 for beta chain variable domain of TCR clone 89683 (TRBV12-5, TRBJ2-5)
CASGPRTSGNQETQYF

SEQ ID NO: 179367 - protein, 10 aa, Homo sapiens
  CDR3 for alpha chain variable domain of TCR clone 89684 (TRAV12-2, TRAJ41)
CAVTGYALTF

SEQ ID NO: 179368 - protein, 15 aa, Homo sapiens
  CDR3 for beta chain variable domain of TCR clone 89684 (TRBV4-2, TRBJ2-1)
CASSQDVGLAGEQFF

SEQ ID NO: 179369 - protein, 13 aa, Homo sapiens
  CDR3 for alpha chain variable domain of TCR clone 89685 (TRAV4, TRAJ42)
CLVGGGSQGNLIF

SEQ ID NO: 179370 - protein, 16 aa, Homo sapiens
  CDR3 for beta chain variable domain of TCR clone 89685 (TRBV5-1, TRBJ2-3)
CAISLQGRVGADTQYF

SEQ ID NO: 179371 - protein, 14 aa, Homo sapiens
  CDR3 for alpha chain variable domain of TCR clone 89686 (TRAV3, TRAJ20)
CAVRPSVTTTSSAL

SEQ ID NO: 179372 - protein, 15 aa, Homo sapiens
  CDR3 for beta chain variable domain of TCR clone 89686 (TRBV19, TRBJ2-6)
CASVRRDSGANVLTF

SEQ ID NO: 179373 - protein, 12 aa, Homo sapiens
  CDR3 for alpha chain variable domain of TCR clone 89687 (TRAV12-3, TRAJ17)
CAMTHTGDKLTF

SEQ ID NO: 179374 - protein, 15 aa, Homo sapiens
  CDR3 for beta chain variable domain of TCR clone 89687 (TRBV20-1, TRBJ2-7)
CSARDRVSGMDEQYF

SEQ ID NO: 179375 - protein, 22 aa, Homo sapiens
  CDR3 for alpha chain variable domain of TCR clone 89688 (TRAV8-3, TRAJ38)
CAVGASNAGNNHIQNPDPAVSQ

SEQ ID NO: 179376 - protein, 15 aa, Homo sapiens
  CDR3 for beta chain variable domain of TCR clone 89688 (TRBV11-3, TRBJ1-3)
CASSLFGPSGNTIYF

SEQ ID NO: 179377 - protein, 13 aa, Homo sapiens
  CDR3 for alpha chain variable domain of TCR clone 89689 (TRAV13-1, TRAJ5)
CAAEHTGRRALTF

SEQ ID NO: 179378 - protein, 13 aa, Homo sapiens
  CDR3 for beta chain variable domain of TCR clone 89689 (TRBV10-3, TRBJ2-7)
CASKLAVNYEQYF

SEQ ID NO: 179379 - protein, 20 aa, Homo sapiens
  CDR3 for alpha chain variable domain of TCR clone 89690 (TRAV12-1, TRAJ42)
SSVIQPPTSVKGGSQGNLIF

SEQ ID NO: 179380 - protein, 18 aa, Homo sapiens
  CDR3 for beta chain variable domain of TCR clone 89690 (TRBV11-2, TRBJ2-3)
CASSLGGASRGDPNTQYF

SEQ ID NO: 179381 - protein, 11 aa, Homo sapiens
  CDR3 for alpha chain variable domain of TCR clone 89691 (TRAV12-2, TRAJ30)
CAVGRDDKIVF

SEQ ID NO: 179382 - protein, 14 aa, Homo sapiens
  CDR3 for beta chain variable domain of TCR clone 89691 (TRBV6-1, TRBJ1-3)
CASVQGGGGNTIYF

SEQ ID NO: 179383 - protein, 22 aa, Homo sapiens
  CDR3 for alpha chain variable domain of TCR clone 89692 (TRAV25, TRAJ13)
TATQTTDVGTFLDSGGYQKVTF

SEQ ID NO: 179384 - protein, 16 aa, Homo sapiens
  CDR3 for beta chain variable domain of TCR clone 89692 (TRBV13, TRBJ2-2)
CASSPRTGEHTGELFF

SEQ ID NO: 179385 - protein, 14 aa, Homo sapiens
  CDR3 for alpha chain variable domain of TCR clone 89693 (TRAV1-2, TRAJ16)
CAVNRFSDGQKLLF

SEQ ID NO: 179386 - protein, 13 aa, Homo sapiens
  CDR3 for beta chain variable domain of TCR clone 89693 (TRBV11-3, TRBJ1-1)
CASSLTRNTEAFF

SEQ ID NO: 179387 - protein, 14 aa, Homo sapiens
  CDR3 for alpha chain variable domain of TCR clone 89694 (TRAV2, TRAJ9)
CAVEDRSGGFQTIF

SEQ ID NO: 179388 - protein, 17 aa, Homo sapiens
  CDR3 for beta chain variable domain of TCR clone 89694 (TRBV11-2, TRBJ2-1)
CASSLYPPGVEYNEQFF

SEQ ID NO: 179389 - protein, 16 aa, Homo sapiens
  CDR3 for alpha chain variable domain of TCR clone 89695 (TRAV12-2, TRAJ18)
CAVTTDRGSTLGRLYF

SEQ ID NO: 179390 - protein, 15 aa, Homo sapiens
  CDR3 for beta chain variable domain of TCR clone 89695 (TRBV20-1, TRBJ2-7)
CSARDRVSGMDEQYF

SEQ ID NO: 179391 - protein, 12 aa, Homo sapiens
  CDR3 for alpha chain variable domain of TCR clone 89696 (TRAV12-2, TRAJ47)
CAVADYGNKLVF

SEQ ID NO: 179392 - protein, 14 aa, Homo sapiens
  CDR3 for beta chain variable domain of TCR clone 89696 (TRBV20-1, TRBJ1-1)
CSAMGGTANTEAFF

SEQ ID NO: 179393 - protein, 17 aa, Homo sapiens
  CDR3 for alpha chain variable domain of TCR clone 89697 (TRAV13-1, TRAJ52)
CAASSGAGGTSYGKLTF

SEQ ID NO: 179394 - protein, 12 aa, Homo sapiens
  CDR3 for beta chain variable domain of TCR clone 89697 (TRBV11-2, TRBJ2-1)
CASSPGNNEQFF

SEQ ID NO: 179395 - protein, 13 aa, Homo sapiens
  CDR3 for alpha chain variable domain of TCR clone 89698 (TRAV2, TRAJ40)
CAVVNSGTYKYIF

SEQ ID NO: 179396 - protein, 14 aa, Homo sapiens
  CDR3 for beta chain variable domain of TCR clone 89698 (TRBV19, TRBJ2-1)
CASPTFVVSGEQFF

SEQ ID NO: 179397 - protein, 14 aa, Homo sapiens
  CDR3 for alpha chain variable domain of TCR clone 89699 (TRAV14/DV4, TRAJ54)
CAMREAPGAQKLIF

SEQ ID NO: 179398 - protein, 15 aa, Homo sapiens
  CDR3 for beta chain variable domain of TCR clone 89699 (TRBV5-1, TRBJ2-7)
CASSLNGGPAREQYF

SEQ ID NO: 179399 - protein, 16 aa, Homo sapiens
  CDR3 for alpha chain variable domain of TCR clone 89700 (TRAV4, TRAJ22)
YLVGDLYSGSARQLTF

SEQ ID NO: 179400 - protein, 16 aa, Homo sapiens
  CDR3 for beta chain variable domain of TCR clone 89700 (TRBV7-9, TRBJ2-1)
CASSDVAGGSYNEQFF

SEQ ID NO: 179401 - protein, 15 aa, Homo sapiens
  CDR3 for alpha chain variable domain of TCR clone 89701 (TRAV4, TRAJ42)
CLGGGYGGSQGNLIF

SEQ ID NO: 179402 - protein, 16 aa, Homo sapiens
  CDR3 for beta chain variable domain of TCR clone 89701 (TRBV27, TRBJ1-1)
CASSTRTGGVGTEAFF

SEQ ID NO: 179403 - protein, 16 aa, Homo sapiens
  CDR3 for alpha chain variable domain of TCR clone 89702 (TRAV12-3, TRAJ45)
CAMGWGSGGGADGLPF

SEQ ID NO: 179404 - protein, 18 aa, Homo sapiens
  CDR3 for beta chain variable domain of TCR clone 89702 (TRBV12-4, TRBJ2-2)
CASSLVAGTRGRTGELFF

SEQ ID NO: 179405 - protein, 14 aa, Homo sapiens
  CDR3 for alpha chain variable domain of TCR clone 89703 (TRAV13-1, TRAJ44)
CAAKATGTASKLTF

SEQ ID NO: 179406 - protein, 12 aa, Homo sapiens
  CDR3 for beta chain variable domain of TCR clone 89703 (TRBV7-8, TRBJ2-7)
CASSLGDRKQYF

SEQ ID NO: 179407 - protein, 17 aa, Homo sapiens
  CDR3 for alpha chain variable domain of TCR clone 89704 (TRAV3, TRAJ42)
CAVRGRDDGGSQGNLIF

SEQ ID NO: 179408 - protein, 14 aa, Homo sapiens
  CDR3 for beta chain variable domain of TCR clone 89704 (TRBV5-4, TRBJ1-1)
CASSLDSRRDEAFF

SEQ ID NO: 179409 - protein, 14 aa, Homo sapiens
  CDR3 for alpha chain variable domain of TCR clone 89705 (TRAV12-1, TRAJ42)
CVVIYGGSQGNLIF

SEQ ID NO: 179410 - protein, 16 aa, Homo sapiens
  CDR3 for beta chain variable domain of TCR clone 89705 (TRBV20-1, TRBJ2-1)
CSARDHLAGGRGEQFF

SEQ ID NO: 179411 - protein, 14 aa, Homo sapiens
  CDR3 for alpha chain variable domain of TCR clone 89706 (TRAV1-2, TRAJ8)
CAVREDTGFQKLVF

SEQ ID NO: 179412 - protein, 17 aa, Homo sapiens
  CDR3 for beta chain variable domain of TCR clone 89706 (TRBV10-3, TRBJ2-4)
CTSVPSVNKGSKNIQYF

SEQ ID NO: 179413 - protein, 14 aa, Homo sapiens
  CDR3 for alpha chain variable domain of TCR clone 89707 (TRAV12-1, TRAJ17)
CVVNPKAAGNKLTF

SEQ ID NO: 179414 - protein, 12 aa, Homo sapiens
  CDR3 for beta chain variable domain of TCR clone 89707 (TRBV7-9, TRBJ2-7)
CASRTGFDEQYF

SEQ ID NO: 179415 - protein, 14 aa, Homo sapiens
  CDR3 for alpha chain variable domain of TCR clone 89708 (TRAV30, TRAJ33)
CGTVAPRSNYQLIW

SEQ ID NO: 179416 - protein, 15 aa, Homo sapiens
  CDR3 for beta chain variable domain of TCR clone 89708 (TRBV7-9, TRBJ2-2)
CASGPLDTFPGELFF

SEQ ID NO: 179417 - protein, 10 aa, Homo sapiens
  CDR3 for alpha chain variable domain of TCR clone 89709 (TRAV30, TRAJ16)
CGTGGQKLRF

SEQ ID NO: 179418 - protein, 14 aa, Homo sapiens
  CDR3 for beta chain variable domain of TCR clone 89709 (TRBV6-1, TRBJ1-2)
CASSTGWPPTGYTF

SEQ ID NO: 179419 - protein, 12 aa, Homo sapiens
  CDR3 for alpha chain variable domain of TCR clone 89710 (TRAV12-3, TRAJ17)
CAMTLTGNKLTF

SEQ ID NO: 179420 - protein, 14 aa, Homo sapiens
  CDR3 for beta chain variable domain of TCR clone 89710 (TRBV28, TRBJ1-1)
CASSESGRGTEAFF

SEQ ID NO: 179421 - protein, 15 aa, Homo sapiens
  CDR3 for alpha chain variable domain of TCR clone 89711 (TRAV26-1, TRAJ29)
CIVRVEGSGNTRLVF

SEQ ID NO: 179422 - protein, 15 aa, Homo sapiens
  CDR3 for beta chain variable domain of TCR clone 89711 (TRBV7-9, TRBJ1-5)
CASSQGHQPNQPQHF

SEQ ID NO: 179423 - protein, 13 aa, Homo sapiens
  CDR3 for alpha chain variable domain of TCR clone 89712 (TRAV2, TRAJ40)
CAVVTSGTYKYIF

SEQ ID NO: 179424 - protein, 18 aa, Homo sapiens
  CDR3 for beta chain variable domain of TCR clone 89712 (TRBV25-1, TRBJ1-2)
CASSGLQNGQGLIFGYTF

SEQ ID NO: 179425 - protein, 10 aa, Homo sapiens
  CDR3 for alpha chain variable domain of TCR clone 89713 (TRAV30, TRAJ48)
CGIGNEKLTF

SEQ ID NO: 179426 - protein, 15 aa, Homo sapiens
  CDR3 for beta chain variable domain of TCR clone 89713 (TRBV7-3, TRBJ2-3)
CASSAGTYYEDTQYF

SEQ ID NO: 179427 - protein, 14 aa, Homo sapiens
  CDR3 for alpha chain variable domain of TCR clone 89714 (TRAV1-2, TRAJ16)
CAVNRFSDGQKLLF

SEQ ID NO: 179428 - protein, 14 aa, Homo sapiens
  CDR3 for beta chain variable domain of TCR clone 89714 (TRBV24-1, TRBJ1-1)
CATSIPRGDTEAFF

SEQ ID NO: 179429 - protein, 10 aa, Homo sapiens
  CDR3 for alpha chain variable domain of TCR clone 89715 (TRAV23/DV6, TRAJ57)
CAASSTLSQG

SEQ ID NO: 179430 - protein, 14 aa, Homo sapiens
  CDR3 for beta chain variable domain of TCR clone 89715 (TRBV25-1, TRBJ1-1)
CASTDLGGNTEAFF

SEQ ID NO: 179431 - protein, 12 aa, Homo sapiens
  CDR3 for alpha chain variable domain of TCR clone 89716 (TRAV36/DV7, TRAJ50)
CAVEPENLLRQG

SEQ ID NO: 179432 - protein, 13 aa, Homo sapiens
  CDR3 for beta chain variable domain of TCR clone 89716 (TRBV7-2, TRBJ2-7)
CASGSPSGSEQYF

SEQ ID NO: 179433 - protein, 13 aa, Homo sapiens
  CDR3 for alpha chain variable domain of TCR clone 89717 (TRAV27, TRAJ54)
CAGAGQGAQKLVF

SEQ ID NO: 179434 - protein, 13 aa, Homo sapiens
  CDR3 for beta chain variable domain of TCR clone 89717 (TRBV7-9, TRBJ1-2)
CASSLKQNYGYTF

SEQ ID NO: 179435 - protein, 12 aa, Homo sapiens
  CDR3 for alpha chain variable domain of TCR clone 89718 (TRAV8-2, TRAJ30)
CVVSDRDDKIIL

SEQ ID NO: 179436 - protein, 16 aa, Homo sapiens
  CDR3 for beta chain variable domain of TCR clone 89718 (TRBV5-4, TRBJ2-5)
CAESPGLAGTQETQYF

SEQ ID NO: 179437 - protein, 18 aa, Homo sapiens
  CDR3 for alpha chain variable domain of TCR clone 89719 (TRAV20, TRAJ4)
CAVQPYYMFSGVYNKLIF

SEQ ID NO: 179438 - protein, 13 aa, Homo sapiens
  CDR3 for beta chain variable domain of TCR clone 89719 (TRBV19, TRBJ2-3)
CATWDKITDTQYF

SEQ ID NO: 179439 - protein, 13 aa, Homo sapiens
  CDR3 for alpha chain variable domain of TCR clone 89720 (TRAV20, TRAJ7)
CAVLHGGNNRLAF

SEQ ID NO: 179440 - protein, 16 aa, Homo sapiens
  CDR3 for beta chain variable domain of TCR clone 89720 (TRBV6-1, TRBJ2-5)
CASSLRTGGVGETQYF

SEQ ID NO: 179441 - protein, 14 aa, Homo sapiens
  CDR3 for alpha chain variable domain of TCR clone 89721 (TRAV1-2, TRAJ8)
CAVREDTGFQKLVF

SEQ ID NO: 179442 - protein, 16 aa, Homo sapiens
  CDR3 for beta chain variable domain of TCR clone 89721 (TRBV20-1, TRBJ1-2)
CSASTFGGAENYGYTF

SEQ ID NO: 179443 - protein, 16 aa, Homo sapiens
  CDR3 for alpha chain variable domain of TCR clone 89722 (TRAV12-3, TRAJ53)
CAMSPGSGGSNYTLTF

SEQ ID NO: 179444 - protein, 16 aa, Homo sapiens
  CDR3 for beta chain variable domain of TCR clone 89722 (TRBV4-2, TRBJ1-1)
CASSQAGFGMNTEAFF

SEQ ID NO: 179445 - protein, 19 aa, Homo sapiens
  CDR3 for alpha chain variable domain of TCR clone 89723 (TRAV2, TRAJ20)
ILQVREADAAVYRDCKLSF

SEQ ID NO: 179446 - protein, 15 aa, Homo sapiens
  CDR3 for beta chain variable domain of TCR clone 89723 (TRBV15, TRBJ1-6)
CATSGGLNSPLHLGT

SEQ ID NO: 179447 - protein, 13 aa, Homo sapiens
  CDR3 for alpha chain variable domain of TCR clone 89724 (TRAV20, TRAJ29)
CAVQAVGNTPLVF

SEQ ID NO: 179448 - protein, 14 aa, Homo sapiens
  CDR3 for beta chain variable domain of TCR clone 89724 (TRBV19, TRBJ2-1)
CASPTFVLSGEQFF

SEQ ID NO: 179449 - protein, 14 aa, Homo sapiens
  CDR3 for alpha chain variable domain of TCR clone 89725 (TRAV14/DV4, TRAJ49)
CAFNRYLTGNQFYF

SEQ ID NO: 179450 - protein, 13 aa, Homo sapiens
  CDR3 for beta chain variable domain of TCR clone 89725 (TRBV2, TRBJ1-5)
CASGTGGYQPQHF

SEQ ID NO: 179451 - protein, 10 aa, Homo sapiens
  CDR3 for alpha chain variable domain of TCR clone 89726 (TRAV2, TRAJ38)
CAVEDFPNAG

SEQ ID NO: 179452 - protein, 14 aa, Homo sapiens
  CDR3 for beta chain variable domain of TCR clone 89726 (TRBV29-1, TRBJ1-4)
CSVSGRQGGEKLFF

SEQ ID NO: 179453 - protein, 14 aa, Homo sapiens
  CDR3 for alpha chain variable domain of TCR clone 89727 (TRAV1-2, TRAJ16)
CAVNLFSDGQKLLF

SEQ ID NO: 179454 - protein, 14 aa, Homo sapiens
  CDR3 for beta chain variable domain of TCR clone 89727 (TRBV19, TRBJ2-7)
CASSVDSESYEQYF

SEQ ID NO: 179455 - protein, 14 aa, Homo sapiens
  CDR3 for alpha chain variable domain of TCR clone 89728 (TRAV1-2, TRAJ15)
CAVRDRQAGTALIF

SEQ ID NO: 179456 - protein, 15 aa, Homo sapiens
  CDR3 for beta chain variable domain of TCR clone 89728 (TRBV4-1, TRBJ1-4)
CASSDTGGTNEKLFF

SEQ ID NO: 179457 - protein, 14 aa, Homo sapiens
  CDR3 for alpha chain variable domain of TCR clone 89729 (TRAV35, TRAJ38)
CAGSNAGNNRKLIW

SEQ ID NO: 179458 - protein, 12 aa, Homo sapiens
  CDR3 for beta chain variable domain of TCR clone 89729 (TRBV19, TRBJ2-7)
CASTDGGYEQYF

SEQ ID NO: 179459 - protein, 11 aa, Homo sapiens
  CDR3 for alpha chain variable domain of TCR clone 89730 (TRAV17, TRAJ9)
CATTGGFKTIF

SEQ ID NO: 179460 - protein, 15 aa, Homo sapiens
  CDR3 for beta chain variable domain of TCR clone 89730 (TRBV7-2, TRBJ2-2)
CASRRPGQNTGELFF

SEQ ID NO: 179461 - protein, 14 aa, Homo sapiens
  CDR3 for alpha chain variable domain of TCR clone 89731 (TRAV8-4, TRAJ48)
CAMSETFGNEKLTF

SEQ ID NO: 179462 - protein, 14 aa, Homo sapiens
  CDR3 for beta chain variable domain of TCR clone 89731 (TRBV13, TRBJ2-7)
CASSLKGASYEQYF

SEQ ID NO: 179463 - protein, 17 aa, Homo sapiens
  CDR3 for alpha chain variable domain of TCR clone 89732 (TRAV23/DV6, TRAJ26)
CAARTYQADNYGQNFVF

SEQ ID NO: 179464 - protein, 16 aa, Homo sapiens
  CDR3 for beta chain variable domain of TCR clone 89732 (TRBV6-5, TRBJ2-2)
CASSHVSRAQPGELFF

SEQ ID NO: 179465 - protein, 14 aa, Homo sapiens
  CDR3 for alpha chain variable domain of TCR clone 89733 (TRAV34, TRAJ44)
CGADGTGTASKLTF

SEQ ID NO: 179466 - protein, 12 aa, Homo sapiens
  CDR3 for beta chain variable domain of TCR clone 89733 (TRBV11-2, TRBJ2-2)
CASSRGGGELFF

SEQ ID NO: 179467 - protein, 18 aa, Homo sapiens
  CDR3 for alpha chain variable domain of TCR clone 89734 (TRAV13-1, TRAJ52)
CAAKDPNAGGTSYGKLTF

SEQ ID NO: 179468 - protein, 13 aa, Homo sapiens
  CDR3 for beta chain variable domain of TCR clone 89734 (TRBV20-1, TRBJ1-1)
CSARGGGNTEAFF

SEQ ID NO: 179469 - protein, 23 aa, Homo sapiens
  CDR3 for alpha chain variable domain of TCR clone 89735 (TRAV17, TRAJ9)
CGFTEASKLSLEQEQDYLLKQIS

SEQ ID NO: 179470 - protein, 14 aa, Homo sapiens
  CDR3 for beta chain variable domain of TCR clone 89735 (TRBV7-9, TRBJ2-2)
CASSLVQDTGELFF

SEQ ID NO: 179471 - protein, 16 aa, Homo sapiens
  CDR3 for alpha chain variable domain of TCR clone 89736 (TRAV20, TRAJ10)
CAVLRGLTGGGNKLTF

SEQ ID NO: 179472 - protein, 20 aa, Homo sapiens
  CDR3 for beta chain variable domain of TCR clone 89736 (TRBV7-8, TRBJ2-2)
CASSHLFPGPTIHITGELFF

SEQ ID NO: 179473 - protein, 14 aa, Homo sapiens
  CDR3 for alpha chain variable domain of TCR clone 89737 (TRAV12-2, TRAJ13)
CAVKKTGGYQKVTF

SEQ ID NO: 179474 - protein, 15 aa, Homo sapiens
  CDR3 for beta chain variable domain of TCR clone 89737 (TRBV28, TRBJ2-5)
CASSPPWSYQDTQYF

SEQ ID NO: 179475 - protein, 13 aa, Homo sapiens
  CDR3 for alpha chain variable domain of TCR clone 89738 (TRAV8-3, TRAJ44)
CALVPGTASKLTF

SEQ ID NO: 179476 - protein, 14 aa, Homo sapiens
  CDR3 for beta chain variable domain of TCR clone 89738 (TRBV11-2, TRBJ2-3)
CASSRLARTDTQHF

SEQ ID NO: 179477 - protein, 16 aa, Homo sapiens
  CDR3 for alpha chain variable domain of TCR clone 89739 (TRAV30, TRAJ24)
CGTEIVDADSWGKFQF

SEQ ID NO: 179478 - protein, 15 aa, Homo sapiens
  CDR3 for beta chain variable domain of TCR clone 89739 (TRBV28, TRBJ2-1)
CASSRSSGGVDEQFF

SEQ ID NO: 179479 - protein, 14 aa, Homo sapiens
  CDR3 for alpha chain variable domain of TCR clone 89740 (TRAV3, TRAJ17)
CAVRDAAAGNKLTF

SEQ ID NO: 179480 - protein, 14 aa, Homo sapiens
  CDR3 for beta chain variable domain of TCR clone 89740 (TRBV27, TRBJ2-5)
CASSSLKGWETQYF

SEQ ID NO: 179481 - protein, 12 aa, Homo sapiens
  CDR3 for alpha chain variable domain of TCR clone 89741 (TRAV12-2, TRAJ10)
WGVTGGGNKLPF

SEQ ID NO: 179482 - protein, 16 aa, Homo sapiens
  CDR3 for beta chain variable domain of TCR clone 89741 (TRBV6-4, TRBJ1-2)
CASSEAVGDPNYGYTF

SEQ ID NO: 179483 - protein, 12 aa, Homo sapiens
  CDR3 for alpha chain variable domain of TCR clone 89742 (TRAV17, TRAJ30)
CVPERRDDKLIF

SEQ ID NO: 179484 - protein, 11 aa, Homo sapiens
  CDR3 for beta chain variable domain of TCR clone 89742 (TRBV20-1, TRBJ1-2)
CSVQGAGGYTF

SEQ ID NO: 179485 - protein, 17 aa, Homo sapiens
  CDR3 for alpha chain variable domain of TCR clone 89743 (TRAV13-1, TRAJ52)
CAASSGAGGTSYGKLTL

SEQ ID NO: 179486 - protein, 15 aa, Homo sapiens
  CDR3 for beta chain variable domain of TCR clone 89743 (TRBV13, TRBJ1-5)
CASSFGQGGVQPQHF

SEQ ID NO: 179487 - protein, 13 aa, Homo sapiens
  CDR3 for alpha chain variable domain of TCR clone 89744 (TRAV27, TRAJ3)
ASLRGSSASKIIF

SEQ ID NO: 179488 - protein, 15 aa, Homo sapiens
  CDR3 for beta chain variable domain of TCR clone 89744 (TRBV28, TRBJ1-3)
CASSIGWASGNTIYF

SEQ ID NO: 179489 - protein, 15 aa, Homo sapiens
  CDR3 for alpha chain variable domain of TCR clone 89745 (TRAV25, TRAJ53)
CAGPRSGGSNYKLTF

SEQ ID NO: 179490 - protein, 15 aa, Homo sapiens
  CDR3 for beta chain variable domain of TCR clone 89745 (TRBV28, TRBJ2-7)
CASSPGGRGFYEQYF

SEQ ID NO: 179491 - protein, 13 aa, Homo sapiens
  CDR3 for alpha chain variable domain of TCR clone 89746 (TRAV20, TRAJ37)
CAGCSSNTGKLIF

SEQ ID NO: 179492 - protein, 13 aa, Homo sapiens
  CDR3 for beta chain variable domain of TCR clone 89746 (TRBV19, TRBJ2-7)
CASRKAGGSEQYF

SEQ ID NO: 179493 - protein, 12 aa, Homo sapiens
  CDR3 for alpha chain variable domain of TCR clone 89747 (TRAV13-2, TRAJ39)
CAENNAGNMLTF

SEQ ID NO: 179494 - protein, 12 aa, Homo sapiens
  CDR3 for beta chain variable domain of TCR clone 89747 (TRBV11-2, TRBJ2-2)
CASSIGGGELFF

SEQ ID NO: 179495 - protein, 12 aa, Homo sapiens
  CDR3 for alpha chain variable domain of TCR clone 89748 (TRAV27, TRAJ13)
CAGVRGYQKVTF

SEQ ID NO: 179496 - protein, 16 aa, Homo sapiens
  CDR3 for beta chain variable domain of TCR clone 89748 (TRBV28, TRBJ2-1)
CASSSSYSGSPNEQFF

SEQ ID NO: 179497 - protein, 14 aa, Homo sapiens
  CDR3 for alpha chain variable domain of TCR clone 89749 (TRAV1-2, TRAJ29)
CAVRELTSATPLVF

SEQ ID NO: 179498 - protein, 14 aa, Homo sapiens
  CDR3 for beta chain variable domain of TCR clone 89749 (TRBV3-1, TRBJ2-5)
CASSQGPDQETQSF

SEQ ID NO: 179499 - protein, 16 aa, Homo sapiens
  CDR3 for alpha chain variable domain of TCR clone 89750 (TRAV30, TRAJ24)
CGTEIVDADSWGKFQF

SEQ ID NO: 179500 - protein, 15 aa, Homo sapiens
  CDR3 for beta chain variable domain of TCR clone 89750 (TRBV20-1, TRBJ2-6)
CSARDRGPGTNVLTF

SEQ ID NO: 179501 - protein, 17 aa, Homo sapiens
  CDR3 for alpha chain variable domain of TCR clone 89751 (TRAV3, TRAJ12)
CAVRDGGRMDSSYKWIF

SEQ ID NO: 179502 - protein, 16 aa, Homo sapiens
  CDR3 for beta chain variable domain of TCR clone 89751 (TRBV9, TRBJ2-2)
CASSAMGKGNTGELFF

SEQ ID NO: 179503 - protein, 11 aa, Homo sapiens
  CDR3 for alpha chain variable domain of TCR clone 89752 (TRAV16, TRAJ49)
CALRSGNQFYF

SEQ ID NO: 179504 - protein, 16 aa, Homo sapiens
  CDR3 for beta chain variable domain of TCR clone 89752 (TRBV20-1, TRBJ1-5)
CSARDVGGGWIQPQHF

SEQ ID NO: 179505 - protein, 15 aa, Homo sapiens
  CDR3 for alpha chain variable domain of TCR clone 89753 (TRAV21, TRAJ53)
CATLNSGGSNYKLTF

SEQ ID NO: 179506 - protein, 13 aa, Homo sapiens
  CDR3 for beta chain variable domain of TCR clone 89753 (TRBV6-3, TRBJ1-2)
CASSLTGDYGYTF

SEQ ID NO: 179507 - protein, 13 aa, Homo sapiens
  CDR3 for alpha chain variable domain of TCR clone 89754 (TRAV23/DV6, TRAJ22)
CAPYSGSARQLTF

SEQ ID NO: 179508 - protein, 12 aa, Homo sapiens
  CDR3 for beta chain variable domain of TCR clone 89754 (TRBV11-2, TRBJ2-1)
CASSPGNNEQFF

SEQ ID NO: 179509 - protein, 17 aa, Homo sapiens
  CDR3 for alpha chain variable domain of TCR clone 89755 (TRAV8-1, TRAJ43)
CAVTNDMRFGSGTRLTV

SEQ ID NO: 179510 - protein, 17 aa, Homo sapiens
  CDR3 for beta chain variable domain of TCR clone 89755 (TRBV5-4, TRBJ2-1)
CASSSAGGRGPYNEQFF

SEQ ID NO: 179511 - protein, 12 aa, Homo sapiens
  CDR3 for alpha chain variable domain of TCR clone 89756 (TRAV20, TRAJ39)
CAVGNAGNMLTF

SEQ ID NO: 179512 - protein, 13 aa, Homo sapiens
  CDR3 for beta chain variable domain of TCR clone 89756 (TRBV11-2, TRBJ1-3)
CASSLEPVNTIYF

SEQ ID NO: 179513 - protein, 13 aa, Homo sapiens
  CDR3 for alpha chain variable domain of TCR clone 89757 (TRAV1-2, TRAJ9)
CAALNTGGFKTIF

SEQ ID NO: 179514 - protein, 19 aa, Homo sapiens
  CDR3 for beta chain variable domain of TCR clone 89757 (TRBV6-3, TRBJ1-2)
CASSYSKGRTGPPNYGYTF

SEQ ID NO: 179515 - protein, 15 aa, Homo sapiens
  CDR3 for alpha chain variable domain of TCR clone 89758 (TRAV12-3, TRAJ6)
CAMSATTGGTYIPTF

SEQ ID NO: 179516 - protein, 16 aa, Homo sapiens
  CDR3 for beta chain variable domain of TCR clone 89758 (TRBV20-1, TRBJ1-2)
CSASMGQGVANYGYTF

SEQ ID NO: 179517 - protein, 15 aa, Homo sapiens
  CDR3 for alpha chain variable domain of TCR clone 89759 (TRAV8-3, TRAJ45)
CASSYSGGGADGLTF

SEQ ID NO: 179518 - protein, 14 aa, Homo sapiens
  CDR3 for beta chain variable domain of TCR clone 89759 (TRBV5-1, TRBJ2-7)
CASSRGESLYEQYF

SEQ ID NO: 179519 - protein, 12 aa, Homo sapiens
  CDR3 for alpha chain variable domain of TCR clone 89760 (TRAV2, TRAJ10)
CASTGGGNKLTF

SEQ ID NO: 179520 - protein, 11 aa, Homo sapiens
  CDR3 for beta chain variable domain of TCR clone 89760 (TRBV19, TRBJ1-1)
CASSIGSEAFF

SEQ ID NO: 179521 - protein, 15 aa, Homo sapiens
  CDR3 for alpha chain variable domain of TCR clone 89761 (TRAV8-1, TRAJ6)
CAVNANPGGSYIPTF

SEQ ID NO: 179522 - protein, 17 aa, Homo sapiens
  CDR3 for beta chain variable domain of TCR clone 89761 (TRBV7-8, TRBJ2-6)
CASSAGTGGAGANVLTF

SEQ ID NO: 179523 - protein, 15 aa, Homo sapiens
  CDR3 for alpha chain variable domain of TCR clone 89762 (TRAV1-1, TRAJ24)
CALSGGTDSWGKFQF

SEQ ID NO: 179524 - protein, 16 aa, Homo sapiens
  CDR3 for beta chain variable domain of TCR clone 89762 (TRBV2, TRBJ2-7)
CASSEPWIGPSYEQYF

SEQ ID NO: 179525 - protein, 12 aa, Homo sapiens
  CDR3 for alpha chain variable domain of TCR clone 89763 (TRAV30, TRAJ20)
CGTESNDYKLSF

SEQ ID NO: 179526 - protein, 15 aa, Homo sapiens
  CDR3 for beta chain variable domain of TCR clone 89763 (TRBV20-1, TRBJ2-7)
CSARDRVPGMDEQYF

SEQ ID NO: 179527 - protein, 13 aa, Homo sapiens
  CDR3 for alpha chain variable domain of TCR clone 89764 (TRAV20, TRAJ21)
CAVEGYNFNQFYF

SEQ ID NO: 179528 - protein, 14 aa, Homo sapiens
  CDR3 for beta chain variable domain of TCR clone 89764 (TRBV3-1, TRBJ2-5)
CASSQGPDQETQYF

SEQ ID NO: 179529 - protein, 15 aa, Homo sapiens
  CDR3 for alpha chain variable domain of TCR clone 89765 (TRAV2, TRAJ9)
CAVAALNTRGFKTIF

SEQ ID NO: 179530 - protein, 14 aa, Homo sapiens
  CDR3 for beta chain variable domain of TCR clone 89765 (TRBV7-8, TRBJ2-5)
CASSATGGQETQYF

SEQ ID NO: 179531 - protein, 16 aa, Homo sapiens
  CDR3 for alpha chain variable domain of TCR clone 89766 (TRAV27, TRAJ13)
CAGAKSDSGGYQKVTF

SEQ ID NO: 179532 - protein, 15 aa, Homo sapiens
  CDR3 for beta chain variable domain of TCR clone 89766 (TRBV29-1, TRBJ2-1)
CSVGRHALFYNEQVF

SEQ ID NO: 179533 - protein, 17 aa, Homo sapiens
  CDR3 for alpha chain variable domain of TCR clone 89767 (TRAV3, TRAJ13)
CAVRDMRRTGGYQKVTF

SEQ ID NO: 179534 - protein, 15 aa, Homo sapiens
  CDR3 for beta chain variable domain of TCR clone 89767 (TRBV11-2, TRBJ2-2)
CASSSDRVNAGELFF

SEQ ID NO: 179535 - protein, 13 aa, Homo sapiens
  CDR3 for alpha chain variable domain of TCR clone 89768 (TRAV8-3, TRAJ21)
CAVGIYNFNKFYF

SEQ ID NO: 179536 - protein, 13 aa, Homo sapiens
  CDR3 for beta chain variable domain of TCR clone 89768 (TRBV7-9, TRBJ1-2)
CASSLKQNYGYTF

SEQ ID NO: 179537 - protein, 17 aa, Homo sapiens
  CDR3 for alpha chain variable domain of TCR clone 89769 (TRAV14/DV4, TRAJ56)
CAMREGSSFGANSKLTF

SEQ ID NO: 179538 - protein, 12 aa, Homo sapiens
  CDR3 for beta chain variable domain of TCR clone 89769 (TRBV11-2, TRBJ2-1)
CASSPGNNEQFF

SEQ ID NO: 179539 - protein, 14 aa, Homo sapiens
  CDR3 for alpha chain variable domain of TCR clone 89770 (TRAV9-2, TRAJ39)
CALYIYNAGNMLTF

SEQ ID NO: 179540 - protein, 13 aa, Homo sapiens
  CDR3 for beta chain variable domain of TCR clone 89770 (TRBV7-9, TRBJ2-5)
CASLSPGQETQYF

SEQ ID NO: 179541 - protein, 14 aa, Homo sapiens
  CDR3 for alpha chain variable domain of TCR clone 89771 (TRAV2, TRAJ29)
CAVTPPSGNTPLVF

SEQ ID NO: 179542 - protein, 13 aa, Homo sapiens
  CDR3 for beta chain variable domain of TCR clone 89771 (TRBV11-2, TRBJ2-1)
CASSLGLAGGPFF

SEQ ID NO: 179543 - protein, 14 aa, Homo sapiens
  CDR3 for alpha chain variable domain of TCR clone 89772 (TRAV17, TRAJ54)
CATDANQGAQKLVF

SEQ ID NO: 179544 - protein, 15 aa, Homo sapiens
  CDR3 for beta chain variable domain of TCR clone 89772 (TRBV4-1, TRBJ2-5)
CASSQWDLYQETQYF

SEQ ID NO: 179545 - protein, 14 aa, Homo sapiens
  CDR3 for alpha chain variable domain of TCR clone 89773 (TRAV38-1, TRAJ40)
CALRPTSGTYKYIF

SEQ ID NO: 179546 - protein, 14 aa, Homo sapiens
  CDR3 for beta chain variable domain of TCR clone 89773 (TRBV28, TRBJ2-3)
CASSLTDLLDTQYF

SEQ ID NO: 179547 - protein, 20 aa, Homo sapiens
  CDR3 for alpha chain variable domain of TCR clone 89774 (TRAV26-1, TRAJ42)
CCVLLHRQTYYGGSQGNLIF

SEQ ID NO: 179548 - protein, 13 aa, Homo sapiens
  CDR3 for beta chain variable domain of TCR clone 89774 (TRBV7-3, TRBJ1-1)
CASSQDWGAEAFF

SEQ ID NO: 179549 - protein, 14 aa, Homo sapiens
  CDR3 for alpha chain variable domain of TCR clone 89775 (TRAV2, TRAJ37)
CAVDFTSNTGKLIF

SEQ ID NO: 179550 - protein, 14 aa, Homo sapiens
  CDR3 for beta chain variable domain of TCR clone 89775 (TRBV19, TRBJ1-4)
CASAIEAEGEKLFF

SEQ ID NO: 179551 - protein, 12 aa, Homo sapiens
  CDR3 for alpha chain variable domain of TCR clone 89776 (TRAV21, TRAJ33)
CAKMDSNYQLIW

SEQ ID NO: 179552 - protein, 14 aa, Homo sapiens
  CDR3 for beta chain variable domain of TCR clone 89776 (TRBV2, TRBJ2-7)
CASTLTSGGYEQYF

SEQ ID NO: 179553 - protein, 21 aa, Homo sapiens
  CDR3 for alpha chain variable domain of TCR clone 89777 (TRAV1-1, TRAJ6)
CLLLLRCERLERTGGSYIPTF

SEQ ID NO: 179554 - protein, 12 aa, Homo sapiens
  CDR3 for beta chain variable domain of TCR clone 89777 (TRBV5-1, TRBJ2-7)
CASSLDSYEQYF

SEQ ID NO: 179555 - protein, 13 aa, Homo sapiens
  CDR3 for alpha chain variable domain of TCR clone 89778 (TRAV23/DV6, TRAJ16)
CAASMSDGQKLLF

SEQ ID NO: 179556 - protein, 15 aa, Homo sapiens
  CDR3 for beta chain variable domain of TCR clone 89778 (TRBV2, TRBJ2-2)
CASSRETVGTGELFF

SEQ ID NO: 179557 - protein, 15 aa, Homo sapiens
  CDR3 for alpha chain variable domain of TCR clone 89779 (TRAV3, TRAJ47)
CAVRAIGEYGNKLVF

SEQ ID NO: 179558 - protein, 14 aa, Homo sapiens
  CDR3 for beta chain variable domain of TCR clone 89779 (TRBV13, TRBJ2-5)
CASSLERVGETQYF

SEQ ID NO: 179559 - protein, 15 aa, Homo sapiens
  CDR3 for alpha chain variable domain of TCR clone 89780 (TRAV12-2, TRAJ57)
CAVSRGQGGSEKLVL

SEQ ID NO: 179560 - protein, 14 aa, Homo sapiens
  CDR3 for beta chain variable domain of TCR clone 89780 (TRBV20-1, TRBJ2-1)
CSAHPGLPYNEQFF

SEQ ID NO: 179561 - protein, 14 aa, Homo sapiens
  CDR3 for alpha chain variable domain of TCR clone 89781 (TRAV8-3, TRAJ4)
CAVGAAGGYNKLIF

SEQ ID NO: 179562 - protein, 15 aa, Homo sapiens
  CDR3 for beta chain variable domain of TCR clone 89781 (TRBV18, TRBJ2-5)
CASSPDPGLQETQYF

SEQ ID NO: 179563 - protein, 18 aa, Homo sapiens
  CDR3 for alpha chain variable domain of TCR clone 89782 (TRAV13-1, TRAJ52)
CAAKNPNAGGTSYGKLTF

SEQ ID NO: 179564 - protein, 13 aa, Homo sapiens
  CDR3 for beta chain variable domain of TCR clone 89782 (TRBV15, TRBJ1-6)
CATSGGLNSPLHF

SEQ ID NO: 179565 - protein, 11 aa, Homo sapiens
  CDR3 for alpha chain variable domain of TCR clone 89783 (TRAV3, TRAJ21)
CAVGNFNKFYF

SEQ ID NO: 179566 - protein, 15 aa, Homo sapiens
  CDR3 for beta chain variable domain of TCR clone 89783 (TRBV4-1, TRBJ2-7)
CASSQQGQGFDEQYF

SEQ ID NO: 179567 - protein, 11 aa, Homo sapiens
  CDR3 for alpha chain variable domain of TCR clone 89784 (TRAV30, TRAJ58)
CGILSGSRLTF

SEQ ID NO: 179568 - protein, 14 aa, Homo sapiens
  CDR3 for beta chain variable domain of TCR clone 89784 (TRBV7-2, TRBJ2-7)
CASSPKTSFYEQYF

SEQ ID NO: 179569 - protein, 15 aa, Homo sapiens
  CDR3 for alpha chain variable domain of TCR clone 89785 (TRAV29/DV5, TRAJ53)
CAASASGGSNYKLTF

SEQ ID NO: 179570 - protein, 17 aa, Homo sapiens
  CDR3 for beta chain variable domain of TCR clone 89785 (TRBV7-8, TRBJ2-6)
RASSAGTGGAGANVLTF

SEQ ID NO: 179571 - protein, 18 aa, Homo sapiens
  CDR3 for alpha chain variable domain of TCR clone 89786 (TRAV13-1, TRAJ52)
CAAKNPNAGGTSYGKLTF

SEQ ID NO: 179572 - protein, 18 aa, Homo sapiens
  CDR3 for beta chain variable domain of TCR clone 89786 (TRBV12-4, TRBJ2-4)
CASSRTGAVEVAKNIQYF

SEQ ID NO: 179573 - protein, 11 aa, Homo sapiens
  CDR3 for alpha chain variable domain of TCR clone 89787 (TRAV35, TRAJ31)
CAESGDARLMF

SEQ ID NO: 179574 - protein, 15 aa, Homo sapiens
  CDR3 for beta chain variable domain of TCR clone 89787 (TRBV7-9, TRBJ1-5)
CASSQGHQPNQPQHF

SEQ ID NO: 179575 - protein, 11 aa, Homo sapiens
  CDR3 for alpha chain variable domain of TCR clone 89788 (TRAV1-2, TRAJ31)
CAVNNNARLMF

SEQ ID NO: 179576 - protein, 15 aa, Homo sapiens
  CDR3 for beta chain variable domain of TCR clone 89788 (TRBV28, TRBJ2-1)
SASSIIAGGRSEQFF

SEQ ID NO: 179577 - protein, 15 aa, Homo sapiens
  CDR3 for alpha chain variable domain of TCR clone 89789 (TRAV3, TRAJ5)
CAVRDLDTGRRALTF

SEQ ID NO: 179578 - protein, 12 aa, Homo sapiens
  CDR3 for beta chain variable domain of TCR clone 89789 (TRBV12-4, TRBJ2-7)
CQSPTETYEQYF

SEQ ID NO: 179579 - protein, 14 aa, Homo sapiens
  CDR3 for alpha chain variable domain of TCR clone 89790 (TRAV12-2, TRAJ40)
CAVKIPSGTYKYIF

SEQ ID NO: 179580 - protein, 14 aa, Homo sapiens
  CDR3 for beta chain variable domain of TCR clone 89790 (TRBV4-1, TRBJ2-2)
CASSQYPDTGELFF

SEQ ID NO: 179581 - protein, 15 aa, Homo sapiens
  CDR3 for alpha chain variable domain of TCR clone 89791 (TRAV29/DV5, TRAJ29)
CAASERSSGNTPLVF

SEQ ID NO: 179582 - protein, 20 aa, Homo sapiens
  CDR3 for beta chain variable domain of TCR clone 89791 (TRBV19, TRBJ2-7)
CASTQVAPESLRAVLRAGHQ

SEQ ID NO: 179583 - protein, 13 aa, Homo sapiens
  CDR3 for alpha chain variable domain of TCR clone 89792 (TRAV27, TRAJ41)
CAGEGNSGDALNF

SEQ ID NO: 179584 - protein, 15 aa, Homo sapiens
  CDR3 for beta chain variable domain of TCR clone 89792 (TRBV6-3, TRBJ2-7)
CASSSPGTVFYEQYF

SEQ ID NO: 179585 - protein, 13 aa, Homo sapiens
  CDR3 for alpha chain variable domain of TCR clone 89793 (TRAV12-3, TRAJ7)
CAMTPYGNNRLAF

SEQ ID NO: 179586 - protein, 16 aa, Homo sapiens
  CDR3 for beta chain variable domain of TCR clone 89793 (TRBV20-1, TRBJ1-4)
CGARPYGGELNEKLFF

SEQ ID NO: 179587 - protein, 12 aa, Homo sapiens
  CDR3 for alpha chain variable domain of TCR clone 89794 (TRAV4, TRAJ26)
CLVGDYGQNFVF

SEQ ID NO: 179588 - protein, 17 aa, Homo sapiens
  CDR3 for beta chain variable domain of TCR clone 89794 (TRBV20-1, TRBJ2-4)
CSARDLVRSGSKNIQYF

SEQ ID NO: 179589 - protein, 15 aa, Homo sapiens
  CDR3 for alpha chain variable domain of TCR clone 89795 (TRAV4, TRAJ10)
CLVGDAEGGGNKLTF

SEQ ID NO: 179590 - protein, 15 aa, Homo sapiens
  CDR3 for beta chain variable domain of TCR clone 89795 (TRBV7-2, TRBJ2-7)
CASSLTGQGTYEQYF

SEQ ID NO: 179591 - protein, 15 aa, Homo sapiens
  CDR3 for alpha chain variable domain of TCR clone 89796 (TRAV17, TRAJ57)
CATGPSQGGSEKLVF

SEQ ID NO: 179592 - protein, 15 aa, Homo sapiens
  CDR3 for beta chain variable domain of TCR clone 89796 (TRBV13, TRBJ1-5)
CASSFGQGGVQPQHF

SEQ ID NO: 179593 - protein, 11 aa, Homo sapiens
  CDR3 for alpha chain variable domain of TCR clone 89797 (TRAV2, TRAJ33)
CAVESNYQLIW

SEQ ID NO: 179594 - protein, 12 aa, Homo sapiens
  CDR3 for beta chain variable domain of TCR clone 89797 (TRBV11-2, TRBJ2-2)
CASSLGGGELFF

SEQ ID NO: 179595 - protein, 13 aa, Homo sapiens
  CDR3 for alpha chain variable domain of TCR clone 89798 (TRAV8-6, TRAJ49)
CAVITNTGNQFDF

SEQ ID NO: 179596 - protein, 14 aa, Homo sapiens
  CDR3 for beta chain variable domain of TCR clone 89798 (TRBV5-1, TRBJ2-7)
CASSRGESLYEQYF

SEQ ID NO: 179597 - protein, 10 aa, Homo sapiens
  CDR3 for alpha chain variable domain of TCR clone 89799 (TRAV12-3, TRAJ49)
CAMNDDQFYF

SEQ ID NO: 179598 - protein, 13 aa, Homo sapiens
  CDR3 for beta chain variable domain of TCR clone 89799 (TRBV12-4, TRBJ1-1)
CARSPGTGFEAFF

SEQ ID NO: 179599 - protein, 17 aa, Homo sapiens
  CDR3 for alpha chain variable domain of TCR clone 89800 (TRAV12-3, TRAJ26)
CAMSGGRWENYGQNFVF

SEQ ID NO: 179600 - protein, 12 aa, Homo sapiens
  CDR3 for beta chain variable domain of TCR clone 89800 (TRBV19, TRBJ1-1)
CASSTTGIEAFF

SEQ ID NO: 179601 - protein, 15 aa, Homo sapiens
  CDR3 for alpha chain variable domain of TCR clone 89801 (TRAV3, TRAJ22)
CAVRDRGGSARQLTF

SEQ ID NO: 179602 - protein, 16 aa, Homo sapiens
  CDR3 for beta chain variable domain of TCR clone 89801 (TRBV5-4, TRBJ2-3)
CASQQLGAGGADTQYF

SEQ ID NO: 179603 - protein, 18 aa, Homo sapiens
  CDR3 for alpha chain variable domain of TCR clone 89802 (TRAV29/DV5, TRAJ52)
CVAGFRGAGGTSYGKLTF

SEQ ID NO: 179604 - protein, 16 aa, Homo sapiens
  CDR3 for beta chain variable domain of TCR clone 89802 (TRBV7-3, TRBJ2-2)
CASSLKRGTLSGELFF

SEQ ID NO: 179605 - protein, 15 aa, Homo sapiens
  CDR3 for alpha chain variable domain of TCR clone 89803 (TRAV20, TRAJ53)
CAVQASVGSNYKLTF

SEQ ID NO: 179606 - protein, 14 aa, Homo sapiens
  CDR3 for beta chain variable domain of TCR clone 89803 (TRBV7-2, TRBJ1-2)
CASSQTGSTYGYTF

SEQ ID NO: 179607 - protein, 11 aa, Homo sapiens
  CDR3 for alpha chain variable domain of TCR clone 89804 (TRAV17, TRAJ31)
CATSNNSRLMF

SEQ ID NO: 179608 - protein, 16 aa, Homo sapiens
  CDR3 for beta chain variable domain of TCR clone 89804 (TRBV7-8, TRBJ2-4)
CASSAERTLAKNIQYF

SEQ ID NO: 179609 - protein, 13 aa, Homo sapiens
  CDR3 for alpha chain variable domain of TCR clone 89805 (TRAV38-2/DV8, TRAJ34)
CAYRTWNTDKLIF

SEQ ID NO: 179610 - protein, 12 aa, Homo sapiens
  CDR3 for beta chain variable domain of TCR clone 89805 (TRBV7-9, TRBJ2-7)
CASSFGSYEQYF

SEQ ID NO: 179611 - protein, 14 aa, Homo sapiens
  CDR3 for alpha chain variable domain of TCR clone 89806 (TRAV12-3, TRAJ28)
CATNSGAGSYQLTF

SEQ ID NO: 179612 - protein, 13 aa, Homo sapiens
  CDR3 for beta chain variable domain of TCR clone 89806 (TRBV10-2, TRBJ2-7)
CASGASGGYEQYF

SEQ ID NO: 179613 - protein, 13 aa, Homo sapiens
  CDR3 for alpha chain variable domain of TCR clone 89807 (TRAV12-2, TRAJ20)
CAVNEGNDYKLSF

SEQ ID NO: 179614 - protein, 14 aa, Homo sapiens
  CDR3 for beta chain variable domain of TCR clone 89807 (TRBV20-1, TRBJ2-1)
CSAQIGGSANEQFF

SEQ ID NO: 179615 - protein, 13 aa, Homo sapiens
  CDR3 for alpha chain variable domain of TCR clone 89808 (TRAV3, TRAJ15)
CAVRDQAGTALIF

SEQ ID NO: 179616 - protein, 15 aa, Homo sapiens
  CDR3 for beta chain variable domain of TCR clone 89808 (TRBV11-1, TRBJ2-7)
CASCLNYGASYEQYF

SEQ ID NO: 179617 - protein, 13 aa, Homo sapiens
  CDR3 for alpha chain variable domain of TCR clone 89809 (TRAV13-1, TRAJ40)
CAASTSGTYKYIF

SEQ ID NO: 179618 - protein, 15 aa, Homo sapiens
  CDR3 for beta chain variable domain of TCR clone 89809 (TRBV7-2, TRBJ2-1)
CASSLASGRVNEQFF

SEQ ID NO: 179619 - protein, 14 aa, Homo sapiens
  CDR3 for alpha chain variable domain of TCR clone 89810 (TRAV16, TRAJ3)
CALSQYSSASKIIF

SEQ ID NO: 179620 - protein, 16 aa, Homo sapiens
  CDR3 for beta chain variable domain of TCR clone 89810 (TRBV15, TRBJ2-3)
CATSRDLGIVTDTQYF

SEQ ID NO: 179621 - protein, 15 aa, Homo sapiens
  CDR3 for alpha chain variable domain of TCR clone 89811 (TRAV21, TRAJ53)
CATLNSGGSDYKLTF

SEQ ID NO: 179622 - protein, 14 aa, Homo sapiens
  CDR3 for beta chain variable domain of TCR clone 89811 (TRBV15, TRBJ1-2)
CATSRASVNYGYTF

SEQ ID NO: 179623 - protein, 11 aa, Homo sapiens
  CDR3 for alpha chain variable domain of TCR clone 89812 (TRAV12-1, TRAJ34)
CVVNKGRVLIF

SEQ ID NO: 179624 - protein, 12 aa, Homo sapiens
  CDR3 for beta chain variable domain of TCR clone 89812 (TRBV2, TRBJ2-1)
CAYGPPGNEQFF

SEQ ID NO: 179625 - protein, 16 aa, Homo sapiens
  CDR3 for alpha chain variable domain of TCR clone 89813 (TRAV3, TRAJ21)
CAVRDIERGNFNKFYF

SEQ ID NO: 179626 - protein, 13 aa, Homo sapiens
  CDR3 for beta chain variable domain of TCR clone 89813 (TRBV12-4, TRBJ2-7)
CASSPTETYEQYF

SEQ ID NO: 179627 - protein, 11 aa, Homo sapiens
  CDR3 for alpha chain variable domain of TCR clone 89814 (TRAV3, TRAJ17)
PSGAAGNKLTF

SEQ ID NO: 179628 - protein, 12 aa, Homo sapiens
  CDR3 for beta chain variable domain of TCR clone 89814 (TRBV11-2, TRBJ2-2)
CASSLGGGELFF

SEQ ID NO: 179629 - protein, 10 aa, Homo sapiens
  CDR3 for alpha chain variable domain of TCR clone 89815 (TRAV2, TRAJ15)
RGQAGTALLF

SEQ ID NO: 179630 - protein, 13 aa, Homo sapiens
  CDR3 for beta chain variable domain of TCR clone 89815 (TRBV10-3, TRBJ2-7)
CASKLAVNYEQYF

SEQ ID NO: 179631 - protein, 14 aa, Homo sapiens
  CDR3 for alpha chain variable domain of TCR clone 89816 (TRAV8-3, TRAJ36)
CAVGATGKQPLLWD

SEQ ID NO: 179632 - protein, 15 aa, Homo sapiens
  CDR3 for beta chain variable domain of TCR clone 89816 (TRBV7-2, TRBJ1-2)
CASSPRAGWNYGYTF

SEQ ID NO: 179633 - protein, 12 aa, Homo sapiens
  CDR3 for alpha chain variable domain of TCR clone 89817 (TRAV13-2, TRAJ23)
CAERHRGGKLIF

SEQ ID NO: 179634 - protein, 18 aa, Homo sapiens
  CDR3 for beta chain variable domain of TCR clone 89817 (TRBV20-1, TRBJ1-4)
CSAPGQGLLTNEKLFLAV

SEQ ID NO: 179635 - protein, 14 aa, Homo sapiens
  CDR3 for alpha chain variable domain of TCR clone 89818 (TRAV13-1, TRAJ44)
CAAKATGTASKLTF

SEQ ID NO: 179636 - protein, 17 aa, Homo sapiens
  CDR3 for beta chain variable domain of TCR clone 89818 (TRBV7-3, TRBJ2-3)
CGSSLMKRMRGADTQYF

SEQ ID NO: 179637 - protein, 12 aa, Homo sapiens
  CDR3 for alpha chain variable domain of TCR clone 89819 (TRAV22, TRAJ29)
CAPPSGNTPLVF

SEQ ID NO: 179638 - protein, 14 aa, Homo sapiens
  CDR3 for beta chain variable domain of TCR clone 89819 (TRBV5-7, TRBJ2-7)
CASSFKGATGEQYF

SEQ ID NO: 179639 - protein, 13 aa, Homo sapiens
  CDR3 for alpha chain variable domain of TCR clone 89820 (TRAV36/DV7, TRAJ54)
CAVCTQGAQKLVF

SEQ ID NO: 179640 - protein, 13 aa, Homo sapiens
  CDR3 for beta chain variable domain of TCR clone 89820 (TRBV7-6, TRBJ2-7)
CASSVDHTHEQYF

SEQ ID NO: 179641 - protein, 13 aa, Homo sapiens
  CDR3 for alpha chain variable domain of TCR clone 89821 (TRAV13-2, TRAJ13)
CAERPGGYQKVTF

SEQ ID NO: 179642 - protein, 15 aa, Homo sapiens
  CDR3 for beta chain variable domain of TCR clone 89821 (TRBV28, TRBJ2-5)
CASSPPWSYQETQYF

SEQ ID NO: 179643 - protein, 15 aa, Homo sapiens
  CDR3 for alpha chain variable domain of TCR clone 89822 (TRAV3, TRAJ9)
CAVRARNTGGFKTIF

SEQ ID NO: 179644 - protein, 13 aa, Homo sapiens
  CDR3 for beta chain variable domain of TCR clone 89822 (TRBV2, TRBJ1-4)
CASSDLFNEKLFF

SEQ ID NO: 179645 - protein, 15 aa, Homo sapiens
  CDR3 for alpha chain variable domain of TCR clone 89823 (TRAV25, TRAJ53)
CPTSNSGGSNYNLTF

SEQ ID NO: 179646 - protein, 14 aa, Homo sapiens
  CDR3 for beta chain variable domain of TCR clone 89823 (TRBV11-2, TRBJ2-3)
CASSRLARTDTQYF

SEQ ID NO: 179647 - protein, 14 aa, Homo sapiens
  CDR3 for alpha chain variable domain of TCR clone 89824 (TRAV26-1, TRAJ22)
CIVRVYGSARQLTF

SEQ ID NO: 179648 - protein, 13 aa, Homo sapiens
  CDR3 for beta chain variable domain of TCR clone 89824 (TRBV6-5, TRBJ2-1)
CASRGRVGNEQFF

SEQ ID NO: 179649 - protein, 15 aa, Homo sapiens
  CDR3 for alpha chain variable domain of TCR clone 89825 (TRAV16, TRAJ10)
CALRELTGGGNKLTF

SEQ ID NO: 179650 - protein, 20 aa, Homo sapiens
  CDR3 for beta chain variable domain of TCR clone 89825 (TRBV3-1, TRBJ2-6)
CASSPRPGLEGGAGANVLTF

SEQ ID NO: 179651 - protein, 11 aa, Homo sapiens
  CDR3 for alpha chain variable domain of TCR clone 89826 (TRAV3, TRAJ21)
CAVGNFNKLYF

SEQ ID NO: 179652 - protein, 16 aa, Homo sapiens
  CDR3 for beta chain variable domain of TCR clone 89826 (TRBV19, TRBJ2-1)
CASSKAGPSSYNEQFF

SEQ ID NO: 179653 - protein, 15 aa, Homo sapiens
  CDR3 for alpha chain variable domain of TCR clone 89827 (TRAV12-2, TRAJ50)
CAVNGLETSYDKVIF

SEQ ID NO: 179654 - protein, 16 aa, Homo sapiens
  CDR3 for beta chain variable domain of TCR clone 89827 (TRBV7-3, TRBJ2-2)
CASSLKRGTLSGELFF

SEQ ID NO: 179655 - protein, 11 aa, Homo sapiens
  CDR3 for alpha chain variable domain of TCR clone 89828 (TRAV2, TRAJ33)
CAVESNYQLIW

SEQ ID NO: 179656 - protein, 12 aa, Homo sapiens
  CDR3 for beta chain variable domain of TCR clone 89828 (TRBV4-3, TRBJ2-1)
CASSLSGYEQFF

SEQ ID NO: 179657 - protein, 17 aa, Homo sapiens
  CDR3 for alpha chain variable domain of TCR clone 89829 (TRAV3, TRAJ6)
CAVRDGPRAGGSYIPTF

SEQ ID NO: 179658 - protein, 14 aa, Homo sapiens
  CDR3 for beta chain variable domain of TCR clone 89829 (TRBV7-2, TRBJ2-1)
CASSLGVGYNEQFF

SEQ ID NO: 179659 - protein, 12 aa, Homo sapiens
  CDR3 for alpha chain variable domain of TCR clone 89830 (TRAV29/DV5, TRAJ49)
CAATDTGNQFYF

SEQ ID NO: 179660 - protein, 15 aa, Homo sapiens
  CDR3 for beta chain variable domain of TCR clone 89830 (TRBV6-1, TRBJ2-3)
CASSERGGITDTQYF

SEQ ID NO: 179661 - protein, 11 aa, Homo sapiens
  CDR3 for alpha chain variable domain of TCR clone 89831 (TRAV2, TRAJ13)
CASGGYQKVTF

SEQ ID NO: 179662 - protein, 13 aa, Homo sapiens
  CDR3 for beta chain variable domain of TCR clone 89831 (TRBV27, TRBJ1-4)
CASSSMGDEKLFF

SEQ ID NO: 179663 - protein, 16 aa, Homo sapiens
  CDR3 for alpha chain variable domain of TCR clone 89832 (TRAV4, TRAJ22)
CLVGDLYSGSARQLNF

SEQ ID NO: 179664 - protein, 16 aa, Homo sapiens
  CDR3 for beta chain variable domain of TCR clone 89832 (TRBV7-9, TRBJ2-3)
CASSPWREVGTDTQYF

SEQ ID NO: 179665 - protein, 11 aa, Homo sapiens
  CDR3 for alpha chain variable domain of TCR clone 89833 (TRAV27, TRAJ20)
CAGLNDYKLSF

SEQ ID NO: 179666 - protein, 14 aa, Homo sapiens
  CDR3 for beta chain variable domain of TCR clone 89833 (TRBV6-1, TRBJ1-1)
CASTPLQMNTEAVF

SEQ ID NO: 179667 - protein, 13 aa, Homo sapiens
  CDR3 for alpha chain variable domain of TCR clone 89834 (TRAV27, TRAJ45)
CRSSGGGADGLTF

SEQ ID NO: 179668 - protein, 16 aa, Homo sapiens
  CDR3 for beta chain variable domain of TCR clone 89834 (TRBV28, TRBJ2-7)
CASSPWVATGDLSQYF

SEQ ID NO: 179669 - protein, 13 aa, Homo sapiens
  CDR3 for alpha chain variable domain of TCR clone 89835 (TRAV1-2, TRAJ9)
CAALNTAGFKTIF

SEQ ID NO: 179670 - protein, 14 aa, Homo sapiens
  CDR3 for beta chain variable domain of TCR clone 89835 (TRBV13, TRBJ2-3)
CASSSGSPTDTQYF

SEQ ID NO: 179671 - protein, 13 aa, Homo sapiens
  CDR3 for alpha chain variable domain of TCR clone 89836 (TRAV3, TRAJ16)
CAVRDRNGQQLLF

SEQ ID NO: 179672 - protein, 15 aa, Homo sapiens
  CDR3 for beta chain variable domain of TCR clone 89836 (TRBV5-1, TRBJ2-1)
CASSPPRAPYNEQFF

SEQ ID NO: 179673 - protein, 17 aa, Homo sapiens
  CDR3 for alpha chain variable domain of TCR clone 89837 (TRAV3, TRAJ38)
CAVRDCLNAGNNRKLIW

SEQ ID NO: 179674 - protein, 14 aa, Homo sapiens
  CDR3 for beta chain variable domain of TCR clone 89837 (TRBV7-9, TRBJ2-7)
CASSSRLVLHEQYF

SEQ ID NO: 179675 - protein, 14 aa, Homo sapiens
  CDR3 for alpha chain variable domain of TCR clone 89838 (TRAV1-2, TRAJ16)
CAVNRFSDGQKLPF

SEQ ID NO: 179676 - protein, 14 aa, Homo sapiens
  CDR3 for beta chain variable domain of TCR clone 89838 (TRBV7-9, TRBJ2-2)
CASSLGHRTGELFF

SEQ ID NO: 179677 - protein, 15 aa, Homo sapiens
  CDR3 for alpha chain variable domain of TCR clone 89839 (TRAV3, TRAJ17)
CAVSPKEAAGNKLTF

SEQ ID NO: 179678 - protein, 15 aa, Homo sapiens
  CDR3 for beta chain variable domain of TCR clone 89839 (TRBV19, TRBJ1-1)
CASTSGQIQNTEAFF

SEQ ID NO: 179679 - protein, 22 aa, Homo sapiens
  CDR3 for alpha chain variable domain of TCR clone 89840 (TRAV3, )
CAVRDCLSAGNNHIQNPDPAVY

SEQ ID NO: 179680 - protein, 14 aa, Homo sapiens
  CDR3 for beta chain variable domain of TCR clone 89840 (TRBV5-5, TRBJ1-5)
CASSGQGVDQPQHF

SEQ ID NO: 179681 - protein, 13 aa, Homo sapiens
  CDR3 for alpha chain variable domain of TCR clone 89841 (TRAV30, TRAJ24)
CGTVIDSWGKLQF

SEQ ID NO: 179682 - protein, 14 aa, Homo sapiens
  CDR3 for beta chain variable domain of TCR clone 89841 (TRBV6-3, TRBJ2-2)
CASAYTPDTGELFF

SEQ ID NO: 179683 - protein, 14 aa, Homo sapiens
  CDR3 for alpha chain variable domain of TCR clone 89842 (TRAV20, TRAJ20)
CAVRRGSNDYKLSF

SEQ ID NO: 179684 - protein, 13 aa, Homo sapiens
  CDR3 for beta chain variable domain of TCR clone 89842 (TRBV19, TRBJ2-5)
CASSETAPETQYF

SEQ ID NO: 179685 - protein, 14 aa, Homo sapiens
  CDR3 for alpha chain variable domain of TCR clone 89843 (TRAV4, TRAJ26)
CLVGPHNYGQNFVF

SEQ ID NO: 179686 - protein, 17 aa, Homo sapiens
  CDR3 for beta chain variable domain of TCR clone 89843 (TRBV24-1, TRBJ2-1)
CATSDVSTSGTCNEQFF

SEQ ID NO: 179687 - protein, 18 aa, Homo sapiens
  CDR3 for alpha chain variable domain of TCR clone 89844 (TRAV26-2, TRAJ54)
CILRDVEVGIQGAQKLVL

SEQ ID NO: 179688 - protein, 16 aa, Homo sapiens
  CDR3 for beta chain variable domain of TCR clone 89844 (TRBV6-1, TRBJ2-5)
CASSETLDRGAETQYF

SEQ ID NO: 179689 - protein, 15 aa, Homo sapiens
  CDR3 for alpha chain variable domain of TCR clone 89845 (TRAV3, TRAJ22)
CAVRDRGGSERQLTF

SEQ ID NO: 179690 - protein, 13 aa, Homo sapiens
  CDR3 for beta chain variable domain of TCR clone 89845 (TRBV20-1, TRBJ1-1)
CSARVGGNTEAFF

SEQ ID NO: 179691 - protein, 12 aa, Homo sapiens
  CDR3 for alpha chain variable domain of TCR clone 89846 (TRAV13-2, TRAJ23)
CAERHRGGKLIC

SEQ ID NO: 179692 - protein, 16 aa, Homo sapiens
  CDR3 for beta chain variable domain of TCR clone 89846 (TRBV20-1, TRBJ1-4)
CSAPGQGLLTNEKLFF

SEQ ID NO: 179693 - protein, 11 aa, Homo sapiens
  CDR3 for alpha chain variable domain of TCR clone 89847 (TRAV2, TRAJ13)
CASGGYQKVTF

SEQ ID NO: 179694 - protein, 14 aa, Homo sapiens
  CDR3 for beta chain variable domain of TCR clone 89847 (TRBV3-1, TRBJ1-1)
CASSQGGRGSEAFF

SEQ ID NO: 179695 - protein, 14 aa, Homo sapiens
  CDR3 for alpha chain variable domain of TCR clone 89848 (TRAV12-2, TRAJ11)
CAVEGGSGYSTLAF

SEQ ID NO: 179696 - protein, 16 aa, Homo sapiens
  CDR3 for beta chain variable domain of TCR clone 89848 (TRBV6-1, TRBJ1-2)
CASSGAWQGRLHGYTF

SEQ ID NO: 179697 - protein, 13 aa, Homo sapiens
  CDR3 for alpha chain variable domain of TCR clone 89849 (TRAV21, TRAJ20)
CAVGLRVDYKLSF

SEQ ID NO: 179698 - protein, 16 aa, Homo sapiens
  CDR3 for beta chain variable domain of TCR clone 89849 (TRBV24-1, TRBJ2-3)
CATSDPGTGATDTQYF

SEQ ID NO: 179699 - protein, 14 aa, Homo sapiens
  CDR3 for alpha chain variable domain of TCR clone 89850 (TRAV13-2, TRAJ22)
CADGTFGSARQLTF

SEQ ID NO: 179700 - protein, 15 aa, Homo sapiens
  CDR3 for beta chain variable domain of TCR clone 89850 (TRBV6-3, TRBJ2-7)
CASSSPGTVFYEQYF

SEQ ID NO: 179701 - protein, 11 aa, Homo sapiens
  CDR3 for alpha chain variable domain of TCR clone 89851 (TRAV3, TRAJ13)
RAVTSYQKVTF

SEQ ID NO: 179702 - protein, 15 aa, Homo sapiens
  CDR3 for beta chain variable domain of TCR clone 89851 (TRBV7-9, TRBJ2-7)
CASSSSGLAVYEQYF

SEQ ID NO: 179703 - protein, 14 aa, Homo sapiens
  CDR3 for alpha chain variable domain of TCR clone 89852 (TRAV1-2, TRAJ16)
CAVNRFSDGQKLLF

SEQ ID NO: 179704 - protein, 15 aa, Homo sapiens
  CDR3 for beta chain variable domain of TCR clone 89852 (TRBV29-1, TRBJ2-1)
CSATLWGRASNEQFF

SEQ ID NO: 179705 - protein, 16 aa, Homo sapiens
  CDR3 for alpha chain variable domain of TCR clone 89853 (TRAV26-1, TRAJ37)
CIGRGDGSGNTGKLIF

SEQ ID NO: 179706 - protein, 17 aa, Homo sapiens
  CDR3 for beta chain variable domain of TCR clone 89853 (TRBV4-1, TRBJ2-7)
CASSRDPLGVRGGEQYF

SEQ ID NO: 179707 - protein, 15 aa, Homo sapiens
  CDR3 for alpha chain variable domain of TCR clone 89854 (TRAV13-2, TRAJ23)
CAERGFYNQGGKLIF

SEQ ID NO: 179708 - protein, 14 aa, Homo sapiens
  CDR3 for beta chain variable domain of TCR clone 89854 (TRBV4-1, TRBJ2-3)
CASSQGWSTDTQYF

SEQ ID NO: 179709 - protein, 15 aa, Homo sapiens
  CDR3 for alpha chain variable domain of TCR clone 89855 (TRAV12-3, TRAJ6)
CAMSATSGGSYIPTF

SEQ ID NO: 179710 - protein, 11 aa, Homo sapiens
  CDR3 for beta chain variable domain of TCR clone 89855 (TRBV29-1, TRBJ2-5)
CSEDRTGTQYF

SEQ ID NO: 179711 - protein, 14 aa, Homo sapiens
  CDR3 for alpha chain variable domain of TCR clone 89856 (TRAV8-4, TRAJ54)
CAVSEVLGAQKLVS

SEQ ID NO: 179712 - protein, 13 aa, Homo sapiens
  CDR3 for beta chain variable domain of TCR clone 89856 (TRBV27, TRBJ2-7)
CASSFVSSYEQYF

SEQ ID NO: 179713 - protein, 14 aa, Homo sapiens
  CDR3 for alpha chain variable domain of TCR clone 89857 (TRAV27, TRAJ50)
CAGGRKTSYDKVIF

SEQ ID NO: 179714 - protein, 11 aa, Homo sapiens
  CDR3 for beta chain variable domain of TCR clone 89857 (TRBV12-4, TRBJ2-3)
CASSSVRGKYF

SEQ ID NO: 179715 - protein, 14 aa, Homo sapiens
  CDR3 for alpha chain variable domain of TCR clone 89858 (TRAV17, TRAJ56)
CATEDTGANSKLTF

SEQ ID NO: 179716 - protein, 16 aa, Homo sapiens
  CDR3 for beta chain variable domain of TCR clone 89858 (TRBV19, TRBJ2-1)
CASSIKLAGAYNEQFF

SEQ ID NO: 179717 - protein, 11 aa, Homo sapiens
  CDR3 for alpha chain variable domain of TCR clone 89859 (TRAV26-1, TRAJ37)
CIVRVGRKLIF

SEQ ID NO: 179718 - protein, 15 aa, Homo sapiens
  CDR3 for beta chain variable domain of TCR clone 89859 (TRBV4-1, TRBJ2-7)
CASSQNTGRLYEQYF

SEQ ID NO: 179719 - protein, 16 aa, Homo sapiens
  CDR3 for alpha chain variable domain of TCR clone 89860 (TRAV30, TRAJ24)
CGTEIVDADSWGKFQL

SEQ ID NO: 179720 - protein, 15 aa, Homo sapiens
  CDR3 for beta chain variable domain of TCR clone 89860 (TRBV11-3, TRBJ2-3)
CASLKDGREGDTQYF

SEQ ID NO: 179721 - protein, 15 aa, Homo sapiens
  CDR3 for alpha chain variable domain of TCR clone 89861 (TRAV3, TRAJ22)
CAVRDRGGSARQLTF

SEQ ID NO: 179722 - protein, 15 aa, Homo sapiens
  CDR3 for beta chain variable domain of TCR clone 89861 (TRBV19, TRBJ2-5)
CASSIVRASKETQYF

SEQ ID NO: 179723 - protein, 13 aa, Homo sapiens
  CDR3 for alpha chain variable domain of TCR clone 89862 (TRAV21, TRAJ37)
CAVSSGNTVKLIF

SEQ ID NO: 179724 - protein, 17 aa, Homo sapiens
  CDR3 for beta chain variable domain of TCR clone 89862 (TRBV5-1, TRBJ2-5)
CASSLLGLAANQETQYF

SEQ ID NO: 179725 - protein, 11 aa, Homo sapiens
  CDR3 for alpha chain variable domain of TCR clone 89863 (TRAV13-1, TRAJ5)
RAPKGRRALTF

SEQ ID NO: 179726 - protein, 15 aa, Homo sapiens
  CDR3 for beta chain variable domain of TCR clone 89863 (TRBV11-2, TRBJ1-1)
CASSSRSSLLLSLDK

SEQ ID NO: 179727 - protein, 14 aa, Homo sapiens
  CDR3 for alpha chain variable domain of TCR clone 89864 (TRAV1-2, TRAJ16)
CAVNRFSDGQKLLF

SEQ ID NO: 179728 - protein, 14 aa, Homo sapiens
  CDR3 for beta chain variable domain of TCR clone 89864 (TRBV11-2, TRBJ1-4)
CASSPEVKNEKLFF

SEQ ID NO: 179729 - protein, 13 aa, Homo sapiens
  CDR3 for alpha chain variable domain of TCR clone 89865 (TRAV16, TRAJ20)
CALWPSNDYKLSF

SEQ ID NO: 179730 - protein, 15 aa, Homo sapiens
  CDR3 for beta chain variable domain of TCR clone 89865 (TRBV5-1, TRBJ2-2)
CASSRVGSDTGELFF

SEQ ID NO: 179731 - protein, 13 aa, Homo sapiens
  CDR3 for alpha chain variable domain of TCR clone 89866 (TRAV2, TRAJ15)
CAVASQAGTALIF

SEQ ID NO: 179732 - protein, 11 aa, Homo sapiens
  CDR3 for beta chain variable domain of TCR clone 89866 (TRBV12-4, TRBJ2-3)
CASTATDTQYF

SEQ ID NO: 179733 - protein, 10 aa, Homo sapiens
  CDR3 for alpha chain variable domain of TCR clone 89867 (TRAV12-3, TRAJ49)
CAMNDDQFYF

SEQ ID NO: 179734 - protein, 17 aa, Homo sapiens
  CDR3 for beta chain variable domain of TCR clone 89867 (TRBV7-3, TRBJ2-3)
CASSLMKRMRGADTQYF

SEQ ID NO: 179735 - protein, 12 aa, Homo sapiens
  CDR3 for alpha chain variable domain of TCR clone 89868 (TRAV23/DV6, TRAJ58)
CAARLLRGETSG

SEQ ID NO: 179736 - protein, 12 aa, Homo sapiens
  CDR3 for beta chain variable domain of TCR clone 89868 (TRBV11-2, TRBJ2-2)
CASSLGGGELFF

SEQ ID NO: 179737 - protein, 12 aa, Homo sapiens
  CDR3 for alpha chain variable domain of TCR clone 89869 (TRAV2, TRAJ9)
CAVGAGGFKTIF

SEQ ID NO: 179738 - protein, 12 aa, Homo sapiens
  CDR3 for beta chain variable domain of TCR clone 89869 (TRBV7-9, TRBJ2-7)
CASSFGSYEQYF

SEQ ID NO: 179739 - protein, 15 aa, Homo sapiens
  CDR3 for alpha chain variable domain of TCR clone 89870 (TRAV12-2, TRAJ53)
CAVNGGGGSNYKLTF

SEQ ID NO: 179740 - protein, 12 aa, Homo sapiens
  CDR3 for beta chain variable domain of TCR clone 89870 (TRBV12-4, TRBJ2-7)
CASSLGGYEQYF

SEQ ID NO: 179741 - protein, 15 aa, Homo sapiens
  CDR3 for alpha chain variable domain of TCR clone 89871 (TRAV26-1, TRAJ22)
CIVRVSFWFYKATDL

SEQ ID NO: 179742 - protein, 13 aa, Homo sapiens
  CDR3 for beta chain variable domain of TCR clone 89871 (TRBV7-9, TRBJ1-2)
CASSLKQNYGYTF

SEQ ID NO: 179743 - protein, 12 aa, Homo sapiens
  CDR3 for alpha chain variable domain of TCR clone 89872 (TRAV13-1, TRAJ11)
CAADSGYSTLTF

SEQ ID NO: 179744 - protein, 12 aa, Homo sapiens
  CDR3 for beta chain variable domain of TCR clone 89872 (TRBV10-3, TRBJ2-1)
CAIHTGHNEQFF

SEQ ID NO: 179745 - protein, 14 aa, Homo sapiens
  CDR3 for alpha chain variable domain of TCR clone 89873 (TRAV23/DV6, TRAJ8)
RAASKATGFQKLVF

SEQ ID NO: 179746 - protein, 15 aa, Homo sapiens
  CDR3 for beta chain variable domain of TCR clone 89873 (TRBV28, TRBJ2-3)
CASSPDRQGANTQYF

SEQ ID NO: 179747 - protein, 13 aa, Homo sapiens
  CDR3 for alpha chain variable domain of TCR clone 89874 (TRAV17, TRAJ7)
CVTDNYGNNRLAF

SEQ ID NO: 179748 - protein, 13 aa, Homo sapiens
  CDR3 for beta chain variable domain of TCR clone 89874 (TRBV27, TRBJ2-1)
CASSSGSYNEQFF

SEQ ID NO: 179749 - protein, 12 aa, Homo sapiens
  CDR3 for alpha chain variable domain of TCR clone 89875 (TRAV17, TRAJ12)
CAGGDSSYKLIF

SEQ ID NO: 179750 - protein, 15 aa, Homo sapiens
  CDR3 for beta chain variable domain of TCR clone 89875 (TRBV20-1, TRBJ2-7)
CSARDRVSGMDEQYF

SEQ ID NO: 179751 - protein, 14 aa, Homo sapiens
  CDR3 for alpha chain variable domain of TCR clone 89876 (TRAV38-1, TRAJ45)
CAYYSGGGADGLTF

SEQ ID NO: 179752 - protein, 20 aa, Homo sapiens
  CDR3 for beta chain variable domain of TCR clone 89876 (TRBV28, TRBJ2-1)
CASTAIGRSPGLAGGNEQFF

SEQ ID NO: 179753 - protein, 16 aa, Homo sapiens
  CDR3 for alpha chain variable domain of TCR clone 89877 (TRAV8-3, TRAJ8)
CAVPRDGNTCFQKLVF

SEQ ID NO: 179754 - protein, 14 aa, Homo sapiens
  CDR3 for beta chain variable domain of TCR clone 89877 (TRBV28, TRBJ1-1)
CASSESGRGTEAFF

SEQ ID NO: 179755 - protein, 10 aa, Homo sapiens
  CDR3 for alpha chain variable domain of TCR clone 89878 (TRAV30, TRAJ48)
CGIGNEKLTF

SEQ ID NO: 179756 - protein, 10 aa, Homo sapiens
  CDR3 for beta chain variable domain of TCR clone 89878 (TRBV27, TRBJ2-1)
GASGDNEQFF

SEQ ID NO: 179757 - protein, 14 aa, Homo sapiens
  CDR3 for alpha chain variable domain of TCR clone 89879 (TRAV17, TRAJ56)
CATVPAGANSKLTF

SEQ ID NO: 179758 - protein, 13 aa, Homo sapiens
  CDR3 for beta chain variable domain of TCR clone 89879 (TRBV12-4, TRBJ2-2)
CASSSTGSGELFF

SEQ ID NO: 179759 - protein, 13 aa, Homo sapiens
  CDR3 for alpha chain variable domain of TCR clone 89880 (TRAV27, TRAJ45)
CRSSGGGADGLTF

SEQ ID NO: 179760 - protein, 15 aa, Homo sapiens
  CDR3 for beta chain variable domain of TCR clone 89880 (TRBV20-1, TRBJ2-7)
RSARDRVSGMDEQYF

SEQ ID NO: 179761 - protein, 14 aa, Homo sapiens
  CDR3 for alpha chain variable domain of TCR clone 89881 (TRAV16, TRAJ49)
CALSGQSTGNQLYF

SEQ ID NO: 179762 - protein, 15 aa, Homo sapiens
  CDR3 for beta chain variable domain of TCR clone 89881 (TRBV11-1, TRBJ2-1)
CASSLFRDTYNEQFF

SEQ ID NO: 179763 - protein, 14 aa, Homo sapiens
  CDR3 for alpha chain variable domain of TCR clone 89882 (TRAV1-2, TRAJ16)
CAVNRFSDGQKMLF

SEQ ID NO: 179764 - protein, 15 aa, Homo sapiens
  CDR3 for beta chain variable domain of TCR clone 89882 (TRBV7-9, TRBJ1-6)
CASSSPGRGNSPPHF

SEQ ID NO: 179765 - protein, 18 aa, Homo sapiens
  CDR3 for alpha chain variable domain of TCR clone 89883 (TRAV13-1, TRAJ52)
CAANNPNAGGTSYGKLTF

SEQ ID NO: 179766 - protein, 11 aa, Homo sapiens
  CDR3 for beta chain variable domain of TCR clone 89883 (TRBV29-1, TRBJ2-5)
CSEDRTGTQYF

SEQ ID NO: 179767 - protein, 15 aa, Homo sapiens
  CDR3 for alpha chain variable domain of TCR clone 89884 (TRAV25, TRAJ52)
CAGTSVGTSYGKLTF

SEQ ID NO: 179768 - protein, 13 aa, Homo sapiens
  CDR3 for beta chain variable domain of TCR clone 89884 (TRBV6-5, TRBJ2-5)
CASSPQGGETQYF

SEQ ID NO: 179769 - protein, 15 aa, Homo sapiens
  CDR3 for alpha chain variable domain of TCR clone 89885 (TRAV2, TRAJ24)
CAVVRLKNSWGKLQF

SEQ ID NO: 179770 - protein, 13 aa, Homo sapiens
  CDR3 for beta chain variable domain of TCR clone 89885 (TRBV24-1, TRBJ2-2)
CATSDWSTGELFF

SEQ ID NO: 179771 - protein, 14 aa, Homo sapiens
  CDR3 for alpha chain variable domain of TCR clone 89886 (TRAV26-1, TRAJ38)
CIADNAGNNRKLIW

SEQ ID NO: 179772 - protein, 13 aa, Homo sapiens
  CDR3 for beta chain variable domain of TCR clone 89886 (TRBV18, TRBJ2-7)
CQLTPGGSYEQYF

SEQ ID NO: 179773 - protein, 14 aa, Homo sapiens
  CDR3 for alpha chain variable domain of TCR clone 89887 (TRAV12-2, TRAJ40)
CAVKIPSGTYKYIF

SEQ ID NO: 179774 - protein, 15 aa, Homo sapiens
  CDR3 for beta chain variable domain of TCR clone 89887 (TRBV18, TRBJ2-3)
CASSPLAGETDTQYF

SEQ ID NO: 179775 - protein, 15 aa, Homo sapiens
  CDR3 for alpha chain variable domain of TCR clone 89888 (TRAV17, TRAJ57)
CATGPSQGGSEKLVF

SEQ ID NO: 179776 - protein, 16 aa, Homo sapiens
  CDR3 for beta chain variable domain of TCR clone 89888 (TRBV4-1, TRBJ2-3)
CASSQSTSGAEDTQYF

SEQ ID NO: 179777 - protein, 14 aa, Homo sapiens
  CDR3 for alpha chain variable domain of TCR clone 89889 (TRAV9-2, TRAJ39)
CALYIYNAVNMLTF

SEQ ID NO: 179778 - protein, 14 aa, Homo sapiens
  CDR3 for beta chain variable domain of TCR clone 89889 (TRBV6-1, TRBJ1-3)
CASVQGGGGNTIYF

SEQ ID NO: 179779 - protein, 13 aa, Homo sapiens
  CDR3 for alpha chain variable domain of TCR clone 89890 (TRAV35, TRAJ42)
CAGFPGSQGNLIF

SEQ ID NO: 179780 - protein, 13 aa, Homo sapiens
  CDR3 for beta chain variable domain of TCR clone 89890 (TRBV29-1, TRBJ2-1)
CRVEGGRVNEQFF

SEQ ID NO: 179781 - protein, 14 aa, Homo sapiens
  CDR3 for alpha chain variable domain of TCR clone 89891 (TRAV1-2, TRAJ16)
CAVNRFSDGQKLLF

SEQ ID NO: 179782 - protein, 11 aa, Homo sapiens
  CDR3 for beta chain variable domain of TCR clone 89891 (TRBV29-1, TRBJ2-5)
CSEDGTGTQYF

SEQ ID NO: 179783 - protein, 14 aa, Homo sapiens
  CDR3 for alpha chain variable domain of TCR clone 89892 (TRAV1-2, TRAJ33)
CAVRAPDSNYQLIW

SEQ ID NO: 179784 - protein, 12 aa, Homo sapiens
  CDR3 for beta chain variable domain of TCR clone 89892 (TRBV11-2, TRBJ2-4)
CASSSASGSEYF

SEQ ID NO: 179785 - protein, 15 aa, Homo sapiens
  CDR3 for alpha chain variable domain of TCR clone 89893 (TRAV4, TRAJ39)
CLVGPNNNAGNMLTF

SEQ ID NO: 179786 - protein, 15 aa, Homo sapiens
  CDR3 for beta chain variable domain of TCR clone 89893 (TRBV7-9, TRBJ1-6)
CASSPPGRGNSPLHF

SEQ ID NO: 179787 - protein, 16 aa, Homo sapiens
  CDR3 for alpha chain variable domain of TCR clone 89894 (TRAV35, TRAJ37)
CWAFLRGSSNTGKLIF

SEQ ID NO: 179788 - protein, 13 aa, Homo sapiens
  CDR3 for beta chain variable domain of TCR clone 89894 (TRBV2, TRBJ1-2)
CASSVRGNYGYSF

SEQ ID NO: 179789 - protein, 14 aa, Homo sapiens
  CDR3 for alpha chain variable domain of TCR clone 89895 (TRAV1-2, TRAJ16)
CAVNRFSDGQKLRF

SEQ ID NO: 179790 - protein, 14 aa, Homo sapiens
  CDR3 for beta chain variable domain of TCR clone 89895 (TRBV7-9, TRBJ2-3)
CASSLEDGTDTQYF

SEQ ID NO: 179791 - protein, 16 aa, Homo sapiens
  CDR3 for alpha chain variable domain of TCR clone 89896 (TRAV12-2, TRAJ18)
CAVTTDSGSTLGRLYF

SEQ ID NO: 179792 - protein, 14 aa, Homo sapiens
  CDR3 for beta chain variable domain of TCR clone 89896 (TRBV4-2, TRBJ1-5)
CASSQDSINQPQHF

SEQ ID NO: 179793 - protein, 14 aa, Homo sapiens
  CDR3 for alpha chain variable domain of TCR clone 89897 (TRAV26-1, TRAJ15)
CIEAGNQAGTALIF

SEQ ID NO: 179794 - protein, 16 aa, Homo sapiens
  CDR3 for beta chain variable domain of TCR clone 89897 (TRBV28, TRBJ2-2)
CASSLEGGSNTGELFF

SEQ ID NO: 179795 - protein, 14 aa, Homo sapiens
  CDR3 for alpha chain variable domain of TCR clone 89898 (TRAV12-2, TRAJ17)
CAVLFKAAGNKLTF

SEQ ID NO: 179796 - protein, 15 aa, Homo sapiens
  CDR3 for beta chain variable domain of TCR clone 89898 (TRBV5-5, TRBJ2-2)
CASSRQASGAGELFF

SEQ ID NO: 179797 - protein, 13 aa, Homo sapiens
  CDR3 for alpha chain variable domain of TCR clone 89899 (TRAV2, TRAJ21)
CAVEDLNFNKFYF

SEQ ID NO: 179798 - protein, 15 aa, Homo sapiens
  CDR3 for beta chain variable domain of TCR clone 89899 (TRBV28, TRBJ2-5)
CASSPGQGSIETQFF

SEQ ID NO: 179799 - protein, 11 aa, Homo sapiens
  CDR3 for alpha chain variable domain of TCR clone 89900 (TRAV13-1, TRAJ39)
CASHAGNMLTF

SEQ ID NO: 179800 - protein, 17 aa, Homo sapiens
  CDR3 for beta chain variable domain of TCR clone 89900 (TRBV11-2, TRBJ2-1)
CASSLYPPGVEYNEQFF

SEQ ID NO: 179801 - protein, 15 aa, Homo sapiens
  CDR3 for alpha chain variable domain of TCR clone 89901 (TRAV8-2, TRAJ10)
CVVSHSTGGGNKLTF

SEQ ID NO: 179802 - protein, 17 aa, Homo sapiens
  CDR3 for beta chain variable domain of TCR clone 89901 (TRBV7-8, TRBJ2-6)
CASSAGTGGAGANVLTF

SEQ ID NO: 179803 - protein, 12 aa, Homo sapiens
  CDR3 for alpha chain variable domain of TCR clone 89902 (TRAV12-2, TRAJ31)
CAVNTPDARLMF

SEQ ID NO: 179804 - protein, 15 aa, Homo sapiens
  CDR3 for beta chain variable domain of TCR clone 89902 (TRBV28, TRBJ2-5)
CASSPPWSYQETQYF

SEQ ID NO: 179805 - protein, 12 aa, Homo sapiens
  CDR3 for alpha chain variable domain of TCR clone 89903 (TRAV21, TRAJ8)
CAVNTGFQKLVF

SEQ ID NO: 179806 - protein, 13 aa, Homo sapiens
  CDR3 for beta chain variable domain of TCR clone 89903 (TRBV6-3, TRBJ2-1)
CASSDDNYNEQFF

SEQ ID NO: 179807 - protein, 14 aa, Homo sapiens
  CDR3 for alpha chain variable domain of TCR clone 89904 (TRAV1-2, TRAJ16)
CAVNRFSDGQKLLF

SEQ ID NO: 179808 - protein, 14 aa, Homo sapiens
  CDR3 for beta chain variable domain of TCR clone 89904 (TRBV9, TRBJ1-1)
CASSPRQMNTEAFF

SEQ ID NO: 179809 - protein, 13 aa, Homo sapiens
  CDR3 for alpha chain variable domain of TCR clone 89905 (TRAV3, TRAJ20)
CAVRDTPRYKLSF

SEQ ID NO: 179810 - protein, 16 aa, Homo sapiens
  CDR3 for beta chain variable domain of TCR clone 89905 (TRBV20-1, TRBJ2-7)
CSARAPGLALSCEQYF

SEQ ID NO: 179811 - protein, 15 aa, Homo sapiens
  CDR3 for alpha chain variable domain of TCR clone 89906 (TRAV3, TRAJ29)
CAVRDLNSGNTPLVF

SEQ ID NO: 179812 - protein, 16 aa, Homo sapiens
  CDR3 for beta chain variable domain of TCR clone 89906 (TRBV4-1, TRBJ2-5)
CASSQTFYGDQETQYF

SEQ ID NO: 179813 - protein, 13 aa, Homo sapiens
  CDR3 for alpha chain variable domain of TCR clone 89907 (TRAV12-3, TRAJ21)
CAPGPHNFNKFYF

SEQ ID NO: 179814 - protein, 17 aa, Homo sapiens
  CDR3 for beta chain variable domain of TCR clone 89907 (TRBV11-2, TRBJ2-6)
CASSQRDIFSGANVLTF

SEQ ID NO: 179815 - protein, 12 aa, Homo sapiens
  CDR3 for alpha chain variable domain of TCR clone 89908 (TRAV21, TRAJ11)
CAVRGGNSTLTL

SEQ ID NO: 179816 - protein, 15 aa, Homo sapiens
  CDR3 for beta chain variable domain of TCR clone 89908 (TRBV6-1, TRBJ2-7)
CASSEPIAATTEQYF

SEQ ID NO: 179817 - protein, 13 aa, Homo sapiens
  CDR3 for alpha chain variable domain of TCR clone 89909 (TRAV23/DV6, TRAJ16)
CAASISDGQKLLF

SEQ ID NO: 179818 - protein, 15 aa, Homo sapiens
  CDR3 for beta chain variable domain of TCR clone 89909 (TRBV2, TRBJ2-2)
CASSRETVGTGELLF

SEQ ID NO: 179819 - protein, 14 aa, Homo sapiens
  CDR3 for alpha chain variable domain of TCR clone 89910 (TRAV29/DV5, TRAJ36)
CAARRKTGANNLFF

SEQ ID NO: 179820 - protein, 15 aa, Homo sapiens
  CDR3 for beta chain variable domain of TCR clone 89910 (TRBV13, TRBJ2-5)
CASSLRPGRGETQYF

SEQ ID NO: 179821 - protein, 14 aa, Homo sapiens
  CDR3 for alpha chain variable domain of TCR clone 89911 (TRAV21, TRAJ45)
CTVSSGGGADGLTF

SEQ ID NO: 179822 - protein, 15 aa, Homo sapiens
  CDR3 for beta chain variable domain of TCR clone 89911 (TRBV6-1, TRBJ2-4)
CASSEAVWTINIQYF

SEQ ID NO: 179823 - protein, 16 aa, Homo sapiens
  CDR3 for alpha chain variable domain of TCR clone 89912 (TRAV30, TRAJ24)
CDTEIVDADSWGKFQF

SEQ ID NO: 179824 - protein, 14 aa, Homo sapiens
  CDR3 for beta chain variable domain of TCR clone 89912 (TRBV13, TRBJ2-1)
CASSPRPRYNEQFF

SEQ ID NO: 179825 - protein, 13 aa, Homo sapiens
  CDR3 for alpha chain variable domain of TCR clone 89913 (TRAV20, TRAJ31)
CAVQAWNNARLMF

SEQ ID NO: 179826 - protein, 20 aa, Homo sapiens
  CDR3 for beta chain variable domain of TCR clone 89913 (TRBV28, TRBJ2-1)
CASTPIGRSPGLAGGNEQFF

SEQ ID NO: 179827 - protein, 11 aa, Homo sapiens
  CDR3 for alpha chain variable domain of TCR clone 89914 (TRAV29/DV5, TRAJ47)
CAASGEIWKQT

SEQ ID NO: 179828 - protein, 13 aa, Homo sapiens
  CDR3 for beta chain variable domain of TCR clone 89914 (TRBV4-1, TRBJ2-2)
CASSQENTGELFF

SEQ ID NO: 179829 - protein, 13 aa, Homo sapiens
  CDR3 for alpha chain variable domain of TCR clone 89915 (TRAV13-2, TRAJ48)
CAEMDFGNEKLSF

SEQ ID NO: 179830 - protein, 15 aa, Homo sapiens
  CDR3 for beta chain variable domain of TCR clone 89915 (TRBV7-9, TRBJ1-6)
RASSSPGRGNSPLHF

SEQ ID NO: 179831 - protein, 11 aa, Homo sapiens
  CDR3 for alpha chain variable domain of TCR clone 89916 (TRAV13-1, TRAJ49)
CACVGGNQLYF

SEQ ID NO: 179832 - protein, 16 aa, Homo sapiens
  CDR3 for beta chain variable domain of TCR clone 89916 (TRBV11-2, TRBJ2-2)
CASSLRTGNLIGELFF

SEQ ID NO: 179833 - protein, 15 aa, Homo sapiens
  CDR3 for alpha chain variable domain of TCR clone 89917 (TRAV12-3, TRAJ6)
CAMSATTGVSYIPTF

SEQ ID NO: 179834 - protein, 19 aa, Homo sapiens
  CDR3 for beta chain variable domain of TCR clone 89917 (TRBV25-1, TRBJ2-2)
CAILVYRVDRGRKTGELFF

SEQ ID NO: 179835 - protein, 12 aa, Homo sapiens
  CDR3 for alpha chain variable domain of TCR clone 89918 (TRAV27, TRAJ9)
CAGESGGFKTIF

SEQ ID NO: 179836 - protein, 13 aa, Homo sapiens
  CDR3 for beta chain variable domain of TCR clone 89918 (TRBV20-1, TRBJ2-2)
CSALSGGAGELFF

SEQ ID NO: 179837 - protein, 22 aa, Homo sapiens
  CDR3 for alpha chain variable domain of TCR clone 89919 (TRAV27, TRAJ41)
CAVRTQIPDIQNPDPAVSQLRD

SEQ ID NO: 179838 - protein, 16 aa, Homo sapiens
  CDR3 for beta chain variable domain of TCR clone 89919 (TRBV5-1, TRBJ2-3)
CASSLGLAVYTDTQYF

SEQ ID NO: 179839 - protein, 12 aa, Homo sapiens
  CDR3 for alpha chain variable domain of TCR clone 89920 (TRAV8-3, TRAJ26)
CAGDNYDQNFVF

SEQ ID NO: 179840 - protein, 15 aa, Homo sapiens
  CDR3 for beta chain variable domain of TCR clone 89920 (TRBV20-1, TRBJ2-3)
CSARRGEAITDTQYF

SEQ ID NO: 179841 - protein, 17 aa, Homo sapiens
  CDR3 for alpha chain variable domain of TCR clone 89921 (TRAV8-6, TRAJ58)
CAVSSWVGETSGSRLTF

SEQ ID NO: 179842 - protein, 14 aa, Homo sapiens
  CDR3 for beta chain variable domain of TCR clone 89921 (TRBV4-2, TRBJ2-1)
CAIGLDRAYNEQFF

SEQ ID NO: 179843 - protein, 12 aa, Homo sapiens
  CDR3 for alpha chain variable domain of TCR clone 89922 (TRAV8-3, TRAJ41)
CAVALSGYELNF

SEQ ID NO: 179844 - protein, 18 aa, Homo sapiens
  CDR3 for beta chain variable domain of TCR clone 89922 (TRBV20-1, TRBJ2-6)
CSAETTPTHGSGANVLTF

SEQ ID NO: 179845 - protein, 12 aa, Homo sapiens
  CDR3 for alpha chain variable domain of TCR clone 89923 (TRAV13-1, TRAJ21)
CAAKEGFNKFYF

SEQ ID NO: 179846 - protein, 13 aa, Homo sapiens
  CDR3 for beta chain variable domain of TCR clone 89923 (TRBV12-4, TRBJ1-2)
CASSLRQGKGYTF

SEQ ID NO: 179847 - protein, 14 aa, Homo sapiens
  CDR3 for alpha chain variable domain of TCR clone 89924 (TRAV1-2, TRAJ16)
CAVNRFSDGQKLLF

SEQ ID NO: 179848 - protein, 15 aa, Homo sapiens
  CDR3 for beta chain variable domain of TCR clone 89924 (TRBV7-3, TRBJ2-7)
CASSVRLAGSYEQYF

SEQ ID NO: 179849 - protein, 14 aa, Homo sapiens
  CDR3 for alpha chain variable domain of TCR clone 89925 (TRAV8-3, TRAJ35)
CAVVPQGFGNVLHG

SEQ ID NO: 179850 - protein, 15 aa, Homo sapiens
  CDR3 for beta chain variable domain of TCR clone 89925 (TRBV6-1, TRBJ2-2)
CASSAGQGYTGELFF

SEQ ID NO: 179851 - protein, 13 aa, Homo sapiens
  CDR3 for alpha chain variable domain of TCR clone 89926 (TRAV8-6, TRAJ21)
CAVSPSSLNKFYF

SEQ ID NO: 179852 - protein, 14 aa, Homo sapiens
  CDR3 for beta chain variable domain of TCR clone 89926 (TRBV7-9, TRBJ2-5)
CASSLETAQETQYF

SEQ ID NO: 179853 - protein, 14 aa, Homo sapiens
  CDR3 for alpha chain variable domain of TCR clone 89927 (TRAV2, TRAJ9)
CAVEDRSGGFKTIF

SEQ ID NO: 179854 - protein, 15 aa, Homo sapiens
  CDR3 for beta chain variable domain of TCR clone 89927 (TRBV7-2, TRBJ1-2)
CASSLVSGGDYGYTF

SEQ ID NO: 179855 - protein, 14 aa, Homo sapiens
  CDR3 for alpha chain variable domain of TCR clone 89928 (TRAV1-2, TRAJ16)
CAVNRFSDGQKLLF

SEQ ID NO: 179856 - protein, 15 aa, Homo sapiens
  CDR3 for beta chain variable domain of TCR clone 89928 (TRBV7-9, TRBJ1-1)
CASSPELGGGTEAFF

SEQ ID NO: 179857 - protein, 14 aa, Homo sapiens
  CDR3 for alpha chain variable domain of TCR clone 89929 (TRAV3, TRAJ28)
CAVRRGAGSCQLTF

SEQ ID NO: 179858 - protein, 16 aa, Homo sapiens
  CDR3 for beta chain variable domain of TCR clone 89929 (TRBV4-1, TRBJ2-7)
CASSQEWTSGPLEQYF

SEQ ID NO: 179859 - protein, 11 aa, Homo sapiens
  CDR3 for alpha chain variable domain of TCR clone 89930 (TRAV13-1, TRAJ23)
CAASSRGKLIF

SEQ ID NO: 179860 - protein, 12 aa, Homo sapiens
  CDR3 for beta chain variable domain of TCR clone 89930 (TRBV11-2, TRBJ2-2)
CASSLGGGELFF

SEQ ID NO: 179861 - protein, 14 aa, Homo sapiens
  CDR3 for alpha chain variable domain of TCR clone 89931 (TRAV8-4, TRAJ48)
CAVSETFGNEKLTF

SEQ ID NO: 179862 - protein, 14 aa, Homo sapiens
  CDR3 for beta chain variable domain of TCR clone 89931 (TRBV13, TRBJ2-7)
RASSLKGASYEQYF

SEQ ID NO: 179863 - protein, 13 aa, Homo sapiens
  CDR3 for alpha chain variable domain of TCR clone 89932 (TRAV12-3, TRAJ53)
CAMRGGSNYKLTF

SEQ ID NO: 179864 - protein, 15 aa, Homo sapiens
  CDR3 for beta chain variable domain of TCR clone 89932 (TRBV2, TRBJ2-1)
CATQAGLVMIGEQFF

SEQ ID NO: 179865 - protein, 17 aa, Homo sapiens
  CDR3 for alpha chain variable domain of TCR clone 89933 (TRAV3, TRAJ6)
CAVRDGPRAGGSYIPTF

SEQ ID NO: 179866 - protein, 16 aa, Homo sapiens
  CDR3 for beta chain variable domain of TCR clone 89933 (TRBV7-8, TRBJ2-3)
CASSTGGQRETDTQYF

SEQ ID NO: 179867 - protein, 14 aa, Homo sapiens
  CDR3 for alpha chain variable domain of TCR clone 89934 (TRAV12-2, TRAJ29)
CAVRRNSGNTPLGF

SEQ ID NO: 179868 - protein, 13 aa, Homo sapiens
  CDR3 for beta chain variable domain of TCR clone 89934 (TRBV12-4, TRBJ2-1)
CASSHYTDNEQFF

SEQ ID NO: 179869 - protein, 15 aa, Homo sapiens
  CDR3 for alpha chain variable domain of TCR clone 89935 (TRAV21, TRAJ32)
CAAAPSGGATNKLIF

SEQ ID NO: 179870 - protein, 17 aa, Homo sapiens
  CDR3 for beta chain variable domain of TCR clone 89935 (TRBV18, TRBJ2-3)
CASSPFGDGGFTDTQYF

SEQ ID NO: 179871 - protein, 14 aa, Homo sapiens
  CDR3 for alpha chain variable domain of TCR clone 89936 (TRAV13-1, TRAJ12)
CAASYMDSSYKLIF

SEQ ID NO: 179872 - protein, 13 aa, Homo sapiens
  CDR3 for beta chain variable domain of TCR clone 89936 (TRBV2, TRBJ2-5)
CASADGIQETQYF

SEQ ID NO: 179873 - protein, 12 aa, Homo sapiens
  CDR3 for alpha chain variable domain of TCR clone 89937 (TRAV13-2, TRAJ23)
CAERHRGGKLIF

SEQ ID NO: 179874 - protein, 15 aa, Homo sapiens
  CDR3 for beta chain variable domain of TCR clone 89937 (TRBV20-1, TRBJ1-4)
QCSGTGLINYEKLFF

SEQ ID NO: 179875 - protein, 16 aa, Homo sapiens
  CDR3 for alpha chain variable domain of TCR clone 89938 (TRAV12-2, TRAJ32)
CAVNLGQGGATNKLIF

SEQ ID NO: 179876 - protein, 13 aa, Homo sapiens
  CDR3 for beta chain variable domain of TCR clone 89938 (TRBV12-4, TRBJ1-1)
CASSPGTGFEAFF

SEQ ID NO: 179877 - protein, 11 aa, Homo sapiens
  CDR3 for alpha chain variable domain of TCR clone 89939 (TRAV17, TRAJ9)
CATTGGFKTIF

SEQ ID NO: 179878 - protein, 17 aa, Homo sapiens
  CDR3 for beta chain variable domain of TCR clone 89939 (TRBV13, TRBJ2-3)
CASSLSRVAGGRNTQYF

SEQ ID NO: 179879 - protein, 14 aa, Homo sapiens
  CDR3 for alpha chain variable domain of TCR clone 89940 (TRAV1-2, TRAJ8)
CAVREDTGFQKLVF

SEQ ID NO: 179880 - protein, 15 aa, Homo sapiens
  CDR3 for beta chain variable domain of TCR clone 89940 (TRBV28, TRBJ2-5)
CASSPGQGSIETQYF

SEQ ID NO: 179881 - protein, 12 aa, Homo sapiens
  CDR3 for alpha chain variable domain of TCR clone 89941 (TRAV8-3, TRAJ40)
CAVTSGTYNYIF

SEQ ID NO: 179882 - protein, 14 aa, Homo sapiens
  CDR3 for beta chain variable domain of TCR clone 89941 (TRBV12-4, TRBJ2-3)
CASSGQGSTDTQYF

SEQ ID NO: 179883 - protein, 15 aa, Homo sapiens
  CDR3 for alpha chain variable domain of TCR clone 89942 (TRAV17, TRAJ6)
CSTDLPSGGSYIPTF

SEQ ID NO: 179884 - protein, 16 aa, Homo sapiens
  CDR3 for beta chain variable domain of TCR clone 89942 (TRBV4-1, TRBJ2-7)
CASSQDPTGYSYEQYF

SEQ ID NO: 179885 - protein, 15 aa, Homo sapiens
  CDR3 for alpha chain variable domain of TCR clone 89943 (TRAV12-2, TRAJ56)
CAVNPFTGVNSKLTF

SEQ ID NO: 179886 - protein, 13 aa, Homo sapiens
  CDR3 for beta chain variable domain of TCR clone 89943 (TRBV20-1, TRBJ1-2)
CSARDRVYGGYTF

SEQ ID NO: 179887 - protein, 14 aa, Homo sapiens
  CDR3 for alpha chain variable domain of TCR clone 89944 (TRAV1-2, TRAJ8)
CAVREDTGFEKLVF

SEQ ID NO: 179888 - protein, 13 aa, Homo sapiens
  CDR3 for beta chain variable domain of TCR clone 89944 (TRBV7-3, TRBJ2-1)
CASSLDSYNEQFF

SEQ ID NO: 179889 - protein, 12 aa, Homo sapiens
  CDR3 for alpha chain variable domain of TCR clone 89945 (TRAV2, TRAJ9)
CAGGAGGFKTIF

SEQ ID NO: 179890 - protein, 16 aa, Homo sapiens
  CDR3 for beta chain variable domain of TCR clone 89945 (TRBV13, TRBJ2-2)
CASSPRTGEHTGELFF

SEQ ID NO: 179891 - protein, 14 aa, Homo sapiens
  CDR3 for alpha chain variable domain of TCR clone 89946 (TRAV30, TRAJ45)
CGTSTGGGADGLTF

SEQ ID NO: 179892 - protein, 14 aa, Homo sapiens
  CDR3 for beta chain variable domain of TCR clone 89946 (TRBV19, TRBJ2-2)
CASTVTANTGELFF

SEQ ID NO: 179893 - protein, 17 aa, Homo sapiens
  CDR3 for alpha chain variable domain of TCR clone 89947 (TRAV23/DV6, TRAJ58)
CAARLLRGETSGSRLTF

SEQ ID NO: 179894 - protein, 20 aa, Homo sapiens
  CDR3 for beta chain variable domain of TCR clone 89947 (TRBV7-8, TRBJ2-2)
CASSHLFPGPTIHITGELFF

SEQ ID NO: 179895 - protein, 15 aa, Homo sapiens
  CDR3 for alpha chain variable domain of TCR clone 89948 (TRAV12-2, TRAJ52)
CAVTSGGTSYGKLTF

SEQ ID NO: 179896 - protein, 13 aa, Homo sapiens
  CDR3 for beta chain variable domain of TCR clone 89948 (TRBV7-2, TRBJ2-2)
CASSLAVTGELFF

SEQ ID NO: 179897 - protein, 14 aa, Homo sapiens
  CDR3 for alpha chain variable domain of TCR clone 89949 (TRAV3, TRAJ40)
CAVRDRRGNYKYIF

SEQ ID NO: 179898 - protein, 15 aa, Homo sapiens
  CDR3 for beta chain variable domain of TCR clone 89949 (TRBV11-1, TRBJ1-3)
CASTDPRAFGNTIYF

SEQ ID NO: 179899 - protein, 13 aa, Homo sapiens
  CDR3 for alpha chain variable domain of TCR clone 89950 (TRAV38-2/DV8, TRAJ34)
CAYRTWNTDKLIF

SEQ ID NO: 179900 - protein, 15 aa, Homo sapiens
  CDR3 for beta chain variable domain of TCR clone 89950 (TRBV7-9, TRBJ1-5)
CASSQGHQPNQPQHF

SEQ ID NO: 179901 - protein, 16 aa, Homo sapiens
  CDR3 for alpha chain variable domain of TCR clone 89951 (TRAV13-1, TRAJ52)
CAAFAKAGTSYGKLTF

SEQ ID NO: 179902 - protein, 16 aa, Homo sapiens
  CDR3 for beta chain variable domain of TCR clone 89951 (TRBV12-4, TRBJ2-5)
CASSFFVRGRQETQYF

SEQ ID NO: 179903 - protein, 13 aa, Homo sapiens
  CDR3 for alpha chain variable domain of TCR clone 89952 (TRAV35, TRAJ36)
CAGPRMGANNLFF

SEQ ID NO: 179904 - protein, 15 aa, Homo sapiens
  CDR3 for beta chain variable domain of TCR clone 89952 (TRBV28, TRBJ2-5)
CASSPPWSYQETQYF

SEQ ID NO: 179905 - protein, 12 aa, Homo sapiens
  CDR3 for alpha chain variable domain of TCR clone 89953 (TRAV12-3, TRAJ17)
CAMPLTGNKLTF

SEQ ID NO: 179906 - protein, 12 aa, Homo sapiens
  CDR3 for beta chain variable domain of TCR clone 89953 (TRBV2, TRBJ2-1)
CAYGPPGNEQFF

SEQ ID NO: 179907 - protein, 14 aa, Homo sapiens
  CDR3 for alpha chain variable domain of TCR clone 89954 (TRAV10, TRAJ36)
CVMKYEGGANNLFF

SEQ ID NO: 179908 - protein, 16 aa, Homo sapiens
  CDR3 for beta chain variable domain of TCR clone 89954 (TRBV7-3, TRBJ2-2)
CASSLKRGTLSGELFF

SEQ ID NO: 179909 - protein, 12 aa, Homo sapiens
  CDR3 for alpha chain variable domain of TCR clone 89955 (TRAV13-1, TRAJ49)
CAAPNTGYQFYF

SEQ ID NO: 179910 - protein, 17 aa, Homo sapiens
  CDR3 for beta chain variable domain of TCR clone 89955 (TRBV25-1, TRBJ2-7)
CASSDARVVFSSYEQYF

SEQ ID NO: 179911 - protein, 14 aa, Homo sapiens
  CDR3 for alpha chain variable domain of TCR clone 89956 (TRAV12-2, TRAJ17)
CAVLIKAAGNKLTF

SEQ ID NO: 179912 - protein, 17 aa, Homo sapiens
  CDR3 for beta chain variable domain of TCR clone 89956 (TRBV20-1, TRBJ2-2)
CSASGSGQGGLTGELFF

SEQ ID NO: 179913 - protein, 15 aa, Homo sapiens
  CDR3 for alpha chain variable domain of TCR clone 89957 (TRAV38-1, TRAJ37)
CAFIHGYGNTGKLIF

SEQ ID NO: 179914 - protein, 12 aa, Homo sapiens
  CDR3 for beta chain variable domain of TCR clone 89957 (TRBV7-9, TRBJ2-7)
CASSFGSYEQYF

SEQ ID NO: 179915 - protein, 14 aa, Homo sapiens
  CDR3 for alpha chain variable domain of TCR clone 89958 (TRAV27, TRAJ15)
CAGFDNQAGTALIF

SEQ ID NO: 179916 - protein, 11 aa, Homo sapiens
  CDR3 for beta chain variable domain of TCR clone 89958 (TRBV29-1, TRBJ1-1)
CSVEVGTRTFV

SEQ ID NO: 179917 - protein, 14 aa, Homo sapiens
  CDR3 for alpha chain variable domain of TCR clone 89959 (TRAV13-2, TRAJ27)
CAEMQPTNAGKSTF

SEQ ID NO: 179918 - protein, 12 aa, Homo sapiens
  CDR3 for beta chain variable domain of TCR clone 89959 (TRBV7-8, TRBJ2-7)
CASSLGDREQYF

SEQ ID NO: 179919 - protein, 16 aa, Homo sapiens
  CDR3 for alpha chain variable domain of TCR clone 89960 (TRAV20, TRAJ22)
CAVQASSSGSARQLTF

SEQ ID NO: 179920 - protein, 13 aa, Homo sapiens
  CDR3 for beta chain variable domain of TCR clone 89960 (TRBV7-2, TRBJ2-5)
CASSQTSVETQNF

SEQ ID NO: 179921 - protein, 15 aa, Homo sapiens
  CDR3 for alpha chain variable domain of TCR clone 89961 (TRAV19, TRAJ9)
CALSLPDTGGFKTIF

SEQ ID NO: 179922 - protein, 16 aa, Homo sapiens
  CDR3 for beta chain variable domain of TCR clone 89961 (TRBV2, TRBJ2-1)
CASRSPAGGKYNEQFF

SEQ ID NO: 179923 - protein, 14 aa, Homo sapiens
  CDR3 for alpha chain variable domain of TCR clone 89962 (TRAV13-2, TRAJ11)
CAETGNSGYSTLTF

SEQ ID NO: 179924 - protein, 13 aa, Homo sapiens
  CDR3 for beta chain variable domain of TCR clone 89962 (TRBV7-9, TRBJ1-2)
CASSLKQNYGYTF

SEQ ID NO: 179925 - protein, 16 aa, Homo sapiens
  CDR3 for alpha chain variable domain of TCR clone 89963 (TRAV12-3, TRAJ53)
CAMSPGSGGSNYKLTF

SEQ ID NO: 179926 - protein, 11 aa, Homo sapiens
  CDR3 for beta chain variable domain of TCR clone 89963 (TRBV6-3, TRBJ2-3)
CATGQADTQYF

SEQ ID NO: 179927 - protein, 15 aa, Homo sapiens
  CDR3 for alpha chain variable domain of TCR clone 89964 (TRAV3, TRAJ8)
CAVRDNETGFQKLVF

SEQ ID NO: 179928 - protein, 20 aa, Homo sapiens
  CDR3 for beta chain variable domain of TCR clone 89964 (TRBV7-8, TRBJ2-2)
CASSHLFPGPTIHITGELFF

SEQ ID NO: 179929 - protein, 12 aa, Homo sapiens
  CDR3 for alpha chain variable domain of TCR clone 89965 (TRAV25, TRAJ11)
CAGYSGYRTLTF

SEQ ID NO: 179930 - protein, 13 aa, Homo sapiens
  CDR3 for beta chain variable domain of TCR clone 89965 (TRBV7-9, TRBJ1-2)
CASSLKQNYGYTF

SEQ ID NO: 179931 - protein, 13 aa, Homo sapiens
  CDR3 for alpha chain variable domain of TCR clone 89966 (TRAV21, TRAJ27)
CAALNTNAGKSTF

SEQ ID NO: 179932 - protein, 15 aa, Homo sapiens
  CDR3 for beta chain variable domain of TCR clone 89966 (TRBV28, TRBJ2-5)
CASSPPWSYQETQYF

SEQ ID NO: 179933 - protein, 14 aa, Homo sapiens
  CDR3 for alpha chain variable domain of TCR clone 89967 (TRAV12-2, TRAJ40)
CAVKIPSGTYKYIF

SEQ ID NO: 179934 - protein, 16 aa, Homo sapiens
  CDR3 for beta chain variable domain of TCR clone 89967 (TRBV4-1, TRBJ2-7)
CASSRGDILNSYEQYF

SEQ ID NO: 179935 - protein, 13 aa, Homo sapiens
  CDR3 for alpha chain variable domain of TCR clone 89968 (TRAV26-1, TRAJ30)
YIVNMNRDDKIIF

SEQ ID NO: 179936 - protein, 16 aa, Homo sapiens
  CDR3 for beta chain variable domain of TCR clone 89968 (TRBV16, TRBJ2-7)
CASSRPAGGSSYEQYF

SEQ ID NO: 179937 - protein, 16 aa, Homo sapiens
  CDR3 for alpha chain variable domain of TCR clone 89969 (TRAV3, TRAJ13)
CSVRDPNSGGYQKVTF

SEQ ID NO: 179938 - protein, 13 aa, Homo sapiens
  CDR3 for beta chain variable domain of TCR clone 89969 (TRBV7-9, TRBJ2-7)
CASSLQGSYEQYF

SEQ ID NO: 179939 - protein, 12 aa, Homo sapiens
  CDR3 for alpha chain variable domain of TCR clone 89970 (TRAV16, TRAJ56)
CAPTGANSKLTF

SEQ ID NO: 179940 - protein, 15 aa, Homo sapiens
  CDR3 for beta chain variable domain of TCR clone 89970 (TRBV5-1, TRBJ2-5)
CASSFKGGDQETQYF

SEQ ID NO: 179941 - protein, 10 aa, Homo sapiens
  CDR3 for alpha chain variable domain of TCR clone 89971 (TRAV2, TRAJ34)
CAVVNDKLIF

SEQ ID NO: 179942 - protein, 16 aa, Homo sapiens
  CDR3 for beta chain variable domain of TCR clone 89971 (TRBV5-1, TRBJ2-3)
CASSLGLAVCTDTQYF

SEQ ID NO: 179943 - protein, 13 aa, Homo sapiens
  CDR3 for alpha chain variable domain of TCR clone 89972 (TRAV36/DV7, TRAJ49)
CALEANTGNQFYF

SEQ ID NO: 179944 - protein, 13 aa, Homo sapiens
  CDR3 for beta chain variable domain of TCR clone 89972 (TRBV10-3, TRBJ2-7)
CASKLAVNYEQYF

SEQ ID NO: 179945 - protein, 16 aa, Homo sapiens
  CDR3 for alpha chain variable domain of TCR clone 89973 (TRAV3, TRAJ21)
CAVRDIERGNFNKFYF

SEQ ID NO: 179946 - protein, 16 aa, Homo sapiens
  CDR3 for beta chain variable domain of TCR clone 89973 (TRBV12-4, TRBJ1-5)
CASSRPVGWSNQPQHF

SEQ ID NO: 179947 - protein, 12 aa, Homo sapiens
  CDR3 for alpha chain variable domain of TCR clone 89974 (TRAV27, TRAJ9)
CAGESGGFKTIF

SEQ ID NO: 179948 - protein, 12 aa, Homo sapiens
  CDR3 for beta chain variable domain of TCR clone 89974 (TRBV7-8, TRBJ2-7)
CASSLGDREQYF

SEQ ID NO: 179949 - protein, 14 aa, Homo sapiens
  CDR3 for alpha chain variable domain of TCR clone 89975 (TRAV13-1, TRAJ35)
CAASKGGFGNVLHC

SEQ ID NO: 179950 - protein, 15 aa, Homo sapiens
  CDR3 for beta chain variable domain of TCR clone 89975 (TRBV6-6, TRBJ2-5)
CASSPGGGLEETQYF

SEQ ID NO: 179951 - protein, 11 aa, Homo sapiens
  CDR3 for alpha chain variable domain of TCR clone 89976 (TRAV12-3, TRAJ27)
CAMANAGKSTF

SEQ ID NO: 179952 - protein, 13 aa, Homo sapiens
  CDR3 for beta chain variable domain of TCR clone 89976 (TRBV12-5, TRBJ2-3)
CASGDRQSDTQYF

SEQ ID NO: 179953 - protein, 14 aa, Homo sapiens
  CDR3 for alpha chain variable domain of TCR clone 89977 (TRAV12-2, TRAJ53)
CAVKGGGSNYKLTS

SEQ ID NO: 179954 - protein, 14 aa, Homo sapiens
  CDR3 for beta chain variable domain of TCR clone 89977 (TRBV19, TRBJ2-1)
CASPTFVLSGEQFF

SEQ ID NO: 179955 - protein, 12 aa, Homo sapiens
  CDR3 for alpha chain variable domain of TCR clone 89978 (TRAV1-2, TRAJ26)
CAVRYYGQNFVF

SEQ ID NO: 179956 - protein, 14 aa, Homo sapiens
  CDR3 for beta chain variable domain of TCR clone 89978 (TRBV11-1, TRBJ2-7)
CASSLRQGSYEQYF

SEQ ID NO: 179957 - protein, 16 aa, Homo sapiens
  CDR3 for alpha chain variable domain of TCR clone 89979 (TRAV3, TRAJ10)
CAVRDMRAGGGNKLTF

SEQ ID NO: 179958 - protein, 12 aa, Homo sapiens
  CDR3 for beta chain variable domain of TCR clone 89979 (TRBV19, TRBJ1-5)
CASSIAQQPQHF

SEQ ID NO: 179959 - protein, 14 aa, Homo sapiens
  CDR3 for alpha chain variable domain of TCR clone 89980 (TRAV13-1, TRAJ35)
CAASKGGFGNVLHC

SEQ ID NO: 179960 - protein, 14 aa, Homo sapiens
  CDR3 for beta chain variable domain of TCR clone 89980 (TRBV19, TRBJ2-7)
CASSVDSESYEQYF

SEQ ID NO: 179961 - protein, 11 aa, Homo sapiens
  CDR3 for alpha chain variable domain of TCR clone 89981 (TRAV2, TRAJ13)
CASGGYQKVTF

SEQ ID NO: 179962 - protein, 15 aa, Homo sapiens
  CDR3 for beta chain variable domain of TCR clone 89981 (TRBV7-9, TRBJ2-7)
CASSPGGGLTYEQYF

SEQ ID NO: 179963 - protein, 16 aa, Homo sapiens
  CDR3 for alpha chain variable domain of TCR clone 89982 (TRAV35, TRAJ37)
CAGRSYVASNTGKLIF

SEQ ID NO: 179964 - protein, 13 aa, Homo sapiens
  CDR3 for beta chain variable domain of TCR clone 89982 (TRBV2, TRBJ1-2)
CASSVRGNYGYTF

SEQ ID NO: 179965 - protein, 14 aa, Homo sapiens
  CDR3 for alpha chain variable domain of TCR clone 89983 (TRAV13-2, TRAJ45)
CAEMSGGGADGLTF

SEQ ID NO: 179966 - protein, 14 aa, Homo sapiens
  CDR3 for beta chain variable domain of TCR clone 89983 (TRBV2, TRBJ1-4)
CASNQGGLSLGLVF

SEQ ID NO: 179967 - protein, 14 aa, Homo sapiens
  CDR3 for alpha chain variable domain of TCR clone 89984 (TRAV12-2, TRAJ13)
CAVKKTGGYKKVTF

SEQ ID NO: 179968 - protein, 15 aa, Homo sapiens
  CDR3 for beta chain variable domain of TCR clone 89984 (TRBV28, TRBJ2-5)
CASSPPWSYQETQYF

SEQ ID NO: 179969 - protein, 14 aa, Homo sapiens
  CDR3 for alpha chain variable domain of TCR clone 89985 (TRAV8-4, TRAJ54)
CAVSEVLVAQKLVF

SEQ ID NO: 179970 - protein, 13 aa, Homo sapiens
  CDR3 for beta chain variable domain of TCR clone 89985 (TRBV27, TRBJ2-7)
CASSFVSSYEQYF

SEQ ID NO: 179971 - protein, 13 aa, Homo sapiens
  CDR3 for alpha chain variable domain of TCR clone 89986 (TRAV12-1, TRAJ40)
CVVPTSGTYKSIF

SEQ ID NO: 179972 - protein, 18 aa, Homo sapiens
  CDR3 for beta chain variable domain of TCR clone 89986 (TRBV7-6, TRBJ2-1)
CASSPRTSGMSSYNEQFF

SEQ ID NO: 179973 - protein, 12 aa, Homo sapiens
  CDR3 for alpha chain variable domain of TCR clone 89987 (TRAV21, TRAJ11)
CAATSGYSTLTF

SEQ ID NO: 179974 - protein, 11 aa, Homo sapiens
  CDR3 for beta chain variable domain of TCR clone 89987 (TRBV11-2, TRBJ2-2)
CASSLPGELFF

SEQ ID NO: 179975 - protein, 12 aa, Homo sapiens
  CDR3 for alpha chain variable domain of TCR clone 89988 (TRAV21, TRAJ37)
CAVRGNTGKLIF

SEQ ID NO: 179976 - protein, 14 aa, Homo sapiens
  CDR3 for beta chain variable domain of TCR clone 89988 (TRBV19, TRBJ2-1)
CASEVTGDRNEQFF

SEQ ID NO: 179977 - protein, 12 aa, Homo sapiens
  CDR3 for alpha chain variable domain of TCR clone 89989 (TRAV12-1, TRAJ40)
CVVYSRTYKYIF

SEQ ID NO: 179978 - protein, 17 aa, Homo sapiens
  CDR3 for beta chain variable domain of TCR clone 89989 (TRBV11-3, TRBJ1-5)
CASSPLTGLRGNQPQHF

SEQ ID NO: 179979 - protein, 13 aa, Homo sapiens
  CDR3 for alpha chain variable domain of TCR clone 89990 (TRAV39, TRAJ41)
CAVISNSGYALNF

SEQ ID NO: 179980 - protein, 14 aa, Homo sapiens
  CDR3 for beta chain variable domain of TCR clone 89990 (TRBV19, TRBJ2-1)
CASPTFVLSGEQFF

SEQ ID NO: 179981 - protein, 15 aa, Homo sapiens
  CDR3 for alpha chain variable domain of TCR clone 89991 (TRAV26-2, TRAJ54)
CILRDVGQGAQKLVF

SEQ ID NO: 179982 - protein, 13 aa, Homo sapiens
  CDR3 for beta chain variable domain of TCR clone 89991 (TRBV7-9, TRBJ1-1)
CASSLAGATEAFF

SEQ ID NO: 179983 - protein, 13 aa, Homo sapiens
  CDR3 for alpha chain variable domain of TCR clone 89992 (TRAV20, TRAJ37)
CAGCSSNTGKLIF

SEQ ID NO: 179984 - protein, 15 aa, Homo sapiens
  CDR3 for beta chain variable domain of TCR clone 89992 (TRBV6-5, TRBJ2-1)
CASSYDAGAGNEQFF

SEQ ID NO: 179985 - protein, 16 aa, Homo sapiens
  CDR3 for alpha chain variable domain of TCR clone 89993 (TRAV26-1, TRAJ52)
CIVSNAGGTSYGKLTF

SEQ ID NO: 179986 - protein, 15 aa, Homo sapiens
  CDR3 for beta chain variable domain of TCR clone 89993 (TRBV7-3, TRBJ2-1)
CASSPTGGGEAEQFF

SEQ ID NO: 179987 - protein, 12 aa, Homo sapiens
  CDR3 for alpha chain variable domain of TCR clone 89994 (TRAV17, TRAJ29)
CLPEFRKHTSCL

SEQ ID NO: 179988 - protein, 14 aa, Homo sapiens
  CDR3 for beta chain variable domain of TCR clone 89994 (TRBV4-1, TRBJ2-2)
CASSQAVNTGELFF

SEQ ID NO: 179989 - protein, 12 aa, Homo sapiens
  CDR3 for alpha chain variable domain of TCR clone 89995 (TRAV13-1, TRAJ21)
CAAKEGSNKFYF

SEQ ID NO: 179990 - protein, 14 aa, Homo sapiens
  CDR3 for beta chain variable domain of TCR clone 89995 (TRBV23-1, TRBJ2-5)
CASSFLRSQETQYF

SEQ ID NO: 179991 - protein, 14 aa, Homo sapiens
  CDR3 for alpha chain variable domain of TCR clone 89996 (TRAV26-1, TRAJ38)
CIADNAGNNRKLIL

SEQ ID NO: 179992 - protein, 13 aa, Homo sapiens
  CDR3 for beta chain variable domain of TCR clone 89996 (TRBV2, TRBJ1-5)
CATAGPGNQPQHF

SEQ ID NO: 179993 - protein, 14 aa, Homo sapiens
  CDR3 for alpha chain variable domain of TCR clone 89997 (TRAV8-6, TRAJ5)
CAVSVDAGRRALTF

SEQ ID NO: 179994 - protein, 14 aa, Homo sapiens
  CDR3 for beta chain variable domain of TCR clone 89997 (TRBV6-1, TRBJ1-3)
CASVQGGGGNTIYF

SEQ ID NO: 179995 - protein, 14 aa, Homo sapiens
  CDR3 for alpha chain variable domain of TCR clone 89998 (TRAV8-4, TRAJ13)
CAVTLSGGYQKVTF

SEQ ID NO: 179996 - protein, 14 aa, Homo sapiens
  CDR3 for beta chain variable domain of TCR clone 89998 (TRBV7-2, TRBJ1-2)
CVSSQTGSTYGYTF

SEQ ID NO: 179997 - protein, 15 aa, Homo sapiens
  CDR3 for alpha chain variable domain of TCR clone 89999 (TRAV21, TRAJ53)
CATLNSGGSNYKLTF

SEQ ID NO: 179998 - protein, 17 aa, Homo sapiens
  CDR3 for beta chain variable domain of TCR clone 89999 (TRBV28, TRBJ2-5)
CASSTPEGDALQETQYF

SEQ ID NO: 179999 - protein, 15 aa, Homo sapiens
  CDR3 for alpha chain variable domain of TCR clone 90000 (TRAV3, TRAJ16)
CAVRDGFSDGQKLLF

SEQ ID NO: 180000 - protein, 11 aa, Homo sapiens
  CDR3 for beta chain variable domain of TCR clone 90000 (TRBV11-2, TRBJ2-2)
CASSLPGELFF

SEQ ID NO: 180001 - protein, 16 aa, Homo sapiens
  CDR3 for alpha chain variable domain of TCR clone 90001 (TRAV27, TRAJ45)
CPPRGRRGGGADGLTL

SEQ ID NO: 180002 - protein, 16 aa, Homo sapiens
  CDR3 for beta chain variable domain of TCR clone 90001 (TRBV7-2, TRBJ1-3)
CASSRLEASSGNTIYF

SEQ ID NO: 180003 - protein, 14 aa, Homo sapiens
  CDR3 for alpha chain variable domain of TCR clone 90002 (TRAV8-4, TRAJ13)
CAVTLSGGYLKVTF

SEQ ID NO: 180004 - protein, 14 aa, Homo sapiens
  CDR3 for beta chain variable domain of TCR clone 90002 (TRBV7-2, TRBJ1-2)
CASSQTGSTYGYTF

SEQ ID NO: 180005 - protein, 14 aa, Homo sapiens
  CDR3 for alpha chain variable domain of TCR clone 90003 (TRAV3, TRAJ27)
CAVRDDPNAGKSTF

SEQ ID NO: 180006 - protein, 15 aa, Homo sapiens
  CDR3 for beta chain variable domain of TCR clone 90003 (TRBV7-7, TRBJ2-2)
CATSKLAKNTGELFF

SEQ ID NO: 180007 - protein, 15 aa, Homo sapiens
  CDR3 for alpha chain variable domain of TCR clone 90004 (TRAV35, TRAJ41)
CAGQLFSNSGYALNL

SEQ ID NO: 180008 - protein, 14 aa, Homo sapiens
  CDR3 for beta chain variable domain of TCR clone 90004 (TRBV7-2, TRBJ1-2)
CASSRGGTNYGYTF

SEQ ID NO: 180009 - protein, 17 aa, Homo sapiens
  CDR3 for alpha chain variable domain of TCR clone 90005 (TRAV13-1, TRAJ28)
CAASPPYSGAGSYQLTF

SEQ ID NO: 180010 - protein, 12 aa, Homo sapiens
  CDR3 for beta chain variable domain of TCR clone 90005 (TRBV11-2, TRBJ2-2)
CASSRPTGELFF

SEQ ID NO: 180011 - protein, 14 aa, Homo sapiens
  CDR3 for alpha chain variable domain of TCR clone 90006 (TRAV12-2, TRAJ13)
CAVKKTGGYQKVTF

SEQ ID NO: 180012 - protein, 15 aa, Homo sapiens
  CDR3 for beta chain variable domain of TCR clone 90006 (TRBV7-2, TRBJ2-3)
CASSLRGGSTDTQYF

SEQ ID NO: 180013 - protein, 13 aa, Homo sapiens
  CDR3 for alpha chain variable domain of TCR clone 90007 (TRAV35, TRAJ42)
CAGFPGSQGNLIF

SEQ ID NO: 180014 - protein, 13 aa, Homo sapiens
  CDR3 for beta chain variable domain of TCR clone 90007 (TRBV29-1, TRBJ2-1)
CSVEGGRVNEQFS

SEQ ID NO: 180015 - protein, 11 aa, Homo sapiens
  CDR3 for alpha chain variable domain of TCR clone 90008 (TRAV2, TRAJ13)
CASGGYQKVTF

SEQ ID NO: 180016 - protein, 12 aa, Homo sapiens
  CDR3 for beta chain variable domain of TCR clone 90008 (TRBV5-8, TRBJ1-2)
CASSFGVYGYTF

SEQ ID NO: 180017 - protein, 14 aa, Homo sapiens
  CDR3 for alpha chain variable domain of TCR clone 90009 (TRAV1-2, TRAJ16)
CAVNRFSDGQKLLF

SEQ ID NO: 180018 - protein, 14 aa, Homo sapiens
  CDR3 for beta chain variable domain of TCR clone 90009 (TRBV7-2, TRBJ2-3)
CKQLRGGGRDTQYF

SEQ ID NO: 180019 - protein, 14 aa, Homo sapiens
  CDR3 for alpha chain variable domain of TCR clone 90010 (TRAV17, TRAJ15)
CATAPNQAGTALIF

SEQ ID NO: 180020 - protein, 14 aa, Homo sapiens
  CDR3 for beta chain variable domain of TCR clone 90010 (TRBV19, TRBJ2-7)
CASSMGQGAIKQYF

SEQ ID NO: 180021 - protein, 12 aa, Homo sapiens
  CDR3 for alpha chain variable domain of TCR clone 90011 (TRAV27, TRAJ13)
CAGVQGYQKVTF

SEQ ID NO: 180022 - protein, 16 aa, Homo sapiens
  CDR3 for beta chain variable domain of TCR clone 90011 (TRBV28, TRBJ2-1)
CASSSSYSGSLNEQFF

SEQ ID NO: 180023 - protein, 12 aa, Homo sapiens
  CDR3 for alpha chain variable domain of TCR clone 90012 (TRAV26-1, TRAJ43)
CIVRVYNNDMRS

SEQ ID NO: 180024 - protein, 14 aa, Homo sapiens
  CDR3 for beta chain variable domain of TCR clone 90012 (TRBV25-1, TRBJ1-4)
CASSYSGGQEKLFF

SEQ ID NO: 180025 - protein, 14 aa, Homo sapiens
  CDR3 for alpha chain variable domain of TCR clone 90013 (TRAV8-1, TRAJ34)
CAVNPSYNTDKLIF

SEQ ID NO: 180026 - protein, 16 aa, Homo sapiens
  CDR3 for beta chain variable domain of TCR clone 90013 (TRBV7-2, TRBJ2-6)
CASSLAGRSGANVMTF

SEQ ID NO: 180027 - protein, 11 aa, Homo sapiens
  CDR3 for alpha chain variable domain of TCR clone 90014 (TRAV12-2, TRAJ31)
CAVTRWARPMF

SEQ ID NO: 180028 - protein, 15 aa, Homo sapiens
  CDR3 for beta chain variable domain of TCR clone 90014 (TRBV19, TRBJ2-7)
CASSIGGGLVNEQYF

SEQ ID NO: 180029 - protein, 13 aa, Homo sapiens
  CDR3 for alpha chain variable domain of TCR clone 90015 (TRAV2, TRAJ40)
CAVVTSGTYKYIF

SEQ ID NO: 180030 - protein, 16 aa, Homo sapiens
  CDR3 for beta chain variable domain of TCR clone 90015 (TRBV19, TRBJ1-1)
CASSPTRFWPGTEAFF

SEQ ID NO: 180031 - protein, 12 aa, Homo sapiens
  CDR3 for alpha chain variable domain of TCR clone 90016 (TRAV26-1, TRAJ17)
CIVRSAGNKLTF

SEQ ID NO: 180032 - protein, 15 aa, Homo sapiens
  CDR3 for beta chain variable domain of TCR clone 90016 (TRBV7-6, TRBJ1-2)
YASSSGGRGGYGYTF

SEQ ID NO: 180033 - protein, 12 aa, Homo sapiens
  CDR3 for alpha chain variable domain of TCR clone 90017 (TRAV3, TRAJ20)
CAVRDPDYKLSF

SEQ ID NO: 180034 - protein, 14 aa, Homo sapiens
  CDR3 for beta chain variable domain of TCR clone 90017 (TRBV4-1, TRBJ2-2)
CASSQAVNTGELFF

SEQ ID NO: 180035 - protein, 12 aa, Homo sapiens
  CDR3 for alpha chain variable domain of TCR clone 90018 (TRAV16, TRAJ12)
CALEDSSYKLIF

SEQ ID NO: 180036 - protein, 16 aa, Homo sapiens
  CDR3 for beta chain variable domain of TCR clone 90018 (TRBV6-1, TRBJ2-5)
CASSETLDRGAETQYF

SEQ ID NO: 180037 - protein, 13 aa, Homo sapiens
  CDR3 for alpha chain variable domain of TCR clone 90019 (TRAV29/DV5, TRAJ47)
CAASAEYGNKLVF

SEQ ID NO: 180038 - protein, 15 aa, Homo sapiens
  CDR3 for beta chain variable domain of TCR clone 90019 (TRBV7-9, TRBJ1-4)
CASSARTEGNEKLFF

SEQ ID NO: 180039 - protein, 20 aa, Homo sapiens
  CDR3 for alpha chain variable domain of TCR clone 90020 (TRAV12-1, TRAJ42)
SSVIQPPTSVKGGSQGNRIF

SEQ ID NO: 180040 - protein, 18 aa, Homo sapiens
  CDR3 for beta chain variable domain of TCR clone 90020 (TRBV11-2, TRBJ2-3)
CASSLGGASRGAPNTQYF

SEQ ID NO: 180041 - protein, 14 aa, Homo sapiens
  CDR3 for alpha chain variable domain of TCR clone 90021 (TRAV9-2, TRAJ39)
CALYIYNAGNMLTF

SEQ ID NO: 180042 - protein, 16 aa, Homo sapiens
  CDR3 for beta chain variable domain of TCR clone 90021 (TRBV2, TRBJ2-1)
CASSDSPGQPYNEQFF

SEQ ID NO: 180043 - protein, 15 aa, Homo sapiens
  CDR3 for alpha chain variable domain of TCR clone 90022 (TRAV21, TRAJ53)
CATLNSGGSNYKLTF

SEQ ID NO: 180044 - protein, 14 aa, Homo sapiens
  CDR3 for beta chain variable domain of TCR clone 90022 (TRBV13, TRBJ2-5)
CASSLGPRGETQYF

SEQ ID NO: 180045 - protein, 12 aa, Homo sapiens
  CDR3 for alpha chain variable domain of TCR clone 90023 (TRAV35, TRAJ40)
RAGRAGTYKYIF

SEQ ID NO: 180046 - protein, 14 aa, Homo sapiens
  CDR3 for beta chain variable domain of TCR clone 90023 (TRBV7-2, TRBJ1-3)
CASSRGGTGNTIYF

SEQ ID NO: 180047 - protein, 13 aa, Homo sapiens
  CDR3 for alpha chain variable domain of TCR clone 90024 (TRAV25, TRAJ10)
CAGRTGGGNKLTF

SEQ ID NO: 180048 - protein, 15 aa, Homo sapiens
  CDR3 for beta chain variable domain of TCR clone 90024 (TRBV6-3, TRBJ2-7)
CASSSPGTVFYEQYF

SEQ ID NO: 180049 - protein, 10 aa, Homo sapiens
  CDR3 for alpha chain variable domain of TCR clone 90025 (TRAV8-4, TRAJ43)
WAVSADDMRF

SEQ ID NO: 180050 - protein, 13 aa, Homo sapiens
  CDR3 for beta chain variable domain of TCR clone 90025 (TRBV12-4, TRBJ2-5)
CASSPGTEETQYF

SEQ ID NO: 180051 - protein, 13 aa, Homo sapiens
  CDR3 for alpha chain variable domain of TCR clone 90026 (TRAV36/DV7, TRAJ37)
CAVFSSNTGKLIF

SEQ ID NO: 180052 - protein, 15 aa, Homo sapiens
  CDR3 for beta chain variable domain of TCR clone 90026 (TRBV4-1, TRBJ2-5)
CASSQWDLYQETQYF

SEQ ID NO: 180053 - protein, 14 aa, Homo sapiens
  CDR3 for alpha chain variable domain of TCR clone 90027 (TRAV12-2, TRAJ13)
CAMKKTGGYQKVTF

SEQ ID NO: 180054 - protein, 15 aa, Homo sapiens
  CDR3 for beta chain variable domain of TCR clone 90027 (TRBV27, TRBJ2-1)
CASSNGGGSSNEQLF

SEQ ID NO: 180055 - protein, 12 aa, Homo sapiens
  CDR3 for alpha chain variable domain of TCR clone 90028 (TRAV13-2, TRAJ8)
CAPWLGFQKLVF

SEQ ID NO: 180056 - protein, 12 aa, Homo sapiens
  CDR3 for beta chain variable domain of TCR clone 90028 (TRBV19, TRBJ2-1)
CLLTGTYNEQFF

SEQ ID NO: 180057 - protein, 16 aa, Homo sapiens
  CDR3 for alpha chain variable domain of TCR clone 90029 (TRAV16, TRAJ52)
CALSGVGGTSYGKLTF

SEQ ID NO: 180058 - protein, 15 aa, Homo sapiens
  CDR3 for beta chain variable domain of TCR clone 90029 (TRBV5-1, TRBJ2-1)
CASSPPRAPYNEQFF

SEQ ID NO: 180059 - protein, 15 aa, Homo sapiens
  CDR3 for alpha chain variable domain of TCR clone 90030 (TRAV2, TRAJ15)
CAVEDRGQAGTALIF

SEQ ID NO: 180060 - protein, 17 aa, Homo sapiens
  CDR3 for beta chain variable domain of TCR clone 90030 (TRBV2, TRBJ2-7)
CASSQALTGWDSYEQYF

SEQ ID NO: 180061 - protein, 14 aa, Homo sapiens
  CDR3 for alpha chain variable domain of TCR clone 90031 (TRAV38-1, TRAJ45)
CAYYSGGGTDGLTF

SEQ ID NO: 180062 - protein, 20 aa, Homo sapiens
  CDR3 for beta chain variable domain of TCR clone 90031 (TRBV28, TRBJ2-1)
CASTPIGRSPGLAGGNEQFF

SEQ ID NO: 180063 - protein, 15 aa, Homo sapiens
  CDR3 for alpha chain variable domain of TCR clone 90032 (TRAV8-3, TRAJ11)
CAVGLLNSGYSTLTF

SEQ ID NO: 180064 - protein, 15 aa, Homo sapiens
  CDR3 for beta chain variable domain of TCR clone 90032 (TRBV7-3, TRBJ2-1)
CASSPTGGGEVEQFF

SEQ ID NO: 180065 - protein, 14 aa, Homo sapiens
  CDR3 for alpha chain variable domain of TCR clone 90033 (TRAV8-1, TRAJ5)
CAVRTDTGRRALTF

SEQ ID NO: 180066 - protein, 14 aa, Homo sapiens
  CDR3 for beta chain variable domain of TCR clone 90033 (TRBV7-8, TRBJ2-3)
CASSFPDGQDTQYV

SEQ ID NO: 180067 - protein, 16 aa, Homo sapiens
  CDR3 for alpha chain variable domain of TCR clone 90034 (TRAV1-2, TRAJ18)
CAVRVERGATLGRLYF

SEQ ID NO: 180068 - protein, 16 aa, Homo sapiens
  CDR3 for beta chain variable domain of TCR clone 90034 (TRBV20-1, TRBJ2-7)
CSASTSGRLSSYEQYF

SEQ ID NO: 180069 - protein, 14 aa, Homo sapiens
  CDR3 for alpha chain variable domain of TCR clone 90035 (TRAV25, TRAJ35)
CARRMEGFGNVLHC

SEQ ID NO: 180070 - protein, 12 aa, Homo sapiens
  CDR3 for beta chain variable domain of TCR clone 90035 (TRBV11-2, TRBJ2-2)
CASSLGGGELFF

SEQ ID NO: 180071 - protein, 14 aa, Homo sapiens
  CDR3 for alpha chain variable domain of TCR clone 90036 (TRAV13-2, TRAJ17)
CAENSKSAGNKLTF

SEQ ID NO: 180072 - protein, 11 aa, Homo sapiens
  CDR3 for beta chain variable domain of TCR clone 90036 (TRBV6-3, TRBJ2-3)
CATGQADTQYF

SEQ ID NO: 180073 - protein, 10 aa, Homo sapiens
  CDR3 for alpha chain variable domain of TCR clone 90037 (TRAV26-1, TRAJ40)
CIAGTYKYIF

SEQ ID NO: 180074 - protein, 15 aa, Homo sapiens
  CDR3 for beta chain variable domain of TCR clone 90037 (TRBV19, TRBJ2-1)
CASSSPGVLLDEQFF

SEQ ID NO: 180075 - protein, 11 aa, Homo sapiens
  CDR3 for alpha chain variable domain of TCR clone 90038 (TRAV12-1, TRAJ34)
CVVNKGRELIF

SEQ ID NO: 180076 - protein, 12 aa, Homo sapiens
  CDR3 for beta chain variable domain of TCR clone 90038 (TRBV11-2, TRBJ2-2)
CASSRGGGELFF

SEQ ID NO: 180077 - protein, 14 aa, Homo sapiens
  CDR3 for alpha chain variable domain of TCR clone 90039 (TRAV12-3, TRAJ5)
CAMTWDTGRRALTF

SEQ ID NO: 180078 - protein, 14 aa, Homo sapiens
  CDR3 for beta chain variable domain of TCR clone 90039 (TRBV10-2, TRBJ1-5)
CASSSTGRNQHQHF

SEQ ID NO: 180079 - protein, 12 aa, Homo sapiens
  CDR3 for alpha chain variable domain of TCR clone 90040 (TRAV27, TRAJ41)
CAGRNSGYALNF

SEQ ID NO: 180080 - protein, 14 aa, Homo sapiens
  CDR3 for beta chain variable domain of TCR clone 90040 (TRBV20-1, TRBJ1-1)
CSAQTRIGGTEAFF

SEQ ID NO: 180081 - protein, 12 aa, Homo sapiens
  CDR3 for alpha chain variable domain of TCR clone 90041 (TRAV21, TRAJ33)
CAVQDSDYQLIW

SEQ ID NO: 180082 - protein, 14 aa, Homo sapiens
  CDR3 for beta chain variable domain of TCR clone 90041 (TRBV28, TRBJ2-1)
CASSPWEGGNEQFF

SEQ ID NO: 180083 - protein, 14 aa, Homo sapiens
  CDR3 for alpha chain variable domain of TCR clone 90042 (TRAV1-2, TRAJ27)
CAVRSGTNAGKSTF

SEQ ID NO: 180084 - protein, 15 aa, Homo sapiens
  CDR3 for beta chain variable domain of TCR clone 90042 (TRBV18, TRBJ2-7)
CAGSPLQGRTYEQYF

SEQ ID NO: 180085 - protein, 17 aa, Homo sapiens
  CDR3 for alpha chain variable domain of TCR clone 90043 (TRAV4, TRAJ13)
CLVGVQGSSGGYQKVTF

SEQ ID NO: 180086 - protein, 16 aa, Homo sapiens
  CDR3 for beta chain variable domain of TCR clone 90043 (TRBV28, TRBJ2-7)
CASSLSFETGGPEQYF

SEQ ID NO: 180087 - protein, 13 aa, Homo sapiens
  CDR3 for alpha chain variable domain of TCR clone 90044 (TRAV8-6, TRAJ49)
FAVITNTGNQFYF

SEQ ID NO: 180088 - protein, 14 aa, Homo sapiens
  CDR3 for beta chain variable domain of TCR clone 90044 (TRBV5-1, TRBJ2-7)
CASSRGESLYEQYF

SEQ ID NO: 180089 - protein, 13 aa, Homo sapiens
  CDR3 for alpha chain variable domain of TCR clone 90045 (TRAV12-1, TRAJ6)
CVVFPGGSYIPTF

SEQ ID NO: 180090 - protein, 19 aa, Homo sapiens
  CDR3 for beta chain variable domain of TCR clone 90045 (TRBV25-1, TRBJ2-2)
CAILVYRVDRGRKTGELFF

SEQ ID NO: 180091 - protein, 11 aa, Homo sapiens
  CDR3 for alpha chain variable domain of TCR clone 90046 (TRAV3, TRAJ21)
CAVGNFSKFYF

SEQ ID NO: 180092 - protein, 14 aa, Homo sapiens
  CDR3 for beta chain variable domain of TCR clone 90046 (TRBV12-5, TRBJ2-5)
CASGSRTHQETQYF

SEQ ID NO: 180093 - protein, 19 aa, Homo sapiens
  CDR3 for alpha chain variable domain of TCR clone 90047 (TRAV26-1, TRAJ52)
CIVRVANNAGGTSYGKLTF

SEQ ID NO: 180094 - protein, 14 aa, Homo sapiens
  CDR3 for beta chain variable domain of TCR clone 90047 (TRBV19, TRBJ1-2)
CASSIGAGSYGDTF

SEQ ID NO: 180095 - protein, 14 aa, Homo sapiens
  CDR3 for alpha chain variable domain of TCR clone 90048 (TRAV16, TRAJ33)
CALSAMDSNYQLNW

SEQ ID NO: 180096 - protein, 15 aa, Homo sapiens
  CDR3 for beta chain variable domain of TCR clone 90048 (TRBV28, TRBJ2-7)
CASSLEAYPIYEQYF

SEQ ID NO: 180097 - protein, 12 aa, Homo sapiens
  CDR3 for alpha chain variable domain of TCR clone 90049 (TRAV2, TRAJ32)
CAVGGATNKLIF

SEQ ID NO: 180098 - protein, 17 aa, Homo sapiens
  CDR3 for beta chain variable domain of TCR clone 90049 (TRBV20-1, TRBJ2-2)
CSASGSGQGGLTGELFF

SEQ ID NO: 180099 - protein, 14 aa, Homo sapiens
  CDR3 for alpha chain variable domain of TCR clone 90050 (TRAV3, TRAJ17)
CAVRDATAGNKLTF

SEQ ID NO: 180100 - protein, 15 aa, Homo sapiens
  CDR3 for beta chain variable domain of TCR clone 90050 (TRBV3-1, TRBJ2-7)
CASSQVRQGAYEQYF

SEQ ID NO: 180101 - protein, 13 aa, Homo sapiens
  CDR3 for alpha chain variable domain of TCR clone 90051 (TRAV21, TRAJ20)
CAVGLRVDYKLSF

SEQ ID NO: 180102 - protein, 13 aa, Homo sapiens
  CDR3 for beta chain variable domain of TCR clone 90051 (TRBV6-1, TRBJ1-1)
CGSSRQGNTEAFF

SEQ ID NO: 180103 - protein, 17 aa, Homo sapiens
  CDR3 for alpha chain variable domain of TCR clone 90052 (TRAV8-6, TRAJ10)
CAVSDGGLTGGGNKLTF

SEQ ID NO: 180104 - protein, 14 aa, Homo sapiens
  CDR3 for beta chain variable domain of TCR clone 90052 (TRBV5-1, TRBJ2-7)
CASSLQGAVDEQYF

SEQ ID NO: 180105 - protein, 15 aa, Homo sapiens
  CDR3 for alpha chain variable domain of TCR clone 90053 (TRAV3, TRAJ3)
CAVRDRDSSASKIIF

SEQ ID NO: 180106 - protein, 15 aa, Homo sapiens
  CDR3 for beta chain variable domain of TCR clone 90053 (TRBV29-1, TRBJ2-7)
CSVELFDRGSYEQYF

SEQ ID NO: 180107 - protein, 17 aa, Homo sapiens
  CDR3 for alpha chain variable domain of TCR clone 90054 (TRAV8-6, TRAJ58)
CAVSSWVGETSGSRLTF

SEQ ID NO: 180108 - protein, 16 aa, Homo sapiens
  CDR3 for beta chain variable domain of TCR clone 90054 (TRBV7-2, TRBJ1-2)
CASSSNQDRRGHGYTF

SEQ ID NO: 180109 - protein, 12 aa, Homo sapiens
  CDR3 for alpha chain variable domain of TCR clone 90055 (TRAV27, TRAJ13)
CPGAGGYQKVTF

SEQ ID NO: 180110 - protein, 15 aa, Homo sapiens
  CDR3 for beta chain variable domain of TCR clone 90055 (TRBV20-1, TRBJ2-6)
CSARDRGPGANVLTF

SEQ ID NO: 180111 - protein, 11 aa, Homo sapiens
  CDR3 for alpha chain variable domain of TCR clone 90056 (TRAV23/DV6, TRAJ58)
CAARLLRGETS

SEQ ID NO: 180112 - protein, 15 aa, Homo sapiens
  CDR3 for beta chain variable domain of TCR clone 90056 (TRBV20-1, TRBJ2-7)
CSARKGLAESYEQYF

SEQ ID NO: 180113 - protein, 13 aa, Homo sapiens
  CDR3 for alpha chain variable domain of TCR clone 90057 (TRAV13-2, TRAJ13)
FAERPGGYQKVTF

SEQ ID NO: 180114 - protein, 14 aa, Homo sapiens
  CDR3 for beta chain variable domain of TCR clone 90057 (TRBV23-1, TRBJ2-5)
CASSFLRSQETQYF

SEQ ID NO: 180115 - protein, 15 aa, Homo sapiens
  CDR3 for alpha chain variable domain of TCR clone 90058 (TRAV12-3, TRAJ27)
CAMRAYNTNAGKSTF

SEQ ID NO: 180116 - protein, 19 aa, Homo sapiens
  CDR3 for beta chain variable domain of TCR clone 90058 (TRBV4-1, TRBJ1-1)
CASSRIILTPRGVNTEAFF

SEQ ID NO: 180117 - protein, 14 aa, Homo sapiens
  CDR3 for alpha chain variable domain of TCR clone 90059 (TRAV1-1, TRAJ27)
CAVIYNTNAGKSTF

SEQ ID NO: 180118 - protein, 18 aa, Homo sapiens
  CDR3 for beta chain variable domain of TCR clone 90059 (TRBV28, TRBJ2-7)
CASSSDPGQGLSRDEQYF

SEQ ID NO: 180119 - protein, 12 aa, Homo sapiens
  CDR3 for alpha chain variable domain of TCR clone 90060 (TRAV27, TRAJ9)
CAGESGGFKTIF

SEQ ID NO: 180120 - protein, 15 aa, Homo sapiens
  CDR3 for beta chain variable domain of TCR clone 90060 (TRBV7-9, TRBJ1-4)
CASSRTGGFNEKLFF

SEQ ID NO: 180121 - protein, 15 aa, Homo sapiens
  CDR3 for alpha chain variable domain of TCR clone 90061 (TRAV17, TRAJ57)
CATGPSQGGSEKLVF

SEQ ID NO: 180122 - protein, 14 aa, Homo sapiens
  CDR3 for beta chain variable domain of TCR clone 90061 (TRBV11-2, TRBJ1-2)
CASSLYRGSYGYTF

SEQ ID NO: 180123 - protein, 13 aa, Homo sapiens
  CDR3 for alpha chain variable domain of TCR clone 90062 (TRAV17, TRAJ9)
CATDYTGGFKTIF

SEQ ID NO: 180124 - protein, 16 aa, Homo sapiens
  CDR3 for beta chain variable domain of TCR clone 90062 (TRBV7-7, TRBJ2-1)
CTSSLASGTSYNEQFF

SEQ ID NO: 180125 - protein, 13 aa, Homo sapiens
  CDR3 for alpha chain variable domain of TCR clone 90063 (TRAV8-3, TRAJ28)
CAVGAVGSYQLTF

SEQ ID NO: 180126 - protein, 15 aa, Homo sapiens
  CDR3 for beta chain variable domain of TCR clone 90063 (TRBV6-5, TRBJ1-2)
CASSYSQAFNYGYTF

SEQ ID NO: 180127 - protein, 14 aa, Homo sapiens
  CDR3 for alpha chain variable domain of TCR clone 90064 (TRAV27, TRAJ22)
CAGLPSGSARQLTF

SEQ ID NO: 180128 - protein, 16 aa, Homo sapiens
  CDR3 for beta chain variable domain of TCR clone 90064 (TRBV19, TRBJ2-2)
CASRSPGTGATGELFF

SEQ ID NO: 180129 - protein, 15 aa, Homo sapiens
  CDR3 for alpha chain variable domain of TCR clone 90065 (TRAV13-1, TRAJ8)
CAASIPNTGFQKLVF

SEQ ID NO: 180130 - protein, 13 aa, Homo sapiens
  CDR3 for beta chain variable domain of TCR clone 90065 (TRBV12-4, TRBJ2-7)
CASSLSGVYEQYF

SEQ ID NO: 180131 - protein, 17 aa, Homo sapiens
  CDR3 for alpha chain variable domain of TCR clone 90066 (TRAV16, TRAJ58)
CITVLSNGETSGSRLTF

SEQ ID NO: 180132 - protein, 17 aa, Homo sapiens
  CDR3 for beta chain variable domain of TCR clone 90066 (TRBV18, TRBJ2-1)
CASSKGLSGGADNEHFF

SEQ ID NO: 180133 - protein, 16 aa, Homo sapiens
  CDR3 for alpha chain variable domain of TCR clone 90067 (TRAV26-1, TRAJ58)
IASSESGETSGSRVTF

SEQ ID NO: 180134 - protein, 14 aa, Homo sapiens
  CDR3 for beta chain variable domain of TCR clone 90067 (TRBV9, TRBJ2-1)
CASSVDPRGKEQFF

SEQ ID NO: 180135 - protein, 14 aa, Homo sapiens
  CDR3 for alpha chain variable domain of TCR clone 90068 (TRAV34, TRAJ44)
CGADGTGTASKLPF

SEQ ID NO: 180136 - protein, 15 aa, Homo sapiens
  CDR3 for beta chain variable domain of TCR clone 90068 (TRBV5-1, TRBJ2-1)
CASSPPRAPYNEQFF

SEQ ID NO: 180137 - protein, 14 aa, Homo sapiens
  CDR3 for alpha chain variable domain of TCR clone 90069 (TRAV1-2, TRAJ27)
CAVRSGANAGKSTF

SEQ ID NO: 180138 - protein, 15 aa, Homo sapiens
  CDR3 for beta chain variable domain of TCR clone 90069 (TRBV18, TRBJ2-7)
CASSPLQGRTYEQCF

SEQ ID NO: 180139 - protein, 12 aa, Homo sapiens
  CDR3 for alpha chain variable domain of TCR clone 90070 (TRAV8-3, TRAJ20)
CAVGANDYKLSF

SEQ ID NO: 180140 - protein, 14 aa, Homo sapiens
  CDR3 for beta chain variable domain of TCR clone 90070 (TRBV4-2, TRBJ2-1)
CASGLDRAYNEQFF

SEQ ID NO: 180141 - protein, 15 aa, Homo sapiens
  CDR3 for alpha chain variable domain of TCR clone 90071 (TRAV1-2, TRAJ28)
CAVQYSGAGSYQLTF

SEQ ID NO: 180142 - protein, 13 aa, Homo sapiens
  CDR3 for beta chain variable domain of TCR clone 90071 (TRBV7-9, TRBJ1-2)
CASSLKQNYGYTF

SEQ ID NO: 180143 - protein, 14 aa, Homo sapiens
  CDR3 for alpha chain variable domain of TCR clone 90072 (TRAV38-2/DV8, TRAJ30)
CAYRSADRDDKIIL

SEQ ID NO: 180144 - protein, 16 aa, Homo sapiens
  CDR3 for beta chain variable domain of TCR clone 90072 (TRBV15, TRBJ1-3)
CATSSPIGFSGNTIYF

SEQ ID NO: 180145 - protein, 15 aa, Homo sapiens
  CDR3 for alpha chain variable domain of TCR clone 90073 (TRAV8-3, TRAJ6)
CAVGPLGGGSYIPTF

SEQ ID NO: 180146 - protein, 14 aa, Homo sapiens
  CDR3 for beta chain variable domain of TCR clone 90073 (TRBV19, TRBJ2-2)
CASSIGQGAGELFF

SEQ ID NO: 180147 - protein, 14 aa, Homo sapiens
  CDR3 for alpha chain variable domain of TCR clone 90074 (TRAV12-2, TRAJ44)
CAGNKAGTASKLTF

SEQ ID NO: 180148 - protein, 12 aa, Homo sapiens
  CDR3 for beta chain variable domain of TCR clone 90074 (TRBV19, TRBJ1-4)
CASKDWPGGLFF

SEQ ID NO: 180149 - protein, 15 aa, Homo sapiens
  CDR3 for alpha chain variable domain of TCR clone 90075 (TRAV13-1, TRAJ44)
CAASRGGGTASKLTF

SEQ ID NO: 180150 - protein, 12 aa, Homo sapiens
  CDR3 for beta chain variable domain of TCR clone 90075 (TRBV11-2, TRBJ2-2)
CASSRGGGELFF

SEQ ID NO: 180151 - protein, 13 aa, Homo sapiens
  CDR3 for alpha chain variable domain of TCR clone 90076 (TRAV20, TRAJ35)
CAVQEGFGNGLHC

SEQ ID NO: 180152 - protein, 14 aa, Homo sapiens
  CDR3 for beta chain variable domain of TCR clone 90076 (TRBV5-1, TRBJ1-1)
CASSSATGGTEAFF

SEQ ID NO: 180153 - protein, 13 aa, Homo sapiens
  CDR3 for alpha chain variable domain of TCR clone 90077 (TRAV21, TRAJ15)
CAVRNQAGTALIF

SEQ ID NO: 180154 - protein, 16 aa, Homo sapiens
  CDR3 for beta chain variable domain of TCR clone 90077 (TRBV20-1, TRBJ2-5)
CSPGGTNGGYMETQYF

SEQ ID NO: 180155 - protein, 14 aa, Homo sapiens
  CDR3 for alpha chain variable domain of TCR clone 90078 (TRAV21, TRAJ58)
CAVGEETSGSRLTF

SEQ ID NO: 180156 - protein, 14 aa, Homo sapiens
  CDR3 for beta chain variable domain of TCR clone 90078 (TRBV7-2, TRBJ1-1)
CAISFLTGTTEAFF

SEQ ID NO: 180157 - protein, 14 aa, Homo sapiens
  CDR3 for alpha chain variable domain of TCR clone 90079 (TRAV1-2, TRAJ8)
CAVREDTGFQKLVF

SEQ ID NO: 180158 - protein, 13 aa, Homo sapiens
  CDR3 for beta chain variable domain of TCR clone 90079 (TRBV7-3, TRBJ1-1)
CASSQDWGAEALF

SEQ ID NO: 180159 - protein, 10 aa, Homo sapiens
  CDR3 for alpha chain variable domain of TCR clone 90080 (TRAV1-2, TRAJ31)
CVSEDARLMF

SEQ ID NO: 180160 - protein, 14 aa, Homo sapiens
  CDR3 for beta chain variable domain of TCR clone 90080 (TRBV19, TRBJ2-1)
CASPTFLLSGEQFF

SEQ ID NO: 180161 - protein, 13 aa, Homo sapiens
  CDR3 for alpha chain variable domain of TCR clone 90081 (TRAV12-1, TRAJ16)
CVVNRPDGQKLLF

SEQ ID NO: 180162 - protein, 15 aa, Homo sapiens
  CDR3 for beta chain variable domain of TCR clone 90081 (TRBV6-3, TRBJ2-7)
CASSSPGTVFYEQYF

SEQ ID NO: 180163 - protein, 14 aa, Homo sapiens
  CDR3 for alpha chain variable domain of TCR clone 90082 (TRAV38-1, TRAJ45)
CAYYSGGGADGLTF

SEQ ID NO: 180164 - protein, 15 aa, Homo sapiens
  CDR3 for beta chain variable domain of TCR clone 90082 (TRBV11-2, TRBJ2-1)
CASSKTRGLIYEQFF

SEQ ID NO: 180165 - protein, 15 aa, Homo sapiens
  CDR3 for alpha chain variable domain of TCR clone 90083 (TRAV27, TRAJ38)
CAARRNAGNNRKLIW

SEQ ID NO: 180166 - protein, 13 aa, Homo sapiens
  CDR3 for beta chain variable domain of TCR clone 90083 (TRBV12-5, TRBJ2-3)
CASGHRQSDTQYF

SEQ ID NO: 180167 - protein, 13 aa, Homo sapiens
  CDR3 for alpha chain variable domain of TCR clone 90084 (TRAV21, TRAJ47)
CAVSGLYGNTLVF

SEQ ID NO: 180168 - protein, 17 aa, Homo sapiens
  CDR3 for beta chain variable domain of TCR clone 90084 (TRBV15, TRBJ2-3)
CATSGTTSEEGTDTQYF

SEQ ID NO: 180169 - protein, 15 aa, Homo sapiens
  CDR3 for alpha chain variable domain of TCR clone 90085 (TRAV21, TRAJ45)
CAVSYSGGGADGLTF

SEQ ID NO: 180170 - protein, 17 aa, Homo sapiens
  CDR3 for beta chain variable domain of TCR clone 90085 (TRBV7-8, TRBJ2-6)
CASSAGTGGAGANVLTF

SEQ ID NO: 180171 - protein, 14 aa, Homo sapiens
  CDR3 for alpha chain variable domain of TCR clone 90086 (TRAV17, TRAJ56)
CATVPAGANSKLTF

SEQ ID NO: 180172 - protein, 16 aa, Homo sapiens
  CDR3 for beta chain variable domain of TCR clone 90086 (TRBV7-8, TRBJ2-4)
CASSAERTLAKNIQYF

SEQ ID NO: 180173 - protein, 15 aa, Homo sapiens
  CDR3 for alpha chain variable domain of TCR clone 90087 (TRAV17, TRAJ56)
CATEPFTGANSKLTF

SEQ ID NO: 180174 - protein, 15 aa, Homo sapiens
  CDR3 for beta chain variable domain of TCR clone 90087 (TRBV28, TRBJ1-5)
CASSRRGGYVQPQHF

SEQ ID NO: 180175 - protein, 15 aa, Homo sapiens
  CDR3 for alpha chain variable domain of TCR clone 90088 (TRAV12-2, TRAJ43)
CAFDMRFGAGTRLTV

SEQ ID NO: 180176 - protein, 14 aa, Homo sapiens
  CDR3 for beta chain variable domain of TCR clone 90088 (TRBV20-1, TRBJ2-2)
CSAPDTANTGELFF

SEQ ID NO: 180177 - protein, 14 aa, Homo sapiens
  CDR3 for alpha chain variable domain of TCR clone 90089 (TRAV12-3, TRAJ42)
CAMNYGGSQGNLIF

SEQ ID NO: 180178 - protein, 21 aa, Homo sapiens
  CDR3 for beta chain variable domain of TCR clone 90089 (TRBV4-1, TRBJ2-7)
CASSLTAGLAEGGVTSSTSGR

SEQ ID NO: 180179 - protein, 14 aa, Homo sapiens
  CDR3 for alpha chain variable domain of TCR clone 90090 (TRAV1-2, TRAJ13)
CAVKKTGGYQKVTF

SEQ ID NO: 180180 - protein, 14 aa, Homo sapiens
  CDR3 for beta chain variable domain of TCR clone 90090 (TRBV12-5, TRBJ2-5)
CASGSRTHQETQYF

SEQ ID NO: 180181 - protein, 13 aa, Homo sapiens
  CDR3 for alpha chain variable domain of TCR clone 90091 (TRAV13-2, TRAJ53)
CAENMGSNYKLTF

SEQ ID NO: 180182 - protein, 15 aa, Homo sapiens
  CDR3 for beta chain variable domain of TCR clone 90091 (TRBV27, TRBJ2-1)
CASSNGGGSSNEQFF

SEQ ID NO: 180183 - protein, 18 aa, Homo sapiens
  CDR3 for alpha chain variable domain of TCR clone 90092 (TRAV12-3, TRAJ52)
CAMSVGGAGGTSYGKLTF

SEQ ID NO: 180184 - protein, 15 aa, Homo sapiens
  CDR3 for beta chain variable domain of TCR clone 90092 (TRBV27, TRBJ1-6)
CASSFDRGLGSPLNF

SEQ ID NO: 180185 - protein, 13 aa, Homo sapiens
  CDR3 for alpha chain variable domain of TCR clone 90093 (TRAV17, TRAJ9)
CATAITGGFKTIF

SEQ ID NO: 180186 - protein, 15 aa, Homo sapiens
  CDR3 for beta chain variable domain of TCR clone 90093 (TRBV11-2, TRBJ2-1)
CASSSPSTRYNEQFF

SEQ ID NO: 180187 - protein, 14 aa, Homo sapiens
  CDR3 for alpha chain variable domain of TCR clone 90094 (TRAV16, TRAJ39)
CALGKNNAGNMLTF

SEQ ID NO: 180188 - protein, 16 aa, Homo sapiens
  CDR3 for beta chain variable domain of TCR clone 90094 (TRBV6-6, TRBJ2-1)
CASSYSFSGSYNEQFF

SEQ ID NO: 180189 - protein, 13 aa, Homo sapiens
  CDR3 for alpha chain variable domain of TCR clone 90095 (TRAV12-3, TRAJ7)
CAMTPYGNNRVAF

SEQ ID NO: 180190 - protein, 16 aa, Homo sapiens
  CDR3 for beta chain variable domain of TCR clone 90095 (TRBV20-1, TRBJ1-4)
CSARPYGGELNEKLFF

SEQ ID NO: 180191 - protein, 14 aa, Homo sapiens
  CDR3 for alpha chain variable domain of TCR clone 90096 (TRAV12-1, TRAJ12)
CVVTRMDSSYKLIS

SEQ ID NO: 180192 - protein, 12 aa, Homo sapiens
  CDR3 for beta chain variable domain of TCR clone 90096 (TRBV20-1, TRBJ2-3)
CSADGAGDTQYF

SEQ ID NO: 180193 - protein, 12 aa, Homo sapiens
  CDR3 for alpha chain variable domain of TCR clone 90097 (TRAV1-1, TRAJ30)
CAVRGRDDKIIF

SEQ ID NO: 180194 - protein, 13 aa, Homo sapiens
  CDR3 for beta chain variable domain of TCR clone 90097 (TRBV11-3, TRBJ2-7)
CACSLDKLYEQYF

SEQ ID NO: 180195 - protein, 14 aa, Homo sapiens
  CDR3 for alpha chain variable domain of TCR clone 90098 (TRAV1-2, TRAJ16)
CAVNRFSDGEKLLF

SEQ ID NO: 180196 - protein, 14 aa, Homo sapiens
  CDR3 for beta chain variable domain of TCR clone 90098 (TRBV7-9, TRBJ2-3)
CASSLEDGTDTQYF

SEQ ID NO: 180197 - protein, 15 aa, Homo sapiens
  CDR3 for alpha chain variable domain of TCR clone 90099 (TRAV3, TRAJ22)
CAVRDRGGSARQLTF

SEQ ID NO: 180198 - protein, 15 aa, Homo sapiens
  CDR3 for beta chain variable domain of TCR clone 90099 (TRBV27, TRBJ2-1)
CASSDGGGSSNEQFF

SEQ ID NO: 180199 - protein, 13 aa, Homo sapiens
  CDR3 for alpha chain variable domain of TCR clone 90100 (TRAV12-2, TRAJ4)
CAVRSGGYNKLIF

SEQ ID NO: 180200 - protein, 15 aa, Homo sapiens
  CDR3 for beta chain variable domain of TCR clone 90100 (TRBV10-3, TRBJ2-1)
CAISDVQGRAYEQFF

SEQ ID NO: 180201 - protein, 17 aa, Homo sapiens
  CDR3 for alpha chain variable domain of TCR clone 90101 (TRAV3, TRAJ42)
CAVRYRDYGGSQGNLIF

SEQ ID NO: 180202 - protein, 14 aa, Homo sapiens
  CDR3 for beta chain variable domain of TCR clone 90101 (TRBV25-1, TRBJ1-1)
CASTHLGGNTEAFF

SEQ ID NO: 180203 - protein, 17 aa, Homo sapiens
  CDR3 for alpha chain variable domain of TCR clone 90102 (TRAV3, TRAJ6)
CALRDGPRAGGSYIPTF

SEQ ID NO: 180204 - protein, 13 aa, Homo sapiens
  CDR3 for beta chain variable domain of TCR clone 90102 (TRBV19, TRBJ2-7)
CASSIDRTYEQYF

SEQ ID NO: 180205 - protein, 11 aa, Homo sapiens
  CDR3 for alpha chain variable domain of TCR clone 90103 (TRAV3, TRAJ21)
CAVGNFNKFYF

SEQ ID NO: 180206 - protein, 14 aa, Homo sapiens
  CDR3 for beta chain variable domain of TCR clone 90103 (TRBV7-9, TRBJ1-1)
CASTPLQSYTEAFF

SEQ ID NO: 180207 - protein, 11 aa, Homo sapiens
  CDR3 for alpha chain variable domain of TCR clone 90104 (TRAV4, TRAJ20)
CLVGDKVTTTS

SEQ ID NO: 180208 - protein, 15 aa, Homo sapiens
  CDR3 for beta chain variable domain of TCR clone 90104 (TRBV18, TRBJ2-7)
CASSPSATGNYEQYF

SEQ ID NO: 180209 - protein, 13 aa, Homo sapiens
  CDR3 for alpha chain variable domain of TCR clone 90105 (TRAV2, TRAJ40)
CAVVTSGTYKYIF

SEQ ID NO: 180210 - protein, 12 aa, Homo sapiens
  CDR3 for beta chain variable domain of TCR clone 90105 (TRBV19, TRBJ1-1)
CASSIGTEEAFF

SEQ ID NO: 180211 - protein, 13 aa, Homo sapiens
  CDR3 for alpha chain variable domain of TCR clone 90106 (TRAV3, TRAJ21)
CAVREPDFNKFYF

SEQ ID NO: 180212 - protein, 13 aa, Homo sapiens
  CDR3 for beta chain variable domain of TCR clone 90106 (TRBV13, TRBJ2-1)
CASILGGRGEQFF

SEQ ID NO: 180213 - protein, 18 aa, Homo sapiens
  CDR3 for alpha chain variable domain of TCR clone 90107 (TRAV26-1, TRAJ23)
CIVRVGLEVWNQGGKLIF

SEQ ID NO: 180214 - protein, 16 aa, Homo sapiens
  CDR3 for beta chain variable domain of TCR clone 90107 (TRBV12-4, TRBJ2-5)
CASSFFVRRRQETQYF

SEQ ID NO: 180215 - protein, 13 aa, Homo sapiens
  CDR3 for alpha chain variable domain of TCR clone 90108 (TRAV20, TRAJ49)
CAVQARTGNQFDF

SEQ ID NO: 180216 - protein, 14 aa, Homo sapiens
  CDR3 for beta chain variable domain of TCR clone 90108 (TRBV5-1, TRBJ1-1)
CASSLQGASTEAFF

SEQ ID NO: 180217 - protein, 14 aa, Homo sapiens
  CDR3 for alpha chain variable domain of TCR clone 90109 (TRAV1-2, TRAJ16)
CAVNRFSDGQKLLF

SEQ ID NO: 180218 - protein, 17 aa, Homo sapiens
  CDR3 for beta chain variable domain of TCR clone 90109 (TRBV9, TRBJ1-6)
CASSEPGQGIHPSTLGT

SEQ ID NO: 180219 - protein, 10 aa, Homo sapiens
  CDR3 for alpha chain variable domain of TCR clone 90110 (TRAV36/DV7, TRAJ38)
CAANNRKLIW

SEQ ID NO: 180220 - protein, 15 aa, Homo sapiens
  CDR3 for beta chain variable domain of TCR clone 90110 (TRBV20-1, TRBJ2-7)
CSAKDRVSGMDEQYF

SEQ ID NO: 180221 - protein, 15 aa, Homo sapiens
  CDR3 for alpha chain variable domain of TCR clone 90111 (TRAV12-3, TRAJ49)
CAMAVTPNTGNQFYF

SEQ ID NO: 180222 - protein, 12 aa, Homo sapiens
  CDR3 for beta chain variable domain of TCR clone 90111 (TRBV4-1, TRBJ1-5)
CASSQDPRGQGL

SEQ ID NO: 180223 - protein, 16 aa, Homo sapiens
  CDR3 for alpha chain variable domain of TCR clone 90112 (TRAV13-1, TRAJ48)
CAASIFGNFGNEKLTF

SEQ ID NO: 180224 - protein, 16 aa, Homo sapiens
  CDR3 for beta chain variable domain of TCR clone 90112 (TRBV12-5, TRBJ2-5)
CASGPRTSGNQETQYF

SEQ ID NO: 180225 - protein, 12 aa, Homo sapiens
  CDR3 for alpha chain variable domain of TCR clone 90113 (TRAV12-1, TRAJ40)
CVFYSGTYKYIF

SEQ ID NO: 180226 - protein, 13 aa, Homo sapiens
  CDR3 for beta chain variable domain of TCR clone 90113 (TRBV24-1, TRBJ2-2)
CATSDWSTGELFF

SEQ ID NO: 180227 - protein, 14 aa, Homo sapiens
  CDR3 for alpha chain variable domain of TCR clone 90114 (TRAV2, TRAJ9)
CAVEDRSGGFKTSF

SEQ ID NO: 180228 - protein, 15 aa, Homo sapiens
  CDR3 for beta chain variable domain of TCR clone 90114 (TRBV11-3, TRBJ2-3)
CASSAGTVVTNTQYF

SEQ ID NO: 180229 - protein, 15 aa, Homo sapiens
  CDR3 for alpha chain variable domain of TCR clone 90115 (TRAV20, TRAJ6)
CAVRLQSGGSYIPPF

SEQ ID NO: 180230 - protein, 14 aa, Homo sapiens
  CDR3 for beta chain variable domain of TCR clone 90115 (TRBV12-4, TRBJ2-7)
CASSASGGWYEQYF

SEQ ID NO: 180231 - protein, 12 aa, Homo sapiens
  CDR3 for alpha chain variable domain of TCR clone 90116 (TRAV12-2, TRAJ47)
CAVAEYGNKLVF

SEQ ID NO: 180232 - protein, 14 aa, Homo sapiens
  CDR3 for beta chain variable domain of TCR clone 90116 (TRBV20-1, TRBJ1-1)
CSATGGTANTEAFF

SEQ ID NO: 180233 - protein, 13 aa, Homo sapiens
  CDR3 for alpha chain variable domain of TCR clone 90117 (TRAV27, TRAJ45)
CRSSGGGADGLTF

SEQ ID NO: 180234 - protein, 17 aa, Homo sapiens
  CDR3 for beta chain variable domain of TCR clone 90117 (TRBV11-2, TRBJ2-1)
CASSLYPPGVEYNEQFI

SEQ ID NO: 180235 - protein, 11 aa, Homo sapiens
  CDR3 for alpha chain variable domain of TCR clone 90118 (TRAV13-1, TRAJ49)
CACVGGNQFYF

SEQ ID NO: 180236 - protein, 12 aa, Homo sapiens
  CDR3 for beta chain variable domain of TCR clone 90118 (TRBV7-8, TRBJ2-7)
CASSLGDREQYF

SEQ ID NO: 180237 - protein, 14 aa, Homo sapiens
  CDR3 for alpha chain variable domain of TCR clone 90119 (TRAV1-2, TRAJ16)
CAVNRFSDGQKLLF

SEQ ID NO: 180238 - protein, 11 aa, Homo sapiens
  CDR3 for beta chain variable domain of TCR clone 90119 (TRBV29-1, TRBJ1-1)
CSVEVGTRTFF

SEQ ID NO: 180239 - protein, 16 aa, Homo sapiens
  CDR3 for alpha chain variable domain of TCR clone 90120 (TRAV17, TRAJ53)
CATDALSGGSNYKLTF

SEQ ID NO: 180240 - protein, 15 aa, Homo sapiens
  CDR3 for beta chain variable domain of TCR clone 90120 (TRBV5-5, TRBJ2-2)
CASSRQASGAGELFF

SEQ ID NO: 180241 - protein, 16 aa, Homo sapiens
  CDR3 for alpha chain variable domain of TCR clone 90121 (TRAV13-2, TRAJ22)
CAENRGSSGSARQLTF

SEQ ID NO: 180242 - protein, 18 aa, Homo sapiens
  CDR3 for beta chain variable domain of TCR clone 90121 (TRBV11-2, TRBJ2-3)
CASSLGGASRGAPNTQYF

SEQ ID NO: 180243 - protein, 15 aa, Homo sapiens
  CDR3 for alpha chain variable domain of TCR clone 90122 (TRAV26-1, TRAJ22)
CIVRVSFWFCKATDL

SEQ ID NO: 180244 - protein, 13 aa, Homo sapiens
  CDR3 for beta chain variable domain of TCR clone 90122 (TRBV7-9, TRBJ1-2)
CASSLQQNYGYTF

SEQ ID NO: 180245 - protein, 13 aa, Homo sapiens
  CDR3 for alpha chain variable domain of TCR clone 90123 (TRAV17, TRAJ5)
RAPMDTGRRALTF

SEQ ID NO: 180246 - protein, 13 aa, Homo sapiens
  CDR3 for beta chain variable domain of TCR clone 90123 (TRBV7-9, TRBJ1-2)
CASSLKQNYGYTF

SEQ ID NO: 180247 - protein, 18 aa, Homo sapiens
  CDR3 for alpha chain variable domain of TCR clone 90124 (TRAV21, TRAJ52)
CAVRSSPAGGTSYGKLTF

SEQ ID NO: 180248 - protein, 17 aa, Homo sapiens
  CDR3 for beta chain variable domain of TCR clone 90124 (TRBV20-1, TRBJ2-2)
CSASGSGQGGLTGELFF

SEQ ID NO: 180249 - protein, 11 aa, Homo sapiens
  CDR3 for alpha chain variable domain of TCR clone 90125 (TRAV16, TRAJ20)
CALSEGFKAAL

SEQ ID NO: 180250 - protein, 13 aa, Homo sapiens
  CDR3 for beta chain variable domain of TCR clone 90125 (TRBV7-3, TRBJ2-1)
CASSLDRYNEQFF

SEQ ID NO: 180251 - protein, 11 aa, Homo sapiens
  CDR3 for alpha chain variable domain of TCR clone 90126 (TRAV3, TRAJ21)
CAVGNFNKFYF

SEQ ID NO: 180252 - protein, 16 aa, Homo sapiens
  CDR3 for beta chain variable domain of TCR clone 90126 (TRBV7-6, TRBJ2-1)
CDSSAPGPSSYNEQFF

SEQ ID NO: 180253 - protein, 15 aa, Homo sapiens
  CDR3 for alpha chain variable domain of TCR clone 90127 (TRAV8-4, TRAJ56)
CAVSGGTGATSKLTF

SEQ ID NO: 180254 - protein, 14 aa, Homo sapiens
  CDR3 for beta chain variable domain of TCR clone 90127 (TRBV7-9, TRBJ2-1)
CASSPKGGADEQFF

SEQ ID NO: 180255 - protein, 13 aa, Homo sapiens
  CDR3 for alpha chain variable domain of TCR clone 90128 (TRAV12-1, TRAJ40)
CVVPTSGNYKYIF

SEQ ID NO: 180256 - protein, 18 aa, Homo sapiens
  CDR3 for beta chain variable domain of TCR clone 90128 (TRBV7-6, TRBJ2-1)
CASSPRTSGMSSYNEQFF

SEQ ID NO: 180257 - protein, 16 aa, Homo sapiens
  CDR3 for alpha chain variable domain of TCR clone 90129 (TRAV30, TRAJ24)
CGTEIVDADSWGKFQL

SEQ ID NO: 180258 - protein, 13 aa, Homo sapiens
  CDR3 for beta chain variable domain of TCR clone 90129 (TRBV7-9, TRBJ1-2)
CASSLKQNYGYTF

SEQ ID NO: 180259 - protein, 14 aa, Homo sapiens
  CDR3 for alpha chain variable domain of TCR clone 90130 (TRAV12-2, TRAJ5)
CAVIRSTGRRALTF

SEQ ID NO: 180260 - protein, 12 aa, Homo sapiens
  CDR3 for beta chain variable domain of TCR clone 90130 (TRBV19, TRBJ1-5)
CASSIAQQPQHF

SEQ ID NO: 180261 - protein, 15 aa, Homo sapiens
  CDR3 for alpha chain variable domain of TCR clone 90131 (TRAV27, TRAJ38)
CAARRNAGNNRKLIC

SEQ ID NO: 180262 - protein, 13 aa, Homo sapiens
  CDR3 for beta chain variable domain of TCR clone 90131 (TRBV12-5, TRBJ2-3)
CASGDRQSDTQYF

SEQ ID NO: 180263 - protein, 12 aa, Homo sapiens
  CDR3 for alpha chain variable domain of TCR clone 90132 (TRAV12-2, TRAJ21)
CAVRYNFNKFYF

SEQ ID NO: 180264 - protein, 14 aa, Homo sapiens
  CDR3 for beta chain variable domain of TCR clone 90132 (TRBV28, TRBJ2-1)
CASSYYPAYNEQFF

SEQ ID NO: 180265 - protein, 13 aa, Homo sapiens
  CDR3 for alpha chain variable domain of TCR clone 90133 (TRAV35, TRAJ43)
CAGYLYNNNDMRF

SEQ ID NO: 180266 - protein, 15 aa, Homo sapiens
  CDR3 for beta chain variable domain of TCR clone 90133 (TRBV25-1, TRBJ1-4)
CASSKRIATNEKLFF

SEQ ID NO: 180267 - protein, 12 aa, Homo sapiens
  CDR3 for alpha chain variable domain of TCR clone 90134 (TRAV8-3, TRAJ40)
CAVTSGTYKYIF

SEQ ID NO: 180268 - protein, 13 aa, Homo sapiens
  CDR3 for beta chain variable domain of TCR clone 90134 (TRBV6-1, TRBJ1-2)
CASSEGTHYGYTF

SEQ ID NO: 180269 - protein, 12 aa, Homo sapiens
  CDR3 for alpha chain variable domain of TCR clone 90135 (TRAV21, TRAJ23)
CAVPNQGGKLIF

SEQ ID NO: 180270 - protein, 15 aa, Homo sapiens
  CDR3 for beta chain variable domain of TCR clone 90135 (TRBV27, TRBJ2-1)
CTSSFGAGTGPEQFF

SEQ ID NO: 180271 - protein, 13 aa, Homo sapiens
  CDR3 for alpha chain variable domain of TCR clone 90136 (TRAV22, TRAJ29)
CAVGGSGNTPLVF

SEQ ID NO: 180272 - protein, 15 aa, Homo sapiens
  CDR3 for beta chain variable domain of TCR clone 90136 (TRBV12-4, TRBJ2-5)
CASSPPTGLQETQYF

SEQ ID NO: 180273 - protein, 23 aa, Homo sapiens
  CDR3 for alpha chain variable domain of TCR clone 90137 (TRAV12-2, TRAJ36)
SLLIRDSQPSDSATLERANNLFF

SEQ ID NO: 180274 - protein, 13 aa, Homo sapiens
  CDR3 for beta chain variable domain of TCR clone 90137 (TRBV2, TRBJ1-1)
CASSEGGNTEAFF

SEQ ID NO: 180275 - protein, 10 aa, Homo sapiens
  CDR3 for alpha chain variable domain of TCR clone 90138 (TRAV21, TRAJ43)
CAVRIGDMRF

SEQ ID NO: 180276 - protein, 12 aa, Homo sapiens
  CDR3 for beta chain variable domain of TCR clone 90138 (TRBV11-2, TRBJ2-2)
CASSLGGGELFF

SEQ ID NO: 180277 - protein, 11 aa, Homo sapiens
  CDR3 for alpha chain variable domain of TCR clone 90139 (TRAV12-3, TRAJ49)
CAANTVNQFYF

SEQ ID NO: 180278 - protein, 15 aa, Homo sapiens
  CDR3 for beta chain variable domain of TCR clone 90139 (TRBV11-2, TRBJ2-1)
CASSLGTSGLNEQFF

SEQ ID NO: 180279 - protein, 13 aa, Homo sapiens
  CDR3 for alpha chain variable domain of TCR clone 90140 (TRAV1-2, TRAJ35)
CAASRGFGNVLHC

SEQ ID NO: 180280 - protein, 18 aa, Homo sapiens
  CDR3 for beta chain variable domain of TCR clone 90140 (TRBV3-1, TRBJ1-2)
CASSQDVIGWNGDYGYTF

SEQ ID NO: 180281 - protein, 13 aa, Homo sapiens
  CDR3 for alpha chain variable domain of TCR clone 90141 (TRAV30, TRAJ6)
CGTEAGGSYIPTF

SEQ ID NO: 180282 - protein, 14 aa, Homo sapiens
  CDR3 for beta chain variable domain of TCR clone 90141 (TRBV19, TRBJ2-1)
CASPTFVLSGEQFF

SEQ ID NO: 180283 - protein, 16 aa, Homo sapiens
  CDR3 for alpha chain variable domain of TCR clone 90142 (TRAV3, TRAJ10)
CAVRDTRAGGGNKLTF

SEQ ID NO: 180284 - protein, 14 aa, Homo sapiens
  CDR3 for beta chain variable domain of TCR clone 90142 (TRBV25-1, TRBJ1-1)
CASTHLGGNTEAFF

SEQ ID NO: 180285 - protein, 13 aa, Homo sapiens
  CDR3 for alpha chain variable domain of TCR clone 90143 (TRAV4, TRAJ20)
CLVGSSNDYKLSF

SEQ ID NO: 180286 - protein, 16 aa, Homo sapiens
  CDR3 for beta chain variable domain of TCR clone 90143 (TRBV7-3, TRBJ2-2)
CASSLKRGTLSGELFF

SEQ ID NO: 180287 - protein, 12 aa, Homo sapiens
  CDR3 for alpha chain variable domain of TCR clone 90144 (TRAV1-1, TRAJ39)
CAVPVVGNMLTS

SEQ ID NO: 180288 - protein, 13 aa, Homo sapiens
  CDR3 for beta chain variable domain of TCR clone 90144 (TRBV4-1, TRBJ1-1)
CASSRKMNTEAFF

SEQ ID NO: 180289 - protein, 12 aa, Homo sapiens
  CDR3 for alpha chain variable domain of TCR clone 90145 (TRAV3, TRAJ43)
CAVRDPNNDMRF

SEQ ID NO: 180290 - protein, 15 aa, Homo sapiens
  CDR3 for beta chain variable domain of TCR clone 90145 (TRBV27, TRBJ1-5)
CASSLWTGFDQPQHF

SEQ ID NO: 180291 - protein, 16 aa, Homo sapiens
  CDR3 for alpha chain variable domain of TCR clone 90146 (TRAV17, TRAJ9)
CATGEWGGPGGFKTIF

SEQ ID NO: 180292 - protein, 12 aa, Homo sapiens
  CDR3 for beta chain variable domain of TCR clone 90146 (TRBV11-2, TRBJ2-1)
CASSPGNNEQFF

SEQ ID NO: 180293 - protein, 11 aa, Homo sapiens
  CDR3 for alpha chain variable domain of TCR clone 90147 (TRAV2, TRAJ33)
CAVESNYQLIW

SEQ ID NO: 180294 - protein, 14 aa, Homo sapiens
  CDR3 for beta chain variable domain of TCR clone 90147 (TRBV12-4, TRBJ1-1)
CASSLGTGGTEAFF

SEQ ID NO: 180295 - protein, 14 aa, Homo sapiens
  CDR3 for alpha chain variable domain of TCR clone 90148 (TRAV23/DV6, TRAJ11)
CAASLESGYSTLHF

SEQ ID NO: 180296 - protein, 13 aa, Homo sapiens
  CDR3 for beta chain variable domain of TCR clone 90148 (TRBV4-1, TRBJ2-5)
CASSLTRGETQYF

SEQ ID NO: 180297 - protein, 15 aa, Homo sapiens
  CDR3 for alpha chain variable domain of TCR clone 90149 (TRAV8-3, TRAJ11)
CAVGMLNSGYSTLTF

SEQ ID NO: 180298 - protein, 14 aa, Homo sapiens
  CDR3 for beta chain variable domain of TCR clone 90149 (TRBV4-1, TRBJ2-5)
CASSRSGSGETQYF

SEQ ID NO: 180299 - protein, 14 aa, Homo sapiens
  CDR3 for alpha chain variable domain of TCR clone 90150 (TRAV29/DV5, TRAJ36)
CAARRKTGANNLFF

SEQ ID NO: 180300 - protein, 14 aa, Homo sapiens
  CDR3 for beta chain variable domain of TCR clone 90150 (TRBV12-5, TRBJ2-5)
CAIGSRTHQETQYF

SEQ ID NO: 180301 - protein, 14 aa, Homo sapiens
  CDR3 for alpha chain variable domain of TCR clone 90151 (TRAV1-2, TRAJ16)
CAVNRVSDGQKLLF

SEQ ID NO: 180302 - protein, 12 aa, Homo sapiens
  CDR3 for beta chain variable domain of TCR clone 90151 (TRBV7-6, TRBJ2-7)
CASSLADSEQYF

SEQ ID NO: 180303 - protein, 13 aa, Homo sapiens
  CDR3 for alpha chain variable domain of TCR clone 90152 (TRAV3, TRAJ21)
CAVREPDFNKFYF

SEQ ID NO: 180304 - protein, 16 aa, Homo sapiens
  CDR3 for beta chain variable domain of TCR clone 90152 (TRBV28, TRBJ2-3)
CASSLFTGVSTDTQYF

SEQ ID NO: 180305 - protein, 15 aa, Homo sapiens
  CDR3 for alpha chain variable domain of TCR clone 90153 (TRAV4, TRAJ39)
CLVGPNNNAGNMLTF

SEQ ID NO: 180306 - protein, 16 aa, Homo sapiens
  CDR3 for beta chain variable domain of TCR clone 90153 (TRBV3-1, TRBJ2-7)
CASSQGATGVAYEQYF

SEQ ID NO: 180307 - protein, 15 aa, Homo sapiens
  CDR3 for alpha chain variable domain of TCR clone 90154 (TRAV3, TRAJ5)
CAVRDRKTGRRALTF

SEQ ID NO: 180308 - protein, 15 aa, Homo sapiens
  CDR3 for beta chain variable domain of TCR clone 90154 (TRBV7-8, TRBJ2-1)
CASSLADSFYNEQFF

SEQ ID NO: 180309 - protein, 15 aa, Homo sapiens
  CDR3 for alpha chain variable domain of TCR clone 90155 (TRAV8-3, TRAJ27)
CAVGPSKTNAGKSTF

SEQ ID NO: 180310 - protein, 12 aa, Homo sapiens
  CDR3 for beta chain variable domain of TCR clone 90155 (TRBV29-1, TRBJ2-3)
CSVTGGADTQYF

SEQ ID NO: 180311 - protein, 15 aa, Homo sapiens
  CDR3 for alpha chain variable domain of TCR clone 90156 (TRAV8-3, TRAJ41)
CAVGSNSNSGYALNF

SEQ ID NO: 180312 - protein, 17 aa, Homo sapiens
  CDR3 for beta chain variable domain of TCR clone 90156 (TRBV25-1, TRBJ2-1)
CASRAYGQGRGVYEQFF

SEQ ID NO: 180313 - protein, 15 aa, Homo sapiens
  CDR3 for alpha chain variable domain of TCR clone 90157 (TRAV38-1, TRAJ57)
CAFMDSQGGSEKLGF

SEQ ID NO: 180314 - protein, 16 aa, Homo sapiens
  CDR3 for beta chain variable domain of TCR clone 90157 (TRBV10-3, TRBJ2-1)
CAIRGGGRGDYNEQFF

SEQ ID NO: 180315 - protein, 15 aa, Homo sapiens
  CDR3 for alpha chain variable domain of TCR clone 90158 (TRAV12-2, TRAJ53)
CAVNGGGGSNDKLTF

SEQ ID NO: 180316 - protein, 14 aa, Homo sapiens
  CDR3 for beta chain variable domain of TCR clone 90158 (TRBV19, TRBJ2-2)
CASSTLHRSGELFF

SEQ ID NO: 180317 - protein, 15 aa, Homo sapiens
  CDR3 for alpha chain variable domain of TCR clone 90159 (TRAV3, TRAJ3)
FAVRDGHSSASKIIF

SEQ ID NO: 180318 - protein, 17 aa, Homo sapiens
  CDR3 for beta chain variable domain of TCR clone 90159 (TRBV25-1, TRBJ2-7)
CASSDARVVFSSYEQYF

SEQ ID NO: 180319 - protein, 11 aa, Homo sapiens
  CDR3 for alpha chain variable domain of TCR clone 90160 (TRAV21, TRAJ9)
CAVPGGFQTIF

SEQ ID NO: 180320 - protein, 17 aa, Homo sapiens
  CDR3 for beta chain variable domain of TCR clone 90160 (TRBV7-9, TRBJ2-5)
CATSGGARDPVLRARHA

SEQ ID NO: 180321 - protein, 18 aa, Homo sapiens
  CDR3 for alpha chain variable domain of TCR clone 90161 (TRAV26-1, TRAJ30)
CCVLLHRQSTNRDDKIIF

SEQ ID NO: 180322 - protein, 18 aa, Homo sapiens
  CDR3 for beta chain variable domain of TCR clone 90161 (TRBV4-1, TRBJ1-5)
CASSHDPRGQGLNQPQHF

SEQ ID NO: 180323 - protein, 13 aa, Homo sapiens
  CDR3 for alpha chain variable domain of TCR clone 90162 (TRAV27, TRAJ45)
CRSSGGGADGLTF

SEQ ID NO: 180324 - protein, 13 aa, Homo sapiens
  CDR3 for beta chain variable domain of TCR clone 90162 (TRBV12-4, TRBJ1-2)
CASSLRQGKGYTF

SEQ ID NO: 180325 - protein, 14 aa, Homo sapiens
  CDR3 for alpha chain variable domain of TCR clone 90163 (TRAV1-2, TRAJ8)
CAVREDTGFTKLVF

SEQ ID NO: 180326 - protein, 15 aa, Homo sapiens
  CDR3 for beta chain variable domain of TCR clone 90163 (TRBV6-3, TRBJ2-7)
CASSSPGTVFYEQYF

SEQ ID NO: 180327 - protein, 10 aa, Homo sapiens
  CDR3 for alpha chain variable domain of TCR clone 90164 (TRAV3, TRAJ3)
CAVVQQCFQD

SEQ ID NO: 180328 - protein, 15 aa, Homo sapiens
  CDR3 for beta chain variable domain of TCR clone 90164 (TRBV7-9, TRBJ1-6)
CASSSPGRGNSPLHF

SEQ ID NO: 180329 - protein, 14 aa, Homo sapiens
  CDR3 for alpha chain variable domain of TCR clone 90165 (TRAV12-1, TRAJ12)
CVVNGRDSSYKLIF

SEQ ID NO: 180330 - protein, 13 aa, Homo sapiens
  CDR3 for beta chain variable domain of TCR clone 90165 (TRBV28, TRBJ2-2)
CASIRESTGELFL

SEQ ID NO: 180331 - protein, 12 aa, Homo sapiens
  CDR3 for alpha chain variable domain of TCR clone 90166 (TRAV13-1, TRAJ49)
CAASPMGNQFYF

SEQ ID NO: 180332 - protein, 13 aa, Homo sapiens
  CDR3 for beta chain variable domain of TCR clone 90166 (TRBV20-1, TRBJ2-2)
CSASAAGAGELFF

SEQ ID NO: 180333 - protein, 15 aa, Homo sapiens
  CDR3 for alpha chain variable domain of TCR clone 90167 (TRAV3, TRAJ22)
CAVRDRGGSARQLTF

SEQ ID NO: 180334 - protein, 12 aa, Homo sapiens
  CDR3 for beta chain variable domain of TCR clone 90167 (TRBV29-1, TRBJ2-3)
CSVTGGADTQYF

SEQ ID NO: 180335 - protein, 11 aa, Homo sapiens
  CDR3 for alpha chain variable domain of TCR clone 90168 (TRAV3, TRAJ21)
CSLGNFNKFYF

SEQ ID NO: 180336 - protein, 16 aa, Homo sapiens
  CDR3 for beta chain variable domain of TCR clone 90168 (TRBV19, TRBJ2-1)
CASSKAGPSSYNEQFF

SEQ ID NO: 180337 - protein, 16 aa, Homo sapiens
  CDR3 for alpha chain variable domain of TCR clone 90169 (TRAV13-1, TRAJ45)
CAASGSRKGGADGLTF

SEQ ID NO: 180338 - protein, 13 aa, Homo sapiens
  CDR3 for beta chain variable domain of TCR clone 90169 (TRBV12-4, TRBJ2-5)
CASRKRGKETQYF

SEQ ID NO: 180339 - protein, 16 aa, Homo sapiens
  CDR3 for alpha chain variable domain of TCR clone 90170 (TRAV26-1, TRAJ30)
CCVLLHRQSRDDKIIF

SEQ ID NO: 180340 - protein, 18 aa, Homo sapiens
  CDR3 for beta chain variable domain of TCR clone 90170 (TRBV7-6, TRBJ2-1)
CASSPRTSGMSSYNEQFF

SEQ ID NO: 180341 - protein, 19 aa, Homo sapiens
  CDR3 for alpha chain variable domain of TCR clone 90171 (TRAV2, TRAJ20)
ILQVREADAAVYRDCKLSF

SEQ ID NO: 180342 - protein, 12 aa, Homo sapiens
  CDR3 for beta chain variable domain of TCR clone 90171 (TRBV11-3, TRBJ2-2)
CASSLGGGELFF

SEQ ID NO: 180343 - protein, 12 aa, Homo sapiens
  CDR3 for alpha chain variable domain of TCR clone 90172 (TRAV12-3, TRAJ17)
CAVTLTGNKLTF

SEQ ID NO: 180344 - protein, 15 aa, Homo sapiens
  CDR3 for beta chain variable domain of TCR clone 90172 (TRBV20-1, TRBJ2-7)
CSARGRVSGMDEQYF

SEQ ID NO: 180345 - protein, 11 aa, Homo sapiens
  CDR3 for alpha chain variable domain of TCR clone 90173 (TRAV3, TRAJ17)
PRGAAGNKLTF

SEQ ID NO: 180346 - protein, 16 aa, Homo sapiens
  CDR3 for beta chain variable domain of TCR clone 90173 (TRBV7-6, TRBJ2-1)
CASSAPGLSSYNEQFF

SEQ ID NO: 180347 - protein, 13 aa, Homo sapiens
  CDR3 for alpha chain variable domain of TCR clone 90174 (TRAV2, TRAJ15)
CAVASQAGTALIF

SEQ ID NO: 180348 - protein, 17 aa, Homo sapiens
  CDR3 for beta chain variable domain of TCR clone 90174 (TRBV4-2, TRBJ1-1)
CASTQFGGGSGNTEAFF

SEQ ID NO: 180349 - protein, 13 aa, Homo sapiens
  CDR3 for alpha chain variable domain of TCR clone 90175 (TRAV17, TRAJ26)
CATVDNYGQNFVF

SEQ ID NO: 180350 - protein, 16 aa, Homo sapiens
  CDR3 for beta chain variable domain of TCR clone 90175 (TRBV2, TRBJ2-1)
CASSVGGSMSYNEQFF

SEQ ID NO: 180351 - protein, 16 aa, Homo sapiens
  CDR3 for alpha chain variable domain of TCR clone 90176 (TRAV3, TRAJ37)
CAVRPHGSGNTGKLIF

SEQ ID NO: 180352 - protein, 15 aa, Homo sapiens
  CDR3 for beta chain variable domain of TCR clone 90176 (TRBV5-1, TRBJ2-3)
CASSVTSGSTDTQYF

SEQ ID NO: 180353 - protein, 14 aa, Homo sapiens
  CDR3 for alpha chain variable domain of TCR clone 90177 (TRAV8-2, TRAJ37)
CVVSISGNTGKLIF

SEQ ID NO: 180354 - protein, 15 aa, Homo sapiens
  CDR3 for beta chain variable domain of TCR clone 90177 (TRBV20-1, TRBJ2-7)
CSAESGTSGAYEQYF

SEQ ID NO: 180355 - protein, 16 aa, Homo sapiens
  CDR3 for alpha chain variable domain of TCR clone 90178 (TRAV12-3, TRAJ53)
CAMSTGSGGSNYKLTF

SEQ ID NO: 180356 - protein, 20 aa, Homo sapiens
  CDR3 for beta chain variable domain of TCR clone 90178 (TRBV7-8, TRBJ2-2)
CASSHLFPGPTIHITGELFF

SEQ ID NO: 180357 - protein, 16 aa, Homo sapiens
  CDR3 for alpha chain variable domain of TCR clone 90179 (TRAV4, TRAJ18)
CCVLLIGGSTLGRLYF

SEQ ID NO: 180358 - protein, 12 aa, Homo sapiens
  CDR3 for beta chain variable domain of TCR clone 90179 (TRBV6-3, TRBJ2-7)
CSSSLTPYEQYF

SEQ ID NO: 180359 - protein, 13 aa, Homo sapiens
  CDR3 for alpha chain variable domain of TCR clone 90180 (TRAV16, TRAJ27)
CALRGTNAGKSTF

SEQ ID NO: 180360 - protein, 15 aa, Homo sapiens
  CDR3 for beta chain variable domain of TCR clone 90180 (TRBV18, TRBJ2-1)
CASSPPSASYNEQFF

SEQ ID NO: 180361 - protein, 21 aa, Homo sapiens
  CDR3 for alpha chain variable domain of TCR clone 90181 (TRAV12-1, TRAJ37)
CVVNGGLWQHRRTNLWARDNF

SEQ ID NO: 180362 - protein, 12 aa, Homo sapiens
  CDR3 for beta chain variable domain of TCR clone 90181 (TRBV20-1, TRBJ1-2)
CSAPGFNYGYTF

SEQ ID NO: 180363 - protein, 12 aa, Homo sapiens
  CDR3 for alpha chain variable domain of TCR clone 90182 (TRAV12-3, TRAJ17)
CAMTPTGNKLTF

SEQ ID NO: 180364 - protein, 17 aa, Homo sapiens
  CDR3 for beta chain variable domain of TCR clone 90182 (TRBV28, TRBJ2-6)
CASTPGQAFSGANVLTF

SEQ ID NO: 180365 - protein, 11 aa, Homo sapiens
  CDR3 for alpha chain variable domain of TCR clone 90183 (TRAV13-1, TRAJ39)
CASHAGNMLTF

SEQ ID NO: 180366 - protein, 14 aa, Homo sapiens
  CDR3 for beta chain variable domain of TCR clone 90183 (TRBV19, TRBJ2-5)
CASSMTGQQETQYF

SEQ ID NO: 180367 - protein, 15 aa, Homo sapiens
  CDR3 for alpha chain variable domain of TCR clone 90184 (TRAV2, TRAJ15)
CAVEDRGQAGTALIF

SEQ ID NO: 180368 - protein, 15 aa, Homo sapiens
  CDR3 for beta chain variable domain of TCR clone 90184 (TRBV6-3, TRBJ2-7)
CASSSPGTVFYEQYF

SEQ ID NO: 180369 - protein, 16 aa, Homo sapiens
  CDR3 for alpha chain variable domain of TCR clone 90185 (TRAV12-2, TRAJ28)
CAVITDSGAGSYQLTF

SEQ ID NO: 180370 - protein, 14 aa, Homo sapiens
  CDR3 for beta chain variable domain of TCR clone 90185 (TRBV25-1, TRBJ1-1)
CASTHLGGNTAAFF

SEQ ID NO: 180371 - protein, 18 aa, Homo sapiens
  CDR3 for alpha chain variable domain of TCR clone 90186 (TRAV26-2, TRAJ54)
CILRDVEVGIQGAQKLVF

SEQ ID NO: 180372 - protein, 12 aa, Homo sapiens
  CDR3 for beta chain variable domain of TCR clone 90186 (TRBV11-2, TRBJ2-1)
CASSPGNNEQFF

SEQ ID NO: 180373 - protein, 11 aa, Homo sapiens
  CDR3 for alpha chain variable domain of TCR clone 90187 (TRAV12-1, TRAJ30)
CVVNGQDKLIF

SEQ ID NO: 180374 - protein, 12 aa, Homo sapiens
  CDR3 for beta chain variable domain of TCR clone 90187 (TRBV27, TRBJ2-2)
CASKLFTGELFF

SEQ ID NO: 180375 - protein, 15 aa, Homo sapiens
  CDR3 for alpha chain variable domain of TCR clone 90188 (TRAV26-1, TRAJ40)
CIDRYATSGTYKYNF

SEQ ID NO: 180376 - protein, 11 aa, Homo sapiens
  CDR3 for beta chain variable domain of TCR clone 90188 (TRBV7-9, TRBJ2-1)
CASSSQNEQFF

SEQ ID NO: 180377 - protein, 13 aa, Homo sapiens
  CDR3 for alpha chain variable domain of TCR clone 90189 (TRAV20, TRAJ20)
CAVQAGSGYKLSF

SEQ ID NO: 180378 - protein, 13 aa, Homo sapiens
  CDR3 for beta chain variable domain of TCR clone 90189 (TRBV7-3, TRBJ2-1)
CASSLDSYNEQFF

SEQ ID NO: 180379 - protein, 18 aa, Homo sapiens
  CDR3 for alpha chain variable domain of TCR clone 90190 (TRAV13-1, TRAJ52)
CAAKNPNAGGTGYGKLTF

SEQ ID NO: 180380 - protein, 14 aa, Homo sapiens
  CDR3 for beta chain variable domain of TCR clone 90190 (TRBV6-5, TRBJ1-1)
CASSFGQGLTEAFF

SEQ ID NO: 180381 - protein, 13 aa, Homo sapiens
  CDR3 for alpha chain variable domain of TCR clone 90191 (TRAV3, TRAJ27)
CAVRPLGAGKSTF

SEQ ID NO: 180382 - protein, 12 aa, Homo sapiens
  CDR3 for beta chain variable domain of TCR clone 90191 (TRBV3-1, TRBJ2-1)
CASSQGSSGQFF

SEQ ID NO: 180383 - protein, 15 aa, Homo sapiens
  CDR3 for alpha chain variable domain of TCR clone 90192 (TRAV20, TRAJ16)
CAVQIRFSDGQKLLF

SEQ ID NO: 180384 - protein, 13 aa, Homo sapiens
  CDR3 for beta chain variable domain of TCR clone 90192 (TRBV14, TRBJ1-1)
CASSQEAGTEAFF

SEQ ID NO: 180385 - protein, 13 aa, Homo sapiens
  CDR3 for alpha chain variable domain of TCR clone 90193 (TRAV2, TRAJ47)
CSVDREYGNKLVF

SEQ ID NO: 180386 - protein, 17 aa, Homo sapiens
  CDR3 for beta chain variable domain of TCR clone 90193 (TRBV15, TRBJ1-5)
CATSRVKGIYSNQPQHF

SEQ ID NO: 180387 - protein, 11 aa, Homo sapiens
  CDR3 for alpha chain variable domain of TCR clone 90194 (TRAV21, TRAJ23)
CAPQRRGKLIF

SEQ ID NO: 180388 - protein, 15 aa, Homo sapiens
  CDR3 for beta chain variable domain of TCR clone 90194 (TRBV12-4, TRBJ2-5)
CASSPPTGLQETQYF

SEQ ID NO: 180389 - protein, 17 aa, Homo sapiens
  CDR3 for alpha chain variable domain of TCR clone 90195 (TRAV3, TRAJ6)
CAVRDGPRAGGSYIPRF

SEQ ID NO: 180390 - protein, 20 aa, Homo sapiens
  CDR3 for beta chain variable domain of TCR clone 90195 (TRBV28, TRBJ2-1)
CASTPIGRSPGLAGGNEQFF

SEQ ID NO: 180391 - protein, 14 aa, Homo sapiens
  CDR3 for alpha chain variable domain of TCR clone 90196 (TRAV12-3, TRAJ58)
CAMSTETSGSRLTF

SEQ ID NO: 180392 - protein, 12 aa, Homo sapiens
  CDR3 for beta chain variable domain of TCR clone 90196 (TRBV7-8, TRBJ2-7)
CTSSLGDREQYF

SEQ ID NO: 180393 - protein, 11 aa, Homo sapiens
  CDR3 for alpha chain variable domain of TCR clone 90197 (TRAV35, TRAJ34)
CWARNTDKLIF

SEQ ID NO: 180394 - protein, 12 aa, Homo sapiens
  CDR3 for beta chain variable domain of TCR clone 90197 (TRBV29-1, TRBJ2-3)
CSVTGGADTQYF

SEQ ID NO: 180395 - protein, 14 aa, Homo sapiens
  CDR3 for alpha chain variable domain of TCR clone 90198 (TRAV8-3, TRAJ9)
CAVVYNTGGFKTIF

SEQ ID NO: 180396 - protein, 14 aa, Homo sapiens
  CDR3 for beta chain variable domain of TCR clone 90198 (TRBV7-3, TRBJ2-2)
CASSSGGYTGELVF

SEQ ID NO: 180397 - protein, 14 aa, Homo sapiens
  CDR3 for alpha chain variable domain of TCR clone 90199 (TRAV12-3, TRAJ10)
SHLPLTGGGNKLNF

SEQ ID NO: 180398 - protein, 13 aa, Homo sapiens
  CDR3 for beta chain variable domain of TCR clone 90199 (TRBV7-7, TRBJ2-5)
CASSRSGQETQYF

SEQ ID NO: 180399 - protein, 15 aa, Homo sapiens
  CDR3 for alpha chain variable domain of TCR clone 90200 (TRAV26-1, TRAJ17)
CIVSSFKAAGNKLTF

SEQ ID NO: 180400 - protein, 15 aa, Homo sapiens
  CDR3 for beta chain variable domain of TCR clone 90200 (TRBV6-1, TRBJ2-7)
CASSESMGDFYEQYF

SEQ ID NO: 180401 - protein, 10 aa, Homo sapiens
  CDR3 for alpha chain variable domain of TCR clone 90201 (TRAV23/DV6, TRAJ57)
CAASSTLSQG

SEQ ID NO: 180402 - protein, 19 aa, Homo sapiens
  CDR3 for beta chain variable domain of TCR clone 90201 (TRBV7-2, TRBJ2-3)
CASSFLSRNWGGGTDTQYF

SEQ ID NO: 180403 - protein, 14 aa, Homo sapiens
  CDR3 for alpha chain variable domain of TCR clone 90202 (TRAV1-2, TRAJ8)
CAVREDTGFQKLVF

SEQ ID NO: 180404 - protein, 14 aa, Homo sapiens
  CDR3 for beta chain variable domain of TCR clone 90202 (TRBV28, TRBJ2-1)
CASSFDSLSDEQFF

SEQ ID NO: 180405 - protein, 12 aa, Homo sapiens
  CDR3 for alpha chain variable domain of TCR clone 90203 (TRAV21, TRAJ58)
CALSASGSRLTF

SEQ ID NO: 180406 - protein, 13 aa, Homo sapiens
  CDR3 for beta chain variable domain of TCR clone 90203 (TRBV7-2, TRBJ2-2)
CASSLAVTGELFF

SEQ ID NO: 180407 - protein, 15 aa, Homo sapiens
  CDR3 for alpha chain variable domain of TCR clone 90204 (TRAV4, TRAJ26)
CLVGDMNNYGQNLVF

SEQ ID NO: 180408 - protein, 16 aa, Homo sapiens
  CDR3 for beta chain variable domain of TCR clone 90204 (TRBV28, TRBJ1-4)
CASSSRTGGANEKLFF

SEQ ID NO: 180409 - protein, 17 aa, Homo sapiens
  CDR3 for alpha chain variable domain of TCR clone 90205 (TRAV13-2, TRAJ42)
FAEKGKNYGGSQGNLIF

SEQ ID NO: 180410 - protein, 16 aa, Homo sapiens
  CDR3 for beta chain variable domain of TCR clone 90205 (TRBV7-9, TRBJ2-1)
CASSLGTGWDYNEQFF

SEQ ID NO: 180411 - protein, 16 aa, Homo sapiens
  CDR3 for alpha chain variable domain of TCR clone 90206 (TRAV1-2, TRAJ6)
CAVRDQGTGGSYIPTF

SEQ ID NO: 180412 - protein, 12 aa, Homo sapiens
  CDR3 for beta chain variable domain of TCR clone 90206 (TRBV7-9, TRBJ2-7)
CASSIKREEQYF

SEQ ID NO: 180413 - protein, 13 aa, Homo sapiens
  CDR3 for alpha chain variable domain of TCR clone 90207 (TRAV13-2, TRAJ8)
CAFMNTGFQKLVF

SEQ ID NO: 180414 - protein, 13 aa, Homo sapiens
  CDR3 for beta chain variable domain of TCR clone 90207 (TRBV6-5, TRBJ2-5)
CATAPSPQETQYF

SEQ ID NO: 180415 - protein, 13 aa, Homo sapiens
  CDR3 for alpha chain variable domain of TCR clone 90208 (TRAV21, TRAJ27)
CAARPGNAGKSTF

SEQ ID NO: 180416 - protein, 12 aa, Homo sapiens
  CDR3 for beta chain variable domain of TCR clone 90208 (TRBV4-2, TRBJ2-7)
AKLAGGTYEQYF

SEQ ID NO: 180417 - protein, 16 aa, Homo sapiens
  CDR3 for alpha chain variable domain of TCR clone 90209 (TRAV3, TRAJ10)
WAVRDMRAGGGNKLTF

SEQ ID NO: 180418 - protein, 13 aa, Homo sapiens
  CDR3 for beta chain variable domain of TCR clone 90209 (TRBV6-1, TRBJ1-1)
CASSRQGNTEAFF

SEQ ID NO: 180419 - protein, 13 aa, Homo sapiens
  CDR3 for alpha chain variable domain of TCR clone 90210 (TRAV13-2, TRAJ22)
CRDPSGSARQLTL

SEQ ID NO: 180420 - protein, 15 aa, Homo sapiens
  CDR3 for beta chain variable domain of TCR clone 90210 (TRBV11-3, TRBJ2-1)
CASNLAGQTYNEQFF

SEQ ID NO: 180421 - protein, 15 aa, Homo sapiens
  CDR3 for alpha chain variable domain of TCR clone 90211 (TRAV38-2/DV8, TRAJ45)
CAYWDSGGGADGLTF

SEQ ID NO: 180422 - protein, 14 aa, Homo sapiens
  CDR3 for beta chain variable domain of TCR clone 90211 (TRBV7-2, TRBJ2-7)
CASRSQEAAYEQYF

SEQ ID NO: 180423 - protein, 15 aa, Homo sapiens
  CDR3 for alpha chain variable domain of TCR clone 90212 (TRAV29/DV5, TRAJ29)
CAASESSSGNTPLVF

SEQ ID NO: 180424 - protein, 17 aa, Homo sapiens
  CDR3 for beta chain variable domain of TCR clone 90212 (TRBV4-1, TRBJ1-4)
CASSQEGPRGVEEKLFF

SEQ ID NO: 180425 - protein, 14 aa, Homo sapiens
  CDR3 for alpha chain variable domain of TCR clone 90213 (TRAV35, TRAJ50)
CAGHRKTSYDKVIF

SEQ ID NO: 180426 - protein, 13 aa, Homo sapiens
  CDR3 for beta chain variable domain of TCR clone 90213 (TRBV7-7, TRBJ2-3)
CASSLSRADTRDF

SEQ ID NO: 180427 - protein, 14 aa, Homo sapiens
  CDR3 for alpha chain variable domain of TCR clone 90214 (TRAV16, TRAJ33)
CALSAMDSNYQLIW

SEQ ID NO: 180428 - protein, 16 aa, Homo sapiens
  CDR3 for beta chain variable domain of TCR clone 90214 (TRBV15, TRBJ2-3)
CATSRDLGIVTDTQYF

SEQ ID NO: 180429 - protein, 14 aa, Homo sapiens
  CDR3 for alpha chain variable domain of TCR clone 90215 (TRAV8-2, TRAJ11)
CVVSEKSGYSTLNF

SEQ ID NO: 180430 - protein, 16 aa, Homo sapiens
  CDR3 for beta chain variable domain of TCR clone 90215 (TRBV28, TRBJ2-1)
CASSSPEYPRDNEQFF

SEQ ID NO: 180431 - protein, 14 aa, Homo sapiens
  CDR3 for alpha chain variable domain of TCR clone 90216 (TRAV1-2, TRAJ16)
CAVNRFSDGQKLLF

SEQ ID NO: 180432 - protein, 15 aa, Homo sapiens
  CDR3 for beta chain variable domain of TCR clone 90216 (TRBV11-2, TRBJ2-3)
CASSPGGGATDTQYF

SEQ ID NO: 180433 - protein, 16 aa, Homo sapiens
  CDR3 for alpha chain variable domain of TCR clone 90217 (TRAV30, TRAJ24)
CGTEIVDADSWGKFQF

SEQ ID NO: 180434 - protein, 12 aa, Homo sapiens
  CDR3 for beta chain variable domain of TCR clone 90217 (TRBV14, TRBJ2-7)
CASSRLKGEQYF

SEQ ID NO: 180435 - protein, 16 aa, Homo sapiens
  CDR3 for alpha chain variable domain of TCR clone 90218 (TRAV21, TRAJ45)
CAVSWGSGGGADGLTF

SEQ ID NO: 180436 - protein, 14 aa, Homo sapiens
  CDR3 for beta chain variable domain of TCR clone 90218 (TRBV12-5, TRBJ2-5)
CASGSRTHQETQYF

SEQ ID NO: 180437 - protein, 13 aa, Homo sapiens
  CDR3 for alpha chain variable domain of TCR clone 90219 (TRAV38-1, TRAJ42)
CARWGGSQGNLIF

SEQ ID NO: 180438 - protein, 17 aa, Homo sapiens
  CDR3 for beta chain variable domain of TCR clone 90219 (TRBV11-2, TRBJ2-1)
CASILYPPGVEYNEQFF

SEQ ID NO: 180439 - protein, 16 aa, Homo sapiens
  CDR3 for alpha chain variable domain of TCR clone 90220 (TRAV12-2, TRAJ50)
CAVGTATKTSYDKVIF

SEQ ID NO: 180440 - protein, 16 aa, Homo sapiens
  CDR3 for beta chain variable domain of TCR clone 90220 (TRBV4-2, TRBJ2-3)
CASSQELAGDTDTQYF

SEQ ID NO: 180441 - protein, 15 aa, Homo sapiens
  CDR3 for alpha chain variable domain of TCR clone 90221 (TRAV8-3, TRAJ45)
CASSYSGGGADGLTL

SEQ ID NO: 180442 - protein, 14 aa, Homo sapiens
  CDR3 for beta chain variable domain of TCR clone 90221 (TRBV4-1, TRBJ2-2)
CASSQAVNTGELFF

SEQ ID NO: 180443 - protein, 17 aa, Homo sapiens
  CDR3 for alpha chain variable domain of TCR clone 90222 (TRAV3, TRAJ42)
CAVRDRDYGGSQGNCIF

SEQ ID NO: 180444 - protein, 15 aa, Homo sapiens
  CDR3 for beta chain variable domain of TCR clone 90222 (TRBV6-6, TRBJ2-7)
CASSYSYGGSYEQYF

SEQ ID NO: 180445 - protein, 10 aa, Homo sapiens
  CDR3 for alpha chain variable domain of TCR clone 90223 (TRAV30, TRAJ48)
CGIGNEKLTF

SEQ ID NO: 180446 - protein, 14 aa, Homo sapiens
  CDR3 for beta chain variable domain of TCR clone 90223 (TRBV7-6, TRBJ2-3)
CASSVAGSTDTQYF

SEQ ID NO: 180447 - protein, 16 aa, Homo sapiens
  CDR3 for alpha chain variable domain of TCR clone 90224 (TRAV14/DV4, TRAJ57)
CNERGLTQGGSEKLVF

SEQ ID NO: 180448 - protein, 14 aa, Homo sapiens
  CDR3 for beta chain variable domain of TCR clone 90224 (TRBV4-1, TRBJ2-3)
CASSQDWSTDTQYF

SEQ ID NO: 180449 - protein, 13 aa, Homo sapiens
  CDR3 for alpha chain variable domain of TCR clone 90225 (TRAV12-2, TRAJ49)
CAVKPNTGNQFYF

SEQ ID NO: 180450 - protein, 15 aa, Homo sapiens
  CDR3 for beta chain variable domain of TCR clone 90225 (TRBV9, TRBJ1-6)
CASSVAGTGDSPLHF

SEQ ID NO: 180451 - protein, 16 aa, Homo sapiens
  CDR3 for alpha chain variable domain of TCR clone 90226 (TRAV3, TRAJ37)
CAVRPHGSGNTCKLIF

SEQ ID NO: 180452 - protein, 14 aa, Homo sapiens
  CDR3 for beta chain variable domain of TCR clone 90226 (TRBV25-1, TRBJ1-1)
CASTHLGGNTEAFF

SEQ ID NO: 180453 - protein, 14 aa, Homo sapiens
  CDR3 for alpha chain variable domain of TCR clone 90227 (TRAV12-2, TRAJ13)
CAVKKTGGYQKVTF

SEQ ID NO: 180454 - protein, 12 aa, Homo sapiens
  CDR3 for beta chain variable domain of TCR clone 90227 (TRBV19, TRBJ2-1)
CASSRQGAEQFF

SEQ ID NO: 180455 - protein, 15 aa, Homo sapiens
  CDR3 for alpha chain variable domain of TCR clone 90228 (TRAV3, TRAJ37)
CAVIRSSSNTGKLIF

SEQ ID NO: 180456 - protein, 17 aa, Homo sapiens
  CDR3 for beta chain variable domain of TCR clone 90228 (TRBV7-3, TRBJ2-3)
CASSLMKRMRGADTQYF

SEQ ID NO: 180457 - protein, 13 aa, Homo sapiens
  CDR3 for alpha chain variable domain of TCR clone 90229 (TRAV1-1, TRAJ11)
CAVLNSGYSTLTF

SEQ ID NO: 180458 - protein, 13 aa, Homo sapiens
  CDR3 for beta chain variable domain of TCR clone 90229 (TRBV2, TRBJ1-5)
CATAGPGNQPQHF

SEQ ID NO: 180459 - protein, 14 aa, Homo sapiens
  CDR3 for alpha chain variable domain of TCR clone 90230 (TRAV12-2, TRAJ11)
CAVNRESGYSTLTF

SEQ ID NO: 180460 - protein, 11 aa, Homo sapiens
  CDR3 for beta chain variable domain of TCR clone 90230 (TRBV29-1, TRBJ2-5)
CSEDRTGTQYF

SEQ ID NO: 180461 - protein, 13 aa, Homo sapiens
  CDR3 for alpha chain variable domain of TCR clone 90231 (TRAV8-1, TRAJ32)
CAADGGATNKLIF

SEQ ID NO: 180462 - protein, 13 aa, Homo sapiens
  CDR3 for beta chain variable domain of TCR clone 90231 (TRBV27, TRBJ1-1)
CASSLSIGAEAFF

SEQ ID NO: 180463 - protein, 17 aa, Homo sapiens
  CDR3 for alpha chain variable domain of TCR clone 90232 (TRAV3, TRAJ28)
CAVREAYSGAGSYQLTF

SEQ ID NO: 180464 - protein, 18 aa, Homo sapiens
  CDR3 for beta chain variable domain of TCR clone 90232 (TRBV27, TRBJ2-1)
CASWNRAVGVGSKNEQFF

SEQ ID NO: 180465 - protein, 13 aa, Homo sapiens
  CDR3 for alpha chain variable domain of TCR clone 90233 (TRAV12-3, TRAJ47)
CAMKKEYGNKLVF

SEQ ID NO: 180466 - protein, 14 aa, Homo sapiens
  CDR3 for beta chain variable domain of TCR clone 90233 (TRBV12-5, TRBJ2-5)
CASGSRTHQETQYF

SEQ ID NO: 180467 - protein, 19 aa, Homo sapiens
  CDR3 for alpha chain variable domain of TCR clone 90234 (TRAV29/DV5, TRAJ49)
CSVLLCSKLTVDTGNQFYF

SEQ ID NO: 180468 - protein, 15 aa, Homo sapiens
  CDR3 for beta chain variable domain of TCR clone 90234 (TRBV28, TRBJ2-1)
CASSIIAGGRSEQFF

SEQ ID NO: 180469 - protein, 14 aa, Homo sapiens
  CDR3 for alpha chain variable domain of TCR clone 90235 (TRAV35, TRAJ33)
CAGSSQDSNYQLIW

SEQ ID NO: 180470 - protein, 17 aa, Homo sapiens
  CDR3 for beta chain variable domain of TCR clone 90235 (TRBV20-1, TRBJ2-6)
CSARDRDRASGANVLTF

SEQ ID NO: 180471 - protein, 12 aa, Homo sapiens
  CDR3 for alpha chain variable domain of TCR clone 90236 (TRAV8-4, TRAJ43)
CAVSANNNDMRF

SEQ ID NO: 180472 - protein, 16 aa, Homo sapiens
  CDR3 for beta chain variable domain of TCR clone 90236 (TRBV7-2, TRBJ2-6)
CASSLAGRSGANVLTF

SEQ ID NO: 180473 - protein, 16 aa, Homo sapiens
  CDR3 for alpha chain variable domain of TCR clone 90237 (TRAV30, TRAJ24)
CGPEIVDADSWGKFQF

SEQ ID NO: 180474 - protein, 15 aa, Homo sapiens
  CDR3 for beta chain variable domain of TCR clone 90237 (TRBV20-1, TRBJ2-6)
CSARDRGPGANVLTF

SEQ ID NO: 180475 - protein, 14 aa, Homo sapiens
  CDR3 for alpha chain variable domain of TCR clone 90238 (TRAV13-1, TRAJ35)
CAASKGGFGNVLHC

SEQ ID NO: 180476 - protein, 13 aa, Homo sapiens
  CDR3 for beta chain variable domain of TCR clone 90238 (TRBV7-3, TRBJ1-1)
CASSQDWGAEEFF

SEQ ID NO: 180477 - protein, 16 aa, Homo sapiens
  CDR3 for alpha chain variable domain of TCR clone 90239 (TRAV1-1, TRAJ29)
CAVRSTRNSGNTPLVF

SEQ ID NO: 180478 - protein, 15 aa, Homo sapiens
  CDR3 for beta chain variable domain of TCR clone 90239 (TRBV7-9, TRBJ1-5)
CASSQGHQPNQPQHF

SEQ ID NO: 180479 - protein, 13 aa, Homo sapiens
  CDR3 for alpha chain variable domain of TCR clone 90240 (TRAV17, TRAJ26)
CATVDNYGQNFVF

SEQ ID NO: 180480 - protein, 14 aa, Homo sapiens
  CDR3 for beta chain variable domain of TCR clone 90240 (TRBV6-1, TRBJ1-3)
CASVQGGGGNTIYC

SEQ ID NO: 180481 - protein, 16 aa, Homo sapiens
  CDR3 for alpha chain variable domain of TCR clone 90241 (TRAV4, TRAJ18)
CCVLLIGGSTLGRLYF

SEQ ID NO: 180482 - protein, 15 aa, Homo sapiens
  CDR3 for beta chain variable domain of TCR clone 90241 (TRBV7-9, TRBJ1-5)
CASSQGHQPNQPQHF

SEQ ID NO: 180483 - protein, 14 aa, Homo sapiens
  CDR3 for alpha chain variable domain of TCR clone 90242 (TRAV8-1, TRAJ5)
CAVRTDTGRRALTF

SEQ ID NO: 180484 - protein, 12 aa, Homo sapiens
  CDR3 for beta chain variable domain of TCR clone 90242 (TRBV28, TRBJ2-3)
CASSLYRDTQYF

SEQ ID NO: 180485 - protein, 15 aa, Homo sapiens
  CDR3 for alpha chain variable domain of TCR clone 90243 (TRAV20, TRAJ50)
CAVRQMKTSYDKVIF

SEQ ID NO: 180486 - protein, 16 aa, Homo sapiens
  CDR3 for beta chain variable domain of TCR clone 90243 (TRBV15, TRBJ1-2)
CATSRGPRTGGGDYTF

SEQ ID NO: 180487 - protein, 14 aa, Homo sapiens
  CDR3 for alpha chain variable domain of TCR clone 90244 (TRAV16, TRAJ17)
CALSGRAAGNELTF

SEQ ID NO: 180488 - protein, 15 aa, Homo sapiens
  CDR3 for beta chain variable domain of TCR clone 90244 (TRBV3-1, TRBJ1-2)
CASSPTRLPEGGYTF

SEQ ID NO: 180489 - protein, 14 aa, Homo sapiens
  CDR3 for alpha chain variable domain of TCR clone 90245 (TRAV13-1, TRAJ3)
CAAEGYSSASKIIF

SEQ ID NO: 180490 - protein, 14 aa, Homo sapiens
  CDR3 for beta chain variable domain of TCR clone 90245 (TRBV19, TRBJ2-5)
RASSSSGIQETQYF

SEQ ID NO: 180491 - protein, 17 aa, Homo sapiens
  CDR3 for alpha chain variable domain of TCR clone 90246 (TRAV3, TRAJ42)
CAVRDRDYGGSQGNLIF

SEQ ID NO: 180492 - protein, 15 aa, Homo sapiens
  CDR3 for beta chain variable domain of TCR clone 90246 (TRBV6-6, TRBJ2-7)
CDSSYSYGGSYEQYF

SEQ ID NO: 180493 - protein, 16 aa, Homo sapiens
  CDR3 for alpha chain variable domain of TCR clone 90247 (TRAV3, TRAJ10)
CAVRDMRAGGGNKLTF

SEQ ID NO: 180494 - protein, 16 aa, Homo sapiens
  CDR3 for beta chain variable domain of TCR clone 90247 (TRBV6-1, TRBJ2-2)
CASSLGQGANTGELFF

SEQ ID NO: 180495 - protein, 11 aa, Homo sapiens
  CDR3 for alpha chain variable domain of TCR clone 90248 (TRAV1-2, TRAJ20)
CAVSNDYKLSF

SEQ ID NO: 180496 - protein, 16 aa, Homo sapiens
  CDR3 for beta chain variable domain of TCR clone 90248 (TRBV7-9, TRBJ2-3)
CASSLDYPDLTDTQYF

SEQ ID NO: 180497 - protein, 17 aa, Homo sapiens
  CDR3 for alpha chain variable domain of TCR clone 90249 (TRAV13-1, TRAJ28)
CAASPPYSGAGSYQLTF

SEQ ID NO: 180498 - protein, 15 aa, Homo sapiens
  CDR3 for beta chain variable domain of TCR clone 90249 (TRBV15, TRBJ2-3)
CATSRDPRGTDTQYF

SEQ ID NO: 180499 - protein, 11 aa, Homo sapiens
  CDR3 for alpha chain variable domain of TCR clone 90250 (TRAV21, TRAJ23)
CAPQRRGKPIF

SEQ ID NO: 180500 - protein, 14 aa, Homo sapiens
  CDR3 for beta chain variable domain of TCR clone 90250 (TRBV12-4, TRBJ1-1)
CASTWTGHDTEAFF

SEQ ID NO: 180501 - protein, 14 aa, Homo sapiens
  CDR3 for alpha chain variable domain of TCR clone 90251 (TRAV8-1, TRAJ15)
CAVNGQQAGTALIC

SEQ ID NO: 180502 - protein, 16 aa, Homo sapiens
  CDR3 for beta chain variable domain of TCR clone 90251 (TRBV11-3, TRBJ2-5)
CASSSVVAGSTETQYF

SEQ ID NO: 180503 - protein, 16 aa, Homo sapiens
  CDR3 for alpha chain variable domain of TCR clone 90252 (TRAV3, TRAJ37)
CAVRGKGSGNTGKLIF

SEQ ID NO: 180504 - protein, 15 aa, Homo sapiens
  CDR3 for beta chain variable domain of TCR clone 90252 (TRBV5-1, TRBJ2-7)
CVSSLNGGPAREQYF

SEQ ID NO: 180505 - protein, 16 aa, Homo sapiens
  CDR3 for alpha chain variable domain of TCR clone 90253 (TRAV4, TRAJ22)
CLVGDLYSGSAMQLTF

SEQ ID NO: 180506 - protein, 16 aa, Homo sapiens
  CDR3 for beta chain variable domain of TCR clone 90253 (TRBV7-9, TRBJ2-3)
CASSPWREVGTDTQYF

SEQ ID NO: 180507 - protein, 14 aa, Homo sapiens
  CDR3 for alpha chain variable domain of TCR clone 90254 (TRAV12-3, TRAJ7)
CAMSEIGGNNRLAL

SEQ ID NO: 180508 - protein, 15 aa, Homo sapiens
  CDR3 for beta chain variable domain of TCR clone 90254 (TRBV5-1, TRBJ2-2)
CASSSQGGNTGELFF

SEQ ID NO: 180509 - protein, 11 aa, Homo sapiens
  CDR3 for alpha chain variable domain of TCR clone 90255 (TRAV12-1, TRAJ43)
CVEYDNNDMRF

SEQ ID NO: 180510 - protein, 14 aa, Homo sapiens
  CDR3 for beta chain variable domain of TCR clone 90255 (TRBV10-2, TRBJ2-1)
CASSEGTSEDGQFF

SEQ ID NO: 180511 - protein, 17 aa, Homo sapiens
  CDR3 for alpha chain variable domain of TCR clone 90256 (TRAV26-2, TRAJ42)
CILRDVGYGGSQGNLIF

SEQ ID NO: 180512 - protein, 16 aa, Homo sapiens
  CDR3 for beta chain variable domain of TCR clone 90256 (TRBV12-4, TRBJ2-7)
CASSLIGGTGTYEQYY

SEQ ID NO: 180513 - protein, 14 aa, Homo sapiens
  CDR3 for alpha chain variable domain of TCR clone 90257 (TRAV8-2, TRAJ10)
CVVSDPGGGNKLTF

SEQ ID NO: 180514 - protein, 15 aa, Homo sapiens
  CDR3 for beta chain variable domain of TCR clone 90257 (TRBV6-1, TRBJ2-1)
CASSELRGQYNEQFF

SEQ ID NO: 180515 - protein, 12 aa, Homo sapiens
  CDR3 for alpha chain variable domain of TCR clone 90258 (TRAV12-1, TRAJ16)
CVVFRDGQKLLF

SEQ ID NO: 180516 - protein, 13 aa, Homo sapiens
  CDR3 for beta chain variable domain of TCR clone 90258 (TRBV10-2, TRBJ2-7)
CASGASGGYEQYF

SEQ ID NO: 180517 - protein, 12 aa, Homo sapiens
  CDR3 for alpha chain variable domain of TCR clone 90259 (TRAV12-3, TRAJ17)
CAVTLTGNKLTF

SEQ ID NO: 180518 - protein, 13 aa, Homo sapiens
  CDR3 for beta chain variable domain of TCR clone 90259 (TRBV7-9, TRBJ1-2)
CASSLKQNYGYTF

SEQ ID NO: 180519 - protein, 13 aa, Homo sapiens
  CDR3 for alpha chain variable domain of TCR clone 90260 (TRAV8-6, TRAJ49)
CAVITNTGNQFYF

SEQ ID NO: 180520 - protein, 14 aa, Homo sapiens
  CDR3 for beta chain variable domain of TCR clone 90260 (TRBV11-2, TRBJ2-5)
CASRPLAGRETQYF

SEQ ID NO: 180521 - protein, 14 aa, Homo sapiens
  CDR3 for alpha chain variable domain of TCR clone 90261 (TRAV35, TRAJ22)
CAGLRPGSARRLTF

SEQ ID NO: 180522 - protein, 13 aa, Homo sapiens
  CDR3 for beta chain variable domain of TCR clone 90261 (TRBV20-1, TRBJ2-7)
CSATHTSGYEQYF

SEQ ID NO: 180523 - protein, 16 aa, Homo sapiens
  CDR3 for alpha chain variable domain of TCR clone 90262 (TRAV8-6, TRAJ32)
CAVSDPHGGATNKLIF

SEQ ID NO: 180524 - protein, 18 aa, Homo sapiens
  CDR3 for beta chain variable domain of TCR clone 90262 (TRBV4-2, TRBJ2-6)
CASSQLQGVLTGANVLTF

SEQ ID NO: 180525 - protein, 14 aa, Homo sapiens
  CDR3 for alpha chain variable domain of TCR clone 90263 (TRAV8-4, TRAJ54)
CAVSEVLGAQKLVF

SEQ ID NO: 180526 - protein, 13 aa, Homo sapiens
  CDR3 for beta chain variable domain of TCR clone 90263 (TRBV27, TRBJ2-7)
CASSFVSSYERYF

SEQ ID NO: 180527 - protein, 12 aa, Homo sapiens
  CDR3 for alpha chain variable domain of TCR clone 90264 (TRAV3, TRAJ31)
CAARPRGPRLMF

SEQ ID NO: 180528 - protein, 17 aa, Homo sapiens
  CDR3 for beta chain variable domain of TCR clone 90264 (TRBV7-9, TRBJ1-5)
CASSASQGGYSNQPQHF

SEQ ID NO: 180529 - protein, 13 aa, Homo sapiens
  CDR3 for alpha chain variable domain of TCR clone 90265 (TRAV13-1, TRAJ39)
CAASIWAGNMLTF

SEQ ID NO: 180530 - protein, 15 aa, Homo sapiens
  CDR3 for beta chain variable domain of TCR clone 90265 (TRBV7-9, TRBJ1-1)
CASSLLEQGGTGAFF

SEQ ID NO: 180531 - protein, 18 aa, Homo sapiens
  CDR3 for alpha chain variable domain of TCR clone 90266 (TRAV21, TRAJ52)
CAVRPSPAGGTSYGKLTF

SEQ ID NO: 180532 - protein, 16 aa, Homo sapiens
  CDR3 for beta chain variable domain of TCR clone 90266 (TRBV29-1, TRBJ2-7)
CSVEVVGTSGSYEQYF

SEQ ID NO: 180533 - protein, 13 aa, Homo sapiens
  CDR3 for alpha chain variable domain of TCR clone 90267 (TRAV2, TRAJ20)
CAVEDPSEYKLSF

SEQ ID NO: 180534 - protein, 17 aa, Homo sapiens
  CDR3 for beta chain variable domain of TCR clone 90267 (TRBV11-2, TRBJ2-1)
CASSLYPPGVEYNEQFF

SEQ ID NO: 180535 - protein, 15 aa, Homo sapiens
  CDR3 for alpha chain variable domain of TCR clone 90268 (TRAV12-1, TRAJ42)
CVVTRDGGSQGNLSF

SEQ ID NO: 180536 - protein, 14 aa, Homo sapiens
  CDR3 for beta chain variable domain of TCR clone 90268 (TRBV11-2, TRBJ2-3)
CASSLGGGANTQYF

SEQ ID NO: 180537 - protein, 14 aa, Homo sapiens
  CDR3 for alpha chain variable domain of TCR clone 90269 (TRAV8-1, TRAJ22)
CAAPSSGSARQLTF

SEQ ID NO: 180538 - protein, 14 aa, Homo sapiens
  CDR3 for beta chain variable domain of TCR clone 90269 (TRBV9, TRBJ2-2)
CASSVRQGAGELFF

SEQ ID NO: 180539 - protein, 14 aa, Homo sapiens
  CDR3 for alpha chain variable domain of TCR clone 90270 (TRAV3, TRAJ33)
RAVRDMGSNYQLIW

SEQ ID NO: 180540 - protein, 17 aa, Homo sapiens
  CDR3 for beta chain variable domain of TCR clone 90270 (TRBV19, TRBJ2-1)
CASSIWSAQPTHNEQFF

SEQ ID NO: 180541 - protein, 16 aa, Homo sapiens
  CDR3 for alpha chain variable domain of TCR clone 90271 (TRAV26-1, TRAJ23)
CIVRVHPYNQGGKLNF

SEQ ID NO: 180542 - protein, 15 aa, Homo sapiens
  CDR3 for beta chain variable domain of TCR clone 90271 (TRBV5-7, TRBJ2-7)
CASSPYFEGSYEQYF

SEQ ID NO: 180543 - protein, 15 aa, Homo sapiens
  CDR3 for alpha chain variable domain of TCR clone 90272 (TRAV2, TRAJ15)
CAVEDRGQAGTALIF

SEQ ID NO: 180544 - protein, 12 aa, Homo sapiens
  CDR3 for beta chain variable domain of TCR clone 90272 (TRBV7-2, TRBJ2-7)
CASSSHSYEQYF

SEQ ID NO: 180545 - protein, 12 aa, Homo sapiens
  CDR3 for alpha chain variable domain of TCR clone 90273 (TRAV12-3, TRAJ17)
CAMTLTGNKLTF

SEQ ID NO: 180546 - protein, 14 aa, Homo sapiens
  CDR3 for beta chain variable domain of TCR clone 90273 (TRBV6-1, TRBJ2-7)
CASNRARPDYEQYF

SEQ ID NO: 180547 - protein, 13 aa, Homo sapiens
  CDR3 for alpha chain variable domain of TCR clone 90274 (TRAV13-2, TRAJ40)
CAEFTSGTYKYIF

SEQ ID NO: 180548 - protein, 14 aa, Homo sapiens
  CDR3 for beta chain variable domain of TCR clone 90274 (TRBV10-2, TRBJ1-5)
CASSYTGRNQPQHF

SEQ ID NO: 180549 - protein, 11 aa, Homo sapiens
  CDR3 for alpha chain variable domain of TCR clone 90275 (TRAV23/DV6, TRAJ58)
CAARLLRGETN

SEQ ID NO: 180550 - protein, 15 aa, Homo sapiens
  CDR3 for beta chain variable domain of TCR clone 90275 (TRBV9, TRBJ1-6)
CASSAAGTGDSPLHF

SEQ ID NO: 180551 - protein, 14 aa, Homo sapiens
  CDR3 for alpha chain variable domain of TCR clone 90276 (TRAV12-2, TRAJ53)
CAVKGGGSNYKLTF

SEQ ID NO: 180552 - protein, 13 aa, Homo sapiens
  CDR3 for beta chain variable domain of TCR clone 90276 (TRBV19, TRBJ2-7)
CASSPRQSYEQYF

SEQ ID NO: 180553 - protein, 13 aa, Homo sapiens
  CDR3 for alpha chain variable domain of TCR clone 90277 (TRAV12-1, TRAJ6)
CVVFPGGSYIPTF

SEQ ID NO: 180554 - protein, 17 aa, Homo sapiens
  CDR3 for beta chain variable domain of TCR clone 90277 (TRBV11-2, TRBJ2-1)
CASSLYPPGVEYNEQFF

SEQ ID NO: 180555 - protein, 23 aa, Homo sapiens
  CDR3 for alpha chain variable domain of TCR clone 90278 (TRAV26-1, TRAJ38)
CIADNAGNNHIQNPDPAGYQLRD

SEQ ID NO: 180556 - protein, 17 aa, Homo sapiens
  CDR3 for beta chain variable domain of TCR clone 90278 (TRBV11-2, TRBJ2-6)
CASSQRDIFSGANVLTF

SEQ ID NO: 180557 - protein, 14 aa, Homo sapiens
  CDR3 for alpha chain variable domain of TCR clone 90279 (TRAV20, TRAJ4)
CAVRLGGGYNKLIF

SEQ ID NO: 180558 - protein, 11 aa, Homo sapiens
  CDR3 for beta chain variable domain of TCR clone 90279 (TRBV2, TRBJ1-1)
CASREGTEAFF

SEQ ID NO: 180559 - protein, 16 aa, Homo sapiens
  CDR3 for alpha chain variable domain of TCR clone 90280 (TRAV12-3, TRAJ53)
CAMSPGSGGSNYKLTF

SEQ ID NO: 180560 - protein, 15 aa, Homo sapiens
  CDR3 for beta chain variable domain of TCR clone 90280 (TRBV4-2, TRBJ2-5)
CASSQRESRGETQYF

SEQ ID NO: 180561 - protein, 12 aa, Homo sapiens
  CDR3 for alpha chain variable domain of TCR clone 90281 (TRAV3, TRAJ27)
CAVRDKAGKSTF

SEQ ID NO: 180562 - protein, 16 aa, Homo sapiens
  CDR3 for beta chain variable domain of TCR clone 90281 (TRBV18, TRBJ2-7)
CASSPYRDGQTYEQYF

SEQ ID NO: 180563 - protein, 14 aa, Homo sapiens
  CDR3 for alpha chain variable domain of TCR clone 90282 (TRAV12-2, TRAJ24)
CAVTPADSWGKLQF

SEQ ID NO: 180564 - protein, 17 aa, Homo sapiens
  CDR3 for beta chain variable domain of TCR clone 90282 (TRBV13, TRBJ2-3)
CASSLSRVAGGRNTQYF

SEQ ID NO: 180565 - protein, 13 aa, Homo sapiens
  CDR3 for alpha chain variable domain of TCR clone 90283 (TRAV13-1, TRAJ26)
CATVFGPGTRLSV

SEQ ID NO: 180566 - protein, 14 aa, Homo sapiens
  CDR3 for beta chain variable domain of TCR clone 90283 (TRBV18, TRBJ2-3)
CASSPRTSTDTQYF

SEQ ID NO: 180567 - protein, 19 aa, Homo sapiens
  CDR3 for alpha chain variable domain of TCR clone 90284 (TRAV26-1, TRAJ28)
CIVRVAHAYSGAGSYQLTF

SEQ ID NO: 180568 - protein, 16 aa, Homo sapiens
  CDR3 for beta chain variable domain of TCR clone 90284 (TRBV2, TRBJ2-1)
CASSVGGSLSYNEQFF

SEQ ID NO: 180569 - protein, 11 aa, Homo sapiens
  CDR3 for alpha chain variable domain of TCR clone 90285 (TRAV17, TRAJ9)
CATTGGFKTIF

SEQ ID NO: 180570 - protein, 11 aa, Homo sapiens
  CDR3 for beta chain variable domain of TCR clone 90285 (TRBV29-1, TRBJ2-5)
CSEDRAGTQYF

SEQ ID NO: 180571 - protein, 13 aa, Homo sapiens
  CDR3 for alpha chain variable domain of TCR clone 90286 (TRAV20, TRAJ31)
CAVQAIGGARLMF

SEQ ID NO: 180572 - protein, 12 aa, Homo sapiens
  CDR3 for beta chain variable domain of TCR clone 90286 (TRBV24-1, TRBJ1-1)
CATLYPDTEAFF

SEQ ID NO: 180573 - protein, 14 aa, Homo sapiens
  CDR3 for alpha chain variable domain of TCR clone 90287 (TRAV12-1, TRAJ4)
CVGDFYGGYNKLIF

SEQ ID NO: 180574 - protein, 15 aa, Homo sapiens
  CDR3 for beta chain variable domain of TCR clone 90287 (TRBV4-2, TRBJ2-7)
CASSQVDRSSYEQYF

SEQ ID NO: 180575 - protein, 13 aa, Homo sapiens
  CDR3 for alpha chain variable domain of TCR clone 90288 (TRAV35, TRAJ13)
CAGRAGGYQKVTF

SEQ ID NO: 180576 - protein, 13 aa, Homo sapiens
  CDR3 for beta chain variable domain of TCR clone 90288 (TRBV10-3, TRBJ2-7)
CASKLAVNYEQYF

SEQ ID NO: 180577 - protein, 14 aa, Homo sapiens
  CDR3 for alpha chain variable domain of TCR clone 90289 (TRAV25, TRAJ44)
CAVFPTGTASKLTF

SEQ ID NO: 180578 - protein, 13 aa, Homo sapiens
  CDR3 for beta chain variable domain of TCR clone 90289 (TRBV7-3, TRBJ1-1)
CASSQDWGAEAFF

SEQ ID NO: 180579 - protein, 10 aa, Homo sapiens
  CDR3 for alpha chain variable domain of TCR clone 90290 (TRAV2, TRAJ32)
CAEPKGMVVL

SEQ ID NO: 180580 - protein, 13 aa, Homo sapiens
  CDR3 for beta chain variable domain of TCR clone 90290 (TRBV28, TRBJ2-7)
CASSLFRGDEQYF

SEQ ID NO: 180581 - protein, 11 aa, Homo sapiens
  CDR3 for alpha chain variable domain of TCR clone 90291 (TRAV21, TRAJ34)
CAVDNTDKLIF

SEQ ID NO: 180582 - protein, 15 aa, Homo sapiens
  CDR3 for beta chain variable domain of TCR clone 90291 (TRBV19, TRBJ1-1)
CASTSGQIQNTEAFF

SEQ ID NO: 180583 - protein, 10 aa, Homo sapiens
  CDR3 for alpha chain variable domain of TCR clone 90292 (TRAV5, TRAJ34)
CAEDTDKLIF

SEQ ID NO: 180584 - protein, 16 aa, Homo sapiens
  CDR3 for beta chain variable domain of TCR clone 90292 (TRBV15, TRBJ2-7)
CATSRDRGRRRGEQYF

SEQ ID NO: 180585 - protein, 17 aa, Homo sapiens
  CDR3 for alpha chain variable domain of TCR clone 90293 (TRAV8-6, TRAJ58)
CAVSSWVGETSGSWLTF

SEQ ID NO: 180586 - protein, 14 aa, Homo sapiens
  CDR3 for beta chain variable domain of TCR clone 90293 (TRBV4-2, TRBJ2-1)
CASGLDRAYNEQFF

SEQ ID NO: 180587 - protein, 13 aa, Homo sapiens
  CDR3 for alpha chain variable domain of TCR clone 90294 (TRAV35, TRAJ43)
CAGYPYNNNEMRF

SEQ ID NO: 180588 - protein, 15 aa, Homo sapiens
  CDR3 for beta chain variable domain of TCR clone 90294 (TRBV25-1, TRBJ1-4)
CASSKRIATNEKLFF

SEQ ID NO: 180589 - protein, 13 aa, Homo sapiens
  CDR3 for alpha chain variable domain of TCR clone 90295 (TRAV21, TRAJ57)
CAVTQGGSEKLVF

SEQ ID NO: 180590 - protein, 16 aa, Homo sapiens
  CDR3 for beta chain variable domain of TCR clone 90295 (TRBV29-1, TRBJ2-7)
CSVEDAEDATAYEQYF

SEQ ID NO: 180591 - protein, 13 aa, Homo sapiens
  CDR3 for alpha chain variable domain of TCR clone 90296 (TRAV27, TRAJ41)
CAGEGNSGYALNF

SEQ ID NO: 180592 - protein, 12 aa, Homo sapiens
  CDR3 for beta chain variable domain of TCR clone 90296 (TRBV7-9, TRBJ2-7)
CASSIKREEQYF

SEQ ID NO: 180593 - protein, 13 aa, Homo sapiens
  CDR3 for alpha chain variable domain of TCR clone 90297 (TRAV36/DV7, TRAJ54)
CVVDIQGAQKLVF

SEQ ID NO: 180594 - protein, 15 aa, Homo sapiens
  CDR3 for beta chain variable domain of TCR clone 90297 (TRBV7-9, TRBJ1-4)
CASSATGGNNEKLFF

SEQ ID NO: 180595 - protein, 12 aa, Homo sapiens
  CDR3 for alpha chain variable domain of TCR clone 90298 (TRAV24, TRAJ40)
CAVMPGTYKYIF

SEQ ID NO: 180596 - protein, 11 aa, Homo sapiens
  CDR3 for beta chain variable domain of TCR clone 90298 (TRBV10-1, TRBJ2-3)
CASSDSDTQYF

SEQ ID NO: 180597 - protein, 14 aa, Homo sapiens
  CDR3 for alpha chain variable domain of TCR clone 90299 (TRAV35, TRAJ33)
CDGSSQDSNYQLIW

SEQ ID NO: 180598 - protein, 15 aa, Homo sapiens
  CDR3 for beta chain variable domain of TCR clone 90299 (TRBV20-1, TRBJ2-7)
CSAESGTSGAYEQYF

SEQ ID NO: 180599 - protein, 15 aa, Homo sapiens
  CDR3 for alpha chain variable domain of TCR clone 90300 (TRAV8-4, TRAJ37)
CAVTYGSSNTGKLIF

SEQ ID NO: 180600 - protein, 12 aa, Homo sapiens
  CDR3 for beta chain variable domain of TCR clone 90300 (TRBV12-4, TRBJ2-5)
CQQFGGSRTQYF

SEQ ID NO: 180601 - protein, 10 aa, Homo sapiens
  CDR3 for alpha chain variable domain of TCR clone 90301 (TRAV38-2/DV8, TRAJ40)
CASGTYKYIF

SEQ ID NO: 180602 - protein, 14 aa, Homo sapiens
  CDR3 for beta chain variable domain of TCR clone 90301 (TRBV7-9, TRBJ2-1)
CASSPRDYLYEQFF

SEQ ID NO: 180603 - protein, 10 aa, Homo sapiens
  CDR3 for alpha chain variable domain of TCR clone 90302 (TRAV20, TRAJ22)
CAAPARQLTF

SEQ ID NO: 180604 - protein, 17 aa, Homo sapiens
  CDR3 for beta chain variable domain of TCR clone 90302 (TRBV20-1, TRBJ2-1)
CSARDPLAGVWDNEQFF

SEQ ID NO: 180605 - protein, 15 aa, Homo sapiens
  CDR3 for alpha chain variable domain of TCR clone 90303 (TRAV27, TRAJ38)
CAGRFNAGNNRKLIW

SEQ ID NO: 180606 - protein, 13 aa, Homo sapiens
  CDR3 for beta chain variable domain of TCR clone 90303 (TRBV20-1, TRBJ2-1)
TSGALPPGNEQFF

SEQ ID NO: 180607 - protein, 14 aa, Homo sapiens
  CDR3 for alpha chain variable domain of TCR clone 90304 (TRAV17, TRAJ8)
CATDLNTGFQKLVF

SEQ ID NO: 180608 - protein, 16 aa, Homo sapiens
  CDR3 for beta chain variable domain of TCR clone 90304 (TRBV12-4, TRBJ2-5)
CASSFFVRGRQETQYF

SEQ ID NO: 180609 - protein, 10 aa, Homo sapiens
  CDR3 for alpha chain variable domain of TCR clone 90305 (TRAV12-1, TRAJ43)
CVVHNNDMRF

SEQ ID NO: 180610 - protein, 16 aa, Homo sapiens
  CDR3 for beta chain variable domain of TCR clone 90305 (TRBV25-1, TRBJ1-1)
CASSGDRDRGRIEAFF

SEQ ID NO: 180611 - protein, 14 aa, Homo sapiens
  CDR3 for alpha chain variable domain of TCR clone 90306 (TRAV26-1, TRAJ48)
CIVRVGFGNEKVTF

SEQ ID NO: 180612 - protein, 13 aa, Homo sapiens
  CDR3 for beta chain variable domain of TCR clone 90306 (TRBV11-3, TRBJ2-3)
CASSHDTKDTQYF

SEQ ID NO: 180613 - protein, 11 aa, Homo sapiens
  CDR3 for alpha chain variable domain of TCR clone 90307 (TRAV3, TRAJ17)
CAEAPGNKLTF

SEQ ID NO: 180614 - protein, 15 aa, Homo sapiens
  CDR3 for beta chain variable domain of TCR clone 90307 (TRBV12-4, TRBJ2-7)
CASSLGSGGPYEQYF

SEQ ID NO: 180615 - protein, 12 aa, Homo sapiens
  CDR3 for alpha chain variable domain of TCR clone 90308 (TRAV12-3, TRAJ17)
CAMTLTGNKPTF

SEQ ID NO: 180616 - protein, 15 aa, Homo sapiens
  CDR3 for beta chain variable domain of TCR clone 90308 (TRBV20-1, TRBJ2-7)
RSARDRVSGMDEQYF

SEQ ID NO: 180617 - protein, 14 aa, Homo sapiens
  CDR3 for alpha chain variable domain of TCR clone 90309 (TRAV12-1, TRAJ8)
CVVNSNTGFQRLVF

SEQ ID NO: 180618 - protein, 16 aa, Homo sapiens
  CDR3 for beta chain variable domain of TCR clone 90309 (TRBV20-1, TRBJ2-2)
CSARDDRVGLTGELFF

SEQ ID NO: 180619 - protein, 15 aa, Homo sapiens
  CDR3 for alpha chain variable domain of TCR clone 90310 (TRAV8-3, TRAJ27)
CAVGPSKTNAGKSTF

SEQ ID NO: 180620 - protein, 14 aa, Homo sapiens
  CDR3 for beta chain variable domain of TCR clone 90310 (TRBV11-2, TRBJ2-3)
CASSRLARTETQYF

SEQ ID NO: 180621 - protein, 14 aa, Homo sapiens
  CDR3 for alpha chain variable domain of TCR clone 90311 (TRAV2, TRAJ13)
CAVPPEGGYQKVTF

SEQ ID NO: 180622 - protein, 15 aa, Homo sapiens
  CDR3 for beta chain variable domain of TCR clone 90311 (TRBV2, TRBJ2-4)
CASSLKTGSSNIQYF

SEQ ID NO: 180623 - protein, 15 aa, Homo sapiens
  CDR3 for alpha chain variable domain of TCR clone 90312 (TRAV26-1, TRAJ42)
FTVRVKGGSQGNLIF

SEQ ID NO: 180624 - protein, 14 aa, Homo sapiens
  CDR3 for beta chain variable domain of TCR clone 90312 (TRBV19, TRBJ2-2)
CATTGHANTGELFF

SEQ ID NO: 180625 - protein, 16 aa, Homo sapiens
  CDR3 for alpha chain variable domain of TCR clone 90313 (TRAV1-2, TRAJ10)
CAVRGVLTGGGNKLTF

SEQ ID NO: 180626 - protein, 17 aa, Homo sapiens
  CDR3 for beta chain variable domain of TCR clone 90313 (TRBV3-1, TRBJ2-5)
CASSQDTLAGGGETQYF

SEQ ID NO: 180627 - protein, 13 aa, Homo sapiens
  CDR3 for alpha chain variable domain of TCR clone 90314 (TRAV38-2/DV8, TRAJ34)
CAYRNYNTDKLIF

SEQ ID NO: 180628 - protein, 13 aa, Homo sapiens
  CDR3 for beta chain variable domain of TCR clone 90314 (TRBV7-9, TRBJ1-2)
CASSLKQNYGYTF

SEQ ID NO: 180629 - protein, 17 aa, Homo sapiens
  CDR3 for alpha chain variable domain of TCR clone 90315 (TRAV8-6, TRAJ58)
CAVSSWVGETSGSRLTL

SEQ ID NO: 180630 - protein, 14 aa, Homo sapiens
  CDR3 for beta chain variable domain of TCR clone 90315 (TRBV20-1, TRBJ2-1)
CSAQIGGSANEQFF

SEQ ID NO: 180631 - protein, 16 aa, Homo sapiens
  CDR3 for alpha chain variable domain of TCR clone 90316 (TRAV26-1, TRAJ53)
CIVRVAMGGSNYKLSF

SEQ ID NO: 180632 - protein, 12 aa, Homo sapiens
  CDR3 for beta chain variable domain of TCR clone 90316 (TRBV7-9, TRBJ1-5)
CASSPQGQPQHF

SEQ ID NO: 180633 - protein, 15 aa, Homo sapiens
  CDR3 for alpha chain variable domain of TCR clone 90317 (TRAV8-3, TRAJ27)
CAVGPSKTNAGKSTF

SEQ ID NO: 180634 - protein, 14 aa, Homo sapiens
  CDR3 for beta chain variable domain of TCR clone 90317 (TRBV27, TRBJ1-5)
CASSLDPRNQPQHF

SEQ ID NO: 180635 - protein, 15 aa, Homo sapiens
  CDR3 for alpha chain variable domain of TCR clone 90318 (TRAV26-1, TRAJ29)
CIVRVEGSGNTPLVF

SEQ ID NO: 180636 - protein, 15 aa, Homo sapiens
  CDR3 for beta chain variable domain of TCR clone 90318 (TRBV7-9, TRBJ1-4)
CASSARTGGNEKLFF

SEQ ID NO: 180637 - protein, 15 aa, Homo sapiens
  CDR3 for alpha chain variable domain of TCR clone 90319 (TRAV21, TRAJ37)
CAVRPTLSNTGKLIF

SEQ ID NO: 180638 - protein, 14 aa, Homo sapiens
  CDR3 for beta chain variable domain of TCR clone 90319 (TRBV9, TRBJ2-1)
CASSVDPRGKEQFF

SEQ ID NO: 180639 - protein, 11 aa, Homo sapiens
  CDR3 for alpha chain variable domain of TCR clone 90320 (TRAV1-1, TRAJ23)
YAVRQGGKLIF

SEQ ID NO: 180640 - protein, 20 aa, Homo sapiens
  CDR3 for beta chain variable domain of TCR clone 90320 (TRBV7-8, TRBJ2-2)
CASSHLFPGPTVHITGELFF

SEQ ID NO: 180641 - protein, 11 aa, Homo sapiens
  CDR3 for alpha chain variable domain of TCR clone 90321 (TRAV12-2, TRAJ29)
CAVTLRSPLVL

SEQ ID NO: 180642 - protein, 16 aa, Homo sapiens
  CDR3 for beta chain variable domain of TCR clone 90321 (TRBV29-1, TRBJ2-2)
CSVETRASGNTGELFF

SEQ ID NO: 180643 - protein, 13 aa, Homo sapiens
  CDR3 for alpha chain variable domain of TCR clone 90322 (TRAV3, TRAJ8)
CAVRFTGFQKLVF

SEQ ID NO: 180644 - protein, 15 aa, Homo sapiens
  CDR3 for beta chain variable domain of TCR clone 90322 (TRBV6-3, TRBJ2-2)
CASSFLATLTGELFF

SEQ ID NO: 180645 - protein, 15 aa, Homo sapiens
  CDR3 for alpha chain variable domain of TCR clone 90323 (TRAV3, TRAJ4)
CTVRDGTGGYNKLIF

SEQ ID NO: 180646 - protein, 13 aa, Homo sapiens
  CDR3 for beta chain variable domain of TCR clone 90323 (TRBV12-5, TRBJ1-2)
CASGVRTGNGYTF

SEQ ID NO: 180647 - protein, 15 aa, Homo sapiens
  CDR3 for alpha chain variable domain of TCR clone 90324 (TRAV14/DV4, TRAJ10)
FAMRELTGGGNKLTF

SEQ ID NO: 180648 - protein, 18 aa, Homo sapiens
  CDR3 for beta chain variable domain of TCR clone 90324 (TRBV7-9, TRBJ2-7)
CASSLTTSGSRTWYEQYF

SEQ ID NO: 180649 - protein, 14 aa, Homo sapiens
  CDR3 for alpha chain variable domain of TCR clone 90325 (TRAV12-2, TRAJ10)
CAVNEAGGGNKLTF

SEQ ID NO: 180650 - protein, 11 aa, Homo sapiens
  CDR3 for beta chain variable domain of TCR clone 90325 (TRBV12-4, TRBJ2-3)
CASTATDTQYF

SEQ ID NO: 180651 - protein, 11 aa, Homo sapiens
  CDR3 for alpha chain variable domain of TCR clone 90326 (TRAV23/DV6, TRAJ58)
CAARLLRVETS

SEQ ID NO: 180652 - protein, 13 aa, Homo sapiens
  CDR3 for beta chain variable domain of TCR clone 90326 (TRBV6-4, TRBJ1-5)
CASSADLNQPQHF

SEQ ID NO: 180653 - protein, 15 aa, Homo sapiens
  CDR3 for alpha chain variable domain of TCR clone 90327 (TRAV12-1, TRAJ41)
CVVNGASNSGYALNF

SEQ ID NO: 180654 - protein, 15 aa, Homo sapiens
  CDR3 for beta chain variable domain of TCR clone 90327 (TRBV7-2, TRBJ1-5)
CASSSTGVDNQPRHF

SEQ ID NO: 180655 - protein, 14 aa, Homo sapiens
  CDR3 for alpha chain variable domain of TCR clone 90328 (TRAV26-1, TRAJ34)
CIVRVAYNTDKLIF

SEQ ID NO: 180656 - protein, 13 aa, Homo sapiens
  CDR3 for beta chain variable domain of TCR clone 90328 (TRBV4-2, TRBJ1-1)
CASIQAGNTEAFF

SEQ ID NO: 180657 - protein, 18 aa, Homo sapiens
  CDR3 for alpha chain variable domain of TCR clone 90329 (TRAV13-1, TRAJ52)
CAAKNPNAGGTSYGKLTF

SEQ ID NO: 180658 - protein, 14 aa, Homo sapiens
  CDR3 for beta chain variable domain of TCR clone 90329 (TRBV7-8, TRBJ1-2)
CASSPDSLSYGYTF

SEQ ID NO: 180659 - protein, 14 aa, Homo sapiens
  CDR3 for alpha chain variable domain of TCR clone 90330 (TRAV30, TRAJ26)
CGSEIVSYGQNFVF

SEQ ID NO: 180660 - protein, 13 aa, Homo sapiens
  CDR3 for beta chain variable domain of TCR clone 90330 (TRBV19, TRBJ1-3)
CASRLSLGNTIYF

SEQ ID NO: 180661 - protein, 12 aa, Homo sapiens
  CDR3 for alpha chain variable domain of TCR clone 90331 (TRAV3, TRAJ26)
CAVRDYGQNFVF

SEQ ID NO: 180662 - protein, 15 aa, Homo sapiens
  CDR3 for beta chain variable domain of TCR clone 90331 (TRBV20-1, TRBJ2-7)
CSARDRVSGMDEQYF

SEQ ID NO: 180663 - protein, 13 aa, Homo sapiens
  CDR3 for alpha chain variable domain of TCR clone 90332 (TRAV9-2, TRAJ53)
CALSGGSNYKLTF

SEQ ID NO: 180664 - protein, 14 aa, Homo sapiens
  CDR3 for beta chain variable domain of TCR clone 90332 (TRBV7-9, TRBJ2-1)
CASSSMVGFGEQFF

SEQ ID NO: 180665 - protein, 12 aa, Homo sapiens
  CDR3 for alpha chain variable domain of TCR clone 90333 (TRAV13-2, TRAJ23)
CAERHRGGKLIF

SEQ ID NO: 180666 - protein, 16 aa, Homo sapiens
  CDR3 for beta chain variable domain of TCR clone 90333 (TRBV7-8, TRBJ2-6)
CASRVGDSSGANVLTF

SEQ ID NO: 180667 - protein, 14 aa, Homo sapiens
  CDR3 for alpha chain variable domain of TCR clone 90334 (TRAV12-1, TRAJ17)
CVVNYKAAGNKLTF

SEQ ID NO: 180668 - protein, 17 aa, Homo sapiens
  CDR3 for beta chain variable domain of TCR clone 90334 (TRBV20-1, TRBJ2-1)
CSASSSGVAGSYNEQFF

SEQ ID NO: 180669 - protein, 16 aa, Homo sapiens
  CDR3 for alpha chain variable domain of TCR clone 90335 (TRAV14/DV4, TRAJ21)
CSMREGPENNFNKFYF

SEQ ID NO: 180670 - protein, 12 aa, Homo sapiens
  CDR3 for beta chain variable domain of TCR clone 90335 (TRBV29-1, TRBJ2-2)
CSVDKYTGELFF

SEQ ID NO: 180671 - protein, 15 aa, Homo sapiens
  CDR3 for alpha chain variable domain of TCR clone 90336 (TRAV3, TRAJ17)
CAVSPKEAAGNKLTF

SEQ ID NO: 180672 - protein, 12 aa, Homo sapiens
  CDR3 for beta chain variable domain of TCR clone 90336 (TRBV5-5, TRBJ2-5)
CASSYFGETQYF

SEQ ID NO: 180673 - protein, 13 aa, Homo sapiens
  CDR3 for alpha chain variable domain of TCR clone 90337 (TRAV14/DV4, TRAJ26)
CAMREGRGQNFVF

SEQ ID NO: 180674 - protein, 13 aa, Homo sapiens
  CDR3 for beta chain variable domain of TCR clone 90337 (TRBV19, TRBJ2-7)
CASRKAGGSEQYF

SEQ ID NO: 180675 - protein, 16 aa, Homo sapiens
  CDR3 for alpha chain variable domain of TCR clone 90338 (TRAV3, TRAJ3)
FAVRDRAKSSASKIIF

SEQ ID NO: 180676 - protein, 13 aa, Homo sapiens
  CDR3 for beta chain variable domain of TCR clone 90338 (TRBV10-3, TRBJ2-7)
CASKLAVNYEQYF

SEQ ID NO: 180677 - protein, 12 aa, Homo sapiens
  CDR3 for alpha chain variable domain of TCR clone 90339 (TRAV26-1, TRAJ13)
CIVPRGYQKVTF

SEQ ID NO: 180678 - protein, 14 aa, Homo sapiens
  CDR3 for beta chain variable domain of TCR clone 90339 (TRBV7-2, TRBJ2-7)
CASSPKTSFYEQYF

SEQ ID NO: 180679 - protein, 13 aa, Homo sapiens
  CDR3 for alpha chain variable domain of TCR clone 90340 (TRAV21, TRAJ34)
CAVSERDTDKLIF

SEQ ID NO: 180680 - protein, 17 aa, Homo sapiens
  CDR3 for beta chain variable domain of TCR clone 90340 (TRBV20-1, TRBJ1-5)
CSARDPSAQGFNQPQHF

SEQ ID NO: 180681 - protein, 18 aa, Homo sapiens
  CDR3 for alpha chain variable domain of TCR clone 90341 (TRAV21, TRAJ52)
CAVRPSPAGGTSYGKLTS

SEQ ID NO: 180682 - protein, 14 aa, Homo sapiens
  CDR3 for beta chain variable domain of TCR clone 90341 (TRBV2, TRBJ1-5)
CASKKTDSNQPQHF

SEQ ID NO: 180683 - protein, 15 aa, Homo sapiens
  CDR3 for alpha chain variable domain of TCR clone 90342 (TRAV9-2, TRAJ56)
CALSDVDGANSKLTF

SEQ ID NO: 180684 - protein, 14 aa, Homo sapiens
  CDR3 for beta chain variable domain of TCR clone 90342 (TRBV5-1, TRBJ2-7)
CASIRGESLYEQYF

SEQ ID NO: 180685 - protein, 15 aa, Homo sapiens
  CDR3 for alpha chain variable domain of TCR clone 90343 (TRAV13-1, TRAJ48)
CAASTPVGGNEKLTF

SEQ ID NO: 180686 - protein, 14 aa, Homo sapiens
  CDR3 for beta chain variable domain of TCR clone 90343 (TRBV28, TRBJ2-7)
CASSLYGGTYEQYF

SEQ ID NO: 180687 - protein, 19 aa, Homo sapiens
  CDR3 for alpha chain variable domain of TCR clone 90344 (TRAV8-4, TRAJ16)
CAVSPVGRWPEAALRKGDH

SEQ ID NO: 180688 - protein, 15 aa, Homo sapiens
  CDR3 for beta chain variable domain of TCR clone 90344 (TRBV11-3, TRBJ2-7)
CASSPGPASSYEQYF

SEQ ID NO: 180689 - protein, 12 aa, Homo sapiens
  CDR3 for alpha chain variable domain of TCR clone 90345 (TRAV1-2, TRAJ24)
CAVGGSWGKFQF

SEQ ID NO: 180690 - protein, 15 aa, Homo sapiens
  CDR3 for beta chain variable domain of TCR clone 90345 (TRBV28, TRBJ2-5)
CASSPGQGSIETQYF

SEQ ID NO: 180691 - protein, 13 aa, Homo sapiens
  CDR3 for alpha chain variable domain of TCR clone 90346 (TRAV3, TRAJ21)
CAVREPDFNKFYF

SEQ ID NO: 180692 - protein, 13 aa, Homo sapiens
  CDR3 for beta chain variable domain of TCR clone 90346 (TRBV7-2, TRBJ1-5)
CASSFARNQPQHF

SEQ ID NO: 180693 - protein, 11 aa, Homo sapiens
  CDR3 for alpha chain variable domain of TCR clone 90347 (TRAV12-3, TRAJ27)
CAMANAGKSTF

SEQ ID NO: 180694 - protein, 18 aa, Homo sapiens
  CDR3 for beta chain variable domain of TCR clone 90347 (TRBV7-9, TRBJ2-1)
CASSLAVSGTSGRNEQFF

SEQ ID NO: 180695 - protein, 11 aa, Homo sapiens
  CDR3 for alpha chain variable domain of TCR clone 90348 (TRAV26-1, TRAJ27)
CIDPNAGKSTF

SEQ ID NO: 180696 - protein, 18 aa, Homo sapiens
  CDR3 for beta chain variable domain of TCR clone 90348 (TRBV7-9, TRBJ2-6)
CASSFTGAGISGANVLTF

SEQ ID NO: 180697 - protein, 13 aa, Homo sapiens
  CDR3 for alpha chain variable domain of TCR clone 90349 (TRAV23/DV6, TRAJ22)
CAPHSGSARQLTF

SEQ ID NO: 180698 - protein, 15 aa, Homo sapiens
  CDR3 for beta chain variable domain of TCR clone 90349 (TRBV11-2, TRBJ1-6)
CASSLDPWAVSPLHF

SEQ ID NO: 180699 - protein, 15 aa, Homo sapiens
  CDR3 for alpha chain variable domain of TCR clone 90350 (TRAV17, TRAJ54)
CATEKLGQGAQKLGF

SEQ ID NO: 180700 - protein, 16 aa, Homo sapiens
  CDR3 for beta chain variable domain of TCR clone 90350 (TRBV9, TRBJ1-2)
CASSVEEKVSPYGYTF

SEQ ID NO: 180701 - protein, 13 aa, Homo sapiens
  CDR3 for alpha chain variable domain of TCR clone 90351 (TRAV27, TRAJ17)
CAGAATAGNKRTF

SEQ ID NO: 180702 - protein, 15 aa, Homo sapiens
  CDR3 for beta chain variable domain of TCR clone 90351 (TRBV5-1, TRBJ2-3)
CASRNQAGSTDTQYF

SEQ ID NO: 180703 - protein, 13 aa, Homo sapiens
  CDR3 for alpha chain variable domain of TCR clone 90352 (TRAV13-1, TRAJ5)
CAASDTGRRALTF

SEQ ID NO: 180704 - protein, 13 aa, Homo sapiens
  CDR3 for beta chain variable domain of TCR clone 90352 (TRBV13, TRBJ2-5)
CASSPEVGETQYF

SEQ ID NO: 180705 - protein, 12 aa, Homo sapiens
  CDR3 for alpha chain variable domain of TCR clone 90353 (TRAV3, TRAJ31)
CAVRPRGPSLMF

SEQ ID NO: 180706 - protein, 17 aa, Homo sapiens
  CDR3 for beta chain variable domain of TCR clone 90353 (TRBV7-9, TRBJ1-5)
CASSASQGGYSNQPQHF

SEQ ID NO: 180707 - protein, 14 aa, Homo sapiens
  CDR3 for alpha chain variable domain of TCR clone 90354 (TRAV30, TRAJ33)
CGTVAPRSNYQLIW

SEQ ID NO: 180708 - protein, 18 aa, Homo sapiens
  CDR3 for beta chain variable domain of TCR clone 90354 (TRBV11-2, TRBJ2-3)
CASSLGGAARGAPNTQYF

SEQ ID NO: 180709 - protein, 13 aa, Homo sapiens
  CDR3 for alpha chain variable domain of TCR clone 90355 (TRAV13-1, TRAJ20)
CAARVSNDYKLIF

SEQ ID NO: 180710 - protein, 12 aa, Homo sapiens
  CDR3 for beta chain variable domain of TCR clone 90355 (TRBV20-1, TRBJ2-1)
CSARLGTDEQFF

SEQ ID NO: 180711 - protein, 14 aa, Homo sapiens
  CDR3 for alpha chain variable domain of TCR clone 90356 (TRAV17, TRAJ16)
CATDDFSDGQKLLF

SEQ ID NO: 180712 - protein, 15 aa, Homo sapiens
  CDR3 for beta chain variable domain of TCR clone 90356 (TRBV18, TRBJ2-1)
CASSPPSASYNEQFF

SEQ ID NO: 180713 - protein, 14 aa, Homo sapiens
  CDR3 for alpha chain variable domain of TCR clone 90357 (TRAV3, TRAJ21)
CAVESQANFNKFYF

SEQ ID NO: 180714 - protein, 12 aa, Homo sapiens
  CDR3 for beta chain variable domain of TCR clone 90357 (TRBV6-3, TRBJ2-7)
CASSLAPYEQYF

SEQ ID NO: 180715 - protein, 12 aa, Homo sapiens
  CDR3 for alpha chain variable domain of TCR clone 90358 (TRAV26-1, TRAJ48)
CIAVFGNEKLTF

SEQ ID NO: 180716 - protein, 18 aa, Homo sapiens
  CDR3 for beta chain variable domain of TCR clone 90358 (TRBV7-2, TRBJ2-3)
CASSLDTSRGRKADTQYF

SEQ ID NO: 180717 - protein, 16 aa, Homo sapiens
  CDR3 for alpha chain variable domain of TCR clone 90359 (TRAV22, TRAJ45)
CAVERGKRGGADGLTF

SEQ ID NO: 180718 - protein, 12 aa, Homo sapiens
  CDR3 for beta chain variable domain of TCR clone 90359 (TRBV7-9, TRBJ2-7)
CASSIKREEQYF

SEQ ID NO: 180719 - protein, 15 aa, Homo sapiens
  CDR3 for alpha chain variable domain of TCR clone 90360 (TRAV16, TRAJ17)
CALSGQEAAGNKLTF

SEQ ID NO: 180720 - protein, 15 aa, Homo sapiens
  CDR3 for beta chain variable domain of TCR clone 90360 (TRBV12-4, TRBJ1-5)
CASTQGTGPLQPRHF

SEQ ID NO: 180721 - protein, 11 aa, Homo sapiens
  CDR3 for alpha chain variable domain of TCR clone 90361 (TRAV16, TRAJ49)
CALRSGNKFYF

SEQ ID NO: 180722 - protein, 16 aa, Homo sapiens
  CDR3 for beta chain variable domain of TCR clone 90361 (TRBV20-1, TRBJ1-5)
CSARDVGGGWIQPQHF

SEQ ID NO: 180723 - protein, 14 aa, Homo sapiens
  CDR3 for alpha chain variable domain of TCR clone 90362 (TRAV12-1, TRAJ22)
CVAFSSGSARQLTF

SEQ ID NO: 180724 - protein, 22 aa, Homo sapiens
  CDR3 for beta chain variable domain of TCR clone 90362 (TRBV15, TRBJ2-1)
QAWGTQPCTCVPPAEVDTARLF

SEQ ID NO: 180725 - protein, 13 aa, Homo sapiens
  CDR3 for alpha chain variable domain of TCR clone 90363 (TRAV12-2, TRAJ39)
CAVNNNAGNMLTF

SEQ ID NO: 180726 - protein, 13 aa, Homo sapiens
  CDR3 for beta chain variable domain of TCR clone 90363 (TRBV2, TRBJ1-5)
CATTGPGNQPQHF

SEQ ID NO: 180727 - protein, 12 aa, Homo sapiens
  CDR3 for alpha chain variable domain of TCR clone 90364 (TRAV16, TRAJ10)
CSRTGGGNKLTF

SEQ ID NO: 180728 - protein, 19 aa, Homo sapiens
  CDR3 for beta chain variable domain of TCR clone 90364 (TRBV25-1, TRBJ2-2)
CAILVYRVDRGRKTGEMFF

SEQ ID NO: 180729 - protein, 14 aa, Homo sapiens
  CDR3 for alpha chain variable domain of TCR clone 90365 (TRAV12-2, TRAJ13)
CAVKKTGGYQKVTF

SEQ ID NO: 180730 - protein, 12 aa, Homo sapiens
  CDR3 for beta chain variable domain of TCR clone 90365 (TRBV19, TRBJ1-5)
CASSIAQQPQHF

SEQ ID NO: 180731 - protein, 10 aa, Homo sapiens
  CDR3 for alpha chain variable domain of TCR clone 90366 (TRAV30, TRAJ32)
CGAEKDMVVL

SEQ ID NO: 180732 - protein, 13 aa, Homo sapiens
  CDR3 for beta chain variable domain of TCR clone 90366 (TRBV10-3, TRBJ2-7)
CASKLAVNYEQYF

SEQ ID NO: 180733 - protein, 14 aa, Homo sapiens
  CDR3 for alpha chain variable domain of TCR clone 90367 (TRAV26-1, TRAJ38)
CIADNAGNNRKLSW

SEQ ID NO: 180734 - protein, 13 aa, Homo sapiens
  CDR3 for beta chain variable domain of TCR clone 90367 (TRBV19, TRBJ1-2)
CASSVPGQDGYTF

SEQ ID NO: 180735 - protein, 21 aa, Homo sapiens
  CDR3 for alpha chain variable domain of TCR clone 90368 (TRAV25, TRAJ47)
TATQTTDVGTYFWEYGNKLVF

SEQ ID NO: 180736 - protein, 14 aa, Homo sapiens
  CDR3 for beta chain variable domain of TCR clone 90368 (TRBV11-1, TRBJ2-7)
CASSFRQGSYEQYF

SEQ ID NO: 180737 - protein, 14 aa, Homo sapiens
  CDR3 for alpha chain variable domain of TCR clone 90369 (TRAV8-4, TRAJ8)
CAVSLNTGFQKLAF

SEQ ID NO: 180738 - protein, 13 aa, Homo sapiens
  CDR3 for beta chain variable domain of TCR clone 90369 (TRBV7-9, TRBJ2-3)
CASSPGSTDTQYF

SEQ ID NO: 180739 - protein, 11 aa, Homo sapiens
  CDR3 for alpha chain variable domain of TCR clone 90370 (TRAV2, TRAJ21)
CAVFNFNKFYF

SEQ ID NO: 180740 - protein, 18 aa, Homo sapiens
  CDR3 for beta chain variable domain of TCR clone 90370 (TRBV11-2, TRBJ2-3)
CASSLGGASRGAPNTQYF

SEQ ID NO: 180741 - protein, 13 aa, Homo sapiens
  CDR3 for alpha chain variable domain of TCR clone 90371 (TRAV17, TRAJ5)
CAPMDTGRRALTF

SEQ ID NO: 180742 - protein, 14 aa, Homo sapiens
  CDR3 for beta chain variable domain of TCR clone 90371 (TRBV20-1, TRBJ1-1)
CSAQTRIGGTEAFF

SEQ ID NO: 180743 - protein, 12 aa, Homo sapiens
  CDR3 for alpha chain variable domain of TCR clone 90372 (TRAV13-2, TRAJ23)
CAERHRGGKLIF

SEQ ID NO: 180744 - protein, 14 aa, Homo sapiens
  CDR3 for beta chain variable domain of TCR clone 90372 (TRBV5-7, TRBJ2-7)
CASSGGLSPYEQYF

SEQ ID NO: 180745 - protein, 12 aa, Homo sapiens
  CDR3 for alpha chain variable domain of TCR clone 90373 (TRAV8-3, TRAJ20)
CAVGANDYKLSF

SEQ ID NO: 180746 - protein, 13 aa, Homo sapiens
  CDR3 for beta chain variable domain of TCR clone 90373 (TRBV19, TRBJ2-7)
CASSIRSSYEQYF

SEQ ID NO: 180747 - protein, 12 aa, Homo sapiens
  CDR3 for alpha chain variable domain of TCR clone 90374 (TRAV35, TRAJ30)
CAGQLVDDKVIF

SEQ ID NO: 180748 - protein, 17 aa, Homo sapiens
  CDR3 for beta chain variable domain of TCR clone 90374 (TRBV4-2, TRBJ2-5)
CASSPGRWRNFQETQYF

SEQ ID NO: 180749 - protein, 15 aa, Homo sapiens
  CDR3 for alpha chain variable domain of TCR clone 90375 (TRAV17, TRAJ56)
CATDADTGANSKLTF

SEQ ID NO: 180750 - protein, 14 aa, Homo sapiens
  CDR3 for beta chain variable domain of TCR clone 90375 (TRBV19, TRBJ1-5)
CASSLGTGGQPQHF

SEQ ID NO: 180751 - protein, 13 aa, Homo sapiens
  CDR3 for alpha chain variable domain of TCR clone 90376 (TRAV21, TRAJ27)
CAARPGNAGKSTF

SEQ ID NO: 180752 - protein, 13 aa, Homo sapiens
  CDR3 for beta chain variable domain of TCR clone 90376 (TRBV13, TRBJ2-1)
CASILGGRGEQSF

SEQ ID NO: 180753 - protein, 14 aa, Homo sapiens
  CDR3 for alpha chain variable domain of TCR clone 90377 (TRAV2, TRAJ37)
CAVDFTSNTGKLIF

SEQ ID NO: 180754 - protein, 13 aa, Homo sapiens
  CDR3 for beta chain variable domain of TCR clone 90377 (TRBV20-1, TRBJ1-1)
CSAPLGGSTEAFF

SEQ ID NO: 180755 - protein, 16 aa, Homo sapiens
  CDR3 for alpha chain variable domain of TCR clone 90378 (TRAV21, TRAJ37)
CAVRTAGSSNTGKLIF

SEQ ID NO: 180756 - protein, 15 aa, Homo sapiens
  CDR3 for beta chain variable domain of TCR clone 90378 (TRBV5-1, TRBJ2-7)
CASSLNGGPAREQYF

SEQ ID NO: 180757 - protein, 13 aa, Homo sapiens
  CDR3 for alpha chain variable domain of TCR clone 90379 (TRAV21, TRAJ15)
CAVANQAGTALIF

SEQ ID NO: 180758 - protein, 15 aa, Homo sapiens
  CDR3 for beta chain variable domain of TCR clone 90379 (TRBV9, TRBJ1-6)
CASSVAGTGDSPLHF

SEQ ID NO: 180759 - protein, 11 aa, Homo sapiens
  CDR3 for alpha chain variable domain of TCR clone 90380 (TRAV12-2, TRAJ31)
CAILNNARLMF

SEQ ID NO: 180760 - protein, 13 aa, Homo sapiens
  CDR3 for beta chain variable domain of TCR clone 90380 (TRBV20-1, TRBJ1-1)
CSARLGQGTEAVF

SEQ ID NO: 180761 - protein, 12 aa, Homo sapiens
  CDR3 for alpha chain variable domain of TCR clone 90381 (TRAV12-3, TRAJ17)
CAMTLTDNNLTF

SEQ ID NO: 180762 - protein, 15 aa, Homo sapiens
  CDR3 for beta chain variable domain of TCR clone 90381 (TRBV20-1, TRBJ2-7)
CSARDRVSGMDEQYF

SEQ ID NO: 180763 - protein, 14 aa, Homo sapiens
  CDR3 for alpha chain variable domain of TCR clone 90382 (TRAV12-2, TRAJ5)
CAVNRSTGRRALTF

SEQ ID NO: 180764 - protein, 14 aa, Homo sapiens
  CDR3 for beta chain variable domain of TCR clone 90382 (TRBV7-6, TRBJ1-6)
CASSQAGGGSPLHF

SEQ ID NO: 180765 - protein, 12 aa, Homo sapiens
  CDR3 for alpha chain variable domain of TCR clone 90383 (TRAV23/DV6, TRAJ3)
CAARAPQQCFQA

SEQ ID NO: 180766 - protein, 17 aa, Homo sapiens
  CDR3 for beta chain variable domain of TCR clone 90383 (TRBV7-9, TRBJ2-3)
CASSPTVAGDLTDTQYF

SEQ ID NO: 180767 - protein, 11 aa, Homo sapiens
  CDR3 for alpha chain variable domain of TCR clone 90384 (TRAV12-1, TRAJ43)
CVEYDNNDMRF

SEQ ID NO: 180768 - protein, 13 aa, Homo sapiens
  CDR3 for beta chain variable domain of TCR clone 90384 (TRBV7-9, TRBJ1-2)
CASSLKQNYGYTF

SEQ ID NO: 180769 - protein, 13 aa, Homo sapiens
  CDR3 for alpha chain variable domain of TCR clone 90385 (TRAV21, TRAJ27)
CAARPGNAGKSTF

SEQ ID NO: 180770 - protein, 14 aa, Homo sapiens
  CDR3 for beta chain variable domain of TCR clone 90385 (TRBV6-6, TRBJ2-3)
CASRLQREADTQYF

SEQ ID NO: 180771 - protein, 13 aa, Homo sapiens
  CDR3 for alpha chain variable domain of TCR clone 90386 (TRAV23/DV6, TRAJ22)
CAASSGSARQLTF

SEQ ID NO: 180772 - protein, 14 aa, Homo sapiens
  CDR3 for beta chain variable domain of TCR clone 90386 (TRBV4-2, TRBJ2-1)
CASGLDRAYNEQFF

SEQ ID NO: 180773 - protein, 14 aa, Homo sapiens
  CDR3 for alpha chain variable domain of TCR clone 90387 (TRAV12-3, TRAJ30)
CAMSLLNRDDNIIF

SEQ ID NO: 180774 - protein, 12 aa, Homo sapiens
  CDR3 for beta chain variable domain of TCR clone 90387 (TRBV11-2, TRBJ2-2)
CASSLGGGELFF

SEQ ID NO: 180775 - protein, 13 aa, Homo sapiens
  CDR3 for alpha chain variable domain of TCR clone 90388 (TRAV12-2, TRAJ7)
CAVNLYGNNRLAF

SEQ ID NO: 180776 - protein, 14 aa, Homo sapiens
  CDR3 for beta chain variable domain of TCR clone 90388 (TRBV25-1, TRBJ1-2)
CASSGATGPYGYTF

SEQ ID NO: 180777 - protein, 14 aa, Homo sapiens
  CDR3 for alpha chain variable domain of TCR clone 90389 (TRAV13-1, TRAJ35)
CAASKGGFGNVLHC

SEQ ID NO: 180778 - protein, 17 aa, Homo sapiens
  CDR3 for beta chain variable domain of TCR clone 90389 (TRBV10-2, TRBJ1-6)
CASSENRGSSYNSPLHF

SEQ ID NO: 180779 - protein, 13 aa, Homo sapiens
  CDR3 for alpha chain variable domain of TCR clone 90390 (TRAV3, TRAJ15)
CAVRDQAGTALIF

SEQ ID NO: 180780 - protein, 15 aa, Homo sapiens
  CDR3 for beta chain variable domain of TCR clone 90390 (TRBV20-1, TRBJ2-7)
CSARDRVSGMDEQYF

SEQ ID NO: 180781 - protein, 12 aa, Homo sapiens
  CDR3 for alpha chain variable domain of TCR clone 90391 (TRAV12-3, TRAJ17)
CAMTLTGNKLTF

SEQ ID NO: 180782 - protein, 17 aa, Homo sapiens
  CDR3 for beta chain variable domain of TCR clone 90391 (TRBV19, TRBJ1-5)
CASSPGAYSGENQPQHF

SEQ ID NO: 180783 - protein, 12 aa, Homo sapiens
  CDR3 for alpha chain variable domain of TCR clone 90392 (TRAV8-6, TRAJ43)
CAVSNNNNDMRV

SEQ ID NO: 180784 - protein, 15 aa, Homo sapiens
  CDR3 for beta chain variable domain of TCR clone 90392 (TRBV7-3, TRBJ2-6)
CASSLGGSGANVLTF

SEQ ID NO: 180785 - protein, 16 aa, Homo sapiens
  CDR3 for alpha chain variable domain of TCR clone 90393 (TRAV12-3, TRAJ53)
CAMSPGSGGSNYKLTS

SEQ ID NO: 180786 - protein, 11 aa, Homo sapiens
  CDR3 for beta chain variable domain of TCR clone 90393 (TRBV29-1, TRBJ2-5)
CSEGRTGTQYF

SEQ ID NO: 180787 - protein, 13 aa, Homo sapiens
  CDR3 for alpha chain variable domain of TCR clone 90394 (TRAV12-1, TRAJ6)
CVVFPGGSYIPTF

SEQ ID NO: 180788 - protein, 12 aa, Homo sapiens
  CDR3 for beta chain variable domain of TCR clone 90394 (TRBV7-9, TRBJ2-7)
CASSLFDYEQYF

SEQ ID NO: 180789 - protein, 14 aa, Homo sapiens
  CDR3 for alpha chain variable domain of TCR clone 90395 (TRAV23/DV6, TRAJ27)
CAASRDTTAGKSTF

SEQ ID NO: 180790 - protein, 13 aa, Homo sapiens
  CDR3 for beta chain variable domain of TCR clone 90395 (TRBV20-1, TRBJ1-5)
CSASGRGNQPQHF

SEQ ID NO: 180791 - protein, 15 aa, Homo sapiens
  CDR3 for alpha chain variable domain of TCR clone 90396 (TRAV26-1, TRAJ48)
CIVRVGDFGNEKLTF

SEQ ID NO: 180792 - protein, 15 aa, Homo sapiens
  CDR3 for beta chain variable domain of TCR clone 90396 (TRBV11-3, TRBJ2-3)
CASLKDGREGDTQYF

SEQ ID NO: 180793 - protein, 16 aa, Homo sapiens
  CDR3 for alpha chain variable domain of TCR clone 90397 (TRAV3, TRAJ21)
CAVRDIERGNFNKFYF

SEQ ID NO: 180794 - protein, 16 aa, Homo sapiens
  CDR3 for beta chain variable domain of TCR clone 90397 (TRBV19, TRBJ2-1)
CASSKAGPSSYNEQFF

SEQ ID NO: 180795 - protein, 14 aa, Homo sapiens
  CDR3 for alpha chain variable domain of TCR clone 90398 (TRAV12-2, TRAJ17)
CAVLFKAAGNKLTF

SEQ ID NO: 180796 - protein, 14 aa, Homo sapiens
  CDR3 for beta chain variable domain of TCR clone 90398 (TRBV4-1, TRBJ2-2)
RASSQAVNTGELFF

SEQ ID NO: 180797 - protein, 14 aa, Homo sapiens
  CDR3 for alpha chain variable domain of TCR clone 90399 (TRAV8-4, TRAJ13)
CAVTLSGGYQKVTF

SEQ ID NO: 180798 - protein, 13 aa, Homo sapiens
  CDR3 for beta chain variable domain of TCR clone 90399 (TRBV11-2, TRBJ1-6)
CASSLAGTSPLHF

SEQ ID NO: 180799 - protein, 13 aa, Homo sapiens
  CDR3 for alpha chain variable domain of TCR clone 90400 (TRAV8-3, TRAJ44)
CAVEPGTASKLTF

SEQ ID NO: 180800 - protein, 14 aa, Homo sapiens
  CDR3 for beta chain variable domain of TCR clone 90400 (TRBV11-2, TRBJ2-3)
CASSRLARTDTQYF

SEQ ID NO: 180801 - protein, 18 aa, Homo sapiens
  CDR3 for alpha chain variable domain of TCR clone 90401 (TRAV26-2, TRAJ54)
CILRDVEVGIQGAQKLVF

SEQ ID NO: 180802 - protein, 13 aa, Homo sapiens
  CDR3 for beta chain variable domain of TCR clone 90401 (TRBV11-2, TRBJ2-7)
CASSGTRPYEQYF

SEQ ID NO: 180803 - protein, 13 aa, Homo sapiens
  CDR3 for alpha chain variable domain of TCR clone 90402 (TRAV12-2, TRAJ6)
CAVNVSRKLHTYI

SEQ ID NO: 180804 - protein, 12 aa, Homo sapiens
  CDR3 for beta chain variable domain of TCR clone 90402 (TRBV29-1, TRBJ2-3)
CSGTGGADTQYF

SEQ ID NO: 180805 - protein, 14 aa, Homo sapiens
  CDR3 for alpha chain variable domain of TCR clone 90403 (TRAV20, TRAJ56)
CAVQFGGANSKLTF

SEQ ID NO: 180806 - protein, 14 aa, Homo sapiens
  CDR3 for beta chain variable domain of TCR clone 90403 (TRBV20-1, TRBJ2-7)
CSAKRGRISYEQYF

SEQ ID NO: 180807 - protein, 15 aa, Homo sapiens
  CDR3 for alpha chain variable domain of TCR clone 90404 (TRAV3, TRAJ3)
CAVRDGHSSASKIIF

SEQ ID NO: 180808 - protein, 17 aa, Homo sapiens
  CDR3 for beta chain variable domain of TCR clone 90404 (TRBV25-1, TRBJ2-7)
CASSEARVVFSSYEQYF

SEQ ID NO: 180809 - protein, 14 aa, Homo sapiens
  CDR3 for alpha chain variable domain of TCR clone 90405 (TRAV12-1, TRAJ12)
CVVTRMDSSYKLIF

SEQ ID NO: 180810 - protein, 20 aa, Homo sapiens
  CDR3 for beta chain variable domain of TCR clone 90405 (TRBV7-8, TRBJ2-2)
CASSHLFPGPTIHITGELFF

SEQ ID NO: 180811 - protein, 22 aa, Homo sapiens
  CDR3 for alpha chain variable domain of TCR clone 90406 (TRAV12-2, TRAJ53)
SPVIQPPTSVPPILSSKYKLTF

SEQ ID NO: 180812 - protein, 13 aa, Homo sapiens
  CDR3 for beta chain variable domain of TCR clone 90406 (TRBV7-7, TRBJ2-3)
CASSLSRADTQYF

SEQ ID NO: 180813 - protein, 13 aa, Homo sapiens
  CDR3 for alpha chain variable domain of TCR clone 90407 (TRAV13-1, TRAJ21)
CAASIYNFKKFYF

SEQ ID NO: 180814 - protein, 15 aa, Homo sapiens
  CDR3 for beta chain variable domain of TCR clone 90407 (TRBV5-5, TRBJ1-5)
CASSLKGGGEQPQHF

SEQ ID NO: 180815 - protein, 15 aa, Homo sapiens
  CDR3 for alpha chain variable domain of TCR clone 90408 (TRAV21, TRAJ57)
CAVIITQGGPEKLVF

SEQ ID NO: 180816 - protein, 14 aa, Homo sapiens
  CDR3 for beta chain variable domain of TCR clone 90408 (TRBV5-1, TRBJ2-2)
CASSLIWIPGELFF

SEQ ID NO: 180817 - protein, 15 aa, Homo sapiens
  CDR3 for alpha chain variable domain of TCR clone 90409 (TRAV41, TRAJ45)
CAASYSGGGADGLTF

SEQ ID NO: 180818 - protein, 15 aa, Homo sapiens
  CDR3 for beta chain variable domain of TCR clone 90409 (TRBV28, TRBJ2-5)
CASSSGRTIQETQYF

SEQ ID NO: 180819 - protein, 14 aa, Homo sapiens
  CDR3 for alpha chain variable domain of TCR clone 90410 (TRAV8-3, TRAJ4)
CAVGASGGYNTLIF

SEQ ID NO: 180820 - protein, 13 aa, Homo sapiens
  CDR3 for beta chain variable domain of TCR clone 90410 (TRBV18, TRBJ2-5)
CASSLQGQETQYF

SEQ ID NO: 180821 - protein, 12 aa, Homo sapiens
  CDR3 for alpha chain variable domain of TCR clone 90411 (TRAV20, TRAJ54)
CAVQEGAQKLVF

SEQ ID NO: 180822 - protein, 17 aa, Homo sapiens
  CDR3 for beta chain variable domain of TCR clone 90411 (TRBV13, TRBJ2-3)
CASSLSRVAGGWNTQYF

SEQ ID NO: 180823 - protein, 13 aa, Homo sapiens
  CDR3 for alpha chain variable domain of TCR clone 90412 (TRAV35, TRAJ42)
CAGFPGSQGNLIF

SEQ ID NO: 180824 - protein, 14 aa, Homo sapiens
  CDR3 for beta chain variable domain of TCR clone 90412 (TRBV12-4, TRBJ2-3)
CASSGQGSTDTQYF

SEQ ID NO: 180825 - protein, 13 aa, Homo sapiens
  CDR3 for alpha chain variable domain of TCR clone 90413 (TRAV38-2/DV8, TRAJ34)
CAYRNYNTDKLIF

SEQ ID NO: 180826 - protein, 18 aa, Homo sapiens
  CDR3 for beta chain variable domain of TCR clone 90413 (TRBV4-1, TRBJ1-5)
CASSQDPRGQGLNQPQHF

SEQ ID NO: 180827 - protein, 14 aa, Homo sapiens
  CDR3 for alpha chain variable domain of TCR clone 90414 (TRAV2, TRAJ37)
CAVDFTSNTGKLSL

SEQ ID NO: 180828 - protein, 15 aa, Homo sapiens
  CDR3 for beta chain variable domain of TCR clone 90414 (TRBV20-1, TRBJ1-1)
CSASRGVTGNTEAFF

SEQ ID NO: 180829 - protein, 12 aa, Homo sapiens
  CDR3 for alpha chain variable domain of TCR clone 90415 (TRAV1-2, TRAJ29)
CAVPSGNTPLVF

SEQ ID NO: 180830 - protein, 13 aa, Homo sapiens
  CDR3 for beta chain variable domain of TCR clone 90415 (TRBV5-4, TRBJ1-1)
CASSVELGTEAFF

SEQ ID NO: 180831 - protein, 16 aa, Homo sapiens
  CDR3 for alpha chain variable domain of TCR clone 90416 (TRAV3, TRAJ37)
CAVRGKGSGNTGKLIF

SEQ ID NO: 180832 - protein, 14 aa, Homo sapiens
  CDR3 for beta chain variable domain of TCR clone 90416 (TRBV11-2, TRBJ1-5)
CASSLDRGRQPQHF

SEQ ID NO: 180833 - protein, 11 aa, Homo sapiens
  CDR3 for alpha chain variable domain of TCR clone 90417 (TRAV3, TRAJ13)
CAVTSYQKVTF

SEQ ID NO: 180834 - protein, 15 aa, Homo sapiens
  CDR3 for beta chain variable domain of TCR clone 90417 (TRBV7-9, TRBJ2-7)
CARSSSGLAVYEQYF

SEQ ID NO: 180835 - protein, 16 aa, Homo sapiens
  CDR3 for alpha chain variable domain of TCR clone 90418 (TRAV26-1, TRAJ22)
CIVSLNFFWICKATDL

SEQ ID NO: 180836 - protein, 15 aa, Homo sapiens
  CDR3 for beta chain variable domain of TCR clone 90418 (TRBV4-2, TRBJ1-2)
CASSQRTGGRDGYTF

SEQ ID NO: 180837 - protein, 12 aa, Homo sapiens
  CDR3 for alpha chain variable domain of TCR clone 90419 (TRAV36/DV7, TRAJ54)
CAVVRGAQKLVF

SEQ ID NO: 180838 - protein, 16 aa, Homo sapiens
  CDR3 for beta chain variable domain of TCR clone 90419 (TRBV10-3, TRBJ2-1)
CAISGVGDGGGGEQFF

SEQ ID NO: 180839 - protein, 23 aa, Homo sapiens
  CDR3 for alpha chain variable domain of TCR clone 90420 (TRAV26-1, TRAJ38)
CIADNAGNNHIQNPDPAVYQLRD

SEQ ID NO: 180840 - protein, 11 aa, Homo sapiens
  CDR3 for beta chain variable domain of TCR clone 90420 (TRBV11-2, TRBJ2-2)
CASSLPGELFF

SEQ ID NO: 180841 - protein, 18 aa, Homo sapiens
  CDR3 for alpha chain variable domain of TCR clone 90421 (TRAV17, TRAJ45)
CATSLNLYSGGGADGLTF

SEQ ID NO: 180842 - protein, 15 aa, Homo sapiens
  CDR3 for beta chain variable domain of TCR clone 90421 (TRBV11-2, TRBJ2-1)
CASSKNRGLIYEQFF

SEQ ID NO: 180843 - protein, 18 aa, Homo sapiens
  CDR3 for alpha chain variable domain of TCR clone 90422 (TRAV29/DV5, TRAJ52)
CAAGFRGAGGTSYGKLTF

SEQ ID NO: 180844 - protein, 13 aa, Homo sapiens
  CDR3 for beta chain variable domain of TCR clone 90422 (TRBV29-1, TRBJ1-1)
CSVGDSRNTEAFF

SEQ ID NO: 180845 - protein, 18 aa, Homo sapiens
  CDR3 for alpha chain variable domain of TCR clone 90423 (TRAV29/DV5, TRAJ52)
CAAGFRGAGSTSYGELTF

SEQ ID NO: 180846 - protein, 16 aa, Homo sapiens
  CDR3 for beta chain variable domain of TCR clone 90423 (TRBV7-3, TRBJ2-2)
CASSLKRGTLSGELFF

SEQ ID NO: 180847 - protein, 15 aa, Homo sapiens
  CDR3 for alpha chain variable domain of TCR clone 90424 (TRAV3, TRAJ4)
CAVRDGTGGYNKLIF

SEQ ID NO: 180848 - protein, 14 aa, Homo sapiens
  CDR3 for beta chain variable domain of TCR clone 90424 (TRBV25-1, TRBJ1-1)
CASTHLGGNTEAFF

SEQ ID NO: 180849 - protein, 14 aa, Homo sapiens
  CDR3 for alpha chain variable domain of TCR clone 90425 (TRAV12-2, TRAJ17)
CVVNYKAAGNKLTF

SEQ ID NO: 180850 - protein, 17 aa, Homo sapiens
  CDR3 for beta chain variable domain of TCR clone 90425 (TRBV20-1, TRBJ2-1)
CSASSSGLAGSYNEQFF

SEQ ID NO: 180851 - protein, 17 aa, Homo sapiens
  CDR3 for alpha chain variable domain of TCR clone 90426 (TRAV26-2, TRAJ42)
CILRDVGYGGSQGNLIF

SEQ ID NO: 180852 - protein, 16 aa, Homo sapiens
  CDR3 for beta chain variable domain of TCR clone 90426 (TRBV12-4, TRBJ2-7)
CASSLMGGTGTYEQYF

SEQ ID NO: 180853 - protein, 13 aa, Homo sapiens
  CDR3 for alpha chain variable domain of TCR clone 90427 (TRAV17, TRAJ9)
CATDYTGGFKTIF

SEQ ID NO: 180854 - protein, 16 aa, Homo sapiens
  CDR3 for beta chain variable domain of TCR clone 90427 (TRBV12-4, TRBJ2-1)
CASSFPGDPSYNEQFF

SEQ ID NO: 180855 - protein, 15 aa, Homo sapiens
  CDR3 for alpha chain variable domain of TCR clone 90428 (TRAV26-1, TRAJ29)
CIVRVEGSGNTPHAF

SEQ ID NO: 180856 - protein, 15 aa, Homo sapiens
  CDR3 for beta chain variable domain of TCR clone 90428 (TRBV7-9, TRBJ1-5)
CASSQGHQPNQPQHF

SEQ ID NO: 180857 - protein, 17 aa, Homo sapiens
  CDR3 for alpha chain variable domain of TCR clone 90429 (TRAV4, TRAJ42)
CLVGVLNYGGSQGNLIF

SEQ ID NO: 180858 - protein, 12 aa, Homo sapiens
  CDR3 for beta chain variable domain of TCR clone 90429 (TRBV20-1, TRBJ2-1)
YSAQYTYNEQFF

SEQ ID NO: 180859 - protein, 13 aa, Homo sapiens
  CDR3 for alpha chain variable domain of TCR clone 90430 (TRAV8-3, TRAJ41)
CAVGADSGYALNF

SEQ ID NO: 180860 - protein, 13 aa, Homo sapiens
  CDR3 for beta chain variable domain of TCR clone 90430 (TRBV27, TRBJ2-1)
CASRTLGVGEQFF

SEQ ID NO: 180861 - protein, 12 aa, Homo sapiens
  CDR3 for alpha chain variable domain of TCR clone 90431 (TRAV35, TRAJ30)
CAGQLADDKIIF

SEQ ID NO: 180862 - protein, 17 aa, Homo sapiens
  CDR3 for beta chain variable domain of TCR clone 90431 (TRBV4-2, TRBJ2-5)
CASSPGRWRNFQETQYF

SEQ ID NO: 180863 - protein, 14 aa, Homo sapiens
  CDR3 for alpha chain variable domain of TCR clone 90432 (TRAV12-2, TRAJ33)
CAVKRAGSNYQLIW

SEQ ID NO: 180864 - protein, 15 aa, Homo sapiens
  CDR3 for beta chain variable domain of TCR clone 90432 (TRBV20-1, TRBJ2-7)
CSARDRVSGMDEQYF

SEQ ID NO: 180865 - protein, 18 aa, Homo sapiens
  CDR3 for alpha chain variable domain of TCR clone 90433 (TRAV8-4, TRAJ52)
CAVTRANAGGTSYRKLTF

SEQ ID NO: 180866 - protein, 20 aa, Homo sapiens
  CDR3 for beta chain variable domain of TCR clone 90433 (TRBV19, TRBJ2-1)
CASSISRTVTSTRLNNEQFF

SEQ ID NO: 180867 - protein, 13 aa, Homo sapiens
  CDR3 for alpha chain variable domain of TCR clone 90434 (TRAV26-1, TRAJ35)
CIVSRRVGEMLHC

SEQ ID NO: 180868 - protein, 17 aa, Homo sapiens
  CDR3 for beta chain variable domain of TCR clone 90434 (TRBV7-9, TRBJ2-7)
CAGSFDGSRGGAYEQYF

SEQ ID NO: 180869 - protein, 13 aa, Homo sapiens
  CDR3 for alpha chain variable domain of TCR clone 90435 (TRAV21, TRAJ57)
CAVIEGGSEKLVL

SEQ ID NO: 180870 - protein, 15 aa, Homo sapiens
  CDR3 for beta chain variable domain of TCR clone 90435 (TRBV10-3, TRBJ2-5)
CAISEFGRGQETQYF

SEQ ID NO: 180871 - protein, 12 aa, Homo sapiens
  CDR3 for alpha chain variable domain of TCR clone 90436 (TRAV2, TRAJ26)
CPPGDYGQNFVF

SEQ ID NO: 180872 - protein, 16 aa, Homo sapiens
  CDR3 for beta chain variable domain of TCR clone 90436 (TRBV13, TRBJ2-2)
CASSPRTGEHTGELFF

SEQ ID NO: 180873 - protein, 11 aa, Homo sapiens
  CDR3 for alpha chain variable domain of TCR clone 90437 (TRAV17, TRAJ9)
CATTGGFKTIF

SEQ ID NO: 180874 - protein, 12 aa, Homo sapiens
  CDR3 for beta chain variable domain of TCR clone 90437 (TRBV11-2, TRBJ2-2)
CASSLPTGELFF

SEQ ID NO: 180875 - protein, 14 aa, Homo sapiens
  CDR3 for alpha chain variable domain of TCR clone 90438 (TRAV23/DV6, TRAJ13)
CAAIYSGGYQKVTF

SEQ ID NO: 180876 - protein, 16 aa, Homo sapiens
  CDR3 for beta chain variable domain of TCR clone 90438 (TRBV9, TRBJ2-1)
CASSALGGIGNNEQFF

SEQ ID NO: 180877 - protein, 10 aa, Homo sapiens
  CDR3 for alpha chain variable domain of TCR clone 90439 (TRAV23/DV6, TRAJ43)
CAAAVAPLEQ

SEQ ID NO: 180878 - protein, 13 aa, Homo sapiens
  CDR3 for beta chain variable domain of TCR clone 90439 (TRBV12-4, TRBJ1-2)
CASSLRQGKGYTF

SEQ ID NO: 180879 - protein, 13 aa, Homo sapiens
  CDR3 for alpha chain variable domain of TCR clone 90440 (TRAV2, TRAJ40)
CTVVTSGTYKYIF

SEQ ID NO: 180880 - protein, 14 aa, Homo sapiens
  CDR3 for beta chain variable domain of TCR clone 90440 (TRBV19, TRBJ2-1)
FASPTFVLSGEQFF

SEQ ID NO: 180881 - protein, 14 aa, Homo sapiens
  CDR3 for alpha chain variable domain of TCR clone 90441 (TRAV1-2, TRAJ8)
CAVREDTGFQKLVF

SEQ ID NO: 180882 - protein, 15 aa, Homo sapiens
  CDR3 for beta chain variable domain of TCR clone 90441 (TRBV11-3, TRBJ2-2)
CASSLGGRPTGELFF

SEQ ID NO: 180883 - protein, 17 aa, Homo sapiens
  CDR3 for alpha chain variable domain of TCR clone 90442 (TRAV3, TRAJ6)
CAVRDGPRAGGSYIPNF

SEQ ID NO: 180884 - protein, 16 aa, Homo sapiens
  CDR3 for beta chain variable domain of TCR clone 90442 (TRBV5-1, TRBJ1-3)
CASSPWAPSSGNTIYF

SEQ ID NO: 180885 - protein, 16 aa, Homo sapiens
  CDR3 for alpha chain variable domain of TCR clone 90443 (TRAV26-1, TRAJ37)
CIVRGDGSGNTGKLIF

SEQ ID NO: 180886 - protein, 15 aa, Homo sapiens
  CDR3 for beta chain variable domain of TCR clone 90443 (TRBV2, TRBJ2-1)
CASSEEREGDNEQFF

SEQ ID NO: 180887 - protein, 16 aa, Homo sapiens
  CDR3 for alpha chain variable domain of TCR clone 90444 (TRAV3, TRAJ21)
CAVRDIERGNFNKFYF

SEQ ID NO: 180888 - protein, 15 aa, Homo sapiens
  CDR3 for beta chain variable domain of TCR clone 90444 (TRBV7-3, TRBJ2-1)
CASSLSSGSFDEQFF

SEQ ID NO: 180889 - protein, 13 aa, Homo sapiens
  CDR3 for alpha chain variable domain of TCR clone 90445 (TRAV17, TRAJ22)
CAHNSGSARQLTF

SEQ ID NO: 180890 - protein, 16 aa, Homo sapiens
  CDR3 for beta chain variable domain of TCR clone 90445 (TRBV4-1, TRBJ1-2)
CASSQDAGQVLYGYTF

SEQ ID NO: 180891 - protein, 15 aa, Homo sapiens
  CDR3 for alpha chain variable domain of TCR clone 90446 (TRAV27, TRAJ38)
CAARRNAGDNRTLIW

SEQ ID NO: 180892 - protein, 13 aa, Homo sapiens
  CDR3 for beta chain variable domain of TCR clone 90446 (TRBV12-5, TRBJ2-3)
CASGDRQSDTQYF

SEQ ID NO: 180893 - protein, 16 aa, Homo sapiens
  CDR3 for alpha chain variable domain of TCR clone 90447 (TRAV3, TRAJ37)
CAVRVRGSGNTGKLIF

SEQ ID NO: 180894 - protein, 11 aa, Homo sapiens
  CDR3 for beta chain variable domain of TCR clone 90447 (TRBV11-2, TRBJ2-2)
CASSLPGELFL

SEQ ID NO: 180895 - protein, 11 aa, Homo sapiens
  CDR3 for alpha chain variable domain of TCR clone 90448 (TRAV17, TRAJ9)
CGITGGFKTIF

SEQ ID NO: 180896 - protein, 14 aa, Homo sapiens
  CDR3 for beta chain variable domain of TCR clone 90448 (TRBV7-9, TRBJ2-2)
CASSLVQDTGELFF

SEQ ID NO: 180897 - protein, 13 aa, Homo sapiens
  CDR3 for alpha chain variable domain of TCR clone 90449 (TRAV12-3, TRAJ33)
CAMSVNSIYQLIW

SEQ ID NO: 180898 - protein, 13 aa, Homo sapiens
  CDR3 for beta chain variable domain of TCR clone 90449 (TRBV7-2, TRBJ2-2)
CASSLAVTGELFF

SEQ ID NO: 180899 - protein, 16 aa, Homo sapiens
  CDR3 for alpha chain variable domain of TCR clone 90450 (TRAV12-1, TRAJ53)
CVVTSVAGGSNYKLTF

SEQ ID NO: 180900 - protein, 16 aa, Homo sapiens
  CDR3 for beta chain variable domain of TCR clone 90450 (TRBV6-6, TRBJ2-3)
CASSYSQAGSTDTQYF

SEQ ID NO: 180901 - protein, 15 aa, Homo sapiens
  CDR3 for alpha chain variable domain of TCR clone 90451 (TRAV13-1, TRAJ44)
CAASRGGGTASKRTF

SEQ ID NO: 180902 - protein, 12 aa, Homo sapiens
  CDR3 for beta chain variable domain of TCR clone 90451 (TRBV11-2, TRBJ2-2)
CASSLGGGELFF

SEQ ID NO: 180903 - protein, 14 aa, Homo sapiens
  CDR3 for alpha chain variable domain of TCR clone 90452 (TRAV38-1, TRAJ29)
CAFITPSGNTPLVF

SEQ ID NO: 180904 - protein, 12 aa, Homo sapiens
  CDR3 for beta chain variable domain of TCR clone 90452 (TRBV12-4, TRBJ2-7)
CASSLGGHEQYF

SEQ ID NO: 180905 - protein, 14 aa, Homo sapiens
  CDR3 for alpha chain variable domain of TCR clone 90453 (TRAV2, TRAJ9)
CAVEDRSGGFKTIF

SEQ ID NO: 180906 - protein, 17 aa, Homo sapiens
  CDR3 for beta chain variable domain of TCR clone 90453 (TRBV5-1, TRBJ2-3)
CASSKIGLVDRTDTQYF

SEQ ID NO: 180907 - protein, 14 aa, Homo sapiens
  CDR3 for alpha chain variable domain of TCR clone 90454 (TRAV35, TRAJ28)
CAGRRGGWELPTHF

SEQ ID NO: 180908 - protein, 15 aa, Homo sapiens
  CDR3 for beta chain variable domain of TCR clone 90454 (TRBV5-1, TRBJ2-1)
CASSPPRAPYNEQFF

SEQ ID NO: 180909 - protein, 12 aa, Homo sapiens
  CDR3 for alpha chain variable domain of TCR clone 90455 (TRAV2, TRAJ9)
CAVGAGGFKTIF

SEQ ID NO: 180910 - protein, 16 aa, Homo sapiens
  CDR3 for beta chain variable domain of TCR clone 90455 (TRBV13, TRBJ2-2)
CASSPRTVEHTGELFF

SEQ ID NO: 180911 - protein, 13 aa, Homo sapiens
  CDR3 for alpha chain variable domain of TCR clone 90456 (TRAV13-1, TRAJ5)
CAASDTGRRALTF

SEQ ID NO: 180912 - protein, 16 aa, Homo sapiens
  CDR3 for beta chain variable domain of TCR clone 90456 (TRBV6-1, TRBJ2-5)
CASSETLDRGAETQYF

SEQ ID NO: 180913 - protein, 12 aa, Homo sapiens
  CDR3 for alpha chain variable domain of TCR clone 90457 (TRAV3, TRAJ7)
CADLLWEQQTRF

SEQ ID NO: 180914 - protein, 14 aa, Homo sapiens
  CDR3 for beta chain variable domain of TCR clone 90457 (TRBV5-4, TRBJ1-1)
CASSLDSRRDEAFF

SEQ ID NO: 180915 - protein, 12 aa, Homo sapiens
  CDR3 for alpha chain variable domain of TCR clone 90458 (TRAV3, TRAJ43)
CAVREPNNDMRF

SEQ ID NO: 180916 - protein, 15 aa, Homo sapiens
  CDR3 for beta chain variable domain of TCR clone 90458 (TRBV27, TRBJ1-5)
CASSLGTGFDQPQHF

SEQ ID NO: 180917 - protein, 15 aa, Homo sapiens
  CDR3 for alpha chain variable domain of TCR clone 90459 (TRAV26-1, TRAJ22)
CIVRVSFWFCKATDL

SEQ ID NO: 180918 - protein, 15 aa, Homo sapiens
  CDR3 for beta chain variable domain of TCR clone 90459 (TRBV6-3, TRBJ2-7)
CASSSPGTVFYEQYF

SEQ ID NO: 180919 - protein, 12 aa, Homo sapiens
  CDR3 for alpha chain variable domain of TCR clone 90460 (TRAV2, TRAJ26)
CAGSPGRLWSEF

SEQ ID NO: 180920 - protein, 17 aa, Homo sapiens
  CDR3 for beta chain variable domain of TCR clone 90460 (TRBV11-2, TRBJ2-1)
YASSLYPPGVEYNEQFF

SEQ ID NO: 180921 - protein, 13 aa, Homo sapiens
  CDR3 for alpha chain variable domain of TCR clone 90461 (TRAV8-3, TRAJ36)
CAVGATGANNLFF

SEQ ID NO: 180922 - protein, 14 aa, Homo sapiens
  CDR3 for beta chain variable domain of TCR clone 90461 (TRBV18, TRBJ2-7)
CASSPRGGAYEQYF

SEQ ID NO: 180923 - protein, 14 aa, Homo sapiens
  CDR3 for alpha chain variable domain of TCR clone 90462 (TRAV12-2, TRAJ24)
CAVTPADSWWKLQF

SEQ ID NO: 180924 - protein, 13 aa, Homo sapiens
  CDR3 for beta chain variable domain of TCR clone 90462 (TRBV6-4, TRBJ1-5)
CASSADLNQPQHF

SEQ ID NO: 180925 - protein, 12 aa, Homo sapiens
  CDR3 for alpha chain variable domain of TCR clone 90463 (TRAV12-3, TRAJ17)
CAMTLTGNKLTF

SEQ ID NO: 180926 - protein, 15 aa, Homo sapiens
  CDR3 for beta chain variable domain of TCR clone 90463 (TRBV13, TRBJ1-5)
CASSFGQGGVQPQHF

SEQ ID NO: 180927 - protein, 13 aa, Homo sapiens
  CDR3 for alpha chain variable domain of TCR clone 90464 (TRAV8-3, TRAJ43)
CAVVPYNDNDMRF

SEQ ID NO: 180928 - protein, 17 aa, Homo sapiens
  CDR3 for beta chain variable domain of TCR clone 90464 (TRBV7-7, TRBJ1-1)
CASIGDRPNLGVTEAFF

SEQ ID NO: 180929 - protein, 13 aa, Homo sapiens
  CDR3 for alpha chain variable domain of TCR clone 90465 (TRAV16, TRAJ28)
CAPTGAGSYQLTF

SEQ ID NO: 180930 - protein, 16 aa, Homo sapiens
  CDR3 for beta chain variable domain of TCR clone 90465 (TRBV28, TRBJ1-5)
CASSLTGQGWNQTQHF

SEQ ID NO: 180931 - protein, 16 aa, Homo sapiens
  CDR3 for alpha chain variable domain of TCR clone 90466 (TRAV27, TRAJ48)
TAAQPGDTGLYLPLTF

SEQ ID NO: 180932 - protein, 13 aa, Homo sapiens
  CDR3 for beta chain variable domain of TCR clone 90466 (TRBV7-2, TRBJ2-5)
CASSQTGVETQYF

SEQ ID NO: 180933 - protein, 11 aa, Homo sapiens
  CDR3 for alpha chain variable domain of TCR clone 90467 (TRAV12-1, TRAJ26)
CVVAYGQNFVF

SEQ ID NO: 180934 - protein, 15 aa, Homo sapiens
  CDR3 for beta chain variable domain of TCR clone 90467 (TRBV12-4, TRBJ2-5)
CASSGTGQAQGTQYF

SEQ ID NO: 180935 - protein, 15 aa, Homo sapiens
  CDR3 for alpha chain variable domain of TCR clone 90468 (TRAV21, TRAJ24)
CAARSSTDSWGKLQF

SEQ ID NO: 180936 - protein, 13 aa, Homo sapiens
  CDR3 for beta chain variable domain of TCR clone 90468 (TRBV11-2, TRBJ2-5)
CASSSTGEETRYF

SEQ ID NO: 180937 - protein, 13 aa, Homo sapiens
  CDR3 for alpha chain variable domain of TCR clone 90469 (TRAV13-1, TRAJ5)
RAASDTGRRALTF

SEQ ID NO: 180938 - protein, 12 aa, Homo sapiens
  CDR3 for beta chain variable domain of TCR clone 90469 (TRBV2, TRBJ2-1)
GRGLPSYNEQFF

SEQ ID NO: 180939 - protein, 12 aa, Homo sapiens
  CDR3 for alpha chain variable domain of TCR clone 90470 (TRAV21, TRAJ39)
CAADNAGNMLTV

SEQ ID NO: 180940 - protein, 13 aa, Homo sapiens
  CDR3 for beta chain variable domain of TCR clone 90470 (TRBV12-4, TRBJ1-1)
CASSPGTGFEAFF

SEQ ID NO: 180941 - protein, 13 aa, Homo sapiens
  CDR3 for alpha chain variable domain of TCR clone 90471 (TRAV13-1, TRAJ39)
CNKYSNAGNMLTF

SEQ ID NO: 180942 - protein, 16 aa, Homo sapiens
  CDR3 for beta chain variable domain of TCR clone 90471 (TRBV20-1, TRBJ1-4)
CSAPGQGLLTNEKLFF

SEQ ID NO: 180943 - protein, 11 aa, Homo sapiens
  CDR3 for alpha chain variable domain of TCR clone 90472 (TRAV21, TRAJ9)
CAVPGGFKTIF

SEQ ID NO: 180944 - protein, 12 aa, Homo sapiens
  CDR3 for beta chain variable domain of TCR clone 90472 (TRBV20-1, TRBJ2-3)
CSARGGTDTQYF

SEQ ID NO: 180945 - protein, 17 aa, Homo sapiens
  CDR3 for alpha chain variable domain of TCR clone 90473 (TRAV23/DV6, TRAJ9)
CAASLSPPNTGGFNTIF

SEQ ID NO: 180946 - protein, 14 aa, Homo sapiens
  CDR3 for beta chain variable domain of TCR clone 90473 (TRBV11-2, TRBJ2-5)
CASSRTGGIETQYF

SEQ ID NO: 180947 - protein, 13 aa, Homo sapiens
  CDR3 for alpha chain variable domain of TCR clone 90474 (TRAV27, TRAJ45)
CRSSGGGADGLTF

SEQ ID NO: 180948 - protein, 16 aa, Homo sapiens
  CDR3 for beta chain variable domain of TCR clone 90474 (TRBV19, TRBJ2-1)
CASSKAGPSSYNEQFF

SEQ ID NO: 180949 - protein, 18 aa, Homo sapiens
  CDR3 for alpha chain variable domain of TCR clone 90475 (TRAV12-3, TRAJ52)
CAMSRTNAGGTSYGKLTF

SEQ ID NO: 180950 - protein, 17 aa, Homo sapiens
  CDR3 for beta chain variable domain of TCR clone 90475 (TRBV7-3, TRBJ2-3)
CARSLMKRMRGADTQYF

SEQ ID NO: 180951 - protein, 19 aa, Homo sapiens
  CDR3 for alpha chain variable domain of TCR clone 90476 (TRAV2, TRAJ37)
CAPWLWQHRQTNIWARDNF

SEQ ID NO: 180952 - protein, 19 aa, Homo sapiens
  CDR3 for beta chain variable domain of TCR clone 90476 (TRBV20-1, TRBJ2-7)
CSARGLVEGTSGRGNEQYF

SEQ ID NO: 180953 - protein, 22 aa, Homo sapiens
  CDR3 for alpha chain variable domain of TCR clone 90477 (TRAV4, TRAJ26)
PADRKSSTLSLPRVYYGQNFVF

SEQ ID NO: 180954 - protein, 16 aa, Homo sapiens
  CDR3 for beta chain variable domain of TCR clone 90477 (TRBV7-2, TRBJ1-2)
CASSSNQDRRGHGYTF

SEQ ID NO: 180955 - protein, 14 aa, Homo sapiens
  CDR3 for alpha chain variable domain of TCR clone 90478 (TRAV8-4, TRAJ54)
CAVSEVLGAQKLVF

SEQ ID NO: 180956 - protein, 17 aa, Homo sapiens
  CDR3 for beta chain variable domain of TCR clone 90478 (TRBV4-1, TRBJ1-4)
CASSQEGPRGAEEKLFF

SEQ ID NO: 180957 - protein, 15 aa, Homo sapiens
  CDR3 for alpha chain variable domain of TCR clone 90479 (TRAV23/DV6, TRAJ28)
CAALLAYSGAGSYQL

SEQ ID NO: 180958 - protein, 15 aa, Homo sapiens
  CDR3 for beta chain variable domain of TCR clone 90479 (TRBV7-2, TRBJ2-1)
CASSLVAVRYNEQFF

SEQ ID NO: 180959 - protein, 17 aa, Homo sapiens
  CDR3 for alpha chain variable domain of TCR clone 90480 (TRAV23/DV6, TRAJ9)
CAASLSPPNTGGFKAIF

SEQ ID NO: 180960 - protein, 18 aa, Homo sapiens
  CDR3 for beta chain variable domain of TCR clone 90480 (TRBV4-1, TRBJ2-7)
CASSQDTGAGSGLNEQYF

SEQ ID NO: 180961 - protein, 15 aa, Homo sapiens
  CDR3 for alpha chain variable domain of TCR clone 90481 (TRAV17, TRAJ57)
CATGPSQGGSEKLVF

SEQ ID NO: 180962 - protein, 14 aa, Homo sapiens
  CDR3 for beta chain variable domain of TCR clone 90481 (TRBV12-5, TRBJ2-5)
CASGSRTHQESQYF

SEQ ID NO: 180963 - protein, 12 aa, Homo sapiens
  CDR3 for alpha chain variable domain of TCR clone 90482 (TRAV14/DV4, TRAJ39)
LAPNNAGNMLTF

SEQ ID NO: 180964 - protein, 16 aa, Homo sapiens
  CDR3 for beta chain variable domain of TCR clone 90482 (TRBV2, TRBJ2-3)
CASSTSVEGVTDTQYF

SEQ ID NO: 180965 - protein, 16 aa, Homo sapiens
  CDR3 for alpha chain variable domain of TCR clone 90483 (TRAV16, TRAJ4)
CALSRMFSGGYNKLIF

SEQ ID NO: 180966 - protein, 16 aa, Homo sapiens
  CDR3 for beta chain variable domain of TCR clone 90483 (TRBV24-1, TRBJ2-3)
CATNDPGTGATDTQYF

SEQ ID NO: 180967 - protein, 13 aa, Homo sapiens
  CDR3 for alpha chain variable domain of TCR clone 90484 (TRAV3, TRAJ8)
CAVRFTGFQKLVF

SEQ ID NO: 180968 - protein, 14 aa, Homo sapiens
  CDR3 for beta chain variable domain of TCR clone 90484 (TRBV7-3, TRBJ2-1)
CASSLAGGTNEQFF

SEQ ID NO: 180969 - protein, 11 aa, Homo sapiens
  CDR3 for alpha chain variable domain of TCR clone 90485 (TRAV1-1, TRAJ23)
CAVRQGGKLIF

SEQ ID NO: 180970 - protein, 13 aa, Homo sapiens
  CDR3 for beta chain variable domain of TCR clone 90485 (TRBV5-5, TRBJ2-5)
CASSPSGQETQYF

SEQ ID NO: 180971 - protein, 18 aa, Homo sapiens
  CDR3 for alpha chain variable domain of TCR clone 90486 (TRAV21, TRAJ52)
CAVRPSPAGGTSYGKLTF

SEQ ID NO: 180972 - protein, 14 aa, Homo sapiens
  CDR3 for beta chain variable domain of TCR clone 90486 (TRBV5-5, TRBJ2-7)
CASSLGLAVYEQYF

SEQ ID NO: 180973 - protein, 17 aa, Homo sapiens
  CDR3 for alpha chain variable domain of TCR clone 90487 (TRAV3, TRAJ12)
CAVRDGGRMDSSYKLIF

SEQ ID NO: 180974 - protein, 12 aa, Homo sapiens
  CDR3 for beta chain variable domain of TCR clone 90487 (TRBV11-2, TRBJ2-2)
CASSLGGGELLF

SEQ ID NO: 180975 - protein, 14 aa, Homo sapiens
  CDR3 for alpha chain variable domain of TCR clone 90488 (TRAV21, TRAJ28)
CAVGSGAGSYQPTF

SEQ ID NO: 180976 - protein, 14 aa, Homo sapiens
  CDR3 for beta chain variable domain of TCR clone 90488 (TRBV18, TRBJ1-4)
CASSPGPNGEKLFF

SEQ ID NO: 180977 - protein, 12 aa, Homo sapiens
  CDR3 for alpha chain variable domain of TCR clone 90489 (TRAV12-3, TRAJ17)
CAMTLTGNKLTF

SEQ ID NO: 180978 - protein, 13 aa, Homo sapiens
  CDR3 for beta chain variable domain of TCR clone 90489 (TRBV5-7, TRBJ1-2)
CASSLIRAPGYTF

SEQ ID NO: 180979 - protein, 13 aa, Homo sapiens
  CDR3 for alpha chain variable domain of TCR clone 90490 (TRAV12-3, TRAJ33)
CAMSVNSNYQLIW

SEQ ID NO: 180980 - protein, 16 aa, Homo sapiens
  CDR3 for beta chain variable domain of TCR clone 90490 (TRBV7-3, TRBJ2-3)
CASSLSGYRPEDTQYV

SEQ ID NO: 180981 - protein, 15 aa, Homo sapiens
  CDR3 for alpha chain variable domain of TCR clone 90491 (TRAV19, TRAJ9)
CALSEARTGGFKTIF

SEQ ID NO: 180982 - protein, 15 aa, Homo sapiens
  CDR3 for beta chain variable domain of TCR clone 90491 (TRBV18, TRBJ1-1)
CASSGRTGEVTEAFF

SEQ ID NO: 180983 - protein, 11 aa, Homo sapiens
  CDR3 for alpha chain variable domain of TCR clone 90492 (TRAV21, TRAJ34)
CAVTNTDKLIF

SEQ ID NO: 180984 - protein, 14 aa, Homo sapiens
  CDR3 for beta chain variable domain of TCR clone 90492 (TRBV11-2, TRBJ1-2)
CASSSGQAGDGYTF

SEQ ID NO: 180985 - protein, 11 aa, Homo sapiens
  CDR3 for alpha chain variable domain of TCR clone 90493 (TRAV27, TRAJ45)
CAGAQEEGLTD

SEQ ID NO: 180986 - protein, 13 aa, Homo sapiens
  CDR3 for beta chain variable domain of TCR clone 90493 (TRBV7-7, TRBJ2-5)
CASSRSGQETQYF

SEQ ID NO: 180987 - protein, 13 aa, Homo sapiens
  CDR3 for alpha chain variable domain of TCR clone 90494 (TRAV1-2, TRAJ9)
CAALNTGGFKTIL

SEQ ID NO: 180988 - protein, 12 aa, Homo sapiens
  CDR3 for beta chain variable domain of TCR clone 90494 (TRBV11-3, TRBJ1-1)
CASSHRQGEAFF

SEQ ID NO: 180989 - protein, 15 aa, Homo sapiens
  CDR3 for alpha chain variable domain of TCR clone 90495 (TRAV34, TRAJ38)
CGADFTPGNNRKQIW

SEQ ID NO: 180990 - protein, 16 aa, Homo sapiens
  CDR3 for beta chain variable domain of TCR clone 90495 (TRBV12-5, TRBJ2-5)
CASGPRTSGNQETQYF

SEQ ID NO: 180991 - protein, 12 aa, Homo sapiens
  CDR3 for alpha chain variable domain of TCR clone 90496 (TRAV2, TRAJ33)
RAVWGSNYQLIW

SEQ ID NO: 180992 - protein, 16 aa, Homo sapiens
  CDR3 for beta chain variable domain of TCR clone 90496 (TRBV20-1, TRBJ1-4)
CSAPGQGLLTNEKLFF

SEQ ID NO: 180993 - protein, 15 aa, Homo sapiens
  CDR3 for alpha chain variable domain of TCR clone 90497 (TRAV25, TRAJ28)
CAGAYSGAGSYQLTF

SEQ ID NO: 180994 - protein, 20 aa, Homo sapiens
  CDR3 for beta chain variable domain of TCR clone 90497 (TRBV28, TRBJ2-1)
CASTPIGRSPGLAGGNEQFF

SEQ ID NO: 180995 - protein, 17 aa, Homo sapiens
  CDR3 for alpha chain variable domain of TCR clone 90498 (TRAV12-2, TRAJ6)
CAPQGPPRAGGRYIPTF

SEQ ID NO: 180996 - protein, 16 aa, Homo sapiens
  CDR3 for beta chain variable domain of TCR clone 90498 (TRBV19, TRBJ2-2)
CASSTARASNTGELFF

SEQ ID NO: 180997 - protein, 14 aa, Homo sapiens
  CDR3 for alpha chain variable domain of TCR clone 90499 (TRAV4, TRAJ9)
CLVGPGTGGFKTIF

SEQ ID NO: 180998 - protein, 14 aa, Homo sapiens
  CDR3 for beta chain variable domain of TCR clone 90499 (TRBV7-9, TRBJ2-4)
CASSLAMGGNIQYF

SEQ ID NO: 180999 - protein, 12 aa, Homo sapiens
  CDR3 for alpha chain variable domain of TCR clone 90500 (TRAV8-3, TRAJ27)
CAVGAEAVKSTF

SEQ ID NO: 181000 - protein, 14 aa, Homo sapiens
  CDR3 for beta chain variable domain of TCR clone 90500 (TRBV2, TRBJ2-1)
CASRLIVGHDEQFF

SEQ ID NO: 181001 - protein, 16 aa, Homo sapiens
  CDR3 for alpha chain variable domain of TCR clone 90501 (TRAV14/DV4, TRAJ57)
CAMKLVGRGGSEKLVF

SEQ ID NO: 181002 - protein, 16 aa, Homo sapiens
  CDR3 for beta chain variable domain of TCR clone 90501 (TRBV29-1, TRBJ1-2)
CSVEANRDIANYGDTF

SEQ ID NO: 181003 - protein, 10 aa, Homo sapiens
  CDR3 for alpha chain variable domain of TCR clone 90502 (TRAV5, TRAJ34)
CAEDTDKLIF

SEQ ID NO: 181004 - protein, 12 aa, Homo sapiens
  CDR3 for beta chain variable domain of TCR clone 90502 (TRBV11-2, TRBJ2-2)
YASSLGGGELFF

SEQ ID NO: 181005 - protein, 15 aa, Homo sapiens
  CDR3 for alpha chain variable domain of TCR clone 90503 (TRAV3, TRAJ45)
CAVRTPWGGADGLTF

SEQ ID NO: 181006 - protein, 13 aa, Homo sapiens
  CDR3 for beta chain variable domain of TCR clone 90503 (TRBV19, TRBJ1-2)
CASSQGQAYGYTF

SEQ ID NO: 181007 - protein, 15 aa, Homo sapiens
  CDR3 for alpha chain variable domain of TCR clone 90504 (TRAV12-3, TRAJ48)
CAMNAKNSGNEKLTF

SEQ ID NO: 181008 - protein, 17 aa, Homo sapiens
  CDR3 for beta chain variable domain of TCR clone 90504 (TRBV7-9, TRBJ2-6)
CASSFGAGYSGANVLTF

SEQ ID NO: 181009 - protein, 11 aa, Homo sapiens
  CDR3 for alpha chain variable domain of TCR clone 90505 (TRAV12-1, TRAJ43)
CVEYDNNDMRF

SEQ ID NO: 181010 - protein, 14 aa, Homo sapiens
  CDR3 for beta chain variable domain of TCR clone 90505 (TRBV11-2, TRBJ2-1)
CASTTGQGNNERFF

SEQ ID NO: 181011 - protein, 11 aa, Homo sapiens
  CDR3 for alpha chain variable domain of TCR clone 90506 (TRAV12-1, TRAJ21)
CVVSNFNKFYF

SEQ ID NO: 181012 - protein, 15 aa, Homo sapiens
  CDR3 for beta chain variable domain of TCR clone 90506 (TRBV5-1, TRBJ1-4)
FAPAAWKDGNEKLFF

SEQ ID NO: 181013 - protein, 17 aa, Homo sapiens
  CDR3 for alpha chain variable domain of TCR clone 90507 (TRAV3, TRAJ6)
CAVRDGPRAGGSYIPTF

SEQ ID NO: 181014 - protein, 17 aa, Homo sapiens
  CDR3 for beta chain variable domain of TCR clone 90507 (TRBV7-8, TRBJ2-1)
CASSPPTGTLAYNEQFF

SEQ ID NO: 181015 - protein, 16 aa, Homo sapiens
  CDR3 for alpha chain variable domain of TCR clone 90508 (TRAV17, TRAJ28)
CATASVSGDGSYQLTF

SEQ ID NO: 181016 - protein, 11 aa, Homo sapiens
  CDR3 for beta chain variable domain of TCR clone 90508 (TRBV7-9, TRBJ2-5)
CASSLGETQYF

SEQ ID NO: 181017 - protein, 14 aa, Homo sapiens
  CDR3 for alpha chain variable domain of TCR clone 90509 (TRAV2, TRAJ9)
CAVEDRRGGFKTIF

SEQ ID NO: 181018 - protein, 17 aa, Homo sapiens
  CDR3 for beta chain variable domain of TCR clone 90509 (TRBV13, TRBJ2-3)
CASSLSRVAGGRNTQYF

SEQ ID NO: 181019 - protein, 14 aa, Homo sapiens
  CDR3 for alpha chain variable domain of TCR clone 90510 (TRAV12-3, TRAJ10)
SHLPLTGGGNKLTF

SEQ ID NO: 181020 - protein, 11 aa, Homo sapiens
  CDR3 for beta chain variable domain of TCR clone 90510 (TRBV6-3, TRBJ2-3)
CATGQADTQYF

SEQ ID NO: 181021 - protein, 12 aa, Homo sapiens
  CDR3 for alpha chain variable domain of TCR clone 90511 (TRAV23/DV6, TRAJ30)
CAASKGDEKIIF

SEQ ID NO: 181022 - protein, 15 aa, Homo sapiens
  CDR3 for beta chain variable domain of TCR clone 90511 (TRBV29-1, TRBJ2-1)
CSGRDRKSSYNEQFF

SEQ ID NO: 181023 - protein, 15 aa, Homo sapiens
  CDR3 for alpha chain variable domain of TCR clone 90512 (TRAV2, TRAJ37)
CAVVVRSGNTGKLIF

SEQ ID NO: 181024 - protein, 15 aa, Homo sapiens
  CDR3 for beta chain variable domain of TCR clone 90512 (TRBV7-2, TRBJ2-1)
CASSSGLAGGNEQFF

SEQ ID NO: 181025 - protein, 14 aa, Homo sapiens
  CDR3 for alpha chain variable domain of TCR clone 90513 (TRAV1-2, TRAJ16)
CAVNRFSDGQKLLF

SEQ ID NO: 181026 - protein, 20 aa, Homo sapiens
  CDR3 for beta chain variable domain of TCR clone 90513 (TRBV7-8, TRBJ2-2)
CASSHLFPGPNIHITGELFF

SEQ ID NO: 181027 - protein, 16 aa, Homo sapiens
  CDR3 for alpha chain variable domain of TCR clone 90514 (TRAV27, TRAJ52)
WAGAPAGGTSYGKLTF

SEQ ID NO: 181028 - protein, 12 aa, Homo sapiens
  CDR3 for beta chain variable domain of TCR clone 90514 (TRBV27, TRBJ2-1)
CASRGFYNEQFF

SEQ ID NO: 181029 - protein, 11 aa, Homo sapiens
  CDR3 for alpha chain variable domain of TCR clone 90515 (TRAV4, TRAJ28)
CLVGDNRAGTL

SEQ ID NO: 181030 - protein, 13 aa, Homo sapiens
  CDR3 for beta chain variable domain of TCR clone 90515 (TRBV20-1, TRBJ2-7)
CSATHTSGYEQYF

SEQ ID NO: 181031 - protein, 14 aa, Homo sapiens
  CDR3 for alpha chain variable domain of TCR clone 90516 (TRAV9-2, TRAJ39)
CALYIYNAGNMLTF

SEQ ID NO: 181032 - protein, 12 aa, Homo sapiens
  CDR3 for beta chain variable domain of TCR clone 90516 (TRBV19, TRBJ2-1)
CASSTGQGEQFF

SEQ ID NO: 181033 - protein, 23 aa, Homo sapiens
  CDR3 for alpha chain variable domain of TCR clone 90517 (TRAV26-1, TRAJ38)
CIADNAGNNHIQNPDPAVYQLRD

SEQ ID NO: 181034 - protein, 13 aa, Homo sapiens
  CDR3 for beta chain variable domain of TCR clone 90517 (TRBV20-1, TRBJ1-1)
CNARGGGNTEAFF

SEQ ID NO: 181035 - protein, 14 aa, Homo sapiens
  CDR3 for alpha chain variable domain of TCR clone 90518 (TRAV12-2, TRAJ40)
CDVKIPSGTYKYIF

SEQ ID NO: 181036 - protein, 20 aa, Homo sapiens
  CDR3 for beta chain variable domain of TCR clone 90518 (TRBV28, TRBJ2-1)
CASTPIGRSPGLAGGNEQFF

SEQ ID NO: 181037 - protein, 17 aa, Homo sapiens
  CDR3 for alpha chain variable domain of TCR clone 90519 (TRAV3, TRAJ6)
CAVRDGPRAGGSYIPTF

SEQ ID NO: 181038 - protein, 17 aa, Homo sapiens
  CDR3 for beta chain variable domain of TCR clone 90519 (TRBV19, TRBJ2-2)
CASSISPSGQGTGELFF

SEQ ID NO: 181039 - protein, 15 aa, Homo sapiens
  CDR3 for alpha chain variable domain of TCR clone 90520 (TRAV26-1, TRAJ42)
CIVSVKGGSQGNLIF

SEQ ID NO: 181040 - protein, 14 aa, Homo sapiens
  CDR3 for beta chain variable domain of TCR clone 90520 (TRBV19, TRBJ2-2)
CATTGHANTGELFF

SEQ ID NO: 181041 - protein, 16 aa, Homo sapiens
  CDR3 for alpha chain variable domain of TCR clone 90521 (TRAV3, TRAJ10)
CAVRDMRAGVGNKLTF

SEQ ID NO: 181042 - protein, 15 aa, Homo sapiens
  CDR3 for beta chain variable domain of TCR clone 90521 (TRBV11-2, TRBJ1-6)
CASTGFGTAVSPLHF

SEQ ID NO: 181043 - protein, 13 aa, Homo sapiens
  CDR3 for alpha chain variable domain of TCR clone 90522 (TRAV8-2, TRAJ13)
CVVSDIRYQKVTF

SEQ ID NO: 181044 - protein, 14 aa, Homo sapiens
  CDR3 for beta chain variable domain of TCR clone 90522 (TRBV25-1, TRBJ1-1)
CASTHLGGNTEAFF

SEQ ID NO: 181045 - protein, 14 aa, Homo sapiens
  CDR3 for alpha chain variable domain of TCR clone 90523 (TRAV3, TRAJ6)
CAVRDPWGSYIPTF

SEQ ID NO: 181046 - protein, 19 aa, Homo sapiens
  CDR3 for beta chain variable domain of TCR clone 90523 (TRBV25-1, TRBJ2-2)
CAILVYRVDRGRKTGELFF

SEQ ID NO: 181047 - protein, 16 aa, Homo sapiens
  CDR3 for alpha chain variable domain of TCR clone 90524 (TRAV26-1, TRAJ40)
CIARGYPTSGTYKYIF

SEQ ID NO: 181048 - protein, 14 aa, Homo sapiens
  CDR3 for beta chain variable domain of TCR clone 90524 (TRBV5-1, TRBJ1-4)
CASSSGQGGEKLFF

SEQ ID NO: 181049 - protein, 11 aa, Homo sapiens
  CDR3 for alpha chain variable domain of TCR clone 90525 (TRAV35, TRAJ30)
CAGPGDDKIIF

SEQ ID NO: 181050 - protein, 14 aa, Homo sapiens
  CDR3 for beta chain variable domain of TCR clone 90525 (TRBV12-4, TRBJ2-1)
CASSWGHSVDEQFF

SEQ ID NO: 181051 - protein, 16 aa, Homo sapiens
  CDR3 for alpha chain variable domain of TCR clone 90526 (TRAV13-1, TRAJ17)
CAASKGVKAAGNKLTF

SEQ ID NO: 181052 - protein, 15 aa, Homo sapiens
  CDR3 for beta chain variable domain of TCR clone 90526 (TRBV20-1, TRBJ1-5)
CSAREGGYNNQPQHF

SEQ ID NO: 181053 - protein, 12 aa, Homo sapiens
  CDR3 for alpha chain variable domain of TCR clone 90527 (TRAV12-2, TRAJ8)
YAVNTGFQKLVF

SEQ ID NO: 181054 - protein, 15 aa, Homo sapiens
  CDR3 for beta chain variable domain of TCR clone 90527 (TRBV7-8, TRBJ1-5)
CASSLERRGLEPQHF

SEQ ID NO: 181055 - protein, 16 aa, Homo sapiens
  CDR3 for alpha chain variable domain of TCR clone 90528 (TRAV12-2, TRAJ6)
CAAPLAGSGGSYIPPF

SEQ ID NO: 181056 - protein, 10 aa, Homo sapiens
  CDR3 for beta chain variable domain of TCR clone 90528 (TRBV28, TRBJ1-2)
CASSSDRAVF

SEQ ID NO: 181057 - protein, 15 aa, Homo sapiens
  CDR3 for alpha chain variable domain of TCR clone 90529 (TRAV12-2, TRAJ23)
CAVKPIYNQGGKLIF

SEQ ID NO: 181058 - protein, 15 aa, Homo sapiens
  CDR3 for beta chain variable domain of TCR clone 90529 (TRBV5-1, TRBJ1-2)
CASSLVGGQSQGYAF

SEQ ID NO: 181059 - protein, 12 aa, Homo sapiens
  CDR3 for alpha chain variable domain of TCR clone 90530 (TRAV29/DV5, TRAJ49)
CAATDTGNQFYF

SEQ ID NO: 181060 - protein, 11 aa, Homo sapiens
  CDR3 for beta chain variable domain of TCR clone 90530 (TRBV19, TRBJ1-1)
CASSIGSEAFF

SEQ ID NO: 181061 - protein, 12 aa, Homo sapiens
  CDR3 for alpha chain variable domain of TCR clone 90531 (TRAV10, TRAJ6)
CVVSEGSYIPTF

SEQ ID NO: 181062 - protein, 12 aa, Homo sapiens
  CDR3 for beta chain variable domain of TCR clone 90531 (TRBV4-2, TRBJ2-7)
CASSLEGYEQYF

SEQ ID NO: 181063 - protein, 12 aa, Homo sapiens
  CDR3 for alpha chain variable domain of TCR clone 90532 (TRAV16, TRAJ9)
CALRAGGFKTIF

SEQ ID NO: 181064 - protein, 13 aa, Homo sapiens
  CDR3 for beta chain variable domain of TCR clone 90532 (TRBV4-3, TRBJ1-1)
CASSQVEGSMAFL

SEQ ID NO: 181065 - protein, 16 aa, Homo sapiens
  CDR3 for alpha chain variable domain of TCR clone 90533 (TRAV30, TRAJ24)
CGTEIVDADSWGKFQF

SEQ ID NO: 181066 - protein, 14 aa, Homo sapiens
  CDR3 for beta chain variable domain of TCR clone 90533 (TRBV3-1, TRBJ2-5)
CASSPQGGGGAQYF

SEQ ID NO: 181067 - protein, 14 aa, Homo sapiens
  CDR3 for alpha chain variable domain of TCR clone 90534 (TRAV20, TRAJ22)
CAVALGGSARQLTF

SEQ ID NO: 181068 - protein, 16 aa, Homo sapiens
  CDR3 for beta chain variable domain of TCR clone 90534 (TRBV6-1, TRBJ1-2)
CASSGAWQGRSHGYTF

SEQ ID NO: 181069 - protein, 14 aa, Homo sapiens
  CDR3 for alpha chain variable domain of TCR clone 90535 (TRAV17, TRAJ57)
CATDPQGGSEKLVF

SEQ ID NO: 181070 - protein, 13 aa, Homo sapiens
  CDR3 for beta chain variable domain of TCR clone 90535 (TRBV11-3, TRBJ2-7)
CASSLDKLYEQYF

SEQ ID NO: 181071 - protein, 16 aa, Homo sapiens
  CDR3 for alpha chain variable domain of TCR clone 90536 (TRAV12-2, TRAJ10)
CAVNRVLTGGGNKLTF

SEQ ID NO: 181072 - protein, 12 aa, Homo sapiens
  CDR3 for beta chain variable domain of TCR clone 90536 (TRBV28, TRBJ2-7)
CASSFSSYEQDF

SEQ ID NO: 181073 - protein, 16 aa, Homo sapiens
  CDR3 for alpha chain variable domain of TCR clone 90537 (TRAV3, TRAJ37)
CAVRPHGSGNTGKIIF

SEQ ID NO: 181074 - protein, 15 aa, Homo sapiens
  CDR3 for beta chain variable domain of TCR clone 90537 (TRBV20-1, TRBJ2-7)
CSARDRVSGMDEQYF

SEQ ID NO: 181075 - protein, 16 aa, Homo sapiens
  CDR3 for alpha chain variable domain of TCR clone 90538 (TRAV8-3, TRAJ8)
CAVPSDGNTGFQKLVF

SEQ ID NO: 181076 - protein, 14 aa, Homo sapiens
  CDR3 for beta chain variable domain of TCR clone 90538 (TRBV4-1, TRBJ2-2)
CASSQAVNTGELFF

SEQ ID NO: 181077 - protein, 10 aa, Homo sapiens
  CDR3 for alpha chain variable domain of TCR clone 90539 (TRAV23/DV6, TRAJ57)
CAASSTLSQG

SEQ ID NO: 181078 - protein, 14 aa, Homo sapiens
  CDR3 for beta chain variable domain of TCR clone 90539 (TRBV11-2, TRBJ2-3)
CASSRLARTDTQYF

SEQ ID NO: 181079 - protein, 17 aa, Homo sapiens
  CDR3 for alpha chain variable domain of TCR clone 90540 (TRAV8-4, TRAJ53)
CAVSGPRSEGSNYKLTL

SEQ ID NO: 181080 - protein, 14 aa, Homo sapiens
  CDR3 for beta chain variable domain of TCR clone 90540 (TRBV7-3, TRBJ2-1)
CASSALAGGPEQFF

SEQ ID NO: 181081 - protein, 13 aa, Homo sapiens
  CDR3 for alpha chain variable domain of TCR clone 90541 (TRAV12-3, TRAJ7)
CAMTPCGNNRLAF

SEQ ID NO: 181082 - protein, 16 aa, Homo sapiens
  CDR3 for beta chain variable domain of TCR clone 90541 (TRBV20-1, TRBJ1-4)
CSARPYGGELNEKLFF

SEQ ID NO: 181083 - protein, 13 aa, Homo sapiens
  CDR3 for alpha chain variable domain of TCR clone 90542 (TRAV20, TRAJ37)
CGGCSSNTGKLIF

SEQ ID NO: 181084 - protein, 11 aa, Homo sapiens
  CDR3 for beta chain variable domain of TCR clone 90542 (TRBV12-4, TRBJ2-3)
CASTATDTQYF

SEQ ID NO: 181085 - protein, 13 aa, Homo sapiens
  CDR3 for alpha chain variable domain of TCR clone 90543 (TRAV30, TRAJ6)
CVTEAGGSYIPTF

SEQ ID NO: 181086 - protein, 16 aa, Homo sapiens
  CDR3 for beta chain variable domain of TCR clone 90543 (TRBV4-3, TRBJ2-3)
CASSLGLAGEGDTQYF

SEQ ID NO: 181087 - protein, 23 aa, Homo sapiens
  CDR3 for alpha chain variable domain of TCR clone 90544 (TRAV12-2, TRAJ36)
SLLIRDSQPSDSATLERANNLFF

SEQ ID NO: 181088 - protein, 15 aa, Homo sapiens
  CDR3 for beta chain variable domain of TCR clone 90544 (TRBV4-1, TRBJ1-4)
CASSDTGGTNEKLFF

SEQ ID NO: 181089 - protein, 18 aa, Homo sapiens
  CDR3 for alpha chain variable domain of TCR clone 90545 (TRAV21, TRAJ52)
CAVRPSPAGGTSYGKLTF

SEQ ID NO: 181090 - protein, 12 aa, Homo sapiens
  CDR3 for beta chain variable domain of TCR clone 90545 (TRBV6-3, TRBJ2-7)
CASSLGRRGLYF

SEQ ID NO: 181091 - protein, 12 aa, Homo sapiens
  CDR3 for alpha chain variable domain of TCR clone 90546 (TRAV12-3, TRAJ17)
CAMTLTGNELTF

SEQ ID NO: 181092 - protein, 13 aa, Homo sapiens
  CDR3 for beta chain variable domain of TCR clone 90546 (TRBV10-3, TRBJ2-7)
CASKLAVNYEQYF

SEQ ID NO: 181093 - protein, 18 aa, Homo sapiens
  CDR3 for alpha chain variable domain of TCR clone 90547 (TRAV2, TRAJ32)
CCLLLCLHYGGATNKLIF

SEQ ID NO: 181094 - protein, 16 aa, Homo sapiens
  CDR3 for beta chain variable domain of TCR clone 90547 (TRBV7-9, TRBJ2-7)
CASSYPDRGGGYEQYF

SEQ ID NO: 181095 - protein, 11 aa, Homo sapiens
  CDR3 for alpha chain variable domain of TCR clone 90548 (TRAV17, TRAJ36)
CAPTGANNLFF

SEQ ID NO: 181096 - protein, 14 aa, Homo sapiens
  CDR3 for beta chain variable domain of TCR clone 90548 (TRBV7-6, TRBJ2-3)
CASSLGTVTDTQYF

SEQ ID NO: 181097 - protein, 15 aa, Homo sapiens
  CDR3 for alpha chain variable domain of TCR clone 90549 (TRAV8-3, TRAJ40)
CAAPSLGSGTYKYIF

SEQ ID NO: 181098 - protein, 16 aa, Homo sapiens
  CDR3 for beta chain variable domain of TCR clone 90549 (TRBV7-3, TRBJ2-3)
CSSSLSGYRPEDTQYF

SEQ ID NO: 181099 - protein, 14 aa, Homo sapiens
  CDR3 for alpha chain variable domain of TCR clone 90550 (TRAV13-1, TRAJ36)
CAAIYQTGANNLFF

SEQ ID NO: 181100 - protein, 15 aa, Homo sapiens
  CDR3 for beta chain variable domain of TCR clone 90550 (TRBV5-1, TRBJ1-1)
CASSPPGGSNTEAFF

SEQ ID NO: 181101 - protein, 12 aa, Homo sapiens
  CDR3 for alpha chain variable domain of TCR clone 90551 (TRAV20, TRAJ39)
CAVGNAGNMLTF

SEQ ID NO: 181102 - protein, 13 aa, Homo sapiens
  CDR3 for beta chain variable domain of TCR clone 90551 (TRBV2, TRBJ2-1)
CASSGTSGGEQFF

SEQ ID NO: 181103 - protein, 13 aa, Homo sapiens
  CDR3 for alpha chain variable domain of TCR clone 90552 (TRAV3, TRAJ21)
CAVREPDFNKFYF

SEQ ID NO: 181104 - protein, 16 aa, Homo sapiens
  CDR3 for beta chain variable domain of TCR clone 90552 (TRBV20-1, TRBJ1-4)
CSAPGQGLLTNEKLFF

SEQ ID NO: 181105 - protein, 12 aa, Homo sapiens
  CDR3 for alpha chain variable domain of TCR clone 90553 (TRAV16, TRAJ27)
CALNHQCSQINL

SEQ ID NO: 181106 - protein, 14 aa, Homo sapiens
  CDR3 for beta chain variable domain of TCR clone 90553 (TRBV11-2, TRBJ1-5)
CASSLDRGRQPQHF

SEQ ID NO: 181107 - protein, 14 aa, Homo sapiens
  CDR3 for alpha chain variable domain of TCR clone 90554 (TRAV13-1, TRAJ45)
CAAIGGGGADGRTF

SEQ ID NO: 181108 - protein, 16 aa, Homo sapiens
  CDR3 for beta chain variable domain of TCR clone 90554 (TRBV7-2, TRBJ1-1)
CASSLGAGWTNTEAFF

SEQ ID NO: 181109 - protein, 13 aa, Homo sapiens
  CDR3 for alpha chain variable domain of TCR clone 90555 (TRAV12-1, TRAJ16)
CVVNGPDGQKLLF

SEQ ID NO: 181110 - protein, 13 aa, Homo sapiens
  CDR3 for beta chain variable domain of TCR clone 90555 (TRBV7-3, TRBJ1-1)
CASSQDWGAEAFF

SEQ ID NO: 181111 - protein, 14 aa, Homo sapiens
  CDR3 for alpha chain variable domain of TCR clone 90556 (TRAV16, TRAJ39)
CALSKNNAGNMLTF

SEQ ID NO: 181112 - protein, 16 aa, Homo sapiens
  CDR3 for beta chain variable domain of TCR clone 90556 (TRBV6-6, TRBJ2-1)
CASRYSFSGSYNEQFF

SEQ ID NO: 181113 - protein, 13 aa, Homo sapiens
  CDR3 for alpha chain variable domain of TCR clone 90557 (TRAV13-1, TRAJ5)
CAASDTGRRALTF

SEQ ID NO: 181114 - protein, 13 aa, Homo sapiens
  CDR3 for beta chain variable domain of TCR clone 90557 (TRBV19, TRBJ2-2)
CASSIWSTGELFF

SEQ ID NO: 181115 - protein, 15 aa, Homo sapiens
  CDR3 for alpha chain variable domain of TCR clone 90558 (TRAV13-1, TRAJ52)
CAATSPRTSYGKLTF

SEQ ID NO: 181116 - protein, 17 aa, Homo sapiens
  CDR3 for beta chain variable domain of TCR clone 90558 (TRBV20-1, TRBJ2-1)
CSASSSGLAGSYNEQFF

SEQ ID NO: 181117 - protein, 15 aa, Homo sapiens
  CDR3 for alpha chain variable domain of TCR clone 90559 (TRAV8-3, TRAJ23)
CAVGAPYNQGGKLIF

SEQ ID NO: 181118 - protein, 15 aa, Homo sapiens
  CDR3 for beta chain variable domain of TCR clone 90559 (TRBV19, TRBJ1-1)
CASTSGQIQNTEAFF

SEQ ID NO: 181119 - protein, 17 aa, Homo sapiens
  CDR3 for alpha chain variable domain of TCR clone 90560 (TRAV3, TRAJ6)
CAVRAGPRAGGSYIPTF

SEQ ID NO: 181120 - protein, 15 aa, Homo sapiens
  CDR3 for beta chain variable domain of TCR clone 90560 (TRBV20-1, TRBJ2-7)
CSARDRVSGMDEQYF

SEQ ID NO: 181121 - protein, 14 aa, Homo sapiens
  CDR3 for alpha chain variable domain of TCR clone 90561 (TRAV20, TRAJ42)
CAVQAGGSQGKLIF

SEQ ID NO: 181122 - protein, 14 aa, Homo sapiens
  CDR3 for beta chain variable domain of TCR clone 90561 (TRBV28, TRBJ1-2)
CASRIQGASYGYTF

SEQ ID NO: 181123 - protein, 13 aa, Homo sapiens
  CDR3 for alpha chain variable domain of TCR clone 90562 (TRAV30, TRAJ39)
CGTENNAGNMLTF

SEQ ID NO: 181124 - protein, 16 aa, Homo sapiens
  CDR3 for beta chain variable domain of TCR clone 90562 (TRBV20-1, TRBJ2-3)
CSARLHSAGAIDTQYF

SEQ ID NO: 181125 - protein, 16 aa, Homo sapiens
  CDR3 for alpha chain variable domain of TCR clone 90563 (TRAV21, TRAJ52)
CAVTSAGGTSYGKLTF

SEQ ID NO: 181126 - protein, 16 aa, Homo sapiens
  CDR3 for beta chain variable domain of TCR clone 90563 (TRBV2, TRBJ2-1)
CASSVGGSLSYNEQFF

SEQ ID NO: 181127 - protein, 14 aa, Homo sapiens
  CDR3 for alpha chain variable domain of TCR clone 90564 (TRAV8-2, TRAJ4)
CVVSPSGGYNKLIF

SEQ ID NO: 181128 - protein, 12 aa, Homo sapiens
  CDR3 for beta chain variable domain of TCR clone 90564 (TRBV12-4, TRBJ2-3)
CASSLGQDTQYF

SEQ ID NO: 181129 - protein, 12 aa, Homo sapiens
  CDR3 for alpha chain variable domain of TCR clone 90565 (TRAV8-2, TRAJ5)
CVVSDIGRALTF

SEQ ID NO: 181130 - protein, 13 aa, Homo sapiens
  CDR3 for beta chain variable domain of TCR clone 90565 (TRBV12-4, TRBJ2-7)
CASSPGQLYEQYF

SEQ ID NO: 181131 - protein, 10 aa, Homo sapiens
  CDR3 for alpha chain variable domain of TCR clone 90566 (TRAV8-4, TRAJ43)
CAVSADDMRF

SEQ ID NO: 181132 - protein, 18 aa, Homo sapiens
  CDR3 for beta chain variable domain of TCR clone 90566 (TRBV12-4, TRBJ2-2)
CASSLVAGTRGRTGELFF

SEQ ID NO: 181133 - protein, 16 aa, Homo sapiens
  CDR3 for alpha chain variable domain of TCR clone 90567 (TRAV8-3, TRAJ8)
CAVPRDGNTGFQKLVF

SEQ ID NO: 181134 - protein, 15 aa, Homo sapiens
  CDR3 for beta chain variable domain of TCR clone 90567 (TRBV6-1, TRBJ2-6)
CASSFRPSGANVLTF

SEQ ID NO: 181135 - protein, 12 aa, Homo sapiens
  CDR3 for alpha chain variable domain of TCR clone 90568 (TRAV12-3, TRAJ17)
CAMTLTGNKLTF

SEQ ID NO: 181136 - protein, 15 aa, Homo sapiens
  CDR3 for beta chain variable domain of TCR clone 90568 (TRBV19, TRBJ2-1)
CASSRPGQNYNEQFF

SEQ ID NO: 181137 - protein, 13 aa, Homo sapiens
  CDR3 for alpha chain variable domain of TCR clone 90569 (TRAV20, TRAJ9)
CAVPDTGGFKTIF

SEQ ID NO: 181138 - protein, 15 aa, Homo sapiens
  CDR3 for beta chain variable domain of TCR clone 90569 (TRBV27, TRBJ2-7)
CASGKAGRGGYEQYF

SEQ ID NO: 181139 - protein, 14 aa, Homo sapiens
  CDR3 for alpha chain variable domain of TCR clone 90570 (TRAV9-2, TRAJ39)
CALYIYNAGNMLTF

SEQ ID NO: 181140 - protein, 16 aa, Homo sapiens
  CDR3 for beta chain variable domain of TCR clone 90570 (TRBV4-1, TRBJ2-3)
CASSQRAGGLTDTQYF

SEQ ID NO: 181141 - protein, 15 aa, Homo sapiens
  CDR3 for alpha chain variable domain of TCR clone 90571 (TRAV21, TRAJ56)
RAVTKYTGANSKLTF

SEQ ID NO: 181142 - protein, 13 aa, Homo sapiens
  CDR3 for beta chain variable domain of TCR clone 90571 (TRBV7-8, TRBJ1-2)
CASSAQSYYGYTF

SEQ ID NO: 181143 - protein, 13 aa, Homo sapiens
  CDR3 for alpha chain variable domain of TCR clone 90572 (TRAV29/DV5, TRAJ44)
CAASTGTASKLTF

SEQ ID NO: 181144 - protein, 16 aa, Homo sapiens
  CDR3 for beta chain variable domain of TCR clone 90572 (TRBV19, TRBJ1-2)
CASSIGLFRDAYGYTF

SEQ ID NO: 181145 - protein, 14 aa, Homo sapiens
  CDR3 for alpha chain variable domain of TCR clone 90573 (TRAV3, TRAJ9)
CAVRGNTGGFKTIF

SEQ ID NO: 181146 - protein, 15 aa, Homo sapiens
  CDR3 for beta chain variable domain of TCR clone 90573 (TRBV6-3, TRBJ2-7)
CASSSPGTVFYEQYF

SEQ ID NO: 181147 - protein, 12 aa, Homo sapiens
  CDR3 for alpha chain variable domain of TCR clone 90574 (TRAV12-3, TRAJ17)
CAMTLTGNKLTF

SEQ ID NO: 181148 - protein, 15 aa, Homo sapiens
  CDR3 for beta chain variable domain of TCR clone 90574 (TRBV7-2, TRBJ2-1)
CASSLVAGRYNEQFF

SEQ ID NO: 181149 - protein, 16 aa, Homo sapiens
  CDR3 for alpha chain variable domain of TCR clone 90575 (TRAV12-1, TRAJ53)
CVVTSVAGGSNYKLTF

SEQ ID NO: 181150 - protein, 14 aa, Homo sapiens
  CDR3 for beta chain variable domain of TCR clone 90575 (TRBV11-2, TRBJ2-7)
CASSLLWGSYEQYF

SEQ ID NO: 181151 - protein, 13 aa, Homo sapiens
  CDR3 for alpha chain variable domain of TCR clone 90576 (TRAV8-3, TRAJ47)
CAVSMEYGNKLVF

SEQ ID NO: 181152 - protein, 15 aa, Homo sapiens
  CDR3 for beta chain variable domain of TCR clone 90576 (TRBV7-9, TRBJ1-5)
CASSQGHQPNQPQHF

SEQ ID NO: 181153 - protein, 15 aa, Homo sapiens
  CDR3 for alpha chain variable domain of TCR clone 90577 (TRAV1-2, TRAJ30)
CAVRPHGNRDDKIIF

SEQ ID NO: 181154 - protein, 16 aa, Homo sapiens
  CDR3 for beta chain variable domain of TCR clone 90577 (TRBV29-1, TRBJ1-2)
CSVEANRDIANYGYTF

SEQ ID NO: 181155 - protein, 10 aa, Homo sapiens
  CDR3 for alpha chain variable domain of TCR clone 90578 (TRAV30, TRAJ48)
CGIGNEKLTS

SEQ ID NO: 181156 - protein, 19 aa, Homo sapiens
  CDR3 for beta chain variable domain of TCR clone 90578 (TRBV25-1, TRBJ2-2)
CAILVYRVDRGRKTGELFF

SEQ ID NO: 181157 - protein, 13 aa, Homo sapiens
  CDR3 for alpha chain variable domain of TCR clone 90579 (TRAV2, TRAJ40)
CAVVTSGTYKYIF

SEQ ID NO: 181158 - protein, 14 aa, Homo sapiens
  CDR3 for beta chain variable domain of TCR clone 90579 (TRBV2, TRBJ1-5)
CASSGTVSNQPQHF

SEQ ID NO: 181159 - protein, 14 aa, Homo sapiens
  CDR3 for alpha chain variable domain of TCR clone 90580 (TRAV13-2, TRAJ9)
CAENSFTGGFKTTF

SEQ ID NO: 181160 - protein, 13 aa, Homo sapiens
  CDR3 for beta chain variable domain of TCR clone 90580 (TRBV19, TRBJ2-7)
CASSIDRTYEQYF

SEQ ID NO: 181161 - protein, 13 aa, Homo sapiens
  CDR3 for alpha chain variable domain of TCR clone 90581 (TRAV36/DV7, TRAJ53)
CALSGGSNYKLTF

SEQ ID NO: 181162 - protein, 13 aa, Homo sapiens
  CDR3 for beta chain variable domain of TCR clone 90581 (TRBV28, TRBJ2-4)
CASSQSSKNIQCF

SEQ ID NO: 181163 - protein, 14 aa, Homo sapiens
  CDR3 for alpha chain variable domain of TCR clone 90582 (TRAV26-1, TRAJ38)
CIADNAGNNRKLNW

SEQ ID NO: 181164 - protein, 13 aa, Homo sapiens
  CDR3 for beta chain variable domain of TCR clone 90582 (TRBV7-9, TRBJ1-2)
CASSLKQNYGYTF

SEQ ID NO: 181165 - protein, 15 aa, Homo sapiens
  CDR3 for alpha chain variable domain of TCR clone 90583 (TRAV16, TRAJ4)
CSSRMFSGGYNKLIF

SEQ ID NO: 181166 - protein, 16 aa, Homo sapiens
  CDR3 for beta chain variable domain of TCR clone 90583 (TRBV12-4, TRBJ1-5)
CASSRPVGGSNQPQHF

SEQ ID NO: 181167 - protein, 15 aa, Homo sapiens
  CDR3 for alpha chain variable domain of TCR clone 90584 (TRAV8-6, TRAJ6)
CAVSSTSGGSYIPTF

SEQ ID NO: 181168 - protein, 18 aa, Homo sapiens
  CDR3 for beta chain variable domain of TCR clone 90584 (TRBV18, TRBJ2-3)
CASSYTSGAAGGTDTQYF

SEQ ID NO: 181169 - protein, 10 aa, Homo sapiens
  CDR3 for alpha chain variable domain of TCR clone 90585 (TRAV23/DV6, TRAJ57)
CAASSTLSQG

SEQ ID NO: 181170 - protein, 16 aa, Homo sapiens
  CDR3 for beta chain variable domain of TCR clone 90585 (TRBV29-1, TRBJ2-7)
CSVEDAEDGTAYEQYF

SEQ ID NO: 181171 - protein, 10 aa, Homo sapiens
  CDR3 for alpha chain variable domain of TCR clone 90586 (TRAV30, TRAJ48)
CGIGNEKLTF

SEQ ID NO: 181172 - protein, 15 aa, Homo sapiens
  CDR3 for beta chain variable domain of TCR clone 90586 (TRBV7-6, TRBJ1-2)
CASSSGGRGGYGYTF

SEQ ID NO: 181173 - protein, 14 aa, Homo sapiens
  CDR3 for alpha chain variable domain of TCR clone 90587 (TRAV35, TRAJ13)
CAGSPSGGYQKVTF

SEQ ID NO: 181174 - protein, 15 aa, Homo sapiens
  CDR3 for beta chain variable domain of TCR clone 90587 (TRBV5-1, TRBJ2-7)
CASSLNGGPAREQYF

SEQ ID NO: 181175 - protein, 13 aa, Homo sapiens
  CDR3 for alpha chain variable domain of TCR clone 90588 (TRAV12-1, TRAJ21)
CVVTLYNFNKFYF

SEQ ID NO: 181176 - protein, 20 aa, Homo sapiens
  CDR3 for beta chain variable domain of TCR clone 90588 (TRBV7-8, TRBJ2-1)
CASNLAHRLAGVRSYNEQFF

SEQ ID NO: 181177 - protein, 15 aa, Homo sapiens
  CDR3 for alpha chain variable domain of TCR clone 90589 (TRAV3, TRAJ47)
CAVRDIGEYGDKLVF

SEQ ID NO: 181178 - protein, 12 aa, Homo sapiens
  CDR3 for beta chain variable domain of TCR clone 90589 (TRBV11-2, TRBJ2-2)
CASSLGGGELFF

SEQ ID NO: 181179 - protein, 11 aa, Homo sapiens
  CDR3 for alpha chain variable domain of TCR clone 90590 (TRAV26-2, TRAJ45)
PIVGGADGLTF

SEQ ID NO: 181180 - protein, 20 aa, Homo sapiens
  CDR3 for beta chain variable domain of TCR clone 90590 (TRBV28, TRBJ2-1)
CASTPIGRSPGLAGGNEQFF

SEQ ID NO: 181181 - protein, 12 aa, Homo sapiens
  CDR3 for alpha chain variable domain of TCR clone 90591 (TRAV17, TRAJ12)
CATLRSSYKLIF

SEQ ID NO: 181182 - protein, 15 aa, Homo sapiens
  CDR3 for beta chain variable domain of TCR clone 90591 (TRBV9, TRBJ1-6)
CASSVAGTGDSPLHF

SEQ ID NO: 181183 - protein, 19 aa, Homo sapiens
  CDR3 for alpha chain variable domain of TCR clone 90592 (TRAV27, TRAJ53)
ASTSVQSRNSGGSNYKLTF

SEQ ID NO: 181184 - protein, 20 aa, Homo sapiens
  CDR3 for beta chain variable domain of TCR clone 90592 (TRBV11-1, TRBJ2-6)
CASSAEFQPGMSSGANVLTF

SEQ ID NO: 181185 - protein, 16 aa, Homo sapiens
  CDR3 for alpha chain variable domain of TCR clone 90593 (TRAV8-3, TRAJ13)
CAVGAYASGGYQKVTF

SEQ ID NO: 181186 - protein, 15 aa, Homo sapiens
  CDR3 for beta chain variable domain of TCR clone 90593 (TRBV19, TRBJ1-5)
CASSIVWADNQPQHF

SEQ ID NO: 181187 - protein, 11 aa, Homo sapiens
  CDR3 for alpha chain variable domain of TCR clone 90594 (TRAV12-1, TRAJ21)
CVVNNFNKFYF

SEQ ID NO: 181188 - protein, 18 aa, Homo sapiens
  CDR3 for beta chain variable domain of TCR clone 90594 (TRBV20-1, TRBJ2-6)
CSAETTPTHGSGANVLTF

SEQ ID NO: 181189 - protein, 15 aa, Homo sapiens
  CDR3 for alpha chain variable domain of TCR clone 90595 (TRAV26-1, TRAJ29)
CIVKVEGSGNTPLVF

SEQ ID NO: 181190 - protein, 13 aa, Homo sapiens
  CDR3 for beta chain variable domain of TCR clone 90595 (TRBV19, TRBJ1-2)
CASSVPGQDGYTF

SEQ ID NO: 181191 - protein, 14 aa, Homo sapiens
  CDR3 for alpha chain variable domain of TCR clone 90596 (TRAV3, TRAJ21)
CAVESQANFNKFYF

SEQ ID NO: 181192 - protein, 12 aa, Homo sapiens
  CDR3 for beta chain variable domain of TCR clone 90596 (TRBV14, TRBJ2-7)
CASSLNQRGQYF

SEQ ID NO: 181193 - protein, 13 aa, Homo sapiens
  CDR3 for alpha chain variable domain of TCR clone 90597 (TRAV8-3, TRAJ36)
CAVGATGANNLFF

SEQ ID NO: 181194 - protein, 20 aa, Homo sapiens
  CDR3 for beta chain variable domain of TCR clone 90597 (TRBV11-1, TRBJ2-6)
CASSAEFQPGMSSGANVLTF

SEQ ID NO: 181195 - protein, 16 aa, Homo sapiens
  CDR3 for alpha chain variable domain of TCR clone 90598 (TRAV13-1, TRAJ45)
CAASWESGGGADGLTF

SEQ ID NO: 181196 - protein, 16 aa, Homo sapiens
  CDR3 for beta chain variable domain of TCR clone 90598 (TRBV10-3, TRBJ2-1)
CAISLTSGNSYNEQFF

SEQ ID NO: 181197 - protein, 14 aa, Homo sapiens
  CDR3 for alpha chain variable domain of TCR clone 90599 (TRAV38-1, TRAJ28)
CAFTSGAGSYQLTF

SEQ ID NO: 181198 - protein, 15 aa, Homo sapiens
  CDR3 for beta chain variable domain of TCR clone 90599 (TRBV19, TRBJ2-4)
CASRGPRRGENIQYF

SEQ ID NO: 181199 - protein, 14 aa, Homo sapiens
  CDR3 for alpha chain variable domain of TCR clone 90600 (TRAV12-2, TRAJ44)
CAVNPAGTASNLTF

SEQ ID NO: 181200 - protein, 15 aa, Homo sapiens
  CDR3 for beta chain variable domain of TCR clone 90600 (TRBV5-1, TRBJ2-1)
CASSPPRAPYNEQFF

SEQ ID NO: 181201 - protein, 12 aa, Homo sapiens
  CDR3 for alpha chain variable domain of TCR clone 90601 (TRAV17, TRAJ53)
CAGGGSSYKLTF

SEQ ID NO: 181202 - protein, 16 aa, Homo sapiens
  CDR3 for beta chain variable domain of TCR clone 90601 (TRBV11-2, TRBJ2-3)
CASSFQGRGALDTQYF

SEQ ID NO: 181203 - protein, 19 aa, Homo sapiens
  CDR3 for alpha chain variable domain of TCR clone 90602 (TRAV38-1, TRAJ53)
CAFMKHGLESGGSNYKLTF

SEQ ID NO: 181204 - protein, 13 aa, Homo sapiens
  CDR3 for beta chain variable domain of TCR clone 90602 (TRBV19, TRBJ2-7)
CASSPGQSYEQYF

SEQ ID NO: 181205 - protein, 13 aa, Homo sapiens
  CDR3 for alpha chain variable domain of TCR clone 90603 (TRAV21, TRAJ27)
CAARPGNAGKSTF

SEQ ID NO: 181206 - protein, 17 aa, Homo sapiens
  CDR3 for beta chain variable domain of TCR clone 90603 (TRBV6-5, TRBJ2-1)
CASRKNPRTGGHNEQFF

SEQ ID NO: 181207 - protein, 15 aa, Homo sapiens
  CDR3 for alpha chain variable domain of TCR clone 90604 (TRAV4, TRAJ39)
CLVGPNNNAGNMLTF

SEQ ID NO: 181208 - protein, 15 aa, Homo sapiens
  CDR3 for beta chain variable domain of TCR clone 90604 (TRBV6-1, TRBJ2-4)
CASSEAVWTINIQYF

SEQ ID NO: 181209 - protein, 12 aa, Homo sapiens
  CDR3 for alpha chain variable domain of TCR clone 90605 (TRAV13-1, TRAJ21)
CAAKEGFNKFYF

SEQ ID NO: 181210 - protein, 20 aa, Homo sapiens
  CDR3 for beta chain variable domain of TCR clone 90605 (TRBV4-2, TRBJ2-7)
CASSQASGGNLRAVLRAGHQ

SEQ ID NO: 181211 - protein, 12 aa, Homo sapiens
  CDR3 for alpha chain variable domain of TCR clone 90606 (TRAV4, TRAJ26)
CLVGDYGQNFVF

SEQ ID NO: 181212 - protein, 16 aa, Homo sapiens
  CDR3 for beta chain variable domain of TCR clone 90606 (TRBV12-5, TRBJ2-5)
CASGPRTSGNQETQYF

SEQ ID NO: 181213 - protein, 14 aa, Homo sapiens
  CDR3 for alpha chain variable domain of TCR clone 90607 (TRAV12-2, TRAJ45)
RAVYSGGGADGLTF

SEQ ID NO: 181214 - protein, 13 aa, Homo sapiens
  CDR3 for beta chain variable domain of TCR clone 90607 (TRBV7-7, TRBJ2-3)
CASSLSRADTQYF

SEQ ID NO: 181215 - protein, 19 aa, Homo sapiens
  CDR3 for alpha chain variable domain of TCR clone 90608 (TRAV2, TRAJ20)
ILQVREADAAVYRDCRLSF

SEQ ID NO: 181216 - protein, 12 aa, Homo sapiens
  CDR3 for beta chain variable domain of TCR clone 90608 (TRBV11-2, TRBJ2-2)
CASSLGGGELFF

SEQ ID NO: 181217 - protein, 15 aa, Homo sapiens
  CDR3 for alpha chain variable domain of TCR clone 90609 (TRAV35, TRAJ40)
CAGQLWDSGTYKYIF

SEQ ID NO: 181218 - protein, 12 aa, Homo sapiens
  CDR3 for beta chain variable domain of TCR clone 90609 (TRBV7-8, TRBJ2-7)
CASSVAGYEQYF

SEQ ID NO: 181219 - protein, 14 aa, Homo sapiens
  CDR3 for alpha chain variable domain of TCR clone 90610 (TRAV8-4, TRAJ13)
CAVTLSGGYQKVAF

SEQ ID NO: 181220 - protein, 14 aa, Homo sapiens
  CDR3 for beta chain variable domain of TCR clone 90610 (TRBV7-2, TRBJ1-2)
CASSQTGSTYGYTF

SEQ ID NO: 181221 - protein, 13 aa, Homo sapiens
  CDR3 for alpha chain variable domain of TCR clone 90611 (TRAV12-2, TRAJ20)
CAVYPSNDYKLRF

SEQ ID NO: 181222 - protein, 15 aa, Homo sapiens
  CDR3 for beta chain variable domain of TCR clone 90611 (TRBV18, TRBJ1-2)
CASSPGNGLGYGYTF

SEQ ID NO: 181223 - protein, 13 aa, Homo sapiens
  CDR3 for alpha chain variable domain of TCR clone 90612 (TRAV3, TRAJ27)
CAVRPLGAGKSTF

SEQ ID NO: 181224 - protein, 14 aa, Homo sapiens
  CDR3 for beta chain variable domain of TCR clone 90612 (TRBV19, TRBJ2-7)
CASTVQGRPYEQYF

SEQ ID NO: 181225 - protein, 15 aa, Homo sapiens
  CDR3 for alpha chain variable domain of TCR clone 90613 (TRAV8-3, TRAJ21)
CAVGALPPRGYKFSF

SEQ ID NO: 181226 - protein, 18 aa, Homo sapiens
  CDR3 for beta chain variable domain of TCR clone 90613 (TRBV25-1, TRBJ1-2)
CASSGLQNGQGLIFGYTF

SEQ ID NO: 181227 - protein, 17 aa, Homo sapiens
  CDR3 for alpha chain variable domain of TCR clone 90614 (TRAV17, TRAJ52)
CATDANAGGTSYGKLTF

SEQ ID NO: 181228 - protein, 15 aa, Homo sapiens
  CDR3 for beta chain variable domain of TCR clone 90614 (TRBV11-2, TRBJ2-2)
CASSSDRVNAGELFF

SEQ ID NO: 181229 - protein, 12 aa, Homo sapiens
  CDR3 for alpha chain variable domain of TCR clone 90615 (TRAV29/DV5, TRAJ34)
CAASGNTDKLIL

SEQ ID NO: 181230 - protein, 16 aa, Homo sapiens
  CDR3 for beta chain variable domain of TCR clone 90615 (TRBV12-4, TRBJ1-5)
CASRQPVEGSNQPQHF

SEQ ID NO: 181231 - protein, 12 aa, Homo sapiens
  CDR3 for alpha chain variable domain of TCR clone 90616 (TRAV1-2, TRAJ33)
CAALDSNYQLIW

SEQ ID NO: 181232 - protein, 16 aa, Homo sapiens
  CDR3 for beta chain variable domain of TCR clone 90616 (TRBV20-1, TRBJ1-2)
CSASMGQGVANYGYTF

SEQ ID NO: 181233 - protein, 15 aa, Homo sapiens
  CDR3 for alpha chain variable domain of TCR clone 90617 (TRAV1-1, TRAJ5)
CAVRHMDTGRRALTF

SEQ ID NO: 181234 - protein, 14 aa, Homo sapiens
  CDR3 for beta chain variable domain of TCR clone 90617 (TRBV7-3, TRBJ2-2)
CASSSGGYTGELFF

SEQ ID NO: 181235 - protein, 13 aa, Homo sapiens
  CDR3 for alpha chain variable domain of TCR clone 90618 (TRAV30, TRAJ24)
CGTVTDSWGKLQF

SEQ ID NO: 181236 - protein, 13 aa, Homo sapiens
  CDR3 for beta chain variable domain of TCR clone 90618 (TRBV19, TRBJ2-7)
CASSIDRTYEQYF

SEQ ID NO: 181237 - protein, 12 aa, Homo sapiens
  CDR3 for alpha chain variable domain of TCR clone 90619 (TRAV26-1, TRAJ13)
CIASRGYRKVTF

SEQ ID NO: 181238 - protein, 14 aa, Homo sapiens
  CDR3 for beta chain variable domain of TCR clone 90619 (TRBV7-2, TRBJ2-7)
CASSPKTSFYEQYF

SEQ ID NO: 181239 - protein, 16 aa, Homo sapiens
  CDR3 for alpha chain variable domain of TCR clone 90620 (TRAV1-2, TRAJ10)
CAVRGVLTGGGNKLTF

SEQ ID NO: 181240 - protein, 11 aa, Homo sapiens
  CDR3 for beta chain variable domain of TCR clone 90620 (TRBV12-4, TRBJ2-3)
CASTATDTQYF

SEQ ID NO: 181241 - protein, 14 aa, Homo sapiens
  CDR3 for alpha chain variable domain of TCR clone 90621 (TRAV12-2, TRAJ40)
CAVKIPSGTYKYTF

SEQ ID NO: 181242 - protein, 20 aa, Homo sapiens
  CDR3 for beta chain variable domain of TCR clone 90621 (TRBV28, TRBJ2-1)
CASTPIGRSPGLAGGNEQFF

SEQ ID NO: 181243 - protein, 17 aa, Homo sapiens
  CDR3 for alpha chain variable domain of TCR clone 90622 (TRAV26-1, TRAJ37)
CIVRVITVSSNTGKLIF

SEQ ID NO: 181244 - protein, 15 aa, Homo sapiens
  CDR3 for beta chain variable domain of TCR clone 90622 (TRBV12-4, TRBJ2-2)
CATRFGRGETGELFF

SEQ ID NO: 181245 - protein, 14 aa, Homo sapiens
  CDR3 for alpha chain variable domain of TCR clone 90623 (TRAV17, TRAJ17)
RATVVRGAGNKLTF

SEQ ID NO: 181246 - protein, 17 aa, Homo sapiens
  CDR3 for beta chain variable domain of TCR clone 90623 (TRBV11-2, TRBJ2-1)
CASSLYPPGVEYNEQFF

SEQ ID NO: 181247 - protein, 12 aa, Homo sapiens
  CDR3 for alpha chain variable domain of TCR clone 90624 (TRAV21, TRAJ13)
PGPSGGYLKVTF

SEQ ID NO: 181248 - protein, 15 aa, Homo sapiens
  CDR3 for beta chain variable domain of TCR clone 90624 (TRBV7-9, TRBJ1-6)
CASSSPGRGNSPLHF

SEQ ID NO: 181249 - protein, 11 aa, Homo sapiens
  CDR3 for alpha chain variable domain of TCR clone 90625 (TRAV8-4, TRAJ20)
CAVTNVLTTTS

SEQ ID NO: 181250 - protein, 15 aa, Homo sapiens
  CDR3 for beta chain variable domain of TCR clone 90625 (TRBV28, TRBJ2-4)
CAAGSGTLLMGIQYF

SEQ ID NO: 181251 - protein, 14 aa, Homo sapiens
  CDR3 for alpha chain variable domain of TCR clone 90626 (TRAV23/DV6, TRAJ11)
CAAILESGYSTLTF

SEQ ID NO: 181252 - protein, 13 aa, Homo sapiens
  CDR3 for beta chain variable domain of TCR clone 90626 (TRBV4-1, TRBJ2-5)
CASSLTRGETQYF

SEQ ID NO: 181253 - protein, 15 aa, Homo sapiens
  CDR3 for alpha chain variable domain of TCR clone 90627 (TRAV26-1, TRAJ23)
CIVRVAGYQGGKLIF

SEQ ID NO: 181254 - protein, 18 aa, Homo sapiens
  CDR3 for beta chain variable domain of TCR clone 90627 (TRBV28, TRBJ2-1)
CASISTSGRANSYNEQFF

SEQ ID NO: 181255 - protein, 15 aa, Homo sapiens
  CDR3 for alpha chain variable domain of TCR clone 90628 (TRAV13-1, TRAJ44)
CAASRGGGTASELTF

SEQ ID NO: 181256 - protein, 14 aa, Homo sapiens
  CDR3 for beta chain variable domain of TCR clone 90628 (TRBV7-2, TRBJ2-5)
CASSPRGSSETQYF

SEQ ID NO: 181257 - protein, 13 aa, Homo sapiens
  CDR3 for alpha chain variable domain of TCR clone 90629 (TRAV12-3, TRAJ7)
CAMTQYGNNRLAF

SEQ ID NO: 181258 - protein, 16 aa, Homo sapiens
  CDR3 for beta chain variable domain of TCR clone 90629 (TRBV20-1, TRBJ1-4)
CSARPYGGELNEKLFF

SEQ ID NO: 181259 - protein, 14 aa, Homo sapiens
  CDR3 for alpha chain variable domain of TCR clone 90630 (TRAV1-2, TRAJ16)
CAVNRFSDGQKLLF

SEQ ID NO: 181260 - protein, 13 aa, Homo sapiens
  CDR3 for beta chain variable domain of TCR clone 90630 (TRBV24-1, TRBJ1-5)
CATSDRGDQPQHF

SEQ ID NO: 181261 - protein, 14 aa, Homo sapiens
  CDR3 for alpha chain variable domain of TCR clone 90631 (TRAV8-2, TRAJ4)
CVVGPSGCYNKLIF

SEQ ID NO: 181262 - protein, 15 aa, Homo sapiens
  CDR3 for beta chain variable domain of TCR clone 90631 (TRBV4-1, TRBJ1-4)
CASSDTGGTNEKLFF

SEQ ID NO: 181263 - protein, 16 aa, Homo sapiens
  CDR3 for alpha chain variable domain of TCR clone 90632 (TRAV3, TRAJ37)
CAVRVRGSGNTGTLIF

SEQ ID NO: 181264 - protein, 13 aa, Homo sapiens
  CDR3 for beta chain variable domain of TCR clone 90632 (TRBV14, TRBJ2-1)
CASSQDRRNEQFF

SEQ ID NO: 181265 - protein, 14 aa, Homo sapiens
  CDR3 for alpha chain variable domain of TCR clone 90633 (TRAV12-2, TRAJ40)
CAVKIPSGTSTYIF

SEQ ID NO: 181266 - protein, 14 aa, Homo sapiens
  CDR3 for beta chain variable domain of TCR clone 90633 (TRBV20-1, TRBJ1-1)
CSAQTRIGGTEAFF

SEQ ID NO: 181267 - protein, 14 aa, Homo sapiens
  CDR3 for alpha chain variable domain of TCR clone 90634 (TRAV1-2, TRAJ16)
CAVNRFSDGQKLLF

SEQ ID NO: 181268 - protein, 14 aa, Homo sapiens
  CDR3 for beta chain variable domain of TCR clone 90634 (TRBV20-1, TRBJ2-3)
CSARGGTSTDTRYF

SEQ ID NO: 181269 - protein, 18 aa, Homo sapiens
  CDR3 for alpha chain variable domain of TCR clone 90635 (TRAV21, TRAJ52)
CAVRPSPAGGTSYGKLTF

SEQ ID NO: 181270 - protein, 15 aa, Homo sapiens
  CDR3 for beta chain variable domain of TCR clone 90635 (TRBV11-2, TRBJ2-1)
CASSPAGQSLNEQFF

SEQ ID NO: 181271 - protein, 14 aa, Homo sapiens
  CDR3 for alpha chain variable domain of TCR clone 90636 (TRAV13-1, TRAJ4)
CAATLSSGYNKLIF

SEQ ID NO: 181272 - protein, 14 aa, Homo sapiens
  CDR3 for beta chain variable domain of TCR clone 90636 (TRBV19, TRBJ2-1)
CASPTFVLSGEQFF

SEQ ID NO: 181273 - protein, 13 aa, Homo sapiens
  CDR3 for alpha chain variable domain of TCR clone 90637 (TRAV21, TRAJ20)
CAVGLRVDYKLSF

SEQ ID NO: 181274 - protein, 16 aa, Homo sapiens
  CDR3 for beta chain variable domain of TCR clone 90637 (TRBV2, TRBJ1-1)
CASSPPNRGMNTEAFF

SEQ ID NO: 181275 - protein, 12 aa, Homo sapiens
  CDR3 for alpha chain variable domain of TCR clone 90638 (TRAV21, TRAJ39)
CAADNAGNMLTF

SEQ ID NO: 181276 - protein, 12 aa, Homo sapiens
  CDR3 for beta chain variable domain of TCR clone 90638 (TRBV11-2, TRBJ2-5)
CASSLDTQTQYF

SEQ ID NO: 181277 - protein, 16 aa, Homo sapiens
  CDR3 for alpha chain variable domain of TCR clone 90639 (TRAV12-1, TRAJ15)
CVVSPAGQPGRNCSDP

SEQ ID NO: 181278 - protein, 13 aa, Homo sapiens
  CDR3 for beta chain variable domain of TCR clone 90639 (TRBV7-2, TRBJ2-4)
CASSREHANIQYF

SEQ ID NO: 181279 - protein, 10 aa, Homo sapiens
  CDR3 for alpha chain variable domain of TCR clone 90640 (TRAV1-2, TRAJ31)
CVSEDARLMF

SEQ ID NO: 181280 - protein, 13 aa, Homo sapiens
  CDR3 for beta chain variable domain of TCR clone 90640 (TRBV4-1, TRBJ2-5)
CASSQEVQETQYF

SEQ ID NO: 181281 - protein, 13 aa, Homo sapiens
  CDR3 for alpha chain variable domain of TCR clone 90641 (TRAV12-2, TRAJ4)
CDVRSGGYNKLIF

SEQ ID NO: 181282 - protein, 15 aa, Homo sapiens
  CDR3 for beta chain variable domain of TCR clone 90641 (TRBV10-3, TRBJ2-1)
CAISDVQDRAYEQFF

SEQ ID NO: 181283 - protein, 15 aa, Homo sapiens
  CDR3 for alpha chain variable domain of TCR clone 90642 (TRAV8-3, TRAJ11)
CAVGLSNSGYSTLTF

SEQ ID NO: 181284 - protein, 23 aa, Homo sapiens
  CDR3 for beta chain variable domain of TCR clone 90642 (TRBV7-9, TRBJ1-2)
EAQLEKSRLLSDRFSSGEDGYTF

SEQ ID NO: 181285 - protein, 14 aa, Homo sapiens
  CDR3 for alpha chain variable domain of TCR clone 90643 (TRAV35, TRAJ33)
CWPRGRDRNYQLIW

SEQ ID NO: 181286 - protein, 11 aa, Homo sapiens
  CDR3 for beta chain variable domain of TCR clone 90643 (TRBV10-3, TRBJ2-7)
CAISEGLEQYF

SEQ ID NO: 181287 - protein, 16 aa, Homo sapiens
  CDR3 for alpha chain variable domain of TCR clone 90644 (TRAV23/DV6, TRAJ9)
CAASIGGNTGGFKTIF

SEQ ID NO: 181288 - protein, 11 aa, Homo sapiens
  CDR3 for beta chain variable domain of TCR clone 90644 (TRBV29-1, TRBJ2-5)
CSEDRTGTQYF

SEQ ID NO: 181289 - protein, 12 aa, Homo sapiens
  CDR3 for alpha chain variable domain of TCR clone 90645 (TRAV12-2, TRAJ31)
CAVNTPDARLMF

SEQ ID NO: 181290 - protein, 14 aa, Homo sapiens
  CDR3 for beta chain variable domain of TCR clone 90645 (TRBV12-4, TRBJ1-1)
CASSFDRVNTEAFF

SEQ ID NO: 181291 - protein, 18 aa, Homo sapiens
  CDR3 for alpha chain variable domain of TCR clone 90646 (TRAV8-4, TRAJ52)
CAVTRANAGGTSYGKLTF

SEQ ID NO: 181292 - protein, 13 aa, Homo sapiens
  CDR3 for beta chain variable domain of TCR clone 90646 (TRBV6-1, TRBJ1-1)
CASSRQGNTEAFF

SEQ ID NO: 181293 - protein, 12 aa, Homo sapiens
  CDR3 for alpha chain variable domain of TCR clone 90647 (TRAV23/DV6, TRAJ30)
CAASKGDDKIIF

SEQ ID NO: 181294 - protein, 18 aa, Homo sapiens
  CDR3 for beta chain variable domain of TCR clone 90647 (TRBV20-1, TRBJ2-3)
CSASGLAGGPGTTDTQYF

SEQ ID NO: 181295 - protein, 11 aa, Homo sapiens
  CDR3 for alpha chain variable domain of TCR clone 90648 (TRAV2, TRAJ13)
CASGGYQKVTF

SEQ ID NO: 181296 - protein, 14 aa, Homo sapiens
  CDR3 for beta chain variable domain of TCR clone 90648 (TRBV19, TRBJ2-5)
CASSMTGQQETQYF

SEQ ID NO: 181297 - protein, 12 aa, Homo sapiens
  CDR3 for alpha chain variable domain of TCR clone 90649 (TRAV12-3, TRAJ17)
CAMTLTGNKLTF

SEQ ID NO: 181298 - protein, 20 aa, Homo sapiens
  CDR3 for beta chain variable domain of TCR clone 90649 (TRBV19, TRBJ2-1)
CASSISRTVTSTRLNNEQLF

SEQ ID NO: 181299 - protein, 12 aa, Homo sapiens
  CDR3 for alpha chain variable domain of TCR clone 90650 (TRAV30, TRAJ43)
CGTEERGNDMRF

SEQ ID NO: 181300 - protein, 13 aa, Homo sapiens
  CDR3 for beta chain variable domain of TCR clone 90650 (TRBV27, TRBJ2-7)
CASSFSQGYEQSF

SEQ ID NO: 181301 - protein, 11 aa, Homo sapiens
  CDR3 for alpha chain variable domain of TCR clone 90651 (TRAV1-1, TRAJ23)
CAVRQGGKLIF

SEQ ID NO: 181302 - protein, 13 aa, Homo sapiens
  CDR3 for beta chain variable domain of TCR clone 90651 (TRBV7-3, TRBJ1-1)
CASSQDWGAEALF

SEQ ID NO: 181303 - protein, 14 aa, Homo sapiens
  CDR3 for alpha chain variable domain of TCR clone 90652 (TRAV8-3, TRAJ10)
CAVGNAGGGNKLTF

SEQ ID NO: 181304 - protein, 13 aa, Homo sapiens
  CDR3 for beta chain variable domain of TCR clone 90652 (TRBV14, TRBJ2-7)
CASSRGQAYEQYF

SEQ ID NO: 181305 - protein, 15 aa, Homo sapiens
  CDR3 for alpha chain variable domain of TCR clone 90653 (TRAV26-1, TRAJ22)
CIVRVSFWFCKATDL

SEQ ID NO: 181306 - protein, 13 aa, Homo sapiens
  CDR3 for beta chain variable domain of TCR clone 90653 (TRBV7-9, TRBJ1-2)
CASGLKQNYGYAF

SEQ ID NO: 181307 - protein, 11 aa, Homo sapiens
  CDR3 for alpha chain variable domain of TCR clone 90654 (TRAV2, TRAJ33)
CAVESNYQLIW

SEQ ID NO: 181308 - protein, 13 aa, Homo sapiens
  CDR3 for beta chain variable domain of TCR clone 90654 (TRBV14, TRBJ2-1)
CASSQDRRNEQFF

SEQ ID NO: 181309 - protein, 13 aa, Homo sapiens
  CDR3 for alpha chain variable domain of TCR clone 90655 (TRAV26-2, TRAJ43)
CILRAVNNNDMRF

SEQ ID NO: 181310 - protein, 15 aa, Homo sapiens
  CDR3 for beta chain variable domain of TCR clone 90655 (TRBV7-2, TRBJ2-1)
CGSTHGTGIYNEQFF

SEQ ID NO: 181311 - protein, 13 aa, Homo sapiens
  CDR3 for alpha chain variable domain of TCR clone 90656 (TRAV8-3, TRAJ28)
CAVGAVGSYQLTF

SEQ ID NO: 181312 - protein, 17 aa, Homo sapiens
  CDR3 for beta chain variable domain of TCR clone 90656 (TRBV11-2, TRBJ2-1)
WASSLYPPGVEYNEQFF

SEQ ID NO: 181313 - protein, 12 aa, Homo sapiens
  CDR3 for alpha chain variable domain of TCR clone 90657 (TRAV21, TRAJ30)
CAVMNRDDKIIF

SEQ ID NO: 181314 - protein, 17 aa, Homo sapiens
  CDR3 for beta chain variable domain of TCR clone 90657 (TRBV5-1, TRBJ1-1)
CASRPIRTGGVNTESFF

SEQ ID NO: 181315 - protein, 13 aa, Homo sapiens
  CDR3 for alpha chain variable domain of TCR clone 90658 (TRAV21, TRAJ27)
CAARPGNACKSTF

SEQ ID NO: 181316 - protein, 14 aa, Homo sapiens
  CDR3 for beta chain variable domain of TCR clone 90658 (TRBV11-2, TRBJ2-7)
CASSLGAGAYEQYF

SEQ ID NO: 181317 - protein, 14 aa, Homo sapiens
  CDR3 for alpha chain variable domain of TCR clone 90659 (TRAV29/DV5, TRAJ20)
CAAIAPIEDYKLSF

SEQ ID NO: 181318 - protein, 15 aa, Homo sapiens
  CDR3 for beta chain variable domain of TCR clone 90659 (TRBV6-1, TRBJ2-1)
CASSEAAYSYNEQFF

SEQ ID NO: 181319 - protein, 14 aa, Homo sapiens
  CDR3 for alpha chain variable domain of TCR clone 90660 (TRAV9-2, TRAJ39)
CALYIYNAGNMLTF

SEQ ID NO: 181320 - protein, 13 aa, Homo sapiens
  CDR3 for beta chain variable domain of TCR clone 90660 (TRBV7-9, TRBJ1-2)
CASSLKQNYGDTF

SEQ ID NO: 181321 - protein, 13 aa, Homo sapiens
  CDR3 for alpha chain variable domain of TCR clone 90661 (TRAV13-1, TRAJ49)
CAASVLRGNQFYF

SEQ ID NO: 181322 - protein, 15 aa, Homo sapiens
  CDR3 for beta chain variable domain of TCR clone 90661 (TRBV9, TRBJ1-6)
CASSVAGTGDSPLHF

SEQ ID NO: 181323 - protein, 14 aa, Homo sapiens
  CDR3 for alpha chain variable domain of TCR clone 90662 (TRAV16, TRAJ39)
CALSKNNAGNMLTF

SEQ ID NO: 181324 - protein, 12 aa, Homo sapiens
  CDR3 for beta chain variable domain of TCR clone 90662 (TRBV19, TRBJ2-1)
CASSMQDTEQFF

SEQ ID NO: 181325 - protein, 16 aa, Homo sapiens
  CDR3 for alpha chain variable domain of TCR clone 90663 (TRAV26-1, TRAJ53)
CIVRVAMGGSNYKLTF

SEQ ID NO: 181326 - protein, 19 aa, Homo sapiens
  CDR3 for beta chain variable domain of TCR clone 90663 (TRBV7-9, TRBJ1-5)
RGTRPCISVPAAHRDSQHF

SEQ ID NO: 181327 - protein, 17 aa, Homo sapiens
  CDR3 for alpha chain variable domain of TCR clone 90664 (TRAV13-1, TRAJ52)
CAASSGAGGTSYGELTF

SEQ ID NO: 181328 - protein, 12 aa, Homo sapiens
  CDR3 for beta chain variable domain of TCR clone 90664 (TRBV29-1, TRBJ2-3)
CSVTGGADTQYF

SEQ ID NO: 181329 - protein, 17 aa, Homo sapiens
  CDR3 for alpha chain variable domain of TCR clone 90665 (TRAV26-1, TRAJ58)
CIARVGAEETSGSRLTF

SEQ ID NO: 181330 - protein, 18 aa, Homo sapiens
  CDR3 for beta chain variable domain of TCR clone 90665 (TRBV7-9, TRBJ2-7)
CASSLTTSGSRTWYEQYF

SEQ ID NO: 181331 - protein, 15 aa, Homo sapiens
  CDR3 for alpha chain variable domain of TCR clone 90666 (TRAV12-1, TRAJ48)
CVVNKVNFGNEKLTF

SEQ ID NO: 181332 - protein, 14 aa, Homo sapiens
  CDR3 for beta chain variable domain of TCR clone 90666 (TRBV6-1, TRBJ1-3)
CASVQGGGGNTIYF

SEQ ID NO: 181333 - protein, 13 aa, Homo sapiens
  CDR3 for alpha chain variable domain of TCR clone 90667 (TRAV12-2, TRAJ34)
CAVRGYNTDKLIF

SEQ ID NO: 181334 - protein, 15 aa, Homo sapiens
  CDR3 for beta chain variable domain of TCR clone 90667 (TRBV6-5, TRBJ1-2)
CASSYSQAFNYGYTF

SEQ ID NO: 181335 - protein, 11 aa, Homo sapiens
  CDR3 for alpha chain variable domain of TCR clone 90668 (TRAV1-1, TRAJ23)
CAVRQGGKLIF

SEQ ID NO: 181336 - protein, 20 aa, Homo sapiens
  CDR3 for beta chain variable domain of TCR clone 90668 (TRBV7-8, TRBJ2-2)
CASSHLFPGPTIHITGQLFF

SEQ ID NO: 181337 - protein, 15 aa, Homo sapiens
  CDR3 for alpha chain variable domain of TCR clone 90669 (TRAV3, TRAJ17)
CAVRDTGAAGNKLTF

SEQ ID NO: 181338 - protein, 15 aa, Homo sapiens
  CDR3 for beta chain variable domain of TCR clone 90669 (TRBV6-3, TRBJ2-7)
CASSSPGTVFYEQYF

SEQ ID NO: 181339 - protein, 13 aa, Homo sapiens
  CDR3 for alpha chain variable domain of TCR clone 90670 (TRAV21, TRAJ36)
CAVIKTGANNLFV

SEQ ID NO: 181340 - protein, 13 aa, Homo sapiens
  CDR3 for beta chain variable domain of TCR clone 90670 (TRBV29-1, TRBJ2-3)
CSATRGGRDTQYF

SEQ ID NO: 181341 - protein, 12 aa, Homo sapiens
  CDR3 for alpha chain variable domain of TCR clone 90671 (TRAV16, TRAJ26)
CALRMYGQNFVF

SEQ ID NO: 181342 - protein, 14 aa, Homo sapiens
  CDR3 for beta chain variable domain of TCR clone 90671 (TRBV4-1, TRBJ2-2)
CASSQAVNTGELFF

SEQ ID NO: 181343 - protein, 11 aa, Homo sapiens
  CDR3 for alpha chain variable domain of TCR clone 90672 (TRAV1-1, TRAJ23)
CAVRQGGKLIF

SEQ ID NO: 181344 - protein, 13 aa, Homo sapiens
  CDR3 for beta chain variable domain of TCR clone 90672 (TRBV19, TRBJ1-2)
CASSQGQVYGYTF

SEQ ID NO: 181345 - protein, 18 aa, Homo sapiens
  CDR3 for alpha chain variable domain of TCR clone 90673 (TRAV13-1, TRAJ52)
CAAKNPNAGGTSYGKLTF

SEQ ID NO: 181346 - protein, 15 aa, Homo sapiens
  CDR3 for beta chain variable domain of TCR clone 90673 (TRBV6-1, TRBJ2-3)
CASSERGGITNTQYF

SEQ ID NO: 181347 - protein, 14 aa, Homo sapiens
  CDR3 for alpha chain variable domain of TCR clone 90674 (TRAV16, TRAJ33)
CALSATDSNYQLIW

SEQ ID NO: 181348 - protein, 15 aa, Homo sapiens
  CDR3 for beta chain variable domain of TCR clone 90674 (TRBV28, TRBJ2-7)
CASSLEAYPIYEQYF

SEQ ID NO: 181349 - protein, 15 aa, Homo sapiens
  CDR3 for alpha chain variable domain of TCR clone 90675 (TRAV34, TRAJ38)
CGADFTPGNNRKLIW

SEQ ID NO: 181350 - protein, 14 aa, Homo sapiens
  CDR3 for beta chain variable domain of TCR clone 90675 (TRBV12-5, TRBJ2-5)
CASGSRTHQETQYF

SEQ ID NO: 181351 - protein, 20 aa, Homo sapiens
  CDR3 for alpha chain variable domain of TCR clone 90676 (TRAV25, TRAJ21)
TATQTTDVGTYPLSFNKFYF

SEQ ID NO: 181352 - protein, 14 aa, Homo sapiens
  CDR3 for beta chain variable domain of TCR clone 90676 (TRBV5-4, TRBJ1-1)
CASSLDSRRDEAFF

SEQ ID NO: 181353 - protein, 10 aa, Homo sapiens
  CDR3 for alpha chain variable domain of TCR clone 90677 (TRAV30, TRAJ16)
CGTGGQKLLF

SEQ ID NO: 181354 - protein, 14 aa, Homo sapiens
  CDR3 for beta chain variable domain of TCR clone 90677 (TRBV4-2, TRBJ2-1)
CASGLDRAYNEQFF

SEQ ID NO: 181355 - protein, 17 aa, Homo sapiens
  CDR3 for alpha chain variable domain of TCR clone 90678 (TRAV38-2/DV8, TRAJ38)
CAYRSARGAGNNRKLFW

SEQ ID NO: 181356 - protein, 13 aa, Homo sapiens
  CDR3 for beta chain variable domain of TCR clone 90678 (TRBV6-5, TRBJ2-1)
CASRGRVGNEQFF

SEQ ID NO: 181357 - protein, 14 aa, Homo sapiens
  CDR3 for alpha chain variable domain of TCR clone 90679 (TRAV23/DV6, TRAJ37)
CAASTSSKTGKLIF

SEQ ID NO: 181358 - protein, 13 aa, Homo sapiens
  CDR3 for beta chain variable domain of TCR clone 90679 (TRBV7-7, TRBJ1-1)
CASSLGANTEAFF

SEQ ID NO: 181359 - protein, 14 aa, Homo sapiens
  CDR3 for alpha chain variable domain of TCR clone 90680 (TRAV34, TRAJ44)
CGADGTGTASKLTF

SEQ ID NO: 181360 - protein, 14 aa, Homo sapiens
  CDR3 for beta chain variable domain of TCR clone 90680 (TRBV5-7, TRBJ1-5)
CASSRTGGGQPQHF

SEQ ID NO: 181361 - protein, 14 aa, Homo sapiens
  CDR3 for alpha chain variable domain of TCR clone 90681 (TRAV1-2, TRAJ8)
CAVREDTGFQKLVF

SEQ ID NO: 181362 - protein, 12 aa, Homo sapiens
  CDR3 for beta chain variable domain of TCR clone 90681 (TRBV7-9, TRBJ2-7)
CANSFGSYEQYF

SEQ ID NO: 181363 - protein, 13 aa, Homo sapiens
  CDR3 for alpha chain variable domain of TCR clone 90682 (TRAV8-2, TRAJ26)
CVVSLGYGQNFVF

SEQ ID NO: 181364 - protein, 13 aa, Homo sapiens
  CDR3 for beta chain variable domain of TCR clone 90682 (TRBV11-2, TRBJ2-7)
CASSLDLGYEQYF

SEQ ID NO: 181365 - protein, 15 aa, Homo sapiens
  CDR3 for alpha chain variable domain of TCR clone 90683 (TRAV3, TRAJ22)
CAVRDRGGSARQLTF

SEQ ID NO: 181366 - protein, 13 aa, Homo sapiens
  CDR3 for beta chain variable domain of TCR clone 90683 (TRBV7-3, TRBJ2-1)
CASSLDSYNEQFF

SEQ ID NO: 181367 - protein, 12 aa, Homo sapiens
  CDR3 for alpha chain variable domain of TCR clone 90684 (TRAV26-1, TRAJ43)
CIVRGNNNDMRF

SEQ ID NO: 181368 - protein, 16 aa, Homo sapiens
  CDR3 for beta chain variable domain of TCR clone 90684 (TRBV20-1, TRBJ1-4)
CSAPGQGLLTNEKLFF

SEQ ID NO: 181369 - protein, 14 aa, Homo sapiens
  CDR3 for alpha chain variable domain of TCR clone 90685 (TRAV23/DV6, TRAJ22)
CAASVSVSARQLTF

SEQ ID NO: 181370 - protein, 16 aa, Homo sapiens
  CDR3 for beta chain variable domain of TCR clone 90685 (TRBV19, TRBJ2-2)
CASSFPGQGLAGELFF

SEQ ID NO: 181371 - protein, 13 aa, Homo sapiens
  CDR3 for alpha chain variable domain of TCR clone 90686 (TRAV3, TRAJ21)
CAVREPDFNQFYF

SEQ ID NO: 181372 - protein, 15 aa, Homo sapiens
  CDR3 for beta chain variable domain of TCR clone 90686 (TRBV2, TRBJ2-1)
CASSELAGGYNEQFF

SEQ ID NO: 181373 - protein, 14 aa, Homo sapiens
  CDR3 for alpha chain variable domain of TCR clone 90687 (TRAV1-2, TRAJ16)
CAVNRFSDGQKLLF

SEQ ID NO: 181374 - protein, 13 aa, Homo sapiens
  CDR3 for beta chain variable domain of TCR clone 90687 (TRBV20-1, TRBJ1-1)
CSARDGGNTEAFF

SEQ ID NO: 181375 - protein, 13 aa, Homo sapiens
  CDR3 for alpha chain variable domain of TCR clone 90688 (TRAV2, TRAJ40)
YAVVTSGTYKYIF

SEQ ID NO: 181376 - protein, 14 aa, Homo sapiens
  CDR3 for beta chain variable domain of TCR clone 90688 (TRBV4-2, TRBJ2-1)
CASGLDRAYNEQFF

SEQ ID NO: 181377 - protein, 16 aa, Homo sapiens
  CDR3 for alpha chain variable domain of TCR clone 90689 (TRAV30, TRAJ24)
CGTEIVDSDSWGKFQF

SEQ ID NO: 181378 - protein, 11 aa, Homo sapiens
  CDR3 for beta chain variable domain of TCR clone 90689 (TRBV12-4, TRBJ2-3)
CASTATDTQYF

SEQ ID NO: 181379 - protein, 12 aa, Homo sapiens
  CDR3 for alpha chain variable domain of TCR clone 90690 (TRAV8-6, TRAJ43)
CAVSNNNDDMRF

SEQ ID NO: 181380 - protein, 15 aa, Homo sapiens
  CDR3 for beta chain variable domain of TCR clone 90690 (TRBV7-3, TRBJ2-6)
CASSLGGSGANVLTF

SEQ ID NO: 181381 - protein, 16 aa, Homo sapiens
  CDR3 for alpha chain variable domain of TCR clone 90691 (TRAV3, TRAJ10)
CAVRDMRAGGGKKLTF

SEQ ID NO: 181382 - protein, 16 aa, Homo sapiens
  CDR3 for beta chain variable domain of TCR clone 90691 (TRBV20-1, TRBJ1-4)
CSAPGQGLLTNEKLFF

SEQ ID NO: 181383 - protein, 14 aa, Homo sapiens
  CDR3 for alpha chain variable domain of TCR clone 90692 (TRAV1-2, TRAJ16)
CAVNRFSDGQKLFF

SEQ ID NO: 181384 - protein, 12 aa, Homo sapiens
  CDR3 for beta chain variable domain of TCR clone 90692 (TRBV7-6, TRBJ2-7)
CASSLADSEQYF

SEQ ID NO: 181385 - protein, 14 aa, Homo sapiens
  CDR3 for alpha chain variable domain of TCR clone 90693 (TRAV12-3, TRAJ10)
SHLPLTGGGNKLTF

SEQ ID NO: 181386 - protein, 17 aa, Homo sapiens
  CDR3 for beta chain variable domain of TCR clone 90693 (TRBV7-9, TRBJ2-3)
CASSPTVAGDLTDTQYF

SEQ ID NO: 181387 - protein, 11 aa, Homo sapiens
  CDR3 for alpha chain variable domain of TCR clone 90694 (TRAV35, TRAJ30)
CAGPGDDKIIF

SEQ ID NO: 181388 - protein, 16 aa, Homo sapiens
  CDR3 for beta chain variable domain of TCR clone 90694 (TRBV4-1, TRBJ2-6)
CASSQVGDPGANVLTF

SEQ ID NO: 181389 - protein, 11 aa, Homo sapiens
  CDR3 for alpha chain variable domain of TCR clone 90695 (TRAV13-1, TRAJ20)
CAASNDYKRSF

SEQ ID NO: 181390 - protein, 15 aa, Homo sapiens
  CDR3 for beta chain variable domain of TCR clone 90695 (TRBV6-3, TRBJ2-7)
CASSSPGTVFYEQYF

SEQ ID NO: 181391 - protein, 13 aa, Homo sapiens
  CDR3 for alpha chain variable domain of TCR clone 90696 (TRAV23/DV6, TRAJ43)
CAASMGGNNDMRF

SEQ ID NO: 181392 - protein, 15 aa, Homo sapiens
  CDR3 for beta chain variable domain of TCR clone 90696 (TRBV10-2, TRBJ2-6)
CASSEQGTGANVLTF

SEQ ID NO: 181393 - protein, 17 aa, Homo sapiens
  CDR3 for alpha chain variable domain of TCR clone 90697 (TRAV3, TRAJ6)
CAVRDGPRAGGSYIPTF

SEQ ID NO: 181394 - protein, 15 aa, Homo sapiens
  CDR3 for beta chain variable domain of TCR clone 90697 (TRBV11-2, TRBJ1-2)
CASSLEGVQRNGYTF

SEQ ID NO: 181395 - protein, 10 aa, Homo sapiens
  CDR3 for alpha chain variable domain of TCR clone 90698 (TRAV27, TRAJ58)
SETSGSRLTF

SEQ ID NO: 181396 - protein, 12 aa, Homo sapiens
  CDR3 for beta chain variable domain of TCR clone 90698 (TRBV11-2, TRBJ2-2)
CASSLGGGELFF

SEQ ID NO: 181397 - protein, 14 aa, Homo sapiens
  CDR3 for alpha chain variable domain of TCR clone 90699 (TRAV1-2, TRAJ16)
CAVNRFSDGQKLLF

SEQ ID NO: 181398 - protein, 15 aa, Homo sapiens
  CDR3 for beta chain variable domain of TCR clone 90699 (TRBV2, TRBJ2-1)
CASSEERGGDNEQFF

SEQ ID NO: 181399 - protein, 15 aa, Homo sapiens
  CDR3 for alpha chain variable domain of TCR clone 90700 (TRAV13-1, TRAJ45)
CAASGSGGGADGLTL

SEQ ID NO: 181400 - protein, 12 aa, Homo sapiens
  CDR3 for beta chain variable domain of TCR clone 90700 (TRBV11-2, TRBJ2-2)
CASSLGGGELFF

SEQ ID NO: 181401 - protein, 15 aa, Homo sapiens
  CDR3 for alpha chain variable domain of TCR clone 90701 (TRAV12-2, TRAJ50)
CAVNGLETPYDKVIF

SEQ ID NO: 181402 - protein, 14 aa, Homo sapiens
  CDR3 for beta chain variable domain of TCR clone 90701 (TRBV7-2, TRBJ1-1)
CASSFLTGTTEAFF

SEQ ID NO: 181403 - protein, 17 aa, Homo sapiens
  CDR3 for alpha chain variable domain of TCR clone 90702 (TRAV3, TRAJ42)
CAVRDRDYGGSQGNLIF

SEQ ID NO: 181404 - protein, 14 aa, Homo sapiens
  CDR3 for beta chain variable domain of TCR clone 90702 (TRBV20-1, TRBJ2-7)
CSAKRGRSSYEQYF

SEQ ID NO: 181405 - protein, 13 aa, Homo sapiens
  CDR3 for alpha chain variable domain of TCR clone 90703 (TRAV8-1, TRAJ30)
CAVIMNRDDKILF

SEQ ID NO: 181406 - protein, 14 aa, Homo sapiens
  CDR3 for beta chain variable domain of TCR clone 90703 (TRBV7-2, TRBJ1-6)
CASSLQGANSPLHF

SEQ ID NO: 181407 - protein, 12 aa, Homo sapiens
  CDR3 for alpha chain variable domain of TCR clone 90704 (TRAV12-3, TRAJ17)
CAMTLTGNKLTF

SEQ ID NO: 181408 - protein, 15 aa, Homo sapiens
  CDR3 for beta chain variable domain of TCR clone 90704 (TRBV4-1, TRBJ1-1)
CASSQEWGHYTEAFF

SEQ ID NO: 181409 - protein, 13 aa, Homo sapiens
  CDR3 for alpha chain variable domain of TCR clone 90705 (TRAV29/DV5, TRAJ47)
CAASAEYGNKLVF

SEQ ID NO: 181410 - protein, 14 aa, Homo sapiens
  CDR3 for beta chain variable domain of TCR clone 90705 (TRBV4-2, TRBJ2-1)
CASGLDRAYNEQFF

SEQ ID NO: 181411 - protein, 12 aa, Homo sapiens
  CDR3 for alpha chain variable domain of TCR clone 90706 (TRAV12-3, TRAJ17)
CAMTLTGNMLTF

SEQ ID NO: 181412 - protein, 13 aa, Homo sapiens
  CDR3 for beta chain variable domain of TCR clone 90706 (TRBV7-9, TRBJ1-2)
CASSLKQNYGYTF

SEQ ID NO: 181413 - protein, 14 aa, Homo sapiens
  CDR3 for alpha chain variable domain of TCR clone 90707 (TRAV26-1, TRAJ38)
CIADNAGNNLKLIW

SEQ ID NO: 181414 - protein, 13 aa, Homo sapiens
  CDR3 for beta chain variable domain of TCR clone 90707 (TRBV2, TRBJ1-5)
CATAGPGNQPQHF

SEQ ID NO: 181415 - protein, 17 aa, Homo sapiens
  CDR3 for alpha chain variable domain of TCR clone 90708 (TRAV21, TRAJ52)
CCEAFPSGGTSYGKLTF

SEQ ID NO: 181416 - protein, 17 aa, Homo sapiens
  CDR3 for beta chain variable domain of TCR clone 90708 (TRBV13, TRBJ2-3)
CASSLSRVAGGRNTQYF

SEQ ID NO: 181417 - protein, 15 aa, Homo sapiens
  CDR3 for alpha chain variable domain of TCR clone 90709 (TRAV38-2/DV8, TRAJ57)
CASARAQGGSEKLFF

SEQ ID NO: 181418 - protein, 17 aa, Homo sapiens
  CDR3 for beta chain variable domain of TCR clone 90709 (TRBV18, TRBJ1-5)
CASSPTMGQGTNQPQHF

SEQ ID NO: 181419 - protein, 13 aa, Homo sapiens
  CDR3 for alpha chain variable domain of TCR clone 90710 (TRAV17, TRAJ22)
CSHHSGSARQLTF

SEQ ID NO: 181420 - protein, 14 aa, Homo sapiens
  CDR3 for beta chain variable domain of TCR clone 90710 (TRBV16, TRBJ1-1)
CASSQAGPNTEAFF

SEQ ID NO: 181421 - protein, 17 aa, Homo sapiens
  CDR3 for alpha chain variable domain of TCR clone 90711 (TRAV27, TRAJ52)
CAGAGWAGGTSYGKLTF

SEQ ID NO: 181422 - protein, 16 aa, Homo sapiens
  CDR3 for beta chain variable domain of TCR clone 90711 (TRBV19, TRBJ2-1)
CASSKAGPSSYNEQPF

SEQ ID NO: 181423 - protein, 13 aa, Homo sapiens
  CDR3 for alpha chain variable domain of TCR clone 90712 (TRAV1-2, TRAJ9)
CAALNTGGFKTIF

SEQ ID NO: 181424 - protein, 13 aa, Homo sapiens
  CDR3 for beta chain variable domain of TCR clone 90712 (TRBV20-1, TRBJ1-1)
CSAPLGGGTEAFF

SEQ ID NO: 181425 - protein, 10 aa, Homo sapiens
  CDR3 for alpha chain variable domain of TCR clone 90713 (TRAV35, TRAJ30)
LPGGDDKIIF

SEQ ID NO: 181426 - protein, 16 aa, Homo sapiens
  CDR3 for beta chain variable domain of TCR clone 90713 (TRBV7-3, TRBJ2-2)
CASSLKRGTLSGELFF

SEQ ID NO: 181427 - protein, 13 aa, Homo sapiens
  CDR3 for alpha chain variable domain of TCR clone 90714 (TRAV12-2, TRAJ52)
CAVGGTSYGKLTF

SEQ ID NO: 181428 - protein, 15 aa, Homo sapiens
  CDR3 for beta chain variable domain of TCR clone 90714 (TRBV7-2, TRBJ2-1)
CASSSGLAGGNEQFF

SEQ ID NO: 181429 - protein, 15 aa, Homo sapiens
  CDR3 for alpha chain variable domain of TCR clone 90715 (TRAV23/DV6, TRAJ33)
CAASNSGGGNYQLIW

SEQ ID NO: 181430 - protein, 14 aa, Homo sapiens
  CDR3 for beta chain variable domain of TCR clone 90715 (TRBV7-2, TRBJ2-7)
CASILYPGRYEQYF

SEQ ID NO: 181431 - protein, 17 aa, Homo sapiens
  CDR3 for alpha chain variable domain of TCR clone 90716 (TRAV3, TRAJ6)
RAVRDGPRAGGSYIPTF

SEQ ID NO: 181432 - protein, 20 aa, Homo sapiens
  CDR3 for beta chain variable domain of TCR clone 90716 (TRBV28, TRBJ2-1)
CASTPIGRSPGLAGGNEQFL

SEQ ID NO: 181433 - protein, 15 aa, Homo sapiens
  CDR3 for alpha chain variable domain of TCR clone 90717 (TRAV8-3, TRAJ40)
CAAPSLGSGTYRYIF

SEQ ID NO: 181434 - protein, 16 aa, Homo sapiens
  CDR3 for beta chain variable domain of TCR clone 90717 (TRBV7-3, TRBJ2-3)
CASSLSGYRPEDTQYY

SEQ ID NO: 181435 - protein, 15 aa, Homo sapiens
  CDR3 for alpha chain variable domain of TCR clone 90718 (TRAV17, TRAJ4)
CATGTWSGGYNKLIF

SEQ ID NO: 181436 - protein, 13 aa, Homo sapiens
  CDR3 for beta chain variable domain of TCR clone 90718 (TRBV6-6, TRBJ2-7)
CASSPTHLAEQYF

SEQ ID NO: 181437 - protein, 17 aa, Homo sapiens
  CDR3 for alpha chain variable domain of TCR clone 90719 (TRAV26-1, TRAJ21)
CVAKGKFYFGSGTKLNV

SEQ ID NO: 181438 - protein, 15 aa, Homo sapiens
  CDR3 for beta chain variable domain of TCR clone 90719 (TRBV7-2, TRBJ2-1)
CASNSGLAGGNEQFF

SEQ ID NO: 181439 - protein, 14 aa, Homo sapiens
  CDR3 for alpha chain variable domain of TCR clone 90720 (TRAV12-2, TRAJ45)
CAVYSGGGADGLTF

SEQ ID NO: 181440 - protein, 14 aa, Homo sapiens
  CDR3 for beta chain variable domain of TCR clone 90720 (TRBV6-5, TRBJ1-2)
CANTRGGGSDGYTF

SEQ ID NO: 181441 - protein, 14 aa, Homo sapiens
  CDR3 for alpha chain variable domain of TCR clone 90721 (TRAV1-2, TRAJ16)
FAVNRFSDGQKLLF

SEQ ID NO: 181442 - protein, 14 aa, Homo sapiens
  CDR3 for beta chain variable domain of TCR clone 90721 (TRBV18, TRBJ2-7)
CASSPRGGAYEQYF

SEQ ID NO: 181443 - protein, 13 aa, Homo sapiens
  CDR3 for alpha chain variable domain of TCR clone 90722 (TRAV8-3, TRAJ28)
CAVGAVGSYQLTF

SEQ ID NO: 181444 - protein, 14 aa, Homo sapiens
  CDR3 for beta chain variable domain of TCR clone 90722 (TRBV12-4, TRBJ1-6)
CASNLQGKGSPLHF

SEQ ID NO: 181445 - protein, 11 aa, Homo sapiens
  CDR3 for alpha chain variable domain of TCR clone 90723 (TRAV2, TRAJ33)
CAVDSNYQLIW

SEQ ID NO: 181446 - protein, 17 aa, Homo sapiens
  CDR3 for beta chain variable domain of TCR clone 90723 (TRBV3-1, TRBJ2-6)
CASSPNTGPAGANVLTF

SEQ ID NO: 181447 - protein, 17 aa, Homo sapiens
  CDR3 for alpha chain variable domain of TCR clone 90724 (TRAV26-2, TRAJ42)
CLLRDVGYGGSQGNLIF

SEQ ID NO: 181448 - protein, 16 aa, Homo sapiens
  CDR3 for beta chain variable domain of TCR clone 90724 (TRBV12-4, TRBJ2-7)
CASSLIGGTGTYEQYF

SEQ ID NO: 181449 - protein, 15 aa, Homo sapiens
  CDR3 for alpha chain variable domain of TCR clone 90725 (TRAV12-2, TRAJ43)
CAFDMRFGAGTRLTV

SEQ ID NO: 181450 - protein, 18 aa, Homo sapiens
  CDR3 for beta chain variable domain of TCR clone 90725 (TRBV28, TRBJ2-1)
CASSSTSGRANSYNEQFF

SEQ ID NO: 181451 - protein, 12 aa, Homo sapiens
  CDR3 for alpha chain variable domain of TCR clone 90726 (TRAV12-1, TRAJ40)
CVFYSGTYKYIF

SEQ ID NO: 181452 - protein, 12 aa, Homo sapiens
  CDR3 for beta chain variable domain of TCR clone 90726 (TRBV7-3, TRBJ2-1)
CASSFVNNEQFF

SEQ ID NO: 181453 - protein, 12 aa, Homo sapiens
  CDR3 for alpha chain variable domain of TCR clone 90727 (TRAV3, TRAJ43)
CAVRDPNNDMRF

SEQ ID NO: 181454 - protein, 16 aa, Homo sapiens
  CDR3 for beta chain variable domain of TCR clone 90727 (TRBV13, TRBJ2-2)
CASSPRTGEHTGELFF

SEQ ID NO: 181455 - protein, 13 aa, Homo sapiens
  CDR3 for alpha chain variable domain of TCR clone 90728 (TRAV13-2, TRAJ48)
CAEMDFGNDKLTF

SEQ ID NO: 181456 - protein, 13 aa, Homo sapiens
  CDR3 for beta chain variable domain of TCR clone 90728 (TRBV7-9, TRBJ1-2)
CASSLKQNYGYTF

SEQ ID NO: 181457 - protein, 15 aa, Homo sapiens
  CDR3 for alpha chain variable domain of TCR clone 90729 (TRAV35, TRAJ40)
CAGQLGTSGTYKYVL

SEQ ID NO: 181458 - protein, 14 aa, Homo sapiens
  CDR3 for beta chain variable domain of TCR clone 90729 (TRBV7-3, TRBJ2-1)
CASSLAGGTNEQFF

SEQ ID NO: 181459 - protein, 13 aa, Homo sapiens
  CDR3 for alpha chain variable domain of TCR clone 90730 (TRAV13-2, TRAJ48)
CAEMDFGNEQLTF

SEQ ID NO: 181460 - protein, 15 aa, Homo sapiens
  CDR3 for beta chain variable domain of TCR clone 90730 (TRBV7-9, TRBJ1-6)
CASSSPGRGNSPLLF

SEQ ID NO: 181461 - protein, 16 aa, Homo sapiens
  CDR3 for alpha chain variable domain of TCR clone 90731 (TRAV30, TRAJ24)
CGTEIVDANSWGKFQF

SEQ ID NO: 181462 - protein, 15 aa, Homo sapiens
  CDR3 for beta chain variable domain of TCR clone 90731 (TRBV20-1, TRBJ2-7)
CSARDRVSGMDEQYF

SEQ ID NO: 181463 - protein, 13 aa, Homo sapiens
  CDR3 for alpha chain variable domain of TCR clone 90732 (TRAV12-3, TRAJ7)
CAMTPYGNNRLAF

SEQ ID NO: 181464 - protein, 16 aa, Homo sapiens
  CDR3 for beta chain variable domain of TCR clone 90732 (TRBV20-1, TRBJ1-4)
CSARPYVGELNEKLFF

SEQ ID NO: 181465 - protein, 13 aa, Homo sapiens
  CDR3 for alpha chain variable domain of TCR clone 90733 (TRAV12-3, TRAJ9)
CAMRNTGGFKTIF

SEQ ID NO: 181466 - protein, 14 aa, Homo sapiens
  CDR3 for beta chain variable domain of TCR clone 90733 (TRBV7-6, TRBJ2-3)
CASSLGTVTDTQYF

SEQ ID NO: 181467 - protein, 15 aa, Homo sapiens
  CDR3 for alpha chain variable domain of TCR clone 90734 (TRAV13-1, TRAJ52)
CALRTGGTSYGKLTF

SEQ ID NO: 181468 - protein, 14 aa, Homo sapiens
  CDR3 for beta chain variable domain of TCR clone 90734 (TRBV4-3, TRBJ1-5)
CASSQGGQGWPQHF

SEQ ID NO: 181469 - protein, 13 aa, Homo sapiens
  CDR3 for alpha chain variable domain of TCR clone 90735 (TRAV8-1, TRAJ34)
CAVNGKGTDKLIF

SEQ ID NO: 181470 - protein, 14 aa, Homo sapiens
  CDR3 for beta chain variable domain of TCR clone 90735 (TRBV5-1, TRBJ2-7)
CASSFRDTGSVQYF

SEQ ID NO: 181471 - protein, 18 aa, Homo sapiens
  CDR3 for alpha chain variable domain of TCR clone 90736 (TRAV12-3, TRAJ52)
CAMSVGGAGGTSYGKLTF

SEQ ID NO: 181472 - protein, 13 aa, Homo sapiens
  CDR3 for beta chain variable domain of TCR clone 90736 (TRBV27, TRBJ1-4)
CASSLMGDEKLFF

SEQ ID NO: 181473 - protein, 16 aa, Homo sapiens
  CDR3 for alpha chain variable domain of TCR clone 90737 (TRAV3, TRAJ4)
CAVRAFFSGGYNKLIF

SEQ ID NO: 181474 - protein, 16 aa, Homo sapiens
  CDR3 for beta chain variable domain of TCR clone 90737 (TRBV12-5, TRBJ2-5)
CASGPRTSGNQETQYF

SEQ ID NO: 181475 - protein, 12 aa, Homo sapiens
  CDR3 for alpha chain variable domain of TCR clone 90738 (TRAV13-1, TRAJ15)
CAASQAGTALIF

SEQ ID NO: 181476 - protein, 13 aa, Homo sapiens
  CDR3 for beta chain variable domain of TCR clone 90738 (TRBV7-3, TRBJ1-1)
CASSQDWGAEAFF

SEQ ID NO: 181477 - protein, 18 aa, Homo sapiens
  CDR3 for alpha chain variable domain of TCR clone 90739 (TRAV21, TRAJ52)
CAVRPSPAGGTSYGKLTF

SEQ ID NO: 181478 - protein, 13 aa, Homo sapiens
  CDR3 for beta chain variable domain of TCR clone 90739 (TRBV27, TRBJ2-7)
CASSFSQGYEQYF

SEQ ID NO: 181479 - protein, 14 aa, Homo sapiens
  CDR3 for alpha chain variable domain of TCR clone 90740 (TRAV2, TRAJ9)
CAVDPNTGGFKTIF

SEQ ID NO: 181480 - protein, 15 aa, Homo sapiens
  CDR3 for beta chain variable domain of TCR clone 90740 (TRBV28, TRBJ2-1)
CASSGLAEVDNEQFF

SEQ ID NO: 181481 - protein, 14 aa, Homo sapiens
  CDR3 for alpha chain variable domain of TCR clone 90741 (TRAV12-1, TRAJ13)
CAVIDSGGYQKVTF

SEQ ID NO: 181482 - protein, 12 aa, Homo sapiens
  CDR3 for beta chain variable domain of TCR clone 90741 (TRBV29-1, TRBJ2-3)
CSVTGGADTQYF

SEQ ID NO: 181483 - protein, 14 aa, Homo sapiens
  CDR3 for alpha chain variable domain of TCR clone 90742 (TRAV12-2, TRAJ40)
CAVKIPSGTYKYIF

SEQ ID NO: 181484 - protein, 12 aa, Homo sapiens
  CDR3 for beta chain variable domain of TCR clone 90742 (TRBV11-2, TRBJ2-2)
CASSRGGGELFF

SEQ ID NO: 181485 - protein, 17 aa, Homo sapiens
  CDR3 for alpha chain variable domain of TCR clone 90743 (TRAV36/DV7, TRAJ52)
CAVAQRAGGTSYGKLTF

SEQ ID NO: 181486 - protein, 20 aa, Homo sapiens
  CDR3 for beta chain variable domain of TCR clone 90743 (TRBV28, TRBJ2-1)
CASTPIGRSPGLAGGNEQFF

SEQ ID NO: 181487 - protein, 14 aa, Homo sapiens
  CDR3 for alpha chain variable domain of TCR clone 90744 (TRAV26-1, TRAJ38)
CIADNAGNNRKLIW

SEQ ID NO: 181488 - protein, 16 aa, Homo sapiens
  CDR3 for beta chain variable domain of TCR clone 90744 (TRBV29-1, TRBJ2-7)
CSVEVVGTSGSYEQYF

SEQ ID NO: 181489 - protein, 13 aa, Homo sapiens
  CDR3 for alpha chain variable domain of TCR clone 90745 (TRAV36/DV7, TRAJ49)
CAVAQTPVTSSIL

SEQ ID NO: 181490 - protein, 17 aa, Homo sapiens
  CDR3 for beta chain variable domain of TCR clone 90745 (TRBV28, TRBJ2-7)
CASSSPGTGRFSYEQYF

SEQ ID NO: 181491 - protein, 12 aa, Homo sapiens
  CDR3 for alpha chain variable domain of TCR clone 90746 (TRAV8-4, TRAJ43)
CAVSVNNNDRRF

SEQ ID NO: 181492 - protein, 14 aa, Homo sapiens
  CDR3 for beta chain variable domain of TCR clone 90746 (TRBV11-2, TRBJ1-2)
CASSLGTANYGYTF

SEQ ID NO: 181493 - protein, 14 aa, Homo sapiens
  CDR3 for alpha chain variable domain of TCR clone 90747 (TRAV17, TRAJ57)
CATDPQGGSEKLVF

SEQ ID NO: 181494 - protein, 15 aa, Homo sapiens
  CDR3 for beta chain variable domain of TCR clone 90747 (TRBV5-1, TRBJ2-1)
CASSPPRAPYNEQFF

SEQ ID NO: 181495 - protein, 14 aa, Homo sapiens
  CDR3 for alpha chain variable domain of TCR clone 90748 (TRAV3, TRAJ9)
CAVRLNTGGFKTIF

SEQ ID NO: 181496 - protein, 17 aa, Homo sapiens
  CDR3 for beta chain variable domain of TCR clone 90748 (TRBV13, TRBJ2-3)
CASSLSRVAGGRNTQYF

SEQ ID NO: 181497 - protein, 13 aa, Homo sapiens
  CDR3 for alpha chain variable domain of TCR clone 90749 (TRAV2, TRAJ3)
CAVEDSSASKIIF

SEQ ID NO: 181498 - protein, 16 aa, Homo sapiens
  CDR3 for beta chain variable domain of TCR clone 90749 (TRBV6-1, TRBJ2-7)
CASRAPRRSPSYEQYF

SEQ ID NO: 181499 - protein, 12 aa, Homo sapiens
  CDR3 for alpha chain variable domain of TCR clone 90750 (TRAV8-3, TRAJ26)
CAGDNYGQNFVF

SEQ ID NO: 181500 - protein, 14 aa, Homo sapiens
  CDR3 for beta chain variable domain of TCR clone 90750 (TRBV11-2, TRBJ2-7)
CASSLGAGAYEQYF

SEQ ID NO: 181501 - protein, 14 aa, Homo sapiens
  CDR3 for alpha chain variable domain of TCR clone 90751 (TRAV12-2, TRAJ13)
CAVKKTGGYQKVTF

SEQ ID NO: 181502 - protein, 11 aa, Homo sapiens
  CDR3 for beta chain variable domain of TCR clone 90751 (TRBV6-1, TRBJ2-1)
CASISSNEQFF

SEQ ID NO: 181503 - protein, 10 aa, Homo sapiens
  CDR3 for alpha chain variable domain of TCR clone 90752 (TRAV23/DV6, TRAJ57)
CAASSTLSQA

SEQ ID NO: 181504 - protein, 14 aa, Homo sapiens
  CDR3 for beta chain variable domain of TCR clone 90752 (TRBV20-1, TRBJ2-7)
CSAKRGRSSYEQYF

SEQ ID NO: 181505 - protein, 15 aa, Homo sapiens
  CDR3 for alpha chain variable domain of TCR clone 90753 (TRAV3, TRAJ5)
CAVRDRKTGMRALTF

SEQ ID NO: 181506 - protein, 15 aa, Homo sapiens
  CDR3 for beta chain variable domain of TCR clone 90753 (TRBV7-8, TRBJ2-1)
CASSLADSLYNEQFF

SEQ ID NO: 181507 - protein, 13 aa, Homo sapiens
  CDR3 for alpha chain variable domain of TCR clone 90754 (TRAV29/DV5, TRAJ31)
CAASRNNNARPMF

SEQ ID NO: 181508 - protein, 12 aa, Homo sapiens
  CDR3 for beta chain variable domain of TCR clone 90754 (TRBV14, TRBJ2-7)
CASSLYKDEQYF

SEQ ID NO: 181509 - protein, 11 aa, Homo sapiens
  CDR3 for alpha chain variable domain of TCR clone 90755 (TRAV12-3, TRAJ17)
CKTLTGNKLTF

SEQ ID NO: 181510 - protein, 16 aa, Homo sapiens
  CDR3 for beta chain variable domain of TCR clone 90755 (TRBV13, TRBJ2-2)
CASSPRTGEHTGELFF

SEQ ID NO: 181511 - protein, 12 aa, Homo sapiens
  CDR3 for alpha chain variable domain of TCR clone 90756 (TRAV13-2, TRAJ42)
CAEGGSQGNLIF

SEQ ID NO: 181512 - protein, 15 aa, Homo sapiens
  CDR3 for beta chain variable domain of TCR clone 90756 (TRBV7-2, TRBJ2-1)
CASTHGTGIYNEQFF

SEQ ID NO: 181513 - protein, 21 aa, Homo sapiens
  CDR3 for alpha chain variable domain of TCR clone 90757 (TRAV1-2, TRAJ37)
CLLPLCCERFHGSGNTGQLIF

SEQ ID NO: 181514 - protein, 14 aa, Homo sapiens
  CDR3 for beta chain variable domain of TCR clone 90757 (TRBV2, TRBJ2-5)
CASSEVLAQETQYF

SEQ ID NO: 181515 - protein, 13 aa, Homo sapiens
  CDR3 for alpha chain variable domain of TCR clone 90758 (TRAV13-1, TRAJ5)
CAASDTGRRALTF

SEQ ID NO: 181516 - protein, 14 aa, Homo sapiens
  CDR3 for beta chain variable domain of TCR clone 90758 (TRBV11-2, TRBJ1-2)
CASSLGTANYGYTF

SEQ ID NO: 181517 - protein, 15 aa, Homo sapiens
  CDR3 for alpha chain variable domain of TCR clone 90759 (TRAV21, TRAJ53)
CATVNSGGSNYKLTF

SEQ ID NO: 181518 - protein, 14 aa, Homo sapiens
  CDR3 for beta chain variable domain of TCR clone 90759 (TRBV7-2, TRBJ2-7)
CASSLPPGQGPQYF

SEQ ID NO: 181519 - protein, 13 aa, Homo sapiens
  CDR3 for alpha chain variable domain of TCR clone 90760 (TRAV21, TRAJ20)
CAVGLRVDYKLSF

SEQ ID NO: 181520 - protein, 14 aa, Homo sapiens
  CDR3 for beta chain variable domain of TCR clone 90760 (TRBV20-1, TRBJ2-7)
CSAKRGRSSYEQYF

SEQ ID NO: 181521 - protein, 12 aa, Homo sapiens
  CDR3 for alpha chain variable domain of TCR clone 90761 (TRAV12-1, TRAJ40)
CVLPSGTYKYIF

SEQ ID NO: 181522 - protein, 15 aa, Homo sapiens
  CDR3 for beta chain variable domain of TCR clone 90761 (TRBV12-4, TRBJ2-1)
CAGSPLSGRNSEQFF

SEQ ID NO: 181523 - protein, 13 aa, Homo sapiens
  CDR3 for alpha chain variable domain of TCR clone 90762 (TRAV13-1, TRAJ28)
CAANEAGSYQLTF

SEQ ID NO: 181524 - protein, 15 aa, Homo sapiens
  CDR3 for beta chain variable domain of TCR clone 90762 (TRBV7-9, TRBJ1-6)
CASSSPGRGDSPLHF

SEQ ID NO: 181525 - protein, 13 aa, Homo sapiens
  CDR3 for alpha chain variable domain of TCR clone 90763 (TRAV20, TRAJ37)
CAGCSSNTGKLIF

SEQ ID NO: 181526 - protein, 17 aa, Homo sapiens
  CDR3 for beta chain variable domain of TCR clone 90763 (TRBV7-3, TRBJ2-3)
CASSLMKRMRGADTQYF

SEQ ID NO: 181527 - protein, 16 aa, Homo sapiens
  CDR3 for alpha chain variable domain of TCR clone 90764 (TRAV30, TRAJ49)
SAAQRVGPNTGNQFYF

SEQ ID NO: 181528 - protein, 15 aa, Homo sapiens
  CDR3 for beta chain variable domain of TCR clone 90764 (TRBV7-2, TRBJ2-1)
CASSSVLAGGNEQFF

SEQ ID NO: 181529 - protein, 13 aa, Homo sapiens
  CDR3 for alpha chain variable domain of TCR clone 90765 (TRAV9-2, TRAJ49)
CALIQIGGNQFYF

SEQ ID NO: 181530 - protein, 14 aa, Homo sapiens
  CDR3 for beta chain variable domain of TCR clone 90765 (TRBV5-1, TRBJ2-3)
CASSLFGPTDTQYF

SEQ ID NO: 181531 - protein, 12 aa, Homo sapiens
  CDR3 for alpha chain variable domain of TCR clone 90766 (TRAV25, TRAJ38)
CAGTGNNRKLIW

SEQ ID NO: 181532 - protein, 14 aa, Homo sapiens
  CDR3 for beta chain variable domain of TCR clone 90766 (TRBV19, TRBJ1-5)
CASSKMPGPQPQHF

SEQ ID NO: 181533 - protein, 12 aa, Homo sapiens
  CDR3 for alpha chain variable domain of TCR clone 90767 (TRAV35, TRAJ49)
CAGWNTGNQFYF

SEQ ID NO: 181534 - protein, 12 aa, Homo sapiens
  CDR3 for beta chain variable domain of TCR clone 90767 (TRBV29-1, TRBJ2-3)
CSVTGGADTQYF

SEQ ID NO: 181535 - protein, 11 aa, Homo sapiens
  CDR3 for alpha chain variable domain of TCR clone 90768 (TRAV12-2, TRAJ29)
CAVTLRSPLVF

SEQ ID NO: 181536 - protein, 12 aa, Homo sapiens
  CDR3 for beta chain variable domain of TCR clone 90768 (TRBV19, TRBJ2-1)
CASSRQGAEQFF

SEQ ID NO: 181537 - protein, 12 aa, Homo sapiens
  CDR3 for alpha chain variable domain of TCR clone 90769 (TRAV12-3, TRAJ17)
CAMTLTGNKLTF

SEQ ID NO: 181538 - protein, 14 aa, Homo sapiens
  CDR3 for beta chain variable domain of TCR clone 90769 (TRBV7-9, TRBJ1-1)
CASSLGGANTEAFF

SEQ ID NO: 181539 - protein, 18 aa, Homo sapiens
  CDR3 for alpha chain variable domain of TCR clone 90770 (TRAV13-1, TRAJ52)
CAAKNPNAGGTSYGKLTF

SEQ ID NO: 181540 - protein, 15 aa, Homo sapiens
  CDR3 for beta chain variable domain of TCR clone 90770 (TRBV6-1, TRBJ2-3)
CASSERGAITDTQYF

SEQ ID NO: 181541 - protein, 11 aa, Homo sapiens
  CDR3 for alpha chain variable domain of TCR clone 90771 (TRAV21, TRAJ34)
CAVTNTDKLIF

SEQ ID NO: 181542 - protein, 13 aa, Homo sapiens
  CDR3 for beta chain variable domain of TCR clone 90771 (TRBV12-5, TRBJ2-3)
CASGDRQSDTQYF

SEQ ID NO: 181543 - protein, 17 aa, Homo sapiens
  CDR3 for alpha chain variable domain of TCR clone 90772 (TRAV26-1, TRAJ58)
CIVRVGAEETSGSRLTF

SEQ ID NO: 181544 - protein, 18 aa, Homo sapiens
  CDR3 for beta chain variable domain of TCR clone 90772 (TRBV7-9, TRBJ2-7)
CASSLTTSGSRAWYEQYF

SEQ ID NO: 181545 - protein, 14 aa, Homo sapiens
  CDR3 for alpha chain variable domain of TCR clone 90773 (TRAV12-2, TRAJ32)
CAHPESGATNKLLF

SEQ ID NO: 181546 - protein, 14 aa, Homo sapiens
  CDR3 for beta chain variable domain of TCR clone 90773 (TRBV4-2, TRBJ2-3)
CASRETRAPGMQYF

SEQ ID NO: 181547 - protein, 13 aa, Homo sapiens
  CDR3 for alpha chain variable domain of TCR clone 90774 (TRAV12-3, TRAJ36)
CAMSRPGANNLFF

SEQ ID NO: 181548 - protein, 18 aa, Homo sapiens
  CDR3 for beta chain variable domain of TCR clone 90774 (TRBV11-1, TRBJ2-2)
CASSREAGGPGNTGELFF

SEQ ID NO: 181549 - protein, 15 aa, Homo sapiens
  CDR3 for alpha chain variable domain of TCR clone 90775 (TRAV12-1, TRAJ6)
CVTYLHLEEEPALLF

SEQ ID NO: 181550 - protein, 15 aa, Homo sapiens
  CDR3 for beta chain variable domain of TCR clone 90775 (TRBV7-3, TRBJ2-1)
CASSLKASEYNERFF

SEQ ID NO: 181551 - protein, 16 aa, Homo sapiens
  CDR3 for alpha chain variable domain of TCR clone 90776 (TRAV26-1, TRAJ23)
CIVGPRFYNQGGKLIF

SEQ ID NO: 181552 - protein, 13 aa, Homo sapiens
  CDR3 for beta chain variable domain of TCR clone 90776 (TRBV20-1, TRBJ1-1)
CSARGGGNTEAFF

SEQ ID NO: 181553 - protein, 16 aa, Homo sapiens
  CDR3 for alpha chain variable domain of TCR clone 90777 (TRAV1-2, TRAJ10)
CAVRGVLTGGGNKLTF

SEQ ID NO: 181554 - protein, 15 aa, Homo sapiens
  CDR3 for beta chain variable domain of TCR clone 90777 (TRBV20-1, TRBJ2-7)
CSAESGTSGAYEQYF

SEQ ID NO: 181555 - protein, 15 aa, Homo sapiens
  CDR3 for alpha chain variable domain of TCR clone 90778 (TRAV29/DV5, TRAJ29)
CAASERSSGNTPLVF

SEQ ID NO: 181556 - protein, 17 aa, Homo sapiens
  CDR3 for beta chain variable domain of TCR clone 90778 (TRBV4-1, TRBJ1-4)
CASSQEGPRGVEEKLLF

SEQ ID NO: 181557 - protein, 11 aa, Homo sapiens
  CDR3 for alpha chain variable domain of TCR clone 90779 (TRAV13-1, TRAJ31)
CSNRYNARLLF

SEQ ID NO: 181558 - protein, 11 aa, Homo sapiens
  CDR3 for beta chain variable domain of TCR clone 90779 (TRBV20-1, TRBJ2-7)
CSARTSYEQYF

SEQ ID NO: 181559 - protein, 18 aa, Homo sapiens
  CDR3 for alpha chain variable domain of TCR clone 90780 (TRAV16, TRAJ26)
CALTRWSESCLWSRNQIV

SEQ ID NO: 181560 - protein, 13 aa, Homo sapiens
  CDR3 for beta chain variable domain of TCR clone 90780 (TRBV4-2, TRBJ1-1)
CASSQAGNTEAFF

SEQ ID NO: 181561 - protein, 14 aa, Homo sapiens
  CDR3 for alpha chain variable domain of TCR clone 90781 (TRAV16, TRAJ15)
CALSGPQAGTALIF

SEQ ID NO: 181562 - protein, 12 aa, Homo sapiens
  CDR3 for beta chain variable domain of TCR clone 90781 (TRBV18, TRBJ2-5)
CASSPSKETQYV

SEQ ID NO: 181563 - protein, 14 aa, Homo sapiens
  CDR3 for alpha chain variable domain of TCR clone 90782 (TRAV23/DV6, TRAJ45)
CAASWGGGADGLTF

SEQ ID NO: 181564 - protein, 15 aa, Homo sapiens
  CDR3 for beta chain variable domain of TCR clone 90782 (TRBV4-2, TRBJ1-2)
CASSRNKGAGYGYTF

SEQ ID NO: 181565 - protein, 11 aa, Homo sapiens
  CDR3 for alpha chain variable domain of TCR clone 90783 (TRAV12-3, TRAJ49)
CAANTGNQFYF

SEQ ID NO: 181566 - protein, 15 aa, Homo sapiens
  CDR3 for beta chain variable domain of TCR clone 90783 (TRBV7-9, TRBJ1-4)
CASSARTGGNEKLFF

SEQ ID NO: 181567 - protein, 13 aa, Homo sapiens
  CDR3 for alpha chain variable domain of TCR clone 90784 (TRAV36/DV7, TRAJ33)
CAVDMDSNYQLIW

SEQ ID NO: 181568 - protein, 16 aa, Homo sapiens
  CDR3 for beta chain variable domain of TCR clone 90784 (TRBV15, TRBJ2-3)
CATRRSGGRAPDTQYF

SEQ ID NO: 181569 - protein, 12 aa, Homo sapiens
  CDR3 for alpha chain variable domain of TCR clone 90785 (TRAV12-3, TRAJ17)
FAMTLTGNKLTF

SEQ ID NO: 181570 - protein, 15 aa, Homo sapiens
  CDR3 for beta chain variable domain of TCR clone 90785 (TRBV20-1, TRBJ2-7)
CSASDRVSGMDEQYF

SEQ ID NO: 181571 - protein, 13 aa, Homo sapiens
  CDR3 for alpha chain variable domain of TCR clone 90786 (TRAV12-1, TRAJ39)
CVVNYNAVNMLTF

SEQ ID NO: 181572 - protein, 14 aa, Homo sapiens
  CDR3 for beta chain variable domain of TCR clone 90786 (TRBV27, TRBJ2-3)
CASSPLGTTDTQYF

SEQ ID NO: 181573 - protein, 13 aa, Homo sapiens
  CDR3 for alpha chain variable domain of TCR clone 90787 (TRAV27, TRAJ54)
CAGAGQGDQKLVF

SEQ ID NO: 181574 - protein, 15 aa, Homo sapiens
  CDR3 for beta chain variable domain of TCR clone 90787 (TRBV18, TRBJ2-6)
CASSPSYAGANVLTF

SEQ ID NO: 181575 - protein, 12 aa, Homo sapiens
  CDR3 for alpha chain variable domain of TCR clone 90788 (TRAV2, TRAJ31)
CAVEDNNARLMF

SEQ ID NO: 181576 - protein, 17 aa, Homo sapiens
  CDR3 for beta chain variable domain of TCR clone 90788 (TRBV7-3, TRBJ2-3)
CASSLMKRMRGADTQYF

SEQ ID NO: 181577 - protein, 16 aa, Homo sapiens
  CDR3 for alpha chain variable domain of TCR clone 90789 (TRAV30, TRAJ24)
CGTEIVDADSWGKFQF

SEQ ID NO: 181578 - protein, 15 aa, Homo sapiens
  CDR3 for beta chain variable domain of TCR clone 90789 (TRBV6-1, TRBJ2-6)
CASSSRPSGANVLTF

SEQ ID NO: 181579 - protein, 14 aa, Homo sapiens
  CDR3 for alpha chain variable domain of TCR clone 90790 (TRAV8-2, TRAJ4)
CVVSPSGGHNKLIF

SEQ ID NO: 181580 - protein, 15 aa, Homo sapiens
  CDR3 for beta chain variable domain of TCR clone 90790 (TRBV2, TRBJ2-1)
CASSELAGSYNEQFF

SEQ ID NO: 181581 - protein, 11 aa, Homo sapiens
  CDR3 for alpha chain variable domain of TCR clone 90791 (TRAV2, TRAJ13)
CASGGYQKVTF

SEQ ID NO: 181582 - protein, 15 aa, Homo sapiens
  CDR3 for beta chain variable domain of TCR clone 90791 (TRBV19, TRBJ2-1)
CASSSPGVPLDEQFF

SEQ ID NO: 181583 - protein, 16 aa, Homo sapiens
  CDR3 for alpha chain variable domain of TCR clone 90792 (TRAV30, TRAJ24)
CGAAIVDADSWGKFQF

SEQ ID NO: 181584 - protein, 14 aa, Homo sapiens
  CDR3 for beta chain variable domain of TCR clone 90792 (TRBV12-5, TRBJ2-5)
CASGSRTHQETQYF

SEQ ID NO: 181585 - protein, 16 aa, Homo sapiens
  CDR3 for alpha chain variable domain of TCR clone 90793 (TRAV20, TRAJ10)
CAVLRGLTGGGNKLTF

SEQ ID NO: 181586 - protein, 16 aa, Homo sapiens
  CDR3 for beta chain variable domain of TCR clone 90793 (TRBV5-5, TRBJ2-2)
CASSGRREGATGELFF

SEQ ID NO: 181587 - protein, 17 aa, Homo sapiens
  CDR3 for alpha chain variable domain of TCR clone 90794 (TRAV1-2, TRAJ8)
CAVRDPDENTGFQKLVF

SEQ ID NO: 181588 - protein, 16 aa, Homo sapiens
  CDR3 for beta chain variable domain of TCR clone 90794 (TRBV7-9, TRBJ2-2)
CASGGFGGANTGELFF

SEQ ID NO: 181589 - protein, 12 aa, Homo sapiens
  CDR3 for alpha chain variable domain of TCR clone 90795 (TRAV26-1, TRAJ36)
CIVRVRADNLFF

SEQ ID NO: 181590 - protein, 14 aa, Homo sapiens
  CDR3 for beta chain variable domain of TCR clone 90795 (TRBV25-1, TRBJ1-1)
CASTHLGGNTEAFF

SEQ ID NO: 181591 - protein, 15 aa, Homo sapiens
  CDR3 for alpha chain variable domain of TCR clone 90796 (TRAV12-3, TRAJ6)
CAMSATTGGSYIPTF

SEQ ID NO: 181592 - protein, 16 aa, Homo sapiens
  CDR3 for beta chain variable domain of TCR clone 90796 (TRBV20-1, TRBJ1-2)
CSASMGQGVSNYGYTF

SEQ ID NO: 181593 - protein, 12 aa, Homo sapiens
  CDR3 for alpha chain variable domain of TCR clone 90797 (TRAV8-4, TRAJ43)
CAVSVNNNDMRF

SEQ ID NO: 181594 - protein, 13 aa, Homo sapiens
  CDR3 for beta chain variable domain of TCR clone 90797 (TRBV7-9, TRBJ1-2)
CASSLKQNYGDTF

SEQ ID NO: 181595 - protein, 12 aa, Homo sapiens
  CDR3 for alpha chain variable domain of TCR clone 90798 (TRAV5, TRAJ36)
CAEKGGANNLFF

SEQ ID NO: 181596 - protein, 16 aa, Homo sapiens
  CDR3 for beta chain variable domain of TCR clone 90798 (TRBV5-4, TRBJ2-1)
CASSLALAGAYNEQFF

SEQ ID NO: 181597 - protein, 14 aa, Homo sapiens
  CDR3 for alpha chain variable domain of TCR clone 90799 (TRAV2, TRAJ9)
CAVEDRGGGFKTIF

SEQ ID NO: 181598 - protein, 11 aa, Homo sapiens
  CDR3 for beta chain variable domain of TCR clone 90799 (TRBV7-9, TRBJ2-5)
CASSLGETQYF

SEQ ID NO: 181599 - protein, 14 aa, Homo sapiens
  CDR3 for alpha chain variable domain of TCR clone 90800 (TRAV26-1, TRAJ38)
CIADNAGNNRKLIW

SEQ ID NO: 181600 - protein, 14 aa, Homo sapiens
  CDR3 for beta chain variable domain of TCR clone 90800 (TRBV20-1, TRBJ1-1)
CGAQTRIGGTEAFF

SEQ ID NO: 181601 - protein, 10 aa, Homo sapiens
  CDR3 for alpha chain variable domain of TCR clone 90801 (TRAV13-1, TRAJ26)
CAPYGQNFFF

SEQ ID NO: 181602 - protein, 15 aa, Homo sapiens
  CDR3 for beta chain variable domain of TCR clone 90801 (TRBV28, TRBJ2-3)
CASSQELGGTDTQYF

SEQ ID NO: 181603 - protein, 12 aa, Homo sapiens
  CDR3 for alpha chain variable domain of TCR clone 90802 (TRAV27, TRAJ35)
CAGADCGNVLHC

SEQ ID NO: 181604 - protein, 13 aa, Homo sapiens
  CDR3 for beta chain variable domain of TCR clone 90802 (TRBV7-3, TRBJ1-1)
CASSQDWGAEAFF

SEQ ID NO: 181605 - protein, 15 aa, Homo sapiens
  CDR3 for alpha chain variable domain of TCR clone 90803 (TRAV21, TRAJ53)
CATLNSGGSNYKLTF

SEQ ID NO: 181606 - protein, 14 aa, Homo sapiens
  CDR3 for beta chain variable domain of TCR clone 90803 (TRBV15, TRBJ1-2)
CATSRASVNYGDTF

SEQ ID NO: 181607 - protein, 13 aa, Homo sapiens
  CDR3 for alpha chain variable domain of TCR clone 90804 (TRAV30, TRAJ24)
CGTVTDSWGKLHF

SEQ ID NO: 181608 - protein, 15 aa, Homo sapiens
  CDR3 for beta chain variable domain of TCR clone 90804 (TRBV4-1, TRBJ2-1)
CASSQDPGNYNEQFF

SEQ ID NO: 181609 - protein, 13 aa, Homo sapiens
  CDR3 for alpha chain variable domain of TCR clone 90805 (TRAV13-1, TRAJ43)
CAASKNNNNDMRF

SEQ ID NO: 181610 - protein, 17 aa, Homo sapiens
  CDR3 for beta chain variable domain of TCR clone 90805 (TRBV4-1, TRBJ2-7)
CASSQPTSGSRGYEQYF

SEQ ID NO: 181611 - protein, 18 aa, Homo sapiens
  CDR3 for alpha chain variable domain of TCR clone 90806 (TRAV26-2, TRAJ54)
CILRDVEVGIQGAQKLVF

SEQ ID NO: 181612 - protein, 17 aa, Homo sapiens
  CDR3 for beta chain variable domain of TCR clone 90806 (TRBV20-1, TRBJ1-5)
CSASLSPGQGGNRPQHF

SEQ ID NO: 181613 - protein, 16 aa, Homo sapiens
  CDR3 for alpha chain variable domain of TCR clone 90807 (TRAV26-1, TRAJ52)
CIVSNAGGTSYGKLTF

SEQ ID NO: 181614 - protein, 15 aa, Homo sapiens
  CDR3 for beta chain variable domain of TCR clone 90807 (TRBV7-3, TRBJ2-1)
CASSPTGGGEGEQFF

SEQ ID NO: 181615 - protein, 15 aa, Homo sapiens
  CDR3 for alpha chain variable domain of TCR clone 90808 (TRAV17, TRAJ23)
CATDAEDNQGGKLIF

SEQ ID NO: 181616 - protein, 14 aa, Homo sapiens
  CDR3 for beta chain variable domain of TCR clone 90808 (TRBV11-3, TRBJ2-7)
CASSPDRNTYEQYF

SEQ ID NO: 181617 - protein, 16 aa, Homo sapiens
  CDR3 for alpha chain variable domain of TCR clone 90809 (TRAV3, TRAJ4)
CSVRPSPSGGYNKLIF

SEQ ID NO: 181618 - protein, 12 aa, Homo sapiens
  CDR3 for beta chain variable domain of TCR clone 90809 (TRBV7-9, TRBJ2-7)
CASSQGVYEQYF

SEQ ID NO: 181619 - protein, 13 aa, Homo sapiens
  CDR3 for alpha chain variable domain of TCR clone 90810 (TRAV23/DV6, TRAJ12)
CAPRVDSSYKLIF

SEQ ID NO: 181620 - protein, 12 aa, Homo sapiens
  CDR3 for beta chain variable domain of TCR clone 90810 (TRBV7-6, TRBJ2-5)
CASSLGQETQYF

SEQ ID NO: 181621 - protein, 12 aa, Homo sapiens
  CDR3 for alpha chain variable domain of TCR clone 90811 (TRAV13-1, TRAJ5)
CAAKAGRRALTF

SEQ ID NO: 181622 - protein, 15 aa, Homo sapiens
  CDR3 for beta chain variable domain of TCR clone 90811 (TRBV11-2, TRBJ2-1)
CASSLGTSGLNEQFF

SEQ ID NO: 181623 - protein, 15 aa, Homo sapiens
  CDR3 for alpha chain variable domain of TCR clone 90812 (TRAV8-4, TRAJ47)
CAVSDPEEYGNKLVS

SEQ ID NO: 181624 - protein, 15 aa, Homo sapiens
  CDR3 for beta chain variable domain of TCR clone 90812 (TRBV11-2, TRBJ2-1)
CASSLGPDSYNEQFF

SEQ ID NO: 181625 - protein, 16 aa, Homo sapiens
  CDR3 for alpha chain variable domain of TCR clone 90813 (TRAV12-2, TRAJ40)
CAVIRGGTSGTYKYIF

SEQ ID NO: 181626 - protein, 14 aa, Homo sapiens
  CDR3 for beta chain variable domain of TCR clone 90813 (TRBV20-1, TRBJ2-5)
CSARDGRAGETQFF

SEQ ID NO: 181627 - protein, 15 aa, Homo sapiens
  CDR3 for alpha chain variable domain of TCR clone 90814 (TRAV8-4, TRAJ12)
CAVSDRVDSSYKLIF

SEQ ID NO: 181628 - protein, 15 aa, Homo sapiens
  CDR3 for beta chain variable domain of TCR clone 90814 (TRBV11-3, TRBJ2-1)
RASSLAGQTYNEQFF

SEQ ID NO: 181629 - protein, 10 aa, Homo sapiens
  CDR3 for alpha chain variable domain of TCR clone 90815 (TRAV12-3, TRAJ49)
CAMNDDQFYF

SEQ ID NO: 181630 - protein, 14 aa, Homo sapiens
  CDR3 for beta chain variable domain of TCR clone 90815 (TRBV7-6, TRBJ2-3)
CASSLGTVTDTQYF

SEQ ID NO: 181631 - protein, 13 aa, Homo sapiens
  CDR3 for alpha chain variable domain of TCR clone 90816 (TRAV17, TRAJ37)
CATDPGNTGKLIF

SEQ ID NO: 181632 - protein, 13 aa, Homo sapiens
  CDR3 for beta chain variable domain of TCR clone 90816 (TRBV5-5, TRBJ2-5)
CASSSLGQGTQYF

SEQ ID NO: 181633 - protein, 11 aa, Homo sapiens
  CDR3 for alpha chain variable domain of TCR clone 90817 (TRAV26-1, TRAJ37)
CIVRVGRKLIF

SEQ ID NO: 181634 - protein, 13 aa, Homo sapiens
  CDR3 for beta chain variable domain of TCR clone 90817 (TRBV7-7, TRBJ2-3)
CASSLSRADTQYF

SEQ ID NO: 181635 - protein, 15 aa, Homo sapiens
  CDR3 for alpha chain variable domain of TCR clone 90818 (TRAV1-2, TRAJ30)
CAVRPHGNRDDKIIF

SEQ ID NO: 181636 - protein, 13 aa, Homo sapiens
  CDR3 for beta chain variable domain of TCR clone 90818 (TRBV4-1, TRBJ2-7)
CASSQVQAYEQYF

SEQ ID NO: 181637 - protein, 16 aa, Homo sapiens
  CDR3 for alpha chain variable domain of TCR clone 90819 (TRAV38-2/DV8, TRAJ47)
CAYRSAIMHYGNKLVF

SEQ ID NO: 181638 - protein, 14 aa, Homo sapiens
  CDR3 for beta chain variable domain of TCR clone 90819 (TRBV19, TRBJ2-7)
CASSIFAGTYEQYF

SEQ ID NO: 181639 - protein, 14 aa, Homo sapiens
  CDR3 for alpha chain variable domain of TCR clone 90820 (TRAV4, TRAJ43)
CLVGPMYNNNDMSF

SEQ ID NO: 181640 - protein, 21 aa, Homo sapiens
  CDR3 for beta chain variable domain of TCR clone 90820 (TRBV11-1, TRBJ2-1)
CASSARERLRPEGPSYNEQFF

SEQ ID NO: 181641 - protein, 15 aa, Homo sapiens
  CDR3 for alpha chain variable domain of TCR clone 90821 (TRAV12-3, TRAJ5)
CAMSGLGTGRIALTF

SEQ ID NO: 181642 - protein, 16 aa, Homo sapiens
  CDR3 for beta chain variable domain of TCR clone 90821 (TRBV20-1, TRBJ2-3)
CSARLHSAGAIDTQYF

SEQ ID NO: 181643 - protein, 14 aa, Homo sapiens
  CDR3 for alpha chain variable domain of TCR clone 90822 (TRAV1-2, TRAJ16)
CAVNRFSDGQKLLF

SEQ ID NO: 181644 - protein, 13 aa, Homo sapiens
  CDR3 for beta chain variable domain of TCR clone 90822 (TRBV19, TRBJ2-5)
CASSIHSQETQYF

SEQ ID NO: 181645 - protein, 13 aa, Homo sapiens
  CDR3 for alpha chain variable domain of TCR clone 90823 (TRAV35, TRAJ36)
CAGPRIGANNLFF

SEQ ID NO: 181646 - protein, 15 aa, Homo sapiens
  CDR3 for beta chain variable domain of TCR clone 90823 (TRBV28, TRBJ2-5)
CASSPPWLYQETQYF

SEQ ID NO: 181647 - protein, 15 aa, Homo sapiens
  CDR3 for alpha chain variable domain of TCR clone 90824 (TRAV3, TRAJ5)
CAVRDRKTGRRALTF

SEQ ID NO: 181648 - protein, 15 aa, Homo sapiens
  CDR3 for beta chain variable domain of TCR clone 90824 (TRBV7-8, TRBJ2-2)
CASGPLDTFPGELFF

SEQ ID NO: 181649 - protein, 13 aa, Homo sapiens
  CDR3 for alpha chain variable domain of TCR clone 90825 (TRAV12-3, TRAJ33)
CAMSVNSNYQLIW

SEQ ID NO: 181650 - protein, 16 aa, Homo sapiens
  CDR3 for beta chain variable domain of TCR clone 90825 (TRBV2, TRBJ2-1)
CASSVGGSLSYNEQFF

SEQ ID NO: 181651 - protein, 14 aa, Homo sapiens
  CDR3 for alpha chain variable domain of TCR clone 90826 (TRAV2, TRAJ9)
CAVEDRSGGFKTIF

SEQ ID NO: 181652 - protein, 19 aa, Homo sapiens
  CDR3 for beta chain variable domain of TCR clone 90826 (TRBV25-1, TRBJ2-2)
CAILVYRVDRGRRTGELFF

SEQ ID NO: 181653 - protein, 13 aa, Homo sapiens
  CDR3 for alpha chain variable domain of TCR clone 90827 (TRAV35, TRAJ36)
CAGPRIGANNLFF

SEQ ID NO: 181654 - protein, 15 aa, Homo sapiens
  CDR3 for beta chain variable domain of TCR clone 90827 (TRBV28, TRBJ2-5)
CASIPPWSYQETQYF

SEQ ID NO: 181655 - protein, 16 aa, Homo sapiens
  CDR3 for alpha chain variable domain of TCR clone 90828 (TRAV13-1, TRAJ18)
CAASRMRGSTLGRLYF

SEQ ID NO: 181656 - protein, 16 aa, Homo sapiens
  CDR3 for beta chain variable domain of TCR clone 90828 (TRBV11-1, TRBJ1-1)
CASSSRGRTGYTEAFF

SEQ ID NO: 181657 - protein, 17 aa, Homo sapiens
  CDR3 for alpha chain variable domain of TCR clone 90829 (TRAV12-1, TRAJ52)
CVVTPNAGGTSYGKLTF

SEQ ID NO: 181658 - protein, 17 aa, Homo sapiens
  CDR3 for beta chain variable domain of TCR clone 90829 (TRBV28, TRBJ2-5)
CASSTPEGDALQETQYF

SEQ ID NO: 181659 - protein, 17 aa, Homo sapiens
  CDR3 for alpha chain variable domain of TCR clone 90830 (TRAV3, TRAJ38)
CAVRDCLNVGNNRKLTW

SEQ ID NO: 181660 - protein, 14 aa, Homo sapiens
  CDR3 for beta chain variable domain of TCR clone 90830 (TRBV5-5, TRBJ1-5)
CASSGQGVDQPQHF

SEQ ID NO: 181661 - protein, 10 aa, Homo sapiens
  CDR3 for alpha chain variable domain of TCR clone 90831 (TRAV1-2, TRAJ31)
CAFFDARLMF

SEQ ID NO: 181662 - protein, 15 aa, Homo sapiens
  CDR3 for beta chain variable domain of TCR clone 90831 (TRBV4-1, TRBJ1-4)
CANSDTGGTNEKLFF

SEQ ID NO: 181663 - protein, 15 aa, Homo sapiens
  CDR3 for alpha chain variable domain of TCR clone 90832 (TRAV3, TRAJ13)
CAVRDIGGGYQKVTF

SEQ ID NO: 181664 - protein, 12 aa, Homo sapiens
  CDR3 for beta chain variable domain of TCR clone 90832 (TRBV5-5, TRBJ2-5)
CASSYFGETQYF

SEQ ID NO: 181665 - protein, 14 aa, Homo sapiens
  CDR3 for alpha chain variable domain of TCR clone 90833 (TRAV2, TRAJ37)
CAVDLTSNTGKLIF

SEQ ID NO: 181666 - protein, 13 aa, Homo sapiens
  CDR3 for beta chain variable domain of TCR clone 90833 (TRBV20-1, TRBJ1-1)
CSAPLGGGTEAFF

SEQ ID NO: 181667 - protein, 15 aa, Homo sapiens
  CDR3 for alpha chain variable domain of TCR clone 90834 (TRAV12-1, TRAJ44)
CEADLPTGTASKLTF

SEQ ID NO: 181668 - protein, 13 aa, Homo sapiens
  CDR3 for beta chain variable domain of TCR clone 90834 (TRBV6-5, TRBJ2-5)
CASSPQGGETQYF

SEQ ID NO: 181669 - protein, 14 aa, Homo sapiens
  CDR3 for alpha chain variable domain of TCR clone 90835 (TRAV12-3, TRAJ21)
CAMEGHQGFNRFYF

SEQ ID NO: 181670 - protein, 16 aa, Homo sapiens
  CDR3 for beta chain variable domain of TCR clone 90835 (TRBV19, TRBJ2-1)
CASSKAGPSSYNEQFF

SEQ ID NO: 181671 - protein, 17 aa, Homo sapiens
  CDR3 for alpha chain variable domain of TCR clone 90836 (TRAV29/DV5, TRAJ21)
CAASNKFYFGSGTKLNV

SEQ ID NO: 181672 - protein, 15 aa, Homo sapiens
  CDR3 for beta chain variable domain of TCR clone 90836 (TRBV6-5, TRBJ2-1)
CASSYDAGAGNEQFF

SEQ ID NO: 181673 - protein, 14 aa, Homo sapiens
  CDR3 for alpha chain variable domain of TCR clone 90837 (TRAV26-1, TRAJ38)
CIADNAGNNRKLIW

SEQ ID NO: 181674 - protein, 15 aa, Homo sapiens
  CDR3 for beta chain variable domain of TCR clone 90837 (TRBV9, TRBJ2-1)
CASSLAGSSYKEQFF

SEQ ID NO: 181675 - protein, 15 aa, Homo sapiens
  CDR3 for alpha chain variable domain of TCR clone 90838 (TRAV36/DV7, TRAJ53)
CAVEGSGGGNYKLTF

SEQ ID NO: 181676 - protein, 16 aa, Homo sapiens
  CDR3 for beta chain variable domain of TCR clone 90838 (TRBV27, TRBJ2-2)
CASSLSGFWVTGELFF

SEQ ID NO: 181677 - protein, 13 aa, Homo sapiens
  CDR3 for alpha chain variable domain of TCR clone 90839 (TRAV12-2, TRAJ6)
CVVNVSRKLHTYI

SEQ ID NO: 181678 - protein, 12 aa, Homo sapiens
  CDR3 for beta chain variable domain of TCR clone 90839 (TRBV29-1, TRBJ2-3)
CSVTGGADTQYF

SEQ ID NO: 181679 - protein, 13 aa, Homo sapiens
  CDR3 for alpha chain variable domain of TCR clone 90840 (TRAV21, TRAJ27)
CAARPGNAGKSTF

SEQ ID NO: 181680 - protein, 13 aa, Homo sapiens
  CDR3 for beta chain variable domain of TCR clone 90840 (TRBV19, TRBJ2-7)
CASSPRQSYEQYF

SEQ ID NO: 181681 - protein, 16 aa, Homo sapiens
  CDR3 for alpha chain variable domain of TCR clone 90841 (TRAV1-1, TRAJ28)
CAVRDDSGAGSYQLTF

SEQ ID NO: 181682 - protein, 13 aa, Homo sapiens
  CDR3 for beta chain variable domain of TCR clone 90841 (TRBV24-1, TRBJ2-2)
CATSDWSTGELFF

SEQ ID NO: 181683 - protein, 15 aa, Homo sapiens
  CDR3 for alpha chain variable domain of TCR clone 90842 (TRAV20, TRAJ53)
CAVQERGGSNYKLTF

SEQ ID NO: 181684 - protein, 15 aa, Homo sapiens
  CDR3 for beta chain variable domain of TCR clone 90842 (TRBV20-1, TRBJ1-6)
CSARAASSYNSPLHF

SEQ ID NO: 181685 - protein, 14 aa, Homo sapiens
  CDR3 for alpha chain variable domain of TCR clone 90843 (TRAV1-2, TRAJ16)
CAVNRFSDGQKLLF

SEQ ID NO: 181686 - protein, 11 aa, Homo sapiens
  CDR3 for beta chain variable domain of TCR clone 90843 (TRBV20-1, TRBJ2-7)
CSARTSYEQYF

SEQ ID NO: 181687 - protein, 16 aa, Homo sapiens
  CDR3 for alpha chain variable domain of TCR clone 90844 (TRAV3, TRAJ37)
CAVRPHGSGNTVKLIF

SEQ ID NO: 181688 - protein, 16 aa, Homo sapiens
  CDR3 for beta chain variable domain of TCR clone 90844 (TRBV9, TRBJ1-2)
CASSVEEKVSPYGYTF

SEQ ID NO: 181689 - protein, 14 aa, Homo sapiens
  CDR3 for alpha chain variable domain of TCR clone 90845 (TRAV16, TRAJ37)
CALDISGNTGKLIF

SEQ ID NO: 181690 - protein, 15 aa, Homo sapiens
  CDR3 for beta chain variable domain of TCR clone 90845 (TRBV2, TRBJ2-1)
CASSELAGGHNEQFF

SEQ ID NO: 181691 - protein, 16 aa, Homo sapiens
  CDR3 for alpha chain variable domain of TCR clone 90846 (TRAV26-1, TRAJ37)
CIVRGDGAGNTGKLIF

SEQ ID NO: 181692 - protein, 17 aa, Homo sapiens
  CDR3 for beta chain variable domain of TCR clone 90846 (TRBV4-1, TRBJ2-7)
CASSRDPLGVRGGEQYF

SEQ ID NO: 181693 - protein, 13 aa, Homo sapiens
  CDR3 for alpha chain variable domain of TCR clone 90847 (TRAV12-2, TRAJ6)
CAVNVSRKPHTYI

SEQ ID NO: 181694 - protein, 12 aa, Homo sapiens
  CDR3 for beta chain variable domain of TCR clone 90847 (TRBV29-1, TRBJ2-3)
CSVTGGADTQYF

SEQ ID NO: 181695 - protein, 13 aa, Homo sapiens
  CDR3 for alpha chain variable domain of TCR clone 90848 (TRAV38-1, TRAJ52)
CAFRGTSYGKLTF

SEQ ID NO: 181696 - protein, 15 aa, Homo sapiens
  CDR3 for beta chain variable domain of TCR clone 90848 (TRBV7-8, TRBJ2-5)
CASSDAAGAQETQYF

SEQ ID NO: 181697 - protein, 11 aa, Homo sapiens
  CDR3 for alpha chain variable domain of TCR clone 90849 (TRAV16, TRAJ33)
CALHSNYQLIW

SEQ ID NO: 181698 - protein, 14 aa, Homo sapiens
  CDR3 for beta chain variable domain of TCR clone 90849 (TRBV19, TRBJ2-1)
CASPTFVLSGEQFF

SEQ ID NO: 181699 - protein, 13 aa, Homo sapiens
  CDR3 for alpha chain variable domain of TCR clone 90850 (TRAV1-1, TRAJ9)
CAAKNTGGFKTIF

SEQ ID NO: 181700 - protein, 14 aa, Homo sapiens
  CDR3 for beta chain variable domain of TCR clone 90850 (TRBV20-1, TRBJ2-1)
CSSQIGGSANEQFF

SEQ ID NO: 181701 - protein, 15 aa, Homo sapiens
  CDR3 for alpha chain variable domain of TCR clone 90851 (TRAV8-2, TRAJ15)
CVVRDRYQAGTALIF

SEQ ID NO: 181702 - protein, 13 aa, Homo sapiens
  CDR3 for beta chain variable domain of TCR clone 90851 (TRBV20-1, TRBJ1-1)
CSAPDRRNTEAFF

SEQ ID NO: 181703 - protein, 12 aa, Homo sapiens
  CDR3 for alpha chain variable domain of TCR clone 90852 (TRAV17, TRAJ39)
CATGAAGNMLTF

SEQ ID NO: 181704 - protein, 14 aa, Homo sapiens
  CDR3 for beta chain variable domain of TCR clone 90852 (TRBV7-3, TRBJ1-1)
CASSLKGGNTEAFF

SEQ ID NO: 181705 - protein, 16 aa, Homo sapiens
  CDR3 for alpha chain variable domain of TCR clone 90853 (TRAV3, TRAJ10)
CAVRDMNAGGGNKLTF

SEQ ID NO: 181706 - protein, 18 aa, Homo sapiens
  CDR3 for beta chain variable domain of TCR clone 90853 (TRBV11-2, TRBJ2-3)
CASSLGGASRGAPNTQYF

SEQ ID NO: 181707 - protein, 15 aa, Homo sapiens
  CDR3 for alpha chain variable domain of TCR clone 90854 (TRAV26-1, TRAJ29)
CIVRVEGSGNTPLVL

SEQ ID NO: 181708 - protein, 14 aa, Homo sapiens
  CDR3 for beta chain variable domain of TCR clone 90854 (TRBV18, TRBJ2-5)
CASSPGVSQGTQYF

SEQ ID NO: 181709 - protein, 17 aa, Homo sapiens
  CDR3 for alpha chain variable domain of TCR clone 90855 (TRAV17, TRAJ7)
CAKLGRLAFGKGNQVVV

SEQ ID NO: 181710 - protein, 13 aa, Homo sapiens
  CDR3 for beta chain variable domain of TCR clone 90855 (TRBV12-4, TRBJ2-7)
CASSLERVREQYF

SEQ ID NO: 181711 - protein, 13 aa, Homo sapiens
  CDR3 for alpha chain variable domain of TCR clone 90856 (TRAV16, TRAJ54)
FALKVRGAQKLVF

SEQ ID NO: 181712 - protein, 13 aa, Homo sapiens
  CDR3 for beta chain variable domain of TCR clone 90856 (TRBV20-1, TRBJ1-1)
CSARGGGNTEAFF

SEQ ID NO: 181713 - protein, 13 aa, Homo sapiens
  CDR3 for alpha chain variable domain of TCR clone 90857 (TRAV13-1, TRAJ21)
CAASIYNFNKFYF

SEQ ID NO: 181714 - protein, 14 aa, Homo sapiens
  CDR3 for beta chain variable domain of TCR clone 90857 (TRBV7-2, TRBJ2-7)
CASRSQGAAYEQYF

SEQ ID NO: 181715 - protein, 15 aa, Homo sapiens
  CDR3 for alpha chain variable domain of TCR clone 90858 (TRAV12-2, TRAJ43)
CAFDMRFGAGTSLTV

SEQ ID NO: 181716 - protein, 15 aa, Homo sapiens
  CDR3 for beta chain variable domain of TCR clone 90858 (TRBV5-1, TRBJ2-3)
CASSVTSGSTDTQYF

SEQ ID NO: 181717 - protein, 15 aa, Homo sapiens
  CDR3 for alpha chain variable domain of TCR clone 90859 (TRAV21, TRAJ24)
CAARSSTDSWGKLQF

SEQ ID NO: 181718 - protein, 15 aa, Homo sapiens
  CDR3 for beta chain variable domain of TCR clone 90859 (TRBV7-9, TRBJ1-4)
CASSRTGGFNEKLFF

SEQ ID NO: 181719 - protein, 14 aa, Homo sapiens
  CDR3 for alpha chain variable domain of TCR clone 90860 (TRAV21, TRAJ45)
CAVSSGGGADGLTF

SEQ ID NO: 181720 - protein, 17 aa, Homo sapiens
  CDR3 for beta chain variable domain of TCR clone 90860 (TRBV7-8, TRBJ2-6)
CASSAGTGGAGANVLTF

SEQ ID NO: 181721 - protein, 13 aa, Homo sapiens
  CDR3 for alpha chain variable domain of TCR clone 90861 (TRAV27, TRAJ41)
CAGEGNSGYALNF

SEQ ID NO: 181722 - protein, 13 aa, Homo sapiens
  CDR3 for beta chain variable domain of TCR clone 90861 (TRBV12-5, TRBJ2-3)
CASGDRQSDTQYF

SEQ ID NO: 181723 - protein, 23 aa, Homo sapiens
  CDR3 for alpha chain variable domain of TCR clone 90862 (TRAV8-4, )
CARLNAGNNHIQNPDPAVYQLRD

SEQ ID NO: 181724 - protein, 14 aa, Homo sapiens
  CDR3 for beta chain variable domain of TCR clone 90862 (TRBV7-8, TRBJ2-3)
CASSLEAGTDTQYF

SEQ ID NO: 181725 - protein, 16 aa, Homo sapiens
  CDR3 for alpha chain variable domain of TCR clone 90863 (TRAV4, TRAJ5)
CLVGPDHGHGQESTYF

SEQ ID NO: 181726 - protein, 15 aa, Homo sapiens
  CDR3 for beta chain variable domain of TCR clone 90863 (TRBV27, TRBJ2-5)
CASSLIPSGGETRYF

SEQ ID NO: 181727 - protein, 14 aa, Homo sapiens
  CDR3 for alpha chain variable domain of TCR clone 90864 (TRAV12-3, TRAJ10)
SHLPLTGGGNKLTF

SEQ ID NO: 181728 - protein, 13 aa, Homo sapiens
  CDR3 for beta chain variable domain of TCR clone 90864 (TRBV7-9, TRBJ2-3)
CASSPGSTNTQYF

SEQ ID NO: 181729 - protein, 15 aa, Homo sapiens
  CDR3 for alpha chain variable domain of TCR clone 90865 (TRAV8-4, TRAJ3)
CAVTGENLVQQCFQD

SEQ ID NO: 181730 - protein, 15 aa, Homo sapiens
  CDR3 for beta chain variable domain of TCR clone 90865 (TRBV4-2, TRBJ1-1)
CQQPRGFGMNTEAFF

SEQ ID NO: 181731 - protein, 15 aa, Homo sapiens
  CDR3 for alpha chain variable domain of TCR clone 90866 (TRAV17, TRAJ23)
CATDAEDNQGGKLIF

SEQ ID NO: 181732 - protein, 12 aa, Homo sapiens
  CDR3 for beta chain variable domain of TCR clone 90866 (TRBV2, TRBJ2-1)
CAKREGYNERFF

SEQ ID NO: 181733 - protein, 15 aa, Homo sapiens
  CDR3 for alpha chain variable domain of TCR clone 90867 (TRAV17, TRAJ23)
CATDAEDNQGGKLIF

SEQ ID NO: 181734 - protein, 11 aa, Homo sapiens
  CDR3 for beta chain variable domain of TCR clone 90867 (TRBV2, TRBJ2-1)
CQAEGYNEQFF

SEQ ID NO: 181735 - protein, 11 aa, Homo sapiens
  CDR3 for alpha chain variable domain of TCR clone 90868 (TRAV3, TRAJ21)
CAVGNFNKFYF

SEQ ID NO: 181736 - protein, 16 aa, Homo sapiens
  CDR3 for beta chain variable domain of TCR clone 90868 (TRBV19, TRBJ2-1)
CASSKAGPSSYSEQFF

SEQ ID NO: 181737 - protein, 13 aa, Homo sapiens
  CDR3 for alpha chain variable domain of TCR clone 90869 (TRAV12-3, TRAJ47)
CAMRKEYGNKLVF

SEQ ID NO: 181738 - protein, 15 aa, Homo sapiens
  CDR3 for beta chain variable domain of TCR clone 90869 (TRBV20-1, TRBJ2-7)
CSARDRVSGMDEQYF

SEQ ID NO: 181739 - protein, 12 aa, Homo sapiens
  CDR3 for alpha chain variable domain of TCR clone 90870 (TRAV13-1, TRAJ53)
AASGGSNYKLTF

SEQ ID NO: 181740 - protein, 15 aa, Homo sapiens
  CDR3 for beta chain variable domain of TCR clone 90870 (TRBV7-9, TRBJ1-5)
CASSQGHQPNQPQHF

SEQ ID NO: 181741 - protein, 14 aa, Homo sapiens
  CDR3 for alpha chain variable domain of TCR clone 90871 (TRAV1-2, TRAJ8)
CAVREDTGFQKLVF

SEQ ID NO: 181742 - protein, 13 aa, Homo sapiens
  CDR3 for beta chain variable domain of TCR clone 90871 (TRBV2, TRBJ1-1)
CASSVLMNTEAFF

SEQ ID NO: 181743 - protein, 14 aa, Homo sapiens
  CDR3 for alpha chain variable domain of TCR clone 90872 (TRAV21, TRAJ37)
CAVKGSSNTGKLIF

SEQ ID NO: 181744 - protein, 14 aa, Homo sapiens
  CDR3 for beta chain variable domain of TCR clone 90872 (TRBV7-2, TRBJ2-7)
CASSLYPGRYEQYF

SEQ ID NO: 181745 - protein, 13 aa, Homo sapiens
  CDR3 for alpha chain variable domain of TCR clone 90873 (TRAV26-2, TRAJ57)
CILSRGGAEKLVF

SEQ ID NO: 181746 - protein, 16 aa, Homo sapiens
  CDR3 for beta chain variable domain of TCR clone 90873 (TRBV18, TRBJ1-5)
CASSPRTGGGNQPQHF

SEQ ID NO: 181747 - protein, 13 aa, Homo sapiens
  CDR3 for alpha chain variable domain of TCR clone 90874 (TRAV8-4, TRAJ10)
CAAFTGGGNKLTF

SEQ ID NO: 181748 - protein, 15 aa, Homo sapiens
  CDR3 for beta chain variable domain of TCR clone 90874 (TRBV2, TRBJ2-3)
CASSDFGKATDTQYF

SEQ ID NO: 181749 - protein, 15 aa, Homo sapiens
  CDR3 for alpha chain variable domain of TCR clone 90875 (TRAV12-2, TRAJ53)
CAVNGGGGSNYKLTF

SEQ ID NO: 181750 - protein, 17 aa, Homo sapiens
  CDR3 for beta chain variable domain of TCR clone 90875 (TRBV7-3, TRBJ2-3)
RASSLMKGMRGADTQYF

SEQ ID NO: 181751 - protein, 14 aa, Homo sapiens
  CDR3 for alpha chain variable domain of TCR clone 90876 (TRAV38-2/DV8, TRAJ23)
CAYRSQNQGGKLIF

SEQ ID NO: 181752 - protein, 13 aa, Homo sapiens
  CDR3 for beta chain variable domain of TCR clone 90876 (TRBV24-1, TRBJ2-1)
CATSAGPYNGQFF

SEQ ID NO: 181753 - protein, 14 aa, Homo sapiens
  CDR3 for alpha chain variable domain of TCR clone 90877 (TRAV1-2, TRAJ8)
CAVREDTGFQKLGF

SEQ ID NO: 181754 - protein, 15 aa, Homo sapiens
  CDR3 for beta chain variable domain of TCR clone 90877 (TRBV20-1, TRBJ2-7)
CSAREGRDSLYEQYF

SEQ ID NO: 181755 - protein, 16 aa, Homo sapiens
  CDR3 for alpha chain variable domain of TCR clone 90878 (TRAV30, TRAJ24)
CGTEIVDADSWGNSSL

SEQ ID NO: 181756 - protein, 15 aa, Homo sapiens
  CDR3 for beta chain variable domain of TCR clone 90878 (TRBV6-3, TRBJ2-7)
CASSSPGTVFYEQYF

SEQ ID NO: 181757 - protein, 15 aa, Homo sapiens
  CDR3 for alpha chain variable domain of TCR clone 90879 (TRAV12-1, TRAJ44)
CVVFVNTGTASKLTF

SEQ ID NO: 181758 - protein, 16 aa, Homo sapiens
  CDR3 for beta chain variable domain of TCR clone 90879 (TRBV12-4, TRBJ1-5)
CASSRPVGGSNQPQHF

SEQ ID NO: 181759 - protein, 14 aa, Homo sapiens
  CDR3 for alpha chain variable domain of TCR clone 90880 (TRAV4, TRAJ20)
CLVGDFINDYKLSF

SEQ ID NO: 181760 - protein, 14 aa, Homo sapiens
  CDR3 for beta chain variable domain of TCR clone 90880 (TRBV5-4, TRBJ1-1)
CASSLDSRRDEAFF

SEQ ID NO: 181761 - protein, 12 aa, Homo sapiens
  CDR3 for alpha chain variable domain of TCR clone 90881 (TRAV13-1, TRAJ21)
CAAKEGFNKFYF

SEQ ID NO: 181762 - protein, 15 aa, Homo sapiens
  CDR3 for beta chain variable domain of TCR clone 90881 (TRBV28, TRBJ1-3)
CASSLAGSSGNTMYF

SEQ ID NO: 181763 - protein, 19 aa, Homo sapiens
  CDR3 for alpha chain variable domain of TCR clone 90882 (TRAV26-1, TRAJ52)
CIVRAHRNAGGTSYGKLTF

SEQ ID NO: 181764 - protein, 15 aa, Homo sapiens
  CDR3 for beta chain variable domain of TCR clone 90882 (TRBV12-4, TRBJ2-5)
CASRPPTGLQETQYF

SEQ ID NO: 181765 - protein, 14 aa, Homo sapiens
  CDR3 for alpha chain variable domain of TCR clone 90883 (TRAV29/DV5, TRAJ20)
CAATIRSNDYKLSF

SEQ ID NO: 181766 - protein, 15 aa, Homo sapiens
  CDR3 for beta chain variable domain of TCR clone 90883 (TRBV20-1, TRBJ2-1)
CSASAAGSSYNEQFF

SEQ ID NO: 181767 - protein, 11 aa, Homo sapiens
  CDR3 for alpha chain variable domain of TCR clone 90884 (TRAV3, TRAJ21)
CAVGNFNKFYF

SEQ ID NO: 181768 - protein, 14 aa, Homo sapiens
  CDR3 for beta chain variable domain of TCR clone 90884 (TRBV11-2, TRBJ2-3)
CASSRLARTDTQYF

SEQ ID NO: 181769 - protein, 16 aa, Homo sapiens
  CDR3 for alpha chain variable domain of TCR clone 90885 (TRAV8-3, TRAJ22)
CAVDLLGTGSARQLTF

SEQ ID NO: 181770 - protein, 14 aa, Homo sapiens
  CDR3 for beta chain variable domain of TCR clone 90885 (TRBV11-2, TRBJ2-7)
CASSLELEGYEQYF

SEQ ID NO: 181771 - protein, 13 aa, Homo sapiens
  CDR3 for alpha chain variable domain of TCR clone 90886 (TRAV24, TRAJ42)
CAFSTGSQRNLIF

SEQ ID NO: 181772 - protein, 17 aa, Homo sapiens
  CDR3 for beta chain variable domain of TCR clone 90886 (TRBV7-8, TRBJ2-6)
CASSAGTGGAGANVLTF

SEQ ID NO: 181773 - protein, 12 aa, Homo sapiens
  CDR3 for alpha chain variable domain of TCR clone 90887 (TRAV8-3, TRAJ41)
CAVALSGYALKF

SEQ ID NO: 181774 - protein, 16 aa, Homo sapiens
  CDR3 for beta chain variable domain of TCR clone 90887 (TRBV27, TRBJ2-7)
CASSSERRDSAYEQYF

SEQ ID NO: 181775 - protein, 12 aa, Homo sapiens
  CDR3 for alpha chain variable domain of TCR clone 90888 (TRAV13-1, TRAJ26)
CAASLYGQNFVF

SEQ ID NO: 181776 - protein, 14 aa, Homo sapiens
  CDR3 for beta chain variable domain of TCR clone 90888 (TRBV18, TRBJ2-7)
CASSPRGGAYEQYF

SEQ ID NO: 181777 - protein, 18 aa, Homo sapiens
  CDR3 for alpha chain variable domain of TCR clone 90889 (TRAV13-1, TRAJ52)
CAAKNPNAGGTSYGKLTF

SEQ ID NO: 181778 - protein, 18 aa, Homo sapiens
  CDR3 for beta chain variable domain of TCR clone 90889 (TRBV12-4, TRBJ2-4)
CASSRTGAVDVARNIQYF

SEQ ID NO: 181779 - protein, 13 aa, Homo sapiens
  CDR3 for alpha chain variable domain of TCR clone 90890 (TRAV8-3, TRAJ48)
CVVVRFGNEKLTF

SEQ ID NO: 181780 - protein, 16 aa, Homo sapiens
  CDR3 for beta chain variable domain of TCR clone 90890 (TRBV20-1, TRBJ2-5)
CSARDFASGIQETQYF

SEQ ID NO: 181781 - protein, 12 aa, Homo sapiens
  CDR3 for alpha chain variable domain of TCR clone 90891 (TRAV13-1, TRAJ49)
CAASPMGNQFYF

SEQ ID NO: 181782 - protein, 14 aa, Homo sapiens
  CDR3 for beta chain variable domain of TCR clone 90891 (TRBV7-2, TRBJ2-7)
CASRSQGAAYEQYF

SEQ ID NO: 181783 - protein, 15 aa, Homo sapiens
  CDR3 for alpha chain variable domain of TCR clone 90892 (TRAV13-1, TRAJ32)
CAASIYGGATNKLIF

SEQ ID NO: 181784 - protein, 14 aa, Homo sapiens
  CDR3 for beta chain variable domain of TCR clone 90892 (TRBV7-2, TRBJ2-7)
CASSPKTSFYEQYF

SEQ ID NO: 181785 - protein, 13 aa, Homo sapiens
  CDR3 for alpha chain variable domain of TCR clone 90893 (TRAV27, TRAJ6)
CAGGTRGSYIPTL

SEQ ID NO: 181786 - protein, 15 aa, Homo sapiens
  CDR3 for beta chain variable domain of TCR clone 90893 (TRBV5-7, TRBJ2-7)
CASSLGPGRGHEQYF

SEQ ID NO: 181787 - protein, 13 aa, Homo sapiens
  CDR3 for alpha chain variable domain of TCR clone 90894 (TRAV14/DV4, TRAJ20)
CAMRDSNDYKLSF

SEQ ID NO: 181788 - protein, 18 aa, Homo sapiens
  CDR3 for beta chain variable domain of TCR clone 90894 (TRBV15, TRBJ2-3)
CATSRDGARSWDTDTQYF

SEQ ID NO: 181789 - protein, 15 aa, Homo sapiens
  CDR3 for alpha chain variable domain of TCR clone 90895 (TRAV8-2, TRAJ40)
CVVSDRGSGTYKYIF

SEQ ID NO: 181790 - protein, 17 aa, Homo sapiens
  CDR3 for beta chain variable domain of TCR clone 90895 (TRBV9, TRBJ2-1)
CASSVRSRSGGNNEQFF

SEQ ID NO: 181791 - protein, 10 aa, Homo sapiens
  CDR3 for alpha chain variable domain of TCR clone 90896 (TRAV38-2/DV8, TRAJ21)
CAYRSNKFYF

SEQ ID NO: 181792 - protein, 12 aa, Homo sapiens
  CDR3 for beta chain variable domain of TCR clone 90896 (TRBV11-3, TRBJ2-3)
CASSLGEDTQYF

SEQ ID NO: 181793 - protein, 14 aa, Homo sapiens
  CDR3 for alpha chain variable domain of TCR clone 90897 (TRAV26-1, TRAJ34)
CIVRVAYNTDKLIF

SEQ ID NO: 181794 - protein, 17 aa, Homo sapiens
  CDR3 for beta chain variable domain of TCR clone 90897 (TRBV20-1, TRBJ2-7)
CSARVPARTSTSSTSGR

SEQ ID NO: 181795 - protein, 14 aa, Homo sapiens
  CDR3 for alpha chain variable domain of TCR clone 90898 (TRAV12-2, TRAJ3)
CAVSLYSSASKIIF

SEQ ID NO: 181796 - protein, 15 aa, Homo sapiens
  CDR3 for beta chain variable domain of TCR clone 90898 (TRBV19, TRBJ2-1)
CASSLETSGYNEQFF

SEQ ID NO: 181797 - protein, 15 aa, Homo sapiens
  CDR3 for alpha chain variable domain of TCR clone 90899 (TRAV3, TRAJ5)
CAVRDRKTGRRALTF

SEQ ID NO: 181798 - protein, 15 aa, Homo sapiens
  CDR3 for beta chain variable domain of TCR clone 90899 (TRBV7-8, TRBJ2-1)
CASSLGDSLYNEQFF

SEQ ID NO: 181799 - protein, 11 aa, Homo sapiens
  CDR3 for alpha chain variable domain of TCR clone 90900 (TRAV29/DV5, TRAJ31)
CAAMNNARLTF

SEQ ID NO: 181800 - protein, 15 aa, Homo sapiens
  CDR3 for beta chain variable domain of TCR clone 90900 (TRBV20-1, TRBJ2-7)
CSARGPLAGGREQYF

SEQ ID NO: 181801 - protein, 14 aa, Homo sapiens
  CDR3 for alpha chain variable domain of TCR clone 90901 (TRAV12-2, TRAJ17)
CAELFKAAGNKLTF

SEQ ID NO: 181802 - protein, 17 aa, Homo sapiens
  CDR3 for beta chain variable domain of TCR clone 90901 (TRBV20-1, TRBJ2-2)
CSASGSGQGGLTGELFF

SEQ ID NO: 181803 - protein, 15 aa, Homo sapiens
  CDR3 for alpha chain variable domain of TCR clone 90902 (TRAV12-2, TRAJ53)
CAVTGGGGSNYKLTF

SEQ ID NO: 181804 - protein, 17 aa, Homo sapiens
  CDR3 for beta chain variable domain of TCR clone 90902 (TRBV7-3, TRBJ2-3)
CASSLMKRMRGADTQYF

SEQ ID NO: 181805 - protein, 16 aa, Homo sapiens
  CDR3 for alpha chain variable domain of TCR clone 90903 (TRAV3, TRAJ37)
CAVRGKGSGNTGKIIF

SEQ ID NO: 181806 - protein, 16 aa, Homo sapiens
  CDR3 for beta chain variable domain of TCR clone 90903 (TRBV28, TRBJ1-5)
CASSFRGGYSNQPQHF

SEQ ID NO: 181807 - protein, 15 aa, Homo sapiens
  CDR3 for alpha chain variable domain of TCR clone 90904 (TRAV2, TRAJ9)
CAVEDRGTGGFKTIF

SEQ ID NO: 181808 - protein, 15 aa, Homo sapiens
  CDR3 for beta chain variable domain of TCR clone 90904 (TRBV7-9, TRBJ1-5)
CASSQGHQPNQPQHF

SEQ ID NO: 181809 - protein, 12 aa, Homo sapiens
  CDR3 for alpha chain variable domain of TCR clone 90905 (TRAV13-1, TRAJ21)
CAAKEGFNKFYF

SEQ ID NO: 181810 - protein, 16 aa, Homo sapiens
  CDR3 for beta chain variable domain of TCR clone 90905 (TRBV12-4, TRBJ2-5)
CASSFFVRGRQETQYF

SEQ ID NO: 181811 - protein, 13 aa, Homo sapiens
  CDR3 for alpha chain variable domain of TCR clone 90906 (TRAV25, TRAJ30)
CAGRVDRDDKIIF

SEQ ID NO: 181812 - protein, 17 aa, Homo sapiens
  CDR3 for beta chain variable domain of TCR clone 90906 (TRBV7-9, TRBJ2-6)
CASSFGAEYSGANVLTF

SEQ ID NO: 181813 - protein, 13 aa, Homo sapiens
  CDR3 for alpha chain variable domain of TCR clone 90907 (TRAV21, TRAJ27)
CAARPGNAGKSTF

SEQ ID NO: 181814 - protein, 15 aa, Homo sapiens
  CDR3 for beta chain variable domain of TCR clone 90907 (TRBV28, TRBJ1-4)
CASSRSGTGNEKLFF

SEQ ID NO: 181815 - protein, 14 aa, Homo sapiens
  CDR3 for alpha chain variable domain of TCR clone 90908 (TRAV13-1, TRAJ20)
CAARPGSNDYKLSF

SEQ ID NO: 181816 - protein, 13 aa, Homo sapiens
  CDR3 for beta chain variable domain of TCR clone 90908 (TRBV20-1, TRBJ1-1)
CSAPPGGHTEAFL

SEQ ID NO: 181817 - protein, 13 aa, Homo sapiens
  CDR3 for alpha chain variable domain of TCR clone 90909 (TRAV29/DV5, TRAJ49)
CAASTNTGNQVYF

SEQ ID NO: 181818 - protein, 13 aa, Homo sapiens
  CDR3 for beta chain variable domain of TCR clone 90909 (TRBV7-2, TRBJ1-4)
CASSLAGLEKLFF

SEQ ID NO: 181819 - protein, 17 aa, Homo sapiens
  CDR3 for alpha chain variable domain of TCR clone 90910 (TRAV3, TRAJ6)
CAVRDGPRAGGSYTPTF

SEQ ID NO: 181820 - protein, 18 aa, Homo sapiens
  CDR3 for beta chain variable domain of TCR clone 90910 (TRBV28, TRBJ1-2)
CASRQQQGKRGSNYGYTF

SEQ ID NO: 181821 - protein, 11 aa, Homo sapiens
  CDR3 for alpha chain variable domain of TCR clone 90911 (TRAV17, TRAJ9)
CATTGGFKTIF

SEQ ID NO: 181822 - protein, 15 aa, Homo sapiens
  CDR3 for beta chain variable domain of TCR clone 90911 (TRBV11-2, TRBJ2-1)
CASSLTSGGYNEQFF

SEQ ID NO: 181823 - protein, 15 aa, Homo sapiens
  CDR3 for alpha chain variable domain of TCR clone 90912 (TRAV16, TRAJ17)
CALSGNKAAGNKLTF

SEQ ID NO: 181824 - protein, 16 aa, Homo sapiens
  CDR3 for beta chain variable domain of TCR clone 90912 (TRBV7-6, TRBJ1-6)
CASSSLPAGEYSPLHC

SEQ ID NO: 181825 - protein, 17 aa, Homo sapiens
  CDR3 for alpha chain variable domain of TCR clone 90913 (TRAV3, TRAJ6)
CAVRDGPRAGGSYIPTF

SEQ ID NO: 181826 - protein, 12 aa, Homo sapiens
  CDR3 for beta chain variable domain of TCR clone 90913 (TRBV5-1, TRBJ2-7)
CASSFRGYEQYF

SEQ ID NO: 181827 - protein, 14 aa, Homo sapiens
  CDR3 for alpha chain variable domain of TCR clone 90914 (TRAV13-1, TRAJ44)
CAAKATGTASKLTF

SEQ ID NO: 181828 - protein, 15 aa, Homo sapiens
  CDR3 for beta chain variable domain of TCR clone 90914 (TRBV10-1, TRBJ2-3)
CASSATSGGFDTQYF

SEQ ID NO: 181829 - protein, 13 aa, Homo sapiens
  CDR3 for alpha chain variable domain of TCR clone 90915 (TRAV12-2, TRAJ47)
CAVFMEYGDKLVF

SEQ ID NO: 181830 - protein, 14 aa, Homo sapiens
  CDR3 for beta chain variable domain of TCR clone 90915 (TRBV4-1, TRBJ1-5)
CASSQGPTNQPQHF

SEQ ID NO: 181831 - protein, 12 aa, Homo sapiens
  CDR3 for alpha chain variable domain of TCR clone 90916 (TRAV17, TRAJ20)
CATDSNDYKLSF

SEQ ID NO: 181832 - protein, 16 aa, Homo sapiens
  CDR3 for beta chain variable domain of TCR clone 90916 (TRBV7-2, TRBJ1-2)
CASSSNQDGRGHGYTF

SEQ ID NO: 181833 - protein, 14 aa, Homo sapiens
  CDR3 for alpha chain variable domain of TCR clone 90917 (TRAV26-1, TRAJ49)
CIVRLTNTGNQFFF

SEQ ID NO: 181834 - protein, 13 aa, Homo sapiens
  CDR3 for beta chain variable domain of TCR clone 90917 (TRBV4-1, TRBJ2-7)
CASSQGQAYEQYF

SEQ ID NO: 181835 - protein, 13 aa, Homo sapiens
  CDR3 for alpha chain variable domain of TCR clone 90918 (TRAV12-3, TRAJ7)
CAMTPYGNNRLAF

SEQ ID NO: 181836 - protein, 16 aa, Homo sapiens
  CDR3 for beta chain variable domain of TCR clone 90918 (TRBV20-1, TRBJ1-4)
CSARPYGGELNERLFF

SEQ ID NO: 181837 - protein, 12 aa, Homo sapiens
  CDR3 for alpha chain variable domain of TCR clone 90919 (TRAV8-3, TRAJ27)
CAAGAEAGKSTF

SEQ ID NO: 181838 - protein, 14 aa, Homo sapiens
  CDR3 for beta chain variable domain of TCR clone 90919 (TRBV2, TRBJ2-1)
CASRLIVGHDEQFF

SEQ ID NO: 181839 - protein, 11 aa, Homo sapiens
  CDR3 for alpha chain variable domain of TCR clone 90920 (TRAV35, TRAJ30)
CAGPGDDKIVF

SEQ ID NO: 181840 - protein, 14 aa, Homo sapiens
  CDR3 for beta chain variable domain of TCR clone 90920 (TRBV7-6, TRBJ1-6)
CASSQAGGGSPLHF

SEQ ID NO: 181841 - protein, 16 aa, Homo sapiens
  CDR3 for alpha chain variable domain of TCR clone 90921 (TRAV30, TRAJ24)
CGTETVDADSWGKFQF

SEQ ID NO: 181842 - protein, 15 aa, Homo sapiens
  CDR3 for beta chain variable domain of TCR clone 90921 (TRBV5-1, TRBJ1-1)
CASSSTTGTNTEAFF

SEQ ID NO: 181843 - protein, 14 aa, Homo sapiens
  CDR3 for alpha chain variable domain of TCR clone 90922 (TRAV23/DV6, TRAJ21)
CAASSGGGTTSTNF

SEQ ID NO: 181844 - protein, 11 aa, Homo sapiens
  CDR3 for beta chain variable domain of TCR clone 90922 (TRBV7-8, TRBJ2-7)
CASSLSLEQYF

SEQ ID NO: 181845 - protein, 14 aa, Homo sapiens
  CDR3 for alpha chain variable domain of TCR clone 90923 (TRAV8-3, TRAJ39)
CAVGANNAGNMLTF

SEQ ID NO: 181846 - protein, 12 aa, Homo sapiens
  CDR3 for beta chain variable domain of TCR clone 90923 (TRBV11-3, TRBJ1-1)
CASSHRQGGAFF

SEQ ID NO: 181847 - protein, 16 aa, Homo sapiens
  CDR3 for alpha chain variable domain of TCR clone 90924 (TRAV26-1, TRAJ53)
CIVRVAMGGSNYKLTF

SEQ ID NO: 181848 - protein, 12 aa, Homo sapiens
  CDR3 for beta chain variable domain of TCR clone 90924 (TRBV7-9, TRBJ1-5)
CVSSPQGQPQHF

SEQ ID NO: 181849 - protein, 19 aa, Homo sapiens
  CDR3 for alpha chain variable domain of TCR clone 90925 (TRAV3, TRAJ37)
CAVRDIVGGYPSNTGQLIF

SEQ ID NO: 181850 - protein, 14 aa, Homo sapiens
  CDR3 for beta chain variable domain of TCR clone 90925 (TRBV7-8, TRBJ2-3)
CASSLEAGTDTQYF

SEQ ID NO: 181851 - protein, 15 aa, Homo sapiens
  CDR3 for alpha chain variable domain of TCR clone 90926 (TRAV13-1, TRAJ50)
CSAKGSETSYDKVIF

SEQ ID NO: 181852 - protein, 18 aa, Homo sapiens
  CDR3 for beta chain variable domain of TCR clone 90926 (TRBV10-3, TRBJ2-1)
CTSVPSVSLRGGVGEQFF

SEQ ID NO: 181853 - protein, 13 aa, Homo sapiens
  CDR3 for alpha chain variable domain of TCR clone 90927 (TRAV38-1, TRAJ42)
CARWGGSQGNLIF

SEQ ID NO: 181854 - protein, 13 aa, Homo sapiens
  CDR3 for beta chain variable domain of TCR clone 90927 (TRBV19, TRBJ1-2)
CASSVPGQDGYTF

SEQ ID NO: 181855 - protein, 14 aa, Homo sapiens
  CDR3 for alpha chain variable domain of TCR clone 90928 (TRAV13-1, TRAJ9)
CAASALTGGFKTIF

SEQ ID NO: 181856 - protein, 12 aa, Homo sapiens
  CDR3 for beta chain variable domain of TCR clone 90928 (TRBV7-9, TRBJ2-3)
CASSQQGDTQYF

SEQ ID NO: 181857 - protein, 16 aa, Homo sapiens
  CDR3 for alpha chain variable domain of TCR clone 90929 (TRAV3, TRAJ10)
CAVRDMRAGGGNKLTF

SEQ ID NO: 181858 - protein, 13 aa, Homo sapiens
  CDR3 for beta chain variable domain of TCR clone 90929 (TRBV12-4, TRBJ1-2)
CASSLRQGKGYTF

SEQ ID NO: 181859 - protein, 14 aa, Homo sapiens
  CDR3 for alpha chain variable domain of TCR clone 90930 (TRAV8-4, TRAJ15)
CAVTNREAGTALIF

SEQ ID NO: 181860 - protein, 16 aa, Homo sapiens
  CDR3 for beta chain variable domain of TCR clone 90930 (TRBV29-1, TRBJ2-6)
CSVEDITYSGANVLTF

SEQ ID NO: 181861 - protein, 11 aa, Homo sapiens
  CDR3 for alpha chain variable domain of TCR clone 90931 (TRAV3, TRAJ21)
CAVGNFNKFYF

SEQ ID NO: 181862 - protein, 15 aa, Homo sapiens
  CDR3 for beta chain variable domain of TCR clone 90931 (TRBV11-3, TRBJ1-1)
CASSGRTGSNTEAFF

SEQ ID NO: 181863 - protein, 12 aa, Homo sapiens
  CDR3 for alpha chain variable domain of TCR clone 90932 (TRAV12-3, TRAJ41)
CVMSYSGYALNF

SEQ ID NO: 181864 - protein, 13 aa, Homo sapiens
  CDR3 for beta chain variable domain of TCR clone 90932 (TRBV7-3, TRBJ2-1)
CASSLDSYNEQFF

SEQ ID NO: 181865 - protein, 13 aa, Homo sapiens
  CDR3 for alpha chain variable domain of TCR clone 90933 (TRAV12-2, TRAJ40)
CAVKRTGTYKYIF

SEQ ID NO: 181866 - protein, 15 aa, Homo sapiens
  CDR3 for beta chain variable domain of TCR clone 90933 (TRBV7-6, TRBJ1-5)
CASSQSSGINQPQHF

SEQ ID NO: 181867 - protein, 14 aa, Homo sapiens
  CDR3 for alpha chain variable domain of TCR clone 90934 (TRAV27, TRAJ39)
CAGRPTGAGNMLTF

SEQ ID NO: 181868 - protein, 17 aa, Homo sapiens
  CDR3 for beta chain variable domain of TCR clone 90934 (TRBV4-2, TRBJ1-1)
CASTQFGGGSGNTEAFF

SEQ ID NO: 181869 - protein, 14 aa, Homo sapiens
  CDR3 for alpha chain variable domain of TCR clone 90935 (TRAV23/DV6, TRAJ40)
CAASLTSGTYNYIF

SEQ ID NO: 181870 - protein, 14 aa, Homo sapiens
  CDR3 for beta chain variable domain of TCR clone 90935 (TRBV5-1, TRBJ2-3)
CASSRGRGGGTQYF

SEQ ID NO: 181871 - protein, 12 aa, Homo sapiens
  CDR3 for alpha chain variable domain of TCR clone 90936 (TRAV17, TRAJ12)
CATLRSSYKLIF

SEQ ID NO: 181872 - protein, 14 aa, Homo sapiens
  CDR3 for beta chain variable domain of TCR clone 90936 (TRBV12-5, TRBJ2-5)
CASGSRTHQETQYF

SEQ ID NO: 181873 - protein, 12 aa, Homo sapiens
  CDR3 for alpha chain variable domain of TCR clone 90937 (TRAV21, TRAJ3)
CCFYSSASKIIF

SEQ ID NO: 181874 - protein, 16 aa, Homo sapiens
  CDR3 for beta chain variable domain of TCR clone 90937 (TRBV19, TRBJ1-5)
CASRPGTGGRNQPQHF

SEQ ID NO: 181875 - protein, 14 aa, Homo sapiens
  CDR3 for alpha chain variable domain of TCR clone 90938 (TRAV3, TRAJ17)
CAVRDAAAGNKLTF

SEQ ID NO: 181876 - protein, 16 aa, Homo sapiens
  CDR3 for beta chain variable domain of TCR clone 90938 (TRBV20-1, TRBJ1-2)
CSASMGQGVANYGDTF

SEQ ID NO: 181877 - protein, 14 aa, Homo sapiens
  CDR3 for alpha chain variable domain of TCR clone 90939 (TRAV12-2, TRAJ36)
CAVNPPTGANNLFF

SEQ ID NO: 181878 - protein, 14 aa, Homo sapiens
  CDR3 for beta chain variable domain of TCR clone 90939 (TRBV11-2, TRBJ1-2)
CASSLGTANYGYTF

SEQ ID NO: 181879 - protein, 14 aa, Homo sapiens
  CDR3 for alpha chain variable domain of TCR clone 90940 (TRAV12-3, TRAJ5)
CAMSTYTGRRALTF

SEQ ID NO: 181880 - protein, 13 aa, Homo sapiens
  CDR3 for beta chain variable domain of TCR clone 90940 (TRBV28, TRBJ2-3)
CASSTGGGDMQYF

SEQ ID NO: 181881 - protein, 17 aa, Homo sapiens
  CDR3 for alpha chain variable domain of TCR clone 90941 (TRAV26-1, TRAJ37)
CIVRVITVSSNTGKLIF

SEQ ID NO: 181882 - protein, 14 aa, Homo sapiens
  CDR3 for beta chain variable domain of TCR clone 90941 (TRBV11-1, TRBJ2-7)
CASSFRQGSYEQYF

SEQ ID NO: 181883 - protein, 15 aa, Homo sapiens
  CDR3 for alpha chain variable domain of TCR clone 90942 (TRAV38-1, TRAJ57)
CAFMDSQGGSEKLVF

SEQ ID NO: 181884 - protein, 15 aa, Homo sapiens
  CDR3 for beta chain variable domain of TCR clone 90942 (TRBV10-3, TRBJ2-1)
CHPGGRQGDYNEQFF

SEQ ID NO: 181885 - protein, 17 aa, Homo sapiens
  CDR3 for alpha chain variable domain of TCR clone 90943 (TRAV36/DV7, TRAJ52)
CAVAQRAGGTSYGKLTF

SEQ ID NO: 181886 - protein, 13 aa, Homo sapiens
  CDR3 for beta chain variable domain of TCR clone 90943 (TRBV12-4, TRBJ1-1)
CASSPGTGFEAFF

SEQ ID NO: 181887 - protein, 10 aa, Homo sapiens
  CDR3 for alpha chain variable domain of TCR clone 90944 (TRAV8-4, TRAJ30)
VFYRDDKIIF

SEQ ID NO: 181888 - protein, 14 aa, Homo sapiens
  CDR3 for beta chain variable domain of TCR clone 90944 (TRBV7-2, TRBJ1-2)
CASSQTGSTYGYTF

SEQ ID NO: 181889 - protein, 12 aa, Homo sapiens
  CDR3 for alpha chain variable domain of TCR clone 90945 (TRAV2, TRAJ9)
CAVGAGGFKTIF

SEQ ID NO: 181890 - protein, 12 aa, Homo sapiens
  CDR3 for beta chain variable domain of TCR clone 90945 (TRBV27, TRBJ2-1)
CASRGFYNEQFF

SEQ ID NO: 181891 - protein, 12 aa, Homo sapiens
  CDR3 for alpha chain variable domain of TCR clone 90946 (TRAV12-3, TRAJ13)
CNGDWGYQKVTF

SEQ ID NO: 181892 - protein, 14 aa, Homo sapiens
  CDR3 for beta chain variable domain of TCR clone 90946 (TRBV7-2, TRBJ2-5)
CASSTGGELKTQYF

SEQ ID NO: 181893 - protein, 16 aa, Homo sapiens
  CDR3 for alpha chain variable domain of TCR clone 90947 (TRAV3, TRAJ37)
CAVRPHGSGNTGKLIF

SEQ ID NO: 181894 - protein, 16 aa, Homo sapiens
  CDR3 for beta chain variable domain of TCR clone 90947 (TRBV6-1, TRBJ2-1)
CASILRQGSSYNEQFF

SEQ ID NO: 181895 - protein, 22 aa, Homo sapiens
  CDR3 for alpha chain variable domain of TCR clone 90948 (TRAV21, )
CAVRQDAGNNHIQNPYPAVYQL

SEQ ID NO: 181896 - protein, 16 aa, Homo sapiens
  CDR3 for beta chain variable domain of TCR clone 90948 (TRBV4-2, TRBJ1-1)
CASRPLDGGGDTEAFF

SEQ ID NO: 181897 - protein, 15 aa, Homo sapiens
  CDR3 for alpha chain variable domain of TCR clone 90949 (TRAV38-2/DV8, TRAJ48)
CAYRSGGFGHEKLTF

SEQ ID NO: 181898 - protein, 16 aa, Homo sapiens
  CDR3 for beta chain variable domain of TCR clone 90949 (TRBV28, TRBJ2-7)
CASSPWVATGDLSQYF

SEQ ID NO: 181899 - protein, 15 aa, Homo sapiens
  CDR3 for alpha chain variable domain of TCR clone 90950 (TRAV3, TRAJ20)
CAGRDIKLSDYKLSF

SEQ ID NO: 181900 - protein, 18 aa, Homo sapiens
  CDR3 for beta chain variable domain of TCR clone 90950 (TRBV20-1, TRBJ2-5)
CSQTGDSGRLGGKETQYF

SEQ ID NO: 181901 - protein, 13 aa, Homo sapiens
  CDR3 for alpha chain variable domain of TCR clone 90951 (TRAV23/DV6, TRAJ22)
CAPYSGSARQLTF

SEQ ID NO: 181902 - protein, 17 aa, Homo sapiens
  CDR3 for beta chain variable domain of TCR clone 90951 (TRBV11-2, TRBJ1-6)
CASSLDPGPCHPSTLGT

SEQ ID NO: 181903 - protein, 12 aa, Homo sapiens
  CDR3 for alpha chain variable domain of TCR clone 90952 (TRAV27, TRAJ41)
CAGRNSGYALNF

SEQ ID NO: 181904 - protein, 15 aa, Homo sapiens
  CDR3 for beta chain variable domain of TCR clone 90952 (TRBV20-1, TRBJ1-5)
CSATSARGLGQPQHF

SEQ ID NO: 181905 - protein, 11 aa, Homo sapiens
  CDR3 for alpha chain variable domain of TCR clone 90953 (TRAV4, TRAJ31)
CLVGLNARLMF

SEQ ID NO: 181906 - protein, 16 aa, Homo sapiens
  CDR3 for beta chain variable domain of TCR clone 90953 (TRBV15, TRBJ2-6)
CATSVNGGFLANILTF

SEQ ID NO: 181907 - protein, 14 aa, Homo sapiens
  CDR3 for alpha chain variable domain of TCR clone 90954 (TRAV8-1, TRAJ5)
CAVRTDTGRSALTF

SEQ ID NO: 181908 - protein, 14 aa, Homo sapiens
  CDR3 for beta chain variable domain of TCR clone 90954 (TRBV7-8, TRBJ2-3)
CASSFPDGQDTQYF

SEQ ID NO: 181909 - protein, 15 aa, Homo sapiens
  CDR3 for alpha chain variable domain of TCR clone 90955 (TRAV12-3, TRAJ6)
CAMSATTGGSYIPTF

SEQ ID NO: 181910 - protein, 15 aa, Homo sapiens
  CDR3 for beta chain variable domain of TCR clone 90955 (TRBV10-2, TRBJ2-6)
CASSEQGTGANVLTF

SEQ ID NO: 181911 - protein, 17 aa, Homo sapiens
  CDR3 for alpha chain variable domain of TCR clone 90956 (TRAV3, TRAJ38)
CAVRDCLNAGNNRKLIW

SEQ ID NO: 181912 - protein, 14 aa, Homo sapiens
  CDR3 for beta chain variable domain of TCR clone 90956 (TRBV5-5, TRBJ1-5)
CASSGQGVDQPRHF

SEQ ID NO: 181913 - protein, 13 aa, Homo sapiens
  CDR3 for alpha chain variable domain of TCR clone 90957 (TRAV2, TRAJ40)
CAVVTSGTYKYIF

SEQ ID NO: 181914 - protein, 17 aa, Homo sapiens
  CDR3 for beta chain variable domain of TCR clone 90957 (TRBV18, TRBJ2-1)
CASSKGLSGGADNEQFF

SEQ ID NO: 181915 - protein, 14 aa, Homo sapiens
  CDR3 for alpha chain variable domain of TCR clone 90958 (TRAV1-1, TRAJ30)
CAARSLNRDDKIIF

SEQ ID NO: 181916 - protein, 14 aa, Homo sapiens
  CDR3 for beta chain variable domain of TCR clone 90958 (TRBV7-8, TRBJ2-3)
CASSLEAGTDTQYF

SEQ ID NO: 181917 - protein, 17 aa, Homo sapiens
  CDR3 for alpha chain variable domain of TCR clone 90959 (TRAV3, TRAJ6)
CAVGDGPRAGGSYIPTF

SEQ ID NO: 181918 - protein, 17 aa, Homo sapiens
  CDR3 for beta chain variable domain of TCR clone 90959 (TRBV27, TRBJ2-6)
CASSLTGFASGANVLTF

SEQ ID NO: 181919 - protein, 14 aa, Homo sapiens
  CDR3 for alpha chain variable domain of TCR clone 90960 (TRAV12-1, TRAJ30)
CVVNIEGRDDKIIF

SEQ ID NO: 181920 - protein, 13 aa, Homo sapiens
  CDR3 for beta chain variable domain of TCR clone 90960 (TRBV12-5, TRBJ2-1)
CASGLGRGNEQFF

SEQ ID NO: 181921 - protein, 14 aa, Homo sapiens
  CDR3 for alpha chain variable domain of TCR clone 90961 (TRAV21, TRAJ35)
CAVMPIGFGNLLHC

SEQ ID NO: 181922 - protein, 12 aa, Homo sapiens
  CDR3 for beta chain variable domain of TCR clone 90961 (TRBV7-9, TRBJ2-7)
CASSIKREEQYF

SEQ ID NO: 181923 - protein, 14 aa, Homo sapiens
  CDR3 for alpha chain variable domain of TCR clone 90962 (TRAV17, TRAJ15)
CATMGIQAGTALIF

SEQ ID NO: 181924 - protein, 15 aa, Homo sapiens
  CDR3 for beta chain variable domain of TCR clone 90962 (TRBV7-2, TRBJ1-2)
CASSPRAGWNYGYTF

SEQ ID NO: 181925 - protein, 16 aa, Homo sapiens
  CDR3 for alpha chain variable domain of TCR clone 90963 (TRAV3, TRAJ37)
CAVRVRGSGNTGKLIF

SEQ ID NO: 181926 - protein, 16 aa, Homo sapiens
  CDR3 for beta chain variable domain of TCR clone 90963 (TRBV27, TRBJ2-2)
CASSFRGLVRTGELFF

SEQ ID NO: 181927 - protein, 14 aa, Homo sapiens
  CDR3 for alpha chain variable domain of TCR clone 90964 (TRAV12-1, TRAJ9)
CVVTGDTGGFKTIF

SEQ ID NO: 181928 - protein, 16 aa, Homo sapiens
  CDR3 for beta chain variable domain of TCR clone 90964 (TRBV29-1, TRBJ1-2)
CSVEANRDIANYGYSF

SEQ ID NO: 181929 - protein, 14 aa, Homo sapiens
  CDR3 for alpha chain variable domain of TCR clone 90965 (TRAV23/DV6, TRAJ57)
CAAALKGGSEKLVF

SEQ ID NO: 181930 - protein, 15 aa, Homo sapiens
  CDR3 for beta chain variable domain of TCR clone 90965 (TRBV7-8, TRBJ1-1)
CASSLGDSRNTEAFF

SEQ ID NO: 181931 - protein, 16 aa, Homo sapiens
  CDR3 for alpha chain variable domain of TCR clone 90966 (TRAV12-2, TRAJ32)
CAVNLGQGGATNKLIF

SEQ ID NO: 181932 - protein, 15 aa, Homo sapiens
  CDR3 for beta chain variable domain of TCR clone 90966 (TRBV20-1, TRBJ2-7)
CSSRGPLAGGREQYF

SEQ ID NO: 181933 - protein, 12 aa, Homo sapiens
  CDR3 for alpha chain variable domain of TCR clone 90967 (TRAV10, TRAJ34)
CVVSGKHRQAHL

SEQ ID NO: 181934 - protein, 14 aa, Homo sapiens
  CDR3 for beta chain variable domain of TCR clone 90967 (TRBV7-6, TRBJ2-3)
CASSLGTVTDTQYF

SEQ ID NO: 181935 - protein, 11 aa, Homo sapiens
  CDR3 for alpha chain variable domain of TCR clone 90968 (TRAV35, TRAJ30)
CSGPGDDKIIF

SEQ ID NO: 181936 - protein, 14 aa, Homo sapiens
  CDR3 for beta chain variable domain of TCR clone 90968 (TRBV7-6, TRBJ1-6)
CASSQAGGGSPLHF

SEQ ID NO: 181937 - protein, 13 aa, Homo sapiens
  CDR3 for alpha chain variable domain of TCR clone 90969 (TRAV2, TRAJ40)
CAVVTSGTYKYIF

SEQ ID NO: 181938 - protein, 16 aa, Homo sapiens
  CDR3 for beta chain variable domain of TCR clone 90969 (TRBV7-9, TRBJ1-3)
CASSLGAGSSGNTIYC

SEQ ID NO: 181939 - protein, 16 aa, Homo sapiens
  CDR3 for alpha chain variable domain of TCR clone 90970 (TRAV16, TRAJ42)
CALSGLLGGSKGNLIF

SEQ ID NO: 181940 - protein, 15 aa, Homo sapiens
  CDR3 for beta chain variable domain of TCR clone 90970 (TRBV5-1, TRBJ2-1)
CASSPGGLAGNEQFF

SEQ ID NO: 181941 - protein, 12 aa, Homo sapiens
  CDR3 for alpha chain variable domain of TCR clone 90971 (TRAV12-1, TRAJ40)
CVVYSGTYKYIF

SEQ ID NO: 181942 - protein, 18 aa, Homo sapiens
  CDR3 for beta chain variable domain of TCR clone 90971 (TRBV11-2, TRBJ2-3)
CASSLGGGSRGAPNTQYF

SEQ ID NO: 181943 - protein, 11 aa, Homo sapiens
  CDR3 for alpha chain variable domain of TCR clone 90972 (TRAV13-1, TRAJ13)
CASGGYQKVTF

SEQ ID NO: 181944 - protein, 17 aa, Homo sapiens
  CDR3 for beta chain variable domain of TCR clone 90972 (TRBV7-3, TRBJ2-3)
CASSLMKRMRGADTQYF

SEQ ID NO: 181945 - protein, 12 aa, Homo sapiens
  CDR3 for alpha chain variable domain of TCR clone 90973 (TRAV13-1, TRAJ21)
CAAKEGFNKFYF

SEQ ID NO: 181946 - protein, 14 aa, Homo sapiens
  CDR3 for beta chain variable domain of TCR clone 90973 (TRBV7-2, TRBJ2-5)
CASSLSGGGETQYF

SEQ ID NO: 181947 - protein, 15 aa, Homo sapiens
  CDR3 for alpha chain variable domain of TCR clone 90974 (TRAV26-1, TRAJ29)
CIVRVEGSGNTPLVF

SEQ ID NO: 181948 - protein, 15 aa, Homo sapiens
  CDR3 for beta chain variable domain of TCR clone 90974 (TRBV7-9, TRBJ1-6)
CASSSATADNSPLHF

SEQ ID NO: 181949 - protein, 14 aa, Homo sapiens
  CDR3 for alpha chain variable domain of TCR clone 90975 (TRAV12-3, TRAJ10)
SHLPLTGGGNKLTF

SEQ ID NO: 181950 - protein, 15 aa, Homo sapiens
  CDR3 for beta chain variable domain of TCR clone 90975 (TRBV5-1, TRBJ2-1)
CASSPPRAPYNKQFF

SEQ ID NO: 181951 - protein, 14 aa, Homo sapiens
  CDR3 for alpha chain variable domain of TCR clone 90976 (TRAV4, TRAJ43)
CLVGPTYNNNDMRF

SEQ ID NO: 181952 - protein, 21 aa, Homo sapiens
  CDR3 for beta chain variable domain of TCR clone 90976 (TRBV11-1, TRBJ2-1)
CASSARERLRPEGPSYNEQFF

SEQ ID NO: 181953 - protein, 16 aa, Homo sapiens
  CDR3 for alpha chain variable domain of TCR clone 90977 (TRAV12-1, TRAJ12)
CVVNTLLMDSSYKLIF

SEQ ID NO: 181954 - protein, 16 aa, Homo sapiens
  CDR3 for beta chain variable domain of TCR clone 90977 (TRBV13, TRBJ2-2)
CASSPRTGEHTGELFF

SEQ ID NO: 181955 - protein, 14 aa, Homo sapiens
  CDR3 for alpha chain variable domain of TCR clone 90978 (TRAV12-2, TRAJ40)
CAMKIPSGTYKYIF

SEQ ID NO: 181956 - protein, 20 aa, Homo sapiens
  CDR3 for beta chain variable domain of TCR clone 90978 (TRBV28, TRBJ2-1)
CASTPIGRSPGLAGGNEQFF

SEQ ID NO: 181957 - protein, 16 aa, Homo sapiens
  CDR3 for alpha chain variable domain of TCR clone 90979 (TRAV12-3, TRAJ53)
CAMSPGSGGSNYKLTF

SEQ ID NO: 181958 - protein, 14 aa, Homo sapiens
  CDR3 for beta chain variable domain of TCR clone 90979 (TRBV12-4, TRBJ1-3)
CASTLTGAGNTIYF

SEQ ID NO: 181959 - protein, 14 aa, Homo sapiens
  CDR3 for alpha chain variable domain of TCR clone 90980 (TRAV12-1, TRAJ23)
CVVNIPNQGGKLIF

SEQ ID NO: 181960 - protein, 15 aa, Homo sapiens
  CDR3 for beta chain variable domain of TCR clone 90980 (TRBV5-1, TRBJ2-3)
CASSVTSGSTDTQYF

SEQ ID NO: 181961 - protein, 14 aa, Homo sapiens
  CDR3 for alpha chain variable domain of TCR clone 90981 (TRAV8-1, TRAJ34)
CAVNPPYNTDKLIF

SEQ ID NO: 181962 - protein, 16 aa, Homo sapiens
  CDR3 for beta chain variable domain of TCR clone 90981 (TRBV7-2, TRBJ2-6)
CASSLAGRSGANVLTF

SEQ ID NO: 181963 - protein, 14 aa, Homo sapiens
  CDR3 for alpha chain variable domain of TCR clone 90982 (TRAV13-1, TRAJ40)
CAASMTSGTYKYIF

SEQ ID NO: 181964 - protein, 13 aa, Homo sapiens
  CDR3 for beta chain variable domain of TCR clone 90982 (TRBV7-9, TRBJ2-2)
CASSLDPTGELFF

SEQ ID NO: 181965 - protein, 18 aa, Homo sapiens
  CDR3 for alpha chain variable domain of TCR clone 90983 (TRAV21, TRAJ52)
RAVRPSPAGGTSYGKLTF

SEQ ID NO: 181966 - protein, 17 aa, Homo sapiens
  CDR3 for beta chain variable domain of TCR clone 90983 (TRBV14, TRBJ2-3)
CASSQEPSGLSTDTQYF

SEQ ID NO: 181967 - protein, 14 aa, Homo sapiens
  CDR3 for alpha chain variable domain of TCR clone 90984 (TRAV12-1, TRAJ8)
CVVNSNTGFQKLLF

SEQ ID NO: 181968 - protein, 17 aa, Homo sapiens
  CDR3 for beta chain variable domain of TCR clone 90984 (TRBV7-8, TRBJ2-6)
CASSAGTGGAGANVLTF

SEQ ID NO: 181969 - protein, 14 aa, Homo sapiens
  CDR3 for alpha chain variable domain of TCR clone 90985 (TRAV8-3, TRAJ4)
CAVGAAGGYNKLIF

SEQ ID NO: 181970 - protein, 14 aa, Homo sapiens
  CDR3 for beta chain variable domain of TCR clone 90985 (TRBV19, TRBJ2-1)
CASPTFVLSGEQFL

SEQ ID NO: 181971 - protein, 14 aa, Homo sapiens
  CDR3 for alpha chain variable domain of TCR clone 90986 (TRAV8-6, TRAJ12)
CAVKAADSSYKFIF

SEQ ID NO: 181972 - protein, 15 aa, Homo sapiens
  CDR3 for beta chain variable domain of TCR clone 90986 (TRBV5-1, TRBJ2-5)
CASSLGLAEQETQYF

SEQ ID NO: 181973 - protein, 15 aa, Homo sapiens
  CDR3 for alpha chain variable domain of TCR clone 90987 (TRAV8-3, TRAJ41)
CAVGSNSNSGYALNF

SEQ ID NO: 181974 - protein, 17 aa, Homo sapiens
  CDR3 for beta chain variable domain of TCR clone 90987 (TRBV25-1, TRBJ2-1)
CASGAYGQGRGVYEQFF

SEQ ID NO: 181975 - protein, 14 aa, Homo sapiens
  CDR3 for alpha chain variable domain of TCR clone 90988 (TRAV12-2, TRAJ52)
CAVPGGTSYGQLTF

SEQ ID NO: 181976 - protein, 12 aa, Homo sapiens
  CDR3 for beta chain variable domain of TCR clone 90988 (TRBV18, TRBJ2-1)
CASSPGTSEGFF

SEQ ID NO: 181977 - protein, 12 aa, Homo sapiens
  CDR3 for alpha chain variable domain of TCR clone 90989 (TRAV3, TRAJ20)
CAVRDGDYKLSF

SEQ ID NO: 181978 - protein, 13 aa, Homo sapiens
  CDR3 for beta chain variable domain of TCR clone 90989 (TRBV9, TRBJ2-1)
GASSVGQGGEQFF

SEQ ID NO: 181979 - protein, 23 aa, Homo sapiens
  CDR3 for alpha chain variable domain of TCR clone 90990 (TRAV21, TRAJ20)
LQLLSLATQPPTSVLPNDYKLSF

SEQ ID NO: 181980 - protein, 14 aa, Homo sapiens
  CDR3 for beta chain variable domain of TCR clone 90990 (TRBV7-2, TRBJ1-3)
CASSRLRSGNTIYF

SEQ ID NO: 181981 - protein, 16 aa, Homo sapiens
  CDR3 for alpha chain variable domain of TCR clone 90991 (TRAV1-1, TRAJ22)
CAVNDALSGSARQLTF

SEQ ID NO: 181982 - protein, 15 aa, Homo sapiens
  CDR3 for beta chain variable domain of TCR clone 90991 (TRBV5-1, TRBJ2-3)
CASSVTSGSTDTQYF

SEQ ID NO: 181983 - protein, 12 aa, Homo sapiens
  CDR3 for alpha chain variable domain of TCR clone 90992 (TRAV26-1, TRAJ48)
CIVSGGNEKLTF

SEQ ID NO: 181984 - protein, 13 aa, Homo sapiens
  CDR3 for beta chain variable domain of TCR clone 90992 (TRBV18, TRBJ2-7)
CASFRDSASEQYF

SEQ ID NO: 181985 - protein, 15 aa, Homo sapiens
  CDR3 for alpha chain variable domain of TCR clone 90993 (TRAV8-3, TRAJ11)
CAVGLLNSGYSTLTF

SEQ ID NO: 181986 - protein, 16 aa, Homo sapiens
  CDR3 for beta chain variable domain of TCR clone 90993 (TRBV7-9, TRBJ1-2)
CASSLGYSSGEDGYTF

SEQ ID NO: 181987 - protein, 13 aa, Homo sapiens
  CDR3 for alpha chain variable domain of TCR clone 90994 (TRAV39, TRAJ30)
CARWMNRDDKIIF

SEQ ID NO: 181988 - protein, 14 aa, Homo sapiens
  CDR3 for beta chain variable domain of TCR clone 90994 (TRBV6-1, TRBJ2-1)
CASAKDGFYNEQFF

SEQ ID NO: 181989 - protein, 15 aa, Homo sapiens
  CDR3 for alpha chain variable domain of TCR clone 90995 (TRAV8-3, TRAJ45)
CASSYSGGGADGLTF

SEQ ID NO: 181990 - protein, 13 aa, Homo sapiens
  CDR3 for beta chain variable domain of TCR clone 90995 (TRBV10-3, TRBJ2-7)
CASKLAVNYEPYF

SEQ ID NO: 181991 - protein, 11 aa, Homo sapiens
  CDR3 for alpha chain variable domain of TCR clone 90996 (TRAV17, TRAJ31)
CATSNNARLVF

SEQ ID NO: 181992 - protein, 16 aa, Homo sapiens
  CDR3 for beta chain variable domain of TCR clone 90996 (TRBV7-8, TRBJ2-4)
CASSAERTLAKNIQYF

SEQ ID NO: 181993 - protein, 15 aa, Homo sapiens
  CDR3 for alpha chain variable domain of TCR clone 90997 (TRAV26-1, TRAJ44)
CIVRANTGTASKLTF

SEQ ID NO: 181994 - protein, 13 aa, Homo sapiens
  CDR3 for beta chain variable domain of TCR clone 90997 (TRBV7-3, TRBJ1-1)
CASSQDWGAEAFF

SEQ ID NO: 181995 - protein, 16 aa, Homo sapiens
  CDR3 for alpha chain variable domain of TCR clone 90998 (TRAV12-2, TRAJ28)
CAVITDSGAGSYQLTF

SEQ ID NO: 181996 - protein, 13 aa, Homo sapiens
  CDR3 for beta chain variable domain of TCR clone 90998 (TRBV20-1, TRBJ1-1)
CSAPLGGGTEAFF

SEQ ID NO: 181997 - protein, 14 aa, Homo sapiens
  CDR3 for alpha chain variable domain of TCR clone 90999 (TRAV4, TRAJ22)
CLARLSGSARQLTF

SEQ ID NO: 181998 - protein, 15 aa, Homo sapiens
  CDR3 for beta chain variable domain of TCR clone 90999 (TRBV20-1, TRBJ2-7)
CSARDRVSGMDEQYF

SEQ ID NO: 181999 - protein, 13 aa, Homo sapiens
  CDR3 for alpha chain variable domain of TCR clone 91000 (TRAV39, TRAJ58)
CAGEETSGSRLTF

SEQ ID NO: 182000 - protein, 13 aa, Homo sapiens
  CDR3 for beta chain variable domain of TCR clone 91000 (TRBV15, TRBJ2-7)
CATNTTGHYEQYF

SEQ ID NO: 182001 - protein, 14 aa, Homo sapiens
  CDR3 for alpha chain variable domain of TCR clone 91001 (TRAV26-1, TRAJ39)
CIVRGSRAGNMLTF

SEQ ID NO: 182002 - protein, 14 aa, Homo sapiens
  CDR3 for beta chain variable domain of TCR clone 91001 (TRBV19, TRBJ2-5)
CASSMTGQQETQYF

SEQ ID NO: 182003 - protein, 13 aa, Homo sapiens
  CDR3 for alpha chain variable domain of TCR clone 91002 (TRAV8-3, TRAJ48)
CAVVPFGNEKLTF

SEQ ID NO: 182004 - protein, 14 aa, Homo sapiens
  CDR3 for beta chain variable domain of TCR clone 91002 (TRBV7-8, TRBJ2-3)
CASSLEAGTDTQYF

SEQ ID NO: 182005 - protein, 14 aa, Homo sapiens
  CDR3 for alpha chain variable domain of TCR clone 91003 (TRAV27, TRAJ44)
CAASFTGTASKLTF

SEQ ID NO: 182006 - protein, 13 aa, Homo sapiens
  CDR3 for beta chain variable domain of TCR clone 91003 (TRBV27, TRBJ2-3)
CATSRGGLYTHYF

SEQ ID NO: 182007 - protein, 14 aa, Homo sapiens
  CDR3 for alpha chain variable domain of TCR clone 91004 (TRAV12-3, TRAJ10)
SHLPLTGGGNKLTF

SEQ ID NO: 182008 - protein, 14 aa, Homo sapiens
  CDR3 for beta chain variable domain of TCR clone 91004 (TRBV28, TRBJ2-7)
CASSTLRGRFEQYF

SEQ ID NO: 182009 - protein, 14 aa, Homo sapiens
  CDR3 for alpha chain variable domain of TCR clone 91005 (TRAV9-2, TRAJ39)
CALYIYNAGNMLTF

SEQ ID NO: 182010 - protein, 12 aa, Homo sapiens
  CDR3 for beta chain variable domain of TCR clone 91005 (TRBV7-2, TRBJ2-5)
CASSQYQETQYS

SEQ ID NO: 182011 - protein, 12 aa, Homo sapiens
  CDR3 for alpha chain variable domain of TCR clone 91006 (TRAV17, TRAJ4)
CATDGGYNKLIF

SEQ ID NO: 182012 - protein, 17 aa, Homo sapiens
  CDR3 for beta chain variable domain of TCR clone 91006 (TRBV11-2, TRBJ2-1)
CASSLYPPGVEYNEQFF

SEQ ID NO: 182013 - protein, 15 aa, Homo sapiens
  CDR3 for alpha chain variable domain of TCR clone 91007 (TRAV17, TRAJ57)
CATGPSQGGSEKLVF

SEQ ID NO: 182014 - protein, 11 aa, Homo sapiens
  CDR3 for beta chain variable domain of TCR clone 91007 (TRBV6-3, TRBJ2-3)
CATGQADTQYF

SEQ ID NO: 182015 - protein, 12 aa, Homo sapiens
  CDR3 for alpha chain variable domain of TCR clone 91008 (TRAV3, TRAJ31)
CAVRPRGPRLMF

SEQ ID NO: 182016 - protein, 17 aa, Homo sapiens
  CDR3 for beta chain variable domain of TCR clone 91008 (TRBV7-9, TRBJ1-5)
CASSASQGGYSNQAQHF

SEQ ID NO: 182017 - protein, 19 aa, Homo sapiens
  CDR3 for alpha chain variable domain of TCR clone 91009 (TRAV2, TRAJ20)
IPQVREADAAVYRDCKLSF

SEQ ID NO: 182018 - protein, 17 aa, Homo sapiens
  CDR3 for beta chain variable domain of TCR clone 91009 (TRBV20-1, TRBJ2-2)
CSASGSGQGGLTGELFF

SEQ ID NO: 182019 - protein, 13 aa, Homo sapiens
  CDR3 for alpha chain variable domain of TCR clone 91010 (TRAV12-3, TRAJ9)
CAMSADGGFKTIL

SEQ ID NO: 182020 - protein, 13 aa, Homo sapiens
  CDR3 for beta chain variable domain of TCR clone 91010 (TRBV12-5, TRBJ2-3)
CASGDRQSDTQYF

SEQ ID NO: 182021 - protein, 14 aa, Homo sapiens
  CDR3 for alpha chain variable domain of TCR clone 91011 (TRAV13-1, TRAJ44)
CAAKATGTASKLTF

SEQ ID NO: 182022 - protein, 19 aa, Homo sapiens
  CDR3 for beta chain variable domain of TCR clone 91011 (TRBV5-1, TRBJ2-3)
CASSLTRIAADWSTDTQYF

SEQ ID NO: 182023 - protein, 13 aa, Homo sapiens
  CDR3 for alpha chain variable domain of TCR clone 91012 (TRAV21, TRAJ20)
CAVGLRDDYKLSF

SEQ ID NO: 182024 - protein, 13 aa, Homo sapiens
  CDR3 for beta chain variable domain of TCR clone 91012 (TRBV6-1, TRBJ1-1)
CASSRQGNTEAFF

SEQ ID NO: 182025 - protein, 18 aa, Homo sapiens
  CDR3 for alpha chain variable domain of TCR clone 91013 (TRAV21, TRAJ52)
CAVRPSPAGGTSYGKLTF

SEQ ID NO: 182026 - protein, 14 aa, Homo sapiens
  CDR3 for beta chain variable domain of TCR clone 91013 (TRBV5-5, TRBJ2-2)
CASSLLGDTGELFF

SEQ ID NO: 182027 - protein, 15 aa, Homo sapiens
  CDR3 for alpha chain variable domain of TCR clone 91014 (TRAV13-2, TRAJ32)
CAENKDGGATNKLIF

SEQ ID NO: 182028 - protein, 14 aa, Homo sapiens
  CDR3 for beta chain variable domain of TCR clone 91014 (TRBV19, TRBJ2-1)
CASPTFVLSGEQFF

SEQ ID NO: 182029 - protein, 12 aa, Homo sapiens
  CDR3 for alpha chain variable domain of TCR clone 91015 (TRAV27, TRAJ35)
CAGADFGHVLHC

SEQ ID NO: 182030 - protein, 16 aa, Homo sapiens
  CDR3 for beta chain variable domain of TCR clone 91015 (TRBV6-1, TRBJ2-1)
CASISRQGSSYNEQFF

SEQ ID NO: 182031 - protein, 13 aa, Homo sapiens
  CDR3 for alpha chain variable domain of TCR clone 91016 (TRAV27, TRAJ29)
CAGAHSGNTPLVF

SEQ ID NO: 182032 - protein, 14 aa, Homo sapiens
  CDR3 for beta chain variable domain of TCR clone 91016 (TRBV7-9, TRBJ2-7)
CVSSIGQGAGEQYF

SEQ ID NO: 182033 - protein, 12 aa, Homo sapiens
  CDR3 for alpha chain variable domain of TCR clone 91017 (TRAV12-3, TRAJ17)
CAMTLTGKKLTF

SEQ ID NO: 182034 - protein, 17 aa, Homo sapiens
  CDR3 for beta chain variable domain of TCR clone 91017 (TRBV7-3, TRBJ2-3)
CASSLMKRMRGADTQYF

SEQ ID NO: 182035 - protein, 16 aa, Homo sapiens
  CDR3 for alpha chain variable domain of TCR clone 91018 (TRAV3, TRAJ21)
CAVRDIERGNFNKFYF

SEQ ID NO: 182036 - protein, 20 aa, Homo sapiens
  CDR3 for beta chain variable domain of TCR clone 91018 (TRBV4-1, TRBJ2-2)
CARSQASPPGLASNTGELFF

SEQ ID NO: 182037 - protein, 16 aa, Homo sapiens
  CDR3 for alpha chain variable domain of TCR clone 91019 (TRAV30, TRAJ24)
CGTEIVDADSWGKFKI

SEQ ID NO: 182038 - protein, 14 aa, Homo sapiens
  CDR3 for beta chain variable domain of TCR clone 91019 (TRBV12-5, TRBJ2-5)
CASGSRTHQETQYF

SEQ ID NO: 182039 - protein, 15 aa, Homo sapiens
  CDR3 for alpha chain variable domain of TCR clone 91020 (TRAV12-3, TRAJ49)
CAMAVTPNTGNQVYF

SEQ ID NO: 182040 - protein, 14 aa, Homo sapiens
  CDR3 for beta chain variable domain of TCR clone 91020 (TRBV7-8, TRBJ2-3)
CASSLEAGTDTQYF

SEQ ID NO: 182041 - protein, 14 aa, Homo sapiens
  CDR3 for alpha chain variable domain of TCR clone 91021 (TRAV12-2, TRAJ13)
CAVKKTGGYQKVTF

SEQ ID NO: 182042 - protein, 13 aa, Homo sapiens
  CDR3 for beta chain variable domain of TCR clone 91021 (TRBV2, TRBJ1-1)
CARNPTGGFHAFF

SEQ ID NO: 182043 - protein, 23 aa, Homo sapiens
  CDR3 for alpha chain variable domain of TCR clone 91022 (TRAV26-1, TRAJ38)
CIVRPLNAGNNHIKNPDPAVYQL

SEQ ID NO: 182044 - protein, 13 aa, Homo sapiens
  CDR3 for beta chain variable domain of TCR clone 91022 (TRBV18, TRBJ1-1)
CASSPNGDTEAFF

SEQ ID NO: 182045 - protein, 14 aa, Homo sapiens
  CDR3 for alpha chain variable domain of TCR clone 91023 (TRAV1-2, TRAJ29)
CAVRELTSATTLVF

SEQ ID NO: 182046 - protein, 14 aa, Homo sapiens
  CDR3 for beta chain variable domain of TCR clone 91023 (TRBV3-1, TRBJ2-5)
CASSQGPDQETQYF

SEQ ID NO: 182047 - protein, 12 aa, Homo sapiens
  CDR3 for alpha chain variable domain of TCR clone 91024 (TRAV21, TRAJ13)
PVPSGGYQKVTF

SEQ ID NO: 182048 - protein, 15 aa, Homo sapiens
  CDR3 for beta chain variable domain of TCR clone 91024 (TRBV7-9, TRBJ1-6)
CASSSPGRGNSPLHF

SEQ ID NO: 182049 - protein, 11 aa, Homo sapiens
  CDR3 for alpha chain variable domain of TCR clone 91025 (TRAV12-3, TRAJ43)
CAMSVSNDMRF

SEQ ID NO: 182050 - protein, 13 aa, Homo sapiens
  CDR3 for beta chain variable domain of TCR clone 91025 (TRBV20-1, TRBJ1-1)
CSAPLGGGTEACF

SEQ ID NO: 182051 - protein, 15 aa, Homo sapiens
  CDR3 for alpha chain variable domain of TCR clone 91026 (TRAV3, TRAJ22)
CAVRDRGGSARQLTL

SEQ ID NO: 182052 - protein, 15 aa, Homo sapiens
  CDR3 for beta chain variable domain of TCR clone 91026 (TRBV10-3, TRBJ2-3)
CAISLTSGGTDTQYF

SEQ ID NO: 182053 - protein, 23 aa, Homo sapiens
  CDR3 for alpha chain variable domain of TCR clone 91027 (TRAV8-6, TRAJ38)
CAVRNAGNNHIQNPDPAVYQLID

SEQ ID NO: 182054 - protein, 15 aa, Homo sapiens
  CDR3 for beta chain variable domain of TCR clone 91027 (TRBV4-1, TRBJ2-2)
CASSEGQGITGELFF

SEQ ID NO: 182055 - protein, 13 aa, Homo sapiens
  CDR3 for alpha chain variable domain of TCR clone 91028 (TRAV16, TRAJ10)
CAPAREEETNTPL

SEQ ID NO: 182056 - protein, 13 aa, Homo sapiens
  CDR3 for beta chain variable domain of TCR clone 91028 (TRBV7-3, TRBJ1-1)
CASSQDWGAEAFF

SEQ ID NO: 182057 - protein, 12 aa, Homo sapiens
  CDR3 for alpha chain variable domain of TCR clone 91029 (TRAV17, TRAJ12)
CATLRSSYKLIF

SEQ ID NO: 182058 - protein, 14 aa, Homo sapiens
  CDR3 for beta chain variable domain of TCR clone 91029 (TRBV7-2, TRBJ2-7)
CASSPKTSFYEQYF

SEQ ID NO: 182059 - protein, 16 aa, Homo sapiens
  CDR3 for alpha chain variable domain of TCR clone 91030 (TRAV2, TRAJ13)
CAARILGVTRKLPLEL

SEQ ID NO: 182060 - protein, 14 aa, Homo sapiens
  CDR3 for beta chain variable domain of TCR clone 91030 (TRBV19, TRBJ2-1)
CASGVTGARNEQFF

SEQ ID NO: 182061 - protein, 16 aa, Homo sapiens
  CDR3 for alpha chain variable domain of TCR clone 91031 (TRAV3, TRAJ37)
CAVRPHGSVNTGKLIF

SEQ ID NO: 182062 - protein, 17 aa, Homo sapiens
  CDR3 for beta chain variable domain of TCR clone 91031 (TRBV5-1, TRBJ2-5)
CASSPVALGQNQETQYF

SEQ ID NO: 182063 - protein, 13 aa, Homo sapiens
  CDR3 for alpha chain variable domain of TCR clone 91032 (TRAV8-1, TRAJ34)
CAVRPYNTDKLIF

SEQ ID NO: 182064 - protein, 15 aa, Homo sapiens
  CDR3 for beta chain variable domain of TCR clone 91032 (TRBV7-9, TRBJ1-3)
CGSSLRSGSGNTIYF

SEQ ID NO: 182065 - protein, 12 aa, Homo sapiens
  CDR3 for alpha chain variable domain of TCR clone 91033 (TRAV6, TRAJ13)
CALAGGYQKVTF

SEQ ID NO: 182066 - protein, 15 aa, Homo sapiens
  CDR3 for beta chain variable domain of TCR clone 91033 (TRBV19, TRBJ1-1)
CASTSGQIQNTEAFF

SEQ ID NO: 182067 - protein, 16 aa, Homo sapiens
  CDR3 for alpha chain variable domain of TCR clone 91034 (TRAV16, TRAJ52)
CALSAAGGTSYGKLKF

SEQ ID NO: 182068 - protein, 17 aa, Homo sapiens
  CDR3 for beta chain variable domain of TCR clone 91034 (TRBV11-2, TRBJ2-1)
CASSLYPPGVEYNEQFF

SEQ ID NO: 182069 - protein, 15 aa, Homo sapiens
  CDR3 for alpha chain variable domain of TCR clone 91035 (TRAV3, TRAJ27)
CAVRGFTPMQANQPV

SEQ ID NO: 182070 - protein, 12 aa, Homo sapiens
  CDR3 for beta chain variable domain of TCR clone 91035 (TRBV11-2, TRBJ2-2)
CASSLGGGELFF

SEQ ID NO: 182071 - protein, 20 aa, Homo sapiens
  CDR3 for alpha chain variable domain of TCR clone 91036 (TRAV12-1, TRAJ42)
SSVIQPPTSVKGGSQGNLIF

SEQ ID NO: 182072 - protein, 18 aa, Homo sapiens
  CDR3 for beta chain variable domain of TCR clone 91036 (TRBV11-2, TRBJ2-3)
CASSLGGASRGAPNMQYF

SEQ ID NO: 182073 - protein, 14 aa, Homo sapiens
  CDR3 for alpha chain variable domain of TCR clone 91037 (TRAV1-2, TRAJ8)
CAVREDTGFQKLVF

SEQ ID NO: 182074 - protein, 17 aa, Homo sapiens
  CDR3 for beta chain variable domain of TCR clone 91037 (TRBV20-1, TRBJ2-2)
CSASGSGQGGSTGELFF

SEQ ID NO: 182075 - protein, 16 aa, Homo sapiens
  CDR3 for alpha chain variable domain of TCR clone 91038 (TRAV26-1, TRAJ23)
CIVRPAIYNQGGKLIF

SEQ ID NO: 182076 - protein, 17 aa, Homo sapiens
  CDR3 for beta chain variable domain of TCR clone 91038 (TRBV5-1, TRBJ2-5)
CASAVTRQFGNKETQYF

SEQ ID NO: 182077 - protein, 12 aa, Homo sapiens
  CDR3 for alpha chain variable domain of TCR clone 91039 (TRAV12-3, TRAJ34)
CAMGYNTDKLIF

SEQ ID NO: 182078 - protein, 14 aa, Homo sapiens
  CDR3 for beta chain variable domain of TCR clone 91039 (TRBV5-7, TRBJ1-5)
CASSRTGGGQTQHF

SEQ ID NO: 182079 - protein, 16 aa, Homo sapiens
  CDR3 for alpha chain variable domain of TCR clone 91040 (TRAV25, TRAJ24)
CAQRRGTTDSWGKLQF

SEQ ID NO: 182080 - protein, 13 aa, Homo sapiens
  CDR3 for beta chain variable domain of TCR clone 91040 (TRBV19, TRBJ1-2)
CASSVPGQDGYTF

SEQ ID NO: 182081 - protein, 12 aa, Homo sapiens
  CDR3 for alpha chain variable domain of TCR clone 91041 (TRAV1-1, TRAJ8)
CAGGTGFQKLVF

SEQ ID NO: 182082 - protein, 15 aa, Homo sapiens
  CDR3 for beta chain variable domain of TCR clone 91041 (TRBV19, TRBJ1-2)
CASSVGQVLNYGYTF

SEQ ID NO: 182083 - protein, 16 aa, Homo sapiens
  CDR3 for alpha chain variable domain of TCR clone 91042 (TRAV21, TRAJ37)
CAVRTAGSSNTGKLIF

SEQ ID NO: 182084 - protein, 13 aa, Homo sapiens
  CDR3 for beta chain variable domain of TCR clone 91042 (TRBV7-9, TRBJ2-5)
FASLPSGRETQYF

SEQ ID NO: 182085 - protein, 15 aa, Homo sapiens
  CDR3 for alpha chain variable domain of TCR clone 91043 (TRAV2, TRAJ37)
CAVEDGSSNTGKLSL

SEQ ID NO: 182086 - protein, 13 aa, Homo sapiens
  CDR3 for beta chain variable domain of TCR clone 91043 (TRBV20-1, TRBJ1-6)
CSTFREGNSPLHF

SEQ ID NO: 182087 - protein, 12 aa, Homo sapiens
  CDR3 for alpha chain variable domain of TCR clone 91044 (TRAV12-3, TRAJ17)
CAMTLTGNKLTF

SEQ ID NO: 182088 - protein, 15 aa, Homo sapiens
  CDR3 for beta chain variable domain of TCR clone 91044 (TRBV10-2, TRBJ2-6)
CASSEQGTGANGLTF

SEQ ID NO: 182089 - protein, 16 aa, Homo sapiens
  CDR3 for alpha chain variable domain of TCR clone 91045 (TRAV13-1, TRAJ48)
CAASIFGNFGNEKLTF

SEQ ID NO: 182090 - protein, 15 aa, Homo sapiens
  CDR3 for beta chain variable domain of TCR clone 91045 (TRBV19, TRBJ1-1)
CASTSGQIQNTEAFF

SEQ ID NO: 182091 - protein, 14 aa, Homo sapiens
  CDR3 for alpha chain variable domain of TCR clone 91046 (TRAV8-3, TRAJ9)
CAVVYNTGGFKTIF

SEQ ID NO: 182092 - protein, 14 aa, Homo sapiens
  CDR3 for beta chain variable domain of TCR clone 91046 (TRBV28, TRBJ1-2)
CASRIQGANYGYTF

SEQ ID NO: 182093 - protein, 13 aa, Homo sapiens
  CDR3 for alpha chain variable domain of TCR clone 91047 (TRAV2, TRAJ40)
CAVVTSGTYKYIF

SEQ ID NO: 182094 - protein, 13 aa, Homo sapiens
  CDR3 for beta chain variable domain of TCR clone 91047 (TRBV2, TRBJ1-1)
CASSVSGYTEAFF

SEQ ID NO: 182095 - protein, 12 aa, Homo sapiens
  CDR3 for alpha chain variable domain of TCR clone 91048 (TRAV1-2, TRAJ20)
CAVRRLLYKLSF

SEQ ID NO: 182096 - protein, 12 aa, Homo sapiens
  CDR3 for beta chain variable domain of TCR clone 91048 (TRBV7-8, TRBJ2-5)
CASSPRVENQYF

SEQ ID NO: 182097 - protein, 14 aa, Homo sapiens
  CDR3 for alpha chain variable domain of TCR clone 91049 (TRAV1-2, TRAJ6)
CAVSLSGGSYIPTS

SEQ ID NO: 182098 - protein, 15 aa, Homo sapiens
  CDR3 for beta chain variable domain of TCR clone 91049 (TRBV28, TRBJ2-7)
CASSPGGRGFYEQYF

SEQ ID NO: 182099 - protein, 16 aa, Homo sapiens
  CDR3 for alpha chain variable domain of TCR clone 91050 (TRAV20, TRAJ22)
CAVQASSSGSARQLTF

SEQ ID NO: 182100 - protein, 15 aa, Homo sapiens
  CDR3 for beta chain variable domain of TCR clone 91050 (TRBV7-9, TRBJ1-6)
CASSSPGRGNSPLHF

SEQ ID NO: 182101 - protein, 14 aa, Homo sapiens
  CDR3 for alpha chain variable domain of TCR clone 91051 (TRAV21, TRAJ28)
CAVGSGAGSYKLTF

SEQ ID NO: 182102 - protein, 14 aa, Homo sapiens
  CDR3 for beta chain variable domain of TCR clone 91051 (TRBV18, TRBJ1-4)
CASSPGPNGEKLFF

SEQ ID NO: 182103 - protein, 15 aa, Homo sapiens
  CDR3 for alpha chain variable domain of TCR clone 91052 (TRAV20, TRAJ58)
CAVQDLETSGSRLTV

SEQ ID NO: 182104 - protein, 13 aa, Homo sapiens
  CDR3 for beta chain variable domain of TCR clone 91052 (TRBV20-1, TRBJ1-1)
CSARGGGNTEAFF

SEQ ID NO: 182105 - protein, 15 aa, Homo sapiens
  CDR3 for alpha chain variable domain of TCR clone 91053 (TRAV12-3, TRAJ6)
CAMSATSGGSYVPTF

SEQ ID NO: 182106 - protein, 13 aa, Homo sapiens
  CDR3 for beta chain variable domain of TCR clone 91053 (TRBV7-9, TRBJ1-2)
CASSLKQNYGYTF

SEQ ID NO: 182107 - protein, 14 aa, Homo sapiens
  CDR3 for alpha chain variable domain of TCR clone 91054 (TRAV2, TRAJ9)
CAVEDRGGGFKTIF

SEQ ID NO: 182108 - protein, 15 aa, Homo sapiens
  CDR3 for beta chain variable domain of TCR clone 91054 (TRBV28, TRBJ1-3)
CASSMGWASGNTIYF

SEQ ID NO: 182109 - protein, 13 aa, Homo sapiens
  CDR3 for alpha chain variable domain of TCR clone 91055 (TRAV17, TRAJ13)
CATDSGGYQKVTF

SEQ ID NO: 182110 - protein, 14 aa, Homo sapiens
  CDR3 for beta chain variable domain of TCR clone 91055 (TRBV6-1, TRBJ1-1)
CASTPLQINTEAFF

SEQ ID NO: 182111 - protein, 11 aa, Homo sapiens
  CDR3 for alpha chain variable domain of TCR clone 91056 (TRAV1-2, TRAJ20)
CAVSNDYKLSF

SEQ ID NO: 182112 - protein, 16 aa, Homo sapiens
  CDR3 for beta chain variable domain of TCR clone 91056 (TRBV29-1, TRBJ2-6)
SSVEDITYSGANVLTF

SEQ ID NO: 182113 - protein, 18 aa, Homo sapiens
  CDR3 for alpha chain variable domain of TCR clone 91057 (TRAV21, TRAJ52)
CAVRPSPAGGTSYGKLTF

SEQ ID NO: 182114 - protein, 17 aa, Homo sapiens
  CDR3 for beta chain variable domain of TCR clone 91057 (TRBV13, TRBJ2-3)
CASSIARVAGGRNTQYF

SEQ ID NO: 182115 - protein, 14 aa, Homo sapiens
  CDR3 for alpha chain variable domain of TCR clone 91058 (TRAV17, TRAJ57)
CATDPQGGSERLVF

SEQ ID NO: 182116 - protein, 14 aa, Homo sapiens
  CDR3 for beta chain variable domain of TCR clone 91058 (TRBV7-2, TRBJ2-7)
CASSPKTSFYEQYF

SEQ ID NO: 182117 - protein, 15 aa, Homo sapiens
  CDR3 for alpha chain variable domain of TCR clone 91059 (TRAV8-6, TRAJ6)
CAVRPPSGGSYIPTF

SEQ ID NO: 182118 - protein, 20 aa, Homo sapiens
  CDR3 for beta chain variable domain of TCR clone 91059 (TRBV7-3, TRBJ2-3)
CISVPAAPPLGTRVTDTQYF

SEQ ID NO: 182119 - protein, 16 aa, Homo sapiens
  CDR3 for alpha chain variable domain of TCR clone 91060 (TRAV14/DV4, TRAJ53)
CAMREGGGGSNYKLTF

SEQ ID NO: 182120 - protein, 13 aa, Homo sapiens
  CDR3 for beta chain variable domain of TCR clone 91060 (TRBV29-1, TRBJ1-1)
CSVGDSRNTEAFF

SEQ ID NO: 182121 - protein, 16 aa, Homo sapiens
  CDR3 for alpha chain variable domain of TCR clone 91061 (TRAV20, TRAJ28)
CAVRDPSGAGSYQLTF

SEQ ID NO: 182122 - protein, 16 aa, Homo sapiens
  CDR3 for beta chain variable domain of TCR clone 91061 (TRBV4-2, TRBJ2-1)
CASSQETATPYNEQFF

SEQ ID NO: 182123 - protein, 14 aa, Homo sapiens
  CDR3 for alpha chain variable domain of TCR clone 91062 (TRAV26-1, TRAJ38)
CIADNAGNNRKLIW

SEQ ID NO: 182124 - protein, 14 aa, Homo sapiens
  CDR3 for beta chain variable domain of TCR clone 91062 (TRBV23-1, TRBJ2-5)
CASSFLRSQETQYF

SEQ ID NO: 182125 - protein, 12 aa, Homo sapiens
  CDR3 for alpha chain variable domain of TCR clone 91063 (TRAV12-3, TRAJ17)
CAMTLTGNKLTF

SEQ ID NO: 182126 - protein, 13 aa, Homo sapiens
  CDR3 for beta chain variable domain of TCR clone 91063 (TRBV12-4, TRBJ1-2)
CASRTDGNYGYTF

SEQ ID NO: 182127 - protein, 13 aa, Homo sapiens
  CDR3 for alpha chain variable domain of TCR clone 91064 (TRAV21, TRAJ57)
CAVTQGGSEKLVF

SEQ ID NO: 182128 - protein, 12 aa, Homo sapiens
  CDR3 for beta chain variable domain of TCR clone 91064 (TRBV12-4, TRBJ2-7)
CASSLGGYEQYF

SEQ ID NO: 182129 - protein, 14 aa, Homo sapiens
  CDR3 for alpha chain variable domain of TCR clone 91065 (TRAV23/DV6, TRAJ13)
CAAMYSGGYHKVTF

SEQ ID NO: 182130 - protein, 14 aa, Homo sapiens
  CDR3 for beta chain variable domain of TCR clone 91065 (TRBV7-9, TRBJ2-1)
CASSPRDSLYEQFF

SEQ ID NO: 182131 - protein, 12 aa, Homo sapiens
  CDR3 for alpha chain variable domain of TCR clone 91066 (TRAV21, TRAJ29)
CCEDSGNTPLVF

SEQ ID NO: 182132 - protein, 15 aa, Homo sapiens
  CDR3 for beta chain variable domain of TCR clone 91066 (TRBV29-1, TRBJ2-1)
CSVEAPRGSPNEQFF

SEQ ID NO: 182133 - protein, 14 aa, Homo sapiens
  CDR3 for alpha chain variable domain of TCR clone 91067 (TRAV12-2, TRAJ17)
CAVLFKAAGNKLTF

SEQ ID NO: 182134 - protein, 16 aa, Homo sapiens
  CDR3 for beta chain variable domain of TCR clone 91067 (TRBV5-4, TRBJ2-3)
CASQQPGAGGADTQYF

SEQ ID NO: 182135 - protein, 13 aa, Homo sapiens
  CDR3 for alpha chain variable domain of TCR clone 91068 (TRAV2, TRAJ40)
CAVVTSGTYKYIF

SEQ ID NO: 182136 - protein, 17 aa, Homo sapiens
  CDR3 for beta chain variable domain of TCR clone 91068 (TRBV11-2, TRBJ2-1)
CASSLCPPGVEYNEQFF

SEQ ID NO: 182137 - protein, 12 aa, Homo sapiens
  CDR3 for alpha chain variable domain of TCR clone 91069 (TRAV13-2, TRAJ8)
CAPWLGFQKLVF

SEQ ID NO: 182138 - protein, 18 aa, Homo sapiens
  CDR3 for beta chain variable domain of TCR clone 91069 (TRBV7-6, TRBJ2-1)
CASSPRTSGMSSYNEQFF

SEQ ID NO: 182139 - protein, 13 aa, Homo sapiens
  CDR3 for alpha chain variable domain of TCR clone 91070 (TRAV12-2, TRAJ18)
CAVRGSTLGRLYF

SEQ ID NO: 182140 - protein, 16 aa, Homo sapiens
  CDR3 for beta chain variable domain of TCR clone 91070 (TRBV12-5, TRBJ2-5)
CASGPRTSGNQETQYF

SEQ ID NO: 182141 - protein, 15 aa, Homo sapiens
  CDR3 for alpha chain variable domain of TCR clone 91071 (TRAV8-3, TRAJ45)
CASSYSGGGADGLTF

SEQ ID NO: 182142 - protein, 17 aa, Homo sapiens
  CDR3 for beta chain variable domain of TCR clone 91071 (TRBV28, TRBJ2-5)
CASSRQGGLAGAETQYF

SEQ ID NO: 182143 - protein, 15 aa, Homo sapiens
  CDR3 for alpha chain variable domain of TCR clone 91072 (TRAV3, TRAJ22)
CAVRDRGGSARQLTF

SEQ ID NO: 182144 - protein, 12 aa, Homo sapiens
  CDR3 for beta chain variable domain of TCR clone 91072 (TRBV19, TRBJ2-1)
CASSRQGAEQFF

SEQ ID NO: 182145 - protein, 10 aa, Homo sapiens
  CDR3 for alpha chain variable domain of TCR clone 91073 (TRAV1-2, TRAJ20)
CVPNDYKLSF

SEQ ID NO: 182146 - protein, 17 aa, Homo sapiens
  CDR3 for beta chain variable domain of TCR clone 91073 (TRBV28, TRBJ2-1)
CASSSARQALTYNEQFF

SEQ ID NO: 182147 - protein, 16 aa, Homo sapiens
  CDR3 for alpha chain variable domain of TCR clone 91074 (TRAV16, TRAJ52)
CALSGVGGTSYGKLTF

SEQ ID NO: 182148 - protein, 14 aa, Homo sapiens
  CDR3 for beta chain variable domain of TCR clone 91074 (TRBV19, TRBJ1-2)
CASSLRGQAYGYTF

SEQ ID NO: 182149 - protein, 13 aa, Homo sapiens
  CDR3 for alpha chain variable domain of TCR clone 91075 (TRAV8-6, TRAJ34)
CAVSDQGTDKLIF

SEQ ID NO: 182150 - protein, 11 aa, Homo sapiens
  CDR3 for beta chain variable domain of TCR clone 91075 (TRBV29-1, TRBJ2-5)
CSEDRTGTQYF

SEQ ID NO: 182151 - protein, 11 aa, Homo sapiens
  CDR3 for alpha chain variable domain of TCR clone 91076 (TRAV12-1, TRAJ43)
CVEYDNNDMRF

SEQ ID NO: 182152 - protein, 15 aa, Homo sapiens
  CDR3 for beta chain variable domain of TCR clone 91076 (TRBV18, TRBJ2-5)
CASSPRASEAGTQYF

SEQ ID NO: 182153 - protein, 18 aa, Homo sapiens
  CDR3 for alpha chain variable domain of TCR clone 91077 (TRAV13-1, TRAJ52)
CAASKRSAGGTSYGKLTF

SEQ ID NO: 182154 - protein, 12 aa, Homo sapiens
  CDR3 for beta chain variable domain of TCR clone 91077 (TRBV12-4, TRBJ1-2)
CQQFTTGKGYTF

SEQ ID NO: 182155 - protein, 11 aa, Homo sapiens
  CDR3 for alpha chain variable domain of TCR clone 91078 (TRAV2, TRAJ21)
CAVFNFNKFYF

SEQ ID NO: 182156 - protein, 14 aa, Homo sapiens
  CDR3 for beta chain variable domain of TCR clone 91078 (TRBV15, TRBJ2-3)
CAARSGTSTDTQYF

SEQ ID NO: 182157 - protein, 13 aa, Homo sapiens
  CDR3 for alpha chain variable domain of TCR clone 91079 (TRAV8-3, TRAJ6)
CAVGSGGSYIPTF

SEQ ID NO: 182158 - protein, 14 aa, Homo sapiens
  CDR3 for beta chain variable domain of TCR clone 91079 (TRBV11-2, TRBJ1-1)
CASSTQRGRTEALF

SEQ ID NO: 182159 - protein, 12 aa, Homo sapiens
  CDR3 for alpha chain variable domain of TCR clone 91080 (TRAV21, TRAJ20)
CAVRGNDYKLSF

SEQ ID NO: 182160 - protein, 14 aa, Homo sapiens
  CDR3 for beta chain variable domain of TCR clone 91080 (TRBV7-8, TRBJ2-7)
CASSQTQGAYEQYF

SEQ ID NO: 182161 - protein, 13 aa, Homo sapiens
  CDR3 for alpha chain variable domain of TCR clone 91081 (TRAV12-1, TRAJ49)
CVVILNTGNQFYF

SEQ ID NO: 182162 - protein, 13 aa, Homo sapiens
  CDR3 for beta chain variable domain of TCR clone 91081 (TRBV10-3, TRBJ2-7)
CASKLAVNYEQYL

SEQ ID NO: 182163 - protein, 15 aa, Homo sapiens
  CDR3 for alpha chain variable domain of TCR clone 91082 (TRAV13-1, TRAJ17)
CAASIERAAGNKLTF

SEQ ID NO: 182164 - protein, 17 aa, Homo sapiens
  CDR3 for beta chain variable domain of TCR clone 91082 (TRBV7-8, TRBJ2-6)
CASSAGTGGAGANVLTF

SEQ ID NO: 182165 - protein, 13 aa, Homo sapiens
  CDR3 for alpha chain variable domain of TCR clone 91083 (TRAV23/DV6, TRAJ12)
CAPRVDSSYKLIF

SEQ ID NO: 182166 - protein, 12 aa, Homo sapiens
  CDR3 for beta chain variable domain of TCR clone 91083 (TRBV7-6, TRBJ2-5)
CASSLSQETQYC

SEQ ID NO: 182167 - protein, 12 aa, Homo sapiens
  CDR3 for alpha chain variable domain of TCR clone 91084 (TRAV13-1, TRAJ21)
CAAKEGFNKFYF

SEQ ID NO: 182168 - protein, 12 aa, Homo sapiens
  CDR3 for beta chain variable domain of TCR clone 91084 (TRBV7-3, TRBJ2-1)
CASSFQSGPQFF

SEQ ID NO: 182169 - protein, 16 aa, Homo sapiens
  CDR3 for alpha chain variable domain of TCR clone 91085 (TRAV3, TRAJ10)
CAVRDMRAGGGNKLTF

SEQ ID NO: 182170 - protein, 13 aa, Homo sapiens
  CDR3 for beta chain variable domain of TCR clone 91085 (TRBV6-1, TRBJ1-1)
CASSRQGNTEAFC

SEQ ID NO: 182171 - protein, 15 aa, Homo sapiens
  CDR3 for alpha chain variable domain of TCR clone 91086 (TRAV21, TRAJ24)
CAARSSTDSWGKLQF

SEQ ID NO: 182172 - protein, 16 aa, Homo sapiens
  CDR3 for beta chain variable domain of TCR clone 91086 (TRBV4-3, TRBJ2-2)
CASSHLQGSGTGELFF

SEQ ID NO: 182173 - protein, 13 aa, Homo sapiens
  CDR3 for alpha chain variable domain of TCR clone 91087 (TRAV8-6, TRAJ49)
CAVITNTGNQFYF

SEQ ID NO: 182174 - protein, 14 aa, Homo sapiens
  CDR3 for beta chain variable domain of TCR clone 91087 (TRBV12-4, TRBJ1-1)
CASSLGTGGTEAFF

SEQ ID NO: 182175 - protein, 14 aa, Homo sapiens
  CDR3 for alpha chain variable domain of TCR clone 91088 (TRAV8-4, TRAJ48)
CAVSVTFGNEKLTF

SEQ ID NO: 182176 - protein, 19 aa, Homo sapiens
  CDR3 for beta chain variable domain of TCR clone 91088 (TRBV7-2, TRBJ2-3)
CASSFLSRNWGGGTDTQYF

SEQ ID NO: 182177 - protein, 16 aa, Homo sapiens
  CDR3 for alpha chain variable domain of TCR clone 91089 (TRAV8-3, TRAJ10)
CAVGPILTGGGNKLTS

SEQ ID NO: 182178 - protein, 16 aa, Homo sapiens
  CDR3 for beta chain variable domain of TCR clone 91089 (TRBV7-2, TRBJ2-5)
CASSSKWLSGQETQYF

SEQ ID NO: 182179 - protein, 17 aa, Homo sapiens
  CDR3 for alpha chain variable domain of TCR clone 91090 (TRAV3, TRAJ7)
CAVRDMSLLEGTTDSLL

SEQ ID NO: 182180 - protein, 17 aa, Homo sapiens
  CDR3 for beta chain variable domain of TCR clone 91090 (TRBV15, TRBJ1-2)
CATSGREIDVVNYGYTF

SEQ ID NO: 182181 - protein, 10 aa, Homo sapiens
  CDR3 for alpha chain variable domain of TCR clone 91091 (TRAV12-3, TRAJ49)
CAMIDDQFYF

SEQ ID NO: 182182 - protein, 13 aa, Homo sapiens
  CDR3 for beta chain variable domain of TCR clone 91091 (TRBV12-4, TRBJ1-1)
CASSPGTGFEAFF

SEQ ID NO: 182183 - protein, 12 aa, Homo sapiens
  CDR3 for alpha chain variable domain of TCR clone 91092 (TRAV12-1, TRAJ21)
CAVRYNFNKFYF

SEQ ID NO: 182184 - protein, 14 aa, Homo sapiens
  CDR3 for beta chain variable domain of TCR clone 91092 (TRBV28, TRBJ2-1)
CASSYYTAYNEQFF

SEQ ID NO: 182185 - protein, 14 aa, Homo sapiens
  CDR3 for alpha chain variable domain of TCR clone 91093 (TRAV17, TRAJ12)
CAILPMDSSYKLIF

SEQ ID NO: 182186 - protein, 14 aa, Homo sapiens
  CDR3 for beta chain variable domain of TCR clone 91093 (TRBV7-2, TRBJ2-7)
CASSPKTSFYEQYF

SEQ ID NO: 182187 - protein, 14 aa, Homo sapiens
  CDR3 for alpha chain variable domain of TCR clone 91094 (TRAV12-2, TRAJ17)
CAVLFKAAGNKLTF

SEQ ID NO: 182188 - protein, 12 aa, Homo sapiens
  CDR3 for beta chain variable domain of TCR clone 91094 (TRBV7-9, TRBJ2-7)
CASSIKREEQYF

SEQ ID NO: 182189 - protein, 15 aa, Homo sapiens
  CDR3 for alpha chain variable domain of TCR clone 91095 (TRAV12-1, TRAJ53)
CVVNRSGGSNYKLTF

SEQ ID NO: 182190 - protein, 13 aa, Homo sapiens
  CDR3 for beta chain variable domain of TCR clone 91095 (TRBV12-4, TRBJ1-1)
CASSPGTGFEAFF

SEQ ID NO: 182191 - protein, 13 aa, Homo sapiens
  CDR3 for alpha chain variable domain of TCR clone 91096 (TRAV3, TRAJ21)
CAVREPNFNKFYF

SEQ ID NO: 182192 - protein, 18 aa, Homo sapiens
  CDR3 for beta chain variable domain of TCR clone 91096 (TRBV11-2, TRBJ2-3)
CASSLGGASRGAPNTQYF

SEQ ID NO: 182193 - protein, 17 aa, Homo sapiens
  CDR3 for alpha chain variable domain of TCR clone 91097 (TRAV13-1, TRAJ28)
YAASPPYSGAGSYQLTF

SEQ ID NO: 182194 - protein, 12 aa, Homo sapiens
  CDR3 for beta chain variable domain of TCR clone 91097 (TRBV11-2, TRBJ2-2)
CASSLPTGELFF

SEQ ID NO: 182195 - protein, 13 aa, Homo sapiens
  CDR3 for alpha chain variable domain of TCR clone 91098 (TRAV39, TRAJ58)
CASEETSGSRLTF

SEQ ID NO: 182196 - protein, 13 aa, Homo sapiens
  CDR3 for beta chain variable domain of TCR clone 91098 (TRBV15, TRBJ2-7)
CATSTTGHYEQYF

SEQ ID NO: 182197 - protein, 13 aa, Homo sapiens
  CDR3 for alpha chain variable domain of TCR clone 91099 (TRAV2, TRAJ15)
CAVASQAGTALIF

SEQ ID NO: 182198 - protein, 16 aa, Homo sapiens
  CDR3 for beta chain variable domain of TCR clone 91099 (TRBV18, TRBJ1-5)
CASSPYRVEGNQPQHL

SEQ ID NO: 182199 - protein, 13 aa, Homo sapiens
  CDR3 for alpha chain variable domain of TCR clone 91100 (TRAV8-3, TRAJ28)
CAVGAVGSYQLTF

SEQ ID NO: 182200 - protein, 14 aa, Homo sapiens
  CDR3 for beta chain variable domain of TCR clone 91100 (TRBV11-2, TRBJ2-3)
CASSRLARTDTQYF

SEQ ID NO: 182201 - protein, 15 aa, Homo sapiens
  CDR3 for alpha chain variable domain of TCR clone 91101 (TRAV8-3, TRAJ45)
CASSYSGGGADGPTF

SEQ ID NO: 182202 - protein, 13 aa, Homo sapiens
  CDR3 for beta chain variable domain of TCR clone 91101 (TRBV10-3, TRBJ2-7)
CASKLAVSYEQYF

SEQ ID NO: 182203 - protein, 16 aa, Homo sapiens
  CDR3 for alpha chain variable domain of TCR clone 91102 (TRAV27, TRAJ13)
CAGAKSASGGYQKVTF

SEQ ID NO: 182204 - protein, 15 aa, Homo sapiens
  CDR3 for beta chain variable domain of TCR clone 91102 (TRBV29-1, TRBJ2-1)
CSVGRHALFYNEQFF

SEQ ID NO: 182205 - protein, 16 aa, Homo sapiens
  CDR3 for alpha chain variable domain of TCR clone 91103 (TRAV26-1, TRAJ37)
CIYAGHGSSNTGKLIF

SEQ ID NO: 182206 - protein, 16 aa, Homo sapiens
  CDR3 for beta chain variable domain of TCR clone 91103 (TRBV19, TRBJ2-4)
CATGGLAGGTKNIQYF

SEQ ID NO: 182207 - protein, 15 aa, Homo sapiens
  CDR3 for alpha chain variable domain of TCR clone 91104 (TRAV25, TRAJ41)
CAGPWNSNSGYALNL

SEQ ID NO: 182208 - protein, 13 aa, Homo sapiens
  CDR3 for beta chain variable domain of TCR clone 91104 (TRBV15, TRBJ1-1)
CATSRGIQARAFF

SEQ ID NO: 182209 - protein, 15 aa, Homo sapiens
  CDR3 for alpha chain variable domain of TCR clone 91105 (TRAV4, TRAJ39)
CLVGPNNNAGNMLTF

SEQ ID NO: 182210 - protein, 14 aa, Homo sapiens
  CDR3 for beta chain variable domain of TCR clone 91105 (TRBV5-1, TRBJ2-7)
CASSRGESLYEQYF

SEQ ID NO: 182211 - protein, 14 aa, Homo sapiens
  CDR3 for alpha chain variable domain of TCR clone 91106 (TRAV1-2, TRAJ8)
CAVREDTGFQKLVF

SEQ ID NO: 182212 - protein, 15 aa, Homo sapiens
  CDR3 for beta chain variable domain of TCR clone 91106 (TRBV7-2, TRBJ2-3)
CASSLVVRDPDTQYF

SEQ ID NO: 182213 - protein, 16 aa, Homo sapiens
  CDR3 for alpha chain variable domain of TCR clone 91107 (TRAV12-3, TRAJ10)
CAMKKGLTGGGNKLTF

SEQ ID NO: 182214 - protein, 17 aa, Homo sapiens
  CDR3 for beta chain variable domain of TCR clone 91107 (TRBV20-1, TRBJ2-1)
CSASSSGLAGSYNEQFF

SEQ ID NO: 182215 - protein, 12 aa, Homo sapiens
  CDR3 for alpha chain variable domain of TCR clone 91108 (TRAV17, TRAJ29)
CATPHQETHLLS

SEQ ID NO: 182216 - protein, 13 aa, Homo sapiens
  CDR3 for beta chain variable domain of TCR clone 91108 (TRBV14, TRBJ2-7)
CASSQDRRYEQYF

SEQ ID NO: 182217 - protein, 14 aa, Homo sapiens
  CDR3 for alpha chain variable domain of TCR clone 91109 (TRAV13-2, TRAJ43)
CAEIPTYNNNDMRF

SEQ ID NO: 182218 - protein, 15 aa, Homo sapiens
  CDR3 for beta chain variable domain of TCR clone 91109 (TRBV7-9, TRBJ2-2)
CASGPLDTFSGELFF

SEQ ID NO: 182219 - protein, 13 aa, Homo sapiens
  CDR3 for alpha chain variable domain of TCR clone 91110 (TRAV29/DV5, TRAJ31)
CAASRNNNARLMF

SEQ ID NO: 182220 - protein, 15 aa, Homo sapiens
  CDR3 for beta chain variable domain of TCR clone 91110 (TRBV6-6, TRBJ2-5)
CASSPGGGLEETQYF

SEQ ID NO: 182221 - protein, 12 aa, Homo sapiens
  CDR3 for alpha chain variable domain of TCR clone 91111 (TRAV21, TRAJ31)
CAVSPARGRHMF

SEQ ID NO: 182222 - protein, 14 aa, Homo sapiens
  CDR3 for beta chain variable domain of TCR clone 91111 (TRBV28, TRBJ2-7)
CASSLLRISYEQYF

SEQ ID NO: 182223 - protein, 15 aa, Homo sapiens
  CDR3 for alpha chain variable domain of TCR clone 91112 (TRAV26-1, TRAJ28)
CIFRVAGAGSYQLTF

SEQ ID NO: 182224 - protein, 19 aa, Homo sapiens
  CDR3 for beta chain variable domain of TCR clone 91112 (TRBV7-3, TRBJ2-7)
CASSLTGVAGGWPSYEQYF

SEQ ID NO: 182225 - protein, 17 aa, Homo sapiens
  CDR3 for alpha chain variable domain of TCR clone 91113 (TRAV8-6, TRAJ58)
CAVSSWVGETSGCRLTF

SEQ ID NO: 182226 - protein, 14 aa, Homo sapiens
  CDR3 for beta chain variable domain of TCR clone 91113 (TRBV4-2, TRBJ2-1)
CASGLDRAYNEQFF

SEQ ID NO: 182227 - protein, 15 aa, Homo sapiens
  CDR3 for alpha chain variable domain of TCR clone 91114 (TRAV3, TRAJ5)
CAVRDLDTGRRALTF

SEQ ID NO: 182228 - protein, 15 aa, Homo sapiens
  CDR3 for beta chain variable domain of TCR clone 91114 (TRBV7-8, TRBJ2-1)
CASSLADSLYNEQFF

SEQ ID NO: 182229 - protein, 11 aa, Homo sapiens
  CDR3 for alpha chain variable domain of TCR clone 91115 (TRAV21, TRAJ34)
CAVTNTDKLIF

SEQ ID NO: 182230 - protein, 15 aa, Homo sapiens
  CDR3 for beta chain variable domain of TCR clone 91115 (TRBV7-3, TRBJ2-3)
CASSLGLTLGGTQYF

SEQ ID NO: 182231 - protein, 15 aa, Homo sapiens
  CDR3 for alpha chain variable domain of TCR clone 91116 (TRAV38-1, TRAJ57)
CAFMKLQGGSEKLVF

SEQ ID NO: 182232 - protein, 14 aa, Homo sapiens
  CDR3 for beta chain variable domain of TCR clone 91116 (TRBV19, TRBJ2-1)
CASPTFVLSGEQFF

SEQ ID NO: 182233 - protein, 14 aa, Homo sapiens
  CDR3 for alpha chain variable domain of TCR clone 91117 (TRAV12-2, TRAJ11)
YAVRKNSGYSTLTF

SEQ ID NO: 182234 - protein, 14 aa, Homo sapiens
  CDR3 for beta chain variable domain of TCR clone 91117 (TRBV7-2, TRBJ2-5)
CASWQERFRETQYF

SEQ ID NO: 182235 - protein, 15 aa, Homo sapiens
  CDR3 for alpha chain variable domain of TCR clone 91118 (TRAV13-1, TRAJ10)
CAATILTGGGNKLTF

SEQ ID NO: 182236 - protein, 15 aa, Homo sapiens
  CDR3 for beta chain variable domain of TCR clone 91118 (TRBV2, TRBJ2-7)
CASALLGSGATEQYF

SEQ ID NO: 182237 - protein, 12 aa, Homo sapiens
  CDR3 for alpha chain variable domain of TCR clone 91119 (TRAV8-3, TRAJ41)
CAVDLSGYALNF

SEQ ID NO: 182238 - protein, 18 aa, Homo sapiens
  CDR3 for beta chain variable domain of TCR clone 91119 (TRBV20-1, TRBJ2-6)
CSAETTPTHGSGANVLTF

SEQ ID NO: 182239 - protein, 13 aa, Homo sapiens
  CDR3 for alpha chain variable domain of TCR clone 91120 (TRAV1-2, TRAJ36)
CAVDQTGANNLFF

SEQ ID NO: 182240 - protein, 14 aa, Homo sapiens
  CDR3 for beta chain variable domain of TCR clone 91120 (TRBV20-1, TRBJ2-5)
CSAREMTKQEAQYF

SEQ ID NO: 182241 - protein, 12 aa, Homo sapiens
  CDR3 for alpha chain variable domain of TCR clone 91121 (TRAV16, TRAJ10)
CSRTEGGNKLTF

SEQ ID NO: 182242 - protein, 15 aa, Homo sapiens
  CDR3 for beta chain variable domain of TCR clone 91121 (TRBV6-3, TRBJ2-7)
CASSSPGTVFYEQYF

SEQ ID NO: 182243 - protein, 16 aa, Homo sapiens
  CDR3 for alpha chain variable domain of TCR clone 91122 (TRAV8-3, TRAJ10)
CAVGPILTGGGNKLTF

SEQ ID NO: 182244 - protein, 18 aa, Homo sapiens
  CDR3 for beta chain variable domain of TCR clone 91122 (TRBV11-2, TRBJ2-3)
CASSLGGASRGAPNTQYF

SEQ ID NO: 182245 - protein, 14 aa, Homo sapiens
  CDR3 for alpha chain variable domain of TCR clone 91123 (TRAV12-2, TRAJ40)
CAVKIPSGTYKYIF

SEQ ID NO: 182246 - protein, 16 aa, Homo sapiens
  CDR3 for beta chain variable domain of TCR clone 91123 (TRBV20-1, TRBJ1-1)
CSAQTRIGGTEASLDK

SEQ ID NO: 182247 - protein, 17 aa, Homo sapiens
  CDR3 for alpha chain variable domain of TCR clone 91124 (TRAV26-1, TRAJ58)
CIVRVGAEETSGSRLTF

SEQ ID NO: 182248 - protein, 13 aa, Homo sapiens
  CDR3 for beta chain variable domain of TCR clone 91124 (TRBV19, TRBJ1-2)
CASSQGQVYGYTF

SEQ ID NO: 182249 - protein, 13 aa, Homo sapiens
  CDR3 for alpha chain variable domain of TCR clone 91125 (TRAV3, TRAJ36)
CAVRDTGANNLLF

SEQ ID NO: 182250 - protein, 15 aa, Homo sapiens
  CDR3 for beta chain variable domain of TCR clone 91125 (TRBV24-1, TRBJ2-1)
CATSGSGGFYNEQFF

SEQ ID NO: 182251 - protein, 14 aa, Homo sapiens
  CDR3 for alpha chain variable domain of TCR clone 91126 (TRAV9-2, TRAJ8)
CATTPNTGFQKLVF

SEQ ID NO: 182252 - protein, 16 aa, Homo sapiens
  CDR3 for beta chain variable domain of TCR clone 91126 (TRBV27, TRBJ1-4)
CASSRNAGIGNEKLSF

SEQ ID NO: 182253 - protein, 13 aa, Homo sapiens
  CDR3 for alpha chain variable domain of TCR clone 91127 (TRAV13-1, TRAJ9)
CEARGTGGFKTIF

SEQ ID NO: 182254 - protein, 12 aa, Homo sapiens
  CDR3 for beta chain variable domain of TCR clone 91127 (TRBV2, TRBJ2-1)
CAYGPPGNEQFF

SEQ ID NO: 182255 - protein, 17 aa, Homo sapiens
  CDR3 for alpha chain variable domain of TCR clone 91128 (TRAV2, TRAJ13)
TTVLWSLNSGGYQKVTF

SEQ ID NO: 182256 - protein, 14 aa, Homo sapiens
  CDR3 for beta chain variable domain of TCR clone 91128 (TRBV28, TRBJ1-5)
CASSGQALYQPQHF

SEQ ID NO: 182257 - protein, 17 aa, Homo sapiens
  CDR3 for alpha chain variable domain of TCR clone 91129 (TRAV13-1, TRAJ52)
CAARRNAGGTSYGKLTF

SEQ ID NO: 182258 - protein, 13 aa, Homo sapiens
  CDR3 for beta chain variable domain of TCR clone 91129 (TRBV7-2, TRBJ1-1)
CASNLKGAKVAFF

SEQ ID NO: 182259 - protein, 12 aa, Homo sapiens
  CDR3 for alpha chain variable domain of TCR clone 91130 (TRAV12-3, TRAJ41)
CAMSYSGYALNF

SEQ ID NO: 182260 - protein, 19 aa, Homo sapiens
  CDR3 for beta chain variable domain of TCR clone 91130 (TRBV19, TRBJ2-5)
CASSIGQVTDFFLGETQYF

SEQ ID NO: 182261 - protein, 13 aa, Homo sapiens
  CDR3 for alpha chain variable domain of TCR clone 91131 (TRAV20, TRAJ37)
CAGCSSNTGKLIF

SEQ ID NO: 182262 - protein, 15 aa, Homo sapiens
  CDR3 for beta chain variable domain of TCR clone 91131 (TRBV19, TRBJ2-7)
CASSPAGSGEALRYF

SEQ ID NO: 182263 - protein, 15 aa, Homo sapiens
  CDR3 for alpha chain variable domain of TCR clone 91132 (TRAV21, TRAJ57)
CAVIITQGGSAKLVF

SEQ ID NO: 182264 - protein, 14 aa, Homo sapiens
  CDR3 for beta chain variable domain of TCR clone 91132 (TRBV5-1, TRBJ2-2)
CASSLIWIPGELFF

SEQ ID NO: 182265 - protein, 15 aa, Homo sapiens
  CDR3 for alpha chain variable domain of TCR clone 91133 (TRAV17, TRAJ45)
CATAYSGGGADGLTF

SEQ ID NO: 182266 - protein, 13 aa, Homo sapiens
  CDR3 for beta chain variable domain of TCR clone 91133 (TRBV20-1, TRBJ2-4)
CSVGGGAKNSQYF

SEQ ID NO: 182267 - protein, 13 aa, Homo sapiens
  CDR3 for alpha chain variable domain of TCR clone 91134 (TRAV20, TRAJ21)
CAVEGYIFNKFYF

SEQ ID NO: 182268 - protein, 14 aa, Homo sapiens
  CDR3 for beta chain variable domain of TCR clone 91134 (TRBV3-1, TRBJ2-5)
CASSQGPDQETQYF

SEQ ID NO: 182269 - protein, 14 aa, Homo sapiens
  CDR3 for alpha chain variable domain of TCR clone 91135 (TRAV13-2, TRAJ43)
CAEIPTYNNNDMRF

SEQ ID NO: 182270 - protein, 15 aa, Homo sapiens
  CDR3 for beta chain variable domain of TCR clone 91135 (TRBV6-3, TRBJ2-7)
CASSSPGTVFYEQYF

SEQ ID NO: 182271 - protein, 16 aa, Homo sapiens
  CDR3 for alpha chain variable domain of TCR clone 91136 (TRAV3, TRAJ40)
CAVRDRIASGTYKYIF

SEQ ID NO: 182272 - protein, 14 aa, Homo sapiens
  CDR3 for beta chain variable domain of TCR clone 91136 (TRBV7-2, TRBJ2-7)
CASSPKTSFYEQYF

SEQ ID NO: 182273 - protein, 14 aa, Homo sapiens
  CDR3 for alpha chain variable domain of TCR clone 91137 (TRAV12-3, TRAJ10)
SHLPLTGGGNKLTF

SEQ ID NO: 182274 - protein, 15 aa, Homo sapiens
  CDR3 for beta chain variable domain of TCR clone 91137 (TRBV7-9, TRBJ1-4)
CASGGQRQGTEKLFF

SEQ ID NO: 182275 - protein, 15 aa, Homo sapiens
  CDR3 for alpha chain variable domain of TCR clone 91138 (TRAV17, TRAJ37)
CATDHGSSNTGKLIF

SEQ ID NO: 182276 - protein, 14 aa, Homo sapiens
  CDR3 for beta chain variable domain of TCR clone 91138 (TRBV7-2, TRBJ2-3)
CASSRTSGAETQYF

SEQ ID NO: 182277 - protein, 19 aa, Homo sapiens
  CDR3 for alpha chain variable domain of TCR clone 91139 (TRAV1-2, TRAJ26)
CLLPLCCERPDNYGQNFVF

SEQ ID NO: 182278 - protein, 14 aa, Homo sapiens
  CDR3 for beta chain variable domain of TCR clone 91139 (TRBV7-2, TRBJ2-7)
CASRSQGAAYEQYF

SEQ ID NO: 182279 - protein, 14 aa, Homo sapiens
  CDR3 for alpha chain variable domain of TCR clone 91140 (TRAV26-2, TRAJ32)
CCVGYGGATNKLIF

SEQ ID NO: 182280 - protein, 14 aa, Homo sapiens
  CDR3 for beta chain variable domain of TCR clone 91140 (TRBV6-1, TRBJ1-3)
CASVQGGGGNTIYF

SEQ ID NO: 182281 - protein, 18 aa, Homo sapiens
  CDR3 for alpha chain variable domain of TCR clone 91141 (TRAV13-1, TRAJ52)
CAASKRSAGGTSYGKLTF

SEQ ID NO: 182282 - protein, 16 aa, Homo sapiens
  CDR3 for beta chain variable domain of TCR clone 91141 (TRBV19, TRBJ2-1)
CASSKAGPSSYNEQFF

SEQ ID NO: 182283 - protein, 14 aa, Homo sapiens
  CDR3 for alpha chain variable domain of TCR clone 91142 (TRAV12-2, TRAJ17)
CAVLFKATGNKLTF

SEQ ID NO: 182284 - protein, 18 aa, Homo sapiens
  CDR3 for beta chain variable domain of TCR clone 91142 (TRBV12-4, TRBJ2-2)
CASRPFGAGALNTGELFF

SEQ ID NO: 182285 - protein, 14 aa, Homo sapiens
  CDR3 for alpha chain variable domain of TCR clone 91143 (TRAV38-1, TRAJ45)
CASHSGGGADGLTF

SEQ ID NO: 182286 - protein, 16 aa, Homo sapiens
  CDR3 for beta chain variable domain of TCR clone 91143 (TRBV5-4, TRBJ2-3)
CASQQPGAGGADTQYF

SEQ ID NO: 182287 - protein, 13 aa, Homo sapiens
  CDR3 for alpha chain variable domain of TCR clone 91144 (TRAV38-2/DV8, TRAJ34)
CAYRNYNTDKLIF

SEQ ID NO: 182288 - protein, 15 aa, Homo sapiens
  CDR3 for beta chain variable domain of TCR clone 91144 (TRBV20-1, TRBJ2-5)
CSAEGAGGLQETQYF

SEQ ID NO: 182289 - protein, 16 aa, Homo sapiens
  CDR3 for alpha chain variable domain of TCR clone 91145 (TRAV26-2, TRAJ45)
CTTASPIGGGADGLTF

SEQ ID NO: 182290 - protein, 20 aa, Homo sapiens
  CDR3 for beta chain variable domain of TCR clone 91145 (TRBV28, TRBJ2-1)
CASTPIGRSPGLAGGNEHFF

SEQ ID NO: 182291 - protein, 12 aa, Homo sapiens
  CDR3 for alpha chain variable domain of TCR clone 91146 (TRAV22, TRAJ22)
CAPGGSARQLTF

SEQ ID NO: 182292 - protein, 14 aa, Homo sapiens
  CDR3 for beta chain variable domain of TCR clone 91146 (TRBV7-9, TRBJ2-1)
CASSPRDSLYEQFF

SEQ ID NO: 182293 - protein, 14 aa, Homo sapiens
  CDR3 for alpha chain variable domain of TCR clone 91147 (TRAV1-2, TRAJ8)
CAVREDTGFKKLVF

SEQ ID NO: 182294 - protein, 15 aa, Homo sapiens
  CDR3 for beta chain variable domain of TCR clone 91147 (TRBV19, TRBJ2-1)
CASSTGTSSYNEQFF

SEQ ID NO: 182295 - protein, 14 aa, Homo sapiens
  CDR3 for alpha chain variable domain of TCR clone 91148 (TRAV1-1, TRAJ27)
CAVIYNTNAGKSTF

SEQ ID NO: 182296 - protein, 15 aa, Homo sapiens
  CDR3 for beta chain variable domain of TCR clone 91148 (TRBV11-2, TRBJ2-2)
CASSPSGGGTGELFF

SEQ ID NO: 182297 - protein, 13 aa, Homo sapiens
  CDR3 for alpha chain variable domain of TCR clone 91149 (TRAV12-3, TRAJ33)
CAMSVNSNYQLIW

SEQ ID NO: 182298 - protein, 12 aa, Homo sapiens
  CDR3 for beta chain variable domain of TCR clone 91149 (TRBV11-2, TRBJ2-1)
CASSLPLPEQFF

SEQ ID NO: 182299 - protein, 14 aa, Homo sapiens
  CDR3 for alpha chain variable domain of TCR clone 91150 (TRAV12-3, TRAJ54)
CAMSGIQGAQKLVF

SEQ ID NO: 182300 - protein, 13 aa, Homo sapiens
  CDR3 for beta chain variable domain of TCR clone 91150 (TRBV19, TRBJ1-1)
CASSPSNGGEAFF

SEQ ID NO: 182301 - protein, 14 aa, Homo sapiens
  CDR3 for alpha chain variable domain of TCR clone 91151 (TRAV29/DV5, TRAJ36)
CATRRKTGANNLFF

SEQ ID NO: 182302 - protein, 14 aa, Homo sapiens
  CDR3 for beta chain variable domain of TCR clone 91151 (TRBV12-5, TRBJ2-5)
CASGSRTHQETQYF

SEQ ID NO: 182303 - protein, 23 aa, Homo sapiens
  CDR3 for alpha chain variable domain of TCR clone 91152 (TRAV26-1, )
CIADNAGNIHIQNPDPAVYQLRD

SEQ ID NO: 182304 - protein, 13 aa, Homo sapiens
  CDR3 for beta chain variable domain of TCR clone 91152 (TRBV20-1, TRBJ1-1)
CSARGGGNTEAFF

SEQ ID NO: 182305 - protein, 17 aa, Homo sapiens
  CDR3 for alpha chain variable domain of TCR clone 91153 (TRAV12-3, TRAJ6)
CAMSARGGAGGSYIPTF

SEQ ID NO: 182306 - protein, 11 aa, Homo sapiens
  CDR3 for beta chain variable domain of TCR clone 91153 (TRBV12-4, TRBJ2-3)
CQQHAPDTQYF

SEQ ID NO: 182307 - protein, 12 aa, Homo sapiens
  CDR3 for alpha chain variable domain of TCR clone 91154 (TRAV12-3, TRAJ31)
CATSVPNARLMF

SEQ ID NO: 182308 - protein, 12 aa, Homo sapiens
  CDR3 for beta chain variable domain of TCR clone 91154 (TRBV11-2, TRBJ2-1)
CASSVQREGQFF

SEQ ID NO: 182309 - protein, 16 aa, Homo sapiens
  CDR3 for alpha chain variable domain of TCR clone 91155 (TRAV26-1, TRAJ38)
CIVRAYNAGNNRKLIW

SEQ ID NO: 182310 - protein, 12 aa, Homo sapiens
  CDR3 for beta chain variable domain of TCR clone 91155 (TRBV28, TRBJ2-1)
CASSVQINEQFF

SEQ ID NO: 182311 - protein, 14 aa, Homo sapiens
  CDR3 for alpha chain variable domain of TCR clone 91156 (TRAV13-1, TRAJ40)
CAASMTSGTYKYIF

SEQ ID NO: 182312 - protein, 15 aa, Homo sapiens
  CDR3 for beta chain variable domain of TCR clone 91156 (TRBV10-3, TRBJ1-3)
CAISDSQGAGNTIYF

SEQ ID NO: 182313 - protein, 13 aa, Homo sapiens
  CDR3 for alpha chain variable domain of TCR clone 91157 (TRAV13-1, TRAJ39)
CSKYSNAGNMLTF

SEQ ID NO: 182314 - protein, 16 aa, Homo sapiens
  CDR3 for beta chain variable domain of TCR clone 91157 (TRBV20-1, TRBJ1-4)
CSTPGQGLLTNEKLFF

SEQ ID NO: 182315 - protein, 13 aa, Homo sapiens
  CDR3 for alpha chain variable domain of TCR clone 91158 (TRAV17, TRAJ9)
CATDYTGGFKTIF

SEQ ID NO: 182316 - protein, 16 aa, Homo sapiens
  CDR3 for beta chain variable domain of TCR clone 91158 (TRBV7-7, TRBJ2-1)
CASTLASGTSYNEQFF

SEQ ID NO: 182317 - protein, 14 aa, Homo sapiens
  CDR3 for alpha chain variable domain of TCR clone 91159 (TRAV25, TRAJ35)
CARRMEGCGNVLHC

SEQ ID NO: 182318 - protein, 13 aa, Homo sapiens
  CDR3 for beta chain variable domain of TCR clone 91159 (TRBV7-2, TRBJ1-4)
CASSLAGLEKLFF

SEQ ID NO: 182319 - protein, 14 aa, Homo sapiens
  CDR3 for alpha chain variable domain of TCR clone 91160 (TRAV8-3, TRAJ4)
CAVGAAGGYNKLIF

SEQ ID NO: 182320 - protein, 14 aa, Homo sapiens
  CDR3 for beta chain variable domain of TCR clone 91160 (TRBV12-5, TRBJ2-5)
CASCSRTHQETQYF

SEQ ID NO: 182321 - protein, 14 aa, Homo sapiens
  CDR3 for alpha chain variable domain of TCR clone 91161 (TRAV12-3, TRAJ7)
CAMSEIGGNNRLAF

SEQ ID NO: 182322 - protein, 17 aa, Homo sapiens
  CDR3 for beta chain variable domain of TCR clone 91161 (TRBV10-3, TRBJ1-1)
CAISESGTGGGTTEAFF

SEQ ID NO: 182323 - protein, 14 aa, Homo sapiens
  CDR3 for alpha chain variable domain of TCR clone 91162 (TRAV13-2, TRAJ29)
CAENIEPGKTPLVF

SEQ ID NO: 182324 - protein, 14 aa, Homo sapiens
  CDR3 for beta chain variable domain of TCR clone 91162 (TRBV19, TRBJ2-2)
CATTGHANTGELFF

SEQ ID NO: 182325 - protein, 13 aa, Homo sapiens
  CDR3 for alpha chain variable domain of TCR clone 91163 (TRAV29/DV5, TRAJ31)
CAASRNNNARPMF

SEQ ID NO: 182326 - protein, 12 aa, Homo sapiens
  CDR3 for beta chain variable domain of TCR clone 91163 (TRBV11-2, TRBJ2-1)
CASSPGNNEQFF

SEQ ID NO: 182327 - protein, 13 aa, Homo sapiens
  CDR3 for alpha chain variable domain of TCR clone 91164 (TRAV27, TRAJ24)
CAGDRDSWGKLQF

SEQ ID NO: 182328 - protein, 16 aa, Homo sapiens
  CDR3 for beta chain variable domain of TCR clone 91164 (TRBV4-3, TRBJ2-2)
CASSHLQGSGTGELFF

SEQ ID NO: 182329 - protein, 13 aa, Homo sapiens
  CDR3 for alpha chain variable domain of TCR clone 91165 (TRAV13-2, TRAJ48)
CAEMDFGNEKLTF

SEQ ID NO: 182330 - protein, 15 aa, Homo sapiens
  CDR3 for beta chain variable domain of TCR clone 91165 (TRBV27, TRBJ2-2)
CQQFIRFLGHRGAVF

SEQ ID NO: 182331 - protein, 13 aa, Homo sapiens
  CDR3 for alpha chain variable domain of TCR clone 91166 (TRAV21, TRAJ57)
CAVTQGGSEKLVF

SEQ ID NO: 182332 - protein, 16 aa, Homo sapiens
  CDR3 for beta chain variable domain of TCR clone 91166 (TRBV29-1, TRBJ2-7)
CSVEDAADGTAYEQYF

SEQ ID NO: 182333 - protein, 15 aa, Homo sapiens
  CDR3 for alpha chain variable domain of TCR clone 91167 (TRAV26-1, TRAJ40)
CIDRYATSGPYKYIF

SEQ ID NO: 182334 - protein, 11 aa, Homo sapiens
  CDR3 for beta chain variable domain of TCR clone 91167 (TRBV7-9, TRBJ2-1)
CASSSQNEQFF

SEQ ID NO: 182335 - protein, 14 aa, Homo sapiens
  CDR3 for alpha chain variable domain of TCR clone 91168 (TRAV17, TRAJ57)
CATDPQGGSEKLVF

SEQ ID NO: 182336 - protein, 16 aa, Homo sapiens
  CDR3 for beta chain variable domain of TCR clone 91168 (TRBV15, TRBJ2-3)
CATSRDLGIVTDTQYF

SEQ ID NO: 182337 - protein, 15 aa, Homo sapiens
  CDR3 for alpha chain variable domain of TCR clone 91169 (TRAV26-1, TRAJ22)
CIVRVSFWFCKATDL

SEQ ID NO: 182338 - protein, 14 aa, Homo sapiens
  CDR3 for beta chain variable domain of TCR clone 91169 (TRBV7-9, TRBJ1-4)
CAITEGEANEKLFF

SEQ ID NO: 182339 - protein, 14 aa, Homo sapiens
  CDR3 for alpha chain variable domain of TCR clone 91170 (TRAV8-3, TRAJ13)
CAVGAQEGYRKVTF

SEQ ID NO: 182340 - protein, 13 aa, Homo sapiens
  CDR3 for beta chain variable domain of TCR clone 91170 (TRBV11-2, TRBJ2-5)
CASSSTGEETQYF

SEQ ID NO: 182341 - protein, 13 aa, Homo sapiens
  CDR3 for alpha chain variable domain of TCR clone 91171 (TRAV30, TRAJ20)
CGTEDRSDYKLSF

SEQ ID NO: 182342 - protein, 15 aa, Homo sapiens
  CDR3 for beta chain variable domain of TCR clone 91171 (TRBV2, TRBJ1-2)
CASTQVQDSNYGDTF

SEQ ID NO: 182343 - protein, 14 aa, Homo sapiens
  CDR3 for alpha chain variable domain of TCR clone 91172 (TRAV12-2, TRAJ13)
CAVKRTGGYQKVTF

SEQ ID NO: 182344 - protein, 17 aa, Homo sapiens
  CDR3 for beta chain variable domain of TCR clone 91172 (TRBV20-1, TRBJ2-2)
CSASGSGQGGLTGELFF

SEQ ID NO: 182345 - protein, 15 aa, Homo sapiens
  CDR3 for alpha chain variable domain of TCR clone 91173 (TRAV8-2, TRAJ40)
CVVLGTTSGTYKYIF

SEQ ID NO: 182346 - protein, 14 aa, Homo sapiens
  CDR3 for beta chain variable domain of TCR clone 91173 (TRBV13, TRBJ2-5)
CASYRRLAEETQYF

SEQ ID NO: 182347 - protein, 15 aa, Homo sapiens
  CDR3 for alpha chain variable domain of TCR clone 91174 (TRAV8-3, TRAJ15)
CAVGAPNQAGTALIF

SEQ ID NO: 182348 - protein, 14 aa, Homo sapiens
  CDR3 for beta chain variable domain of TCR clone 91174 (TRBV4-1, TRBJ2-2)
CASSQAVNTGELFF

SEQ ID NO: 182349 - protein, 10 aa, Homo sapiens
  CDR3 for alpha chain variable domain of TCR clone 91175 (TRAV21, TRAJ31)
CAVDNASLMF

SEQ ID NO: 182350 - protein, 13 aa, Homo sapiens
  CDR3 for beta chain variable domain of TCR clone 91175 (TRBV4-1, TRBJ1-1)
CASSRKMNTEAFF

SEQ ID NO: 182351 - protein, 13 aa, Homo sapiens
  CDR3 for alpha chain variable domain of TCR clone 91176 (TRAV26-1, TRAJ33)
CIGRVEGNYQLIW

SEQ ID NO: 182352 - protein, 16 aa, Homo sapiens
  CDR3 for beta chain variable domain of TCR clone 91176 (TRBV15, TRBJ2-7)
CATSRDRGRRRGEQYF

SEQ ID NO: 182353 - protein, 23 aa, Homo sapiens
  CDR3 for alpha chain variable domain of TCR clone 91177 (TRAV26-1, TRAJ38)
CIADNAGNNHIQNPDPAVYQLRD

SEQ ID NO: 182354 - protein, 13 aa, Homo sapiens
  CDR3 for beta chain variable domain of TCR clone 91177 (TRBV20-1, TRBJ1-1)
CSARGGANTEAFF

SEQ ID NO: 182355 - protein, 12 aa, Homo sapiens
  CDR3 for alpha chain variable domain of TCR clone 91178 (TRAV16, TRAJ10)
CSRTGGGSKLTF

SEQ ID NO: 182356 - protein, 16 aa, Homo sapiens
  CDR3 for beta chain variable domain of TCR clone 91178 (TRBV6-1, TRBJ2-5)
CASSETLDRGAETQYF

SEQ ID NO: 182357 - protein, 11 aa, Homo sapiens
  CDR3 for alpha chain variable domain of TCR clone 91179 (TRAV1-2, TRAJ20)
CAVANVYKLSF

SEQ ID NO: 182358 - protein, 18 aa, Homo sapiens
  CDR3 for beta chain variable domain of TCR clone 91179 (TRBV20-1, TRBJ2-6)
CSAETTPTHGSGANVLTF

SEQ ID NO: 182359 - protein, 14 aa, Homo sapiens
  CDR3 for alpha chain variable domain of TCR clone 91180 (TRAV8-4, TRAJ23)
CAVSSPGSGGKLIF

SEQ ID NO: 182360 - protein, 17 aa, Homo sapiens
  CDR3 for beta chain variable domain of TCR clone 91180 (TRBV4-3, TRBJ2-3)
CASSQDPLAGAVDTQYF

SEQ ID NO: 182361 - protein, 13 aa, Homo sapiens
  CDR3 for alpha chain variable domain of TCR clone 91181 (TRAV13-1, TRAJ27)
CAASTHQCRQINL

SEQ ID NO: 182362 - protein, 16 aa, Homo sapiens
  CDR3 for beta chain variable domain of TCR clone 91181 (TRBV27, TRBJ2-2)
CASSSRGLVRTGELFF

SEQ ID NO: 182363 - protein, 13 aa, Homo sapiens
  CDR3 for alpha chain variable domain of TCR clone 91182 (TRAV13-1, TRAJ43)
CAASKNNNNDMRF

SEQ ID NO: 182364 - protein, 14 aa, Homo sapiens
  CDR3 for beta chain variable domain of TCR clone 91182 (TRBV7-2, TRBJ2-7)
CASRSQGAAYEQYF

SEQ ID NO: 182365 - protein, 11 aa, Homo sapiens
  CDR3 for alpha chain variable domain of TCR clone 91183 (TRAV3, TRAJ21)
CAVGNFNKFYF

SEQ ID NO: 182366 - protein, 19 aa, Homo sapiens
  CDR3 for beta chain variable domain of TCR clone 91183 (TRBV2, TRBJ2-2)
CASSQPGLAGGGNTGELFF

SEQ ID NO: 182367 - protein, 15 aa, Homo sapiens
  CDR3 for alpha chain variable domain of TCR clone 91184 (TRAV35, TRAJ23)
CAGPLGNNQGGKLIF

SEQ ID NO: 182368 - protein, 14 aa, Homo sapiens
  CDR3 for beta chain variable domain of TCR clone 91184 (TRBV7-9, TRBJ1-1)
CASTPLQSYTEAFC

SEQ ID NO: 182369 - protein, 14 aa, Homo sapiens
  CDR3 for alpha chain variable domain of TCR clone 91185 (TRAV26-1, TRAJ38)
CIADNAGNNRKLIW

SEQ ID NO: 182370 - protein, 11 aa, Homo sapiens
  CDR3 for beta chain variable domain of TCR clone 91185 (TRBV7-2, TRBJ2-7)
CASSSGLWQYF

SEQ ID NO: 182371 - protein, 13 aa, Homo sapiens
  CDR3 for alpha chain variable domain of TCR clone 91186 (TRAV1-1, TRAJ9)
CAAKNTGGFKTIF

SEQ ID NO: 182372 - protein, 18 aa, Homo sapiens
  CDR3 for beta chain variable domain of TCR clone 91186 (TRBV18, TRBJ1-3)
CASSPRGGAGPSGNTIYF

SEQ ID NO: 182373 - protein, 13 aa, Homo sapiens
  CDR3 for alpha chain variable domain of TCR clone 91187 (TRAV16, TRAJ26)
CITVLCLGQNFVF

SEQ ID NO: 182374 - protein, 12 aa, Homo sapiens
  CDR3 for beta chain variable domain of TCR clone 91187 (TRBV11-2, TRBJ2-1)
CVSSPGNNEQFF

SEQ ID NO: 182375 - protein, 15 aa, Homo sapiens
  CDR3 for alpha chain variable domain of TCR clone 91188 (TRAV12-1, TRAJ45)
CVVLSGGGGADGLTL

SEQ ID NO: 182376 - protein, 12 aa, Homo sapiens
  CDR3 for beta chain variable domain of TCR clone 91188 (TRBV12-5, TRBJ2-5)
CASGQGVETQYF

SEQ ID NO: 182377 - protein, 18 aa, Homo sapiens
  CDR3 for alpha chain variable domain of TCR clone 91189 (TRAV21, TRAJ52)
CAVRPSPAGGTSYGKLTF

SEQ ID NO: 182378 - protein, 15 aa, Homo sapiens
  CDR3 for beta chain variable domain of TCR clone 91189 (TRBV11-2, TRBJ2-7)
CASRFPGTGGYEQYF

SEQ ID NO: 182379 - protein, 13 aa, Homo sapiens
  CDR3 for alpha chain variable domain of TCR clone 91190 (TRAV13-1, TRAJ21)
CAASRYNFNKFYF

SEQ ID NO: 182380 - protein, 15 aa, Homo sapiens
  CDR3 for beta chain variable domain of TCR clone 91190 (TRBV7-8, TRBJ1-5)
CASSLAGQPNQPQHF

SEQ ID NO: 182381 - protein, 14 aa, Homo sapiens
  CDR3 for alpha chain variable domain of TCR clone 91191 (TRAV27, TRAJ37)
CAGERSSNTGKLIF

SEQ ID NO: 182382 - protein, 15 aa, Homo sapiens
  CDR3 for beta chain variable domain of TCR clone 91191 (TRBV11-3, TRBJ1-6)
CASSLDWGASSPLHF

SEQ ID NO: 182383 - protein, 12 aa, Homo sapiens
  CDR3 for alpha chain variable domain of TCR clone 91192 (TRAV16, TRAJ26)
CASKDGGQNFVF

SEQ ID NO: 182384 - protein, 13 aa, Homo sapiens
  CDR3 for beta chain variable domain of TCR clone 91192 (TRBV25-1, TRBJ1-1)
CTSSDRGRAEAFF

SEQ ID NO: 182385 - protein, 16 aa, Homo sapiens
  CDR3 for alpha chain variable domain of TCR clone 91193 (TRAV3, TRAJ37)
CAVRGKGSGNTGKLIF

SEQ ID NO: 182386 - protein, 14 aa, Homo sapiens
  CDR3 for beta chain variable domain of TCR clone 91193 (TRBV13, TRBJ2-5)
CASSLGRGQETQYF

SEQ ID NO: 182387 - protein, 14 aa, Homo sapiens
  CDR3 for alpha chain variable domain of TCR clone 91194 (TRAV12-2, TRAJ13)
CAVTKTGGYQKVTF

SEQ ID NO: 182388 - protein, 15 aa, Homo sapiens
  CDR3 for beta chain variable domain of TCR clone 91194 (TRBV27, TRBJ2-1)
CASSNGGVSSNEQFF

SEQ ID NO: 182389 - protein, 14 aa, Homo sapiens
  CDR3 for alpha chain variable domain of TCR clone 91195 (TRAV12-3, TRAJ10)
SHLPLTGGENKLTF

SEQ ID NO: 182390 - protein, 12 aa, Homo sapiens
  CDR3 for beta chain variable domain of TCR clone 91195 (TRBV7-8, TRBJ2-7)
CASNLGDREQYF

SEQ ID NO: 182391 - protein, 10 aa, Homo sapiens
  CDR3 for alpha chain variable domain of TCR clone 91196 (TRAV1-2, TRAJ20)
CACNGYKLSF

SEQ ID NO: 182392 - protein, 16 aa, Homo sapiens
  CDR3 for beta chain variable domain of TCR clone 91196 (TRBV20-1, TRBJ2-1)
CSARDLKQGMNNEQFF

SEQ ID NO: 182393 - protein, 17 aa, Homo sapiens
  CDR3 for alpha chain variable domain of TCR clone 91197 (TRAV8-4, TRAJ11)
CAVSDRGENSGYSTLTF

SEQ ID NO: 182394 - protein, 16 aa, Homo sapiens
  CDR3 for beta chain variable domain of TCR clone 91197 (TRBV12-4, TRBJ2-5)
CASSFLVRGRQETQYF

SEQ ID NO: 182395 - protein, 14 aa, Homo sapiens
  CDR3 for alpha chain variable domain of TCR clone 91198 (TRAV21, TRAJ37)
CAVKGSSNTGKLIF

SEQ ID NO: 182396 - protein, 14 aa, Homo sapiens
  CDR3 for beta chain variable domain of TCR clone 91198 (TRBV7-2, TRBJ2-1)
CAGSRGGARNEQFF

SEQ ID NO: 182397 - protein, 15 aa, Homo sapiens
  CDR3 for alpha chain variable domain of TCR clone 91199 (TRAV27, TRAJ38)
CAARRNAGNNRKLSW

SEQ ID NO: 182398 - protein, 11 aa, Homo sapiens
  CDR3 for beta chain variable domain of TCR clone 91199 (TRBV12-4, TRBJ2-2)
CASSSAGELFF

SEQ ID NO: 182399 - protein, 12 aa, Homo sapiens
  CDR3 for alpha chain variable domain of TCR clone 91200 (TRAV30, TRAJ43)
CGTEERGNDMRF

SEQ ID NO: 182400 - protein, 13 aa, Homo sapiens
  CDR3 for beta chain variable domain of TCR clone 91200 (TRBV27, TRBJ2-7)
CDSSFSQGYEQYF

SEQ ID NO: 182401 - protein, 15 aa, Homo sapiens
  CDR3 for alpha chain variable domain of TCR clone 91201 (TRAV8-3, TRAJ41)
CAVGSNSNSRYALNF

SEQ ID NO: 182402 - protein, 17 aa, Homo sapiens
  CDR3 for beta chain variable domain of TCR clone 91201 (TRBV25-1, TRBJ2-1)
CASSAYGQGRGVYEQFF

SEQ ID NO: 182403 - protein, 10 aa, Homo sapiens
  CDR3 for alpha chain variable domain of TCR clone 91202 (TRAV30, TRAJ48)
CGIGNEKLTF

SEQ ID NO: 182404 - protein, 17 aa, Homo sapiens
  CDR3 for beta chain variable domain of TCR clone 91202 (TRBV11-2, TRBJ2-1)
CASSLYPPGVEYNEQFF

SEQ ID NO: 182405 - protein, 13 aa, Homo sapiens
  CDR3 for alpha chain variable domain of TCR clone 91203 (TRAV6, TRAJ5)
CAPKATGRRALTF

SEQ ID NO: 182406 - protein, 13 aa, Homo sapiens
  CDR3 for beta chain variable domain of TCR clone 91203 (TRBV20-1, TRBJ2-7)
CSASPLSSYEQYF

SEQ ID NO: 182407 - protein, 16 aa, Homo sapiens
  CDR3 for alpha chain variable domain of TCR clone 91204 (TRAV23/DV6, TRAJ48)
CAASGVVNFGNEKLTF

SEQ ID NO: 182408 - protein, 15 aa, Homo sapiens
  CDR3 for beta chain variable domain of TCR clone 91204 (TRBV7-9, TRBJ2-1)
CASSLGWGRANEQFL

SEQ ID NO: 182409 - protein, 12 aa, Homo sapiens
  CDR3 for alpha chain variable domain of TCR clone 91205 (TRAV13-2, TRAJ8)
CAPWLGFQKLVF

SEQ ID NO: 182410 - protein, 15 aa, Homo sapiens
  CDR3 for beta chain variable domain of TCR clone 91205 (TRBV18, TRBJ2-1)
CASSPPSASYNEQFF

SEQ ID NO: 182411 - protein, 13 aa, Homo sapiens
  CDR3 for alpha chain variable domain of TCR clone 91206 (TRAV8-3, TRAJ44)
CAVVPGTASKLTF

SEQ ID NO: 182412 - protein, 15 aa, Homo sapiens
  CDR3 for beta chain variable domain of TCR clone 91206 (TRBV28, TRBJ2-1)
CASSIIAGGRSEQFF

SEQ ID NO: 182413 - protein, 14 aa, Homo sapiens
  CDR3 for alpha chain variable domain of TCR clone 91207 (TRAV1-2, TRAJ16)
CAVNRFSDGQKLLF

SEQ ID NO: 182414 - protein, 14 aa, Homo sapiens
  CDR3 for beta chain variable domain of TCR clone 91207 (TRBV7-2, TRBJ2-7)
CASSPKTSLYEQYF

SEQ ID NO: 182415 - protein, 21 aa, Homo sapiens
  CDR3 for alpha chain variable domain of TCR clone 91208 (TRAV8-3, TRAJ10)
CAVGHTHGRRKQTHLWYRHSA

SEQ ID NO: 182416 - protein, 10 aa, Homo sapiens
  CDR3 for beta chain variable domain of TCR clone 91208 (TRBV20-1, TRBJ2-5)
CSARFETQYF

SEQ ID NO: 182417 - protein, 16 aa, Homo sapiens
  CDR3 for alpha chain variable domain of TCR clone 91209 (TRAV12-3, TRAJ28)
CAEKSYSGAGSYQLTF

SEQ ID NO: 182418 - protein, 16 aa, Homo sapiens
  CDR3 for beta chain variable domain of TCR clone 91209 (TRBV19, TRBJ2-1)
CASSKAGPSSYNEQFF

SEQ ID NO: 182419 - protein, 11 aa, Homo sapiens
  CDR3 for alpha chain variable domain of TCR clone 91210 (TRAV1-1, TRAJ23)
CAVRQGGKLIF

SEQ ID NO: 182420 - protein, 13 aa, Homo sapiens
  CDR3 for beta chain variable domain of TCR clone 91210 (TRBV20-1, TRBJ1-1)
CSARVGGNTEAFF

SEQ ID NO: 182421 - protein, 15 aa, Homo sapiens
  CDR3 for alpha chain variable domain of TCR clone 91211 (TRAV3, TRAJ17)
CAVSPKEAAGNKLTF

SEQ ID NO: 182422 - protein, 12 aa, Homo sapiens
  CDR3 for beta chain variable domain of TCR clone 91211 (TRBV7-9, TRBJ1-6)
CASSLMTSSLHF

SEQ ID NO: 182423 - protein, 15 aa, Homo sapiens
  CDR3 for alpha chain variable domain of TCR clone 91212 (TRAV23/DV6, TRAJ13)
CAAWPGGGGCQKVTF

SEQ ID NO: 182424 - protein, 17 aa, Homo sapiens
  CDR3 for beta chain variable domain of TCR clone 91212 (TRBV19, TRBJ2-7)
CASSISFYDSYPYEQYF

SEQ ID NO: 182425 - protein, 13 aa, Homo sapiens
  CDR3 for alpha chain variable domain of TCR clone 91213 (TRAV8-6, TRAJ41)
CAASENSGYALNF

SEQ ID NO: 182426 - protein, 17 aa, Homo sapiens
  CDR3 for beta chain variable domain of TCR clone 91213 (TRBV7-2, TRBJ2-3)
CASSLEARGTSTDTQYF

SEQ ID NO: 182427 - protein, 12 aa, Homo sapiens
  CDR3 for alpha chain variable domain of TCR clone 91214 (TRAV8-3, TRAJ41)
CAVGALGYALNF

SEQ ID NO: 182428 - protein, 16 aa, Homo sapiens
  CDR3 for beta chain variable domain of TCR clone 91214 (TRBV7-6, TRBJ2-3)
CASSDSRGEGTDKQYF

SEQ ID NO: 182429 - protein, 12 aa, Homo sapiens
  CDR3 for alpha chain variable domain of TCR clone 91215 (TRAV12-2, TRAJ52)
IGGGTSYGKLTF

SEQ ID NO: 182430 - protein, 14 aa, Homo sapiens
  CDR3 for beta chain variable domain of TCR clone 91215 (TRBV7-2, TRBJ2-7)
CASSPKTSFYEQYF

SEQ ID NO: 182431 - protein, 15 aa, Homo sapiens
  CDR3 for alpha chain variable domain of TCR clone 91216 (TRAV4, TRAJ39)
CLVGPNNNAGNMLTF

SEQ ID NO: 182432 - protein, 17 aa, Homo sapiens
  CDR3 for beta chain variable domain of TCR clone 91216 (TRBV7-7, TRBJ2-2)
CASSSVPAGGEIGELFF

SEQ ID NO: 182433 - protein, 13 aa, Homo sapiens
  CDR3 for alpha chain variable domain of TCR clone 91217 (TRAV2, TRAJ21)
CGVEDLNFNKFYF

SEQ ID NO: 182434 - protein, 15 aa, Homo sapiens
  CDR3 for beta chain variable domain of TCR clone 91217 (TRBV28, TRBJ2-5)
CASSPGQGSIETQYF

SEQ ID NO: 182435 - protein, 13 aa, Homo sapiens
  CDR3 for alpha chain variable domain of TCR clone 91218 (TRAV12-3, TRAJ50)
CARGGTSYDKVIF

SEQ ID NO: 182436 - protein, 13 aa, Homo sapiens
  CDR3 for beta chain variable domain of TCR clone 91218 (TRBV3-1, TRBJ1-1)
CASSPGVITEAFF

SEQ ID NO: 182437 - protein, 13 aa, Homo sapiens
  CDR3 for alpha chain variable domain of TCR clone 91219 (TRAV8-3, TRAJ47)
CAVSMEYGNKLVF

SEQ ID NO: 182438 - protein, 13 aa, Homo sapiens
  CDR3 for beta chain variable domain of TCR clone 91219 (TRBV12-5, TRBJ2-3)
CASGDRQSDTQYF

SEQ ID NO: 182439 - protein, 13 aa, Homo sapiens
  CDR3 for alpha chain variable domain of TCR clone 91220 (TRAV12-2, TRAJ9)
CAVKWAGGFKTIF

SEQ ID NO: 182440 - protein, 15 aa, Homo sapiens
  CDR3 for beta chain variable domain of TCR clone 91220 (TRBV7-3, TRBJ2-1)
CASSPTGGGEVEQFF

SEQ ID NO: 182441 - protein, 19 aa, Homo sapiens
  CDR3 for alpha chain variable domain of TCR clone 91221 (TRAV3, TRAJ6)
CAVRDRHPSRSGGSYIPTF

SEQ ID NO: 182442 - protein, 15 aa, Homo sapiens
  CDR3 for beta chain variable domain of TCR clone 91221 (TRBV18, TRBJ2-7)
CASSPTFMDSYEQYF

SEQ ID NO: 182443 - protein, 15 aa, Homo sapiens
  CDR3 for alpha chain variable domain of TCR clone 91222 (TRAV16, TRAJ4)
CALEDPSGDYNKLIF

SEQ ID NO: 182444 - protein, 13 aa, Homo sapiens
  CDR3 for beta chain variable domain of TCR clone 91222 (TRBV7-3, TRBJ2-7)
CASSQAGGYEQYF

SEQ ID NO: 182445 - protein, 15 aa, Homo sapiens
  CDR3 for alpha chain variable domain of TCR clone 91223 (TRAV3, TRAJ3)
CAVRDGHSSASKLIF

SEQ ID NO: 182446 - protein, 17 aa, Homo sapiens
  CDR3 for beta chain variable domain of TCR clone 91223 (TRBV25-1, TRBJ2-7)
CASSDARVVFSSYEQYF

SEQ ID NO: 182447 - protein, 14 aa, Homo sapiens
  CDR3 for alpha chain variable domain of TCR clone 91224 (TRAV8-4, TRAJ39)
CAVSEGNAGNMLTF

SEQ ID NO: 182448 - protein, 15 aa, Homo sapiens
  CDR3 for beta chain variable domain of TCR clone 91224 (TRBV19, TRBJ2-7)
CASRPTPGLSIEQYF

SEQ ID NO: 182449 - protein, 15 aa, Homo sapiens
  CDR3 for alpha chain variable domain of TCR clone 91225 (TRAV12-1, TRAJ9)
CVVSFGDTGGFKTIF

SEQ ID NO: 182450 - protein, 12 aa, Homo sapiens
  CDR3 for beta chain variable domain of TCR clone 91225 (TRBV11-3, TRBJ1-1)
CASSHRQGEAFL

SEQ ID NO: 182451 - protein, 12 aa, Homo sapiens
  CDR3 for alpha chain variable domain of TCR clone 91226 (TRAV12-3, TRAJ17)
CAMTLTGNKLTF

SEQ ID NO: 182452 - protein, 15 aa, Homo sapiens
  CDR3 for beta chain variable domain of TCR clone 91226 (TRBV19, TRBJ2-5)
CASRGLAGAQETQYF

SEQ ID NO: 182453 - protein, 16 aa, Homo sapiens
  CDR3 for alpha chain variable domain of TCR clone 91227 (TRAV35, TRAJ52)
CAGQGSGGTSYGKLTF

SEQ ID NO: 182454 - protein, 17 aa, Homo sapiens
  CDR3 for beta chain variable domain of TCR clone 91227 (TRBV13, TRBJ2-3)
CASSLSRVARGRNTQYF

SEQ ID NO: 182455 - protein, 23 aa, Homo sapiens
  CDR3 for alpha chain variable domain of TCR clone 91228 (TRAV26-1, TRAJ38)
CIADNAGNNHIQNPDPAVYQLRH

SEQ ID NO: 182456 - protein, 15 aa, Homo sapiens
  CDR3 for beta chain variable domain of TCR clone 91228 (TRBV27, TRBJ2-1)
CASSNGGGSSNEQFF

SEQ ID NO: 182457 - protein, 16 aa, Homo sapiens
  CDR3 for alpha chain variable domain of TCR clone 91229 (TRAV4, TRAJ22)
CLAGDLYSGSARQLTF

SEQ ID NO: 182458 - protein, 14 aa, Homo sapiens
  CDR3 for beta chain variable domain of TCR clone 91229 (TRBV28, TRBJ2-3)
CASSWRGRADTQYF

SEQ ID NO: 182459 - protein, 16 aa, Homo sapiens
  CDR3 for alpha chain variable domain of TCR clone 91230 (TRAV12-3, TRAJ53)
CAMSPGSGGSNYKLTF

SEQ ID NO: 182460 - protein, 15 aa, Homo sapiens
  CDR3 for beta chain variable domain of TCR clone 91230 (TRBV28, TRBJ2-3)
CAPTFRDWSTDTQYF

SEQ ID NO: 182461 - protein, 16 aa, Homo sapiens
  CDR3 for alpha chain variable domain of TCR clone 91231 (TRAV4, TRAJ18)
CCVLLIGGSTLGRLYF

SEQ ID NO: 182462 - protein, 16 aa, Homo sapiens
  CDR3 for beta chain variable domain of TCR clone 91231 (TRBV7-8, TRBJ2-4)
CASSAERTLAKNIQYF

SEQ ID NO: 182463 - protein, 17 aa, Homo sapiens
  CDR3 for alpha chain variable domain of TCR clone 91232 (TRAV8-6, TRAJ58)
CAVSSWVGETSGSRLTF

SEQ ID NO: 182464 - protein, 15 aa, Homo sapiens
  CDR3 for beta chain variable domain of TCR clone 91232 (TRBV20-1, TRBJ2-7)
CSARDRVSGMDKQYF

SEQ ID NO: 182465 - protein, 15 aa, Homo sapiens
  CDR3 for alpha chain variable domain of TCR clone 91233 (TRAV12-3, TRAJ49)
CAMAVTPNTGNQFYF

SEQ ID NO: 182466 - protein, 17 aa, Homo sapiens
  CDR3 for beta chain variable domain of TCR clone 91233 (TRBV20-1, TRBJ2-1)
CSASSSGLGDPTMSSSS

SEQ ID NO: 182467 - protein, 14 aa, Homo sapiens
  CDR3 for alpha chain variable domain of TCR clone 91234 (TRAV12-3, TRAJ29)
CAMSPYSGNTPLFF

SEQ ID NO: 182468 - protein, 15 aa, Homo sapiens
  CDR3 for beta chain variable domain of TCR clone 91234 (TRBV27, TRBJ2-1)
CASSNGGGSSNEQFF

SEQ ID NO: 182469 - protein, 14 aa, Homo sapiens
  CDR3 for alpha chain variable domain of TCR clone 91235 (TRAV12-2, TRAJ17)
CAVLFKAAGNKLTF

SEQ ID NO: 182470 - protein, 14 aa, Homo sapiens
  CDR3 for beta chain variable domain of TCR clone 91235 (TRBV7-8, TRBJ2-5)
CASSATGGQETQYV

SEQ ID NO: 182471 - protein, 13 aa, Homo sapiens
  CDR3 for alpha chain variable domain of TCR clone 91236 (TRAV3, TRAJ21)
CAVREPDFNKFYF

SEQ ID NO: 182472 - protein, 13 aa, Homo sapiens
  CDR3 for beta chain variable domain of TCR clone 91236 (TRBV19, TRBJ1-1)
CASSGQVNTEAFF

SEQ ID NO: 182473 - protein, 16 aa, Homo sapiens
  CDR3 for alpha chain variable domain of TCR clone 91237 (TRAV3, TRAJ21)
CAVRDIERGNFNKFYF

SEQ ID NO: 182474 - protein, 16 aa, Homo sapiens
  CDR3 for beta chain variable domain of TCR clone 91237 (TRBV12-4, TRBJ1-5)
CASSRPVGGSDQPQHF

SEQ ID NO: 182475 - protein, 16 aa, Homo sapiens
  CDR3 for alpha chain variable domain of TCR clone 91238 (TRAV3, TRAJ10)
CAVRDMNAGGGNKITF

SEQ ID NO: 182476 - protein, 16 aa, Homo sapiens
  CDR3 for beta chain variable domain of TCR clone 91238 (TRBV6-3, TRBJ1-2)
CASSYSRRASNYGYTF

SEQ ID NO: 182477 - protein, 14 aa, Homo sapiens
  CDR3 for alpha chain variable domain of TCR clone 91239 (TRAV1-2, TRAJ16)
CAVNRFSDGQKLLF

SEQ ID NO: 182478 - protein, 13 aa, Homo sapiens
  CDR3 for beta chain variable domain of TCR clone 91239 (TRBV19, TRBJ1-2)
CASSVPGQDGYIF

SEQ ID NO: 182479 - protein, 20 aa, Homo sapiens
  CDR3 for alpha chain variable domain of TCR clone 91240 (TRAV16, TRAJ26)
CAPEELWSEFCLWSRNQIVR

SEQ ID NO: 182480 - protein, 15 aa, Homo sapiens
  CDR3 for beta chain variable domain of TCR clone 91240 (TRBV7-2, TRBJ2-3)
CASSLTGTSTDTQYF

SEQ ID NO: 182481 - protein, 14 aa, Homo sapiens
  CDR3 for alpha chain variable domain of TCR clone 91241 (TRAV13-1, TRAJ26)
CAASSAHYGKNFVF

SEQ ID NO: 182482 - protein, 17 aa, Homo sapiens
  CDR3 for beta chain variable domain of TCR clone 91241 (TRBV25-1, TRBJ2-5)
CASSRRGGRGGQETQYF

SEQ ID NO: 182483 - protein, 14 aa, Homo sapiens
  CDR3 for alpha chain variable domain of TCR clone 91242 (TRAV1-2, TRAJ8)
CAVREDTGFQKLVF

SEQ ID NO: 182484 - protein, 13 aa, Homo sapiens
  CDR3 for beta chain variable domain of TCR clone 91242 (TRBV7-9, TRBJ1-2)
CASSPRGLSNTMA

SEQ ID NO: 182485 - protein, 16 aa, Homo sapiens
  CDR3 for alpha chain variable domain of TCR clone 91243 (TRAV30, TRAJ24)
CGTEIVHADSWGKFQF

SEQ ID NO: 182486 - protein, 12 aa, Homo sapiens
  CDR3 for beta chain variable domain of TCR clone 91243 (TRBV11-2, TRBJ2-2)
CASSLPTGELFF

SEQ ID NO: 182487 - protein, 14 aa, Homo sapiens
  CDR3 for alpha chain variable domain of TCR clone 91244 (TRAV1-2, TRAJ8)
CAVREDTGFQKLVF

SEQ ID NO: 182488 - protein, 14 aa, Homo sapiens
  CDR3 for beta chain variable domain of TCR clone 91244 (TRBV19, TRBJ2-1)
CASPAFVLSGEQFF

SEQ ID NO: 182489 - protein, 13 aa, Homo sapiens
  CDR3 for alpha chain variable domain of TCR clone 91245 (TRAV13-1, TRAJ39)
CAARIWAGNMLTF

SEQ ID NO: 182490 - protein, 13 aa, Homo sapiens
  CDR3 for beta chain variable domain of TCR clone 91245 (TRBV11-2, TRBJ1-3)
CASSLEPVNTIYF

SEQ ID NO: 182491 - protein, 14 aa, Homo sapiens
  CDR3 for alpha chain variable domain of TCR clone 91246 (TRAV16, TRAJ39)
CALSKNNAGNMLTF

SEQ ID NO: 182492 - protein, 14 aa, Homo sapiens
  CDR3 for beta chain variable domain of TCR clone 91246 (TRBV7-3, TRBJ2-1)
CASSLSGSYNEQFF

SEQ ID NO: 182493 - protein, 12 aa, Homo sapiens
  CDR3 for alpha chain variable domain of TCR clone 91247 (TRAV12-1, TRAJ40)
CVVYSGTYKYIF

SEQ ID NO: 182494 - protein, 15 aa, Homo sapiens
  CDR3 for beta chain variable domain of TCR clone 91247 (TRBV6-3, TRBJ2-7)
CASSSPGTVFYEQYF

SEQ ID NO: 182495 - protein, 15 aa, Homo sapiens
  CDR3 for alpha chain variable domain of TCR clone 91248 (TRAV21, TRAJ53)
CATLNSGGSNYILTF

SEQ ID NO: 182496 - protein, 13 aa, Homo sapiens
  CDR3 for beta chain variable domain of TCR clone 91248 (TRBV7-2, TRBJ2-5)
CASSQTSVETQYF

SEQ ID NO: 182497 - protein, 14 aa, Homo sapiens
  CDR3 for alpha chain variable domain of TCR clone 91249 (TRAV1-2, TRAJ16)
CAVNRFSVGQKLLF

SEQ ID NO: 182498 - protein, 13 aa, Homo sapiens
  CDR3 for beta chain variable domain of TCR clone 91249 (TRBV4-1, TRBJ2-1)
CASSQAGGDEQFF

SEQ ID NO: 182499 - protein, 14 aa, Homo sapiens
  CDR3 for alpha chain variable domain of TCR clone 91250 (TRAV17, TRAJ35)
CATDRPGFGNVLHC

SEQ ID NO: 182500 - protein, 19 aa, Homo sapiens
  CDR3 for beta chain variable domain of TCR clone 91250 (TRBV11-3, TRBJ2-2)
CASSTRPGAKTKNTGELFF

SEQ ID NO: 182501 - protein, 12 aa, Homo sapiens
  CDR3 for alpha chain variable domain of TCR clone 91251 (TRAV35, TRAJ39)
LAPNNAGNMLTF

SEQ ID NO: 182502 - protein, 13 aa, Homo sapiens
  CDR3 for beta chain variable domain of TCR clone 91251 (TRBV19, TRBJ1-3)
CASRLSLGNTIYF

SEQ ID NO: 182503 - protein, 17 aa, Homo sapiens
  CDR3 for alpha chain variable domain of TCR clone 91252 (TRAV8-6, TRAJ58)
CAVSSCVGETSGSRLTF

SEQ ID NO: 182504 - protein, 16 aa, Homo sapiens
  CDR3 for beta chain variable domain of TCR clone 91252 (TRBV20-1, TRBJ1-4)
CSAPGQGLLTNEKLFF

SEQ ID NO: 182505 - protein, 14 aa, Homo sapiens
  CDR3 for alpha chain variable domain of TCR clone 91253 (TRAV13-1, TRAJ35)
CAASKGGFGNVLHC

SEQ ID NO: 182506 - protein, 13 aa, Homo sapiens
  CDR3 for beta chain variable domain of TCR clone 91253 (TRBV28, TRBJ2-5)
CASSSRNQETQYF

SEQ ID NO: 182507 - protein, 15 aa, Homo sapiens
  CDR3 for alpha chain variable domain of TCR clone 91254 (TRAV21, TRAJ45)
CAVSYSGGGADGLTF

SEQ ID NO: 182508 - protein, 14 aa, Homo sapiens
  CDR3 for beta chain variable domain of TCR clone 91254 (TRBV7-9, TRBJ2-2)
CASSLVQDTGELFF

SEQ ID NO: 182509 - protein, 14 aa, Homo sapiens
  CDR3 for alpha chain variable domain of TCR clone 91255 (TRAV1-2, TRAJ16)
CAVNRFSYGQKLLF

SEQ ID NO: 182510 - protein, 14 aa, Homo sapiens
  CDR3 for beta chain variable domain of TCR clone 91255 (TRBV4-1, TRBJ2-2)
CASSQAVNTGELFF

SEQ ID NO: 182511 - protein, 14 aa, Homo sapiens
  CDR3 for alpha chain variable domain of TCR clone 91256 (TRAV17, TRAJ13)
CATVESGGYQKVTF

SEQ ID NO: 182512 - protein, 17 aa, Homo sapiens
  CDR3 for beta chain variable domain of TCR clone 91256 (TRBV7-9, TRBJ2-6)
CASSPSQGLRGANVLTF

SEQ ID NO: 182513 - protein, 12 aa, Homo sapiens
  CDR3 for alpha chain variable domain of TCR clone 91257 (TRAV13-2, TRAJ8)
CAPWLGFQKLVF

SEQ ID NO: 182514 - protein, 14 aa, Homo sapiens
  CDR3 for beta chain variable domain of TCR clone 91257 (TRBV6-6, TRBJ1-5)
CASSYGPANQPQHF

SEQ ID NO: 182515 - protein, 13 aa, Homo sapiens
  CDR3 for alpha chain variable domain of TCR clone 91258 (TRAV13-1, TRAJ39)
CAASIWAGNMLTF

SEQ ID NO: 182516 - protein, 16 aa, Homo sapiens
  CDR3 for beta chain variable domain of TCR clone 91258 (TRBV11-2, TRBJ1-2)
CASSPSGREANYGYTF

SEQ ID NO: 182517 - protein, 17 aa, Homo sapiens
  CDR3 for alpha chain variable domain of TCR clone 91259 (TRAV13-1, TRAJ28)
CAASPPYSGAGSYQLTF

SEQ ID NO: 182518 - protein, 16 aa, Homo sapiens
  CDR3 for beta chain variable domain of TCR clone 91259 (TRBV2, TRBJ2-3)
CASSTSVEGVTDTQYF

SEQ ID NO: 182519 - protein, 11 aa, Homo sapiens
  CDR3 for alpha chain variable domain of TCR clone 91260 (TRAV21, TRAJ41)
CAVRSGYALNF

SEQ ID NO: 182520 - protein, 13 aa, Homo sapiens
  CDR3 for beta chain variable domain of TCR clone 91260 (TRBV7-9, TRBJ1-2)
CASSLKQNYGYTC

SEQ ID NO: 182521 - protein, 15 aa, Homo sapiens
  CDR3 for alpha chain variable domain of TCR clone 91261 (TRAV21, TRAJ53)
CATLNSGGSNYKLTF

SEQ ID NO: 182522 - protein, 16 aa, Homo sapiens
  CDR3 for beta chain variable domain of TCR clone 91261 (TRBV9, TRBJ2-1)
CASSVGGGGNYNDQFF

SEQ ID NO: 182523 - protein, 15 aa, Homo sapiens
  CDR3 for alpha chain variable domain of TCR clone 91262 (TRAV26-1, TRAJ21)
CIVRVPNYNFNKLYF

SEQ ID NO: 182524 - protein, 16 aa, Homo sapiens
  CDR3 for beta chain variable domain of TCR clone 91262 (TRBV7-9, TRBJ2-3)
CASSLQGNPGTDTQYF

SEQ ID NO: 182525 - protein, 13 aa, Homo sapiens
  CDR3 for alpha chain variable domain of TCR clone 91263 (TRAV8-3, TRAJ40)
CAVGAQYLRNLQI

SEQ ID NO: 182526 - protein, 13 aa, Homo sapiens
  CDR3 for beta chain variable domain of TCR clone 91263 (TRBV24-1, TRBJ2-2)
CATSDWSTGELFF

SEQ ID NO: 182527 - protein, 17 aa, Homo sapiens
  CDR3 for alpha chain variable domain of TCR clone 91264 (TRAV3, TRAJ6)
CAVRDGPRAGGSDIPTF

SEQ ID NO: 182528 - protein, 12 aa, Homo sapiens
  CDR3 for beta chain variable domain of TCR clone 91264 (TRBV11-2, TRBJ2-2)
CASSLGGGELFF

SEQ ID NO: 182529 - protein, 13 aa, Homo sapiens
  CDR3 for alpha chain variable domain of TCR clone 91265 (TRAV20, TRAJ54)
CAVQAGGAQQLVF

SEQ ID NO: 182530 - protein, 14 aa, Homo sapiens
  CDR3 for beta chain variable domain of TCR clone 91265 (TRBV20-1, TRBJ2-7)
CSAKTGTGGYEQYF

SEQ ID NO: 182531 - protein, 18 aa, Homo sapiens
  CDR3 for alpha chain variable domain of TCR clone 91266 (TRAV21, TRAJ52)
CAVRPSPAGGTSYGKLTF

SEQ ID NO: 182532 - protein, 14 aa, Homo sapiens
  CDR3 for beta chain variable domain of TCR clone 91266 (TRBV13, TRBJ2-5)
CASYRRLAEETQYF

SEQ ID NO: 182533 - protein, 13 aa, Homo sapiens
  CDR3 for alpha chain variable domain of TCR clone 91267 (TRAV35, TRAJ42)
CAGFPGSQGNLIF

SEQ ID NO: 182534 - protein, 13 aa, Homo sapiens
  CDR3 for beta chain variable domain of TCR clone 91267 (TRBV29-1, TRBJ2-1)
CSVEGGRVNEHFF

SEQ ID NO: 182535 - protein, 12 aa, Homo sapiens
  CDR3 for alpha chain variable domain of TCR clone 91268 (TRAV16, TRAJ22)
CALEVSARQLNF

SEQ ID NO: 182536 - protein, 14 aa, Homo sapiens
  CDR3 for beta chain variable domain of TCR clone 91268 (TRBV11-2, TRBJ2-3)
CASSSIASTDTQYF

SEQ ID NO: 182537 - protein, 14 aa, Homo sapiens
  CDR3 for alpha chain variable domain of TCR clone 91269 (TRAV16, TRAJ8)
CALLLNTGSQKLVF

SEQ ID NO: 182538 - protein, 15 aa, Homo sapiens
  CDR3 for beta chain variable domain of TCR clone 91269 (TRBV7-7, TRBJ2-2)
CATSKLAKNTGELFF

SEQ ID NO: 182539 - protein, 14 aa, Homo sapiens
  CDR3 for alpha chain variable domain of TCR clone 91270 (TRAV1-2, TRAJ16)
CAVNRLSDGQKLLF

SEQ ID NO: 182540 - protein, 16 aa, Homo sapiens
  CDR3 for beta chain variable domain of TCR clone 91270 (TRBV11-2, TRBJ1-2)
CASSLDTGGADYGYTF

SEQ ID NO: 182541 - protein, 14 aa, Homo sapiens
  CDR3 for alpha chain variable domain of TCR clone 91271 (TRAV12-2, TRAJ13)
CAVKKTGGYQKGTF

SEQ ID NO: 182542 - protein, 16 aa, Homo sapiens
  CDR3 for beta chain variable domain of TCR clone 91271 (TRBV2, TRBJ2-1)
CASRSPAGGKYNEQFF

SEQ ID NO: 182543 - protein, 15 aa, Homo sapiens
  CDR3 for alpha chain variable domain of TCR clone 91272 (TRAV21, TRAJ24)
CAARSSTDSWGKLQF

SEQ ID NO: 182544 - protein, 16 aa, Homo sapiens
  CDR3 for beta chain variable domain of TCR clone 91272 (TRBV5-4, TRBJ2-1)
CASSLALAGAYNEQFF

SEQ ID NO: 182545 - protein, 13 aa, Homo sapiens
  CDR3 for alpha chain variable domain of TCR clone 91273 (TRAV8-4, TRAJ10)
CAAFTGGGNKITF

SEQ ID NO: 182546 - protein, 15 aa, Homo sapiens
  CDR3 for beta chain variable domain of TCR clone 91273 (TRBV2, TRBJ2-3)
CASSDFEKATDTQYF

SEQ ID NO: 182547 - protein, 13 aa, Homo sapiens
  CDR3 for alpha chain variable domain of TCR clone 91274 (TRAV3, TRAJ29)
CAVRDIIDTPLVF

SEQ ID NO: 182548 - protein, 12 aa, Homo sapiens
  CDR3 for beta chain variable domain of TCR clone 91274 (TRBV12-4, TRBJ2-7)
CASSLGGYEQYF

SEQ ID NO: 182549 - protein, 14 aa, Homo sapiens
  CDR3 for alpha chain variable domain of TCR clone 91275 (TRAV8-1, TRAJ24)
CAVNAADSWGNCSL

SEQ ID NO: 182550 - protein, 16 aa, Homo sapiens
  CDR3 for beta chain variable domain of TCR clone 91275 (TRBV4-3, TRBJ2-1)
CASSPALDRGVNEQFF

SEQ ID NO: 182551 - protein, 14 aa, Homo sapiens
  CDR3 for alpha chain variable domain of TCR clone 91276 (TRAV1-2, TRAJ8)
CAVREDTGFQKLVF

SEQ ID NO: 182552 - protein, 12 aa, Homo sapiens
  CDR3 for beta chain variable domain of TCR clone 91276 (TRBV12-4, TRBJ2-2)
CASSLGGGELFF

SEQ ID NO: 182553 - protein, 14 aa, Homo sapiens
  CDR3 for alpha chain variable domain of TCR clone 91277 (TRAV35, TRAJ33)
CAGSSQDSNYQLIW

SEQ ID NO: 182554 - protein, 12 aa, Homo sapiens
  CDR3 for beta chain variable domain of TCR clone 91277 (TRBV11-2, TRBJ2-1)
CASSPGNNEQFF

SEQ ID NO: 182555 - protein, 14 aa, Homo sapiens
  CDR3 for alpha chain variable domain of TCR clone 91278 (TRAV16, TRAJ39)
CALSKNNAGNMLTF

SEQ ID NO: 182556 - protein, 15 aa, Homo sapiens
  CDR3 for beta chain variable domain of TCR clone 91278 (TRBV11-3, TRBJ2-3)
CASLKDGREGDTQYF

SEQ ID NO: 182557 - protein, 13 aa, Homo sapiens
  CDR3 for alpha chain variable domain of TCR clone 91279 (TRAV12-3, TRAJ54)
CAMKVRGAQKLVF

SEQ ID NO: 182558 - protein, 15 aa, Homo sapiens
  CDR3 for beta chain variable domain of TCR clone 91279 (TRBV28, TRBJ2-7)
CASSPTGTGSYEQYF

SEQ ID NO: 182559 - protein, 15 aa, Homo sapiens
  CDR3 for alpha chain variable domain of TCR clone 91280 (TRAV21, TRAJ24)
CAARSSTDSWGKLQF

SEQ ID NO: 182560 - protein, 16 aa, Homo sapiens
  CDR3 for beta chain variable domain of TCR clone 91280 (TRBV11-2, TRBJ1-2)
CASSLDTGGADYGYTF

SEQ ID NO: 182561 - protein, 14 aa, Homo sapiens
  CDR3 for alpha chain variable domain of TCR clone 91281 (TRAV1-2, TRAJ16)
SAVNRFSDGQKLLF

SEQ ID NO: 182562 - protein, 15 aa, Homo sapiens
  CDR3 for beta chain variable domain of TCR clone 91281 (TRBV7-9, TRBJ1-4)
CASSARTGGNEKLFF

SEQ ID NO: 182563 - protein, 15 aa, Homo sapiens
  CDR3 for alpha chain variable domain of TCR clone 91282 (TRAV8-3, TRAJ45)
CASSYSGGGADGLTF

SEQ ID NO: 182564 - protein, 15 aa, Homo sapiens
  CDR3 for beta chain variable domain of TCR clone 91282 (TRBV18, TRBJ1-1)
CASFPRQGENTEAFF

SEQ ID NO: 182565 - protein, 13 aa, Homo sapiens
  CDR3 for alpha chain variable domain of TCR clone 91283 (TRAV13-1, TRAJ21)
CAASIYNFNKFYF

SEQ ID NO: 182566 - protein, 13 aa, Homo sapiens
  CDR3 for beta chain variable domain of TCR clone 91283 (TRBV27, TRBJ1-4)
CASGLMGDEKLFF

SEQ ID NO: 182567 - protein, 15 aa, Homo sapiens
  CDR3 for alpha chain variable domain of TCR clone 91284 (TRAV17, TRAJ57)
CATGPSQGGSEKLVF

SEQ ID NO: 182568 - protein, 15 aa, Homo sapiens
  CDR3 for beta chain variable domain of TCR clone 91284 (TRBV6-3, TRBJ2-7)
CASSSPGTVSYEQYF

SEQ ID NO: 182569 - protein, 12 aa, Homo sapiens
  CDR3 for alpha chain variable domain of TCR clone 91285 (TRAV12-1, TRAJ40)
CVVYSGTYKYIF

SEQ ID NO: 182570 - protein, 12 aa, Homo sapiens
  CDR3 for beta chain variable domain of TCR clone 91285 (TRBV3-1, TRBJ2-1)
CASGGLGNEQFF

SEQ ID NO: 182571 - protein, 14 aa, Homo sapiens
  CDR3 for alpha chain variable domain of TCR clone 91286 (TRAV8-4, TRAJ9)
CAVRINTGGFKTIF

SEQ ID NO: 182572 - protein, 14 aa, Homo sapiens
  CDR3 for beta chain variable domain of TCR clone 91286 (TRBV7-9, TRBJ2-3)
CASSLEDGTDTQYF

SEQ ID NO: 182573 - protein, 12 aa, Homo sapiens
  CDR3 for alpha chain variable domain of TCR clone 91287 (TRAV12-3, TRAJ17)
CAMTLTGNKLTS

SEQ ID NO: 182574 - protein, 15 aa, Homo sapiens
  CDR3 for beta chain variable domain of TCR clone 91287 (TRBV20-1, TRBJ2-7)
CSARDRVSGMDEQCF

SEQ ID NO: 182575 - protein, 13 aa, Homo sapiens
  CDR3 for alpha chain variable domain of TCR clone 91288 (TRAV36/DV7, TRAJ7)
CAGTRYGNNSLAF

SEQ ID NO: 182576 - protein, 14 aa, Homo sapiens
  CDR3 for beta chain variable domain of TCR clone 91288 (TRBV19, TRBJ2-1)
CASPTFVLSGEQFF

SEQ ID NO: 182577 - protein, 13 aa, Homo sapiens
  CDR3 for alpha chain variable domain of TCR clone 91289 (TRAV21, TRAJ57)
CAVTQGGSEKLVF

SEQ ID NO: 182578 - protein, 15 aa, Homo sapiens
  CDR3 for beta chain variable domain of TCR clone 91289 (TRBV2, TRBJ2-1)
CASSELAGSYNEQFF

SEQ ID NO: 182579 - protein, 15 aa, Homo sapiens
  CDR3 for alpha chain variable domain of TCR clone 91290 (TRAV12-3, TRAJ22)
CAMRTISGSARQLTF

SEQ ID NO: 182580 - protein, 16 aa, Homo sapiens
  CDR3 for beta chain variable domain of TCR clone 91290 (TRBV20-1, TRBJ2-2)
CSARRPGTGNTGRLFF

SEQ ID NO: 182581 - protein, 13 aa, Homo sapiens
  CDR3 for alpha chain variable domain of TCR clone 91291 (TRAV12-2, TRAJ39)
CAVNNNAGNMLTF

SEQ ID NO: 182582 - protein, 12 aa, Homo sapiens
  CDR3 for beta chain variable domain of TCR clone 91291 (TRBV18, TRBJ2-1)
CASSSDEDEQFF

SEQ ID NO: 182583 - protein, 14 aa, Homo sapiens
  CDR3 for alpha chain variable domain of TCR clone 91292 (TRAV21, TRAJ58)
CAVRRGRSGSRLTF

SEQ ID NO: 182584 - protein, 13 aa, Homo sapiens
  CDR3 for beta chain variable domain of TCR clone 91292 (TRBV7-2, TRBJ1-6)
CASSLKSDSPLHF

SEQ ID NO: 182585 - protein, 15 aa, Homo sapiens
  CDR3 for alpha chain variable domain of TCR clone 91293 (TRAV12-3, TRAJ6)
CAMSATTGGSYIPTF

SEQ ID NO: 182586 - protein, 16 aa, Homo sapiens
  CDR3 for beta chain variable domain of TCR clone 91293 (TRBV6-3, TRBJ2-2)
CASSSPDRGDTGELFF

SEQ ID NO: 182587 - protein, 13 aa, Homo sapiens
  CDR3 for alpha chain variable domain of TCR clone 91294 (TRAV3, TRAJ27)
CAVRPLGAGKSTF

SEQ ID NO: 182588 - protein, 16 aa, Homo sapiens
  CDR3 for beta chain variable domain of TCR clone 91294 (TRBV5-1, TRBJ2-3)
CASSLQGRVGADTQYF

SEQ ID NO: 182589 - protein, 14 aa, Homo sapiens
  CDR3 for alpha chain variable domain of TCR clone 91295 (TRAV4, TRAJ32)
CLVGLGGATNKLIF

SEQ ID NO: 182590 - protein, 15 aa, Homo sapiens
  CDR3 for beta chain variable domain of TCR clone 91295 (TRBV20-1, TRBJ2-7)
CSARDRVSGMDEQYF

SEQ ID NO: 182591 - protein, 15 aa, Homo sapiens
  CDR3 for alpha chain variable domain of TCR clone 91296 (TRAV3, TRAJ22)
CSVRDRGGSARQLTF

SEQ ID NO: 182592 - protein, 16 aa, Homo sapiens
  CDR3 for beta chain variable domain of TCR clone 91296 (TRBV4-2, TRBJ2-4)
CASSQELRRAKNIQYF

SEQ ID NO: 182593 - protein, 15 aa, Homo sapiens
  CDR3 for alpha chain variable domain of TCR clone 91297 (TRAV21, TRAJ53)
CATLNNGGSNYKLTF

SEQ ID NO: 182594 - protein, 15 aa, Homo sapiens
  CDR3 for beta chain variable domain of TCR clone 91297 (TRBV7-6, TRBJ1-5)
CASSQSSGINQPQHF

SEQ ID NO: 182595 - protein, 14 aa, Homo sapiens
  CDR3 for alpha chain variable domain of TCR clone 91298 (TRAV27, TRAJ44)
CAASFTGTASKLTF

SEQ ID NO: 182596 - protein, 12 aa, Homo sapiens
  CDR3 for beta chain variable domain of TCR clone 91298 (TRBV11-2, TRBJ2-1)
CASSPGNNEQFF

SEQ ID NO: 182597 - protein, 16 aa, Homo sapiens
  CDR3 for alpha chain variable domain of TCR clone 91299 (TRAV4, TRAJ18)
CCVLLIGGSTLGRLYF

SEQ ID NO: 182598 - protein, 16 aa, Homo sapiens
  CDR3 for beta chain variable domain of TCR clone 91299 (TRBV7-3, TRBJ2-2)
CASSLKRGTLSGELFF

SEQ ID NO: 182599 - protein, 13 aa, Homo sapiens
  CDR3 for alpha chain variable domain of TCR clone 91300 (TRAV2, TRAJ40)
CAVVTSGTYKYIF

SEQ ID NO: 182600 - protein, 16 aa, Homo sapiens
  CDR3 for beta chain variable domain of TCR clone 91300 (TRBV7-9, TRBJ1-3)
CASSLGAGSSGNAIYF

SEQ ID NO: 182601 - protein, 17 aa, Homo sapiens
  CDR3 for alpha chain variable domain of TCR clone 91301 (TRAV26-1, TRAJ10)
CIVSFRGLTGGGNKHTF

SEQ ID NO: 182602 - protein, 13 aa, Homo sapiens
  CDR3 for beta chain variable domain of TCR clone 91301 (TRBV20-1, TRBJ2-3)
CSASRQAADTQYF

SEQ ID NO: 182603 - protein, 14 aa, Homo sapiens
  CDR3 for alpha chain variable domain of TCR clone 91302 (TRAV17, TRAJ56)
CATVPAGANSKLTF

SEQ ID NO: 182604 - protein, 13 aa, Homo sapiens
  CDR3 for beta chain variable domain of TCR clone 91302 (TRBV12-4, TRBJ2-2)
CASSITGSGELSF

SEQ ID NO: 182605 - protein, 17 aa, Homo sapiens
  CDR3 for alpha chain variable domain of TCR clone 91303 (TRAV13-1, TRAJ52)
CAASSGAGGTSYGKLTF

SEQ ID NO: 182606 - protein, 14 aa, Homo sapiens
  CDR3 for beta chain variable domain of TCR clone 91303 (TRBV5-5, TRBJ1-5)
CASSGQGVDQPQHF

SEQ ID NO: 182607 - protein, 15 aa, Homo sapiens
  CDR3 for alpha chain variable domain of TCR clone 91304 (TRAV13-1, TRAJ44)
CAASRGGGTASKLTF

SEQ ID NO: 182608 - protein, 14 aa, Homo sapiens
  CDR3 for beta chain variable domain of TCR clone 91304 (TRBV27, TRBJ2-2)
CASSLGAAIGELFF

SEQ ID NO: 182609 - protein, 14 aa, Homo sapiens
  CDR3 for alpha chain variable domain of TCR clone 91305 (TRAV26-1, TRAJ45)
CIEVTGGGAHGLTF

SEQ ID NO: 182610 - protein, 13 aa, Homo sapiens
  CDR3 for beta chain variable domain of TCR clone 91305 (TRBV7-6, TRBJ1-2)
CASSLVADYGYTF

SEQ ID NO: 182611 - protein, 10 aa, Homo sapiens
  CDR3 for alpha chain variable domain of TCR clone 91306 (TRAV12-1, TRAJ33)
CVASNYQLIW

SEQ ID NO: 182612 - protein, 15 aa, Homo sapiens
  CDR3 for beta chain variable domain of TCR clone 91306 (TRBV5-4, TRBJ1-4)
CASSHGYGENEKLFF

SEQ ID NO: 182613 - protein, 13 aa, Homo sapiens
  CDR3 for alpha chain variable domain of TCR clone 91307 (TRAV1-2, TRAJ9)
CAALNTGGFKTIF

SEQ ID NO: 182614 - protein, 13 aa, Homo sapiens
  CDR3 for beta chain variable domain of TCR clone 91307 (TRBV15, TRBJ1-6)
CATSGGLNSPPHF

SEQ ID NO: 182615 - protein, 16 aa, Homo sapiens
  CDR3 for alpha chain variable domain of TCR clone 91308 (TRAV3, TRAJ10)
CAVRDMRAGGGNKPTF

SEQ ID NO: 182616 - protein, 12 aa, Homo sapiens
  CDR3 for beta chain variable domain of TCR clone 91308 (TRBV20-1, TRBJ2-7)
CSAGLKMGEQYF

SEQ ID NO: 182617 - protein, 13 aa, Homo sapiens
  CDR3 for alpha chain variable domain of TCR clone 91309 (TRAV17, TRAJ4)
CATQSGGYNKLIF

SEQ ID NO: 182618 - protein, 14 aa, Homo sapiens
  CDR3 for beta chain variable domain of TCR clone 91309 (TRBV20-1, TRBJ1-5)
CSARDDRGNQPQHF

SEQ ID NO: 182619 - protein, 14 aa, Homo sapiens
  CDR3 for alpha chain variable domain of TCR clone 91310 (TRAV16, TRAJ32)
CALKSGGATNKLIF

SEQ ID NO: 182620 - protein, 13 aa, Homo sapiens
  CDR3 for beta chain variable domain of TCR clone 91310 (TRBV27, TRBJ1-1)
CASSLSIGAEAFF

SEQ ID NO: 182621 - protein, 12 aa, Homo sapiens
  CDR3 for alpha chain variable domain of TCR clone 91311 (TRAV2, TRAJ36)
CAALTGANNLFF

SEQ ID NO: 182622 - protein, 18 aa, Homo sapiens
  CDR3 for beta chain variable domain of TCR clone 91311 (TRBV19, TRBJ1-1)
CASIIDGGDYTGNTEAFF

SEQ ID NO: 182623 - protein, 14 aa, Homo sapiens
  CDR3 for alpha chain variable domain of TCR clone 91312 (TRAV1-2, TRAJ16)
CAVNRFSDGQKLLF

SEQ ID NO: 182624 - protein, 17 aa, Homo sapiens
  CDR3 for beta chain variable domain of TCR clone 91312 (TRBV7-8, TRBJ2-6)
CASSAGTGGAGANDLTF

SEQ ID NO: 182625 - protein, 18 aa, Homo sapiens
  CDR3 for alpha chain variable domain of TCR clone 91313 (TRAV13-1, TRAJ52)
CAASKRSAGGTSYGKLTF

SEQ ID NO: 182626 - protein, 16 aa, Homo sapiens
  CDR3 for beta chain variable domain of TCR clone 91313 (TRBV2, TRBJ2-3)
CASSTSVEGVTDTQYF

SEQ ID NO: 182627 - protein, 12 aa, Homo sapiens
  CDR3 for alpha chain variable domain of TCR clone 91314 (TRAV36/DV7, TRAJ40)
CAVGTGTYKYIF

SEQ ID NO: 182628 - protein, 13 aa, Homo sapiens
  CDR3 for beta chain variable domain of TCR clone 91314 (TRBV19, TRBJ1-2)
CASSVPGQDGYTF

SEQ ID NO: 182629 - protein, 11 aa, Homo sapiens
  CDR3 for alpha chain variable domain of TCR clone 91315 (TRAV12-2, TRAJ29)
CDVTLRSPLVF

SEQ ID NO: 182630 - protein, 16 aa, Homo sapiens
  CDR3 for beta chain variable domain of TCR clone 91315 (TRBV19, TRBJ1-5)
CASSIDRGGPRQPQHF

SEQ ID NO: 182631 - protein, 13 aa, Homo sapiens
  CDR3 for alpha chain variable domain of TCR clone 91316 (TRAV2, TRAJ15)
CAVASQAGTALIF

SEQ ID NO: 182632 - protein, 16 aa, Homo sapiens
  CDR3 for beta chain variable domain of TCR clone 91316 (TRBV5-1, TRBJ1-1)
CASSSWGNSLNTEAFF

SEQ ID NO: 182633 - protein, 17 aa, Homo sapiens
  CDR3 for alpha chain variable domain of TCR clone 91317 (TRAV23/DV6, TRAJ57)
CAASSTLSQGASEKLVF

SEQ ID NO: 182634 - protein, 14 aa, Homo sapiens
  CDR3 for beta chain variable domain of TCR clone 91317 (TRBV25-1, TRBJ1-1)
CASTHLGGNTEAFF

SEQ ID NO: 182635 - protein, 19 aa, Homo sapiens
  CDR3 for alpha chain variable domain of TCR clone 91318 (TRAV1-1, TRAJ6)
CAVRDYRGQEEATYLHLEE

SEQ ID NO: 182636 - protein, 13 aa, Homo sapiens
  CDR3 for beta chain variable domain of TCR clone 91318 (TRBV10-2, TRBJ2-7)
CASGASGGYEQYF

SEQ ID NO: 182637 - protein, 14 aa, Homo sapiens
  CDR3 for alpha chain variable domain of TCR clone 91319 (TRAV17, TRAJ57)
CATDPQGGSEKLVF

SEQ ID NO: 182638 - protein, 11 aa, Homo sapiens
  CDR3 for beta chain variable domain of TCR clone 91319 (TRBV11-2, TRBJ2-2)
CASSLPGELFF

SEQ ID NO: 182639 - protein, 13 aa, Homo sapiens
  CDR3 for alpha chain variable domain of TCR clone 91320 (TRAV3, TRAJ20)
CCEAFCNDYKLSF

SEQ ID NO: 182640 - protein, 15 aa, Homo sapiens
  CDR3 for beta chain variable domain of TCR clone 91320 (TRBV12-4, TRBJ2-5)
CASSPPTGLQETQYF

SEQ ID NO: 182641 - protein, 18 aa, Homo sapiens
  CDR3 for alpha chain variable domain of TCR clone 91321 (TRAV26-1, TRAJ22)
CIVRVSFWFCKATDLLIW

SEQ ID NO: 182642 - protein, 13 aa, Homo sapiens
  CDR3 for beta chain variable domain of TCR clone 91321 (TRBV7-9, TRBJ1-2)
CASSLKQNYGYAF

SEQ ID NO: 182643 - protein, 15 aa, Homo sapiens
  CDR3 for alpha chain variable domain of TCR clone 91322 (TRAV29/DV5, TRAJ29)
CAASERSAGNTPLVF

SEQ ID NO: 182644 - protein, 17 aa, Homo sapiens
  CDR3 for beta chain variable domain of TCR clone 91322 (TRBV4-1, TRBJ1-4)
CASSQEGPRGVEEKLFF

SEQ ID NO: 182645 - protein, 13 aa, Homo sapiens
  CDR3 for alpha chain variable domain of TCR clone 91323 (TRAV2, TRAJ40)
CAVFTSGTYKYIF

SEQ ID NO: 182646 - protein, 16 aa, Homo sapiens
  CDR3 for beta chain variable domain of TCR clone 91323 (TRBV29-1, TRBJ1-2)
CSVEANRDIANYGYTF

SEQ ID NO: 182647 - protein, 14 aa, Homo sapiens
  CDR3 for alpha chain variable domain of TCR clone 91324 (TRAV12-2, TRAJ45)
CAVNKEGGADGLTF

SEQ ID NO: 182648 - protein, 14 aa, Homo sapiens
  CDR3 for beta chain variable domain of TCR clone 91324 (TRBV20-1, TRBJ1-1)
CSAMGGTANTEAFF

SEQ ID NO: 182649 - protein, 14 aa, Homo sapiens
  CDR3 for alpha chain variable domain of TCR clone 91325 (TRAV12-2, TRAJ45)
CSVNIGGGADGLTF

SEQ ID NO: 182650 - protein, 13 aa, Homo sapiens
  CDR3 for beta chain variable domain of TCR clone 91325 (TRBV19, TRBJ2-2)
CASGIWSTGGLFF

SEQ ID NO: 182651 - protein, 15 aa, Homo sapiens
  CDR3 for alpha chain variable domain of TCR clone 91326 (TRAV1-2, TRAJ35)
CAVRDPGGFGNGLHC

SEQ ID NO: 182652 - protein, 14 aa, Homo sapiens
  CDR3 for beta chain variable domain of TCR clone 91326 (TRBV5-1, TRBJ2-1)
CASSLDDRFDEQFF

SEQ ID NO: 182653 - protein, 14 aa, Homo sapiens
  CDR3 for alpha chain variable domain of TCR clone 91327 (TRAV12-2, TRAJ45)
CAVSIGGGADGLTF

SEQ ID NO: 182654 - protein, 13 aa, Homo sapiens
  CDR3 for beta chain variable domain of TCR clone 91327 (TRBV19, TRBJ2-2)
CASSIWSTGELFF

SEQ ID NO: 182655 - protein, 14 aa, Homo sapiens
  CDR3 for alpha chain variable domain of TCR clone 91328 (TRAV23/DV6, TRAJ15)
CAASKYQAGTALIF

SEQ ID NO: 182656 - protein, 16 aa, Homo sapiens
  CDR3 for beta chain variable domain of TCR clone 91328 (TRBV7-9, TRBJ2-1)
CASSDVAGGSYNEQFF

SEQ ID NO: 182657 - protein, 14 aa, Homo sapiens
  CDR3 for alpha chain variable domain of TCR clone 91329 (TRAV3, TRAJ44)
CACTTGGTASKLTF

SEQ ID NO: 182658 - protein, 18 aa, Homo sapiens
  CDR3 for beta chain variable domain of TCR clone 91329 (TRBV11-2, TRBJ2-6)
CASSLNPFLGTGANVLTF

SEQ ID NO: 182659 - protein, 15 aa, Homo sapiens
  CDR3 for alpha chain variable domain of TCR clone 91330 (TRAV3, TRAJ9)
CAVGARNTGGFKTIF

SEQ ID NO: 182660 - protein, 12 aa, Homo sapiens
  CDR3 for beta chain variable domain of TCR clone 91330 (TRBV11-2, TRBJ2-7)
CASSLPTYEQYF

SEQ ID NO: 182661 - protein, 12 aa, Homo sapiens
  CDR3 for alpha chain variable domain of TCR clone 91331 (TRAV29/DV5, TRAJ49)
CAATDTGNQFYF

SEQ ID NO: 182662 - protein, 12 aa, Homo sapiens
  CDR3 for beta chain variable domain of TCR clone 91331 (TRBV12-4, TRBJ2-7)
WASSLGGYEQYF

SEQ ID NO: 182663 - protein, 13 aa, Homo sapiens
  CDR3 for alpha chain variable domain of TCR clone 91332 (TRAV3, TRAJ40)
CAVSGSGAYKYIF

SEQ ID NO: 182664 - protein, 15 aa, Homo sapiens
  CDR3 for beta chain variable domain of TCR clone 91332 (TRBV27, TRBJ1-5)
CASSSSGTGNQPQHF

SEQ ID NO: 182665 - protein, 13 aa, Homo sapiens
  CDR3 for alpha chain variable domain of TCR clone 91333 (TRAV26-2, TRAJ54)
CILRDQGAQKLVF

SEQ ID NO: 182666 - protein, 15 aa, Homo sapiens
  CDR3 for beta chain variable domain of TCR clone 91333 (TRBV28, TRBJ1-5)
CASSFSGYSNHPQHF

SEQ ID NO: 182667 - protein, 16 aa, Homo sapiens
  CDR3 for alpha chain variable domain of TCR clone 91334 (TRAV38-1, TRAJ32)
CAFMKGGGGATNKIIF

SEQ ID NO: 182668 - protein, 13 aa, Homo sapiens
  CDR3 for beta chain variable domain of TCR clone 91334 (TRBV20-1, TRBJ2-5)
CSAREAFQETQYF

SEQ ID NO: 182669 - protein, 16 aa, Homo sapiens
  CDR3 for alpha chain variable domain of TCR clone 91335 (TRAV38-2/DV8, TRAJ33)
CAYRTGLFVSNYQLIW

SEQ ID NO: 182670 - protein, 13 aa, Homo sapiens
  CDR3 for beta chain variable domain of TCR clone 91335 (TRBV27, TRBJ1-4)
CASSLMGDEKLFF

SEQ ID NO: 182671 - protein, 16 aa, Homo sapiens
  CDR3 for alpha chain variable domain of TCR clone 91336 (TRAV30, TRAJ24)
CGTEIVDADSWVKFQF

SEQ ID NO: 182672 - protein, 16 aa, Homo sapiens
  CDR3 for beta chain variable domain of TCR clone 91336 (TRBV7-3, TRBJ2-2)
CASSLKRGTLSGELFF

SEQ ID NO: 182673 - protein, 18 aa, Homo sapiens
  CDR3 for alpha chain variable domain of TCR clone 91337 (TRAV21, TRAJ52)
CAVRPSPAGGTSYGKLTF

SEQ ID NO: 182674 - protein, 17 aa, Homo sapiens
  CDR3 for beta chain variable domain of TCR clone 91337 (TRBV13, TRBJ2-3)
CASSLARVAGGRNAQYF

SEQ ID NO: 182675 - protein, 19 aa, Homo sapiens
  CDR3 for alpha chain variable domain of TCR clone 91338 (TRAV25, TRAJ20)
TATQTTDVGILPHDYKLSF

SEQ ID NO: 182676 - protein, 17 aa, Homo sapiens
  CDR3 for beta chain variable domain of TCR clone 91338 (TRBV4-3, TRBJ2-1)
CASSQFSSRRASGEQFF

SEQ ID NO: 182677 - protein, 15 aa, Homo sapiens
  CDR3 for alpha chain variable domain of TCR clone 91339 (TRAV3, TRAJ5)
CAVRDLDTGRRALTF

SEQ ID NO: 182678 - protein, 16 aa, Homo sapiens
  CDR3 for beta chain variable domain of TCR clone 91339 (TRBV7-3, TRBJ2-1)
CASSKPLAGGYNEQFF

SEQ ID NO: 182679 - protein, 14 aa, Homo sapiens
  CDR3 for alpha chain variable domain of TCR clone 91340 (TRAV17, TRAJ56)
CATVPAGANSKLTL

SEQ ID NO: 182680 - protein, 13 aa, Homo sapiens
  CDR3 for beta chain variable domain of TCR clone 91340 (TRBV12-4, TRBJ2-2)
CASSITGSGELFF

SEQ ID NO: 182681 - protein, 14 aa, Homo sapiens
  CDR3 for alpha chain variable domain of TCR clone 91341 (TRAV21, TRAJ15)
CAVSLNQAGTALIF

SEQ ID NO: 182682 - protein, 11 aa, Homo sapiens
  CDR3 for beta chain variable domain of TCR clone 91341 (TRBV20-1, TRBJ2-7)
CSARTSYEQYC

SEQ ID NO: 182683 - protein, 13 aa, Homo sapiens
  CDR3 for alpha chain variable domain of TCR clone 91342 (TRAV3, TRAJ3)
CAVRALGASKIIF

SEQ ID NO: 182684 - protein, 17 aa, Homo sapiens
  CDR3 for beta chain variable domain of TCR clone 91342 (TRBV7-2, TRBJ2-7)
CASSKHPGQGAGYEQYF

SEQ ID NO: 182685 - protein, 13 aa, Homo sapiens
  CDR3 for alpha chain variable domain of TCR clone 91343 (TRAV13-1, TRAJ10)
CAALEGGGNKLTF

SEQ ID NO: 182686 - protein, 13 aa, Homo sapiens
  CDR3 for beta chain variable domain of TCR clone 91343 (TRBV7-9, TRBJ1-2)
CASSLKQKYGYTF

SEQ ID NO: 182687 - protein, 13 aa, Homo sapiens
  CDR3 for alpha chain variable domain of TCR clone 91344 (TRAV17, TRAJ9)
CATAITGGFKTIF

SEQ ID NO: 182688 - protein, 16 aa, Homo sapiens
  CDR3 for beta chain variable domain of TCR clone 91344 (TRBV15, TRBJ2-1)
CATSRTLAGGYNEQFF

SEQ ID NO: 182689 - protein, 14 aa, Homo sapiens
  CDR3 for alpha chain variable domain of TCR clone 91345 (TRAV35, TRAJ41)
CAGKTSNSGYALNF

SEQ ID NO: 182690 - protein, 11 aa, Homo sapiens
  CDR3 for beta chain variable domain of TCR clone 91345 (TRBV12-4, TRBJ2-2)
CASSSAGELFF

SEQ ID NO: 182691 - protein, 16 aa, Homo sapiens
  CDR3 for alpha chain variable domain of TCR clone 91346 (TRAV3, TRAJ10)
CAVRDMRAGGGNNITF

SEQ ID NO: 182692 - protein, 14 aa, Homo sapiens
  CDR3 for beta chain variable domain of TCR clone 91346 (TRBV25-1, TRBJ1-1)
CASTHLGGNTEAFF

SEQ ID NO: 182693 - protein, 18 aa, Homo sapiens
  CDR3 for alpha chain variable domain of TCR clone 91347 (TRAV12-3, TRAJ52)
CAMSVGGAGGTSYGKLTF

SEQ ID NO: 182694 - protein, 16 aa, Homo sapiens
  CDR3 for beta chain variable domain of TCR clone 91347 (TRBV7-2, TRBJ1-6)
CASSSFESSYNSPLHF

SEQ ID NO: 182695 - protein, 12 aa, Homo sapiens
  CDR3 for alpha chain variable domain of TCR clone 91348 (TRAV13-2, TRAJ23)
CAEHHRGGKLIF

SEQ ID NO: 182696 - protein, 19 aa, Homo sapiens
  CDR3 for beta chain variable domain of TCR clone 91348 (TRBV19, TRBJ2-5)
CASSIGQVTDFFLGETQYF

SEQ ID NO: 182697 - protein, 14 aa, Homo sapiens
  CDR3 for alpha chain variable domain of TCR clone 91349 (TRAV12-2, TRAJ17)
CAVLFKAAGNKLTF

SEQ ID NO: 182698 - protein, 15 aa, Homo sapiens
  CDR3 for beta chain variable domain of TCR clone 91349 (TRBV20-1, TRBJ2-7)
CSARDRASGMDGQYF

SEQ ID NO: 182699 - protein, 14 aa, Homo sapiens
  CDR3 for alpha chain variable domain of TCR clone 91350 (TRAV30, TRAJ26)
CGTEIVSYGQNFVF

SEQ ID NO: 182700 - protein, 13 aa, Homo sapiens
  CDR3 for beta chain variable domain of TCR clone 91350 (TRBV12-4, TRBJ1-2)
CASSLRQGKGYTF

SEQ ID NO: 182701 - protein, 11 aa, Homo sapiens
  CDR3 for alpha chain variable domain of TCR clone 91351 (TRAV2, TRAJ33)
CAVDSNYQLIW

SEQ ID NO: 182702 - protein, 15 aa, Homo sapiens
  CDR3 for beta chain variable domain of TCR clone 91351 (TRBV7-9, TRBJ1-4)
CASSRTGGFNEKLFF

SEQ ID NO: 182703 - protein, 19 aa, Homo sapiens
  CDR3 for alpha chain variable domain of TCR clone 91352 (TRAV3, TRAJ37)
CAVRDIVGGHPSNTGKLIF

SEQ ID NO: 182704 - protein, 14 aa, Homo sapiens
  CDR3 for beta chain variable domain of TCR clone 91352 (TRBV7-8, TRBJ2-3)
CASSLEAGTDTQYF

SEQ ID NO: 182705 - protein, 15 aa, Homo sapiens
  CDR3 for alpha chain variable domain of TCR clone 91353 (TRAV8-3, TRAJ23)
CAVGDRYNQGGKLIF

SEQ ID NO: 182706 - protein, 12 aa, Homo sapiens
  CDR3 for beta chain variable domain of TCR clone 91353 (TRBV11-2, TRBJ2-2)
CASSLPTGELFF

SEQ ID NO: 182707 - protein, 14 aa, Homo sapiens
  CDR3 for alpha chain variable domain of TCR clone 91354 (TRAV27, TRAJ22)
FAGVSVLGKRQLTF

SEQ ID NO: 182708 - protein, 17 aa, Homo sapiens
  CDR3 for beta chain variable domain of TCR clone 91354 (TRBV14, TRBJ2-1)
CASSQDRRVTSYNEQFF

SEQ ID NO: 182709 - protein, 16 aa, Homo sapiens
  CDR3 for alpha chain variable domain of TCR clone 91355 (TRAV30, TRAJ24)
CGTEIVDADSWGKFQF

SEQ ID NO: 182710 - protein, 17 aa, Homo sapiens
  CDR3 for beta chain variable domain of TCR clone 91355 (TRBV20-1, TRBJ2-1)
CSASSSGLAGSYSEQFL

SEQ ID NO: 182711 - protein, 13 aa, Homo sapiens
  CDR3 for alpha chain variable domain of TCR clone 91356 (TRAV27, TRAJ3)
ASLRGSSASKITF

SEQ ID NO: 182712 - protein, 15 aa, Homo sapiens
  CDR3 for beta chain variable domain of TCR clone 91356 (TRBV28, TRBJ1-3)
CASSMGWASGNTIYF

SEQ ID NO: 182713 - protein, 13 aa, Homo sapiens
  CDR3 for alpha chain variable domain of TCR clone 91357 (TRAV27, TRAJ41)
CAGEGNSGYALNF

SEQ ID NO: 182714 - protein, 13 aa, Homo sapiens
  CDR3 for beta chain variable domain of TCR clone 91357 (TRBV7-9, TRBJ2-5)
CASTPVGQETRYF

SEQ ID NO: 182715 - protein, 15 aa, Homo sapiens
  CDR3 for alpha chain variable domain of TCR clone 91358 (TRAV12-1, TRAJ36)
CVVNEHQTGTNNLFF

SEQ ID NO: 182716 - protein, 12 aa, Homo sapiens
  CDR3 for beta chain variable domain of TCR clone 91358 (TRBV29-1, TRBJ2-3)
CSVTGGADTQYF

SEQ ID NO: 182717 - protein, 11 aa, Homo sapiens
  CDR3 for alpha chain variable domain of TCR clone 91359 (TRAV13-1, TRAJ30)
CAASRDDKIIF

SEQ ID NO: 182718 - protein, 15 aa, Homo sapiens
  CDR3 for beta chain variable domain of TCR clone 91359 (TRBV18, TRBJ1-1)
CARSPSSWVNTEAFF

SEQ ID NO: 182719 - protein, 14 aa, Homo sapiens
  CDR3 for alpha chain variable domain of TCR clone 91360 (TRAV26-2, TRAJ31)
CILIPGNNNARPMF

SEQ ID NO: 182720 - protein, 16 aa, Homo sapiens
  CDR3 for beta chain variable domain of TCR clone 91360 (TRBV7-3, TRBJ2-1)
CASSLVSGSSNNEQFS

SEQ ID NO: 182721 - protein, 11 aa, Homo sapiens
  CDR3 for alpha chain variable domain of TCR clone 91361 (TRAV3, TRAJ21)
CAVGHFNKFYF

SEQ ID NO: 182722 - protein, 15 aa, Homo sapiens
  CDR3 for beta chain variable domain of TCR clone 91361 (TRBV5-1, TRBJ2-1)
CASSLVANSYNEQFF

SEQ ID NO: 182723 - protein, 17 aa, Homo sapiens
  CDR3 for alpha chain variable domain of TCR clone 91362 (TRAV3, TRAJ6)
CAWRDGPRAGGSYIPTF

SEQ ID NO: 182724 - protein, 20 aa, Homo sapiens
  CDR3 for beta chain variable domain of TCR clone 91362 (TRBV28, TRBJ2-1)
CASTPIGRSPGLAGGNEQFF

SEQ ID NO: 182725 - protein, 13 aa, Homo sapiens
  CDR3 for alpha chain variable domain of TCR clone 91363 (TRAV12-2, TRAJ39)
CAVNNNAGNMLTF

SEQ ID NO: 182726 - protein, 13 aa, Homo sapiens
  CDR3 for beta chain variable domain of TCR clone 91363 (TRBV2, TRBJ1-5)
CATAEPGNQPQHF

SEQ ID NO: 182727 - protein, 14 aa, Homo sapiens
  CDR3 for alpha chain variable domain of TCR clone 91364 (TRAV12-1, TRAJ30)
CVVNIGGRDDKIIF

SEQ ID NO: 182728 - protein, 15 aa, Homo sapiens
  CDR3 for beta chain variable domain of TCR clone 91364 (TRBV20-1, TRBJ2-7)
CSARDRVSGMDEQYF

SEQ ID NO: 182729 - protein, 15 aa, Homo sapiens
  CDR3 for alpha chain variable domain of TCR clone 91365 (TRAV25, TRAJ53)
CAATGGGGSNYTLTF

SEQ ID NO: 182730 - protein, 19 aa, Homo sapiens
  CDR3 for beta chain variable domain of TCR clone 91365 (TRBV7-2, TRBJ2-3)
CASSFLSRNWGGGTDTQYF

SEQ ID NO: 182731 - protein, 16 aa, Homo sapiens
  CDR3 for alpha chain variable domain of TCR clone 91366 (TRAV30, TRAJ24)
CGTEIVDVDSWGKFQF

SEQ ID NO: 182732 - protein, 15 aa, Homo sapiens
  CDR3 for beta chain variable domain of TCR clone 91366 (TRBV15, TRBJ1-5)
CATSRDPVSNQPQHF

SEQ ID NO: 182733 - protein, 15 aa, Homo sapiens
  CDR3 for alpha chain variable domain of TCR clone 91367 (TRAV2, TRAJ9)
CAVEDRGTGGFKTIF

SEQ ID NO: 182734 - protein, 14 aa, Homo sapiens
  CDR3 for beta chain variable domain of TCR clone 91367 (TRBV12-4, TRBJ1-1)
CASSLGTGGTEAFF

SEQ ID NO: 182735 - protein, 14 aa, Homo sapiens
  CDR3 for alpha chain variable domain of TCR clone 91368 (TRAV1-2, TRAJ16)
CAVNRFSDGQKLLF

SEQ ID NO: 182736 - protein, 13 aa, Homo sapiens
  CDR3 for beta chain variable domain of TCR clone 91368 (TRBV4-3, TRBJ2-1)
CASSQEVPGKLYF

SEQ ID NO: 182737 - protein, 14 aa, Homo sapiens
  CDR3 for alpha chain variable domain of TCR clone 91369 (TRAV23/DV6, TRAJ39)
CAASIGNAGNMLTF

SEQ ID NO: 182738 - protein, 14 aa, Homo sapiens
  CDR3 for beta chain variable domain of TCR clone 91369 (TRBV19, TRBJ2-1)
CASPTFVLSGEQFF

SEQ ID NO: 182739 - protein, 14 aa, Homo sapiens
  CDR3 for alpha chain variable domain of TCR clone 91370 (TRAV8-4, TRAJ45)
CASGGGGGADGLTF

SEQ ID NO: 182740 - protein, 20 aa, Homo sapiens
  CDR3 for beta chain variable domain of TCR clone 91370 (TRBV4-3, TRBJ2-3)
CASSPRVEMRASGRPDKQYF

SEQ ID NO: 182741 - protein, 14 aa, Homo sapiens
  CDR3 for alpha chain variable domain of TCR clone 91371 (TRAV17, TRAJ57)
CATDPKGGSEKLVF

SEQ ID NO: 182742 - protein, 18 aa, Homo sapiens
  CDR3 for beta chain variable domain of TCR clone 91371 (TRBV6-6, TRBJ1-3)
CASSYSKWDSISGNTIYF

SEQ ID NO: 182743 - protein, 11 aa, Homo sapiens
  CDR3 for alpha chain variable domain of TCR clone 91372 (TRAV1-1, TRAJ23)
CAVRQGGKLIF

SEQ ID NO: 182744 - protein, 14 aa, Homo sapiens
  CDR3 for beta chain variable domain of TCR clone 91372 (TRBV11-2, TRBJ1-2)
CASSLGTANYGYTF

SEQ ID NO: 182745 - protein, 15 aa, Homo sapiens
  CDR3 for alpha chain variable domain of TCR clone 91373 (TRAV25, TRAJ52)
CAGTPGGTSYGKLTF

SEQ ID NO: 182746 - protein, 16 aa, Homo sapiens
  CDR3 for beta chain variable domain of TCR clone 91373 (TRBV15, TRBJ1-2)
CATSRGPRTGGGGYTF

SEQ ID NO: 182747 - protein, 15 aa, Homo sapiens
  CDR3 for alpha chain variable domain of TCR clone 91374 (TRAV29/DV5, TRAJ29)
CAASERSSGNTPLVF

SEQ ID NO: 182748 - protein, 12 aa, Homo sapiens
  CDR3 for beta chain variable domain of TCR clone 91374 (TRBV28, TRBJ2-3)
CASSLYRGTQYF

SEQ ID NO: 182749 - protein, 11 aa, Homo sapiens
  CDR3 for alpha chain variable domain of TCR clone 91375 (TRAV26-1, TRAJ37)
CIVRVGRKLIF

SEQ ID NO: 182750 - protein, 12 aa, Homo sapiens
  CDR3 for beta chain variable domain of TCR clone 91375 (TRBV29-1, TRBJ2-3)
CSVTGGADTQYF

SEQ ID NO: 182751 - protein, 11 aa, Homo sapiens
  CDR3 for alpha chain variable domain of TCR clone 91376 (TRAV2, TRAJ33)
CAVESNYQLIW

SEQ ID NO: 182752 - protein, 15 aa, Homo sapiens
  CDR3 for beta chain variable domain of TCR clone 91376 (TRBV24-1, TRBJ1-3)
CATSDHGESGNTIYF

SEQ ID NO: 182753 - protein, 13 aa, Homo sapiens
  CDR3 for alpha chain variable domain of TCR clone 91377 (TRAV2, TRAJ40)
CAVVTSGTYKYIF

SEQ ID NO: 182754 - protein, 12 aa, Homo sapiens
  CDR3 for beta chain variable domain of TCR clone 91377 (TRBV11-2, TRBJ2-2)
CASSFGGGELFF

SEQ ID NO: 182755 - protein, 14 aa, Homo sapiens
  CDR3 for alpha chain variable domain of TCR clone 91378 (TRAV12-2, TRAJ13)
CAVKKTGGYQKVNF

SEQ ID NO: 182756 - protein, 16 aa, Homo sapiens
  CDR3 for beta chain variable domain of TCR clone 91378 (TRBV2, TRBJ2-1)
CASRSPAGGKYNEQFF

SEQ ID NO: 182757 - protein, 15 aa, Homo sapiens
  CDR3 for alpha chain variable domain of TCR clone 91379 (TRAV17, TRAJ57)
CATGPSQCGSEKLVF

SEQ ID NO: 182758 - protein, 18 aa, Homo sapiens
  CDR3 for beta chain variable domain of TCR clone 91379 (TRBV7-9, TRBJ2-7)
CASSLTTSGSRTWYEQYF

SEQ ID NO: 182759 - protein, 18 aa, Homo sapiens
  CDR3 for alpha chain variable domain of TCR clone 91380 (TRAV12-2, )
CAVEDIQNPDPAVYQLRD

SEQ ID NO: 182760 - protein, 18 aa, Homo sapiens
  CDR3 for beta chain variable domain of TCR clone 91380 (TRBV11-2, TRBJ2-3)
CASSLGGASRGAPNTRYF

SEQ ID NO: 182761 - protein, 16 aa, Homo sapiens
  CDR3 for alpha chain variable domain of TCR clone 91381 (TRAV1-1, TRAJ28)
CAVRDDPGAGSYQLTF

SEQ ID NO: 182762 - protein, 12 aa, Homo sapiens
  CDR3 for beta chain variable domain of TCR clone 91381 (TRBV11-2, TRBJ2-5)
CASSLDTQTQYF

SEQ ID NO: 182763 - protein, 15 aa, Homo sapiens
  CDR3 for alpha chain variable domain of TCR clone 91382 (TRAV12-3, TRAJ11)
CAMSEENPGYSTLTF

SEQ ID NO: 182764 - protein, 16 aa, Homo sapiens
  CDR3 for beta chain variable domain of TCR clone 91382 (TRBV5-1, TRBJ2-7)
CASSLEGLAGLYEQYF

SEQ ID NO: 182765 - protein, 14 aa, Homo sapiens
  CDR3 for alpha chain variable domain of TCR clone 91383 (TRAV12-2, TRAJ40)
CAVKIPSGTYKYIF

SEQ ID NO: 182766 - protein, 14 aa, Homo sapiens
  CDR3 for beta chain variable domain of TCR clone 91383 (TRBV7-7, TRBJ2-2)
CATRQDSDTGELFF

SEQ ID NO: 182767 - protein, 16 aa, Homo sapiens
  CDR3 for alpha chain variable domain of TCR clone 91384 (TRAV3, TRAJ21)
FAVRDIERGNFNKFYF

SEQ ID NO: 182768 - protein, 13 aa, Homo sapiens
  CDR3 for beta chain variable domain of TCR clone 91384 (TRBV27, TRBJ2-7)
CASSLTTGYEQYF

SEQ ID NO: 182769 - protein, 17 aa, Homo sapiens
  CDR3 for alpha chain variable domain of TCR clone 91385 (TRAV3, TRAJ12)
CAVRDGGRMDGSYKLIF

SEQ ID NO: 182770 - protein, 14 aa, Homo sapiens
  CDR3 for beta chain variable domain of TCR clone 91385 (TRBV7-9, TRBJ1-2)
CASSRQGANYGYTF

SEQ ID NO: 182771 - protein, 17 aa, Homo sapiens
  CDR3 for alpha chain variable domain of TCR clone 91386 (TRAV13-1, )
CAANIQNPDPAVYQLRD

SEQ ID NO: 182772 - protein, 14 aa, Homo sapiens
  CDR3 for beta chain variable domain of TCR clone 91386 (TRBV19, TRBJ2-7)
CASSIGPNSCEQYF

SEQ ID NO: 182773 - protein, 15 aa, Homo sapiens
  CDR3 for alpha chain variable domain of TCR clone 91387 (TRAV16, TRAJ48)
CALSISNFGNEKLTF

SEQ ID NO: 182774 - protein, 15 aa, Homo sapiens
  CDR3 for beta chain variable domain of TCR clone 91387 (TRBV27, TRBJ2-7)
CASSTAGTGSYGQYF

SEQ ID NO: 182775 - protein, 14 aa, Homo sapiens
  CDR3 for alpha chain variable domain of TCR clone 91388 (TRAV12-1, TRAJ38)
CGELNAGNNRKLIW

SEQ ID NO: 182776 - protein, 12 aa, Homo sapiens
  CDR3 for beta chain variable domain of TCR clone 91388 (TRBV24-1, TRBJ1-1)
CATLYPDTEAFF

SEQ ID NO: 182777 - protein, 17 aa, Homo sapiens
  CDR3 for alpha chain variable domain of TCR clone 91389 (TRAV3, TRAJ6)
CAVRDGPRAGGNYIPPF

SEQ ID NO: 182778 - protein, 14 aa, Homo sapiens
  CDR3 for beta chain variable domain of TCR clone 91389 (TRBV7-2, TRBJ2-7)
CASSPKTSFYEQYF

SEQ ID NO: 182779 - protein, 14 aa, Homo sapiens
  CDR3 for alpha chain variable domain of TCR clone 91390 (TRAV8-3, TRAJ9)
CAVVYNTGGFKTIF

SEQ ID NO: 182780 - protein, 12 aa, Homo sapiens
  CDR3 for beta chain variable domain of TCR clone 91390 (TRBV12-4, TRBJ2-7)
CASSLGGYEQYF

SEQ ID NO: 182781 - protein, 14 aa, Homo sapiens
  CDR3 for alpha chain variable domain of TCR clone 91391 (TRAV1-2, TRAJ16)
CAVNRFSDGQKLLF

SEQ ID NO: 182782 - protein, 14 aa, Homo sapiens
  CDR3 for beta chain variable domain of TCR clone 91391 (TRBV7-9, TRBJ2-1)
CASSLASGSNEQFF

SEQ ID NO: 182783 - protein, 12 aa, Homo sapiens
  CDR3 for alpha chain variable domain of TCR clone 91392 (TRAV12-1, TRAJ40)
CVVYSGTYNYIF

SEQ ID NO: 182784 - protein, 14 aa, Homo sapiens
  CDR3 for beta chain variable domain of TCR clone 91392 (TRBV20-1, TRBJ2-3)
CSARGGTSTDTQYF

SEQ ID NO: 182785 - protein, 11 aa, Homo sapiens
  CDR3 for alpha chain variable domain of TCR clone 91393 (TRAV35, TRAJ12)
RRMDCSYKLIF

SEQ ID NO: 182786 - protein, 14 aa, Homo sapiens
  CDR3 for beta chain variable domain of TCR clone 91393 (TRBV19, TRBJ1-1)
CASSPNRGDTEAFF

SEQ ID NO: 182787 - protein, 16 aa, Homo sapiens
  CDR3 for alpha chain variable domain of TCR clone 91394 (TRAV12-2, TRAJ40)
CAVLRGGTSGTYKYIF

SEQ ID NO: 182788 - protein, 16 aa, Homo sapiens
  CDR3 for beta chain variable domain of TCR clone 91394 (TRBV7-9, TRBJ2-1)
CASSDVAGGSYNEQFF

SEQ ID NO: 182789 - protein, 15 aa, Homo sapiens
  CDR3 for alpha chain variable domain of TCR clone 91395 (TRAV4, TRAJ39)
CLVGPNNNAGNMLTF

SEQ ID NO: 182790 - protein, 14 aa, Homo sapiens
  CDR3 for beta chain variable domain of TCR clone 91395 (TRBV19, TRBJ2-7)
CASNFPDTFTGMYF

SEQ ID NO: 182791 - protein, 12 aa, Homo sapiens
  CDR3 for alpha chain variable domain of TCR clone 91396 (TRAV13-1, TRAJ27)
CAAHTNAGKSTF

SEQ ID NO: 182792 - protein, 11 aa, Homo sapiens
  CDR3 for beta chain variable domain of TCR clone 91396 (TRBV11-2, TRBJ2-2)
CASSLPGELFF

SEQ ID NO: 182793 - protein, 16 aa, Homo sapiens
  CDR3 for alpha chain variable domain of TCR clone 91397 (TRAV16, TRAJ52)
CALSAAGGPSYGKLTF

SEQ ID NO: 182794 - protein, 12 aa, Homo sapiens
  CDR3 for beta chain variable domain of TCR clone 91397 (TRBV12-4, TRBJ1-3)
CASSFSGNTIYF

SEQ ID NO: 182795 - protein, 13 aa, Homo sapiens
  CDR3 for alpha chain variable domain of TCR clone 91398 (TRAV13-1, TRAJ12)
CSKYMGSSYKLIF

SEQ ID NO: 182796 - protein, 14 aa, Homo sapiens
  CDR3 for beta chain variable domain of TCR clone 91398 (TRBV12-4, TRBJ1-3)
CASTLTGAGNTIYF

SEQ ID NO: 182797 - protein, 11 aa, Homo sapiens
  CDR3 for alpha chain variable domain of TCR clone 91399 (TRAV2, TRAJ13)
CASGGYQKVTF

SEQ ID NO: 182798 - protein, 17 aa, Homo sapiens
  CDR3 for beta chain variable domain of TCR clone 91399 (TRBV20-1, TRBJ2-3)
CSARSAGLAGVTDTQYF

SEQ ID NO: 182799 - protein, 14 aa, Homo sapiens
  CDR3 for alpha chain variable domain of TCR clone 91400 (TRAV1-2, TRAJ8)
CAVREDTGFQKLVF

SEQ ID NO: 182800 - protein, 19 aa, Homo sapiens
  CDR3 for beta chain variable domain of TCR clone 91400 (TRBV28, TRBJ2-1)
FASSFSIRGSGRTRYEQFF

SEQ ID NO: 182801 - protein, 14 aa, Homo sapiens
  CDR3 for alpha chain variable domain of TCR clone 91401 (TRAV26-1, TRAJ38)
CIADSAGNNRKLIW

SEQ ID NO: 182802 - protein, 13 aa, Homo sapiens
  CDR3 for beta chain variable domain of TCR clone 91401 (TRBV19, TRBJ1-2)
CASSVPGQDGYTF

SEQ ID NO: 182803 - protein, 14 aa, Homo sapiens
  CDR3 for alpha chain variable domain of TCR clone 91402 (TRAV12-2, TRAJ13)
CAVKKTGGYQKVTF

SEQ ID NO: 182804 - protein, 17 aa, Homo sapiens
  CDR3 for beta chain variable domain of TCR clone 91402 (TRBV7-3, TRBJ2-5)
CASSLGSGRSGSETQYF

SEQ ID NO: 182805 - protein, 14 aa, Homo sapiens
  CDR3 for alpha chain variable domain of TCR clone 91403 (TRAV23/DV6, TRAJ17)
CAAGGRAAGNKLTF

SEQ ID NO: 182806 - protein, 12 aa, Homo sapiens
  CDR3 for beta chain variable domain of TCR clone 91403 (TRBV7-9, TRBJ2-3)
CASSFITDTQYF

SEQ ID NO: 182807 - protein, 12 aa, Homo sapiens
  CDR3 for alpha chain variable domain of TCR clone 91404 (TRAV13-2, TRAJ23)
CAERHRGGKLIF

SEQ ID NO: 182808 - protein, 13 aa, Homo sapiens
  CDR3 for beta chain variable domain of TCR clone 91404 (TRBV20-1, TRBJ1-1)
CSARGGGNTEAFF

SEQ ID NO: 182809 - protein, 13 aa, Homo sapiens
  CDR3 for alpha chain variable domain of TCR clone 91405 (TRAV2, TRAJ21)
CAVEDLNFNKFYF

SEQ ID NO: 182810 - protein, 20 aa, Homo sapiens
  CDR3 for beta chain variable domain of TCR clone 91405 (TRBV7-8, TRBJ2-2)
CASSHLFPGPTIHITGELFF

SEQ ID NO: 182811 - protein, 12 aa, Homo sapiens
  CDR3 for alpha chain variable domain of TCR clone 91406 (TRAV8-3, TRAJ20)
CAVGANDYKLSF

SEQ ID NO: 182812 - protein, 12 aa, Homo sapiens
  CDR3 for beta chain variable domain of TCR clone 91406 (TRBV6-3, TRBJ2-1)
CASSGSYNEQFF

SEQ ID NO: 182813 - protein, 14 aa, Homo sapiens
  CDR3 for alpha chain variable domain of TCR clone 91407 (TRAV9-2, TRAJ39)
CALYIYNAGNTLTF

SEQ ID NO: 182814 - protein, 14 aa, Homo sapiens
  CDR3 for beta chain variable domain of TCR clone 91407 (TRBV6-1, TRBJ1-3)
CASVQGGGGNTIYF

SEQ ID NO: 182815 - protein, 14 aa, Homo sapiens
  CDR3 for alpha chain variable domain of TCR clone 91408 (TRAV8-3, TRAJ30)
CAVGDMNRDDKIIF

SEQ ID NO: 182816 - protein, 14 aa, Homo sapiens
  CDR3 for beta chain variable domain of TCR clone 91408 (TRBV25-1, TRBJ1-1)
CASTHLGGNTEAFF

SEQ ID NO: 182817 - protein, 15 aa, Homo sapiens
  CDR3 for alpha chain variable domain of TCR clone 91409 (TRAV21, TRAJ53)
CATLNSGGSNYKLTF

SEQ ID NO: 182818 - protein, 12 aa, Homo sapiens
  CDR3 for beta chain variable domain of TCR clone 91409 (TRBV14, TRBJ2-7)
CASSLYKDEQYF

SEQ ID NO: 182819 - protein, 12 aa, Homo sapiens
  CDR3 for alpha chain variable domain of TCR clone 91410 (TRAV38-1, TRAJ20)
CAFIWNDYKLSF

SEQ ID NO: 182820 - protein, 14 aa, Homo sapiens
  CDR3 for beta chain variable domain of TCR clone 91410 (TRBV19, TRBJ2-1)
CASIMGSGATEQFF

SEQ ID NO: 182821 - protein, 13 aa, Homo sapiens
  CDR3 for alpha chain variable domain of TCR clone 91411 (TRAV13-1, TRAJ5)
CAARVTGRRALTF

SEQ ID NO: 182822 - protein, 15 aa, Homo sapiens
  CDR3 for beta chain variable domain of TCR clone 91411 (TRBV7-9, TRBJ2-7)
CASSPGGGLTYGQYF

SEQ ID NO: 182823 - protein, 16 aa, Homo sapiens
  CDR3 for alpha chain variable domain of TCR clone 91412 (TRAV30, TRAJ24)
CGTEIVDAASWGKFQF

SEQ ID NO: 182824 - protein, 13 aa, Homo sapiens
  CDR3 for beta chain variable domain of TCR clone 91412 (TRBV7-2, TRBJ1-4)
CASSLAGLEKLFF

SEQ ID NO: 182825 - protein, 16 aa, Homo sapiens
  CDR3 for alpha chain variable domain of TCR clone 91413 (TRAV3, TRAJ37)
CAVRGKGSGNTGKLIF

SEQ ID NO: 182826 - protein, 14 aa, Homo sapiens
  CDR3 for beta chain variable domain of TCR clone 91413 (TRBV7-9, TRBJ2-5)
CASSLDTAQETQYF

SEQ ID NO: 182827 - protein, 14 aa, Homo sapiens
  CDR3 for alpha chain variable domain of TCR clone 91414 (TRAV35, TRAJ22)
CAGLRPGSARQLTF

SEQ ID NO: 182828 - protein, 13 aa, Homo sapiens
  CDR3 for beta chain variable domain of TCR clone 91414 (TRBV15, TRBJ1-6)
CATSGGLNSPLHF

SEQ ID NO: 182829 - protein, 16 aa, Homo sapiens
  CDR3 for alpha chain variable domain of TCR clone 91415 (TRAV23/DV6, TRAJ3)
CAARAPQQCSQDNLWI

SEQ ID NO: 182830 - protein, 17 aa, Homo sapiens
  CDR3 for beta chain variable domain of TCR clone 91415 (TRBV7-9, TRBJ2-3)
CASSPTVAGDLTDTQYF

SEQ ID NO: 182831 - protein, 18 aa, Homo sapiens
  CDR3 for alpha chain variable domain of TCR clone 91416 (TRAV21, TRAJ52)
CAVRPSPAGGTSYGKLTF

SEQ ID NO: 182832 - protein, 13 aa, Homo sapiens
  CDR3 for beta chain variable domain of TCR clone 91416 (TRBV19, TRBJ2-7)
CASRKAGGSEQYF

SEQ ID NO: 182833 - protein, 15 aa, Homo sapiens
  CDR3 for alpha chain variable domain of TCR clone 91417 (TRAV17, TRAJ57)
CATGPSQGGSEKLVF

SEQ ID NO: 182834 - protein, 14 aa, Homo sapiens
  CDR3 for beta chain variable domain of TCR clone 91417 (TRBV12-5, TRBJ2-5)
CASGSWTHQETQYF

SEQ ID NO: 182835 - protein, 15 aa, Homo sapiens
  CDR3 for alpha chain variable domain of TCR clone 91418 (TRAV27, TRAJ38)
CAARRNAGNNRKLIW

SEQ ID NO: 182836 - protein, 15 aa, Homo sapiens
  CDR3 for beta chain variable domain of TCR clone 91418 (TRBV5-1, TRBJ2-1)
CASSPPRAPYNEQFF

SEQ ID NO: 182837 - protein, 14 aa, Homo sapiens
  CDR3 for alpha chain variable domain of TCR clone 91419 (TRAV3, TRAJ9)
CALRLNTGGFKTIF

SEQ ID NO: 182838 - protein, 16 aa, Homo sapiens
  CDR3 for beta chain variable domain of TCR clone 91419 (TRBV12-5, TRBJ2-5)
CASGPRTSGNQETQYF

SEQ ID NO: 182839 - protein, 16 aa, Homo sapiens
  CDR3 for alpha chain variable domain of TCR clone 91420 (TRAV20, TRAJ22)
CAVQASSSGSARQLTF

SEQ ID NO: 182840 - protein, 16 aa, Homo sapiens
  CDR3 for beta chain variable domain of TCR clone 91420 (TRBV20-1, TRBJ1-5)
CSASRGTGYSKQPQHF

SEQ ID NO: 182841 - protein, 14 aa, Homo sapiens
  CDR3 for alpha chain variable domain of TCR clone 91421 (TRAV8-4, TRAJ9)
CAVRINTGGFKPIF

SEQ ID NO: 182842 - protein, 14 aa, Homo sapiens
  CDR3 for beta chain variable domain of TCR clone 91421 (TRBV5-1, TRBJ1-1)
CASSLQGASTEAFF

SEQ ID NO: 182843 - protein, 14 aa, Homo sapiens
  CDR3 for alpha chain variable domain of TCR clone 91422 (TRAV1-1, TRAJ23)
CAVSIYNQGGKRIF

SEQ ID NO: 182844 - protein, 15 aa, Homo sapiens
  CDR3 for beta chain variable domain of TCR clone 91422 (TRBV5-8, TRBJ2-2)
CASSLDRGATGELFF

SEQ ID NO: 182845 - protein, 13 aa, Homo sapiens
  CDR3 for alpha chain variable domain of TCR clone 91423 (TRAV1-2, TRAJ9)
CAALNTGGFKTIF

SEQ ID NO: 182846 - protein, 14 aa, Homo sapiens
  CDR3 for beta chain variable domain of TCR clone 91423 (TRBV2, TRBJ2-1)
CASSVGRSGNEQFF

SEQ ID NO: 182847 - protein, 14 aa, Homo sapiens
  CDR3 for alpha chain variable domain of TCR clone 91424 (TRAV17, TRAJ57)
CATDPQGGSEKLVF

SEQ ID NO: 182848 - protein, 13 aa, Homo sapiens
  CDR3 for beta chain variable domain of TCR clone 91424 (TRBV19, TRBJ2-7)
CASRPRQSYEQYF

SEQ ID NO: 182849 - protein, 13 aa, Homo sapiens
  CDR3 for alpha chain variable domain of TCR clone 91425 (TRAV27, TRAJ8)
CAGGPTGFQKLVF

SEQ ID NO: 182850 - protein, 15 aa, Homo sapiens
  CDR3 for beta chain variable domain of TCR clone 91425 (TRBV6-1, TRBJ2-7)
RASSESMGDFYEQYF

SEQ ID NO: 182851 - protein, 16 aa, Homo sapiens
  CDR3 for alpha chain variable domain of TCR clone 91426 (TRAV12-2, TRAJ56)
CAVRRVDTGANGKLTF

SEQ ID NO: 182852 - protein, 11 aa, Homo sapiens
  CDR3 for beta chain variable domain of TCR clone 91426 (TRBV3-1, TRBJ2-7)
CASSQVREQYF

SEQ ID NO: 182853 - protein, 13 aa, Homo sapiens
  CDR3 for alpha chain variable domain of TCR clone 91427 (TRAV12-1, TRAJ40)
CVLPTSGTYKYIF

SEQ ID NO: 182854 - protein, 18 aa, Homo sapiens
  CDR3 for beta chain variable domain of TCR clone 91427 (TRBV7-6, TRBJ2-1)
CASSPRTSGMSSYNEQFF

SEQ ID NO: 182855 - protein, 13 aa, Homo sapiens
  CDR3 for alpha chain variable domain of TCR clone 91428 (TRAV2, TRAJ15)
CAVASQAGTALIF

SEQ ID NO: 182856 - protein, 13 aa, Homo sapiens
  CDR3 for beta chain variable domain of TCR clone 91428 (TRBV7-2, TRBJ2-5)
CQQLVRGGETQYF

SEQ ID NO: 182857 - protein, 14 aa, Homo sapiens
  CDR3 for alpha chain variable domain of TCR clone 91429 (TRAV1-2, TRAJ16)
CAVNRFSDGQKLLF

SEQ ID NO: 182858 - protein, 13 aa, Homo sapiens
  CDR3 for beta chain variable domain of TCR clone 91429 (TRBV11-2, TRBJ2-1)
CASSLGLAGERFF

SEQ ID NO: 182859 - protein, 16 aa, Homo sapiens
  CDR3 for alpha chain variable domain of TCR clone 91430 (TRAV4, TRAJ37)
CLVGWSGSSNTGKLIF

SEQ ID NO: 182860 - protein, 15 aa, Homo sapiens
  CDR3 for beta chain variable domain of TCR clone 91430 (TRBV12-4, TRBJ2-3)
CASSLAERPTDTQYF

SEQ ID NO: 182861 - protein, 13 aa, Homo sapiens
  CDR3 for alpha chain variable domain of TCR clone 91431 (TRAV26-2, TRAJ43)
CILRAVNNNDMRS

SEQ ID NO: 182862 - protein, 13 aa, Homo sapiens
  CDR3 for beta chain variable domain of TCR clone 91431 (TRBV2, TRBJ2-7)
CASSVGGSGEQYF

SEQ ID NO: 182863 - protein, 13 aa, Homo sapiens
  CDR3 for alpha chain variable domain of TCR clone 91432 (TRAV27, TRAJ6)
CAGGTRGSFIPTF

SEQ ID NO: 182864 - protein, 15 aa, Homo sapiens
  CDR3 for beta chain variable domain of TCR clone 91432 (TRBV11-2, TRBJ1-3)
CASSLSPLVRDTIYF

SEQ ID NO: 182865 - protein, 15 aa, Homo sapiens
  CDR3 for alpha chain variable domain of TCR clone 91433 (TRAV23/DV6, TRAJ22)
CAASFSSGSARQLTF

SEQ ID NO: 182866 - protein, 15 aa, Homo sapiens
  CDR3 for beta chain variable domain of TCR clone 91433 (TRBV20-1, TRBJ2-7)
CSARDRVSGMDEQYF

SEQ ID NO: 182867 - protein, 14 aa, Homo sapiens
  CDR3 for alpha chain variable domain of TCR clone 91434 (TRAV8-2, TRAJ37)
CVVSISGNTGKLIF

SEQ ID NO: 182868 - protein, 14 aa, Homo sapiens
  CDR3 for beta chain variable domain of TCR clone 91434 (TRBV7-8, TRBJ2-3)
CASSLEAGTDTQYF

SEQ ID NO: 182869 - protein, 21 aa, Homo sapiens
  CDR3 for alpha chain variable domain of TCR clone 91435 (TRAV1-1, TRAJ6)
CLLLLRCERLERTGGSYIPTF

SEQ ID NO: 182870 - protein, 15 aa, Homo sapiens
  CDR3 for beta chain variable domain of TCR clone 91435 (TRBV9, TRBJ2-1)
CASSLAGSSYNEQFF

SEQ ID NO: 182871 - protein, 23 aa, Homo sapiens
  CDR3 for alpha chain variable domain of TCR clone 91436 (TRAV30, TRAJ43)
CTIRPPSSVTQEPTSAALSDMRF

SEQ ID NO: 182872 - protein, 13 aa, Homo sapiens
  CDR3 for beta chain variable domain of TCR clone 91436 (TRBV12-4, TRBJ2-2)
CASSITGSGELFF

SEQ ID NO: 182873 - protein, 12 aa, Homo sapiens
  CDR3 for alpha chain variable domain of TCR clone 91437 (TRAV1-2, TRAJ42)
CVAGGSQGNLIF

SEQ ID NO: 182874 - protein, 12 aa, Homo sapiens
  CDR3 for beta chain variable domain of TCR clone 91437 (TRBV24-1, TRBJ1-1)
CATSDSDRGAFL

SEQ ID NO: 182875 - protein, 14 aa, Homo sapiens
  CDR3 for alpha chain variable domain of TCR clone 91438 (TRAV13-2, TRAJ9)
CAENSFTGGFKTIF

SEQ ID NO: 182876 - protein, 13 aa, Homo sapiens
  CDR3 for beta chain variable domain of TCR clone 91438 (TRBV12-5, TRBJ2-3)
CASGDRQSDTQYF

SEQ ID NO: 182877 - protein, 15 aa, Homo sapiens
  CDR3 for alpha chain variable domain of TCR clone 91439 (TRAV35, TRAJ33)
CAGQPPRYSNYQLIW

SEQ ID NO: 182878 - protein, 13 aa, Homo sapiens
  CDR3 for beta chain variable domain of TCR clone 91439 (TRBV7-9, TRBJ1-2)
RASSLKQNYGYTF

SEQ ID NO: 182879 - protein, 14 aa, Homo sapiens
  CDR3 for alpha chain variable domain of TCR clone 91440 (TRAV9-2, TRAJ39)
CALYIYNAGNMPTF

SEQ ID NO: 182880 - protein, 13 aa, Homo sapiens
  CDR3 for beta chain variable domain of TCR clone 91440 (TRBV7-9, TRBJ1-2)
CASSLKQNYGYTF

SEQ ID NO: 182881 - protein, 18 aa, Homo sapiens
  CDR3 for alpha chain variable domain of TCR clone 91441 (TRAV13-1, TRAJ52)
CAASKRSAGGTSYGKLTF

SEQ ID NO: 182882 - protein, 15 aa, Homo sapiens
  CDR3 for beta chain variable domain of TCR clone 91441 (TRBV7-2, TRBJ2-1)
CASSLASGRVNEQFF

SEQ ID NO: 182883 - protein, 12 aa, Homo sapiens
  CDR3 for alpha chain variable domain of TCR clone 91442 (TRAV12-1, TRAJ40)
CVVYSGTYKYIF

SEQ ID NO: 182884 - protein, 18 aa, Homo sapiens
  CDR3 for beta chain variable domain of TCR clone 91442 (TRBV11-2, TRBJ2-3)
CATSLGGASRGAPNTQYF

SEQ ID NO: 182885 - protein, 14 aa, Homo sapiens
  CDR3 for alpha chain variable domain of TCR clone 91443 (TRAV12-2, TRAJ13)
CAVNPSGGYLKVTF

SEQ ID NO: 182886 - protein, 13 aa, Homo sapiens
  CDR3 for beta chain variable domain of TCR clone 91443 (TRBV20-1, TRBJ1-6)
CSAKLGGTSPLHF

SEQ ID NO: 182887 - protein, 13 aa, Homo sapiens
  CDR3 for alpha chain variable domain of TCR clone 91444 (TRAV8-3, TRAJ44)
CAVVPGTASKLTF

SEQ ID NO: 182888 - protein, 14 aa, Homo sapiens
  CDR3 for beta chain variable domain of TCR clone 91444 (TRBV11-2, TRBJ2-3)
CASRKLARTDTQYF

SEQ ID NO: 182889 - protein, 16 aa, Homo sapiens
  CDR3 for alpha chain variable domain of TCR clone 91445 (TRAV26-1, TRAJ37)
CIVRGDGSGKTGKLIF

SEQ ID NO: 182890 - protein, 17 aa, Homo sapiens
  CDR3 for beta chain variable domain of TCR clone 91445 (TRBV4-1, TRBJ2-7)
CASSRDPLGVRGGEQYF

SEQ ID NO: 182891 - protein, 11 aa, Homo sapiens
  CDR3 for alpha chain variable domain of TCR clone 91446 (TRAV5, TRAJ3)
CAPGSASKIIF

SEQ ID NO: 182892 - protein, 13 aa, Homo sapiens
  CDR3 for beta chain variable domain of TCR clone 91446 (TRBV3-1, TRBJ2-2)
CASLARGSGELFF

SEQ ID NO: 182893 - protein, 15 aa, Homo sapiens
  CDR3 for alpha chain variable domain of TCR clone 91447 (TRAV16, TRAJ4)
CALEDPSGGYNKLLF

SEQ ID NO: 182894 - protein, 13 aa, Homo sapiens
  CDR3 for beta chain variable domain of TCR clone 91447 (TRBV7-3, TRBJ2-7)
CASSQAGGYEQYF

SEQ ID NO: 182895 - protein, 13 aa, Homo sapiens
  CDR3 for alpha chain variable domain of TCR clone 91448 (TRAV23/DV6, TRAJ24)
CAASEDSWGKLQL

SEQ ID NO: 182896 - protein, 12 aa, Homo sapiens
  CDR3 for beta chain variable domain of TCR clone 91448 (TRBV5-1, TRBJ2-7)
CASSDSTYEQYF

SEQ ID NO: 182897 - protein, 13 aa, Homo sapiens
  CDR3 for alpha chain variable domain of TCR clone 91449 (TRAV21, TRAJ27)
CAARPGNAGKSTF

SEQ ID NO: 182898 - protein, 15 aa, Homo sapiens
  CDR3 for beta chain variable domain of TCR clone 91449 (TRBV28, TRBJ1-3)
CASSMGWASGNTIYF

SEQ ID NO: 182899 - protein, 18 aa, Homo sapiens
  CDR3 for alpha chain variable domain of TCR clone 91450 (TRAV26-1, TRAJ22)
CIVRVASISSGSARQLTF

SEQ ID NO: 182900 - protein, 13 aa, Homo sapiens
  CDR3 for beta chain variable domain of TCR clone 91450 (TRBV13, TRBJ2-5)
CASSPEVGETQYF

SEQ ID NO: 182901 - protein, 11 aa, Homo sapiens
  CDR3 for alpha chain variable domain of TCR clone 91451 (TRAV21, TRAJ34)
CAVTNTDKLIF

SEQ ID NO: 182902 - protein, 16 aa, Homo sapiens
  CDR3 for beta chain variable domain of TCR clone 91451 (TRBV12-4, TRBJ1-4)
CASSLKGIGHGEKLFF

SEQ ID NO: 182903 - protein, 13 aa, Homo sapiens
  CDR3 for alpha chain variable domain of TCR clone 91452 (TRAV2, TRAJ15)
CAVASQAGTALIF

SEQ ID NO: 182904 - protein, 14 aa, Homo sapiens
  CDR3 for beta chain variable domain of TCR clone 91452 (TRBV19, TRBJ2-1)
CASPTVVLSGEQFF

SEQ ID NO: 182905 - protein, 14 aa, Homo sapiens
  CDR3 for alpha chain variable domain of TCR clone 91453 (TRAV13-2, TRAJ43)
CAEIPTYNNNDVRF

SEQ ID NO: 182906 - protein, 15 aa, Homo sapiens
  CDR3 for beta chain variable domain of TCR clone 91453 (TRBV7-9, TRBJ2-2)
CASGPLDTFPGELFF

SEQ ID NO: 182907 - protein, 12 aa, Homo sapiens
  CDR3 for alpha chain variable domain of TCR clone 91454 (TRAV12-1, TRAJ40)
CVFYSGTYKYIF

SEQ ID NO: 182908 - protein, 12 aa, Homo sapiens
  CDR3 for beta chain variable domain of TCR clone 91454 (TRBV7-3, TRBJ2-1)
CASSCINNEQFF

SEQ ID NO: 182909 - protein, 11 aa, Homo sapiens
  CDR3 for alpha chain variable domain of TCR clone 91455 (TRAV1-2, TRAJ20)
CAVSNDYNLSF

SEQ ID NO: 182910 - protein, 15 aa, Homo sapiens
  CDR3 for beta chain variable domain of TCR clone 91455 (TRBV5-1, TRBJ2-2)
CASSSQGGNTGELFF

SEQ ID NO: 182911 - protein, 18 aa, Homo sapiens
  CDR3 for alpha chain variable domain of TCR clone 91456 (TRAV13-1, TRAJ52)
CAAKNPNAGGTSYGKLTY

SEQ ID NO: 182912 - protein, 15 aa, Homo sapiens
  CDR3 for beta chain variable domain of TCR clone 91456 (TRBV6-1, TRBJ2-3)
CASSERGGITDTQYF

SEQ ID NO: 182913 - protein, 14 aa, Homo sapiens
  CDR3 for alpha chain variable domain of TCR clone 91457 (TRAV1-1, TRAJ23)
CAVSIYNQGGKLIF

SEQ ID NO: 182914 - protein, 11 aa, Homo sapiens
  CDR3 for beta chain variable domain of TCR clone 91457 (TRBV29-1, TRBJ2-5)
CSEDRTGTQYF

SEQ ID NO: 182915 - protein, 10 aa, Homo sapiens
  CDR3 for alpha chain variable domain of TCR clone 91458 (TRAV5, TRAJ34)
CAEDTDKLIF

SEQ ID NO: 182916 - protein, 12 aa, Homo sapiens
  CDR3 for beta chain variable domain of TCR clone 91458 (TRBV11-3, TRBJ2-2)
CASSLGGGELFF

SEQ ID NO: 182917 - protein, 14 aa, Homo sapiens
  CDR3 for alpha chain variable domain of TCR clone 91459 (TRAV21, TRAJ15)
CAVSLNQAGTALIF

SEQ ID NO: 182918 - protein, 15 aa, Homo sapiens
  CDR3 for beta chain variable domain of TCR clone 91459 (TRBV20-1, TRBJ2-7)
CSARDRVSGMDEQYF

SEQ ID NO: 182919 - protein, 14 aa, Homo sapiens
  CDR3 for alpha chain variable domain of TCR clone 91460 (TRAV17, TRAJ22)
CATDASGSARQLTF

SEQ ID NO: 182920 - protein, 13 aa, Homo sapiens
  CDR3 for beta chain variable domain of TCR clone 91460 (TRBV12-4, TRBJ2-5)
CASRKRGKETQYF

SEQ ID NO: 182921 - protein, 14 aa, Homo sapiens
  CDR3 for alpha chain variable domain of TCR clone 91461 (TRAV16, TRAJ33)
CALSAMDSNYQLIW

SEQ ID NO: 182922 - protein, 17 aa, Homo sapiens
  CDR3 for beta chain variable domain of TCR clone 91461 (TRBV25-1, TRBJ2-7)
CASSDARVVFASYEQYF

SEQ ID NO: 182923 - protein, 14 aa, Homo sapiens
  CDR3 for alpha chain variable domain of TCR clone 91462 (TRAV13-2, TRAJ43)
CAEIPTYNNNDMRF

SEQ ID NO: 182924 - protein, 15 aa, Homo sapiens
  CDR3 for beta chain variable domain of TCR clone 91462 (TRBV7-9, TRBJ2-2)
CASGPLDSFPGELFF

SEQ ID NO: 182925 - protein, 15 aa, Homo sapiens
  CDR3 for alpha chain variable domain of TCR clone 91463 (TRAV3, TRAJ9)
CAVRDSNTGGCKTIF

SEQ ID NO: 182926 - protein, 16 aa, Homo sapiens
  CDR3 for beta chain variable domain of TCR clone 91463 (TRBV15, TRBJ2-5)
CATSPTTGQGMETQYF

SEQ ID NO: 182927 - protein, 13 aa, Homo sapiens
  CDR3 for alpha chain variable domain of TCR clone 91464 (TRAV8-3, TRAJ48)
CAVVPFGNEKLTF

SEQ ID NO: 182928 - protein, 18 aa, Homo sapiens
  CDR3 for beta chain variable domain of TCR clone 91464 (TRBV25-1, TRBJ2-2)
CHPSLPGGQGRKTGELFF

SEQ ID NO: 182929 - protein, 15 aa, Homo sapiens
  CDR3 for alpha chain variable domain of TCR clone 91465 (TRAV17, TRAJ57)
CATGPSQGGSEKLVF

SEQ ID NO: 182930 - protein, 16 aa, Homo sapiens
  CDR3 for beta chain variable domain of TCR clone 91465 (TRBV12-4, TRBJ1-5)
CATSRPVGGSNQPQHF

SEQ ID NO: 182931 - protein, 14 aa, Homo sapiens
  CDR3 for alpha chain variable domain of TCR clone 91466 (TRAV17, TRAJ37)
CATAGSSNTGKLIF

SEQ ID NO: 182932 - protein, 13 aa, Homo sapiens
  CDR3 for beta chain variable domain of TCR clone 91466 (TRBV11-2, TRBJ2-1)
CASSLDLVNEQFF

SEQ ID NO: 182933 - protein, 14 aa, Homo sapiens
  CDR3 for alpha chain variable domain of TCR clone 91467 (TRAV8-4, TRAJ34)
CAVSDPGDTDKPIF

SEQ ID NO: 182934 - protein, 15 aa, Homo sapiens
  CDR3 for beta chain variable domain of TCR clone 91467 (TRBV6-6, TRBJ1-1)
CASSPRGDVETEAFF

SEQ ID NO: 182935 - protein, 17 aa, Homo sapiens
  CDR3 for alpha chain variable domain of TCR clone 91468 (TRAV3, TRAJ6)
CAVRDGPRAGGSYIPTF

SEQ ID NO: 182936 - protein, 15 aa, Homo sapiens
  CDR3 for beta chain variable domain of TCR clone 91468 (TRBV7-9, TRBJ2-7)
CASSSSGLAVYEQYF

SEQ ID NO: 182937 - protein, 14 aa, Homo sapiens
  CDR3 for alpha chain variable domain of TCR clone 91469 (TRAV1-2, TRAJ8)
CAVREETGFQKLVF

SEQ ID NO: 182938 - protein, 16 aa, Homo sapiens
  CDR3 for beta chain variable domain of TCR clone 91469 (TRBV7-3, TRBJ2-2)
CASSLKRGTLSGELFF

SEQ ID NO: 182939 - protein, 14 aa, Homo sapiens
  CDR3 for alpha chain variable domain of TCR clone 91470 (TRAV8-3, TRAJ4)
CAVGAAGGYNKLIF

SEQ ID NO: 182940 - protein, 15 aa, Homo sapiens
  CDR3 for beta chain variable domain of TCR clone 91470 (TRBV5-1, TRBJ2-1)
CASSPPRAPYDEQFF

SEQ ID NO: 182941 - protein, 15 aa, Homo sapiens
  CDR3 for alpha chain variable domain of TCR clone 91471 (TRAV23/DV6, TRAJ45)
CAAENGGGGADGLTF

SEQ ID NO: 182942 - protein, 13 aa, Homo sapiens
  CDR3 for beta chain variable domain of TCR clone 91471 (TRBV20-1, TRBJ1-1)
YSARGGGNTEAFF

SEQ ID NO: 182943 - protein, 16 aa, Homo sapiens
  CDR3 for alpha chain variable domain of TCR clone 91472 (TRAV20, TRAJ22)
CAVQASSSGSARQLTF

SEQ ID NO: 182944 - protein, 13 aa, Homo sapiens
  CDR3 for beta chain variable domain of TCR clone 91472 (TRBV7-8, TRBJ2-7)
CASSLTGGREQYF

SEQ ID NO: 182945 - protein, 13 aa, Homo sapiens
  CDR3 for alpha chain variable domain of TCR clone 91473 (TRAV12-2, TRAJ4)
CAVRPGGYNKLIF

SEQ ID NO: 182946 - protein, 15 aa, Homo sapiens
  CDR3 for beta chain variable domain of TCR clone 91473 (TRBV11-2, TRBJ1-6)
CASSLDPWAVSPLHF

SEQ ID NO: 182947 - protein, 18 aa, Homo sapiens
  CDR3 for alpha chain variable domain of TCR clone 91474 (TRAV12-3, TRAJ52)
CAMSVGGAGGTSYVKLTF

SEQ ID NO: 182948 - protein, 14 aa, Homo sapiens
  CDR3 for beta chain variable domain of TCR clone 91474 (TRBV7-2, TRBJ2-7)
CASRSQGAAYEQYF

SEQ ID NO: 182949 - protein, 15 aa, Homo sapiens
  CDR3 for alpha chain variable domain of TCR clone 91475 (TRAV27, TRAJ38)
CAARRNAVNNRKLIW

SEQ ID NO: 182950 - protein, 13 aa, Homo sapiens
  CDR3 for beta chain variable domain of TCR clone 91475 (TRBV20-1, TRBJ1-1)
CSARAGGNTEAFF

SEQ ID NO: 182951 - protein, 14 aa, Homo sapiens
  CDR3 for alpha chain variable domain of TCR clone 91476 (TRAV12-2, TRAJ13)
CAVKKTGGHQKVTF

SEQ ID NO: 182952 - protein, 15 aa, Homo sapiens
  CDR3 for beta chain variable domain of TCR clone 91476 (TRBV19, TRBJ1-1)
CASTSGQIQNTEAFF

SEQ ID NO: 182953 - protein, 17 aa, Homo sapiens
  CDR3 for alpha chain variable domain of TCR clone 91477 (TRAV8-3, TRAJ13)
CAVGAGLGVTRKLPLEL

SEQ ID NO: 182954 - protein, 14 aa, Homo sapiens
  CDR3 for beta chain variable domain of TCR clone 91477 (TRBV7-3, TRBJ2-1)
CASSLAGGTNEQFF

SEQ ID NO: 182955 - protein, 18 aa, Homo sapiens
  CDR3 for alpha chain variable domain of TCR clone 91478 (TRAV26-2, TRAJ54)
CILRDVEVGIQGAQKLVF

SEQ ID NO: 182956 - protein, 14 aa, Homo sapiens
  CDR3 for beta chain variable domain of TCR clone 91478 (TRBV11-2, TRBJ1-5)
CASSLDRGRQPQHF

SEQ ID NO: 182957 - protein, 16 aa, Homo sapiens
  CDR3 for alpha chain variable domain of TCR clone 91479 (TRAV30, TRAJ24)
CGTEIVDADSWGKFQF

SEQ ID NO: 182958 - protein, 19 aa, Homo sapiens
  CDR3 for beta chain variable domain of TCR clone 91479 (TRBV25-1, TRBJ2-2)
CAILVYRVDRGRETGELFF

SEQ ID NO: 182959 - protein, 14 aa, Homo sapiens
  CDR3 for alpha chain variable domain of TCR clone 91480 (TRAV1-2, TRAJ16)
CAVNRFSDGQKLLF

SEQ ID NO: 182960 - protein, 15 aa, Homo sapiens
  CDR3 for beta chain variable domain of TCR clone 91480 (TRBV7-9, TRBJ1-6)
CASSSPGSGNSPLHF

SEQ ID NO: 182961 - protein, 13 aa, Homo sapiens
  CDR3 for alpha chain variable domain of TCR clone 91481 (TRAV3, TRAJ20)
CAVRPLNDYKLSC

SEQ ID NO: 182962 - protein, 12 aa, Homo sapiens
  CDR3 for beta chain variable domain of TCR clone 91481 (TRBV6-1, TRBJ2-1)
CATYGLNNEQFF

SEQ ID NO: 182963 - protein, 14 aa, Homo sapiens
  CDR3 for alpha chain variable domain of TCR clone 91482 (TRAV3, TRAJ34)
CAVRAPGNTDKLIF

SEQ ID NO: 182964 - protein, 13 aa, Homo sapiens
  CDR3 for beta chain variable domain of TCR clone 91482 (TRBV7-9, TRBJ1-2)
CASSLKQNYGYTF

SEQ ID NO: 182965 - protein, 15 aa, Homo sapiens
  CDR3 for alpha chain variable domain of TCR clone 91483 (TRAV14/DV4, TRAJ46)
CAMREKKSSGDKRTF

SEQ ID NO: 182966 - protein, 13 aa, Homo sapiens
  CDR3 for beta chain variable domain of TCR clone 91483 (TRBV20-1, TRBJ2-5)
CSAREAFQETQYF

SEQ ID NO: 182967 - protein, 14 aa, Homo sapiens
  CDR3 for alpha chain variable domain of TCR clone 91484 (TRAV12-3, TRAJ42)
CAMNYGGSQGNLIF

SEQ ID NO: 182968 - protein, 14 aa, Homo sapiens
  CDR3 for beta chain variable domain of TCR clone 91484 (TRBV7-8, TRBJ2-7)
CASSVGQGAYEQYF

SEQ ID NO: 182969 - protein, 15 aa, Homo sapiens
  CDR3 for alpha chain variable domain of TCR clone 91485 (TRAV2, TRAJ37)
CAVEDGSSNTGKLIF

SEQ ID NO: 182970 - protein, 13 aa, Homo sapiens
  CDR3 for beta chain variable domain of TCR clone 91485 (TRBV20-1, TRBJ1-6)
CSTFRQGNSPLHF

SEQ ID NO: 182971 - protein, 12 aa, Homo sapiens
  CDR3 for alpha chain variable domain of TCR clone 91486 (TRAV13-1, TRAJ53)
AASGGSNYKLTF

SEQ ID NO: 182972 - protein, 15 aa, Homo sapiens
  CDR3 for beta chain variable domain of TCR clone 91486 (TRBV5-1, TRBJ2-1)
CARSPPRAPYNEQFF

SEQ ID NO: 182973 - protein, 12 aa, Homo sapiens
  CDR3 for alpha chain variable domain of TCR clone 91487 (TRAV12-3, TRAJ41)
CAMSYSGYALNF

SEQ ID NO: 182974 - protein, 13 aa, Homo sapiens
  CDR3 for beta chain variable domain of TCR clone 91487 (TRBV7-3, TRBJ2-1)
CASSVDSDNEQFF

SEQ ID NO: 182975 - protein, 15 aa, Homo sapiens
  CDR3 for alpha chain variable domain of TCR clone 91488 (TRAV3, TRAJ20)
CAVRDSRSNDYELSF

SEQ ID NO: 182976 - protein, 14 aa, Homo sapiens
  CDR3 for beta chain variable domain of TCR clone 91488 (TRBV20-1, TRBJ2-7)
CSARRGNGIYEQYF

SEQ ID NO: 182977 - protein, 17 aa, Homo sapiens
  CDR3 for alpha chain variable domain of TCR clone 91489 (TRAV3, TRAJ42)
CAVRDRDDGGSQGNLIF

SEQ ID NO: 182978 - protein, 15 aa, Homo sapiens
  CDR3 for beta chain variable domain of TCR clone 91489 (TRBV2, TRBJ2-7)
CASSEGLARSYEQYF

SEQ ID NO: 182979 - protein, 10 aa, Homo sapiens
  CDR3 for alpha chain variable domain of TCR clone 91490 (TRAV12-1, TRAJ43)
CVVHNNDMRF

SEQ ID NO: 182980 - protein, 15 aa, Homo sapiens
  CDR3 for beta chain variable domain of TCR clone 91490 (TRBV10-3, TRBJ2-3)
CAISLTSGGTDTQYF

SEQ ID NO: 182981 - protein, 20 aa, Homo sapiens
  CDR3 for alpha chain variable domain of TCR clone 91491 (TRAV12-1, TRAJ42)
SSVIQPPTSVKGGSQGNLIF

SEQ ID NO: 182982 - protein, 14 aa, Homo sapiens
  CDR3 for beta chain variable domain of TCR clone 91491 (TRBV11-2, TRBJ2-5)
CASSRTGGIETQYF

SEQ ID NO: 182983 - protein, 11 aa, Homo sapiens
  CDR3 for alpha chain variable domain of TCR clone 91492 (TRAV3, TRAJ21)
FAVGNFNKFYF

SEQ ID NO: 182984 - protein, 13 aa, Homo sapiens
  CDR3 for beta chain variable domain of TCR clone 91492 (TRBV12-5, TRBJ2-3)
CASGDRQSDTQYF

SEQ ID NO: 182985 - protein, 12 aa, Homo sapiens
  CDR3 for alpha chain variable domain of TCR clone 91493 (TRAV21, TRAJ31)
CAVWGNNARLMF

SEQ ID NO: 182986 - protein, 16 aa, Homo sapiens
  CDR3 for beta chain variable domain of TCR clone 91493 (TRBV27, TRBJ2-5)
CASSYGPGGKKETQYF

SEQ ID NO: 182987 - protein, 20 aa, Homo sapiens
  CDR3 for alpha chain variable domain of TCR clone 91494 (TRAV12-1, TRAJ42)
SSVIQPPTSVKGGSQGNLIF

SEQ ID NO: 182988 - protein, 18 aa, Homo sapiens
  CDR3 for beta chain variable domain of TCR clone 91494 (TRBV11-2, TRBJ2-3)
CDSSLGGASRGAPNTQYF

SEQ ID NO: 182989 - protein, 13 aa, Homo sapiens
  CDR3 for alpha chain variable domain of TCR clone 91495 (TRAV12-2, TRAJ52)
CAVGGTSYGKLTF

SEQ ID NO: 182990 - protein, 14 aa, Homo sapiens
  CDR3 for beta chain variable domain of TCR clone 91495 (TRBV7-9, TRBJ2-1)
CASSPRDSPYEQFF

SEQ ID NO: 182991 - protein, 16 aa, Homo sapiens
  CDR3 for alpha chain variable domain of TCR clone 91496 (TRAV13-1, TRAJ45)
CAAPKESGGGADGLTF

SEQ ID NO: 182992 - protein, 13 aa, Homo sapiens
  CDR3 for beta chain variable domain of TCR clone 91496 (TRBV7-9, TRBJ1-2)
CASSLKQNYGYTF

SEQ ID NO: 182993 - protein, 15 aa, Homo sapiens
  CDR3 for alpha chain variable domain of TCR clone 91497 (TRAV20, TRAJ53)
CAVQASGGSNYKLTF

SEQ ID NO: 182994 - protein, 12 aa, Homo sapiens
  CDR3 for beta chain variable domain of TCR clone 91497 (TRBV7-6, TRBJ2-5)
CASSLSQETQHF

SEQ ID NO: 182995 - protein, 14 aa, Homo sapiens
  CDR3 for alpha chain variable domain of TCR clone 91498 (TRAV12-3, TRAJ10)
SHLHLTGGGNKLTF

SEQ ID NO: 182996 - protein, 15 aa, Homo sapiens
  CDR3 for beta chain variable domain of TCR clone 91498 (TRBV9, TRBJ1-6)
CASSVAGTGDSPLHF

SEQ ID NO: 182997 - protein, 15 aa, Homo sapiens
  CDR3 for alpha chain variable domain of TCR clone 91499 (TRAV13-1, TRAJ45)
CAASGSGGGADGLTF

SEQ ID NO: 182998 - protein, 14 aa, Homo sapiens
  CDR3 for beta chain variable domain of TCR clone 91499 (TRBV12-4, TRBJ1-2)
CASSFVGTAYGDTF

SEQ ID NO: 182999 - protein, 11 aa, Homo sapiens
  CDR3 for alpha chain variable domain of TCR clone 91500 (TRAV1-2, TRAJ40)
CAVPGTYKYIF

SEQ ID NO: 183000 - protein, 16 aa, Homo sapiens
  CDR3 for beta chain variable domain of TCR clone 91500 (TRBV29-1, TRBJ2-7)
CSVEVVGTSGSYEQNF

SEQ ID NO: 183001 - protein, 14 aa, Homo sapiens
  CDR3 for alpha chain variable domain of TCR clone 91501 (TRAV12-2, TRAJ40)
CAVKIPSGTYKYIF

SEQ ID NO: 183002 - protein, 13 aa, Homo sapiens
  CDR3 for beta chain variable domain of TCR clone 91501 (TRBV7-3, TRBJ2-1)
CASSPVAYNEQFF

SEQ ID NO: 183003 - protein, 14 aa, Homo sapiens
  CDR3 for alpha chain variable domain of TCR clone 91502 (TRAV12-2, TRAJ40)
CAVKIPSGTYKYIF

SEQ ID NO: 183004 - protein, 16 aa, Homo sapiens
  CDR3 for beta chain variable domain of TCR clone 91502 (TRBV10-3, TRBJ2-3)
CAISVSRLALTDTQYF

SEQ ID NO: 183005 - protein, 15 aa, Homo sapiens
  CDR3 for alpha chain variable domain of TCR clone 91503 (TRAV34, TRAJ38)
CGADFTPGNNRKLIW

SEQ ID NO: 183006 - protein, 16 aa, Homo sapiens
  CDR3 for beta chain variable domain of TCR clone 91503 (TRBV12-5, TRBJ2-5)
CASGLRTSGNQETQYL

SEQ ID NO: 183007 - protein, 13 aa, Homo sapiens
  CDR3 for alpha chain variable domain of TCR clone 91504 (TRAV1-2, TRAJ9)
CAVLNPGGFKTIF

SEQ ID NO: 183008 - protein, 14 aa, Homo sapiens
  CDR3 for beta chain variable domain of TCR clone 91504 (TRBV20-1, TRBJ2-3)
CSARGGTSTDTQYF

SEQ ID NO: 183009 - protein, 14 aa, Homo sapiens
  CDR3 for alpha chain variable domain of TCR clone 91505 (TRAV13-1, TRAJ40)
CAASMTSGTYKYIF

SEQ ID NO: 183010 - protein, 15 aa, Homo sapiens
  CDR3 for beta chain variable domain of TCR clone 91505 (TRBV11-2, TRBJ2-1)
CASSSPSTRYNEQFF

SEQ ID NO: 183011 - protein, 14 aa, Homo sapiens
  CDR3 for alpha chain variable domain of TCR clone 91506 (TRAV1-2, TRAJ8)
CAVREDTGFQKLVF

SEQ ID NO: 183012 - protein, 13 aa, Homo sapiens
  CDR3 for beta chain variable domain of TCR clone 91506 (TRBV12-4, TRBJ1-2)
CASSSGPNYGYTF

SEQ ID NO: 183013 - protein, 11 aa, Homo sapiens
  CDR3 for alpha chain variable domain of TCR clone 91507 (TRAV12-2, TRAJ21)
CAVEGFNKFYF

SEQ ID NO: 183014 - protein, 15 aa, Homo sapiens
  CDR3 for beta chain variable domain of TCR clone 91507 (TRBV6-3, TRBJ2-7)
CASSSPGTVFYEQYF

SEQ ID NO: 183015 - protein, 15 aa, Homo sapiens
  CDR3 for alpha chain variable domain of TCR clone 91508 (TRAV12-3, TRAJ22)
CAMRTISGSARQMTF

SEQ ID NO: 183016 - protein, 16 aa, Homo sapiens
  CDR3 for beta chain variable domain of TCR clone 91508 (TRBV20-1, TRBJ2-2)
CSARRPGTGNTGELFF

SEQ ID NO: 183017 - protein, 15 aa, Homo sapiens
  CDR3 for alpha chain variable domain of TCR clone 91509 (TRAV8-4, TRAJ37)
CAVTYGSSNTGKLIF

SEQ ID NO: 183018 - protein, 15 aa, Homo sapiens
  CDR3 for beta chain variable domain of TCR clone 91509 (TRBV19, TRBJ1-6)
CASSTQGAVGSPLHF

SEQ ID NO: 183019 - protein, 14 aa, Homo sapiens
  CDR3 for alpha chain variable domain of TCR clone 91510 (TRAV12-2, TRAJ3)
CAVKGYSSASKIIF

SEQ ID NO: 183020 - protein, 14 aa, Homo sapiens
  CDR3 for beta chain variable domain of TCR clone 91510 (TRBV6-3, TRBJ1-2)
CASSEGGGSYGYTF

SEQ ID NO: 183021 - protein, 15 aa, Homo sapiens
  CDR3 for alpha chain variable domain of TCR clone 91511 (TRAV3, TRAJ4)
CAVRDGAGGYNKLIF

SEQ ID NO: 183022 - protein, 13 aa, Homo sapiens
  CDR3 for beta chain variable domain of TCR clone 91511 (TRBV12-5, TRBJ1-2)
CASGVRTGNGYTF

SEQ ID NO: 183023 - protein, 14 aa, Homo sapiens
  CDR3 for alpha chain variable domain of TCR clone 91512 (TRAV25, TRAJ6)
CAGRESGGSYIPTF

SEQ ID NO: 183024 - protein, 14 aa, Homo sapiens
  CDR3 for beta chain variable domain of TCR clone 91512 (TRBV7-9, TRBJ2-1)
CASSPRDSLYEQFF

SEQ ID NO: 183025 - protein, 16 aa, Homo sapiens
  CDR3 for alpha chain variable domain of TCR clone 91513 (TRAV12-1, TRAJ45)
CVVIRYSGGGADGLTF

SEQ ID NO: 183026 - protein, 12 aa, Homo sapiens
  CDR3 for beta chain variable domain of TCR clone 91513 (TRBV6-5, TRBJ2-2)
FASRQITGELFF

SEQ ID NO: 183027 - protein, 15 aa, Homo sapiens
  CDR3 for alpha chain variable domain of TCR clone 91514 (TRAV21, TRAJ53)
CAVRQSGGSNYKLTF

SEQ ID NO: 183028 - protein, 14 aa, Homo sapiens
  CDR3 for beta chain variable domain of TCR clone 91514 (TRBV18, TRBJ2-5)
CASSPGVSQETQYL

SEQ ID NO: 183029 - protein, 14 aa, Homo sapiens
  CDR3 for alpha chain variable domain of TCR clone 91515 (TRAV16, TRAJ15)
CALRPNQAGTALIF

SEQ ID NO: 183030 - protein, 13 aa, Homo sapiens
  CDR3 for beta chain variable domain of TCR clone 91515 (TRBV7-3, TRBJ1-1)
CASSQDWGAEAFF

SEQ ID NO: 183031 - protein, 16 aa, Homo sapiens
  CDR3 for alpha chain variable domain of TCR clone 91516 (TRAV16, TRAJ42)
CSRKMNYGGSQGNLIF

SEQ ID NO: 183032 - protein, 13 aa, Homo sapiens
  CDR3 for beta chain variable domain of TCR clone 91516 (TRBV20-1, TRBJ2-7)
CSASPPSSYEQYF

SEQ ID NO: 183033 - protein, 12 aa, Homo sapiens
  CDR3 for alpha chain variable domain of TCR clone 91517 (TRAV17, TRAJ5)
CAILTGRRALTF

SEQ ID NO: 183034 - protein, 13 aa, Homo sapiens
  CDR3 for beta chain variable domain of TCR clone 91517 (TRBV7-9, TRBJ2-3)
CASSPGSTDTQYF

SEQ ID NO: 183035 - protein, 14 aa, Homo sapiens
  CDR3 for alpha chain variable domain of TCR clone 91518 (TRAV12-2, TRAJ13)
CAVKMTGGYQKVTF

SEQ ID NO: 183036 - protein, 14 aa, Homo sapiens
  CDR3 for beta chain variable domain of TCR clone 91518 (TRBV7-2, TRBJ2-7)
CASSPKTSFYEQYF

SEQ ID NO: 183037 - protein, 14 aa, Homo sapiens
  CDR3 for alpha chain variable domain of TCR clone 91519 (TRAV13-1, TRAJ29)
CAASSNSGNTPLVF

SEQ ID NO: 183038 - protein, 16 aa, Homo sapiens
  CDR3 for beta chain variable domain of TCR clone 91519 (TRBV6-6, TRBJ1-5)
CASSYSTLVGNQPQHF

SEQ ID NO: 183039 - protein, 14 aa, Homo sapiens
  CDR3 for alpha chain variable domain of TCR clone 91520 (TRAV12-2, TRAJ17)
CAALFKAAGNKLTF

SEQ ID NO: 183040 - protein, 16 aa, Homo sapiens
  CDR3 for beta chain variable domain of TCR clone 91520 (TRBV20-1, TRBJ2-2)
CGASASGIPGAGELFF

SEQ ID NO: 183041 - protein, 14 aa, Homo sapiens
  CDR3 for alpha chain variable domain of TCR clone 91521 (TRAV12-2, TRAJ5)
CAVNRATGRRALTF

SEQ ID NO: 183042 - protein, 12 aa, Homo sapiens
  CDR3 for beta chain variable domain of TCR clone 91521 (TRBV19, TRBJ1-5)
CASSIAQQPQHF

SEQ ID NO: 183043 - protein, 14 aa, Homo sapiens
  CDR3 for alpha chain variable domain of TCR clone 91522 (TRAV16, TRAJ39)
CALSKNNAGNMITF

SEQ ID NO: 183044 - protein, 17 aa, Homo sapiens
  CDR3 for beta chain variable domain of TCR clone 91522 (TRBV23-1, TRBJ1-2)
CASSNTGGGLLWLHLRF

SEQ ID NO: 183045 - protein, 13 aa, Homo sapiens
  CDR3 for alpha chain variable domain of TCR clone 91523 (TRAV27, TRAJ6)
CAGGTRGSYIPTF

SEQ ID NO: 183046 - protein, 13 aa, Homo sapiens
  CDR3 for beta chain variable domain of TCR clone 91523 (TRBV7-3, TRBJ2-5)
CASSFRGGETQYF

SEQ ID NO: 183047 - protein, 18 aa, Homo sapiens
  CDR3 for alpha chain variable domain of TCR clone 91524 (TRAV26-2, TRAJ54)
CILRDVEVGIQGAQKLVF

SEQ ID NO: 183048 - protein, 13 aa, Homo sapiens
  CDR3 for beta chain variable domain of TCR clone 91524 (TRBV12-5, TRBJ2-3)
CASGDRQSDTQYF

SEQ ID NO: 183049 - protein, 14 aa, Homo sapiens
  CDR3 for alpha chain variable domain of TCR clone 91525 (TRAV35, TRAJ41)
CAGQASVRRNALNF

SEQ ID NO: 183050 - protein, 14 aa, Homo sapiens
  CDR3 for beta chain variable domain of TCR clone 91525 (TRBV20-1, TRBJ1-2)
CSASEQGAVYGYSF

SEQ ID NO: 183051 - protein, 14 aa, Homo sapiens
  CDR3 for alpha chain variable domain of TCR clone 91526 (TRAV26-1, TRAJ38)
CIADNAGNNRKLIW

SEQ ID NO: 183052 - protein, 13 aa, Homo sapiens
  CDR3 for beta chain variable domain of TCR clone 91526 (TRBV18, TRBJ2-2)
CASSPTRGGELFF

SEQ ID NO: 183053 - protein, 13 aa, Homo sapiens
  CDR3 for alpha chain variable domain of TCR clone 91527 (TRAV36/DV7, TRAJ37)
CAVFSSNTGQLIF

SEQ ID NO: 183054 - protein, 16 aa, Homo sapiens
  CDR3 for beta chain variable domain of TCR clone 91527 (TRBV3-1, TRBJ2-5)
CASSPGQFNGFGTQYF

SEQ ID NO: 183055 - protein, 16 aa, Homo sapiens
  CDR3 for alpha chain variable domain of TCR clone 91528 (TRAV3, TRAJ21)
CAVRDIERGNFNKFYF

SEQ ID NO: 183056 - protein, 15 aa, Homo sapiens
  CDR3 for beta chain variable domain of TCR clone 91528 (TRBV7-9, TRBJ1-4)
CASSARTGGNEKLFF

SEQ ID NO: 183057 - protein, 14 aa, Homo sapiens
  CDR3 for alpha chain variable domain of TCR clone 91529 (TRAV34, TRAJ44)
CGADGTGTASKLTF

SEQ ID NO: 183058 - protein, 16 aa, Homo sapiens
  CDR3 for beta chain variable domain of TCR clone 91529 (TRBV7-9, TRBJ1-2)
CASSLGFSSGEDGYTF

SEQ ID NO: 183059 - protein, 15 aa, Homo sapiens
  CDR3 for alpha chain variable domain of TCR clone 91530 (TRAV3, TRAJ22)
CAVRDLGGSARQLTF

SEQ ID NO: 183060 - protein, 16 aa, Homo sapiens
  CDR3 for beta chain variable domain of TCR clone 91530 (TRBV5-4, TRBJ2-3)
CASQQPGAGGADTQYF

SEQ ID NO: 183061 - protein, 16 aa, Homo sapiens
  CDR3 for alpha chain variable domain of TCR clone 91531 (TRAV12-2, TRAJ40)
CAMIRGGTSGTYKYIF

SEQ ID NO: 183062 - protein, 14 aa, Homo sapiens
  CDR3 for beta chain variable domain of TCR clone 91531 (TRBV20-1, TRBJ2-5)
CSARDGRAGETQYF

SEQ ID NO: 183063 - protein, 12 aa, Homo sapiens
  CDR3 for alpha chain variable domain of TCR clone 91532 (TRAV12-2, TRAJ3)
CAVWSSASKIIF

SEQ ID NO: 183064 - protein, 16 aa, Homo sapiens
  CDR3 for beta chain variable domain of TCR clone 91532 (TRBV7-3, TRBJ2-1)
CASSLEGYRSYNEQFF

SEQ ID NO: 183065 - protein, 13 aa, Homo sapiens
  CDR3 for alpha chain variable domain of TCR clone 91533 (TRAV13-1, TRAJ20)
CAARVSNDYKLSF

SEQ ID NO: 183066 - protein, 12 aa, Homo sapiens
  CDR3 for beta chain variable domain of TCR clone 91533 (TRBV20-1, TRBJ2-1)
RSARLGTDEQFF

SEQ ID NO: 183067 - protein, 11 aa, Homo sapiens
  CDR3 for alpha chain variable domain of TCR clone 91534 (TRAV2, TRAJ33)
CAVDSNYQLIW

SEQ ID NO: 183068 - protein, 13 aa, Homo sapiens
  CDR3 for beta chain variable domain of TCR clone 91534 (TRBV15, TRBJ1-6)
CATSGGLNSPLHF

SEQ ID NO: 183069 - protein, 15 aa, Homo sapiens
  CDR3 for alpha chain variable domain of TCR clone 91535 (TRAV12-1, TRAJ45)
CVVLSVGGGADGLTF

SEQ ID NO: 183070 - protein, 12 aa, Homo sapiens
  CDR3 for beta chain variable domain of TCR clone 91535 (TRBV12-5, TRBJ2-5)
CASGQGVETQYF

SEQ ID NO: 183071 - protein, 13 aa, Homo sapiens
  CDR3 for alpha chain variable domain of TCR clone 91536 (TRAV2, TRAJ21)
CAVEHLNFNKFYF

SEQ ID NO: 183072 - protein, 15 aa, Homo sapiens
  CDR3 for beta chain variable domain of TCR clone 91536 (TRBV28, TRBJ2-5)
CASSPGQGSIETQYF

SEQ ID NO: 183073 - protein, 16 aa, Homo sapiens
  CDR3 for alpha chain variable domain of TCR clone 91537 (TRAV12-3, TRAJ53)
CAMSPGSGGSNYKLTF

SEQ ID NO: 183074 - protein, 14 aa, Homo sapiens
  CDR3 for beta chain variable domain of TCR clone 91537 (TRBV7-9, TRBJ2-3)
CASSLEDGTDTQYF

SEQ ID NO: 183075 - protein, 14 aa, Homo sapiens
  CDR3 for alpha chain variable domain of TCR clone 91538 (TRAV2, TRAJ9)
CAVEDRSGGFNTIF

SEQ ID NO: 183076 - protein, 17 aa, Homo sapiens
  CDR3 for beta chain variable domain of TCR clone 91538 (TRBV11-2, TRBJ2-1)
CASSLYPPGVEYNEQFF

SEQ ID NO: 183077 - protein, 15 aa, Homo sapiens
  CDR3 for alpha chain variable domain of TCR clone 91539 (TRAV25, TRAJ52)
CAGRPGGTSYGKLTF

SEQ ID NO: 183078 - protein, 18 aa, Homo sapiens
  CDR3 for beta chain variable domain of TCR clone 91539 (TRBV11-2, TRBJ2-3)
CASSLGGASREAPNTQYF

SEQ ID NO: 183079 - protein, 12 aa, Homo sapiens
  CDR3 for alpha chain variable domain of TCR clone 91540 (TRAV21, TRAJ33)
CAKMDSNYQLIW

SEQ ID NO: 183080 - protein, 13 aa, Homo sapiens
  CDR3 for beta chain variable domain of TCR clone 91540 (TRBV7-9, TRBJ2-3)
CASSPGSTDTQYF

SEQ ID NO: 183081 - protein, 17 aa, Homo sapiens
  CDR3 for alpha chain variable domain of TCR clone 91541 (TRAV8-2, )
CVVNIQNPDPAVCQLRD

SEQ ID NO: 183082 - protein, 12 aa, Homo sapiens
  CDR3 for beta chain variable domain of TCR clone 91541 (TRBV28, TRBJ2-3)
CASSLYRDTQYF

SEQ ID NO: 183083 - protein, 10 aa, Homo sapiens
  CDR3 for alpha chain variable domain of TCR clone 91542 (TRAV8-4, TRAJ43)
CAVSADDMRF

SEQ ID NO: 183084 - protein, 14 aa, Homo sapiens
  CDR3 for beta chain variable domain of TCR clone 91542 (TRBV7-3, TRBJ2-1)
CASSLAGGTNEQFF

SEQ ID NO: 183085 - protein, 11 aa, Homo sapiens
  CDR3 for alpha chain variable domain of TCR clone 91543 (TRAV21, TRAJ11)
CAVNGYSTLTF

SEQ ID NO: 183086 - protein, 11 aa, Homo sapiens
  CDR3 for beta chain variable domain of TCR clone 91543 (TRBV19, TRBJ1-1)
CVSSIGSEAFF

SEQ ID NO: 183087 - protein, 15 aa, Homo sapiens
  CDR3 for alpha chain variable domain of TCR clone 91544 (TRAV12-3, TRAJ11)
CAMSEGNSGYSTLTF

SEQ ID NO: 183088 - protein, 16 aa, Homo sapiens
  CDR3 for beta chain variable domain of TCR clone 91544 (TRBV5-1, TRBJ2-7)
CASSLEGLAGLYEQYF

SEQ ID NO: 183089 - protein, 23 aa, Homo sapiens
  CDR3 for alpha chain variable domain of TCR clone 91545 (TRAV26-1, TRAJ38)
CIADNAGNNHIQNPDPAGYQLSD

SEQ ID NO: 183090 - protein, 13 aa, Homo sapiens
  CDR3 for beta chain variable domain of TCR clone 91545 (TRBV20-1, TRBJ1-1)
CSARGGGNTEAFF

SEQ ID NO: 183091 - protein, 13 aa, Homo sapiens
  CDR3 for alpha chain variable domain of TCR clone 91546 (TRAV35, TRAJ44)
CAGLSGTASKLTF

SEQ ID NO: 183092 - protein, 17 aa, Homo sapiens
  CDR3 for beta chain variable domain of TCR clone 91546 (TRBV7-8, TRBJ1-2)
RASSLRPLQGHLYGYTF

SEQ ID NO: 183093 - protein, 12 aa, Homo sapiens
  CDR3 for alpha chain variable domain of TCR clone 91547 (TRAV4, TRAJ26)
CLVGDYGQNFVF

SEQ ID NO: 183094 - protein, 15 aa, Homo sapiens
  CDR3 for beta chain variable domain of TCR clone 91547 (TRBV7-2, TRBJ2-5)
CASSGILAGAETQYF

SEQ ID NO: 183095 - protein, 14 aa, Homo sapiens
  CDR3 for alpha chain variable domain of TCR clone 91548 (TRAV13-1, TRAJ45)
CAAIGGGGADGLTF

SEQ ID NO: 183096 - protein, 16 aa, Homo sapiens
  CDR3 for beta chain variable domain of TCR clone 91548 (TRBV7-2, TRBJ1-1)
CASSLGEGWTNTEAFF

SEQ ID NO: 183097 - protein, 13 aa, Homo sapiens
  CDR3 for alpha chain variable domain of TCR clone 91549 (TRAV27, TRAJ6)
CAGGTRGSYIPTF

SEQ ID NO: 183098 - protein, 16 aa, Homo sapiens
  CDR3 for beta chain variable domain of TCR clone 91549 (TRBV19, TRBJ1-1)
CASRFGGPVTGTEAFF

SEQ ID NO: 183099 - protein, 12 aa, Homo sapiens
  CDR3 for alpha chain variable domain of TCR clone 91550 (TRAV12-3, TRAJ17)
CAMTLTGNELTF

SEQ ID NO: 183100 - protein, 15 aa, Homo sapiens
  CDR3 for beta chain variable domain of TCR clone 91550 (TRBV20-1, TRBJ2-7)
CSARDRVSGMDEHYF

SEQ ID NO: 183101 - protein, 14 aa, Homo sapiens
  CDR3 for alpha chain variable domain of TCR clone 91551 (TRAV1-1, TRAJ27)
CAVIYNTNAGKSTF

SEQ ID NO: 183102 - protein, 13 aa, Homo sapiens
  CDR3 for beta chain variable domain of TCR clone 91551 (TRBV4-2, TRBJ1-1)
CASSQAGNTEAFF

SEQ ID NO: 183103 - protein, 14 aa, Homo sapiens
  CDR3 for alpha chain variable domain of TCR clone 91552 (TRAV26-1, TRAJ54)
CIVRRTQGAQKLVF

SEQ ID NO: 183104 - protein, 17 aa, Homo sapiens
  CDR3 for beta chain variable domain of TCR clone 91552 (TRBV4-2, TRBJ1-1)
CASNQFGGGSGNTEAFF

SEQ ID NO: 183105 - protein, 11 aa, Homo sapiens
  CDR3 for alpha chain variable domain of TCR clone 91553 (TRAV12-2, TRAJ33)
CAVGSNYQLIW

SEQ ID NO: 183106 - protein, 13 aa, Homo sapiens
  CDR3 for beta chain variable domain of TCR clone 91553 (TRBV27, TRBJ2-1)
CASRTLGVGEQFF

SEQ ID NO: 183107 - protein, 14 aa, Homo sapiens
  CDR3 for alpha chain variable domain of TCR clone 91554 (TRAV12-2, TRAJ36)
CAVNPPTGANNLFF

SEQ ID NO: 183108 - protein, 14 aa, Homo sapiens
  CDR3 for beta chain variable domain of TCR clone 91554 (TRBV7-3, TRBJ1-1)
CASSLKGGNTEAFF

SEQ ID NO: 183109 - protein, 12 aa, Homo sapiens
  CDR3 for alpha chain variable domain of TCR clone 91555 (TRAV20, TRAJ33)
CAVRGSSYQLIW

SEQ ID NO: 183110 - protein, 13 aa, Homo sapiens
  CDR3 for beta chain variable domain of TCR clone 91555 (TRBV4-3, TRBJ1-1)
CASSPTGNTEAFF

SEQ ID NO: 183111 - protein, 13 aa, Homo sapiens
  CDR3 for alpha chain variable domain of TCR clone 91556 (TRAV26-1, TRAJ34)
CIVRGHDTDKLIF

SEQ ID NO: 183112 - protein, 15 aa, Homo sapiens
  CDR3 for beta chain variable domain of TCR clone 91556 (TRBV4-1, TRBJ2-7)
CASSQEWGPSYEQYF

SEQ ID NO: 183113 - protein, 13 aa, Homo sapiens
  CDR3 for alpha chain variable domain of TCR clone 91557 (TRAV20, TRAJ21)
CAVEGYTFNKFYF

SEQ ID NO: 183114 - protein, 14 aa, Homo sapiens
  CDR3 for beta chain variable domain of TCR clone 91557 (TRBV3-1, TRBJ2-5)
CASSQGPDQETQYF

SEQ ID NO: 183115 - protein, 16 aa, Homo sapiens
  CDR3 for alpha chain variable domain of TCR clone 91558 (TRAV12-3, TRAJ53)
CAMSPGSGGSNYKLTF

SEQ ID NO: 183116 - protein, 13 aa, Homo sapiens
  CDR3 for beta chain variable domain of TCR clone 91558 (TRBV11-2, TRBJ1-6)
CASSLAGVSPLHF

SEQ ID NO: 183117 - protein, 17 aa, Homo sapiens
  CDR3 for alpha chain variable domain of TCR clone 91559 (TRAV26-1, TRAJ28)
CIVRVPDSGAGSYQLTF

SEQ ID NO: 183118 - protein, 17 aa, Homo sapiens
  CDR3 for beta chain variable domain of TCR clone 91559 (TRBV28, TRBJ2-7)
CASSPLPAGGKAYEQYF

SEQ ID NO: 183119 - protein, 15 aa, Homo sapiens
  CDR3 for alpha chain variable domain of TCR clone 91560 (TRAV12-3, TRAJ10)
CASYILTGGGNKLTF

SEQ ID NO: 183120 - protein, 15 aa, Homo sapiens
  CDR3 for beta chain variable domain of TCR clone 91560 (TRBV7-2, TRBJ1-6)
CASSLGPDRGMHLHF

SEQ ID NO: 183121 - protein, 12 aa, Homo sapiens
  CDR3 for alpha chain variable domain of TCR clone 91561 (TRAV12-3, TRAJ17)
CAMTLTGNKLTF

SEQ ID NO: 183122 - protein, 12 aa, Homo sapiens
  CDR3 for beta chain variable domain of TCR clone 91561 (TRBV2, TRBJ2-1)
CAYGPPGDEQFF

SEQ ID NO: 183123 - protein, 14 aa, Homo sapiens
  CDR3 for alpha chain variable domain of TCR clone 91562 (TRAV13-1, TRAJ16)
CAAGQMARSCSLQG

SEQ ID NO: 183124 - protein, 15 aa, Homo sapiens
  CDR3 for beta chain variable domain of TCR clone 91562 (TRBV19, TRBJ2-1)
CASSSPGVPLDEQFF

SEQ ID NO: 183125 - protein, 16 aa, Homo sapiens
  CDR3 for alpha chain variable domain of TCR clone 91563 (TRAV30, TRAJ24)
CVTEIVDADSWGKFQF

SEQ ID NO: 183126 - protein, 16 aa, Homo sapiens
  CDR3 for beta chain variable domain of TCR clone 91563 (TRBV2, TRBJ1-3)
CASSGGAGRSGNTIYF

SEQ ID NO: 183127 - protein, 18 aa, Homo sapiens
  CDR3 for alpha chain variable domain of TCR clone 91564 (TRAV1-2, TRAJ18)
CAVRDMGDRGSTLGRLYF

SEQ ID NO: 183128 - protein, 16 aa, Homo sapiens
  CDR3 for beta chain variable domain of TCR clone 91564 (TRBV29-1, TRBJ1-2)
CSVEANRNIANYGYTF

SEQ ID NO: 183129 - protein, 14 aa, Homo sapiens
  CDR3 for alpha chain variable domain of TCR clone 91565 (TRAV8-2, TRAJ4)
CVVSPSGGYNKLIF

SEQ ID NO: 183130 - protein, 15 aa, Homo sapiens
  CDR3 for beta chain variable domain of TCR clone 91565 (TRBV2, TRBJ2-1)
CASSELAGSYNEHFF

SEQ ID NO: 183131 - protein, 16 aa, Homo sapiens
  CDR3 for alpha chain variable domain of TCR clone 91566 (TRAV12-1, TRAJ8)
CVVNGRGNTGFQKLVF

SEQ ID NO: 183132 - protein, 14 aa, Homo sapiens
  CDR3 for beta chain variable domain of TCR clone 91566 (TRBV7-9, TRBJ2-5)
CASSLVGGEETQYF

SEQ ID NO: 183133 - protein, 12 aa, Homo sapiens
  CDR3 for alpha chain variable domain of TCR clone 91567 (TRAV21, TRAJ33)
CAKMDSNYQLIW

SEQ ID NO: 183134 - protein, 13 aa, Homo sapiens
  CDR3 for beta chain variable domain of TCR clone 91567 (TRBV11-2, TRBJ2-2)
CASGRDREEELFF

SEQ ID NO: 183135 - protein, 13 aa, Homo sapiens
  CDR3 for alpha chain variable domain of TCR clone 91568 (TRAV17, TRAJ5)
CALRGTGRRALTF

SEQ ID NO: 183136 - protein, 15 aa, Homo sapiens
  CDR3 for beta chain variable domain of TCR clone 91568 (TRBV6-1, TRBJ1-5)
CASSELREGNQTQHF

SEQ ID NO: 183137 - protein, 10 aa, Homo sapiens
  CDR3 for alpha chain variable domain of TCR clone 91569 (TRAV30, TRAJ48)
CGIGNEKLTF

SEQ ID NO: 183138 - protein, 14 aa, Homo sapiens
  CDR3 for beta chain variable domain of TCR clone 91569 (TRBV7-6, TRBJ2-3)
CASSVAGGSDTQYF

SEQ ID NO: 183139 - protein, 19 aa, Homo sapiens
  CDR3 for alpha chain variable domain of TCR clone 91570 (TRAV17, TRAJ40)
TASRAADTASYFCASKYIF

SEQ ID NO: 183140 - protein, 17 aa, Homo sapiens
  CDR3 for beta chain variable domain of TCR clone 91570 (TRBV11-2, TRBJ2-4)
CASSFRALGGAGDIQYF

SEQ ID NO: 183141 - protein, 14 aa, Homo sapiens
  CDR3 for alpha chain variable domain of TCR clone 91571 (TRAV17, TRAJ57)
CATDPQGGSEKLVF

SEQ ID NO: 183142 - protein, 17 aa, Homo sapiens
  CDR3 for beta chain variable domain of TCR clone 91571 (TRBV28, TRBJ2-5)
CASSTPEGDALQETQYF

SEQ ID NO: 183143 - protein, 13 aa, Homo sapiens
  CDR3 for alpha chain variable domain of TCR clone 91572 (TRAV3, TRAJ21)
CAVREPEFNKFYF

SEQ ID NO: 183144 - protein, 13 aa, Homo sapiens
  CDR3 for beta chain variable domain of TCR clone 91572 (TRBV9, TRBJ2-1)
CASSPSGGNEQFF

SEQ ID NO: 183145 - protein, 11 aa, Homo sapiens
  CDR3 for alpha chain variable domain of TCR clone 91573 (TRAV16, TRAJ49)
CALRPGNQFYF

SEQ ID NO: 183146 - protein, 16 aa, Homo sapiens
  CDR3 for beta chain variable domain of TCR clone 91573 (TRBV20-1, TRBJ1-5)
CSARDVGGGWIQPQHF

SEQ ID NO: 183147 - protein, 12 aa, Homo sapiens
  CDR3 for alpha chain variable domain of TCR clone 91574 (TRAV24, TRAJ39)
CAWGDAGNMLTF

SEQ ID NO: 183148 - protein, 12 aa, Homo sapiens
  CDR3 for beta chain variable domain of TCR clone 91574 (TRBV29-1, TRBJ2-3)
CSVTGGADTQYF

SEQ ID NO: 183149 - protein, 10 aa, Homo sapiens
  CDR3 for alpha chain variable domain of TCR clone 91575 (TRAV1-2, TRAJ23)
CAGQGGKLIF

SEQ ID NO: 183150 - protein, 16 aa, Homo sapiens
  CDR3 for beta chain variable domain of TCR clone 91575 (TRBV11-2, TRBJ1-1)
CASSLRKGGEHSKAFF

SEQ ID NO: 183151 - protein, 16 aa, Homo sapiens
  CDR3 for alpha chain variable domain of TCR clone 91576 (TRAV3, TRAJ10)
CAVRDMNAGGGNRLTL

SEQ ID NO: 183152 - protein, 16 aa, Homo sapiens
  CDR3 for beta chain variable domain of TCR clone 91576 (TRBV6-3, TRBJ1-2)
CASSYSRRASNYGYTF

SEQ ID NO: 183153 - protein, 13 aa, Homo sapiens
  CDR3 for alpha chain variable domain of TCR clone 91577 (TRAV12-3, TRAJ13)
CAMSSGCYQKVTF

SEQ ID NO: 183154 - protein, 13 aa, Homo sapiens
  CDR3 for beta chain variable domain of TCR clone 91577 (TRBV20-1, TRBJ1-1)
CSAPPGGHTEAFF

SEQ ID NO: 183155 - protein, 16 aa, Homo sapiens
  CDR3 for alpha chain variable domain of TCR clone 91578 (TRAV1-2, TRAJ10)
CAVRGVLTGGGNKLTF

SEQ ID NO: 183156 - protein, 14 aa, Homo sapiens
  CDR3 for beta chain variable domain of TCR clone 91578 (TRBV25-1, TRBJ1-1)
CASTHLGGDTEAFF

SEQ ID NO: 183157 - protein, 13 aa, Homo sapiens
  CDR3 for alpha chain variable domain of TCR clone 91579 (TRAV20, TRAJ48)
CAVHLFGNEKLTF

SEQ ID NO: 183158 - protein, 15 aa, Homo sapiens
  CDR3 for beta chain variable domain of TCR clone 91579 (TRBV6-5, TRBJ2-6)
CARSQWEAGANVLTF

SEQ ID NO: 183159 - protein, 11 aa, Homo sapiens
  CDR3 for alpha chain variable domain of TCR clone 91580 (TRAV3, TRAJ21)
CAVGNFNKFYF

SEQ ID NO: 183160 - protein, 15 aa, Homo sapiens
  CDR3 for beta chain variable domain of TCR clone 91580 (TRBV5-1, TRBJ2-7)
CASSLGDFTTYEQYF

SEQ ID NO: 183161 - protein, 15 aa, Homo sapiens
  CDR3 for alpha chain variable domain of TCR clone 91581 (TRAV35, TRAJ40)
CAGQLGTSGTYRYIF

SEQ ID NO: 183162 - protein, 14 aa, Homo sapiens
  CDR3 for beta chain variable domain of TCR clone 91581 (TRBV7-3, TRBJ2-1)
CANSLAGGTNEQFF

SEQ ID NO: 183163 - protein, 18 aa, Homo sapiens
  CDR3 for alpha chain variable domain of TCR clone 91582 (TRAV21, TRAJ52)
CAVRPSPSGGTSYGKLTF

SEQ ID NO: 183164 - protein, 16 aa, Homo sapiens
  CDR3 for beta chain variable domain of TCR clone 91582 (TRBV7-3, TRBJ2-1)
CASSLEGYRSYNEQFF

SEQ ID NO: 183165 - protein, 14 aa, Homo sapiens
  CDR3 for alpha chain variable domain of TCR clone 91583 (TRAV12-2, TRAJ33)
CAVKSARSNYQLIW

SEQ ID NO: 183166 - protein, 12 aa, Homo sapiens
  CDR3 for beta chain variable domain of TCR clone 91583 (TRBV24-1, TRBJ2-3)
CATSDSTDTQYF

SEQ ID NO: 183167 - protein, 16 aa, Homo sapiens
  CDR3 for alpha chain variable domain of TCR clone 91584 (TRAV16, TRAJ52)
CALSGVGGTSYGKLTF

SEQ ID NO: 183168 - protein, 14 aa, Homo sapiens
  CDR3 for beta chain variable domain of TCR clone 91584 (TRBV19, TRBJ1-2)
CASSLQVQAYGYTF

SEQ ID NO: 183169 - protein, 14 aa, Homo sapiens
  CDR3 for alpha chain variable domain of TCR clone 91585 (TRAV12-2, TRAJ45)
CAVYSGGGADGLTF

SEQ ID NO: 183170 - protein, 15 aa, Homo sapiens
  CDR3 for beta chain variable domain of TCR clone 91585 (TRBV11-3, TRBJ2-7)
CASSPGPASSYEQYF

SEQ ID NO: 183171 - protein, 12 aa, Homo sapiens
  CDR3 for alpha chain variable domain of TCR clone 91586 (TRAV13-2, TRAJ23)
CAERHRGGKLSF

SEQ ID NO: 183172 - protein, 16 aa, Homo sapiens
  CDR3 for beta chain variable domain of TCR clone 91586 (TRBV20-1, TRBJ2-7)
CSASTSGRLSSYEQYF

SEQ ID NO: 183173 - protein, 16 aa, Homo sapiens
  CDR3 for alpha chain variable domain of TCR clone 91587 (TRAV3, TRAJ21)
CAVRDIERGNFNKFYF

SEQ ID NO: 183174 - protein, 14 aa, Homo sapiens
  CDR3 for beta chain variable domain of TCR clone 91587 (TRBV20-1, TRBJ1-5)
CSARGLGSNQPQHF

SEQ ID NO: 183175 - protein, 14 aa, Homo sapiens
  CDR3 for alpha chain variable domain of TCR clone 91588 (TRAV8-3, TRAJ48)
CCGCGQSGNEKLTF

SEQ ID NO: 183176 - protein, 15 aa, Homo sapiens
  CDR3 for beta chain variable domain of TCR clone 91588 (TRBV28, TRBJ2-4)
CAAGSGTLLMGIQYF

SEQ ID NO: 183177 - protein, 12 aa, Homo sapiens
  CDR3 for alpha chain variable domain of TCR clone 91589 (TRAV1-2, TRAJ33)
CAALDSNYQLIW

SEQ ID NO: 183178 - protein, 15 aa, Homo sapiens
  CDR3 for beta chain variable domain of TCR clone 91589 (TRBV7-9, TRBJ1-6)
CASSSPGRGNSPLHF

SEQ ID NO: 183179 - protein, 16 aa, Homo sapiens
  CDR3 for alpha chain variable domain of TCR clone 91590 (TRAV21, TRAJ37)
CAVRTAGSSNTGKLIF

SEQ ID NO: 183180 - protein, 14 aa, Homo sapiens
  CDR3 for beta chain variable domain of TCR clone 91590 (TRBV7-6, TRBJ2-3)
CASSLGTVTDTQYF

SEQ ID NO: 183181 - protein, 11 aa, Homo sapiens
  CDR3 for alpha chain variable domain of TCR clone 91591 (TRAV13-1, TRAJ15)
CAATPGTAMIF

SEQ ID NO: 183182 - protein, 17 aa, Homo sapiens
  CDR3 for beta chain variable domain of TCR clone 91591 (TRBV13, TRBJ2-3)
CASSLSRVAGGRNTQYF

SEQ ID NO: 183183 - protein, 12 aa, Homo sapiens
  CDR3 for alpha chain variable domain of TCR clone 91592 (TRAV17, TRAJ20)
CATQSNDYKLSF

SEQ ID NO: 183184 - protein, 14 aa, Homo sapiens
  CDR3 for beta chain variable domain of TCR clone 91592 (TRBV7-9, TRBJ2-2)
CASSLVQDTGELFF

SEQ ID NO: 183185 - protein, 14 aa, Homo sapiens
  CDR3 for alpha chain variable domain of TCR clone 91593 (TRAV1-2, TRAJ8)
CAVREDIGFQKLVF

SEQ ID NO: 183186 - protein, 15 aa, Homo sapiens
  CDR3 for beta chain variable domain of TCR clone 91593 (TRBV27, TRBJ2-1)
CASSNGGGSSNEQFF

SEQ ID NO: 183187 - protein, 11 aa, Homo sapiens
  CDR3 for alpha chain variable domain of TCR clone 91594 (TRAV2, TRAJ33)
CAVESNYQLIR

SEQ ID NO: 183188 - protein, 15 aa, Homo sapiens
  CDR3 for beta chain variable domain of TCR clone 91594 (TRBV19, TRBJ1-1)
CASTSGQIKNTEAFF

SEQ ID NO: 183189 - protein, 14 aa, Homo sapiens
  CDR3 for alpha chain variable domain of TCR clone 91595 (TRAV3, TRAJ40)
CAVRDRRGTYKYIF

SEQ ID NO: 183190 - protein, 15 aa, Homo sapiens
  CDR3 for beta chain variable domain of TCR clone 91595 (TRBV19, TRBJ2-1)
CASSIGLAGWDEQFF

SEQ ID NO: 183191 - protein, 12 aa, Homo sapiens
  CDR3 for alpha chain variable domain of TCR clone 91596 (TRAV9-2, TRAJ36)
WALKKGANNLFF

SEQ ID NO: 183192 - protein, 17 aa, Homo sapiens
  CDR3 for beta chain variable domain of TCR clone 91596 (TRBV20-1, TRBJ1-5)
CSAREIPQGVGNQPQHF

SEQ ID NO: 183193 - protein, 12 aa, Homo sapiens
  CDR3 for alpha chain variable domain of TCR clone 91597 (TRAV1-2, TRAJ24)
CAVGGSWGKFQF

SEQ ID NO: 183194 - protein, 14 aa, Homo sapiens
  CDR3 for beta chain variable domain of TCR clone 91597 (TRBV11-2, TRBJ2-7)
CASSLGAGAYEQYF

SEQ ID NO: 183195 - protein, 14 aa, Homo sapiens
  CDR3 for alpha chain variable domain of TCR clone 91598 (TRAV12-2, TRAJ13)
CAVKKTGGYQKVTF

SEQ ID NO: 183196 - protein, 15 aa, Homo sapiens
  CDR3 for beta chain variable domain of TCR clone 91598 (TRBV11-2, TRBJ1-4)
CASSFRGLYNEKLFF

SEQ ID NO: 183197 - protein, 15 aa, Homo sapiens
  CDR3 for alpha chain variable domain of TCR clone 91599 (TRAV12-1, TRAJ44)
CVVNINTGTASKLTF

SEQ ID NO: 183198 - protein, 16 aa, Homo sapiens
  CDR3 for beta chain variable domain of TCR clone 91599 (TRBV12-5, TRBJ2-5)
CASGPRTSGNRETQYF

SEQ ID NO: 183199 - protein, 14 aa, Homo sapiens
  CDR3 for alpha chain variable domain of TCR clone 91600 (TRAV13-1, TRAJ35)
CAASKGGFGSVLHF

SEQ ID NO: 183200 - protein, 13 aa, Homo sapiens
  CDR3 for beta chain variable domain of TCR clone 91600 (TRBV7-3, TRBJ1-1)
CASSQDWGAEAFF

SEQ ID NO: 183201 - protein, 14 aa, Homo sapiens
  CDR3 for alpha chain variable domain of TCR clone 91601 (TRAV2, TRAJ37)
CAVDFTSNTGKLVF

SEQ ID NO: 183202 - protein, 15 aa, Homo sapiens
  CDR3 for beta chain variable domain of TCR clone 91601 (TRBV2, TRBJ2-1)
CASSELAGSYNEQFF

SEQ ID NO: 183203 - protein, 14 aa, Homo sapiens
  CDR3 for alpha chain variable domain of TCR clone 91602 (TRAV8-3, TRAJ30)
CAVGDMNRDDKIIF

SEQ ID NO: 183204 - protein, 17 aa, Homo sapiens
  CDR3 for beta chain variable domain of TCR clone 91602 (TRBV19, TRBJ2-2)
CASSRNPGGFGTGELSF

SEQ ID NO: 183205 - protein, 15 aa, Homo sapiens
  CDR3 for alpha chain variable domain of TCR clone 91603 (TRAV25, TRAJ52)
CAGTSGGTSYGKLTF

SEQ ID NO: 183206 - protein, 16 aa, Homo sapiens
  CDR3 for beta chain variable domain of TCR clone 91603 (TRBV15, TRBJ1-2)
CATSRGPRTGGGGYTC

SEQ ID NO: 183207 - protein, 15 aa, Homo sapiens
  CDR3 for alpha chain variable domain of TCR clone 91604 (TRAV8-3, TRAJ45)
CASSYSGRGADGLTF

SEQ ID NO: 183208 - protein, 15 aa, Homo sapiens
  CDR3 for beta chain variable domain of TCR clone 91604 (TRBV7-2, TRBJ2-2)
CASSSLTGGTGELFF

SEQ ID NO: 183209 - protein, 15 aa, Homo sapiens
  CDR3 for alpha chain variable domain of TCR clone 91605 (TRAV3, TRAJ24)
CAVRDKMTAGGNCSL

SEQ ID NO: 183210 - protein, 14 aa, Homo sapiens
  CDR3 for beta chain variable domain of TCR clone 91605 (TRBV7-2, TRBJ2-3)
CASSQTGSYYTQYF

SEQ ID NO: 183211 - protein, 14 aa, Homo sapiens
  CDR3 for alpha chain variable domain of TCR clone 91606 (TRAV20, TRAJ29)
CAVQAWVGNTPLAF

SEQ ID NO: 183212 - protein, 15 aa, Homo sapiens
  CDR3 for beta chain variable domain of TCR clone 91606 (TRBV29-1, TRBJ2-7)
CSVEFFDRGSYEQYF

SEQ ID NO: 183213 - protein, 12 aa, Homo sapiens
  CDR3 for alpha chain variable domain of TCR clone 91607 (TRAV23/DV6, TRAJ30)
CAASKVDDKIIF

SEQ ID NO: 183214 - protein, 15 aa, Homo sapiens
  CDR3 for beta chain variable domain of TCR clone 91607 (TRBV20-1, TRBJ2-7)
CSARDRVSGMDEQYF

SEQ ID NO: 183215 - protein, 12 aa, Homo sapiens
  CDR3 for alpha chain variable domain of TCR clone 91608 (TRAV12-3, TRAJ17)
CAMTLTGNKLTF

SEQ ID NO: 183216 - protein, 14 aa, Homo sapiens
  CDR3 for beta chain variable domain of TCR clone 91608 (TRBV5-1, TRBJ2-5)
CASSLAGKQETQYF

SEQ ID NO: 183217 - protein, 13 aa, Homo sapiens
  CDR3 for alpha chain variable domain of TCR clone 91609 (TRAV12-1, TRAJ26)
SATYLYYGQSFVF

SEQ ID NO: 183218 - protein, 15 aa, Homo sapiens
  CDR3 for beta chain variable domain of TCR clone 91609 (TRBV5-1, TRBJ2-6)
CASSLDPSGANVLTF

SEQ ID NO: 183219 - protein, 15 aa, Homo sapiens
  CDR3 for alpha chain variable domain of TCR clone 91610 (TRAV12-3, TRAJ11)
CAMSEENSGYSTLTF

SEQ ID NO: 183220 - protein, 14 aa, Homo sapiens
  CDR3 for beta chain variable domain of TCR clone 91610 (TRBV11-1, TRBJ2-7)
CASSFRQGSYEQYF

SEQ ID NO: 183221 - protein, 13 aa, Homo sapiens
  CDR3 for alpha chain variable domain of TCR clone 91611 (TRAV3, TRAJ27)
CAVRPLGAGKSTF

SEQ ID NO: 183222 - protein, 13 aa, Homo sapiens
  CDR3 for beta chain variable domain of TCR clone 91611 (TRBV20-1, TRBJ1-1)
CSARGGGNTEAFF

SEQ ID NO: 183223 - protein, 13 aa, Homo sapiens
  CDR3 for alpha chain variable domain of TCR clone 91612 (TRAV12-1, TRAJ7)
CVVNMRGNNRLAF

SEQ ID NO: 183224 - protein, 14 aa, Homo sapiens
  CDR3 for beta chain variable domain of TCR clone 91612 (TRBV7-2, TRBJ2-7)
CASSPKTSFYEQYF

SEQ ID NO: 183225 - protein, 12 aa, Homo sapiens
  CDR3 for alpha chain variable domain of TCR clone 91613 (TRAV13-2, TRAJ23)
CAERHRGGKLIF

SEQ ID NO: 183226 - protein, 16 aa, Homo sapiens
  CDR3 for beta chain variable domain of TCR clone 91613 (TRBV10-3, TRBJ2-7)
CAISADFADRPYEQYF

SEQ ID NO: 183227 - protein, 10 aa, Homo sapiens
  CDR3 for alpha chain variable domain of TCR clone 91614 (TRAV13-2, TRAJ49)
CADTGSQFYF

SEQ ID NO: 183228 - protein, 13 aa, Homo sapiens
  CDR3 for beta chain variable domain of TCR clone 91614 (TRBV10-3, TRBJ1-2)
CAISERDSYGYTF

SEQ ID NO: 183229 - protein, 12 aa, Homo sapiens
  CDR3 for alpha chain variable domain of TCR clone 91615 (TRAV13-1, TRAJ21)
CAAKEGFNKFYF

SEQ ID NO: 183230 - protein, 17 aa, Homo sapiens
  CDR3 for beta chain variable domain of TCR clone 91615 (TRBV7-3, TRBJ2-3)
CASSLMKRMRGADTQYF

SEQ ID NO: 183231 - protein, 16 aa, Homo sapiens
  CDR3 for alpha chain variable domain of TCR clone 91616 (TRAV3, TRAJ10)
CAVRDMRAGGGNKPTF

SEQ ID NO: 183232 - protein, 17 aa, Homo sapiens
  CDR3 for beta chain variable domain of TCR clone 91616 (TRBV20-1, TRBJ2-2)
CSASGSGQGGLTGELFF

SEQ ID NO: 183233 - protein, 14 aa, Homo sapiens
  CDR3 for alpha chain variable domain of TCR clone 91617 (TRAV12-1, TRAJ30)
CVPTGTNRDDKIIL

SEQ ID NO: 183234 - protein, 11 aa, Homo sapiens
  CDR3 for beta chain variable domain of TCR clone 91617 (TRBV4-1, TRBJ2-2)
CASEHTGELFF

SEQ ID NO: 183235 - protein, 13 aa, Homo sapiens
  CDR3 for alpha chain variable domain of TCR clone 91618 (TRAV8-4, TRAJ30)
CATYKNRDDKIIF

SEQ ID NO: 183236 - protein, 12 aa, Homo sapiens
  CDR3 for beta chain variable domain of TCR clone 91618 (TRBV19, TRBJ1-2)
CASSPDVYGYTF

SEQ ID NO: 183237 - protein, 14 aa, Homo sapiens
  CDR3 for alpha chain variable domain of TCR clone 91619 (TRAV12-1, TRAJ5)
CVVNERTGRRALTF

SEQ ID NO: 183238 - protein, 15 aa, Homo sapiens
  CDR3 for beta chain variable domain of TCR clone 91619 (TRBV18, TRBJ2-7)
CASSPASTPNYEQYF

SEQ ID NO: 183239 - protein, 16 aa, Homo sapiens
  CDR3 for alpha chain variable domain of TCR clone 91620 (TRAV30, TRAJ24)
CGTEIVDADSWGKFQF

SEQ ID NO: 183240 - protein, 14 aa, Homo sapiens
  CDR3 for beta chain variable domain of TCR clone 91620 (TRBV7-2, TRBJ2-1)
CASSPGLAGNEQFF

SEQ ID NO: 183241 - protein, 16 aa, Homo sapiens
  CDR3 for alpha chain variable domain of TCR clone 91621 (TRAV26-1, TRAJ53)
CIVRVAMGGSNYKLTF

SEQ ID NO: 183242 - protein, 12 aa, Homo sapiens
  CDR3 for beta chain variable domain of TCR clone 91621 (TRBV7-9, TRBJ1-5)
CASSPKGQPQHF

SEQ ID NO: 183243 - protein, 11 aa, Homo sapiens
  CDR3 for alpha chain variable domain of TCR clone 91622 (TRAV3, TRAJ21)
CAVGNFNKFYL

SEQ ID NO: 183244 - protein, 12 aa, Homo sapiens
  CDR3 for beta chain variable domain of TCR clone 91622 (TRBV29-1, TRBJ2-3)
CSVTGGADTQYF

SEQ ID NO: 183245 - protein, 13 aa, Homo sapiens
  CDR3 for alpha chain variable domain of TCR clone 91623 (TRAV13-1, TRAJ39)
CSKYSNAGNMLTF

SEQ ID NO: 183246 - protein, 14 aa, Homo sapiens
  CDR3 for beta chain variable domain of TCR clone 91623 (TRBV7-2, TRBJ2-5)
CASSPRGSSETQYF

SEQ ID NO: 183247 - protein, 13 aa, Homo sapiens
  CDR3 for alpha chain variable domain of TCR clone 91624 (TRAV21, TRAJ3)
CCEPYSSASKIIF

SEQ ID NO: 183248 - protein, 13 aa, Homo sapiens
  CDR3 for beta chain variable domain of TCR clone 91624 (TRBV19, TRBJ1-2)
CASSVPGQDGYTF

SEQ ID NO: 183249 - protein, 13 aa, Homo sapiens
  CDR3 for alpha chain variable domain of TCR clone 91625 (TRAV12-1, TRAJ26)
CVVRRNYGQNFVF

SEQ ID NO: 183250 - protein, 15 aa, Homo sapiens
  CDR3 for beta chain variable domain of TCR clone 91625 (TRBV19, TRBJ1-6)
CASSTQGAVGSPLHF

SEQ ID NO: 183251 - protein, 12 aa, Homo sapiens
  CDR3 for alpha chain variable domain of TCR clone 91626 (TRAV35, TRAJ49)
CAGWNTGNQFYF

SEQ ID NO: 183252 - protein, 17 aa, Homo sapiens
  CDR3 for beta chain variable domain of TCR clone 91626 (TRBV4-2, TRBJ1-1)
CASTQFGGGSGNTEAFF

SEQ ID NO: 183253 - protein, 15 aa, Homo sapiens
  CDR3 for alpha chain variable domain of TCR clone 91627 (TRAV35, TRAJ58)
CAGRRQETSGSRLTF

SEQ ID NO: 183254 - protein, 16 aa, Homo sapiens
  CDR3 for beta chain variable domain of TCR clone 91627 (TRBV20-1, TRBJ2-1)
CSASASGYSSYNEQFF

SEQ ID NO: 183255 - protein, 11 aa, Homo sapiens
  CDR3 for alpha chain variable domain of TCR clone 91628 (TRAV3, TRAJ21)
CAVGNFNKFYF

SEQ ID NO: 183256 - protein, 15 aa, Homo sapiens
  CDR3 for beta chain variable domain of TCR clone 91628 (TRBV19, TRBJ1-2)
CASSVGQVLNYGYAF

SEQ ID NO: 183257 - protein, 15 aa, Homo sapiens
  CDR3 for alpha chain variable domain of TCR clone 91629 (TRAV3, TRAJ17)
CAVSPKEAAGNKLTF

SEQ ID NO: 183258 - protein, 12 aa, Homo sapiens
  CDR3 for beta chain variable domain of TCR clone 91629 (TRBV7-9, TRBJ1-6)
CASSLMTSPHHF

SEQ ID NO: 183259 - protein, 14 aa, Homo sapiens
  CDR3 for alpha chain variable domain of TCR clone 91630 (TRAV13-1, TRAJ35)
CAASKGGFGNVLHC

SEQ ID NO: 183260 - protein, 16 aa, Homo sapiens
  CDR3 for beta chain variable domain of TCR clone 91630 (TRBV4-2, TRBJ1-5)
CASSQGQGASNQPQHF

SEQ ID NO: 183261 - protein, 14 aa, Homo sapiens
  CDR3 for alpha chain variable domain of TCR clone 91631 (TRAV20, TRAJ22)
CAVASGGSARQLTF

SEQ ID NO: 183262 - protein, 15 aa, Homo sapiens
  CDR3 for beta chain variable domain of TCR clone 91631 (TRBV7-2, TRBJ1-1)
CASSFAGDRDTEAFF

SEQ ID NO: 183263 - protein, 12 aa, Homo sapiens
  CDR3 for alpha chain variable domain of TCR clone 91632 (TRAV12-1, TRAJ40)
CVVYSGTYKYIF

SEQ ID NO: 183264 - protein, 13 aa, Homo sapiens
  CDR3 for beta chain variable domain of TCR clone 91632 (TRBV4-1, TRBJ2-2)
CASSQENTGELFF

SEQ ID NO: 183265 - protein, 11 aa, Homo sapiens
  CDR3 for alpha chain variable domain of TCR clone 91633 (TRAV12-1, TRAJ43)
CVEYDDNDMRF

SEQ ID NO: 183266 - protein, 13 aa, Homo sapiens
  CDR3 for beta chain variable domain of TCR clone 91633 (TRBV4-2, TRBJ1-1)
CASSQAGNTEAFF

SEQ ID NO: 183267 - protein, 18 aa, Homo sapiens
  CDR3 for alpha chain variable domain of TCR clone 91634 (TRAV8-6, TRAJ52)
CAASRVGAGGTSYGKLTF

SEQ ID NO: 183268 - protein, 14 aa, Homo sapiens
  CDR3 for beta chain variable domain of TCR clone 91634 (TRBV7-2, TRBJ1-4)
CASSHSKTNEKLFF

SEQ ID NO: 183269 - protein, 13 aa, Homo sapiens
  CDR3 for alpha chain variable domain of TCR clone 91635 (TRAV13-1, TRAJ21)
CAASIYNFNKFYF

SEQ ID NO: 183270 - protein, 15 aa, Homo sapiens
  CDR3 for beta chain variable domain of TCR clone 91635 (TRBV28, TRBJ2-1)
CASSIIAGGRSEQFF

SEQ ID NO: 183271 - protein, 12 aa, Homo sapiens
  CDR3 for alpha chain variable domain of TCR clone 91636 (TRAV13-1, TRAJ21)
CAAKEGFNKFYF

SEQ ID NO: 183272 - protein, 12 aa, Homo sapiens
  CDR3 for beta chain variable domain of TCR clone 91636 (TRBV14, TRBJ2-4)
CASSNLKSIQYF

SEQ ID NO: 183273 - protein, 13 aa, Homo sapiens
  CDR3 for alpha chain variable domain of TCR clone 91637 (TRAV14/DV4, TRAJ23)
CAMREVKGGKLIF

SEQ ID NO: 183274 - protein, 15 aa, Homo sapiens
  CDR3 for beta chain variable domain of TCR clone 91637 (TRBV7-2, TRBJ2-1)
CASSSGLAGGNEQFF

SEQ ID NO: 183275 - protein, 18 aa, Homo sapiens
  CDR3 for alpha chain variable domain of TCR clone 91638 (TRAV21, TRAJ52)
CAVRPSPAGGTSYGKLTF

SEQ ID NO: 183276 - protein, 17 aa, Homo sapiens
  CDR3 for beta chain variable domain of TCR clone 91638 (TRBV13, TRBJ2-3)
CASSLSRVAGGRNKRYF

SEQ ID NO: 183277 - protein, 14 aa, Homo sapiens
  CDR3 for alpha chain variable domain of TCR clone 91639 (TRAV12-3, TRAJ12)
CAMSRMDSSYELIF

SEQ ID NO: 183278 - protein, 14 aa, Homo sapiens
  CDR3 for beta chain variable domain of TCR clone 91639 (TRBV19, TRBJ2-1)
CASPTFVLSGEQFF

SEQ ID NO: 183279 - protein, 12 aa, Homo sapiens
  CDR3 for alpha chain variable domain of TCR clone 91640 (TRAV13-1, TRAJ49)
CAASPMGNQFYF

SEQ ID NO: 183280 - protein, 14 aa, Homo sapiens
  CDR3 for beta chain variable domain of TCR clone 91640 (TRBV7-2, TRBJ2-7)
CASSPKTSFYEQYF

SEQ ID NO: 183281 - protein, 15 aa, Homo sapiens
  CDR3 for alpha chain variable domain of TCR clone 91641 (TRAV21, TRAJ24)
CAARSSTGSWGKLQF

SEQ ID NO: 183282 - protein, 13 aa, Homo sapiens
  CDR3 for beta chain variable domain of TCR clone 91641 (TRBV10-3, TRBJ2-7)
CASKLAVNYEQYL

SEQ ID NO: 183283 - protein, 14 aa, Homo sapiens
  CDR3 for alpha chain variable domain of TCR clone 91642 (TRAV21, TRAJ17)
CAVRSKAAGNKLTF

SEQ ID NO: 183284 - protein, 14 aa, Homo sapiens
  CDR3 for beta chain variable domain of TCR clone 91642 (TRBV6-1, TRBJ1-3)
CASVQGGGGNTIYF

SEQ ID NO: 183285 - protein, 17 aa, Homo sapiens
  CDR3 for alpha chain variable domain of TCR clone 91643 (TRAV26-1, TRAJ53)
CIVRVDDSGGSNYKLTF

SEQ ID NO: 183286 - protein, 14 aa, Homo sapiens
  CDR3 for beta chain variable domain of TCR clone 91643 (TRBV7-2, TRBJ2-7)
CASSPKTSFYEQYF

SEQ ID NO: 183287 - protein, 14 aa, Homo sapiens
  CDR3 for alpha chain variable domain of TCR clone 91644 (TRAV12-2, TRAJ13)
CAVKKTGGYQKVTF

SEQ ID NO: 183288 - protein, 15 aa, Homo sapiens
  CDR3 for beta chain variable domain of TCR clone 91644 (TRBV20-1, TRBJ2-7)
CSARDRVAGMDEQYF

SEQ ID NO: 183289 - protein, 14 aa, Homo sapiens
  CDR3 for alpha chain variable domain of TCR clone 91645 (TRAV16, TRAJ33)
CALSAMDSNYQLIW

SEQ ID NO: 183290 - protein, 16 aa, Homo sapiens
  CDR3 for beta chain variable domain of TCR clone 91645 (TRBV25-1, TRBJ2-5)
CASSEMGSRAPETQYF

SEQ ID NO: 183291 - protein, 14 aa, Homo sapiens
  CDR3 for alpha chain variable domain of TCR clone 91646 (TRAV17, TRAJ31)
CATVLRNNNARLMF

SEQ ID NO: 183292 - protein, 14 aa, Homo sapiens
  CDR3 for beta chain variable domain of TCR clone 91646 (TRBV12-4, TRBJ2-5)
CASSLWRKQETQYF

SEQ ID NO: 183293 - protein, 15 aa, Homo sapiens
  CDR3 for alpha chain variable domain of TCR clone 91647 (TRAV17, TRAJ56)
CATDANTGANSKLTF

SEQ ID NO: 183294 - protein, 13 aa, Homo sapiens
  CDR3 for beta chain variable domain of TCR clone 91647 (TRBV7-9, TRBJ1-2)
CASSLKQNYGYTF

SEQ ID NO: 183295 - protein, 13 aa, Homo sapiens
  CDR3 for alpha chain variable domain of TCR clone 91648 (TRAV8-2, TRAJ6)
CVVSDGGSYIPTF

SEQ ID NO: 183296 - protein, 13 aa, Homo sapiens
  CDR3 for beta chain variable domain of TCR clone 91648 (TRBV28, TRBJ2-7)
CAGAQQGLDEQYF

SEQ ID NO: 183297 - protein, 14 aa, Homo sapiens
  CDR3 for alpha chain variable domain of TCR clone 91649 (TRAV26-1, TRAJ45)
CIEVTGGVADGLTF

SEQ ID NO: 183298 - protein, 13 aa, Homo sapiens
  CDR3 for beta chain variable domain of TCR clone 91649 (TRBV7-6, TRBJ1-2)
CASSLVADYGYTF

SEQ ID NO: 183299 - protein, 14 aa, Homo sapiens
  CDR3 for alpha chain variable domain of TCR clone 91650 (TRAV12-2, TRAJ40)
CAVKITSGTYKYIF

SEQ ID NO: 183300 - protein, 14 aa, Homo sapiens
  CDR3 for beta chain variable domain of TCR clone 91650 (TRBV18, TRBJ2-5)
CASSPLRVQETQYF

SEQ ID NO: 183301 - protein, 13 aa, Homo sapiens
  CDR3 for alpha chain variable domain of TCR clone 91651 (TRAV12-3, TRAJ7)
CAMSASGNNRPAF

SEQ ID NO: 183302 - protein, 14 aa, Homo sapiens
  CDR3 for beta chain variable domain of TCR clone 91651 (TRBV13, TRBJ2-5)
CASSLGPRGETQYL

SEQ ID NO: 183303 - protein, 12 aa, Homo sapiens
  CDR3 for alpha chain variable domain of TCR clone 91652 (TRAV21, TRAJ33)
CAKMDSNYQLIW

SEQ ID NO: 183304 - protein, 14 aa, Homo sapiens
  CDR3 for beta chain variable domain of TCR clone 91652 (TRBV2, TRBJ2-7)
CASSLTSGGYEQNF

SEQ ID NO: 183305 - protein, 18 aa, Homo sapiens
  CDR3 for alpha chain variable domain of TCR clone 91653 (TRAV13-1, TRAJ52)
CAASKRSAGGTSYGKLTF

SEQ ID NO: 183306 - protein, 13 aa, Homo sapiens
  CDR3 for beta chain variable domain of TCR clone 91653 (TRBV27, TRBJ2-1)
CASSSGSYNEQFF

SEQ ID NO: 183307 - protein, 16 aa, Homo sapiens
  CDR3 for alpha chain variable domain of TCR clone 91654 (TRAV12-3, TRAJ53)
CAMSPGSGGSNYKLKF

SEQ ID NO: 183308 - protein, 12 aa, Homo sapiens
  CDR3 for beta chain variable domain of TCR clone 91654 (TRBV7-8, TRBJ2-7)
CASSLGDREQYF

SEQ ID NO: 183309 - protein, 15 aa, Homo sapiens
  CDR3 for alpha chain variable domain of TCR clone 91655 (TRAV26-2, TRAJ57)
CILRDIRGGSAKLVF

SEQ ID NO: 183310 - protein, 15 aa, Homo sapiens
  CDR3 for beta chain variable domain of TCR clone 91655 (TRBV2, TRBJ2-1)
CASDIGLAGEGEQFF

SEQ ID NO: 183311 - protein, 12 aa, Homo sapiens
  CDR3 for alpha chain variable domain of TCR clone 91656 (TRAV26-1, TRAJ39)
CIVRVEGNMLTF

SEQ ID NO: 183312 - protein, 11 aa, Homo sapiens
  CDR3 for beta chain variable domain of TCR clone 91656 (TRBV27, TRBJ2-3)
CASSLGDTQYF

SEQ ID NO: 183313 - protein, 14 aa, Homo sapiens
  CDR3 for alpha chain variable domain of TCR clone 91657 (TRAV12-2, TRAJ40)
CAVKIPSGTYKDIF

SEQ ID NO: 183314 - protein, 14 aa, Homo sapiens
  CDR3 for beta chain variable domain of TCR clone 91657 (TRBV20-1, TRBJ1-1)
CSAQTRIGGTEAFF

SEQ ID NO: 183315 - protein, 16 aa, Homo sapiens
  CDR3 for alpha chain variable domain of TCR clone 91658 (TRAV30, TRAJ24)
CGTEIVDADSWGNSSL

SEQ ID NO: 183316 - protein, 16 aa, Homo sapiens
  CDR3 for beta chain variable domain of TCR clone 91658 (TRBV2, TRBJ1-3)
CASSGGAGRSGNTIYF

SEQ ID NO: 183317 - protein, 13 aa, Homo sapiens
  CDR3 for alpha chain variable domain of TCR clone 91659 (TRAV13-2, TRAJ48)
CAEMDFGNEKLTF

SEQ ID NO: 183318 - protein, 19 aa, Homo sapiens
  CDR3 for beta chain variable domain of TCR clone 91659 (TRBV25-1, TRBJ2-2)
CAILVYRVDRGRKTGELFF

SEQ ID NO: 183319 - protein, 15 aa, Homo sapiens
  CDR3 for alpha chain variable domain of TCR clone 91660 (TRAV21, TRAJ24)
CAARSSTDSWGKLQF

SEQ ID NO: 183320 - protein, 18 aa, Homo sapiens
  CDR3 for beta chain variable domain of TCR clone 91660 (TRBV11-2, TRBJ2-3)
CASSLGGASRGAPNTQYF

SEQ ID NO: 183321 - protein, 14 aa, Homo sapiens
  CDR3 for alpha chain variable domain of TCR clone 91661 (TRAV13-1, TRAJ20)
CAARPGPNDYKLSF

SEQ ID NO: 183322 - protein, 13 aa, Homo sapiens
  CDR3 for beta chain variable domain of TCR clone 91661 (TRBV20-1, TRBJ1-1)
CSAPPGGHTEAFF

SEQ ID NO: 183323 - protein, 13 aa, Homo sapiens
  CDR3 for alpha chain variable domain of TCR clone 91662 (TRAV12-3, TRAJ39)
CAVIDNAGNMLTF

SEQ ID NO: 183324 - protein, 18 aa, Homo sapiens
  CDR3 for beta chain variable domain of TCR clone 91662 (TRBV9, TRBJ2-5)
CASSVAEGTNAFGETQYF

SEQ ID NO: 183325 - protein, 11 aa, Homo sapiens
  CDR3 for alpha chain variable domain of TCR clone 91663 (TRAV2, TRAJ13)
CASGGYQRVTF

SEQ ID NO: 183326 - protein, 15 aa, Homo sapiens
  CDR3 for beta chain variable domain of TCR clone 91663 (TRBV11-1, TRBJ2-7)
CASSLNYGASYEQYF

SEQ ID NO: 183327 - protein, 15 aa, Homo sapiens
  CDR3 for alpha chain variable domain of TCR clone 91664 (TRAV34, TRAJ37)
CGAAYGSSNTGKLIF

SEQ ID NO: 183328 - protein, 16 aa, Homo sapiens
  CDR3 for beta chain variable domain of TCR clone 91664 (TRBV12-5, TRBJ2-5)
CASGPRTSGNQETQYF

SEQ ID NO: 183329 - protein, 11 aa, Homo sapiens
  CDR3 for alpha chain variable domain of TCR clone 91665 (TRAV2, TRAJ13)
CASGGYQKATF

SEQ ID NO: 183330 - protein, 14 aa, Homo sapiens
  CDR3 for beta chain variable domain of TCR clone 91665 (TRBV7-3, TRBJ2-1)
CASSLAGGTNEQFF

SEQ ID NO: 183331 - protein, 13 aa, Homo sapiens
  CDR3 for alpha chain variable domain of TCR clone 91666 (TRAV8-6, TRAJ49)
CAVITNTGTQFYF

SEQ ID NO: 183332 - protein, 14 aa, Homo sapiens
  CDR3 for beta chain variable domain of TCR clone 91666 (TRBV5-1, TRBJ2-7)
CASSRGESLYEQYF

SEQ ID NO: 183333 - protein, 12 aa, Homo sapiens
  CDR3 for alpha chain variable domain of TCR clone 91667 (TRAV21, TRAJ33)
CAKMDSNYLLIW

SEQ ID NO: 183334 - protein, 14 aa, Homo sapiens
  CDR3 for beta chain variable domain of TCR clone 91667 (TRBV2, TRBJ2-7)
CASSLTSGGYEQYF

SEQ ID NO: 183335 - protein, 11 aa, Homo sapiens
  CDR3 for alpha chain variable domain of TCR clone 91668 (TRAV21, TRAJ9)
CAVPGGFTTIF

SEQ ID NO: 183336 - protein, 12 aa, Homo sapiens
  CDR3 for beta chain variable domain of TCR clone 91668 (TRBV20-1, TRBJ2-3)
CSARVGTDTQYF

SEQ ID NO: 183337 - protein, 14 aa, Homo sapiens
  CDR3 for alpha chain variable domain of TCR clone 91669 (TRAV29/DV5, TRAJ36)
CAARRKTGANNLFF

SEQ ID NO: 183338 - protein, 13 aa, Homo sapiens
  CDR3 for beta chain variable domain of TCR clone 91669 (TRBV2, TRBJ2-7)
CASSVGGSGEQYF

SEQ ID NO: 183339 - protein, 14 aa, Homo sapiens
  CDR3 for alpha chain variable domain of TCR clone 91670 (TRAV12-3, TRAJ10)
SHLPLTGGGNKLTF

SEQ ID NO: 183340 - protein, 16 aa, Homo sapiens
  CDR3 for beta chain variable domain of TCR clone 91670 (TRBV19, TRBJ1-1)
CASKFGGPVTGTEAFF

SEQ ID NO: 183341 - protein, 13 aa, Homo sapiens
  CDR3 for alpha chain variable domain of TCR clone 91671 (TRAV1-2, TRAJ9)
CAALNTGGFKTIF

SEQ ID NO: 183342 - protein, 16 aa, Homo sapiens
  CDR3 for beta chain variable domain of TCR clone 91671 (TRBV5-1, TRBJ2-5)
CASSLSLAGAQETQYF

SEQ ID NO: 183343 - protein, 19 aa, Homo sapiens
  CDR3 for alpha chain variable domain of TCR clone 91672 (TRAV26-1, TRAJ29)
CCVLLHRQSRGSGNTPLVF

SEQ ID NO: 183344 - protein, 15 aa, Homo sapiens
  CDR3 for beta chain variable domain of TCR clone 91672 (TRBV7-9, TRBJ1-5)
CASSQGHQPNQPQHF

SEQ ID NO: 183345 - protein, 14 aa, Homo sapiens
  CDR3 for alpha chain variable domain of TCR clone 91673 (TRAV12-2, TRAJ13)
CAVKKTGGYQKVTF

SEQ ID NO: 183346 - protein, 15 aa, Homo sapiens
  CDR3 for beta chain variable domain of TCR clone 91673 (TRBV7-9, TRBJ2-7)
CASSPGGGLTYEQYF

SEQ ID NO: 183347 - protein, 15 aa, Homo sapiens
  CDR3 for alpha chain variable domain of TCR clone 91674 (TRAV1-2, TRAJ8)
CAVRDRNTGFQKLVF

SEQ ID NO: 183348 - protein, 16 aa, Homo sapiens
  CDR3 for beta chain variable domain of TCR clone 91674 (TRBV11-2, TRBJ2-5)
CASSGQGYSPQETQYF

SEQ ID NO: 183349 - protein, 15 aa, Homo sapiens
  CDR3 for alpha chain variable domain of TCR clone 91675 (TRAV26-1, TRAJ40)
WIVRAVPSGTYKYIF

SEQ ID NO: 183350 - protein, 14 aa, Homo sapiens
  CDR3 for beta chain variable domain of TCR clone 91675 (TRBV19, TRBJ2-1)
CASKDPGLANEQFF

SEQ ID NO: 183351 - protein, 17 aa, Homo sapiens
  CDR3 for alpha chain variable domain of TCR clone 91676 (TRAV36/DV7, TRAJ52)
CAVAQRAGGTSYGQLTF

SEQ ID NO: 183352 - protein, 15 aa, Homo sapiens
  CDR3 for beta chain variable domain of TCR clone 91676 (TRBV6-5, TRBJ1-2)
CASSYSQAFNYGYTF

SEQ ID NO: 183353 - protein, 12 aa, Homo sapiens
  CDR3 for alpha chain variable domain of TCR clone 91677 (TRAV13-2, TRAJ23)
CAERHRGGKLIF

SEQ ID NO: 183354 - protein, 16 aa, Homo sapiens
  CDR3 for beta chain variable domain of TCR clone 91677 (TRBV11-2, TRBJ1-2)
CASSPSGREANYGYTF

SEQ ID NO: 183355 - protein, 15 aa, Homo sapiens
  CDR3 for alpha chain variable domain of TCR clone 91678 (TRAV17, TRAJ57)
CATGPSQGRSEKLVF

SEQ ID NO: 183356 - protein, 11 aa, Homo sapiens
  CDR3 for beta chain variable domain of TCR clone 91678 (TRBV29-1, TRBJ2-5)
CSEDRTGTQYF

SEQ ID NO: 183357 - protein, 11 aa, Homo sapiens
  CDR3 for alpha chain variable domain of TCR clone 91679 (TRAV12-3, TRAJ43)
RAMSVSNDMRF

SEQ ID NO: 183358 - protein, 14 aa, Homo sapiens
  CDR3 for beta chain variable domain of TCR clone 91679 (TRBV12-5, TRBJ2-5)
CASGSRTHQETQYF

SEQ ID NO: 183359 - protein, 13 aa, Homo sapiens
  CDR3 for alpha chain variable domain of TCR clone 91680 (TRAV20, TRAJ49)
CAVQARTGNQFYF

SEQ ID NO: 183360 - protein, 17 aa, Homo sapiens
  CDR3 for beta chain variable domain of TCR clone 91680 (TRBV11-2, TRBJ2-1)
CASSLYPPGVEYNEQFF

SEQ ID NO: 183361 - protein, 17 aa, Homo sapiens
  CDR3 for alpha chain variable domain of TCR clone 91681 (TRAV17, TRAJ29)
CFLLPCYASSGNTPLVF

SEQ ID NO: 183362 - protein, 13 aa, Homo sapiens
  CDR3 for beta chain variable domain of TCR clone 91681 (TRBV14, TRBJ2-7)
CASSQDRRYEQYF

SEQ ID NO: 183363 - protein, 12 aa, Homo sapiens
  CDR3 for alpha chain variable domain of TCR clone 91682 (TRAV8-3, TRAJ20)
CAVGANDYKLSF

SEQ ID NO: 183364 - protein, 17 aa, Homo sapiens
  CDR3 for beta chain variable domain of TCR clone 91682 (TRBV11-2, TRBJ2-6)
CASSQRDIFSGANVLTF

SEQ ID NO: 183365 - protein, 15 aa, Homo sapiens
  CDR3 for alpha chain variable domain of TCR clone 91683 (TRAV8-3, TRAJ45)
YASSYSGGGADGRTF

SEQ ID NO: 183366 - protein, 13 aa, Homo sapiens
  CDR3 for beta chain variable domain of TCR clone 91683 (TRBV10-3, TRBJ2-7)
CASKLAVNYEQYF

SEQ ID NO: 183367 - protein, 17 aa, Homo sapiens
  CDR3 for alpha chain variable domain of TCR clone 91684 (TRAV1-1, TRAJ28)
CAVDPAYSGAGRYQLTF

SEQ ID NO: 183368 - protein, 14 aa, Homo sapiens
  CDR3 for beta chain variable domain of TCR clone 91684 (TRBV19, TRBJ2-1)
CASPTFVLSGEQFF

SEQ ID NO: 183369 - protein, 15 aa, Homo sapiens
  CDR3 for alpha chain variable domain of TCR clone 91685 (TRAV17, TRAJ56)
CATDANTGANSKLPF

SEQ ID NO: 183370 - protein, 12 aa, Homo sapiens
  CDR3 for beta chain variable domain of TCR clone 91685 (TRBV7-8, TRBJ2-7)
CASSLGDREQYF

SEQ ID NO: 183371 - protein, 13 aa, Homo sapiens
  CDR3 for alpha chain variable domain of TCR clone 91686 (TRAV13-1, TRAJ21)
CAASIYNFNKFYF

SEQ ID NO: 183372 - protein, 14 aa, Homo sapiens
  CDR3 for beta chain variable domain of TCR clone 91686 (TRBV18, TRBJ2-5)
CASSPGVSQETQYF

SEQ ID NO: 183373 - protein, 18 aa, Homo sapiens
  CDR3 for alpha chain variable domain of TCR clone 91687 (TRAV12-3, TRAJ52)
CAMSRTNAGGTSYGKLTF

SEQ ID NO: 183374 - protein, 16 aa, Homo sapiens
  CDR3 for beta chain variable domain of TCR clone 91687 (TRBV6-1, TRBJ2-2)
CASSFGQGANTGELFF

SEQ ID NO: 183375 - protein, 14 aa, Homo sapiens
  CDR3 for alpha chain variable domain of TCR clone 91688 (TRAV1-2, TRAJ16)
CAVNRFSDGQKLLF

SEQ ID NO: 183376 - protein, 15 aa, Homo sapiens
  CDR3 for beta chain variable domain of TCR clone 91688 (TRBV14, TRBJ1-1)
CASSQDGMGRREAFF

SEQ ID NO: 183377 - protein, 16 aa, Homo sapiens
  CDR3 for alpha chain variable domain of TCR clone 91689 (TRAV20, TRAJ10)
CAVLRGLTGGGNKLTF

SEQ ID NO: 183378 - protein, 13 aa, Homo sapiens
  CDR3 for beta chain variable domain of TCR clone 91689 (TRBV12-4, TRBJ2-7)
CASSPTETYEQYF

SEQ ID NO: 183379 - protein, 14 aa, Homo sapiens
  CDR3 for alpha chain variable domain of TCR clone 91690 (TRAV3, TRAJ21)
CAVRDKSNFNKFYF

SEQ ID NO: 183380 - protein, 14 aa, Homo sapiens
  CDR3 for beta chain variable domain of TCR clone 91690 (TRBV27, TRBJ2-3)
CASRDSPITDTQYF

SEQ ID NO: 183381 - protein, 14 aa, Homo sapiens
  CDR3 for alpha chain variable domain of TCR clone 91691 (TRAV35, TRAJ33)
CAGSSQDSNYQLIW

SEQ ID NO: 183382 - protein, 15 aa, Homo sapiens
  CDR3 for beta chain variable domain of TCR clone 91691 (TRBV20-1, TRBJ2-7)
CSAESGTSGAYEHYF

SEQ ID NO: 183383 - protein, 12 aa, Homo sapiens
  CDR3 for alpha chain variable domain of TCR clone 91692 (TRAV21, TRAJ23)
YAVMLQGGKLIF

SEQ ID NO: 183384 - protein, 14 aa, Homo sapiens
  CDR3 for beta chain variable domain of TCR clone 91692 (TRBV7-9, TRBJ1-4)
CAITEGEANEKLFF

SEQ ID NO: 183385 - protein, 19 aa, Homo sapiens
  CDR3 for alpha chain variable domain of TCR clone 91693 (TRAV2, TRAJ20)
ILQVREADAAVYRDCKLSF

SEQ ID NO: 183386 - protein, 12 aa, Homo sapiens
  CDR3 for beta chain variable domain of TCR clone 91693 (TRBV11-2, TRBJ2-2)
CASSPGGGELFF

SEQ ID NO: 183387 - protein, 17 aa, Homo sapiens
  CDR3 for alpha chain variable domain of TCR clone 91694 (TRAV8-6, TRAJ8)
CAVKKGIENTGFQKLVF

SEQ ID NO: 183388 - protein, 12 aa, Homo sapiens
  CDR3 for beta chain variable domain of TCR clone 91694 (TRBV19, TRBJ1-4)
CASKDWPGGLFF

SEQ ID NO: 183389 - protein, 15 aa, Homo sapiens
  CDR3 for alpha chain variable domain of TCR clone 91695 (TRAV8-4, TRAJ3)
CAVTGENLVQQCFQN

SEQ ID NO: 183390 - protein, 16 aa, Homo sapiens
  CDR3 for beta chain variable domain of TCR clone 91695 (TRBV4-2, TRBJ1-1)
CASSQAGFGMNTEAFF

SEQ ID NO: 183391 - protein, 17 aa, Homo sapiens
  CDR3 for alpha chain variable domain of TCR clone 91696 (TRAV3, TRAJ12)
CAVRDGGRMDSSYKLIF

SEQ ID NO: 183392 - protein, 13 aa, Homo sapiens
  CDR3 for beta chain variable domain of TCR clone 91696 (TRBV2, TRBJ2-5)
CASGTPYQETQYF

SEQ ID NO: 183393 - protein, 11 aa, Homo sapiens
  CDR3 for alpha chain variable domain of TCR clone 91697 (TRAV1-1, TRAJ23)
CAVRQGGRLIF

SEQ ID NO: 183394 - protein, 14 aa, Homo sapiens
  CDR3 for beta chain variable domain of TCR clone 91697 (TRBV19, TRBJ2-1)
CASPTFVLSGEQFF

SEQ ID NO: 183395 - protein, 17 aa, Homo sapiens
  CDR3 for alpha chain variable domain of TCR clone 91698 (TRAV12-2, TRAJ52)
CAMNPYAGGTSYGKLTF

SEQ ID NO: 183396 - protein, 16 aa, Homo sapiens
  CDR3 for beta chain variable domain of TCR clone 91698 (TRBV5-5, TRBJ2-2)
CASSGRREGATGELFF

SEQ ID NO: 183397 - protein, 11 aa, Homo sapiens
  CDR3 for alpha chain variable domain of TCR clone 91699 (TRAV2, TRAJ33)
CAVDSNYQLIW

SEQ ID NO: 183398 - protein, 15 aa, Homo sapiens
  CDR3 for beta chain variable domain of TCR clone 91699 (TRBV7-9, TRBJ1-4)
CASSARTGGNEKLFF

SEQ ID NO: 183399 - protein, 13 aa, Homo sapiens
  CDR3 for alpha chain variable domain of TCR clone 91700 (TRAV8-3, TRAJ4)
WVFYSGGDNKLIF

SEQ ID NO: 183400 - protein, 16 aa, Homo sapiens
  CDR3 for beta chain variable domain of TCR clone 91700 (TRBV7-8, TRBJ2-3)
CASSTEGQRETDTQYF

SEQ ID NO: 183401 - protein, 12 aa, Homo sapiens
  CDR3 for alpha chain variable domain of TCR clone 91701 (TRAV13-2, TRAJ23)
CAERHRGGKLIF

SEQ ID NO: 183402 - protein, 16 aa, Homo sapiens
  CDR3 for beta chain variable domain of TCR clone 91701 (TRBV20-1, TRBJ1-4)
CSAPGQGLLTNEKLYF

SEQ ID NO: 183403 - protein, 13 aa, Homo sapiens
  CDR3 for alpha chain variable domain of TCR clone 91702 (TRAV12-2, TRAJ10)
CAVPTGGGHKLTF

SEQ ID NO: 183404 - protein, 14 aa, Homo sapiens
  CDR3 for beta chain variable domain of TCR clone 91702 (TRBV25-1, TRBJ1-1)
CASTHLGGNTEAFF

SEQ ID NO: 183405 - protein, 14 aa, Homo sapiens
  CDR3 for alpha chain variable domain of TCR clone 91703 (TRAV38-1, TRAJ45)
CAYYSGGGADGLTF

SEQ ID NO: 183406 - protein, 20 aa, Homo sapiens
  CDR3 for beta chain variable domain of TCR clone 91703 (TRBV28, TRBJ2-1)
CASTLIGRSPGLAGGNEQFF

SEQ ID NO: 183407 - protein, 15 aa, Homo sapiens
  CDR3 for alpha chain variable domain of TCR clone 91704 (TRAV3, TRAJ29)
CAVRDLYSGNTPLVF

SEQ ID NO: 183408 - protein, 14 aa, Homo sapiens
  CDR3 for beta chain variable domain of TCR clone 91704 (TRBV12-5, TRBJ2-5)
CASGSRTHQETQYF

SEQ ID NO: 183409 - protein, 17 aa, Homo sapiens
  CDR3 for alpha chain variable domain of TCR clone 91705 (TRAV3, TRAJ6)
CAVRDGPRAGGSYIPTF

SEQ ID NO: 183410 - protein, 15 aa, Homo sapiens
  CDR3 for beta chain variable domain of TCR clone 91705 (TRBV11-3, TRBJ2-7)
CASSPGPARSYEQYF

SEQ ID NO: 183411 - protein, 13 aa, Homo sapiens
  CDR3 for alpha chain variable domain of TCR clone 91706 (TRAV2, TRAJ15)
CAVEAQAGTALIF

SEQ ID NO: 183412 - protein, 14 aa, Homo sapiens
  CDR3 for beta chain variable domain of TCR clone 91706 (TRBV2, TRBJ2-7)
CASSRDRSSYEQYF

SEQ ID NO: 183413 - protein, 14 aa, Homo sapiens
  CDR3 for alpha chain variable domain of TCR clone 91707 (TRAV17, TRAJ57)
CAADPQGGSEKLVL

SEQ ID NO: 183414 - protein, 16 aa, Homo sapiens
  CDR3 for beta chain variable domain of TCR clone 91707 (TRBV27, TRBJ2-2)
CASSFRGLVRTGELFF

SEQ ID NO: 183415 - protein, 15 aa, Homo sapiens
  CDR3 for alpha chain variable domain of TCR clone 91708 (TRAV12-2, TRAJ53)
WAVNGGGGSNYKLTF

SEQ ID NO: 183416 - protein, 13 aa, Homo sapiens
  CDR3 for beta chain variable domain of TCR clone 91708 (TRBV3-1, TRBJ1-1)
CASSPGVITEAFF

SEQ ID NO: 183417 - protein, 12 aa, Homo sapiens
  CDR3 for alpha chain variable domain of TCR clone 91709 (TRAV29/DV5, TRAJ49)
CAATDTGNQFYF

SEQ ID NO: 183418 - protein, 15 aa, Homo sapiens
  CDR3 for beta chain variable domain of TCR clone 91709 (TRBV19, TRBJ2-2)
CASRQTGADTGELSF

SEQ ID NO: 183419 - protein, 16 aa, Homo sapiens
  CDR3 for alpha chain variable domain of TCR clone 91710 (TRAV14/DV4, TRAJ54)
CAMREGRIQGAQKLVF

SEQ ID NO: 183420 - protein, 15 aa, Homo sapiens
  CDR3 for beta chain variable domain of TCR clone 91710 (TRBV7-2, TRBJ1-4)
CASSLLGQSNEKLFF

SEQ ID NO: 183421 - protein, 14 aa, Homo sapiens
  CDR3 for alpha chain variable domain of TCR clone 91711 (TRAV1-2, TRAJ8)
CAVREDTGFQKLVF

SEQ ID NO: 183422 - protein, 12 aa, Homo sapiens
  CDR3 for beta chain variable domain of TCR clone 91711 (TRBV11-2, TRBJ2-7)
CASGPPADEQYF

SEQ ID NO: 183423 - protein, 15 aa, Homo sapiens
  CDR3 for alpha chain variable domain of TCR clone 91712 (TRAV2, TRAJ9)
CAVAALNTGGFKTIF

SEQ ID NO: 183424 - protein, 16 aa, Homo sapiens
  CDR3 for beta chain variable domain of TCR clone 91712 (TRBV4-3, TRBJ2-7)
CASSPRTSGRSYEQYF

SEQ ID NO: 183425 - protein, 12 aa, Homo sapiens
  CDR3 for alpha chain variable domain of TCR clone 91713 (TRAV23/DV6, TRAJ33)
CAPMDSNYQLIW

SEQ ID NO: 183426 - protein, 14 aa, Homo sapiens
  CDR3 for beta chain variable domain of TCR clone 91713 (TRBV7-2, TRBJ2-7)
CASRSQGAAYEQYF

SEQ ID NO: 183427 - protein, 12 aa, Homo sapiens
  CDR3 for alpha chain variable domain of TCR clone 91714 (TRAV13-1, TRAJ21)
CAAKEGFHKFYF

SEQ ID NO: 183428 - protein, 14 aa, Homo sapiens
  CDR3 for beta chain variable domain of TCR clone 91714 (TRBV5-4, TRBJ1-1)
CASSLDSRRDEAFF

SEQ ID NO: 183429 - protein, 11 aa, Homo sapiens
  CDR3 for alpha chain variable domain of TCR clone 91715 (TRAV3, TRAJ17)
PRGASGNKLTF

SEQ ID NO: 183430 - protein, 16 aa, Homo sapiens
  CDR3 for beta chain variable domain of TCR clone 91715 (TRBV7-6, TRBJ2-1)
CASSAPGPSSYNEQFF

SEQ ID NO: 183431 - protein, 14 aa, Homo sapiens
  CDR3 for alpha chain variable domain of TCR clone 91716 (TRAV13-1, TRAJ44)
CAAKATGTASKLTF

SEQ ID NO: 183432 - protein, 17 aa, Homo sapiens
  CDR3 for beta chain variable domain of TCR clone 91716 (TRBV7-3, TRBJ2-3)
RASRLMKRMRGADTQYF

SEQ ID NO: 183433 - protein, 15 aa, Homo sapiens
  CDR3 for alpha chain variable domain of TCR clone 91717 (TRAV2, TRAJ28)
CAVPYSGAGSYHLTF

SEQ ID NO: 183434 - protein, 17 aa, Homo sapiens
  CDR3 for beta chain variable domain of TCR clone 91717 (TRBV20-1, TRBJ2-4)
CSARDWASGGRENIQYF

SEQ ID NO: 183435 - protein, 16 aa, Homo sapiens
  CDR3 for alpha chain variable domain of TCR clone 91718 (TRAV12-3, TRAJ53)
CAMSPGRGGSNYKLTF

SEQ ID NO: 183436 - protein, 14 aa, Homo sapiens
  CDR3 for beta chain variable domain of TCR clone 91718 (TRBV12-5, TRBJ2-5)
CASGSRTHQETQYF

SEQ ID NO: 183437 - protein, 12 aa, Homo sapiens
  CDR3 for alpha chain variable domain of TCR clone 91719 (TRAV9-2, TRAJ36)
CALRKGANNLFF

SEQ ID NO: 183438 - protein, 13 aa, Homo sapiens
  CDR3 for beta chain variable domain of TCR clone 91719 (TRBV27, TRBJ1-1)
CASSLSIGAEAFF

SEQ ID NO: 183439 - protein, 14 aa, Homo sapiens
  CDR3 for alpha chain variable domain of TCR clone 91720 (TRAV34, TRAJ22)
CGADTSGSARQLTF

SEQ ID NO: 183440 - protein, 12 aa, Homo sapiens
  CDR3 for beta chain variable domain of TCR clone 91720 (TRBV7-8, TRBJ2-7)
CASSLGDREQYF

SEQ ID NO: 183441 - protein, 13 aa, Homo sapiens
  CDR3 for alpha chain variable domain of TCR clone 91721 (TRAV13-1, TRAJ10)
CAATAGGGNKITF

SEQ ID NO: 183442 - protein, 12 aa, Homo sapiens
  CDR3 for beta chain variable domain of TCR clone 91721 (TRBV7-3, TRBJ2-1)
CASSFQSGPQFF

SEQ ID NO: 183443 - protein, 12 aa, Homo sapiens
  CDR3 for alpha chain variable domain of TCR clone 91722 (TRAV8-3, TRAJ20)
CAVDFNDYKLSF

SEQ ID NO: 183444 - protein, 17 aa, Homo sapiens
  CDR3 for beta chain variable domain of TCR clone 91722 (TRBV7-8, TRBJ2-6)
CASSAGTGGAGANGLTF

SEQ ID NO: 183445 - protein, 15 aa, Homo sapiens
  CDR3 for alpha chain variable domain of TCR clone 91723 (TRAV20, TRAJ6)
CAVRLQSGGSYIPTF

SEQ ID NO: 183446 - protein, 16 aa, Homo sapiens
  CDR3 for beta chain variable domain of TCR clone 91723 (TRBV5-1, TRBJ2-2)
CASRNTGEANTGELFF

SEQ ID NO: 183447 - protein, 18 aa, Homo sapiens
  CDR3 for alpha chain variable domain of TCR clone 91724 (TRAV26-1, TRAJ23)
CIVRVGLEVWNQGGKLIF

SEQ ID NO: 183448 - protein, 13 aa, Homo sapiens
  CDR3 for beta chain variable domain of TCR clone 91724 (TRBV19, TRBJ2-2)
CASSIWSTGELFF

SEQ ID NO: 183449 - protein, 14 aa, Homo sapiens
  CDR3 for alpha chain variable domain of TCR clone 91725 (TRAV12-3, TRAJ57)
CAMSAWGGSEKLVF

SEQ ID NO: 183450 - protein, 17 aa, Homo sapiens
  CDR3 for beta chain variable domain of TCR clone 91725 (TRBV28, TRBJ2-5)
CASSTPEGDALQETQYF

SEQ ID NO: 183451 - protein, 10 aa, Homo sapiens
  CDR3 for alpha chain variable domain of TCR clone 91726 (TRAV23/DV6, TRAJ22)
CAASSRGSRF

SEQ ID NO: 183452 - protein, 15 aa, Homo sapiens
  CDR3 for beta chain variable domain of TCR clone 91726 (TRBV10-3, TRBJ2-3)
CAIDTSGRLTDTQYF

SEQ ID NO: 183453 - protein, 11 aa, Homo sapiens
  CDR3 for alpha chain variable domain of TCR clone 91727 (TRAV21, TRAJ34)
CAVTNTDKLIF

SEQ ID NO: 183454 - protein, 18 aa, Homo sapiens
  CDR3 for beta chain variable domain of TCR clone 91727 (TRBV11-2, TRBJ2-3)
CASSLGGASRGAPNTQYF

SEQ ID NO: 183455 - protein, 21 aa, Homo sapiens
  CDR3 for alpha chain variable domain of TCR clone 91728 (TRAV1-2, TRAJ37)
CLLPLCCGRFHGSGNTGKLIF

SEQ ID NO: 183456 - protein, 14 aa, Homo sapiens
  CDR3 for beta chain variable domain of TCR clone 91728 (TRBV2, TRBJ2-5)
CASSEVLAQETQYF

SEQ ID NO: 183457 - protein, 13 aa, Homo sapiens
  CDR3 for alpha chain variable domain of TCR clone 91729 (TRAV35, TRAJ42)
YAGFPGSQGNLIF

SEQ ID NO: 183458 - protein, 14 aa, Homo sapiens
  CDR3 for beta chain variable domain of TCR clone 91729 (TRBV19, TRBJ2-1)
CASPTFVLSGEQFF

SEQ ID NO: 183459 - protein, 19 aa, Homo sapiens
  CDR3 for alpha chain variable domain of TCR clone 91730 (TRAV2, TRAJ20)
IPQVREADAAVYRDCKLSF

SEQ ID NO: 183460 - protein, 16 aa, Homo sapiens
  CDR3 for beta chain variable domain of TCR clone 91730 (TRBV9, TRBJ2-2)
CASSAMGKGNTGELFF

SEQ ID NO: 183461 - protein, 15 aa, Homo sapiens
  CDR3 for alpha chain variable domain of TCR clone 91731 (TRAV3, TRAJ4)
CAQNMFSVGYNKLIF

SEQ ID NO: 183462 - protein, 16 aa, Homo sapiens
  CDR3 for beta chain variable domain of TCR clone 91731 (TRBV3-1, TRBJ1-6)
CASSQEFQGSYSPLHF

SEQ ID NO: 183463 - protein, 13 aa, Homo sapiens
  CDR3 for alpha chain variable domain of TCR clone 91732 (TRAV1-2, TRAJ9)
CAALNTGGFKTIF

SEQ ID NO: 183464 - protein, 16 aa, Homo sapiens
  CDR3 for beta chain variable domain of TCR clone 91732 (TRBV5-4, TRBJ2-3)
CASQQPGAGGADTQYF

SEQ ID NO: 183465 - protein, 14 aa, Homo sapiens
  CDR3 for alpha chain variable domain of TCR clone 91733 (TRAV35, TRAJ40)
CAGSTTSGTYKYTF

SEQ ID NO: 183466 - protein, 13 aa, Homo sapiens
  CDR3 for beta chain variable domain of TCR clone 91733 (TRBV20-1, TRBJ1-6)
CSAPVGVGSPLHF

SEQ ID NO: 183467 - protein, 15 aa, Homo sapiens
  CDR3 for alpha chain variable domain of TCR clone 91734 (TRAV8-3, TRAJ45)
CDSSYSGGGADGLTF

SEQ ID NO: 183468 - protein, 13 aa, Homo sapiens
  CDR3 for beta chain variable domain of TCR clone 91734 (TRBV20-1, TRBJ2-2)
CSASAAGTGELFF

SEQ ID NO: 183469 - protein, 14 aa, Homo sapiens
  CDR3 for alpha chain variable domain of TCR clone 91735 (TRAV8-1, TRAJ5)
CAVSMDTGRRALTF

SEQ ID NO: 183470 - protein, 14 aa, Homo sapiens
  CDR3 for beta chain variable domain of TCR clone 91735 (TRBV25-1, TRBJ1-1)
CASTHLGGNTEAFF

SEQ ID NO: 183471 - protein, 17 aa, Homo sapiens
  CDR3 for alpha chain variable domain of TCR clone 91736 (TRAV27, TRAJ42)
CAERVIYYGGSQGNLLF

SEQ ID NO: 183472 - protein, 14 aa, Homo sapiens
  CDR3 for beta chain variable domain of TCR clone 91736 (TRBV6-6, TRBJ2-3)
CASRLQREADTQYF

SEQ ID NO: 183473 - protein, 13 aa, Homo sapiens
  CDR3 for alpha chain variable domain of TCR clone 91737 (TRAV13-2, TRAJ53)
CAENMGSNYKLTF

SEQ ID NO: 183474 - protein, 16 aa, Homo sapiens
  CDR3 for beta chain variable domain of TCR clone 91737 (TRBV7-6, TRBJ1-6)
CASSLSSRIGDSPLHF

SEQ ID NO: 183475 - protein, 14 aa, Homo sapiens
  CDR3 for alpha chain variable domain of TCR clone 91738 (TRAV1-2, TRAJ16)
CAVNRFSDVQKLLF

SEQ ID NO: 183476 - protein, 12 aa, Homo sapiens
  CDR3 for beta chain variable domain of TCR clone 91738 (TRBV28, TRBJ2-6)
CAIQAGANVLTF

SEQ ID NO: 183477 - protein, 12 aa, Homo sapiens
  CDR3 for alpha chain variable domain of TCR clone 91739 (TRAV13-1, TRAJ21)
CAAKEGFNKFYF

SEQ ID NO: 183478 - protein, 15 aa, Homo sapiens
  CDR3 for beta chain variable domain of TCR clone 91739 (TRBV7-9, TRBJ1-6)
CASSSPGRGNSPLHL

SEQ ID NO: 183479 - protein, 13 aa, Homo sapiens
  CDR3 for alpha chain variable domain of TCR clone 91740 (TRAV13-2, TRAJ54)
CAESGSGSPEAGI

SEQ ID NO: 183480 - protein, 15 aa, Homo sapiens
  CDR3 for beta chain variable domain of TCR clone 91740 (TRBV20-1, TRBJ2-7)
CSAESGTSGAYEQYF

SEQ ID NO: 183481 - protein, 13 aa, Homo sapiens
  CDR3 for alpha chain variable domain of TCR clone 91741 (TRAV20, TRAJ49)
CAVQARTGNKFYF

SEQ ID NO: 183482 - protein, 14 aa, Homo sapiens
  CDR3 for beta chain variable domain of TCR clone 91741 (TRBV5-1, TRBJ1-1)
CASSLQGASTEAFF

SEQ ID NO: 183483 - protein, 13 aa, Homo sapiens
  CDR3 for alpha chain variable domain of TCR clone 91742 (TRAV20, TRAJ50)
CAVQQTSYDKVIF

SEQ ID NO: 183484 - protein, 15 aa, Homo sapiens
  CDR3 for beta chain variable domain of TCR clone 91742 (TRBV20-1, TRBJ2-7)
CSARDRVSGMDEQYF

SEQ ID NO: 183485 - protein, 12 aa, Homo sapiens
  CDR3 for alpha chain variable domain of TCR clone 91743 (TRAV12-3, TRAJ17)
CAMTLTGNKLTF

SEQ ID NO: 183486 - protein, 15 aa, Homo sapiens
  CDR3 for beta chain variable domain of TCR clone 91743 (TRBV11-2, TRBJ2-2)
CASSSDRVNTGELFF

SEQ ID NO: 183487 - protein, 11 aa, Homo sapiens
  CDR3 for alpha chain variable domain of TCR clone 91744 (TRAV3, TRAJ21)
CAVSNFNKFYF

SEQ ID NO: 183488 - protein, 16 aa, Homo sapiens
  CDR3 for beta chain variable domain of TCR clone 91744 (TRBV4-3, TRBJ2-2)
CASSHLQGSGTGELFF

SEQ ID NO: 183489 - protein, 12 aa, Homo sapiens
  CDR3 for alpha chain variable domain of TCR clone 91745 (TRAV36/DV7, TRAJ37)
CACYGNTGQLIF

SEQ ID NO: 183490 - protein, 14 aa, Homo sapiens
  CDR3 for beta chain variable domain of TCR clone 91745 (TRBV6-3, TRBJ1-4)
CASSGQNLNEKLFF

SEQ ID NO: 183491 - protein, 14 aa, Homo sapiens
  CDR3 for alpha chain variable domain of TCR clone 91746 (TRAV1-2, TRAJ16)
CAVNRFSDGQKLLF

SEQ ID NO: 183492 - protein, 16 aa, Homo sapiens
  CDR3 for beta chain variable domain of TCR clone 91746 (TRBV7-3, TRBJ2-1)
CASSPNSGSSYNEQFS

SEQ ID NO: 183493 - protein, 13 aa, Homo sapiens
  CDR3 for alpha chain variable domain of TCR clone 91747 (TRAV27, TRAJ3)
ASLRGSSASKIIF

SEQ ID NO: 183494 - protein, 15 aa, Homo sapiens
  CDR3 for beta chain variable domain of TCR clone 91747 (TRBV28, TRBJ1-3)
SASSMGWASGNTIYF

SEQ ID NO: 183495 - protein, 11 aa, Homo sapiens
  CDR3 for alpha chain variable domain of TCR clone 91748 (TRAV1-1, TRAJ20)
CAVFNDYKLSF

SEQ ID NO: 183496 - protein, 16 aa, Homo sapiens
  CDR3 for beta chain variable domain of TCR clone 91748 (TRBV12-5, TRBJ2-5)
CASGPRTSGNQETQYF

SEQ ID NO: 183497 - protein, 15 aa, Homo sapiens
  CDR3 for alpha chain variable domain of TCR clone 91749 (TRAV4, TRAJ26)
CLVGAMNNYGQNFVF

SEQ ID NO: 183498 - protein, 16 aa, Homo sapiens
  CDR3 for beta chain variable domain of TCR clone 91749 (TRBV28, TRBJ1-4)
CASSSRTGAANEKLFF

SEQ ID NO: 183499 - protein, 12 aa, Homo sapiens
  CDR3 for alpha chain variable domain of TCR clone 91750 (TRAV12-3, TRAJ5)
CAMDTGRRSLTF

SEQ ID NO: 183500 - protein, 14 aa, Homo sapiens
  CDR3 for beta chain variable domain of TCR clone 91750 (TRBV20-1, TRBJ2-1)
CSAQIGGSANEQFF

SEQ ID NO: 183501 - protein, 18 aa, Homo sapiens
  CDR3 for alpha chain variable domain of TCR clone 91751 (TRAV21, TRAJ52)
CAVRPSPAGGTSYGKLTF

SEQ ID NO: 183502 - protein, 13 aa, Homo sapiens
  CDR3 for beta chain variable domain of TCR clone 91751 (TRBV7-9, TRBJ1-2)
CASGLKQNYGYTF

SEQ ID NO: 183503 - protein, 14 aa, Homo sapiens
  CDR3 for alpha chain variable domain of TCR clone 91752 (TRAV12-2, TRAJ53)
CRERGGGSNYKLTF

SEQ ID NO: 183504 - protein, 17 aa, Homo sapiens
  CDR3 for beta chain variable domain of TCR clone 91752 (TRBV7-3, TRBJ2-3)
CASSLMKRMRGAETQYF

SEQ ID NO: 183505 - protein, 10 aa, Homo sapiens
  CDR3 for alpha chain variable domain of TCR clone 91753 (TRAV26-1, TRAJ40)
WIAGTYKYIF

SEQ ID NO: 183506 - protein, 15 aa, Homo sapiens
  CDR3 for beta chain variable domain of TCR clone 91753 (TRBV19, TRBJ2-1)
CASSSPGVPLDEQFF

SEQ ID NO: 183507 - protein, 14 aa, Homo sapiens
  CDR3 for alpha chain variable domain of TCR clone 91754 (TRAV8-4, TRAJ45)
CASGGGGGADGLTF

SEQ ID NO: 183508 - protein, 16 aa, Homo sapiens
  CDR3 for beta chain variable domain of TCR clone 91754 (TRBV19, TRBJ2-1)
CASSKAGPSSYNEQFF

SEQ ID NO: 183509 - protein, 15 aa, Homo sapiens
  CDR3 for alpha chain variable domain of TCR clone 91755 (TRAV3, TRAJ47)
CAVRDIGEYGNKLVI

SEQ ID NO: 183510 - protein, 14 aa, Homo sapiens
  CDR3 for beta chain variable domain of TCR clone 91755 (TRBV13, TRBJ2-5)
CASSLERVGETQYF

SEQ ID NO: 183511 - protein, 18 aa, Homo sapiens
  CDR3 for alpha chain variable domain of TCR clone 91756 (TRAV26-1, TRAJ22)
CIVRVALVSSGSARQLTF

SEQ ID NO: 183512 - protein, 13 aa, Homo sapiens
  CDR3 for beta chain variable domain of TCR clone 91756 (TRBV13, TRBJ2-5)
CASSPEVGETQYF

SEQ ID NO: 183513 - protein, 15 aa, Homo sapiens
  CDR3 for alpha chain variable domain of TCR clone 91757 (TRAV3, TRAJ5)
CAVRDRKTGRRALTF

SEQ ID NO: 183514 - protein, 17 aa, Homo sapiens
  CDR3 for beta chain variable domain of TCR clone 91757 (TRBV7-8, TRBJ2-6)
CASSAGTGGAGANVLTF

SEQ ID NO: 183515 - protein, 18 aa, Homo sapiens
  CDR3 for alpha chain variable domain of TCR clone 91758 (TRAV26-1, TRAJ37)
CIVRVDMHGSSNTGKLIF

SEQ ID NO: 183516 - protein, 15 aa, Homo sapiens
  CDR3 for beta chain variable domain of TCR clone 91758 (TRBV20-1, TRBJ2-7)
CSARVLASPLYEQYC

SEQ ID NO: 183517 - protein, 13 aa, Homo sapiens
  CDR3 for alpha chain variable domain of TCR clone 91759 (TRAV26-1, TRAJ33)
CIVRVDSNYKLIW

SEQ ID NO: 183518 - protein, 15 aa, Homo sapiens
  CDR3 for beta chain variable domain of TCR clone 91759 (TRBV7-2, TRBJ1-5)
CASSFSAGINQPQHF

SEQ ID NO: 183519 - protein, 11 aa, Homo sapiens
  CDR3 for alpha chain variable domain of TCR clone 91760 (TRAV21, TRAJ34)
CAHYNTDKPIF

SEQ ID NO: 183520 - protein, 13 aa, Homo sapiens
  CDR3 for beta chain variable domain of TCR clone 91760 (TRBV7-6, TRBJ1-2)
CASSVVADYGYTF

SEQ ID NO: 183521 - protein, 15 aa, Homo sapiens
  CDR3 for alpha chain variable domain of TCR clone 91761 (TRAV12-3, TRAJ11)
CAMSEESSGYSTLTF

SEQ ID NO: 183522 - protein, 13 aa, Homo sapiens
  CDR3 for beta chain variable domain of TCR clone 91761 (TRBV12-4, TRBJ2-1)
CASSFHTGSEQFF

SEQ ID NO: 183523 - protein, 13 aa, Homo sapiens
  CDR3 for alpha chain variable domain of TCR clone 91762 (TRAV21, TRAJ37)
CAVSPGNTGKLIF

SEQ ID NO: 183524 - protein, 15 aa, Homo sapiens
  CDR3 for beta chain variable domain of TCR clone 91762 (TRBV12-4, TRBJ1-2)
CASSFVDRGNYGYTF

SEQ ID NO: 183525 - protein, 14 aa, Homo sapiens
  CDR3 for alpha chain variable domain of TCR clone 91763 (TRAV17, TRAJ37)
CATDGSGNTGKLIF

SEQ ID NO: 183526 - protein, 13 aa, Homo sapiens
  CDR3 for beta chain variable domain of TCR clone 91763 (TRBV11-2, TRBJ2-1)
CASSLDLVNEQFF

SEQ ID NO: 183527 - protein, 13 aa, Homo sapiens
  CDR3 for alpha chain variable domain of TCR clone 91764 (TRAV27, TRAJ8)
CAGGPTGFQKLVF

SEQ ID NO: 183528 - protein, 15 aa, Homo sapiens
  CDR3 for beta chain variable domain of TCR clone 91764 (TRBV6-1, TRBJ2-7)
CASSESRGDFYEQYF

SEQ ID NO: 183529 - protein, 14 aa, Homo sapiens
  CDR3 for alpha chain variable domain of TCR clone 91765 (TRAV1-2, TRAJ16)
CAVNRFSDGQKLLF

SEQ ID NO: 183530 - protein, 13 aa, Homo sapiens
  CDR3 for beta chain variable domain of TCR clone 91765 (TRBV6-3, TRBJ2-5)
CASRRGIQETQYF

SEQ ID NO: 183531 - protein, 13 aa, Homo sapiens
  CDR3 for alpha chain variable domain of TCR clone 91766 (TRAV21, TRAJ27)
CAARPGNAGKSTF

SEQ ID NO: 183532 - protein, 14 aa, Homo sapiens
  CDR3 for beta chain variable domain of TCR clone 91766 (TRBV5-1, TRBJ2-3)
CASSLFGPTDTQYF

SEQ ID NO: 183533 - protein, 16 aa, Homo sapiens
  CDR3 for alpha chain variable domain of TCR clone 91767 (TRAV30, TRAJ24)
CGTEIVDADGWGKFQF

SEQ ID NO: 183534 - protein, 16 aa, Homo sapiens
  CDR3 for beta chain variable domain of TCR clone 91767 (TRBV2, TRBJ2-1)
CASRSPAGGKYNEQFF

SEQ ID NO: 183535 - protein, 14 aa, Homo sapiens
  CDR3 for alpha chain variable domain of TCR clone 91768 (TRAV1-1, TRAJ27)
CAVIYNTNAGKSTF

SEQ ID NO: 183536 - protein, 15 aa, Homo sapiens
  CDR3 for beta chain variable domain of TCR clone 91768 (TRBV2, TRBJ2-7)
CASSEGLARSYEQYF

SEQ ID NO: 183537 - protein, 15 aa, Homo sapiens
  CDR3 for alpha chain variable domain of TCR clone 91769 (TRAV12-2, TRAJ53)
CAVNEGGGSNYKLTF

SEQ ID NO: 183538 - protein, 14 aa, Homo sapiens
  CDR3 for beta chain variable domain of TCR clone 91769 (TRBV19, TRBJ2-2)
CASSTLHRSGELFF

SEQ ID NO: 183539 - protein, 14 aa, Homo sapiens
  CDR3 for alpha chain variable domain of TCR clone 91770 (TRAV12-2, TRAJ11)
CAVEGGSGYSTLTF

SEQ ID NO: 183540 - protein, 16 aa, Homo sapiens
  CDR3 for beta chain variable domain of TCR clone 91770 (TRBV6-1, TRBJ1-2)
CASSGAWQGRSHGYTC

SEQ ID NO: 183541 - protein, 11 aa, Homo sapiens
  CDR3 for alpha chain variable domain of TCR clone 91771 (TRAV13-1, TRAJ52)
PGGTSYGKLTF

SEQ ID NO: 183542 - protein, 13 aa, Homo sapiens
  CDR3 for beta chain variable domain of TCR clone 91771 (TRBV7-8, TRBJ2-7)
CASSLTGGREQYF

SEQ ID NO: 183543 - protein, 14 aa, Homo sapiens
  CDR3 for alpha chain variable domain of TCR clone 91772 (TRAV1-2, TRAJ29)
CAVRELTSATPLVF

SEQ ID NO: 183544 - protein, 18 aa, Homo sapiens
  CDR3 for beta chain variable domain of TCR clone 91772 (TRBV7-7, TRBJ2-1)
CASSLALTSGRSYNEQFF

SEQ ID NO: 183545 - protein, 16 aa, Homo sapiens
  CDR3 for alpha chain variable domain of TCR clone 91773 (TRAV35, TRAJ28)
CAGQRYSGAGSYQLTF

SEQ ID NO: 183546 - protein, 13 aa, Homo sapiens
  CDR3 for beta chain variable domain of TCR clone 91773 (TRBV19, TRBJ1-2)
CASSQGQFYGYTF

SEQ ID NO: 183547 - protein, 21 aa, Homo sapiens
  CDR3 for alpha chain variable domain of TCR clone 91774 (TRAV26-1, TRAJ22)
CCVLLHRQSPSHSGSARQLTF

SEQ ID NO: 183548 - protein, 16 aa, Homo sapiens
  CDR3 for beta chain variable domain of TCR clone 91774 (TRBV28, TRBJ2-1)
CASRRSGRVVGNEQFF

SEQ ID NO: 183549 - protein, 14 aa, Homo sapiens
  CDR3 for alpha chain variable domain of TCR clone 91775 (TRAV8-2, TRAJ11)
CVVSEKSGYSTLTF

SEQ ID NO: 183550 - protein, 18 aa, Homo sapiens
  CDR3 for beta chain variable domain of TCR clone 91775 (TRBV28, TRBJ2-1)
CTSVPAVPEYPRDNEQFF

SEQ ID NO: 183551 - protein, 18 aa, Homo sapiens
  CDR3 for alpha chain variable domain of TCR clone 91776 (TRAV26-2, TRAJ45)
CILRLWGYSGGGADGLTF

SEQ ID NO: 183552 - protein, 15 aa, Homo sapiens
  CDR3 for beta chain variable domain of TCR clone 91776 (TRBV9, TRBJ1-6)
CASSVAGTGDSPLHF

SEQ ID NO: 183553 - protein, 13 aa, Homo sapiens
  CDR3 for alpha chain variable domain of TCR clone 91777 (TRAV27, TRAJ49)
CAPRPYTGNQFYF

SEQ ID NO: 183554 - protein, 13 aa, Homo sapiens
  CDR3 for beta chain variable domain of TCR clone 91777 (TRBV19, TRBJ1-2)
CASSVPGQDGYTF

SEQ ID NO: 183555 - protein, 15 aa, Homo sapiens
  CDR3 for alpha chain variable domain of TCR clone 91778 (TRAV26-1, TRAJ48)
CIARWSWFGNEKLTF

SEQ ID NO: 183556 - protein, 15 aa, Homo sapiens
  CDR3 for beta chain variable domain of TCR clone 91778 (TRBV20-1, TRBJ2-7)
CSARDRVSGMDEQYF

SEQ ID NO: 183557 - protein, 14 aa, Homo sapiens
  CDR3 for alpha chain variable domain of TCR clone 91779 (TRAV12-3, TRAJ10)
CAMSGTGGGNKLTF

SEQ ID NO: 183558 - protein, 13 aa, Homo sapiens
  CDR3 for beta chain variable domain of TCR clone 91779 (TRBV12-5, TRBJ2-3)
CASGDRQSDTQYF

SEQ ID NO: 183559 - protein, 12 aa, Homo sapiens
  CDR3 for alpha chain variable domain of TCR clone 91780 (TRAV2, TRAJ15)
CAVAQAGTALIF

SEQ ID NO: 183560 - protein, 15 aa, Homo sapiens
  CDR3 for beta chain variable domain of TCR clone 91780 (TRBV5-1, TRBJ1-4)
FAPAAWKDGNEKLFF

SEQ ID NO: 183561 - protein, 12 aa, Homo sapiens
  CDR3 for alpha chain variable domain of TCR clone 91781 (TRAV3, TRAJ20)
CAVRDPDYKLSF

SEQ ID NO: 183562 - protein, 15 aa, Homo sapiens
  CDR3 for beta chain variable domain of TCR clone 91781 (TRBV27, TRBJ1-6)
CASSFDRGLGSPLHF

SEQ ID NO: 183563 - protein, 15 aa, Homo sapiens
  CDR3 for alpha chain variable domain of TCR clone 91782 (TRAV13-2, TRAJ10)
CAENRDTGGGNKLTF

SEQ ID NO: 183564 - protein, 13 aa, Homo sapiens
  CDR3 for beta chain variable domain of TCR clone 91782 (TRBV12-4, TRBJ1-5)
CASSPDRAQPQHF

SEQ ID NO: 183565 - protein, 14 aa, Homo sapiens
  CDR3 for alpha chain variable domain of TCR clone 91783 (TRAV12-3, TRAJ10)
NHLPLTGGGNKLTF

SEQ ID NO: 183566 - protein, 14 aa, Homo sapiens
  CDR3 for beta chain variable domain of TCR clone 91783 (TRBV6-1, TRBJ1-3)
CASVQGGGGNTIYF

SEQ ID NO: 183567 - protein, 13 aa, Homo sapiens
  CDR3 for alpha chain variable domain of TCR clone 91784 (TRAV1-2, TRAJ9)
CAVLNTGGFKTIF

SEQ ID NO: 183568 - protein, 16 aa, Homo sapiens
  CDR3 for beta chain variable domain of TCR clone 91784 (TRBV7-3, TRBJ2-2)
CASSLKRGTLSGELFF

SEQ ID NO: 183569 - protein, 14 aa, Homo sapiens
  CDR3 for alpha chain variable domain of TCR clone 91785 (TRAV12-1, TRAJ12)
CVVTRMDGSYKLIF

SEQ ID NO: 183570 - protein, 13 aa, Homo sapiens
  CDR3 for beta chain variable domain of TCR clone 91785 (TRBV6-5, TRBJ2-5)
CASSPQGGETQYF

SEQ ID NO: 183571 - protein, 13 aa, Homo sapiens
  CDR3 for alpha chain variable domain of TCR clone 91786 (TRAV17, TRAJ9)
CATDYTGGFKTIF

SEQ ID NO: 183572 - protein, 16 aa, Homo sapiens
  CDR3 for beta chain variable domain of TCR clone 91786 (TRBV29-1, TRBJ2-7)
CSVEVVGTSGSYEQYF

SEQ ID NO: 183573 - protein, 13 aa, Homo sapiens
  CDR3 for alpha chain variable domain of TCR clone 91787 (TRAV38-1, TRAJ42)
CSRWGGSQGNLIF

SEQ ID NO: 183574 - protein, 14 aa, Homo sapiens
  CDR3 for beta chain variable domain of TCR clone 91787 (TRBV6-1, TRBJ1-3)
CASVQGGGGNTIYF

SEQ ID NO: 183575 - protein, 19 aa, Homo sapiens
  CDR3 for alpha chain variable domain of TCR clone 91788 (TRAV2, TRAJ20)
ILQVREADAAVYRDCKLSF

SEQ ID NO: 183576 - protein, 13 aa, Homo sapiens
  CDR3 for beta chain variable domain of TCR clone 91788 (TRBV15, TRBJ1-6)
CATSGGLNSPLQF

SEQ ID NO: 183577 - protein, 15 aa, Homo sapiens
  CDR3 for alpha chain variable domain of TCR clone 91789 (TRAV3, TRAJ17)
CAVRDTGAAGNTLTF

SEQ ID NO: 183578 - protein, 14 aa, Homo sapiens
  CDR3 for beta chain variable domain of TCR clone 91789 (TRBV6-3, TRBJ1-1)
CASSNLLPGAEAFF

SEQ ID NO: 183579 - protein, 16 aa, Homo sapiens
  CDR3 for alpha chain variable domain of TCR clone 91790 (TRAV3, TRAJ10)
CAVRDMRAGGGKKLTF

SEQ ID NO: 183580 - protein, 20 aa, Homo sapiens
  CDR3 for beta chain variable domain of TCR clone 91790 (TRBV11-3, TRBJ2-7)
CASSQRTSGSLRAVLRAGHQ

SEQ ID NO: 183581 - protein, 13 aa, Homo sapiens
  CDR3 for alpha chain variable domain of TCR clone 91791 (TRAV8-2, TRAJ36)
CVVSHLPTNNLFF

SEQ ID NO: 183582 - protein, 18 aa, Homo sapiens
  CDR3 for beta chain variable domain of TCR clone 91791 (TRBV7-9, TRBJ2-6)
CASSFPGAGMSGANVLTF

SEQ ID NO: 183583 - protein, 13 aa, Homo sapiens
  CDR3 for alpha chain variable domain of TCR clone 91792 (TRAV1-2, TRAJ9)
CAALNTGGFKTIF

SEQ ID NO: 183584 - protein, 13 aa, Homo sapiens
  CDR3 for beta chain variable domain of TCR clone 91792 (TRBV19, TRBJ1-2)
CASNVPGQDGHTF

SEQ ID NO: 183585 - protein, 13 aa, Homo sapiens
  CDR3 for alpha chain variable domain of TCR clone 91793 (TRAV3, TRAJ30)
CAVRGRGDDKIIF

SEQ ID NO: 183586 - protein, 14 aa, Homo sapiens
  CDR3 for beta chain variable domain of TCR clone 91793 (TRBV5-1, TRBJ1-1)
CASSRTTGDTEAFF

SEQ ID NO: 183587 - protein, 16 aa, Homo sapiens
  CDR3 for alpha chain variable domain of TCR clone 91794 (TRAV3, TRAJ10)
CAARDMRAGGGNELTF

SEQ ID NO: 183588 - protein, 13 aa, Homo sapiens
  CDR3 for beta chain variable domain of TCR clone 91794 (TRBV12-4, TRBJ2-7)
CASSPTETYEQYF

SEQ ID NO: 183589 - protein, 15 aa, Homo sapiens
  CDR3 for alpha chain variable domain of TCR clone 91795 (TRAV3, TRAJ9)
CAVRARNTGGFKTIF

SEQ ID NO: 183590 - protein, 15 aa, Homo sapiens
  CDR3 for beta chain variable domain of TCR clone 91795 (TRBV7-2, TRBJ2-2)
CASSPTGANTGELFF

SEQ ID NO: 183591 - protein, 13 aa, Homo sapiens
  CDR3 for alpha chain variable domain of TCR clone 91796 (TRAV1-2, TRAJ9)
CAALNTGGFKPIF

SEQ ID NO: 183592 - protein, 12 aa, Homo sapiens
  CDR3 for beta chain variable domain of TCR clone 91796 (TRBV11-3, TRBJ1-1)
CASSHRQGEAFF

SEQ ID NO: 183593 - protein, 12 aa, Homo sapiens
  CDR3 for alpha chain variable domain of TCR clone 91797 (TRAV13-1, TRAJ21)
CAAKKGFNKFYF

SEQ ID NO: 183594 - protein, 14 aa, Homo sapiens
  CDR3 for beta chain variable domain of TCR clone 91797 (TRBV5-4, TRBJ1-1)
CASSLDSRRDEAFF

SEQ ID NO: 183595 - protein, 14 aa, Homo sapiens
  CDR3 for alpha chain variable domain of TCR clone 91798 (TRAV35, TRAJ22)
CAGLRPGSARQLTF

SEQ ID NO: 183596 - protein, 15 aa, Homo sapiens
  CDR3 for beta chain variable domain of TCR clone 91798 (TRBV12-4, TRBJ2-5)
CASSPPTSLQETQYF

SEQ ID NO: 183597 - protein, 17 aa, Homo sapiens
  CDR3 for alpha chain variable domain of TCR clone 91799 (TRAV3, TRAJ6)
CAVRDGPRAGGSYIPTF

SEQ ID NO: 183598 - protein, 11 aa, Homo sapiens
  CDR3 for beta chain variable domain of TCR clone 91799 (TRBV19, TRBJ2-4)
CASSNKNIQYF

SEQ ID NO: 183599 - protein, 14 aa, Homo sapiens
  CDR3 for alpha chain variable domain of TCR clone 91800 (TRAV12-2, TRAJ17)
CAVLFKAAGNKLTS

SEQ ID NO: 183600 - protein, 17 aa, Homo sapiens
  CDR3 for beta chain variable domain of TCR clone 91800 (TRBV20-1, TRBJ2-2)
CSASGSGRGGLTGELFF

SEQ ID NO: 183601 - protein, 14 aa, Homo sapiens
  CDR3 for alpha chain variable domain of TCR clone 91801 (TRAV12-2, TRAJ5)
CAVNRSTGRRPLTF

SEQ ID NO: 183602 - protein, 12 aa, Homo sapiens
  CDR3 for beta chain variable domain of TCR clone 91801 (TRBV19, TRBJ1-5)
CASSIAQQPQHF

SEQ ID NO: 183603 - protein, 13 aa, Homo sapiens
  CDR3 for alpha chain variable domain of TCR clone 91802 (TRAV22, TRAJ53)
CAALGGSNYKLTF

SEQ ID NO: 183604 - protein, 14 aa, Homo sapiens
  CDR3 for beta chain variable domain of TCR clone 91802 (TRBV7-9, TRBJ2-1)
CASSPRDSLYEQFF

SEQ ID NO: 183605 - protein, 15 aa, Homo sapiens
  CDR3 for alpha chain variable domain of TCR clone 91803 (TRAV12-3, TRAJ6)
CAMSPASGGSYVPTF

SEQ ID NO: 183606 - protein, 15 aa, Homo sapiens
  CDR3 for beta chain variable domain of TCR clone 91803 (TRBV2, TRBJ1-2)
CASSESRTVNYGYTF

SEQ ID NO: 183607 - protein, 15 aa, Homo sapiens
  CDR3 for alpha chain variable domain of TCR clone 91804 (TRAV8-1, TRAJ42)
CAVTNYGGSQGNLIF

SEQ ID NO: 183608 - protein, 14 aa, Homo sapiens
  CDR3 for beta chain variable domain of TCR clone 91804 (TRBV7-6, TRBJ2-3)
CASSLGTVTDTQYF

SEQ ID NO: 183609 - protein, 14 aa, Homo sapiens
  CDR3 for alpha chain variable domain of TCR clone 91805 (TRAV12-2, TRAJ5)
CAVNRSTGRRALTF

SEQ ID NO: 183610 - protein, 14 aa, Homo sapiens
  CDR3 for beta chain variable domain of TCR clone 91805 (TRBV13, TRBJ2-7)
CASSLKGASYEQYF

SEQ ID NO: 183611 - protein, 13 aa, Homo sapiens
  CDR3 for alpha chain variable domain of TCR clone 91806 (TRAV2, TRAJ43)
TTVLKRGNNDMRF

SEQ ID NO: 183612 - protein, 17 aa, Homo sapiens
  CDR3 for beta chain variable domain of TCR clone 91806 (TRBV5-5, TRBJ1-2)
CASSLGSLDGQSEGYTF

SEQ ID NO: 183613 - protein, 12 aa, Homo sapiens
  CDR3 for alpha chain variable domain of TCR clone 91807 (TRAV26-1, TRAJ36)
CIVETGANNLFF

SEQ ID NO: 183614 - protein, 12 aa, Homo sapiens
  CDR3 for beta chain variable domain of TCR clone 91807 (TRBV5-5, TRBJ2-5)
CASSYFGETQYF

SEQ ID NO: 183615 - protein, 20 aa, Homo sapiens
  CDR3 for alpha chain variable domain of TCR clone 91808 (TRAV12-3, TRAJ52)
CAMTQSYQNAGGTSYGKLTF

SEQ ID NO: 183616 - protein, 14 aa, Homo sapiens
  CDR3 for beta chain variable domain of TCR clone 91808 (TRBV4-1, TRBJ1-6)
CASSPGSDSSPLHF

SEQ ID NO: 183617 - protein, 14 aa, Homo sapiens
  CDR3 for alpha chain variable domain of TCR clone 91809 (TRAV2, TRAJ15)
CAVTVNQAGTALIF

SEQ ID NO: 183618 - protein, 14 aa, Homo sapiens
  CDR3 for beta chain variable domain of TCR clone 91809 (TRBV7-9, TRBJ2-5)
CASSLAPDQETQYF

SEQ ID NO: 183619 - protein, 14 aa, Homo sapiens
  CDR3 for alpha chain variable domain of TCR clone 91810 (TRAV23/DV6, TRAJ29)
CAASTFSGNTPLVF

SEQ ID NO: 183620 - protein, 14 aa, Homo sapiens
  CDR3 for beta chain variable domain of TCR clone 91810 (TRBV7-2, TRBJ2-7)
CASRSQGAAYEQYF

SEQ ID NO: 183621 - protein, 16 aa, Homo sapiens
  CDR3 for alpha chain variable domain of TCR clone 91811 (TRAV12-2, TRAJ36)
CGTNNLFFGTGTRLPV

SEQ ID NO: 183622 - protein, 14 aa, Homo sapiens
  CDR3 for beta chain variable domain of TCR clone 91811 (TRBV7-2, TRBJ2-1)
CASSLSRVDNEQFF

SEQ ID NO: 183623 - protein, 12 aa, Homo sapiens
  CDR3 for alpha chain variable domain of TCR clone 91812 (TRAV1-1, TRAJ8)
CAGGTGFQKLVF

SEQ ID NO: 183624 - protein, 16 aa, Homo sapiens
  CDR3 for beta chain variable domain of TCR clone 91812 (TRBV7-9, TRBJ1-2)
CASSLGFSSGEDGYTF

SEQ ID NO: 183625 - protein, 12 aa, Homo sapiens
  CDR3 for alpha chain variable domain of TCR clone 91813 (TRAV3, TRAJ43)
CAVIDPNNDMRF

SEQ ID NO: 183626 - protein, 17 aa, Homo sapiens
  CDR3 for beta chain variable domain of TCR clone 91813 (TRBV7-8, TRBJ2-6)
CASSAGTGGAGANVLTF

SEQ ID NO: 183627 - protein, 18 aa, Homo sapiens
  CDR3 for alpha chain variable domain of TCR clone 91814 (TRAV26-1, TRAJ23)
CIVRVGLEVWNQGGKLIF

SEQ ID NO: 183628 - protein, 16 aa, Homo sapiens
  CDR3 for beta chain variable domain of TCR clone 91814 (TRBV12-4, TRBJ2-5)
CASSFLVRGRQETQYF

SEQ ID NO: 183629 - protein, 11 aa, Homo sapiens
  CDR3 for alpha chain variable domain of TCR clone 91815 (TRAV3, TRAJ21)
CAVGNFNKFYF

SEQ ID NO: 183630 - protein, 16 aa, Homo sapiens
  CDR3 for beta chain variable domain of TCR clone 91815 (TRBV7-2, TRBJ1-4)
CASSPVGRFDREKLFF

SEQ ID NO: 183631 - protein, 15 aa, Homo sapiens
  CDR3 for alpha chain variable domain of TCR clone 91816 (TRAV38-1, TRAJ37)
CAFIFGSGITGKLIF

SEQ ID NO: 183632 - protein, 12 aa, Homo sapiens
  CDR3 for beta chain variable domain of TCR clone 91816 (TRBV7-9, TRBJ2-7)
CASSLEGYEQYF

SEQ ID NO: 183633 - protein, 12 aa, Homo sapiens
  CDR3 for alpha chain variable domain of TCR clone 91817 (TRAV13-1, TRAJ17)
CAARTAGNRLTF

SEQ ID NO: 183634 - protein, 15 aa, Homo sapiens
  CDR3 for beta chain variable domain of TCR clone 91817 (TRBV7-6, TRBJ1-1)
CASSPQGGANTEAFF

SEQ ID NO: 183635 - protein, 15 aa, Homo sapiens
  CDR3 for alpha chain variable domain of TCR clone 91818 (TRAV1-2, TRAJ15)
CAVDVMGSAGTALIF

SEQ ID NO: 183636 - protein, 13 aa, Homo sapiens
  CDR3 for beta chain variable domain of TCR clone 91818 (TRBV20-1, TRBJ1-1)
CSAFGRENTEAFF

SEQ ID NO: 183637 - protein, 14 aa, Homo sapiens
  CDR3 for alpha chain variable domain of TCR clone 91819 (TRAV1-2, TRAJ8)
CAVREDTGFQKLVF

SEQ ID NO: 183638 - protein, 15 aa, Homo sapiens
  CDR3 for beta chain variable domain of TCR clone 91819 (TRBV6-3, TRBJ2-1)
CASSYASDSYNEQFF

SEQ ID NO: 183639 - protein, 14 aa, Homo sapiens
  CDR3 for alpha chain variable domain of TCR clone 91820 (TRAV17, TRAJ35)
CATDRPGFGNVLHG

SEQ ID NO: 183640 - protein, 19 aa, Homo sapiens
  CDR3 for beta chain variable domain of TCR clone 91820 (TRBV11-3, TRBJ2-2)
CASSTRPGAKTTNTGELFF

SEQ ID NO: 183641 - protein, 15 aa, Homo sapiens
  CDR3 for alpha chain variable domain of TCR clone 91821 (TRAV26-1, TRAJ20)
CIVRVVGSNDYKLSF

SEQ ID NO: 183642 - protein, 17 aa, Homo sapiens
  CDR3 for beta chain variable domain of TCR clone 91821 (TRBV11-2, TRBJ2-1)
CASSLYPPGVEYNEQFF

SEQ ID NO: 183643 - protein, 14 aa, Homo sapiens
  CDR3 for alpha chain variable domain of TCR clone 91822 (TRAV12-1, TRAJ17)
CVVNPKAAGNQLTF

SEQ ID NO: 183644 - protein, 16 aa, Homo sapiens
  CDR3 for beta chain variable domain of TCR clone 91822 (TRBV20-1, TRBJ2-1)
CSASASGYSSYNEQFF

SEQ ID NO: 183645 - protein, 14 aa, Homo sapiens
  CDR3 for alpha chain variable domain of TCR clone 91823 (TRAV21, TRAJ15)
CAVSLNQAGTALIF

SEQ ID NO: 183646 - protein, 11 aa, Homo sapiens
  CDR3 for beta chain variable domain of TCR clone 91823 (TRBV20-1, TRBJ2-7)
CSARNSYEQYF

SEQ ID NO: 183647 - protein, 14 aa, Homo sapiens
  CDR3 for alpha chain variable domain of TCR clone 91824 (TRAV23/DV6, TRAJ11)
CAASLESGYSTLTF

SEQ ID NO: 183648 - protein, 16 aa, Homo sapiens
  CDR3 for beta chain variable domain of TCR clone 91824 (TRBV12-5, TRBJ2-5)
CASGPRTSGNQETQYF

SEQ ID NO: 183649 - protein, 13 aa, Homo sapiens
  CDR3 for alpha chain variable domain of TCR clone 91825 (TRAV13-1, TRAJ39)
CAASIWAGDILTF

SEQ ID NO: 183650 - protein, 15 aa, Homo sapiens
  CDR3 for beta chain variable domain of TCR clone 91825 (TRBV7-9, TRBJ1-1)
CASSLLEQGGTEAFF

SEQ ID NO: 183651 - protein, 16 aa, Homo sapiens
  CDR3 for alpha chain variable domain of TCR clone 91826 (TRAV26-2, TRAJ57)
CLLRDVGSGGSEKLVF

SEQ ID NO: 183652 - protein, 13 aa, Homo sapiens
  CDR3 for beta chain variable domain of TCR clone 91826 (TRBV18, TRBJ2-3)
CASSPGVTDTQYF

SEQ ID NO: 183653 - protein, 16 aa, Homo sapiens
  CDR3 for alpha chain variable domain of TCR clone 91827 (TRAV3, TRAJ23)
CVVKIGIYNQGGKLIF

SEQ ID NO: 183654 - protein, 17 aa, Homo sapiens
  CDR3 for beta chain variable domain of TCR clone 91827 (TRBV10-3, TRBJ2-6)
CAISESTAPSGANVLTF

SEQ ID NO: 183655 - protein, 17 aa, Homo sapiens
  CDR3 for alpha chain variable domain of TCR clone 91828 (TRAV3, TRAJ12)
CAVRDGGRMDSSYKLIF

SEQ ID NO: 183656 - protein, 14 aa, Homo sapiens
  CDR3 for beta chain variable domain of TCR clone 91828 (TRBV7-9, TRBJ1-2)
CASNRQGANYGYTF

SEQ ID NO: 183657 - protein, 14 aa, Homo sapiens
  CDR3 for alpha chain variable domain of TCR clone 91829 (TRAV8-3, TRAJ39)
CAVGANNAGNMLTF

SEQ ID NO: 183658 - protein, 14 aa, Homo sapiens
  CDR3 for beta chain variable domain of TCR clone 91829 (TRBV7-6, TRBJ2-3)
CASSLGTVTDTQYF

SEQ ID NO: 183659 - protein, 12 aa, Homo sapiens
  CDR3 for alpha chain variable domain of TCR clone 91830 (TRAV13-1, TRAJ21)
CAAFYNFNKFYF

SEQ ID NO: 183660 - protein, 14 aa, Homo sapiens
  CDR3 for beta chain variable domain of TCR clone 91830 (TRBV4-1, TRBJ2-7)
CASRLTSGSYEQYF

SEQ ID NO: 183661 - protein, 12 aa, Homo sapiens
  CDR3 for alpha chain variable domain of TCR clone 91831 (TRAV12-1, TRAJ40)
CVVYSGTYKYIF

SEQ ID NO: 183662 - protein, 11 aa, Homo sapiens
  CDR3 for beta chain variable domain of TCR clone 91831 (TRBV29-1, TRBJ2-5)
CSEDRTGTQYF

SEQ ID NO: 183663 - protein, 16 aa, Homo sapiens
  CDR3 for alpha chain variable domain of TCR clone 91832 (TRAV8-3, TRAJ28)
CAVGATLGLGVTTSLS

SEQ ID NO: 183664 - protein, 14 aa, Homo sapiens
  CDR3 for beta chain variable domain of TCR clone 91832 (TRBV7-2, TRBJ2-1)
CASSLGVGYNEQFF

SEQ ID NO: 183665 - protein, 14 aa, Homo sapiens
  CDR3 for alpha chain variable domain of TCR clone 91833 (TRAV1-2, TRAJ8)
CAVREDTGFQKLVF

SEQ ID NO: 183666 - protein, 16 aa, Homo sapiens
  CDR3 for beta chain variable domain of TCR clone 91833 (TRBV5-1, TRBJ2-2)
CASSRWDTTNTGELFF

SEQ ID NO: 183667 - protein, 13 aa, Homo sapiens
  CDR3 for alpha chain variable domain of TCR clone 91834 (TRAV35, TRAJ48)
GRSRVFGNEQLTF

SEQ ID NO: 183668 - protein, 14 aa, Homo sapiens
  CDR3 for beta chain variable domain of TCR clone 91834 (TRBV20-1, TRBJ2-5)
CSALVPGYQETQYF

SEQ ID NO: 183669 - protein, 12 aa, Homo sapiens
  CDR3 for alpha chain variable domain of TCR clone 91835 (TRAV16, TRAJ10)
CSRTGGGNKPTF

SEQ ID NO: 183670 - protein, 12 aa, Homo sapiens
  CDR3 for beta chain variable domain of TCR clone 91835 (TRBV11-3, TRBJ1-1)
CASSHRQGEAFF

SEQ ID NO: 183671 - protein, 20 aa, Homo sapiens
  CDR3 for alpha chain variable domain of TCR clone 91836 (TRAV12-3, TRAJ41)
SLFIRDSQPSDSATPEALNF

SEQ ID NO: 183672 - protein, 16 aa, Homo sapiens
  CDR3 for beta chain variable domain of TCR clone 91836 (TRBV4-1, TRBJ2-3)
CASSQSTSGAEDTQYF

SEQ ID NO: 183673 - protein, 15 aa, Homo sapiens
  CDR3 for alpha chain variable domain of TCR clone 91837 (TRAV12-3, TRAJ6)
CAMSATTGGSYIPTF

SEQ ID NO: 183674 - protein, 16 aa, Homo sapiens
  CDR3 for beta chain variable domain of TCR clone 91837 (TRBV20-1, TRBJ1-2)
CSSSMGQGVANYGYTF

SEQ ID NO: 183675 - protein, 16 aa, Homo sapiens
  CDR3 for alpha chain variable domain of TCR clone 91838 (TRAV3, TRAJ37)
CAVRVRGSGNTGKLIF

SEQ ID NO: 183676 - protein, 13 aa, Homo sapiens
  CDR3 for beta chain variable domain of TCR clone 91838 (TRBV4-1, TRBJ2-1)
CASSQAGGDEQFF

SEQ ID NO: 183677 - protein, 12 aa, Homo sapiens
  CDR3 for alpha chain variable domain of TCR clone 91839 (TRAV13-1, TRAJ42)
SVLRGSQGNLIF

SEQ ID NO: 183678 - protein, 13 aa, Homo sapiens
  CDR3 for beta chain variable domain of TCR clone 91839 (TRBV2, TRBJ1-4)
CASSELGFEKLFF

SEQ ID NO: 183679 - protein, 13 aa, Homo sapiens
  CDR3 for alpha chain variable domain of TCR clone 91840 (TRAV30, TRAJ39)
CGTEKNTGNMLTF

SEQ ID NO: 183680 - protein, 12 aa, Homo sapiens
  CDR3 for beta chain variable domain of TCR clone 91840 (TRBV12-4, TRBJ2-5)
CASSSAQETQYF

SEQ ID NO: 183681 - protein, 13 aa, Homo sapiens
  CDR3 for alpha chain variable domain of TCR clone 91841 (TRAV16, TRAJ34)
CALTGYNTDKLIF

SEQ ID NO: 183682 - protein, 13 aa, Homo sapiens
  CDR3 for beta chain variable domain of TCR clone 91841 (TRBV6-1, TRBJ2-1)
CASREDGGHEQSF

SEQ ID NO: 183683 - protein, 13 aa, Homo sapiens
  CDR3 for alpha chain variable domain of TCR clone 91842 (TRAV17, TRAJ57)
CAIYQGGSEKLVL

SEQ ID NO: 183684 - protein, 16 aa, Homo sapiens
  CDR3 for beta chain variable domain of TCR clone 91842 (TRBV4-3, TRBJ2-1)
CASSQERLAGFNEQFF

SEQ ID NO: 183685 - protein, 14 aa, Homo sapiens
  CDR3 for alpha chain variable domain of TCR clone 91843 (TRAV38-1, TRAJ40)
CALRPTSGTYKYIF

SEQ ID NO: 183686 - protein, 15 aa, Homo sapiens
  CDR3 for beta chain variable domain of TCR clone 91843 (TRBV10-3, TRBJ2-3)
CAISLTSGGTDTQYF

SEQ ID NO: 183687 - protein, 11 aa, Homo sapiens
  CDR3 for alpha chain variable domain of TCR clone 91844 (TRAV12-2, TRAJ31)
CAVTSWARLMF

SEQ ID NO: 183688 - protein, 15 aa, Homo sapiens
  CDR3 for beta chain variable domain of TCR clone 91844 (TRBV19, TRBJ2-7)
CASSIGGGLVNEQYF

SEQ ID NO: 183689 - protein, 14 aa, Homo sapiens
  CDR3 for alpha chain variable domain of TCR clone 91845 (TRAV16, TRAJ26)
CALSSANYGQNFVF

SEQ ID NO: 183690 - protein, 15 aa, Homo sapiens
  CDR3 for beta chain variable domain of TCR clone 91845 (TRBV27, TRBJ2-1)
CASSNGGGSSNEQFF

SEQ ID NO: 183691 - protein, 15 aa, Homo sapiens
  CDR3 for alpha chain variable domain of TCR clone 91846 (TRAV3, TRAJ45)
CAVRTPWGGADGLTF

SEQ ID NO: 183692 - protein, 16 aa, Homo sapiens
  CDR3 for beta chain variable domain of TCR clone 91846 (TRBV6-1, TRBJ2-2)
CASNFGQGANTGELFF

SEQ ID NO: 183693 - protein, 16 aa, Homo sapiens
  CDR3 for alpha chain variable domain of TCR clone 91847 (TRAV3, TRAJ10)
CAVRDMRAGGGNKLTF

SEQ ID NO: 183694 - protein, 12 aa, Homo sapiens
  CDR3 for beta chain variable domain of TCR clone 91847 (TRBV6-3, TRBJ2-7)
CASSLTPYEQYF

SEQ ID NO: 183695 - protein, 13 aa, Homo sapiens
  CDR3 for alpha chain variable domain of TCR clone 91848 (TRAV2, TRAJ15)
CAVASQAGTALIF

SEQ ID NO: 183696 - protein, 14 aa, Homo sapiens
  CDR3 for beta chain variable domain of TCR clone 91848 (TRBV7-9, TRBJ2-2)
CASSLVQDTGELFF

SEQ ID NO: 183697 - protein, 14 aa, Homo sapiens
  CDR3 for alpha chain variable domain of TCR clone 91849 (TRAV17, TRAJ16)
CATADFSDGQKLLF

SEQ ID NO: 183698 - protein, 15 aa, Homo sapiens
  CDR3 for beta chain variable domain of TCR clone 91849 (TRBV18, TRBJ2-1)
CGSSPPSASYNEQFF

SEQ ID NO: 183699 - protein, 16 aa, Homo sapiens
  CDR3 for alpha chain variable domain of TCR clone 91850 (TRAV12-1, TRAJ43)
CVVNPHRFGAGARLTV

SEQ ID NO: 183700 - protein, 16 aa, Homo sapiens
  CDR3 for beta chain variable domain of TCR clone 91850 (TRBV27, TRBJ2-2)
CASSSTGGGDTGELFF

SEQ ID NO: 183701 - protein, 14 aa, Homo sapiens
  CDR3 for alpha chain variable domain of TCR clone 91851 (TRAV26-1, TRAJ34)
CIVRVAYNTDKLIF

SEQ ID NO: 183702 - protein, 15 aa, Homo sapiens
  CDR3 for beta chain variable domain of TCR clone 91851 (TRBV20-1, TRBJ2-7)
CSAKVPAAYFYEQYF

SEQ ID NO: 183703 - protein, 16 aa, Homo sapiens
  CDR3 for alpha chain variable domain of TCR clone 91852 (TRAV26-1, TRAJ32)
CIVRTNYGGATNKLIF

SEQ ID NO: 183704 - protein, 15 aa, Homo sapiens
  CDR3 for beta chain variable domain of TCR clone 91852 (TRBV12-4, TRBJ2-5)
CASSPPTGLQETQYF

SEQ ID NO: 183705 - protein, 13 aa, Homo sapiens
  CDR3 for alpha chain variable domain of TCR clone 91853 (TRAV8-3, TRAJ36)
CAVGATGANNLFF

SEQ ID NO: 183706 - protein, 15 aa, Homo sapiens
  CDR3 for beta chain variable domain of TCR clone 91853 (TRBV7-2, TRBJ1-2)
CASRPRAGWNYGYTF

SEQ ID NO: 183707 - protein, 14 aa, Homo sapiens
  CDR3 for alpha chain variable domain of TCR clone 91854 (TRAV17, TRAJ16)
CATADFSDGQKLLF

SEQ ID NO: 183708 - protein, 14 aa, Homo sapiens
  CDR3 for beta chain variable domain of TCR clone 91854 (TRBV7-2, TRBJ2-4)
CASSLSGGANIQYF

SEQ ID NO: 183709 - protein, 15 aa, Homo sapiens
  CDR3 for alpha chain variable domain of TCR clone 91855 (TRAV8-3, TRAJ13)
CSVAPNSGGYQKVTF

SEQ ID NO: 183710 - protein, 12 aa, Homo sapiens
  CDR3 for beta chain variable domain of TCR clone 91855 (TRBV19, TRBJ2-7)
CASTDRDYEQYF

SEQ ID NO: 183711 - protein, 14 aa, Homo sapiens
  CDR3 for alpha chain variable domain of TCR clone 91856 (TRAV29/DV5, TRAJ49)
CAASLSNTGNQFYF

SEQ ID NO: 183712 - protein, 16 aa, Homo sapiens
  CDR3 for beta chain variable domain of TCR clone 91856 (TRBV12-5, TRBJ2-5)
CASGPRTSGNQETQYF

SEQ ID NO: 183713 - protein, 14 aa, Homo sapiens
  CDR3 for alpha chain variable domain of TCR clone 91857 (TRAV1-1, TRAJ27)
CAVIYNTNAGKSTF

SEQ ID NO: 183714 - protein, 14 aa, Homo sapiens
  CDR3 for beta chain variable domain of TCR clone 91857 (TRBV9, TRBJ2-7)
CASSVGVGSYEQYF

SEQ ID NO: 183715 - protein, 13 aa, Homo sapiens
  CDR3 for alpha chain variable domain of TCR clone 91858 (TRAV8-4, TRAJ42)
CAVKEGSQGNLIF

SEQ ID NO: 183716 - protein, 15 aa, Homo sapiens
  CDR3 for beta chain variable domain of TCR clone 91858 (TRBV7-2, TRBJ2-1)
CASSSGLAGGNEQFF

SEQ ID NO: 183717 - protein, 10 aa, Homo sapiens
  CDR3 for alpha chain variable domain of TCR clone 91859 (TRAV2, TRAJ34)
CAVVNDKLIF

SEQ ID NO: 183718 - protein, 13 aa, Homo sapiens
  CDR3 for beta chain variable domain of TCR clone 91859 (TRBV14, TRBJ1-1)
CASSQEAGTEAFF

SEQ ID NO: 183719 - protein, 14 aa, Homo sapiens
  CDR3 for alpha chain variable domain of TCR clone 91860 (TRAV26-1, TRAJ34)
CIVRVAYNTDKLIF

SEQ ID NO: 183720 - protein, 16 aa, Homo sapiens
  CDR3 for beta chain variable domain of TCR clone 91860 (TRBV7-3, TRBJ2-2)
CASSLKRGTLSGEPFF

SEQ ID NO: 183721 - protein, 20 aa, Homo sapiens
  CDR3 for alpha chain variable domain of TCR clone 91861 (TRAV26-1, TRAJ42)
CCVLLHRQTYYGGSPGNLIF

SEQ ID NO: 183722 - protein, 16 aa, Homo sapiens
  CDR3 for beta chain variable domain of TCR clone 91861 (TRBV7-3, TRBJ2-2)
CASSLKRGTLSGELFF

SEQ ID NO: 183723 - protein, 15 aa, Homo sapiens
  CDR3 for alpha chain variable domain of TCR clone 91862 (TRAV36/DV7, TRAJ53)
CAVEGSGGSNYKLTF

SEQ ID NO: 183724 - protein, 16 aa, Homo sapiens
  CDR3 for beta chain variable domain of TCR clone 91862 (TRBV27, TRBJ2-2)
RASSLSGFWVTGELFF

SEQ ID NO: 183725 - protein, 13 aa, Homo sapiens
  CDR3 for alpha chain variable domain of TCR clone 91863 (TRAV8-4, TRAJ29)
CAVSATGNTPLVF

SEQ ID NO: 183726 - protein, 15 aa, Homo sapiens
  CDR3 for beta chain variable domain of TCR clone 91863 (TRBV19, TRBJ1-2)
CASSVGQVLNYGYTF

SEQ ID NO: 183727 - protein, 14 aa, Homo sapiens
  CDR3 for alpha chain variable domain of TCR clone 91864 (TRAV12-2, TRAJ17)
CAVLFKAAGNKLTS

SEQ ID NO: 183728 - protein, 17 aa, Homo sapiens
  CDR3 for beta chain variable domain of TCR clone 91864 (TRBV20-1, TRBJ2-2)
CSASGSGQGGLTGELLF

SEQ ID NO: 183729 - protein, 15 aa, Homo sapiens
  CDR3 for alpha chain variable domain of TCR clone 91865 (TRAV12-1, TRAJ44)
CVADLPTGTASKLTF

SEQ ID NO: 183730 - protein, 13 aa, Homo sapiens
  CDR3 for beta chain variable domain of TCR clone 91865 (TRBV7-3, TRBJ1-1)
CASSQDWGAEAFF

SEQ ID NO: 183731 - protein, 16 aa, Homo sapiens
  CDR3 for alpha chain variable domain of TCR clone 91866 (TRAV3, TRAJ10)
CAVRDRRAGGGNKLTF

SEQ ID NO: 183732 - protein, 14 aa, Homo sapiens
  CDR3 for beta chain variable domain of TCR clone 91866 (TRBV7-2, TRBJ1-1)
CASSFLTGTTEAFF

SEQ ID NO: 183733 - protein, 12 aa, Homo sapiens
  CDR3 for alpha chain variable domain of TCR clone 91867 (TRAV27, TRAJ9)
CAGESGGFKNIF

SEQ ID NO: 183734 - protein, 14 aa, Homo sapiens
  CDR3 for beta chain variable domain of TCR clone 91867 (TRBV6-1, TRBJ2-1)
CASAKDGFYNEQFF

SEQ ID NO: 183735 - protein, 13 aa, Homo sapiens
  CDR3 for alpha chain variable domain of TCR clone 91868 (TRAV1-1, TRAJ31)
CASYLNNNARLMF

SEQ ID NO: 183736 - protein, 17 aa, Homo sapiens
  CDR3 for beta chain variable domain of TCR clone 91868 (TRBV13, TRBJ2-3)
CASSLSRVAGGRNTQYF

SEQ ID NO: 183737 - protein, 14 aa, Homo sapiens
  CDR3 for alpha chain variable domain of TCR clone 91869 (TRAV2, TRAJ37)
CAVDFTSNTGKLIF

SEQ ID NO: 183738 - protein, 16 aa, Homo sapiens
  CDR3 for beta chain variable domain of TCR clone 91869 (TRBV29-1, TRBJ2-7)
CSVEDAEDGTAYEQYF

SEQ ID NO: 183739 - protein, 17 aa, Homo sapiens
  CDR3 for alpha chain variable domain of TCR clone 91870 (TRAV3, TRAJ6)
CAVRNGPRAGGSYIPTF

SEQ ID NO: 183740 - protein, 17 aa, Homo sapiens
  CDR3 for beta chain variable domain of TCR clone 91870 (TRBV11-2, TRBJ2-1)
CASSLYPPGVEYNEQFF

SEQ ID NO: 183741 - protein, 14 aa, Homo sapiens
  CDR3 for alpha chain variable domain of TCR clone 91871 (TRAV12-2, TRAJ6)
CASKWGGGSYIPTF

SEQ ID NO: 183742 - protein, 13 aa, Homo sapiens
  CDR3 for beta chain variable domain of TCR clone 91871 (TRBV2, TRBJ1-1)
CASSEGGNTEASF

SEQ ID NO: 183743 - protein, 12 aa, Homo sapiens
  CDR3 for alpha chain variable domain of TCR clone 91872 (TRAV36/DV7, TRAJ54)
CAVVRGAQKLVF

SEQ ID NO: 183744 - protein, 14 aa, Homo sapiens
  CDR3 for beta chain variable domain of TCR clone 91872 (TRBV20-1, TRBJ1-3)
CSASPTGAGNTIYF

SEQ ID NO: 183745 - protein, 14 aa, Homo sapiens
  CDR3 for alpha chain variable domain of TCR clone 91873 (TRAV17, TRAJ54)
CATDANQGAQKLLF

SEQ ID NO: 183746 - protein, 12 aa, Homo sapiens
  CDR3 for beta chain variable domain of TCR clone 91873 (TRBV6-3, TRBJ2-1)
CASSGSYNEQFF

SEQ ID NO: 183747 - protein, 13 aa, Homo sapiens
  CDR3 for alpha chain variable domain of TCR clone 91874 (TRAV38-1, TRAJ52)
CAFRGTSYGKLTF

SEQ ID NO: 183748 - protein, 15 aa, Homo sapiens
  CDR3 for beta chain variable domain of TCR clone 91874 (TRBV7-8, TRBJ2-5)
CASSGAAGSQETQYF

SEQ ID NO: 183749 - protein, 12 aa, Homo sapiens
  CDR3 for alpha chain variable domain of TCR clone 91875 (TRAV17, TRAJ12)
CATLRSSYKLIF

SEQ ID NO: 183750 - protein, 16 aa, Homo sapiens
  CDR3 for beta chain variable domain of TCR clone 91875 (TRBV7-9, TRBJ1-2)
CASSLGFSSGEDGYTF

SEQ ID NO: 183751 - protein, 14 aa, Homo sapiens
  CDR3 for alpha chain variable domain of TCR clone 91876 (TRAV12-3, TRAJ22)
CAMSLFGSARQLTL

SEQ ID NO: 183752 - protein, 11 aa, Homo sapiens
  CDR3 for beta chain variable domain of TCR clone 91876 (TRBV12-4, TRBJ2-2)
CASSSAGELFF

SEQ ID NO: 183753 - protein, 13 aa, Homo sapiens
  CDR3 for alpha chain variable domain of TCR clone 91877 (TRAV12-3, TRAJ13)
CAVTSGGYQKVTF

SEQ ID NO: 183754 - protein, 13 aa, Homo sapiens
  CDR3 for beta chain variable domain of TCR clone 91877 (TRBV7-9, TRBJ1-2)
CASSLKQNYGYTF

SEQ ID NO: 183755 - protein, 23 aa, Homo sapiens
  CDR3 for alpha chain variable domain of TCR clone 91878 (TRAV26-1, TRAJ38)
CIADNAGNNHIQNPDPAVYQLRD

SEQ ID NO: 183756 - protein, 14 aa, Homo sapiens
  CDR3 for beta chain variable domain of TCR clone 91878 (TRBV20-1, TRBJ1-1)
CSAQTRIGGTEAFF

SEQ ID NO: 183757 - protein, 16 aa, Homo sapiens
  CDR3 for alpha chain variable domain of TCR clone 91879 (TRAV26-1, TRAJ37)
CIVRGDGSGNTGKLIF

SEQ ID NO: 183758 - protein, 12 aa, Homo sapiens
  CDR3 for beta chain variable domain of TCR clone 91879 (TRBV28, TRBJ2-3)
CASSLYRDTQYF

SEQ ID NO: 183759 - protein, 10 aa, Homo sapiens
  CDR3 for alpha chain variable domain of TCR clone 91880 (TRAV26-1, TRAJ22)
CIVSLNFFWF

SEQ ID NO: 183760 - protein, 17 aa, Homo sapiens
  CDR3 for beta chain variable domain of TCR clone 91880 (TRBV11-2, TRBJ2-1)
CASSLYPPGVEYNEQFF

SEQ ID NO: 183761 - protein, 16 aa, Homo sapiens
  CDR3 for alpha chain variable domain of TCR clone 91881 (TRAV3, TRAJ37)
CAVRGKGSGNTGKLIF

SEQ ID NO: 183762 - protein, 17 aa, Homo sapiens
  CDR3 for beta chain variable domain of TCR clone 91881 (TRBV20-1, TRBJ2-2)
CSASGSGQGGLTGELFF

SEQ ID NO: 183763 - protein, 15 aa, Homo sapiens
  CDR3 for alpha chain variable domain of TCR clone 91882 (TRAV26-2, TRAJ45)
CILRDRVDQEELLTD

SEQ ID NO: 183764 - protein, 15 aa, Homo sapiens
  CDR3 for beta chain variable domain of TCR clone 91882 (TRBV7-6, TRBJ2-5)
CASSKPTGPQETQYF

SEQ ID NO: 183765 - protein, 14 aa, Homo sapiens
  CDR3 for alpha chain variable domain of TCR clone 91883 (TRAV17, TRAJ16)
YATADFSDGQKLLF

SEQ ID NO: 183766 - protein, 15 aa, Homo sapiens
  CDR3 for beta chain variable domain of TCR clone 91883 (TRBV18, TRBJ2-1)
CASSPPSASYNEQFF

SEQ ID NO: 183767 - protein, 15 aa, Homo sapiens
  CDR3 for alpha chain variable domain of TCR clone 91884 (TRAV14/DV4, TRAJ10)
YAMRELTGGGNKLTF

SEQ ID NO: 183768 - protein, 18 aa, Homo sapiens
  CDR3 for beta chain variable domain of TCR clone 91884 (TRBV7-9, TRBJ2-7)
CASSLTTSGSRTWYEQYF

SEQ ID NO: 183769 - protein, 14 aa, Homo sapiens
  CDR3 for alpha chain variable domain of TCR clone 91885 (TRAV20, TRAJ49)
CAVQAVVAGNQFYF

SEQ ID NO: 183770 - protein, 13 aa, Homo sapiens
  CDR3 for beta chain variable domain of TCR clone 91885 (TRBV28, TRBJ2-7)
CASRWTGTYEQYF

SEQ ID NO: 183771 - protein, 13 aa, Homo sapiens
  CDR3 for alpha chain variable domain of TCR clone 91886 (TRAV13-1, TRAJ39)
CSKYSNAGNMLTF

SEQ ID NO: 183772 - protein, 16 aa, Homo sapiens
  CDR3 for beta chain variable domain of TCR clone 91886 (TRBV20-1, TRBJ1-4)
CSATGQGLLTNEKLFF

SEQ ID NO: 183773 - protein, 17 aa, Homo sapiens
  CDR3 for alpha chain variable domain of TCR clone 91887 (TRAV3, TRAJ6)
CAVRDGPRAGGSYIPTF

SEQ ID NO: 183774 - protein, 14 aa, Homo sapiens
  CDR3 for beta chain variable domain of TCR clone 91887 (TRBV7-8, TRBJ2-7)
CASSPGLADYEQYF

SEQ ID NO: 183775 - protein, 17 aa, Homo sapiens
  CDR3 for alpha chain variable domain of TCR clone 91888 (TRAV8-3, TRAJ10)
EASNTVILTGGGNKLTF

SEQ ID NO: 183776 - protein, 16 aa, Homo sapiens
  CDR3 for beta chain variable domain of TCR clone 91888 (TRBV7-9, TRBJ1-2)
CASSLGFSPGEDGYTF

SEQ ID NO: 183777 - protein, 13 aa, Homo sapiens
  CDR3 for alpha chain variable domain of TCR clone 91889 (TRAV27, TRAJ42)
CAGARGSQGNLIF

SEQ ID NO: 183778 - protein, 14 aa, Homo sapiens
  CDR3 for beta chain variable domain of TCR clone 91889 (TRBV19, TRBJ2-1)
CASPTFVLSGEQFF

SEQ ID NO: 183779 - protein, 13 aa, Homo sapiens
  CDR3 for alpha chain variable domain of TCR clone 91890 (TRAV17, TRAJ40)
CATDEGGTYKYIF

SEQ ID NO: 183780 - protein, 13 aa, Homo sapiens
  CDR3 for beta chain variable domain of TCR clone 91890 (TRBV7-9, TRBJ1-2)
CASSLKQNYGYTF

SEQ ID NO: 183781 - protein, 15 aa, Homo sapiens
  CDR3 for alpha chain variable domain of TCR clone 91891 (TRAV3, TRAJ7)
CAVSDKDNGNNRLAF

SEQ ID NO: 183782 - protein, 19 aa, Homo sapiens
  CDR3 for beta chain variable domain of TCR clone 91891 (TRBV5-8, TRBJ2-3)
CASSFLGTSGSHRTDTQYF

SEQ ID NO: 183783 - protein, 13 aa, Homo sapiens
  CDR3 for alpha chain variable domain of TCR clone 91892 (TRAV2, TRAJ40)
CAVVTSGTYKYIF

SEQ ID NO: 183784 - protein, 15 aa, Homo sapiens
  CDR3 for beta chain variable domain of TCR clone 91892 (TRBV27, TRBJ2-3)
CASSLGLAATDTQYF

SEQ ID NO: 183785 - protein, 14 aa, Homo sapiens
  CDR3 for alpha chain variable domain of TCR clone 91893 (TRAV1-2, TRAJ8)
CAVREDTGFQKLVF

SEQ ID NO: 183786 - protein, 16 aa, Homo sapiens
  CDR3 for beta chain variable domain of TCR clone 91893 (TRBV7-9, TRBJ1-2)
CASSPGGGAINYGYTF

SEQ ID NO: 183787 - protein, 14 aa, Homo sapiens
  CDR3 for alpha chain variable domain of TCR clone 91894 (TRAV22, TRAJ40)
FAVESTSGTYEYIF

SEQ ID NO: 183788 - protein, 17 aa, Homo sapiens
  CDR3 for beta chain variable domain of TCR clone 91894 (TRBV7-9, TRBJ2-2)
CASSLGVAGMNTGELFF

SEQ ID NO: 183789 - protein, 11 aa, Homo sapiens
  CDR3 for alpha chain variable domain of TCR clone 91895 (TRAV1-2, TRAJ31)
CAVHNNARLMF

SEQ ID NO: 183790 - protein, 15 aa, Homo sapiens
  CDR3 for beta chain variable domain of TCR clone 91895 (TRBV28, TRBJ2-1)
CASSIIAGGRSEQFF

SEQ ID NO: 183791 - protein, 13 aa, Homo sapiens
  CDR3 for alpha chain variable domain of TCR clone 91896 (TRAV13-2, TRAJ40)
CAETLPGTYKYIF

SEQ ID NO: 183792 - protein, 16 aa, Homo sapiens
  CDR3 for beta chain variable domain of TCR clone 91896 (TRBV20-1, TRBJ2-1)
CSARDFSGRIGDEQFF

SEQ ID NO: 183793 - protein, 16 aa, Homo sapiens
  CDR3 for alpha chain variable domain of TCR clone 91897 (TRAV17, TRAJ35)
CATAEGGIGFGDVLHC

SEQ ID NO: 183794 - protein, 16 aa, Homo sapiens
  CDR3 for beta chain variable domain of TCR clone 91897 (TRBV6-5, TRBJ2-7)
CASSSDPTSGFYEQYF

SEQ ID NO: 183795 - protein, 14 aa, Homo sapiens
  CDR3 for alpha chain variable domain of TCR clone 91898 (TRAV1-2, TRAJ8)
CAVREDTGFQKLVF

SEQ ID NO: 183796 - protein, 15 aa, Homo sapiens
  CDR3 for beta chain variable domain of TCR clone 91898 (TRBV7-9, TRBJ2-1)
CASSGTGGDYNEQFF

SEQ ID NO: 183797 - protein, 14 aa, Homo sapiens
  CDR3 for alpha chain variable domain of TCR clone 91899 (TRAV13-1, TRAJ35)
CAASKGGFGNVLHC

SEQ ID NO: 183798 - protein, 12 aa, Homo sapiens
  CDR3 for beta chain variable domain of TCR clone 91899 (TRBV14, TRBJ2-7)
CASSRLKGEQYF

SEQ ID NO: 183799 - protein, 18 aa, Homo sapiens
  CDR3 for alpha chain variable domain of TCR clone 91900 (TRAV26-1, TRAJ39)
CCVLLHRQGLEGRQHATF

SEQ ID NO: 183800 - protein, 15 aa, Homo sapiens
  CDR3 for beta chain variable domain of TCR clone 91900 (TRBV7-9, TRBJ1-5)
CASSQGHQPNQPQHF

SEQ ID NO: 183801 - protein, 14 aa, Homo sapiens
  CDR3 for alpha chain variable domain of TCR clone 91901 (TRAV38-1, TRAJ45)
CASHSGGGADGLTF

SEQ ID NO: 183802 - protein, 16 aa, Homo sapiens
  CDR3 for beta chain variable domain of TCR clone 91901 (TRBV7-2, TRBJ1-2)
CASSSNQDRRGHGYTF

SEQ ID NO: 183803 - protein, 12 aa, Homo sapiens
  CDR3 for alpha chain variable domain of TCR clone 91902 (TRAV12-3, TRAJ17)
CAMTLTGNKLTF

SEQ ID NO: 183804 - protein, 13 aa, Homo sapiens
  CDR3 for beta chain variable domain of TCR clone 91902 (TRBV9, TRBJ2-7)
CASSVAEYYEQYF

SEQ ID NO: 183805 - protein, 14 aa, Homo sapiens
  CDR3 for alpha chain variable domain of TCR clone 91903 (TRAV12-3, TRAJ30)
CAMSLLNRDDKIIF

SEQ ID NO: 183806 - protein, 12 aa, Homo sapiens
  CDR3 for beta chain variable domain of TCR clone 91903 (TRBV11-2, TRBJ2-2)
CVSSLGGGELFF

SEQ ID NO: 183807 - protein, 14 aa, Homo sapiens
  CDR3 for alpha chain variable domain of TCR clone 91904 (TRAV23/DV6, TRAJ22)
CAASVSGSARQLTS

SEQ ID NO: 183808 - protein, 16 aa, Homo sapiens
  CDR3 for beta chain variable domain of TCR clone 91904 (TRBV19, TRBJ2-2)
CASSFPGQGLAGELFF

SEQ ID NO: 183809 - protein, 17 aa, Homo sapiens
  CDR3 for alpha chain variable domain of TCR clone 91905 (TRAV3, TRAJ6)
CAVRDGPRAGGSYIPTF

SEQ ID NO: 183810 - protein, 12 aa, Homo sapiens
  CDR3 for beta chain variable domain of TCR clone 91905 (TRBV11-2, TRBJ2-2)
CASSLGGGELFF

SEQ ID NO: 183811 - protein, 15 aa, Homo sapiens
  CDR3 for alpha chain variable domain of TCR clone 91906 (TRAV26-1, TRAJ22)
CIVRVSFWFCKATDL

SEQ ID NO: 183812 - protein, 16 aa, Homo sapiens
  CDR3 for beta chain variable domain of TCR clone 91906 (TRBV7-3, TRBJ2-2)
CASSLKRGTLSGELFF

SEQ ID NO: 183813 - protein, 14 aa, Homo sapiens
  CDR3 for alpha chain variable domain of TCR clone 91907 (TRAV8-3, TRAJ34)
CAVGPPHNTDKLIF

SEQ ID NO: 183814 - protein, 16 aa, Homo sapiens
  CDR3 for beta chain variable domain of TCR clone 91907 (TRBV27, TRBJ2-2)
CASSLRPGGAPGELFF

SEQ ID NO: 183815 - protein, 16 aa, Homo sapiens
  CDR3 for alpha chain variable domain of TCR clone 91908 (TRAV30, TRAJ24)
CGTETVDADSWGKFQF

SEQ ID NO: 183816 - protein, 12 aa, Homo sapiens
  CDR3 for beta chain variable domain of TCR clone 91908 (TRBV11-2, TRBJ2-1)
CASSPGNNEQFF

SEQ ID NO: 183817 - protein, 13 aa, Homo sapiens
  CDR3 for alpha chain variable domain of TCR clone 91909 (TRAV1-2, TRAJ7)
CAGPYYGNNRLAF

SEQ ID NO: 183818 - protein, 16 aa, Homo sapiens
  CDR3 for beta chain variable domain of TCR clone 91909 (TRBV7-3, TRBJ2-3)
CASSPGGGAVTDTQYF

SEQ ID NO: 183819 - protein, 18 aa, Homo sapiens
  CDR3 for alpha chain variable domain of TCR clone 91910 (TRAV1-2, TRAJ28)
CAVRVSAYSGAGSYQLTF

SEQ ID NO: 183820 - protein, 14 aa, Homo sapiens
  CDR3 for beta chain variable domain of TCR clone 91910 (TRBV7-6, TRBJ1-6)
CASSQAGGGSPLHF

SEQ ID NO: 183821 - protein, 10 aa, Homo sapiens
  CDR3 for alpha chain variable domain of TCR clone 91911 (TRAV12-3, TRAJ18)
RAMSAEAQPW

SEQ ID NO: 183822 - protein, 13 aa, Homo sapiens
  CDR3 for beta chain variable domain of TCR clone 91911 (TRBV15, TRBJ1-6)
CATSGGLNSPLHF

SEQ ID NO: 183823 - protein, 10 aa, Homo sapiens
  CDR3 for alpha chain variable domain of TCR clone 91912 (TRAV30, TRAJ48)
CGIGNEKLTF

SEQ ID NO: 183824 - protein, 14 aa, Homo sapiens
  CDR3 for beta chain variable domain of TCR clone 91912 (TRBV7-6, TRBJ2-3)
CASGVAGGTDTQYF

SEQ ID NO: 183825 - protein, 14 aa, Homo sapiens
  CDR3 for alpha chain variable domain of TCR clone 91913 (TRAV1-2, TRAJ16)
CAVNRFSDGQKLLF

SEQ ID NO: 183826 - protein, 15 aa, Homo sapiens
  CDR3 for beta chain variable domain of TCR clone 91913 (TRBV12-4, TRBJ1-1)
CQQQDRVVANTEAFF

SEQ ID NO: 183827 - protein, 14 aa, Homo sapiens
  CDR3 for alpha chain variable domain of TCR clone 91914 (TRAV1-2, TRAJ8)
CSVREDTGFQKLVF

SEQ ID NO: 183828 - protein, 12 aa, Homo sapiens
  CDR3 for beta chain variable domain of TCR clone 91914 (TRBV2, TRBJ2-1)
CAYGPPGNEQFF

SEQ ID NO: 183829 - protein, 12 aa, Homo sapiens
  CDR3 for alpha chain variable domain of TCR clone 91915 (TRAV20, TRAJ54)
CAVQEGAQKLVF

SEQ ID NO: 183830 - protein, 17 aa, Homo sapiens
  CDR3 for beta chain variable domain of TCR clone 91915 (TRBV13, TRBJ2-3)
CASSLSGVAGGRNTQYF

SEQ ID NO: 183831 - protein, 10 aa, Homo sapiens
  CDR3 for alpha chain variable domain of TCR clone 91916 (TRAV2, TRAJ34)
CAVVNVKLIF

SEQ ID NO: 183832 - protein, 15 aa, Homo sapiens
  CDR3 for beta chain variable domain of TCR clone 91916 (TRBV3-1, TRBJ2-2)
CASSQDWTRAGELFF

SEQ ID NO: 183833 - protein, 14 aa, Homo sapiens
  CDR3 for alpha chain variable domain of TCR clone 91917 (TRAV12-1, TRAJ30)
CVVNIGGRDDKIIF

SEQ ID NO: 183834 - protein, 20 aa, Homo sapiens
  CDR3 for beta chain variable domain of TCR clone 91917 (TRBV3-1, TRBJ2-6)
CASSPRPGLEGGAGANVLTF

SEQ ID NO: 183835 - protein, 18 aa, Homo sapiens
  CDR3 for alpha chain variable domain of TCR clone 91918 (TRAV13-2, TRAJ20)
CSYSTWRLSCLLVHKLSF

SEQ ID NO: 183836 - protein, 13 aa, Homo sapiens
  CDR3 for beta chain variable domain of TCR clone 91918 (TRBV5-1, TRBJ2-1)
CASRPFGYNEQFF

SEQ ID NO: 183837 - protein, 11 aa, Homo sapiens
  CDR3 for alpha chain variable domain of TCR clone 91919 (TRAV1-2, TRAJ20)
CAVANDYKLSF

SEQ ID NO: 183838 - protein, 20 aa, Homo sapiens
  CDR3 for beta chain variable domain of TCR clone 91919 (TRBV28, TRBJ2-1)
CASTPIGRSPGLAGGNEQFF

SEQ ID NO: 183839 - protein, 14 aa, Homo sapiens
  CDR3 for alpha chain variable domain of TCR clone 91920 (TRAV8-1, TRAJ5)
CAVRTDTGRRALTF

SEQ ID NO: 183840 - protein, 13 aa, Homo sapiens
  CDR3 for beta chain variable domain of TCR clone 91920 (TRBV7-3, TRBJ1-1)
CAGSQDWGAEAFF

SEQ ID NO: 183841 - protein, 15 aa, Homo sapiens
  CDR3 for alpha chain variable domain of TCR clone 91921 (TRAV26-1, TRAJ22)
CIVRVSFWFCKATDL

SEQ ID NO: 183842 - protein, 18 aa, Homo sapiens
  CDR3 for beta chain variable domain of TCR clone 91921 (TRBV25-1, TRBJ1-2)
CASSGLQNGQGLIFGYTF

SEQ ID NO: 183843 - protein, 16 aa, Homo sapiens
  CDR3 for alpha chain variable domain of TCR clone 91922 (TRAV8-3, TRAJ22)
CAVDLLGPGSARQLTF

SEQ ID NO: 183844 - protein, 17 aa, Homo sapiens
  CDR3 for beta chain variable domain of TCR clone 91922 (TRBV13, TRBJ2-3)
CASSLSRVAGGRNTQYF

SEQ ID NO: 183845 - protein, 12 aa, Homo sapiens
  CDR3 for alpha chain variable domain of TCR clone 91923 (TRAV13-1, TRAJ15)
CAASQAGTALIF

SEQ ID NO: 183846 - protein, 14 aa, Homo sapiens
  CDR3 for beta chain variable domain of TCR clone 91923 (TRBV19, TRBJ2-2)
RASSTPHRSGELFF

SEQ ID NO: 183847 - protein, 16 aa, Homo sapiens
  CDR3 for alpha chain variable domain of TCR clone 91924 (TRAV30, TRAJ24)
CVTEIVDADSWGKFQF

SEQ ID NO: 183848 - protein, 14 aa, Homo sapiens
  CDR3 for beta chain variable domain of TCR clone 91924 (TRBV12-5, TRBJ2-5)
CASGSRTHQGTQYF

SEQ ID NO: 183849 - protein, 12 aa, Homo sapiens
  CDR3 for alpha chain variable domain of TCR clone 91925 (TRAV8-3, TRAJ7)
CAVEGGNNRLAF

SEQ ID NO: 183850 - protein, 15 aa, Homo sapiens
  CDR3 for beta chain variable domain of TCR clone 91925 (TRBV10-3, TRBJ2-1)
CAIRDVQDRAYEQFF

SEQ ID NO: 183851 - protein, 13 aa, Homo sapiens
  CDR3 for alpha chain variable domain of TCR clone 91926 (TRAV12-1, TRAJ26)
SATYLYYGQNFGF

SEQ ID NO: 183852 - protein, 15 aa, Homo sapiens
  CDR3 for beta chain variable domain of TCR clone 91926 (TRBV5-1, TRBJ2-6)
CASSLDPSGANVLTF

SEQ ID NO: 183853 - protein, 14 aa, Homo sapiens
  CDR3 for alpha chain variable domain of TCR clone 91927 (TRAV9-2, TRAJ39)
CALYIYNAGNMLTF

SEQ ID NO: 183854 - protein, 13 aa, Homo sapiens
  CDR3 for beta chain variable domain of TCR clone 91927 (TRBV4-1, TRBJ2-7)
CASSQQATYEQYF

SEQ ID NO: 183855 - protein, 14 aa, Homo sapiens
  CDR3 for alpha chain variable domain of TCR clone 91928 (TRAV1-1, TRAJ27)
CAVIYNTNAGKSTF

SEQ ID NO: 183856 - protein, 15 aa, Homo sapiens
  CDR3 for beta chain variable domain of TCR clone 91928 (TRBV7-2, TRBJ2-1)
CASSSGLAGGYEQFF

SEQ ID NO: 183857 - protein, 14 aa, Homo sapiens
  CDR3 for alpha chain variable domain of TCR clone 91929 (TRAV1-2, TRAJ15)
CAGRDRQAGTALIF

SEQ ID NO: 183858 - protein, 17 aa, Homo sapiens
  CDR3 for beta chain variable domain of TCR clone 91929 (TRBV5-5, TRBJ1-2)
CASSLGSLDGQSEGYTF

SEQ ID NO: 183859 - protein, 18 aa, Homo sapiens
  CDR3 for alpha chain variable domain of TCR clone 91930 (TRAV13-1, TRAJ52)
CAASKRSAGGTSYGKLTF

SEQ ID NO: 183860 - protein, 12 aa, Homo sapiens
  CDR3 for beta chain variable domain of TCR clone 91930 (TRBV7-8, TRBJ2-1)
CASTDRDNEQFF

SEQ ID NO: 183861 - protein, 11 aa, Homo sapiens
  CDR3 for alpha chain variable domain of TCR clone 91931 (TRAV21, TRAJ34)
CAHYNTDKLIF

SEQ ID NO: 183862 - protein, 13 aa, Homo sapiens
  CDR3 for beta chain variable domain of TCR clone 91931 (TRBV20-1, TRBJ2-7)
CSAEPGATYEQYF

SEQ ID NO: 183863 - protein, 19 aa, Homo sapiens
  CDR3 for alpha chain variable domain of TCR clone 91932 (TRAV1-1, TRAJ30)
CAGSEMTRSSLEKGHDFIF

SEQ ID NO: 183864 - protein, 14 aa, Homo sapiens
  CDR3 for beta chain variable domain of TCR clone 91932 (TRBV11-3, TRBJ1-6)
RASSFSGGDSPLHF

SEQ ID NO: 183865 - protein, 17 aa, Homo sapiens
  CDR3 for alpha chain variable domain of TCR clone 91933 (TRAV3, TRAJ6)
CAVRGGPRAGGSYIPTF

SEQ ID NO: 183866 - protein, 17 aa, Homo sapiens
  CDR3 for beta chain variable domain of TCR clone 91933 (TRBV20-1, TRBJ2-1)
CSAPPRLAGTRYNEQFF

SEQ ID NO: 183867 - protein, 13 aa, Homo sapiens
  CDR3 for alpha chain variable domain of TCR clone 91934 (TRAV29/DV5, TRAJ31)
CAASRNNNARLIF

SEQ ID NO: 183868 - protein, 20 aa, Homo sapiens
  CDR3 for beta chain variable domain of TCR clone 91934 (TRBV19, TRBJ2-1)
CASSISRTVTSTRLNNEQFF

SEQ ID NO: 183869 - protein, 14 aa, Homo sapiens
  CDR3 for alpha chain variable domain of TCR clone 91935 (TRAV8-1, TRAJ48)
CAVNAGFGNEKLTL

SEQ ID NO: 183870 - protein, 15 aa, Homo sapiens
  CDR3 for beta chain variable domain of TCR clone 91935 (TRBV9, TRBJ1-6)
CASSVAGTGDSPLHF

SEQ ID NO: 183871 - protein, 14 aa, Homo sapiens
  CDR3 for alpha chain variable domain of TCR clone 91936 (TRAV12-2, TRAJ5)
CAVNRSTGRRALTF

SEQ ID NO: 183872 - protein, 12 aa, Homo sapiens
  CDR3 for beta chain variable domain of TCR clone 91936 (TRBV18, TRBJ1-1)
CASSPGGTEAFF

SEQ ID NO: 183873 - protein, 14 aa, Homo sapiens
  CDR3 for alpha chain variable domain of TCR clone 91937 (TRAV2, TRAJ37)
CAVDFTSNTGKLIF

SEQ ID NO: 183874 - protein, 15 aa, Homo sapiens
  CDR3 for beta chain variable domain of TCR clone 91937 (TRBV9, TRBJ2-1)
CASSLAGSSYNEQFF

SEQ ID NO: 183875 - protein, 14 aa, Homo sapiens
  CDR3 for alpha chain variable domain of TCR clone 91938 (TRAV12-1, TRAJ13)
CVVIDSGGYQKVTF

SEQ ID NO: 183876 - protein, 13 aa, Homo sapiens
  CDR3 for beta chain variable domain of TCR clone 91938 (TRBV7-9, TRBJ1-2)
CASSLKQNYGYTF

SEQ ID NO: 183877 - protein, 14 aa, Homo sapiens
  CDR3 for alpha chain variable domain of TCR clone 91939 (TRAV1-1, TRAJ30)
CAVRSLNRDDKITF

SEQ ID NO: 183878 - protein, 14 aa, Homo sapiens
  CDR3 for beta chain variable domain of TCR clone 91939 (TRBV7-8, TRBJ2-3)
CASSLEAGTDTQYF

SEQ ID NO: 183879 - protein, 15 aa, Homo sapiens
  CDR3 for alpha chain variable domain of TCR clone 91940 (TRAV13-1, TRAJ44)
CAASRGGGTASKLTF

SEQ ID NO: 183880 - protein, 15 aa, Homo sapiens
  CDR3 for beta chain variable domain of TCR clone 91940 (TRBV4-1, TRBJ1-4)
CASSDTGGTNEKLFF

SEQ ID NO: 183881 - protein, 19 aa, Homo sapiens
  CDR3 for alpha chain variable domain of TCR clone 91941 (TRAV8-3, TRAJ8)
LSTSVLWDPMNTGFQKLVF

SEQ ID NO: 183882 - protein, 18 aa, Homo sapiens
  CDR3 for beta chain variable domain of TCR clone 91941 (TRBV7-6, TRBJ2-1)
CASSPRTSGMSSYNEQFF

SEQ ID NO: 183883 - protein, 18 aa, Homo sapiens
  CDR3 for alpha chain variable domain of TCR clone 91942 (TRAV26-1, TRAJ23)
CIVRVGLEVWNQGGKLIF

SEQ ID NO: 183884 - protein, 13 aa, Homo sapiens
  CDR3 for beta chain variable domain of TCR clone 91942 (TRBV20-1, TRBJ1-1)
CSAGTVGNTEAFF

SEQ ID NO: 183885 - protein, 13 aa, Homo sapiens
  CDR3 for alpha chain variable domain of TCR clone 91943 (TRAV27, TRAJ6)
CAGGTRGSYIPTF

SEQ ID NO: 183886 - protein, 13 aa, Homo sapiens
  CDR3 for beta chain variable domain of TCR clone 91943 (TRBV10-3, TRBJ2-7)
CASKLAVNYEQYF

SEQ ID NO: 183887 - protein, 14 aa, Homo sapiens
  CDR3 for alpha chain variable domain of TCR clone 91944 (TRAV8-4, TRAJ38)
CARLNAGNNRKLIW

SEQ ID NO: 183888 - protein, 12 aa, Homo sapiens
  CDR3 for beta chain variable domain of TCR clone 91944 (TRBV6-1, TRBJ2-7)
CASSEPLHEQYF

SEQ ID NO: 183889 - protein, 13 aa, Homo sapiens
  CDR3 for alpha chain variable domain of TCR clone 91945 (TRAV12-2, TRAJ31)
CAVKADNNARLMF

SEQ ID NO: 183890 - protein, 15 aa, Homo sapiens
  CDR3 for beta chain variable domain of TCR clone 91945 (TRBV15, TRBJ1-5)
CATSREQGGNQPQHF

SEQ ID NO: 183891 - protein, 14 aa, Homo sapiens
  CDR3 for alpha chain variable domain of TCR clone 91946 (TRAV8-1, TRAJ5)
CAVRTDTGRRALTF

SEQ ID NO: 183892 - protein, 14 aa, Homo sapiens
  CDR3 for beta chain variable domain of TCR clone 91946 (TRBV7-6, TRBJ2-3)
CASSLGTVTDTQYF

SEQ ID NO: 183893 - protein, 13 aa, Homo sapiens
  CDR3 for alpha chain variable domain of TCR clone 91947 (TRAV13-1, TRAJ21)
CAASIYNFNKFYF

SEQ ID NO: 183894 - protein, 16 aa, Homo sapiens
  CDR3 for beta chain variable domain of TCR clone 91947 (TRBV7-3, TRBJ2-3)
CASSLSGYRPEDTQYF

SEQ ID NO: 183895 - protein, 15 aa, Homo sapiens
  CDR3 for alpha chain variable domain of TCR clone 91948 (TRAV26-1, TRAJ15)
CIVRMANQEGTALIF

SEQ ID NO: 183896 - protein, 15 aa, Homo sapiens
  CDR3 for beta chain variable domain of TCR clone 91948 (TRBV20-1, TRBJ1-1)
CSARKAETSNTEAFF

SEQ ID NO: 183897 - protein, 13 aa, Homo sapiens
  CDR3 for alpha chain variable domain of TCR clone 91949 (TRAV2, TRAJ9)
CAVESTGGFKTIF

SEQ ID NO: 183898 - protein, 15 aa, Homo sapiens
  CDR3 for beta chain variable domain of TCR clone 91949 (TRBV10-3, TRBJ2-1)
CATTFGGGTDNEQFF

SEQ ID NO: 183899 - protein, 14 aa, Homo sapiens
  CDR3 for alpha chain variable domain of TCR clone 91950 (TRAV12-1, TRAJ17)
CVVNYKTAGNKLTF

SEQ ID NO: 183900 - protein, 14 aa, Homo sapiens
  CDR3 for beta chain variable domain of TCR clone 91950 (TRBV4-1, TRBJ2-2)
CASSQAVNTGELFF

SEQ ID NO: 183901 - protein, 16 aa, Homo sapiens
  CDR3 for alpha chain variable domain of TCR clone 91951 (TRAV8-3, TRAJ8)
CAVPRDGNTGFQKLVF

SEQ ID NO: 183902 - protein, 14 aa, Homo sapiens
  CDR3 for beta chain variable domain of TCR clone 91951 (TRBV7-2, TRBJ2-7)
CASRSQGAAYEQYF

SEQ ID NO: 183903 - protein, 11 aa, Homo sapiens
  CDR3 for alpha chain variable domain of TCR clone 91952 (TRAV3, TRAJ13)
CAVASYQKVTF

SEQ ID NO: 183904 - protein, 15 aa, Homo sapiens
  CDR3 for beta chain variable domain of TCR clone 91952 (TRBV7-9, TRBJ2-7)
CASSSSGLAVYEQYF

SEQ ID NO: 183905 - protein, 14 aa, Homo sapiens
  CDR3 for alpha chain variable domain of TCR clone 91953 (TRAV1-2, TRAJ8)
CAVREDTGFQKLVF

SEQ ID NO: 183906 - protein, 15 aa, Homo sapiens
  CDR3 for beta chain variable domain of TCR clone 91953 (TRBV6-5, TRBJ1-6)
CASSLGQGFRSPLHF

SEQ ID NO: 183907 - protein, 14 aa, Homo sapiens
  CDR3 for alpha chain variable domain of TCR clone 91954 (TRAV12-2, TRAJ4)
CAEDLSGGYNKLIL

SEQ ID NO: 183908 - protein, 13 aa, Homo sapiens
  CDR3 for beta chain variable domain of TCR clone 91954 (TRBV7-9, TRBJ1-2)
RASSLKQNYGYTF

SEQ ID NO: 183909 - protein, 14 aa, Homo sapiens
  CDR3 for alpha chain variable domain of TCR clone 91955 (TRAV1-2, TRAJ16)
CAVNRFSDGQKLLF

SEQ ID NO: 183910 - protein, 13 aa, Homo sapiens
  CDR3 for beta chain variable domain of TCR clone 91955 (TRBV20-1, TRBJ1-1)
CSARGGWNTEAFF

SEQ ID NO: 183911 - protein, 13 aa, Homo sapiens
  CDR3 for alpha chain variable domain of TCR clone 91956 (TRAV8-3, TRAJ20)
CAVGRPSDYKLSF

SEQ ID NO: 183912 - protein, 14 aa, Homo sapiens
  CDR3 for beta chain variable domain of TCR clone 91956 (TRBV12-5, TRBJ2-5)
CASGSRTHQETQYF

SEQ ID NO: 183913 - protein, 13 aa, Homo sapiens
  CDR3 for alpha chain variable domain of TCR clone 91957 (TRAV13-1, TRAJ21)
CAASIYNFNKFYF

SEQ ID NO: 183914 - protein, 16 aa, Homo sapiens
  CDR3 for beta chain variable domain of TCR clone 91957 (TRBV2, TRBJ2-3)
CASSTSVEGVTDTQYF

SEQ ID NO: 183915 - protein, 14 aa, Homo sapiens
  CDR3 for alpha chain variable domain of TCR clone 91958 (TRAV1-2, TRAJ16)
CAVKRFSDGQKLLF

SEQ ID NO: 183916 - protein, 14 aa, Homo sapiens
  CDR3 for beta chain variable domain of TCR clone 91958 (TRBV7-3, TRBJ2-1)
CASSLAGGTNEQFF

SEQ ID NO: 183917 - protein, 15 aa, Homo sapiens
  CDR3 for alpha chain variable domain of TCR clone 91959 (TRAV12-3, TRAJ6)
CAMSATTGGSYIPTF

SEQ ID NO: 183918 - protein, 15 aa, Homo sapiens
  CDR3 for beta chain variable domain of TCR clone 91959 (TRBV5-1, TRBJ2-7)
CASSLNGGPAREQYF

SEQ ID NO: 183919 - protein, 15 aa, Homo sapiens
  CDR3 for alpha chain variable domain of TCR clone 91960 (TRAV8-4, TRAJ3)
CAVTGENLVQQCFQD

SEQ ID NO: 183920 - protein, 16 aa, Homo sapiens
  CDR3 for beta chain variable domain of TCR clone 91960 (TRBV4-3, TRBJ2-2)
CASSHLQGSGTGELFF

SEQ ID NO: 183921 - protein, 14 aa, Homo sapiens
  CDR3 for alpha chain variable domain of TCR clone 91961 (TRAV14/DV4, TRAJ15)
CAMRRDQAGTALIF

SEQ ID NO: 183922 - protein, 13 aa, Homo sapiens
  CDR3 for beta chain variable domain of TCR clone 91961 (TRBV20-1, TRBJ1-1)
CSPRGGGNTEAFF

SEQ ID NO: 183923 - protein, 13 aa, Homo sapiens
  CDR3 for alpha chain variable domain of TCR clone 91962 (TRAV10, TRAJ40)
CVVSALGTYKYIF

SEQ ID NO: 183924 - protein, 13 aa, Homo sapiens
  CDR3 for beta chain variable domain of TCR clone 91962 (TRBV20-1, TRBJ2-3)
CSARRAGTDTQYF

SEQ ID NO: 183925 - protein, 12 aa, Homo sapiens
  CDR3 for alpha chain variable domain of TCR clone 91963 (TRAV8-3, TRAJ20)
CAVVANDYKLSF

SEQ ID NO: 183926 - protein, 16 aa, Homo sapiens
  CDR3 for beta chain variable domain of TCR clone 91963 (TRBV19, TRBJ2-2)
CASRPPGTGATGELFF

SEQ ID NO: 183927 - protein, 11 aa, Homo sapiens
  CDR3 for alpha chain variable domain of TCR clone 91964 (TRAV12-1, TRAJ30)
CVVNGQDQIIF

SEQ ID NO: 183928 - protein, 12 aa, Homo sapiens
  CDR3 for beta chain variable domain of TCR clone 91964 (TRBV27, TRBJ2-2)
CASKLFTGELFF

SEQ ID NO: 183929 - protein, 14 aa, Homo sapiens
  CDR3 for alpha chain variable domain of TCR clone 91965 (TRAV35, TRAJ33)
CAGSSQDNNYQLIW

SEQ ID NO: 183930 - protein, 15 aa, Homo sapiens
  CDR3 for beta chain variable domain of TCR clone 91965 (TRBV20-1, TRBJ2-7)
CSAESGTSGAYEQYF

SEQ ID NO: 183931 - protein, 18 aa, Homo sapiens
  CDR3 for alpha chain variable domain of TCR clone 91966 (TRAV13-1, TRAJ52)
CAAKNPNAGGTSYGKLTF

SEQ ID NO: 183932 - protein, 13 aa, Homo sapiens
  CDR3 for beta chain variable domain of TCR clone 91966 (TRBV7-9, TRBJ2-5)
CASLPSGRETQYF

SEQ ID NO: 183933 - protein, 12 aa, Homo sapiens
  CDR3 for alpha chain variable domain of TCR clone 91967 (TRAV12-2, TRAJ10)
WGVTGGGNKLTF

SEQ ID NO: 183934 - protein, 16 aa, Homo sapiens
  CDR3 for beta chain variable domain of TCR clone 91967 (TRBV5-4, TRBJ2-3)
CASQQPGAGGADTQYF

SEQ ID NO: 183935 - protein, 13 aa, Homo sapiens
  CDR3 for alpha chain variable domain of TCR clone 91968 (TRAV17, TRAJ29)
CATGPSGNTPLVF

SEQ ID NO: 183936 - protein, 14 aa, Homo sapiens
  CDR3 for beta chain variable domain of TCR clone 91968 (TRBV2, TRBJ1-6)
CASEVSSYNSTLHF

SEQ ID NO: 183937 - protein, 12 aa, Homo sapiens
  CDR3 for alpha chain variable domain of TCR clone 91969 (TRAV13-1, TRAJ49)
CAASLMGNQFYF

SEQ ID NO: 183938 - protein, 13 aa, Homo sapiens
  CDR3 for beta chain variable domain of TCR clone 91969 (TRBV20-1, TRBJ2-2)
CSASAAGTGELFF

SEQ ID NO: 183939 - protein, 12 aa, Homo sapiens
  CDR3 for alpha chain variable domain of TCR clone 91970 (TRAV13-1, TRAJ21)
CAAKEGLNKFYF

SEQ ID NO: 183940 - protein, 14 aa, Homo sapiens
  CDR3 for beta chain variable domain of TCR clone 91970 (TRBV5-4, TRBJ1-1)
CASILDSRRDEAFF

SEQ ID NO: 183941 - protein, 13 aa, Homo sapiens
  CDR3 for alpha chain variable domain of TCR clone 91971 (TRAV13-1, TRAJ20)
CAARVSNDYKLSF

SEQ ID NO: 183942 - protein, 15 aa, Homo sapiens
  CDR3 for beta chain variable domain of TCR clone 91971 (TRBV28, TRBJ1-1)
CASRIKGGLNTEAFF

SEQ ID NO: 183943 - protein, 15 aa, Homo sapiens
  CDR3 for alpha chain variable domain of TCR clone 91972 (TRAV2, TRAJ15)
CAVEDREQAGTALIL

SEQ ID NO: 183944 - protein, 13 aa, Homo sapiens
  CDR3 for beta chain variable domain of TCR clone 91972 (TRBV10-2, TRBJ2-7)
CASGTSGGYEQYF

SEQ ID NO: 183945 - protein, 15 aa, Homo sapiens
  CDR3 for alpha chain variable domain of TCR clone 91973 (TRAV1-1, TRAJ23)
CLLLLRCAQGGKLIF

SEQ ID NO: 183946 - protein, 20 aa, Homo sapiens
  CDR3 for beta chain variable domain of TCR clone 91973 (TRBV7-8, TRBJ2-2)
CASSHLFPGPTIHITGELFF

SEQ ID NO: 183947 - protein, 12 aa, Homo sapiens
  CDR3 for alpha chain variable domain of TCR clone 91974 (TRAV26-2, TRAJ47)
CILVEYGNKLVF

SEQ ID NO: 183948 - protein, 16 aa, Homo sapiens
  CDR3 for beta chain variable domain of TCR clone 91974 (TRBV18, TRBJ1-4)
CASSPLVGDRAGKLFF

SEQ ID NO: 183949 - protein, 15 aa, Homo sapiens
  CDR3 for alpha chain variable domain of TCR clone 91975 (TRAV23/DV6, TRAJ18)
CAARYRGSTLGRLYF

SEQ ID NO: 183950 - protein, 18 aa, Homo sapiens
  CDR3 for beta chain variable domain of TCR clone 91975 (TRBV11-2, TRBJ2-7)
CASSPRGVAGFLIYEQYF

SEQ ID NO: 183951 - protein, 12 aa, Homo sapiens
  CDR3 for alpha chain variable domain of TCR clone 91976 (TRAV36/DV7, TRAJ26)
CAVDNYGQNFVF

SEQ ID NO: 183952 - protein, 11 aa, Homo sapiens
  CDR3 for beta chain variable domain of TCR clone 91976 (TRBV29-1, TRBJ2-5)
CSEDRTGTQYF

SEQ ID NO: 183953 - protein, 12 aa, Homo sapiens
  CDR3 for alpha chain variable domain of TCR clone 91977 (TRAV2, TRAJ34)
CAVERNTDKLIF

SEQ ID NO: 183954 - protein, 14 aa, Homo sapiens
  CDR3 for beta chain variable domain of TCR clone 91977 (TRBV7-9, TRBJ2-1)
CASSDNTGYNEQFF

SEQ ID NO: 183955 - protein, 12 aa, Homo sapiens
  CDR3 for alpha chain variable domain of TCR clone 91978 (TRAV26-1, TRAJ26)
CIVYNYGQSFVF

SEQ ID NO: 183956 - protein, 15 aa, Homo sapiens
  CDR3 for beta chain variable domain of TCR clone 91978 (TRBV7-2, TRBJ2-3)
CASSLRGGSTDTQYF

SEQ ID NO: 183957 - protein, 12 aa, Homo sapiens
  CDR3 for alpha chain variable domain of TCR clone 91979 (TRAV4, TRAJ26)
CLVGDYGQNFGF

SEQ ID NO: 183958 - protein, 16 aa, Homo sapiens
  CDR3 for beta chain variable domain of TCR clone 91979 (TRBV7-2, TRBJ1-2)
CASSSNQDRRGHGYTF

SEQ ID NO: 183959 - protein, 15 aa, Homo sapiens
  CDR3 for alpha chain variable domain of TCR clone 91980 (TRAV1-2, TRAJ30)
CAVRPHGNRDDKIIF

SEQ ID NO: 183960 - protein, 13 aa, Homo sapiens
  CDR3 for beta chain variable domain of TCR clone 91980 (TRBV4-2, TRBJ1-1)
CASSQAGNTEAFF

SEQ ID NO: 183961 - protein, 12 aa, Homo sapiens
  CDR3 for alpha chain variable domain of TCR clone 91981 (TRAV12-2, TRAJ10)
WGVTGGGNKLTF

SEQ ID NO: 183962 - protein, 17 aa, Homo sapiens
  CDR3 for beta chain variable domain of TCR clone 91981 (TRBV13, TRBJ2-3)
CASSISRVAGGRNTQYF

SEQ ID NO: 183963 - protein, 13 aa, Homo sapiens
  CDR3 for alpha chain variable domain of TCR clone 91982 (TRAV13-1, TRAJ5)
CAASDTGRRALTF

SEQ ID NO: 183964 - protein, 12 aa, Homo sapiens
  CDR3 for beta chain variable domain of TCR clone 91982 (TRBV28, TRBJ2-3)
SASSLYRDTQYF

SEQ ID NO: 183965 - protein, 15 aa, Homo sapiens
  CDR3 for alpha chain variable domain of TCR clone 91983 (TRAV3, TRAJ45)
CAVRTPWGGADGLTF

SEQ ID NO: 183966 - protein, 16 aa, Homo sapiens
  CDR3 for beta chain variable domain of TCR clone 91983 (TRBV6-1, TRBJ2-2)
CASSFGQGANTGELIF

SEQ ID NO: 183967 - protein, 18 aa, Homo sapiens
  CDR3 for alpha chain variable domain of TCR clone 91984 (TRAV26-1, TRAJ27)
CIVRPSFNYNTNAGKSTF

SEQ ID NO: 183968 - protein, 14 aa, Homo sapiens
  CDR3 for beta chain variable domain of TCR clone 91984 (TRBV27, TRBJ1-1)
CASSPQGKRAEAFF

SEQ ID NO: 183969 - protein, 14 aa, Homo sapiens
  CDR3 for alpha chain variable domain of TCR clone 91985 (TRAV12-2, TRAJ45)
CAVNIGGGADGLTF

SEQ ID NO: 183970 - protein, 17 aa, Homo sapiens
  CDR3 for beta chain variable domain of TCR clone 91985 (TRBV20-1, TRBJ2-2)
CSASGSGQGELTGELFF

SEQ ID NO: 183971 - protein, 14 aa, Homo sapiens
  CDR3 for alpha chain variable domain of TCR clone 91986 (TRAV4, TRAJ6)
CLAGEAGGSYIPTF

SEQ ID NO: 183972 - protein, 16 aa, Homo sapiens
  CDR3 for beta chain variable domain of TCR clone 91986 (TRBV7-6, TRBJ2-1)
CASSLNEGPSYNEQFF

SEQ ID NO: 183973 - protein, 13 aa, Homo sapiens
  CDR3 for alpha chain variable domain of TCR clone 91987 (TRAV3, TRAJ21)
CAVREPDFNKFYF

SEQ ID NO: 183974 - protein, 13 aa, Homo sapiens
  CDR3 for beta chain variable domain of TCR clone 91987 (TRBV7-9, TRBJ2-7)
CASSFAGAYEQYF

SEQ ID NO: 183975 - protein, 13 aa, Homo sapiens
  CDR3 for alpha chain variable domain of TCR clone 91988 (TRAV1-2, TRAJ9)
CAALSTGGFKTIF

SEQ ID NO: 183976 - protein, 13 aa, Homo sapiens
  CDR3 for beta chain variable domain of TCR clone 91988 (TRBV4-1, TRBJ2-1)
CASSQEVQYEQFF

SEQ ID NO: 183977 - protein, 14 aa, Homo sapiens
  CDR3 for alpha chain variable domain of TCR clone 91989 (TRAV12-2, TRAJ44)
CAVNPAGTASTLTF

SEQ ID NO: 183978 - protein, 13 aa, Homo sapiens
  CDR3 for beta chain variable domain of TCR clone 91989 (TRBV20-1, TRBJ1-6)
CSAPLGVGSPLHF

SEQ ID NO: 183979 - protein, 13 aa, Homo sapiens
  CDR3 for alpha chain variable domain of TCR clone 91990 (TRAV13-1, TRAJ43)
CAASLSNNNDTRF

SEQ ID NO: 183980 - protein, 14 aa, Homo sapiens
  CDR3 for beta chain variable domain of TCR clone 91990 (TRBV5-1, TRBJ2-5)
CASSLAGKQETQYF

SEQ ID NO: 183981 - protein, 11 aa, Homo sapiens
  CDR3 for alpha chain variable domain of TCR clone 91991 (TRAV35, TRAJ34)
CWARNTDKLIF

SEQ ID NO: 183982 - protein, 13 aa, Homo sapiens
  CDR3 for beta chain variable domain of TCR clone 91991 (TRBV19, TRBJ2-7)
CASSIDRTYEQYV

SEQ ID NO: 183983 - protein, 13 aa, Homo sapiens
  CDR3 for alpha chain variable domain of TCR clone 91992 (TRAV8-2, TRAJ13)
CVVSDLRYQKFTF

SEQ ID NO: 183984 - protein, 14 aa, Homo sapiens
  CDR3 for beta chain variable domain of TCR clone 91992 (TRBV25-1, TRBJ1-1)
CASTHLGGNTEAFF

SEQ ID NO: 183985 - protein, 14 aa, Homo sapiens
  CDR3 for alpha chain variable domain of TCR clone 91993 (TRAV27, TRAJ13)
CRSSNSGGYQKVTF

SEQ ID NO: 183986 - protein, 14 aa, Homo sapiens
  CDR3 for beta chain variable domain of TCR clone 91993 (TRBV7-6, TRBJ2-1)
CASSWGGGADEQFF

SEQ ID NO: 183987 - protein, 14 aa, Homo sapiens
  CDR3 for alpha chain variable domain of TCR clone 91994 (TRAV12-3, TRAJ54)
CAMRGIQGAQKLVF

SEQ ID NO: 183988 - protein, 13 aa, Homo sapiens
  CDR3 for beta chain variable domain of TCR clone 91994 (TRBV7-9, TRBJ1-2)
CASSLKQNYGYTF

SEQ ID NO: 183989 - protein, 13 aa, Homo sapiens
  CDR3 for alpha chain variable domain of TCR clone 91995 (TRAV12-3, TRAJ43)
CAMIRPNNNDMPF

SEQ ID NO: 183990 - protein, 12 aa, Homo sapiens
  CDR3 for beta chain variable domain of TCR clone 91995 (TRBV11-2, TRBJ2-5)
CASSLGQETQYF

SEQ ID NO: 183991 - protein, 14 aa, Homo sapiens
  CDR3 for alpha chain variable domain of TCR clone 91996 (TRAV8-3, TRAJ6)
CAVSSSGGSYIPTF

SEQ ID NO: 183992 - protein, 16 aa, Homo sapiens
  CDR3 for beta chain variable domain of TCR clone 91996 (TRBV7-9, TRBJ2-7)
CASSYPDREGGYEQYF

SEQ ID NO: 183993 - protein, 16 aa, Homo sapiens
  CDR3 for alpha chain variable domain of TCR clone 91997 (TRAV3, TRAJ37)
CAVRPHGSGNTGKLIF

SEQ ID NO: 183994 - protein, 15 aa, Homo sapiens
  CDR3 for beta chain variable domain of TCR clone 91997 (TRBV5-4, TRBJ1-1)
CASSSLGWANTEAFF

SEQ ID NO: 183995 - protein, 14 aa, Homo sapiens
  CDR3 for alpha chain variable domain of TCR clone 91998 (TRAV13-1, TRAJ9)
CAASALTGGFKTIF

SEQ ID NO: 183996 - protein, 16 aa, Homo sapiens
  CDR3 for beta chain variable domain of TCR clone 91998 (TRBV20-1, TRBJ1-2)
CSASMGQGVANYGYTF

SEQ ID NO: 183997 - protein, 12 aa, Homo sapiens
  CDR3 for alpha chain variable domain of TCR clone 91999 (TRAV35, TRAJ49)
CAGWNTGNQFYF

SEQ ID NO: 183998 - protein, 15 aa, Homo sapiens
  CDR3 for beta chain variable domain of TCR clone 91999 (TRBV27, TRBJ1-5)
CASSLRTGFDQPQHF

SEQ ID NO: 183999 - protein, 12 aa, Homo sapiens
  CDR3 for alpha chain variable domain of TCR clone 92000 (TRAV2, TRAJ9)
CAVGAGGFKTIF

SEQ ID NO: 184000 - protein, 13 aa, Homo sapiens
  CDR3 for beta chain variable domain of TCR clone 92000 (TRBV15, TRBJ1-6)
CATSGGLNSPLHF

SEQ ID NO: 184001 - protein, 12 aa, Homo sapiens
  CDR3 for alpha chain variable domain of TCR clone 92001 (TRAV12-2, TRAJ20)
CAVNRNDYKLSF

SEQ ID NO: 184002 - protein, 17 aa, Homo sapiens
  CDR3 for beta chain variable domain of TCR clone 92001 (TRBV7-8, TRBJ2-6)
CASSAGTGGAGANVLTF

SEQ ID NO: 184003 - protein, 10 aa, Homo sapiens
  CDR3 for alpha chain variable domain of TCR clone 92002 (TRAV8-4, TRAJ43)
CAVSADDMRF

SEQ ID NO: 184004 - protein, 15 aa, Homo sapiens
  CDR3 for beta chain variable domain of TCR clone 92002 (TRBV5-1, TRBJ2-3)
CARSVTSGSTDTQYF

SEQ ID NO: 184005 - protein, 13 aa, Homo sapiens
  CDR3 for alpha chain variable domain of TCR clone 92003 (TRAV2, TRAJ40)
CAVVTSGTYKYIF

SEQ ID NO: 184006 - protein, 16 aa, Homo sapiens
  CDR3 for beta chain variable domain of TCR clone 92003 (TRBV19, TRBJ2-1)
CASSKAGPSSYNEKFF

SEQ ID NO: 184007 - protein, 15 aa, Homo sapiens
  CDR3 for alpha chain variable domain of TCR clone 92004 (TRAV17, TRAJ57)
CATGPSQGGSEKLVF

SEQ ID NO: 184008 - protein, 16 aa, Homo sapiens
  CDR3 for beta chain variable domain of TCR clone 92004 (TRBV12-4, TRBJ1-5)
CASSRPDGGSNQPQHF

SEQ ID NO: 184009 - protein, 11 aa, Homo sapiens
  CDR3 for alpha chain variable domain of TCR clone 92005 (TRAV12-3, TRAJ43)
CAMSVSSDMRF

SEQ ID NO: 184010 - protein, 13 aa, Homo sapiens
  CDR3 for beta chain variable domain of TCR clone 92005 (TRBV20-1, TRBJ1-1)
CSAPLGGGTEAFF

SEQ ID NO: 184011 - protein, 16 aa, Homo sapiens
  CDR3 for alpha chain variable domain of TCR clone 92006 (TRAV16, TRAJ4)
FALSRMFSGGYNKLIF

SEQ ID NO: 184012 - protein, 14 aa, Homo sapiens
  CDR3 for beta chain variable domain of TCR clone 92006 (TRBV4-1, TRBJ2-2)
CASSQAVNTGELFF

SEQ ID NO: 184013 - protein, 16 aa, Homo sapiens
  CDR3 for alpha chain variable domain of TCR clone 92007 (TRAV30, TRAJ24)
CGTEIVDADSWGKFQF

SEQ ID NO: 184014 - protein, 18 aa, Homo sapiens
  CDR3 for beta chain variable domain of TCR clone 92007 (TRBV18, TRBJ2-2)
CASSPRRASGLNTGELFF

SEQ ID NO: 184015 - protein, 20 aa, Homo sapiens
  CDR3 for alpha chain variable domain of TCR clone 92008 (TRAV12-3, TRAJ41)
SLFIRDSQPSDSATPEAPNF

SEQ ID NO: 184016 - protein, 15 aa, Homo sapiens
  CDR3 for beta chain variable domain of TCR clone 92008 (TRBV5-1, TRBJ2-7)
CASSLDLTSSYEQYF

SEQ ID NO: 184017 - protein, 13 aa, Homo sapiens
  CDR3 for alpha chain variable domain of TCR clone 92009 (TRAV3, TRAJ5)
CAVRDTGRRALTF

SEQ ID NO: 184018 - protein, 17 aa, Homo sapiens
  CDR3 for beta chain variable domain of TCR clone 92009 (TRBV20-1, TRBJ2-2)
CSASGSGQGGLTGELFF

SEQ ID NO: 184019 - protein, 17 aa, Homo sapiens
  CDR3 for alpha chain variable domain of TCR clone 92010 (TRAV3, TRAJ6)
CAVSRRTDTGGSYIPTF

SEQ ID NO: 184020 - protein, 18 aa, Homo sapiens
  CDR3 for beta chain variable domain of TCR clone 92010 (TRBV7-2, TRBJ2-3)
CASSLETSRGREADTQYF

SEQ ID NO: 184021 - protein, 17 aa, Homo sapiens
  CDR3 for alpha chain variable domain of TCR clone 92011 (TRAV3, TRAJ6)
CAVRDGPRAGGSYIPTF

SEQ ID NO: 184022 - protein, 15 aa, Homo sapiens
  CDR3 for beta chain variable domain of TCR clone 92011 (TRBV7-6, TRBJ2-1)
CASSSLAGEGNEQFF

SEQ ID NO: 184023 - protein, 13 aa, Homo sapiens
  CDR3 for alpha chain variable domain of TCR clone 92012 (TRAV3, TRAJ27)
CAVRRLGAGKSTF

SEQ ID NO: 184024 - protein, 13 aa, Homo sapiens
  CDR3 for beta chain variable domain of TCR clone 92012 (TRBV7-9, TRBJ2-3)
CASSPGSTDTQYF

SEQ ID NO: 184025 - protein, 13 aa, Homo sapiens
  CDR3 for alpha chain variable domain of TCR clone 92013 (TRAV13-1, TRAJ39)
CSKYSNAGNMLTF

SEQ ID NO: 184026 - protein, 14 aa, Homo sapiens
  CDR3 for beta chain variable domain of TCR clone 92013 (TRBV19, TRBJ2-1)
CASPTFVLSGEQFF

SEQ ID NO: 184027 - protein, 15 aa, Homo sapiens
  CDR3 for alpha chain variable domain of TCR clone 92014 (TRAV27, TRAJ38)
CAGRFNAGNNRRLIW

SEQ ID NO: 184028 - protein, 13 aa, Homo sapiens
  CDR3 for beta chain variable domain of TCR clone 92014 (TRBV19, TRBJ2-7)
CASRKAGGSEQYF

SEQ ID NO: 184029 - protein, 16 aa, Homo sapiens
  CDR3 for alpha chain variable domain of TCR clone 92015 (TRAV1-2, TRAJ10)
CAVRGVLTGGGNKLTF

SEQ ID NO: 184030 - protein, 12 aa, Homo sapiens
  CDR3 for beta chain variable domain of TCR clone 92015 (TRBV11-2, TRBJ2-4)
CASSSASGSEYF

SEQ ID NO: 184031 - protein, 12 aa, Homo sapiens
  CDR3 for alpha chain variable domain of TCR clone 92016 (TRAV16, TRAJ8)
CAPPGGFQKLVF

SEQ ID NO: 184032 - protein, 15 aa, Homo sapiens
  CDR3 for beta chain variable domain of TCR clone 92016 (TRBV6-1, TRBJ1-5)
CASIPDRLGNQPQHF

SEQ ID NO: 184033 - protein, 15 aa, Homo sapiens
  CDR3 for alpha chain variable domain of TCR clone 92017 (TRAV17, TRAJ54)
CATTRSEQGAQKLEF

SEQ ID NO: 184034 - protein, 16 aa, Homo sapiens
  CDR3 for beta chain variable domain of TCR clone 92017 (TRBV12-4, TRBJ2-3)
CASSLRLAETTDTQYF

SEQ ID NO: 184035 - protein, 13 aa, Homo sapiens
  CDR3 for alpha chain variable domain of TCR clone 92018 (TRAV13-1, TRAJ12)
WAASPDSSYKLIF

SEQ ID NO: 184036 - protein, 16 aa, Homo sapiens
  CDR3 for beta chain variable domain of TCR clone 92018 (TRBV15, TRBJ2-1)
CATSRERLAGAYEQFF

SEQ ID NO: 184037 - protein, 15 aa, Homo sapiens
  CDR3 for alpha chain variable domain of TCR clone 92019 (TRAV2, TRAJ9)
CAVEDRGTGGFKTIF

SEQ ID NO: 184038 - protein, 16 aa, Homo sapiens
  CDR3 for beta chain variable domain of TCR clone 92019 (TRBV24-1, TRBJ2-3)
CATSDRGTGATDTQYF

SEQ ID NO: 184039 - protein, 12 aa, Homo sapiens
  CDR3 for alpha chain variable domain of TCR clone 92020 (TRAV13-1, TRAJ21)
CAAKEGFNKFYF

SEQ ID NO: 184040 - protein, 13 aa, Homo sapiens
  CDR3 for beta chain variable domain of TCR clone 92020 (TRBV7-7, TRBJ2-3)
CASSLSRADTQYF

SEQ ID NO: 184041 - protein, 14 aa, Homo sapiens
  CDR3 for alpha chain variable domain of TCR clone 92021 (TRAV2, TRAJ9)
CAVEDRSGGFKTIF

SEQ ID NO: 184042 - protein, 14 aa, Homo sapiens
  CDR3 for beta chain variable domain of TCR clone 92021 (TRBV7-9, TRBJ1-1)
CASTPLQSYTEAFF

SEQ ID NO: 184043 - protein, 12 aa, Homo sapiens
  CDR3 for alpha chain variable domain of TCR clone 92022 (TRAV12-3, TRAJ17)
CAMTLTGNKLTF

SEQ ID NO: 184044 - protein, 16 aa, Homo sapiens
  CDR3 for beta chain variable domain of TCR clone 92022 (TRBV4-1, TRBJ1-1)
CASSQDAGMGNTEAFF

SEQ ID NO: 184045 - protein, 12 aa, Homo sapiens
  CDR3 for alpha chain variable domain of TCR clone 92023 (TRAV12-3, TRAJ32)
CAGGGATNKLIF

SEQ ID NO: 184046 - protein, 19 aa, Homo sapiens
  CDR3 for beta chain variable domain of TCR clone 92023 (TRBV7-2, TRBJ2-3)
CASSFLSRNWGGGTDTQYF

SEQ ID NO: 184047 - protein, 11 aa, Homo sapiens
  CDR3 for alpha chain variable domain of TCR clone 92024 (TRAV35, TRAJ48)
SRVFGNEKLTF

SEQ ID NO: 184048 - protein, 14 aa, Homo sapiens
  CDR3 for beta chain variable domain of TCR clone 92024 (TRBV20-1, TRBJ2-5)
CSALVPGYQETQYF

SEQ ID NO: 184049 - protein, 13 aa, Homo sapiens
  CDR3 for alpha chain variable domain of TCR clone 92025 (TRAV12-1, TRAJ26)
CVVRRNYGQNFVF

SEQ ID NO: 184050 - protein, 15 aa, Homo sapiens
  CDR3 for beta chain variable domain of TCR clone 92025 (TRBV27, TRBJ2-1)
CASSNGGGSSNEQFF

SEQ ID NO: 184051 - protein, 14 aa, Homo sapiens
  CDR3 for alpha chain variable domain of TCR clone 92026 (TRAV12-2, TRAJ13)
CAVKKTGGYQKVTF

SEQ ID NO: 184052 - protein, 13 aa, Homo sapiens
  CDR3 for beta chain variable domain of TCR clone 92026 (TRBV7-9, TRBJ1-2)
CASSVKQNYGYTF

SEQ ID NO: 184053 - protein, 16 aa, Homo sapiens
  CDR3 for alpha chain variable domain of TCR clone 92027 (TRAV35, TRAJ28)
CAGQRYSGAGSYQLTF

SEQ ID NO: 184054 - protein, 14 aa, Homo sapiens
  CDR3 for beta chain variable domain of TCR clone 92027 (TRBV18, TRBJ2-7)
CASSPRGGDYEQYF

SEQ ID NO: 184055 - protein, 16 aa, Homo sapiens
  CDR3 for alpha chain variable domain of TCR clone 92028 (TRAV13-2, TRAJ32)
CAENMNYGGATNKLIF

SEQ ID NO: 184056 - protein, 15 aa, Homo sapiens
  CDR3 for beta chain variable domain of TCR clone 92028 (TRBV19, TRBJ1-2)
CASSVGQVLNYGYTF

SEQ ID NO: 184057 - protein, 14 aa, Homo sapiens
  CDR3 for alpha chain variable domain of TCR clone 92029 (TRAV26-2, TRAJ23)
CSRTLYNQGGKLIF

SEQ ID NO: 184058 - protein, 15 aa, Homo sapiens
  CDR3 for beta chain variable domain of TCR clone 92029 (TRBV20-1, TRBJ2-7)
CSARDRVAGMDEQYF

SEQ ID NO: 184059 - protein, 14 aa, Homo sapiens
  CDR3 for alpha chain variable domain of TCR clone 92030 (TRAV38-1, TRAJ45)
CASHSGGGADGLTF

SEQ ID NO: 184060 - protein, 16 aa, Homo sapiens
  CDR3 for beta chain variable domain of TCR clone 92030 (TRBV19, TRBJ1-1)
CASSPTRFWPGTEAFF

SEQ ID NO: 184061 - protein, 13 aa, Homo sapiens
  CDR3 for alpha chain variable domain of TCR clone 92031 (TRAV3, TRAJ20)
CAVRDTPRYKLSF

SEQ ID NO: 184062 - protein, 16 aa, Homo sapiens
  CDR3 for beta chain variable domain of TCR clone 92031 (TRBV20-1, TRBJ2-7)
CSARAPGLALSYERYF

SEQ ID NO: 184063 - protein, 14 aa, Homo sapiens
  CDR3 for alpha chain variable domain of TCR clone 92032 (TRAV12-3, TRAJ42)
CAMNYGGSQGNLIF

SEQ ID NO: 184064 - protein, 13 aa, Homo sapiens
  CDR3 for beta chain variable domain of TCR clone 92032 (TRBV12-4, TRBJ1-2)
CASSLRQGKGYTF

SEQ ID NO: 184065 - protein, 14 aa, Homo sapiens
  CDR3 for alpha chain variable domain of TCR clone 92033 (TRAV2, TRAJ9)
CAVEDRSGGFKTIF

SEQ ID NO: 184066 - protein, 13 aa, Homo sapiens
  CDR3 for beta chain variable domain of TCR clone 92033 (TRBV7-2, TRBJ2-4)
CASSREHANIQYF

SEQ ID NO: 184067 - protein, 12 aa, Homo sapiens
  CDR3 for alpha chain variable domain of TCR clone 92034 (TRAV8-3, TRAJ20)
CAVGANDYKLSL

SEQ ID NO: 184068 - protein, 16 aa, Homo sapiens
  CDR3 for beta chain variable domain of TCR clone 92034 (TRBV19, TRBJ2-2)
CASRSPGTGAIGELFF

SEQ ID NO: 184069 - protein, 13 aa, Homo sapiens
  CDR3 for alpha chain variable domain of TCR clone 92035 (TRAV12-2, TRAJ10)
CAVPTGGGTKLTF

SEQ ID NO: 184070 - protein, 11 aa, Homo sapiens
  CDR3 for beta chain variable domain of TCR clone 92035 (TRBV6-1, TRBJ2-1)
CASISSNEHFF

SEQ ID NO: 184071 - protein, 15 aa, Homo sapiens
  CDR3 for alpha chain variable domain of TCR clone 92036 (TRAV8-3, TRAJ45)
CASSYSGGGADGLTF

SEQ ID NO: 184072 - protein, 15 aa, Homo sapiens
  CDR3 for beta chain variable domain of TCR clone 92036 (TRBV19, TRBJ2-1)
CASSSPGVPLDEQFF

SEQ ID NO: 184073 - protein, 17 aa, Homo sapiens
  CDR3 for alpha chain variable domain of TCR clone 92037 (TRAV17, TRAJ28)
CATDPRRGGAGSYQLTF

SEQ ID NO: 184074 - protein, 16 aa, Homo sapiens
  CDR3 for beta chain variable domain of TCR clone 92037 (TRBV25-1, TRBJ1-1)
CASSGDRDRGRIESFF

SEQ ID NO: 184075 - protein, 16 aa, Homo sapiens
  CDR3 for alpha chain variable domain of TCR clone 92038 (TRAV3, TRAJ10)
CAVRDMRAGGGNKLTF

SEQ ID NO: 184076 - protein, 17 aa, Homo sapiens
  CDR3 for beta chain variable domain of TCR clone 92038 (TRBV5-4, TRBJ2-1)
CASSSAGGRGPYNEQFF

SEQ ID NO: 184077 - protein, 13 aa, Homo sapiens
  CDR3 for alpha chain variable domain of TCR clone 92039 (TRAV26-2, TRAJ43)
CILRAVNNNDMRF

SEQ ID NO: 184078 - protein, 16 aa, Homo sapiens
  CDR3 for beta chain variable domain of TCR clone 92039 (TRBV10-3, TRBJ2-1)
CAIRGGGRGDYNEQFF

SEQ ID NO: 184079 - protein, 17 aa, Homo sapiens
  CDR3 for alpha chain variable domain of TCR clone 92040 (TRAV3, TRAJ6)
CAVRDGPRAGGSYIPTV

SEQ ID NO: 184080 - protein, 18 aa, Homo sapiens
  CDR3 for beta chain variable domain of TCR clone 92040 (TRBV7-9, TRBJ2-7)
CASSLTTSGSRTWYEQYF

SEQ ID NO: 184081 - protein, 15 aa, Homo sapiens
  CDR3 for alpha chain variable domain of TCR clone 92041 (TRAV1-2, TRAJ30)
CAVRPHGNRDDKIIF

SEQ ID NO: 184082 - protein, 13 aa, Homo sapiens
  CDR3 for beta chain variable domain of TCR clone 92041 (TRBV4-1, TRBJ2-7)
CASSHGQAYEQYF

SEQ ID NO: 184083 - protein, 14 aa, Homo sapiens
  CDR3 for alpha chain variable domain of TCR clone 92042 (TRAV9-2, TRAJ39)
CALYIYNACNMLTF

SEQ ID NO: 184084 - protein, 14 aa, Homo sapiens
  CDR3 for beta chain variable domain of TCR clone 92042 (TRBV6-1, TRBJ1-3)
CASVQGGGGNTIYF

SEQ ID NO: 184085 - protein, 14 aa, Homo sapiens
  CDR3 for alpha chain variable domain of TCR clone 92043 (TRAV1-2, TRAJ16)
CAVNRFSDGQKLLF

SEQ ID NO: 184086 - protein, 13 aa, Homo sapiens
  CDR3 for beta chain variable domain of TCR clone 92043 (TRBV5-1, TRBJ1-1)
CASSADWDTEAFF

SEQ ID NO: 184087 - protein, 15 aa, Homo sapiens
  CDR3 for alpha chain variable domain of TCR clone 92044 (TRAV23/DV6, TRAJ4)
CAASPLRGGYNNLIF

SEQ ID NO: 184088 - protein, 15 aa, Homo sapiens
  CDR3 for beta chain variable domain of TCR clone 92044 (TRBV7-9, TRBJ1-6)
CASSSPGRGNSPLHF

SEQ ID NO: 184089 - protein, 15 aa, Homo sapiens
  CDR3 for alpha chain variable domain of TCR clone 92045 (TRAV12-2, TRAJ53)
CAVNGGGGSNYKLTF

SEQ ID NO: 184090 - protein, 11 aa, Homo sapiens
  CDR3 for beta chain variable domain of TCR clone 92045 (TRBV12-4, TRBJ2-3)
CASTATDTQYF

SEQ ID NO: 184091 - protein, 14 aa, Homo sapiens
  CDR3 for alpha chain variable domain of TCR clone 92046 (TRAV21, TRAJ23)
CAIMIYHQGGKLIF

SEQ ID NO: 184092 - protein, 18 aa, Homo sapiens
  CDR3 for beta chain variable domain of TCR clone 92046 (TRBV20-1, TRBJ2-6)
CSAETTPTHGSGANVLTF

SEQ ID NO: 184093 - protein, 14 aa, Homo sapiens
  CDR3 for alpha chain variable domain of TCR clone 92047 (TRAV38-2/DV8, TRAJ23)
CAYRKPNQGGKLIF

SEQ ID NO: 184094 - protein, 18 aa, Homo sapiens
  CDR3 for beta chain variable domain of TCR clone 92047 (TRBV11-2, TRBJ2-3)
CASSLGGASRGAPNTQYF

SEQ ID NO: 184095 - protein, 12 aa, Homo sapiens
  CDR3 for alpha chain variable domain of TCR clone 92048 (TRAV38-1, TRAJ36)
CAFETGANNLFF

SEQ ID NO: 184096 - protein, 13 aa, Homo sapiens
  CDR3 for beta chain variable domain of TCR clone 92048 (TRBV7-3, TRBJ1-1)
CASSQDWGAEAFF

SEQ ID NO: 184097 - protein, 16 aa, Homo sapiens
  CDR3 for alpha chain variable domain of TCR clone 92049 (TRAV8-3, TRAJ13)
CAVGAYPSGGYQKVTF

SEQ ID NO: 184098 - protein, 15 aa, Homo sapiens
  CDR3 for beta chain variable domain of TCR clone 92049 (TRBV19, TRBJ1-5)
CASSIVWADNQPQNF

SEQ ID NO: 184099 - protein, 16 aa, Homo sapiens
  CDR3 for alpha chain variable domain of TCR clone 92050 (TRAV4, TRAJ22)
CLVGDLYSGSARQLTF

SEQ ID NO: 184100 - protein, 17 aa, Homo sapiens
  CDR3 for beta chain variable domain of TCR clone 92050 (TRBV11-2, TRBJ2-1)
CASSLYPPGVEYNEQFL

SEQ ID NO: 184101 - protein, 15 aa, Homo sapiens
  CDR3 for alpha chain variable domain of TCR clone 92051 (TRAV3, TRAJ5)
CAVRDRKTGRRALTF

SEQ ID NO: 184102 - protein, 15 aa, Homo sapiens
  CDR3 for beta chain variable domain of TCR clone 92051 (TRBV7-9, TRBJ2-2)
CASGPLDTFPGELSF

SEQ ID NO: 184103 - protein, 14 aa, Homo sapiens
  CDR3 for alpha chain variable domain of TCR clone 92052 (TRAV26-1, TRAJ45)
CIVRVGGGADGLTF

SEQ ID NO: 184104 - protein, 16 aa, Homo sapiens
  CDR3 for beta chain variable domain of TCR clone 92052 (TRBV7-9, TRBJ1-1)
CASSLTQVRSNTEAFF

SEQ ID NO: 184105 - protein, 14 aa, Homo sapiens
  CDR3 for alpha chain variable domain of TCR clone 92053 (TRAV13-2, TRAJ17)
CAENSKAAGNKITF

SEQ ID NO: 184106 - protein, 15 aa, Homo sapiens
  CDR3 for beta chain variable domain of TCR clone 92053 (TRBV27, TRBJ2-1)
CASSNGGGSSNEQFF

SEQ ID NO: 184107 - protein, 13 aa, Homo sapiens
  CDR3 for alpha chain variable domain of TCR clone 92054 (TRAV17, TRAJ5)
CALRGTGRRALTF

SEQ ID NO: 184108 - protein, 17 aa, Homo sapiens
  CDR3 for beta chain variable domain of TCR clone 92054 (TRBV7-3, TRBJ2-5)
CASSLGSGRSGSETQYF

SEQ ID NO: 184109 - protein, 14 aa, Homo sapiens
  CDR3 for alpha chain variable domain of TCR clone 92055 (TRAV8-1, TRAJ24)
CAVNAADSWGKLQF

SEQ ID NO: 184110 - protein, 16 aa, Homo sapiens
  CDR3 for beta chain variable domain of TCR clone 92055 (TRBV4-3, TRBJ2-1)
CASSPALDRGVNKQFF

SEQ ID NO: 184111 - protein, 12 aa, Homo sapiens
  CDR3 for alpha chain variable domain of TCR clone 92056 (TRAV3, TRAJ20)
CAVRDPDSKLSF

SEQ ID NO: 184112 - protein, 13 aa, Homo sapiens
  CDR3 for beta chain variable domain of TCR clone 92056 (TRBV9, TRBJ2-1)
CASSVGQGGEQFF

SEQ ID NO: 184113 - protein, 16 aa, Homo sapiens
  CDR3 for alpha chain variable domain of TCR clone 92057 (TRAV12-1, TRAJ48)
CVVSMVSNFGNEKLTF

SEQ ID NO: 184114 - protein, 18 aa, Homo sapiens
  CDR3 for beta chain variable domain of TCR clone 92057 (TRBV11-2, TRBJ2-6)
CASSLNPFLGTGANVLTF

SEQ ID NO: 184115 - protein, 12 aa, Homo sapiens
  CDR3 for alpha chain variable domain of TCR clone 92058 (TRAV21, TRAJ11)
CAATSGYSTLTF

SEQ ID NO: 184116 - protein, 16 aa, Homo sapiens
  CDR3 for beta chain variable domain of TCR clone 92058 (TRBV28, TRBJ2-2)
CASSLEGGSNTGGLFF

SEQ ID NO: 184117 - protein, 12 aa, Homo sapiens
  CDR3 for alpha chain variable domain of TCR clone 92059 (TRAV3, TRAJ20)
CAVRDPVYKLSF

SEQ ID NO: 184118 - protein, 13 aa, Homo sapiens
  CDR3 for beta chain variable domain of TCR clone 92059 (TRBV9, TRBJ2-1)
CASSVGQGGEQFF

SEQ ID NO: 184119 - protein, 13 aa, Homo sapiens
  CDR3 for alpha chain variable domain of TCR clone 92060 (TRAV22, TRAJ29)
CAVGGSGNTPLVF

SEQ ID NO: 184120 - protein, 15 aa, Homo sapiens
  CDR3 for beta chain variable domain of TCR clone 92060 (TRBV6-5, TRBJ1-5)
CASSLTALGNQPQHF

SEQ ID NO: 184121 - protein, 12 aa, Homo sapiens
  CDR3 for alpha chain variable domain of TCR clone 92061 (TRAV13-1, TRAJ21)
CAAKEGFNKFYF

SEQ ID NO: 184122 - protein, 13 aa, Homo sapiens
  CDR3 for beta chain variable domain of TCR clone 92061 (TRBV7-3, TRBJ1-1)
CASSQDWGAEAFF

SEQ ID NO: 184123 - protein, 16 aa, Homo sapiens
  CDR3 for alpha chain variable domain of TCR clone 92062 (TRAV30, TRAJ24)
CGTEIVDADSWGKFQF

SEQ ID NO: 184124 - protein, 14 aa, Homo sapiens
  CDR3 for beta chain variable domain of TCR clone 92062 (TRBV5-5, TRBJ1-2)
CACSLDPYNYGYTF

SEQ ID NO: 184125 - protein, 15 aa, Homo sapiens
  CDR3 for alpha chain variable domain of TCR clone 92063 (TRAV3, TRAJ45)
RAVRTPWGGADGLTF

SEQ ID NO: 184126 - protein, 16 aa, Homo sapiens
  CDR3 for beta chain variable domain of TCR clone 92063 (TRBV6-1, TRBJ2-2)
CASSFGQGANTGELFF

SEQ ID NO: 184127 - protein, 12 aa, Homo sapiens
  CDR3 for alpha chain variable domain of TCR clone 92064 (TRAV17, TRAJ12)
CAGGDSSYKLFF

SEQ ID NO: 184128 - protein, 12 aa, Homo sapiens
  CDR3 for beta chain variable domain of TCR clone 92064 (TRBV29-1, TRBJ1-1)
CSESDGNTEAFF

SEQ ID NO: 184129 - protein, 17 aa, Homo sapiens
  CDR3 for alpha chain variable domain of TCR clone 92065 (TRAV3, TRAJ42)
CAVRDRDYGGSQGNLIF

SEQ ID NO: 184130 - protein, 13 aa, Homo sapiens
  CDR3 for beta chain variable domain of TCR clone 92065 (TRBV4-1, TRBJ1-1)
CASSRKMNTEAFF

SEQ ID NO: 184131 - protein, 17 aa, Homo sapiens
  CDR3 for alpha chain variable domain of TCR clone 92066 (TRAV3, TRAJ7)
CAVRDMSPLEGPTDSLL

SEQ ID NO: 184132 - protein, 17 aa, Homo sapiens
  CDR3 for beta chain variable domain of TCR clone 92066 (TRBV15, TRBJ1-2)
CATSGREIDVVNYGYTF

SEQ ID NO: 184133 - protein, 12 aa, Homo sapiens
  CDR3 for alpha chain variable domain of TCR clone 92067 (TRAV13-1, TRAJ21)
CAAKEGFNKFYF

SEQ ID NO: 184134 - protein, 15 aa, Homo sapiens
  CDR3 for beta chain variable domain of TCR clone 92067 (TRBV12-4, TRBJ1-2)
CASRLGVAGNYGYTF

SEQ ID NO: 184135 - protein, 12 aa, Homo sapiens
  CDR3 for alpha chain variable domain of TCR clone 92068 (TRAV3, TRAJ31)
CAVRDGNARLMF

SEQ ID NO: 184136 - protein, 18 aa, Homo sapiens
  CDR3 for beta chain variable domain of TCR clone 92068 (TRBV7-2, TRBJ2-3)
CASSLRREGRGITDTQYF

SEQ ID NO: 184137 - protein, 14 aa, Homo sapiens
  CDR3 for alpha chain variable domain of TCR clone 92069 (TRAV9-2, TRAJ39)
CALYIYNAGNMLTF

SEQ ID NO: 184138 - protein, 15 aa, Homo sapiens
  CDR3 for beta chain variable domain of TCR clone 92069 (TRBV6-5, TRBJ1-2)
CASSYSQAFNYGYTF

SEQ ID NO: 184139 - protein, 13 aa, Homo sapiens
  CDR3 for alpha chain variable domain of TCR clone 92070 (TRAV17, TRAJ5)
CAPMDTGRRALTF

SEQ ID NO: 184140 - protein, 11 aa, Homo sapiens
  CDR3 for beta chain variable domain of TCR clone 92070 (TRBV29-1, TRBJ2-5)
CSEDRTGTQYF

SEQ ID NO: 184141 - protein, 14 aa, Homo sapiens
  CDR3 for alpha chain variable domain of TCR clone 92071 (TRAV26-1, TRAJ9)
CIVNPLAGGFKTIF

SEQ ID NO: 184142 - protein, 15 aa, Homo sapiens
  CDR3 for beta chain variable domain of TCR clone 92071 (TRBV20-1, TRBJ2-7)
CSARDRVSGMDEQYF

SEQ ID NO: 184143 - protein, 18 aa, Homo sapiens
  CDR3 for alpha chain variable domain of TCR clone 92072 (TRAV8-4, TRAJ52)
CAVTRANAGGTSYGKLPF

SEQ ID NO: 184144 - protein, 12 aa, Homo sapiens
  CDR3 for beta chain variable domain of TCR clone 92072 (TRBV12-4, TRBJ2-7)
CASSLGGYEQYF

SEQ ID NO: 184145 - protein, 14 aa, Homo sapiens
  CDR3 for alpha chain variable domain of TCR clone 92073 (TRAV2, TRAJ3)
CAVRPYSSASKIIF

SEQ ID NO: 184146 - protein, 17 aa, Homo sapiens
  CDR3 for beta chain variable domain of TCR clone 92073 (TRBV7-6, TRBJ2-5)
CASSSPQAGNPSETQYF

SEQ ID NO: 184147 - protein, 13 aa, Homo sapiens
  CDR3 for alpha chain variable domain of TCR clone 92074 (TRAV12-2, TRAJ37)
CAGGSGNTGKLIF

SEQ ID NO: 184148 - protein, 14 aa, Homo sapiens
  CDR3 for beta chain variable domain of TCR clone 92074 (TRBV6-1, TRBJ2-6)
CASHQGAGANVLTF

SEQ ID NO: 184149 - protein, 15 aa, Homo sapiens
  CDR3 for alpha chain variable domain of TCR clone 92075 (TRAV23/DV6, TRAJ18)
CAARYRGSTLGRLYF

SEQ ID NO: 184150 - protein, 20 aa, Homo sapiens
  CDR3 for beta chain variable domain of TCR clone 92075 (TRBV7-8, TRBJ2-2)
CASSHLFPGPTIHITGELFF

SEQ ID NO: 184151 - protein, 18 aa, Homo sapiens
  CDR3 for alpha chain variable domain of TCR clone 92076 (TRAV21, TRAJ52)
CALRPSPAGGTSYGKLTF

SEQ ID NO: 184152 - protein, 13 aa, Homo sapiens
  CDR3 for beta chain variable domain of TCR clone 92076 (TRBV29-1, TRBJ2-2)
CSVYREDTGELFF

SEQ ID NO: 184153 - protein, 12 aa, Homo sapiens
  CDR3 for alpha chain variable domain of TCR clone 92077 (TRAV8-3, TRAJ41)
CAVAPSGYALNF

SEQ ID NO: 184154 - protein, 16 aa, Homo sapiens
  CDR3 for beta chain variable domain of TCR clone 92077 (TRBV27, TRBJ2-7)
CASSSERRDSAYEQYF

SEQ ID NO: 184155 - protein, 15 aa, Homo sapiens
  CDR3 for alpha chain variable domain of TCR clone 92078 (TRAV8-1, TRAJ37)
CAVKKGPGNTGKLIF

SEQ ID NO: 184156 - protein, 17 aa, Homo sapiens
  CDR3 for beta chain variable domain of TCR clone 92078 (TRBV12-4, TRBJ1-1)
CASSLSGFRTMNTEAFF

SEQ ID NO: 184157 - protein, 11 aa, Homo sapiens
  CDR3 for alpha chain variable domain of TCR clone 92079 (TRAV26-1, TRAJ37)
CIVRVGRKLIF

SEQ ID NO: 184158 - protein, 15 aa, Homo sapiens
  CDR3 for beta chain variable domain of TCR clone 92079 (TRBV4-3, TRBJ2-5)
CASSQGTGHRETQYF

SEQ ID NO: 184159 - protein, 14 aa, Homo sapiens
  CDR3 for alpha chain variable domain of TCR clone 92080 (TRAV21, TRAJ15)
CAESLNQAGTALIF

SEQ ID NO: 184160 - protein, 11 aa, Homo sapiens
  CDR3 for beta chain variable domain of TCR clone 92080 (TRBV20-1, TRBJ2-7)
CSARTSYEQYF

SEQ ID NO: 184161 - protein, 12 aa, Homo sapiens
  CDR3 for alpha chain variable domain of TCR clone 92081 (TRAV21, TRAJ33)
CAVQDSNYKLIW

SEQ ID NO: 184162 - protein, 14 aa, Homo sapiens
  CDR3 for beta chain variable domain of TCR clone 92081 (TRBV28, TRBJ2-1)
CASSPGEGGNEQFF

SEQ ID NO: 184163 - protein, 14 aa, Homo sapiens
  CDR3 for alpha chain variable domain of TCR clone 92082 (TRAV8-4, TRAJ5)
CAVSTDTGRRALTF

SEQ ID NO: 184164 - protein, 15 aa, Homo sapiens
  CDR3 for beta chain variable domain of TCR clone 92082 (TRBV19, TRBJ1-1)
CASTSGQIQNTEAFF

SEQ ID NO: 184165 - protein, 14 aa, Homo sapiens
  CDR3 for alpha chain variable domain of TCR clone 92083 (TRAV3, TRAJ9)
CAVRLNTGGFKTIF

SEQ ID NO: 184166 - protein, 13 aa, Homo sapiens
  CDR3 for beta chain variable domain of TCR clone 92083 (TRBV19, TRBJ1-2)
CASSVPGQDGYTF

SEQ ID NO: 184167 - protein, 15 aa, Homo sapiens
  CDR3 for alpha chain variable domain of TCR clone 92084 (TRAV17, TRAJ57)
CATGPSQGGSEKLVF

SEQ ID NO: 184168 - protein, 13 aa, Homo sapiens
  CDR3 for beta chain variable domain of TCR clone 92084 (TRBV7-2, TRBJ2-2)
CASSLAVTGELFF

SEQ ID NO: 184169 - protein, 12 aa, Homo sapiens
  CDR3 for alpha chain variable domain of TCR clone 92085 (TRAV24, TRAJ40)
CAFIPGTYKYIF

SEQ ID NO: 184170 - protein, 11 aa, Homo sapiens
  CDR3 for beta chain variable domain of TCR clone 92085 (TRBV10-1, TRBJ2-3)
CASSDSDTQYF

SEQ ID NO: 184171 - protein, 13 aa, Homo sapiens
  CDR3 for alpha chain variable domain of TCR clone 92086 (TRAV12-1, TRAJ34)
CVVTGYNTDKLIF

SEQ ID NO: 184172 - protein, 14 aa, Homo sapiens
  CDR3 for beta chain variable domain of TCR clone 92086 (TRBV28, TRBJ2-5)
CASSLGDRAEIQYF

SEQ ID NO: 184173 - protein, 13 aa, Homo sapiens
  CDR3 for alpha chain variable domain of TCR clone 92087 (TRAV3, TRAJ21)
CAVREPDFNKFYF

SEQ ID NO: 184174 - protein, 15 aa, Homo sapiens
  CDR3 for beta chain variable domain of TCR clone 92087 (TRBV7-2, TRBJ2-3)
CASSSTGLETDTQYF

SEQ ID NO: 184175 - protein, 13 aa, Homo sapiens
  CDR3 for alpha chain variable domain of TCR clone 92088 (TRAV16, TRAJ5)
CALPDTGRRALTF

SEQ ID NO: 184176 - protein, 14 aa, Homo sapiens
  CDR3 for beta chain variable domain of TCR clone 92088 (TRBV6-5, TRBJ1-2)
CASSTGRTNYGYTF

SEQ ID NO: 184177 - protein, 12 aa, Homo sapiens
  CDR3 for alpha chain variable domain of TCR clone 92089 (TRAV12-1, TRAJ40)
CVVYPGTYKYIF

SEQ ID NO: 184178 - protein, 15 aa, Homo sapiens
  CDR3 for beta chain variable domain of TCR clone 92089 (TRBV7-9, TRBJ1-6)
CASSSPGRGNSPLHF

SEQ ID NO: 184179 - protein, 13 aa, Homo sapiens
  CDR3 for alpha chain variable domain of TCR clone 92090 (TRAV27, TRAJ41)
CAGEGNSGYALNF

SEQ ID NO: 184180 - protein, 14 aa, Homo sapiens
  CDR3 for beta chain variable domain of TCR clone 92090 (TRBV13, TRBJ2-5)
CASSLERVGETQYF

SEQ ID NO: 184181 - protein, 15 aa, Homo sapiens
  CDR3 for alpha chain variable domain of TCR clone 92091 (TRAV29/DV5, TRAJ42)
CAAKTDGGSQGNLIF

SEQ ID NO: 184182 - protein, 11 aa, Homo sapiens
  CDR3 for beta chain variable domain of TCR clone 92091 (TRBV29-1, TRBJ2-5)
CSEDRTGTQYF

SEQ ID NO: 184183 - protein, 13 aa, Homo sapiens
  CDR3 for alpha chain variable domain of TCR clone 92092 (TRAV13-1, TRAJ37)
CAARSGNTGKLIF

SEQ ID NO: 184184 - protein, 14 aa, Homo sapiens
  CDR3 for beta chain variable domain of TCR clone 92092 (TRBV12-4, TRBJ2-3)
YASSLGQGTDTQYF

SEQ ID NO: 184185 - protein, 13 aa, Homo sapiens
  CDR3 for alpha chain variable domain of TCR clone 92093 (TRAV29/DV5, TRAJ44)
CAASTGTASKFTF

SEQ ID NO: 184186 - protein, 13 aa, Homo sapiens
  CDR3 for beta chain variable domain of TCR clone 92093 (TRBV19, TRBJ2-7)
CASRKAGGSEQYF

SEQ ID NO: 184187 - protein, 14 aa, Homo sapiens
  CDR3 for alpha chain variable domain of TCR clone 92094 (TRAV17, TRAJ24)
CATLTTDSWGKFQF

SEQ ID NO: 184188 - protein, 16 aa, Homo sapiens
  CDR3 for beta chain variable domain of TCR clone 92094 (TRBV4-2, TRBJ2-7)
CAGSQDGGSLRGEQYF

SEQ ID NO: 184189 - protein, 15 aa, Homo sapiens
  CDR3 for alpha chain variable domain of TCR clone 92095 (TRAV1-1, TRAJ24)
CALSGGTDSWGKFQF

SEQ ID NO: 184190 - protein, 16 aa, Homo sapiens
  CDR3 for beta chain variable domain of TCR clone 92095 (TRBV2, TRBJ2-7)
CASSEPWTGPPYEQYF

SEQ ID NO: 184191 - protein, 11 aa, Homo sapiens
  CDR3 for alpha chain variable domain of TCR clone 92096 (TRAV17, TRAJ43)
CATPRSKDMRF

SEQ ID NO: 184192 - protein, 15 aa, Homo sapiens
  CDR3 for beta chain variable domain of TCR clone 92096 (TRBV11-2, TRBJ2-1)
CASSLGTSGLNEQFF

SEQ ID NO: 184193 - protein, 17 aa, Homo sapiens
  CDR3 for alpha chain variable domain of TCR clone 92097 (TRAV3, TRAJ38)
CAVRDCLNAGNNRKLIW

SEQ ID NO: 184194 - protein, 16 aa, Homo sapiens
  CDR3 for beta chain variable domain of TCR clone 92097 (TRBV20-1, TRBJ1-4)
CSARPYRGELNEKLFF

SEQ ID NO: 184195 - protein, 15 aa, Homo sapiens
  CDR3 for alpha chain variable domain of TCR clone 92098 (TRAV12-3, TRAJ42)
CAMSGHGGSQGNLIF

SEQ ID NO: 184196 - protein, 13 aa, Homo sapiens
  CDR3 for beta chain variable domain of TCR clone 92098 (TRBV7-9, TRBJ1-2)
CASSLKQNYGYTF

SEQ ID NO: 184197 - protein, 17 aa, Homo sapiens
  CDR3 for alpha chain variable domain of TCR clone 92099 (TRAV26-1, TRAJ53)
CIVRVDDSGGSNYKLTF

SEQ ID NO: 184198 - protein, 14 aa, Homo sapiens
  CDR3 for beta chain variable domain of TCR clone 92099 (TRBV20-1, TRBJ1-1)
CSAQTRIGGTEAFF

SEQ ID NO: 184199 - protein, 13 aa, Homo sapiens
  CDR3 for alpha chain variable domain of TCR clone 92100 (TRAV30, TRAJ34)
CGTVGYNTDKLIF

SEQ ID NO: 184200 - protein, 16 aa, Homo sapiens
  CDR3 for beta chain variable domain of TCR clone 92100 (TRBV7-9, TRBJ1-2)
CASSLGFSSGEDGYTV

SEQ ID NO: 184201 - protein, 17 aa, Homo sapiens
  CDR3 for alpha chain variable domain of TCR clone 92101 (TRAV23/DV6, TRAJ57)
CAASSTFSQGGSEKLVF

SEQ ID NO: 184202 - protein, 14 aa, Homo sapiens
  CDR3 for beta chain variable domain of TCR clone 92101 (TRBV25-1, TRBJ1-1)
CASTHLGGNTEAFF

SEQ ID NO: 184203 - protein, 13 aa, Homo sapiens
  CDR3 for alpha chain variable domain of TCR clone 92102 (TRAV27, TRAJ6)
CAGGTRGSYIPTS

SEQ ID NO: 184204 - protein, 15 aa, Homo sapiens
  CDR3 for beta chain variable domain of TCR clone 92102 (TRBV5-7, TRBJ2-7)
CASSLGPGRGHEQYF

SEQ ID NO: 184205 - protein, 15 aa, Homo sapiens
  CDR3 for alpha chain variable domain of TCR clone 92103 (TRAV21, TRAJ53)
CATLNSGGSNYKLTF

SEQ ID NO: 184206 - protein, 16 aa, Homo sapiens
  CDR3 for beta chain variable domain of TCR clone 92103 (TRBV2, TRBJ2-3)
CASSTSVEGVTDTQYF

SEQ ID NO: 184207 - protein, 14 aa, Homo sapiens
  CDR3 for alpha chain variable domain of TCR clone 92104 (TRAV12-1, TRAJ17)
CVVNYKAAGNKLTF

SEQ ID NO: 184208 - protein, 15 aa, Homo sapiens
  CDR3 for beta chain variable domain of TCR clone 92104 (TRBV5-5, TRBJ2-7)
CASSLAAPLSYEQYF

SEQ ID NO: 184209 - protein, 11 aa, Homo sapiens
  CDR3 for alpha chain variable domain of TCR clone 92105 (TRAV2, TRAJ13)
CASGGYQKVTF

SEQ ID NO: 184210 - protein, 17 aa, Homo sapiens
  CDR3 for beta chain variable domain of TCR clone 92105 (TRBV4-1, TRBJ2-1)
CASSHRDSGSSYNEQFF

SEQ ID NO: 184211 - protein, 15 aa, Homo sapiens
  CDR3 for alpha chain variable domain of TCR clone 92106 (TRAV8-3, TRAJ11)
CAVGLLNSGYSTLTF

SEQ ID NO: 184212 - protein, 14 aa, Homo sapiens
  CDR3 for beta chain variable domain of TCR clone 92106 (TRBV7-9, TRBJ2-2)
CASSLVQDTGELFF

SEQ ID NO: 184213 - protein, 13 aa, Homo sapiens
  CDR3 for alpha chain variable domain of TCR clone 92107 (TRAV26-1, TRAJ41)
CIVRINSGYALNF

SEQ ID NO: 184214 - protein, 14 aa, Homo sapiens
  CDR3 for beta chain variable domain of TCR clone 92107 (TRBV4-1, TRBJ2-2)
CASSQAVNTGELFF

SEQ ID NO: 184215 - protein, 15 aa, Homo sapiens
  CDR3 for alpha chain variable domain of TCR clone 92108 (TRAV27, TRAJ38)
CAARRNAGNNRKLIW

SEQ ID NO: 184216 - protein, 11 aa, Homo sapiens
  CDR3 for beta chain variable domain of TCR clone 92108 (TRBV12-4, TRBJ2-2)
CTSSSAGELFF

SEQ ID NO: 184217 - protein, 16 aa, Homo sapiens
  CDR3 for alpha chain variable domain of TCR clone 92109 (TRAV30, TRAJ24)
CGTEIADADSWGKFQF

SEQ ID NO: 184218 - protein, 13 aa, Homo sapiens
  CDR3 for beta chain variable domain of TCR clone 92109 (TRBV7-3, TRBJ1-1)
CASSQDWGAEAFF

SEQ ID NO: 184219 - protein, 12 aa, Homo sapiens
  CDR3 for alpha chain variable domain of TCR clone 92110 (TRAV21, TRAJ33)
CAKMDSNYQLIW

SEQ ID NO: 184220 - protein, 15 aa, Homo sapiens
  CDR3 for beta chain variable domain of TCR clone 92110 (TRBV11-2, TRBJ2-2)
CASSSDRVNAGELFF

SEQ ID NO: 184221 - protein, 15 aa, Homo sapiens
  CDR3 for alpha chain variable domain of TCR clone 92111 (TRAV4, TRAJ36)
CLVGDRQTGANNLFF

SEQ ID NO: 184222 - protein, 15 aa, Homo sapiens
  CDR3 for beta chain variable domain of TCR clone 92111 (TRBV7-6, TRBJ2-1)
CDSSSLAGEGNEQFF

SEQ ID NO: 184223 - protein, 14 aa, Homo sapiens
  CDR3 for alpha chain variable domain of TCR clone 92112 (TRAV12-1, TRAJ23)
CVVAGYNQGGKLIF

SEQ ID NO: 184224 - protein, 16 aa, Homo sapiens
  CDR3 for beta chain variable domain of TCR clone 92112 (TRBV7-2, TRBJ1-5)
CASSPWGPEGNQPQHF

SEQ ID NO: 184225 - protein, 13 aa, Homo sapiens
  CDR3 for alpha chain variable domain of TCR clone 92113 (TRAV8-3, TRAJ4)
WVFYSGGYNKLIF

SEQ ID NO: 184226 - protein, 13 aa, Homo sapiens
  CDR3 for beta chain variable domain of TCR clone 92113 (TRBV13, TRBJ2-1)
CASILGGRGEQFF

SEQ ID NO: 184227 - protein, 18 aa, Homo sapiens
  CDR3 for alpha chain variable domain of TCR clone 92114 (TRAV26-1, TRAJ23)
CIVRVGLEVWIQGGKLIF

SEQ ID NO: 184228 - protein, 16 aa, Homo sapiens
  CDR3 for beta chain variable domain of TCR clone 92114 (TRBV12-4, TRBJ2-5)
CASSFFVRGRQETQYF

SEQ ID NO: 184229 - protein, 16 aa, Homo sapiens
  CDR3 for alpha chain variable domain of TCR clone 92115 (TRAV12-2, TRAJ10)
CAVNRVLTGGGNKLTF

SEQ ID NO: 184230 - protein, 12 aa, Homo sapiens
  CDR3 for beta chain variable domain of TCR clone 92115 (TRBV28, TRBJ2-7)
CASSFSSYEHYF

SEQ ID NO: 184231 - protein, 15 aa, Homo sapiens
  CDR3 for alpha chain variable domain of TCR clone 92116 (TRAV2, TRAJ15)
CAVEDRGQAGTALIF

SEQ ID NO: 184232 - protein, 12 aa, Homo sapiens
  CDR3 for beta chain variable domain of TCR clone 92116 (TRBV28, TRBJ2-3)
CASSLYRDTQYF

SEQ ID NO: 184233 - protein, 11 aa, Homo sapiens
  CDR3 for alpha chain variable domain of TCR clone 92117 (TRAV12-3, TRAJ17)
CAMTLTGKLTF

SEQ ID NO: 184234 - protein, 15 aa, Homo sapiens
  CDR3 for beta chain variable domain of TCR clone 92117 (TRBV20-1, TRBJ2-7)
CSARDRVSGMDEQHF

SEQ ID NO: 184235 - protein, 12 aa, Homo sapiens
  CDR3 for alpha chain variable domain of TCR clone 92118 (TRAV8-3, TRAJ27)
CAVGAEAGKSTF

SEQ ID NO: 184236 - protein, 14 aa, Homo sapiens
  CDR3 for beta chain variable domain of TCR clone 92118 (TRBV2, TRBJ2-1)
CASRLIVGHDEHFF

SEQ ID NO: 184237 - protein, 14 aa, Homo sapiens
  CDR3 for alpha chain variable domain of TCR clone 92119 (TRAV12-2, TRAJ40)
CAVKIPSGTYQYIF

SEQ ID NO: 184238 - protein, 12 aa, Homo sapiens
  CDR3 for beta chain variable domain of TCR clone 92119 (TRBV11-2, TRBJ2-2)
CASSLGGGELFF

SEQ ID NO: 184239 - protein, 12 aa, Homo sapiens
  CDR3 for alpha chain variable domain of TCR clone 92120 (TRAV29/DV5, TRAJ49)
CAATDTGNQFYF

SEQ ID NO: 184240 - protein, 14 aa, Homo sapiens
  CDR3 for beta chain variable domain of TCR clone 92120 (TRBV11-2, TRBJ2-5)
CASSRTGGIETQYF

SEQ ID NO: 184241 - protein, 15 aa, Homo sapiens
  CDR3 for alpha chain variable domain of TCR clone 92121 (TRAV29/DV5, TRAJ24)
CAASGATDSWGKFQF

SEQ ID NO: 184242 - protein, 12 aa, Homo sapiens
  CDR3 for beta chain variable domain of TCR clone 92121 (TRBV11-2, TRBJ2-2)
CASSLPTGEPFF

SEQ ID NO: 184243 - protein, 14 aa, Homo sapiens
  CDR3 for alpha chain variable domain of TCR clone 92122 (TRAV12-2, TRAJ40)
CAVKIPSGTYKYIF

SEQ ID NO: 184244 - protein, 17 aa, Homo sapiens
  CDR3 for beta chain variable domain of TCR clone 92122 (TRBV7-9, TRBJ2-6)
CASSFGAGYSGANVLTF

SEQ ID NO: 184245 - protein, 16 aa, Homo sapiens
  CDR3 for alpha chain variable domain of TCR clone 92123 (TRAV30, TRAJ24)
CGTEIVDADSWGKFQL

SEQ ID NO: 184246 - protein, 15 aa, Homo sapiens
  CDR3 for beta chain variable domain of TCR clone 92123 (TRBV7-9, TRBJ1-4)
RASSARTGGNEKLFF

SEQ ID NO: 184247 - protein, 13 aa, Homo sapiens
  CDR3 for alpha chain variable domain of TCR clone 92124 (TRAV27, TRAJ45)
CRSSGGGADGLTF

SEQ ID NO: 184248 - protein, 16 aa, Homo sapiens
  CDR3 for beta chain variable domain of TCR clone 92124 (TRBV12-5, TRBJ2-5)
CASGPRTSGNQETQYF

SEQ ID NO: 184249 - protein, 10 aa, Homo sapiens
  CDR3 for alpha chain variable domain of TCR clone 92125 (TRAV23/DV6, TRAJ57)
CAASSTLTQG

SEQ ID NO: 184250 - protein, 14 aa, Homo sapiens
  CDR3 for beta chain variable domain of TCR clone 92125 (TRBV25-1, TRBJ1-1)
CASTHLGGNTEAFF

SEQ ID NO: 184251 - protein, 16 aa, Homo sapiens
  CDR3 for alpha chain variable domain of TCR clone 92126 (TRAV26-1, TRAJ32)
CIVRTNYGGATNKLIF

SEQ ID NO: 184252 - protein, 14 aa, Homo sapiens
  CDR3 for beta chain variable domain of TCR clone 92126 (TRBV27, TRBJ1-1)
CASSLLSGLSETFF

SEQ ID NO: 184253 - protein, 13 aa, Homo sapiens
  CDR3 for alpha chain variable domain of TCR clone 92127 (TRAV8-3, TRAJ31)
CAVGARNNARLMF

SEQ ID NO: 184254 - protein, 13 aa, Homo sapiens
  CDR3 for beta chain variable domain of TCR clone 92127 (TRBV4-2, TRBJ1-1)
CASSQAGNTEAFF

SEQ ID NO: 184255 - protein, 13 aa, Homo sapiens
  CDR3 for alpha chain variable domain of TCR clone 92128 (TRAV26-1, TRAJ48)
CIVRVVGDEKLTF

SEQ ID NO: 184256 - protein, 14 aa, Homo sapiens
  CDR3 for beta chain variable domain of TCR clone 92128 (TRBV7-9, TRBJ2-1)
CASSPRDSLYEQFF

SEQ ID NO: 184257 - protein, 15 aa, Homo sapiens
  CDR3 for alpha chain variable domain of TCR clone 92129 (TRAV30, TRAJ32)
CGTEILGGATNKLIF

SEQ ID NO: 184258 - protein, 13 aa, Homo sapiens
  CDR3 for beta chain variable domain of TCR clone 92129 (TRBV6-3, TRBJ2-7)
CASSFSGGYEQDF

SEQ ID NO: 184259 - protein, 17 aa, Homo sapiens
  CDR3 for alpha chain variable domain of TCR clone 92130 (TRAV13-1, TRAJ28)
CAASPPYSGAGSYQLTF

SEQ ID NO: 184260 - protein, 15 aa, Homo sapiens
  CDR3 for beta chain variable domain of TCR clone 92130 (TRBV7-9, TRBJ2-7)
CASSLALAEAYEQYF

SEQ ID NO: 184261 - protein, 11 aa, Homo sapiens
  CDR3 for alpha chain variable domain of TCR clone 92131 (TRAV2, TRAJ21)
CAVFNFNKFHF

SEQ ID NO: 184262 - protein, 14 aa, Homo sapiens
  CDR3 for beta chain variable domain of TCR clone 92131 (TRBV15, TRBJ2-3)
CATRSGASTDTQYF

SEQ ID NO: 184263 - protein, 13 aa, Homo sapiens
  CDR3 for alpha chain variable domain of TCR clone 92132 (TRAV8-3, TRAJ21)
CAVGLDNFNKFYF

SEQ ID NO: 184264 - protein, 13 aa, Homo sapiens
  CDR3 for beta chain variable domain of TCR clone 92132 (TRBV7-3, TRBJ1-1)
CASSQDWGAEAFF

SEQ ID NO: 184265 - protein, 12 aa, Homo sapiens
  CDR3 for alpha chain variable domain of TCR clone 92133 (TRAV23/DV6, TRAJ31)
CAARRIGARLMV

SEQ ID NO: 184266 - protein, 13 aa, Homo sapiens
  CDR3 for beta chain variable domain of TCR clone 92133 (TRBV28, TRBJ2-7)
CASKAGGVYEQYF

SEQ ID NO: 184267 - protein, 12 aa, Homo sapiens
  CDR3 for alpha chain variable domain of TCR clone 92134 (TRAV21, TRAJ33)
CAKMDSNYQLIW

SEQ ID NO: 184268 - protein, 15 aa, Homo sapiens
  CDR3 for beta chain variable domain of TCR clone 92134 (TRBV12-4, TRBJ2-5)
CASNPPTGLQETQYF

SEQ ID NO: 184269 - protein, 12 aa, Homo sapiens
  CDR3 for alpha chain variable domain of TCR clone 92135 (TRAV8-4, TRAJ43)
CAVSVNNNDMRF

SEQ ID NO: 184270 - protein, 12 aa, Homo sapiens
  CDR3 for beta chain variable domain of TCR clone 92135 (TRBV29-1, TRBJ2-3)
CSVTGGADTQYF

SEQ ID NO: 184271 - protein, 17 aa, Homo sapiens
  CDR3 for alpha chain variable domain of TCR clone 92136 (TRAV26-1, TRAJ58)
CIVRVGAEETSGSRLTF

SEQ ID NO: 184272 - protein, 14 aa, Homo sapiens
  CDR3 for beta chain variable domain of TCR clone 92136 (TRBV7-3, TRBJ2-1)
CASSLAGGTNEQFF

SEQ ID NO: 184273 - protein, 16 aa, Homo sapiens
  CDR3 for alpha chain variable domain of TCR clone 92137 (TRAV12-1, TRAJ4)
CVVNMGPLGGYNKLIF

SEQ ID NO: 184274 - protein, 15 aa, Homo sapiens
  CDR3 for beta chain variable domain of TCR clone 92137 (TRBV6-1, TRBJ2-3)
CASSQDGLGTDTQYF

SEQ ID NO: 184275 - protein, 16 aa, Homo sapiens
  CDR3 for alpha chain variable domain of TCR clone 92138 (TRAV8-6, TRAJ22)
CAVSPTSSGSARQLTF

SEQ ID NO: 184276 - protein, 14 aa, Homo sapiens
  CDR3 for beta chain variable domain of TCR clone 92138 (TRBV2, TRBJ2-1)
CASSARAAYNEQFF

SEQ ID NO: 184277 - protein, 14 aa, Homo sapiens
  CDR3 for alpha chain variable domain of TCR clone 92139 (TRAV21, TRAJ45)
CAVSSGGGADGLTF

SEQ ID NO: 184278 - protein, 13 aa, Homo sapiens
  CDR3 for beta chain variable domain of TCR clone 92139 (TRBV10-3, TRBJ2-7)
CASKLAVNYEQYF

SEQ ID NO: 184279 - protein, 13 aa, Homo sapiens
  CDR3 for alpha chain variable domain of TCR clone 92140 (TRAV2, TRAJ40)
CAVVTSGTYKYIF

SEQ ID NO: 184280 - protein, 17 aa, Homo sapiens
  CDR3 for beta chain variable domain of TCR clone 92140 (TRBV7-3, TRBJ2-3)
CASRLMKRMRGADTQYF

SEQ ID NO: 184281 - protein, 12 aa, Homo sapiens
  CDR3 for alpha chain variable domain of TCR clone 92141 (TRAV6, TRAJ23)
CALYNQGGKLIF

SEQ ID NO: 184282 - protein, 14 aa, Homo sapiens
  CDR3 for beta chain variable domain of TCR clone 92141 (TRBV11-2, TRBJ2-7)
CASSLGAGAYEQYF

SEQ ID NO: 184283 - protein, 15 aa, Homo sapiens
  CDR3 for alpha chain variable domain of TCR clone 92142 (TRAV3, TRAJ17)
CAASPKEAAGNKLTF

SEQ ID NO: 184284 - protein, 12 aa, Homo sapiens
  CDR3 for beta chain variable domain of TCR clone 92142 (TRBV7-9, TRBJ1-6)
CASSLMTSPLHF

SEQ ID NO: 184285 - protein, 14 aa, Homo sapiens
  CDR3 for alpha chain variable domain of TCR clone 92143 (TRAV26-1, TRAJ38)
CIADNAGNNRKLIW

SEQ ID NO: 184286 - protein, 14 aa, Homo sapiens
  CDR3 for beta chain variable domain of TCR clone 92143 (TRBV7-3, TRBJ1-1)
CASSLGTGYTEAFF

SEQ ID NO: 184287 - protein, 16 aa, Homo sapiens
  CDR3 for alpha chain variable domain of TCR clone 92144 (TRAV30, TRAJ24)
CGTEIVDADSWGKFQF

SEQ ID NO: 184288 - protein, 15 aa, Homo sapiens
  CDR3 for beta chain variable domain of TCR clone 92144 (TRBV24-1, TRBJ2-1)
CATRASGGQYNEQFF

SEQ ID NO: 184289 - protein, 10 aa, Homo sapiens
  CDR3 for alpha chain variable domain of TCR clone 92145 (TRAV16, TRAJ22)
SAMYLRQLTF

SEQ ID NO: 184290 - protein, 13 aa, Homo sapiens
  CDR3 for beta chain variable domain of TCR clone 92145 (TRBV19, TRBJ1-2)
CASSVPGQDGYTF

SEQ ID NO: 184291 - protein, 16 aa, Homo sapiens
  CDR3 for alpha chain variable domain of TCR clone 92146 (TRAV14/DV4, TRAJ54)
CAMRGGRIQGAQKLVF

SEQ ID NO: 184292 - protein, 12 aa, Homo sapiens
  CDR3 for beta chain variable domain of TCR clone 92146 (TRBV11-2, TRBJ2-2)
CASSLGGGELFF

SEQ ID NO: 184293 - protein, 18 aa, Homo sapiens
  CDR3 for alpha chain variable domain of TCR clone 92147 (TRAV12-3, TRAJ52)
CAMSVGGAGGTSYGKLTF

SEQ ID NO: 184294 - protein, 12 aa, Homo sapiens
  CDR3 for beta chain variable domain of TCR clone 92147 (TRBV7-9, TRBJ2-7)
CASSLEGYEQYF

SEQ ID NO: 184295 - protein, 13 aa, Homo sapiens
  CDR3 for alpha chain variable domain of TCR clone 92148 (TRAV1-2, TRAJ33)
CAVSEDSNHQLIW

SEQ ID NO: 184296 - protein, 16 aa, Homo sapiens
  CDR3 for beta chain variable domain of TCR clone 92148 (TRBV4-2, TRBJ2-7)
CASSQDGVERGYEQYF

SEQ ID NO: 184297 - protein, 15 aa, Homo sapiens
  CDR3 for alpha chain variable domain of TCR clone 92149 (TRAV8-3, TRAJ27)
CAVGPSKTNAGRSTF

SEQ ID NO: 184298 - protein, 13 aa, Homo sapiens
  CDR3 for beta chain variable domain of TCR clone 92149 (TRBV11-3, TRBJ2-7)
CASSLDKLYEQYF

SEQ ID NO: 184299 - protein, 13 aa, Homo sapiens
  CDR3 for alpha chain variable domain of TCR clone 92150 (TRAV26-2, TRAJ43)
CILRAVNNNDMRF

SEQ ID NO: 184300 - protein, 13 aa, Homo sapiens
  CDR3 for beta chain variable domain of TCR clone 92150 (TRBV7-9, TRBJ2-2)
CASSLSSSGELFF

SEQ ID NO: 184301 - protein, 14 aa, Homo sapiens
  CDR3 for alpha chain variable domain of TCR clone 92151 (TRAV17, TRAJ39)
CATDPVRAGNMLTF

SEQ ID NO: 184302 - protein, 15 aa, Homo sapiens
  CDR3 for beta chain variable domain of TCR clone 92151 (TRBV13, TRBJ1-5)
CASSFVQGGVQPQHF

SEQ ID NO: 184303 - protein, 14 aa, Homo sapiens
  CDR3 for alpha chain variable domain of TCR clone 92152 (TRAV1-2, TRAJ16)
CAVNRFSDGPKLLF

SEQ ID NO: 184304 - protein, 15 aa, Homo sapiens
  CDR3 for beta chain variable domain of TCR clone 92152 (TRBV20-1, TRBJ2-7)
CSARDRVSGMDEQYF

SEQ ID NO: 184305 - protein, 17 aa, Homo sapiens
  CDR3 for alpha chain variable domain of TCR clone 92153 (TRAV3, TRAJ42)
CAVRDRNYGGSQGNLIF

SEQ ID NO: 184306 - protein, 18 aa, Homo sapiens
  CDR3 for beta chain variable domain of TCR clone 92153 (TRBV20-1, TRBJ2-3)
CSASGLAGGPGTTDTQYF

SEQ ID NO: 184307 - protein, 16 aa, Homo sapiens
  CDR3 for alpha chain variable domain of TCR clone 92154 (TRAV12-2, TRAJ45)
CAVKRNPGGGADGLTL

SEQ ID NO: 184308 - protein, 12 aa, Homo sapiens
  CDR3 for beta chain variable domain of TCR clone 92154 (TRBV6-1, TRBJ2-5)
CASSEGRETQYF

SEQ ID NO: 184309 - protein, 11 aa, Homo sapiens
  CDR3 for alpha chain variable domain of TCR clone 92155 (TRAV3, TRAJ21)
CAVGNFNKFYF

SEQ ID NO: 184310 - protein, 14 aa, Homo sapiens
  CDR3 for beta chain variable domain of TCR clone 92155 (TRBV29-1, TRBJ2-2)
CSGRGSGNTGELFV

SEQ ID NO: 184311 - protein, 15 aa, Homo sapiens
  CDR3 for alpha chain variable domain of TCR clone 92156 (TRAV26-1, TRAJ22)
CIVRVSFWFCKATDL

SEQ ID NO: 184312 - protein, 16 aa, Homo sapiens
  CDR3 for beta chain variable domain of TCR clone 92156 (TRBV12-4, TRBJ1-5)
CASSRPVGGSNQPQHF

SEQ ID NO: 184313 - protein, 13 aa, Homo sapiens
  CDR3 for alpha chain variable domain of TCR clone 92157 (TRAV23/DV6, TRAJ31)
CAARRGNNARLMF

SEQ ID NO: 184314 - protein, 11 aa, Homo sapiens
  CDR3 for beta chain variable domain of TCR clone 92157 (TRBV19, TRBJ1-1)
CASSIGSEAFF

SEQ ID NO: 184315 - protein, 12 aa, Homo sapiens
  CDR3 for alpha chain variable domain of TCR clone 92158 (TRAV13-2, TRAJ31)
CAESYNNARLMF

SEQ ID NO: 184316 - protein, 13 aa, Homo sapiens
  CDR3 for beta chain variable domain of TCR clone 92158 (TRBV24-1, TRBJ1-3)
CATMADSGNTIYV

SEQ ID NO: 184317 - protein, 18 aa, Homo sapiens
  CDR3 for alpha chain variable domain of TCR clone 92159 (TRAV26-1, TRAJ37)
CIVRVDMHGSSNTGKLIF

SEQ ID NO: 184318 - protein, 15 aa, Homo sapiens
  CDR3 for beta chain variable domain of TCR clone 92159 (TRBV20-1, TRBJ2-7)
CSARVLASPRYEQYF

SEQ ID NO: 184319 - protein, 16 aa, Homo sapiens
  CDR3 for alpha chain variable domain of TCR clone 92160 (TRAV14/DV4, TRAJ54)
CAMREGRIQGAQKLVF

SEQ ID NO: 184320 - protein, 13 aa, Homo sapiens
  CDR3 for beta chain variable domain of TCR clone 92160 (TRBV12-4, TRBJ2-7)
CASSLSGVYEQYF

SEQ ID NO: 184321 - protein, 15 aa, Homo sapiens
  CDR3 for alpha chain variable domain of TCR clone 92161 (TRAV17, TRAJ23)
CATDAEDNQGGKLIF

SEQ ID NO: 184322 - protein, 14 aa, Homo sapiens
  CDR3 for beta chain variable domain of TCR clone 92161 (TRBV11-2, TRBJ2-5)
CASRPLAGRETQYF

SEQ ID NO: 184323 - protein, 20 aa, Homo sapiens
  CDR3 for alpha chain variable domain of TCR clone 92162 (TRAV25, TRAJ21)
TATQTTDVGTYPLSFNKFYF

SEQ ID NO: 184324 - protein, 13 aa, Homo sapiens
  CDR3 for beta chain variable domain of TCR clone 92162 (TRBV7-3, TRBJ1-1)
CASSQDWGAEAFF

SEQ ID NO: 184325 - protein, 16 aa, Homo sapiens
  CDR3 for alpha chain variable domain of TCR clone 92163 (TRAV3, TRAJ10)
CAVRDMRAGGGNKLTF

SEQ ID NO: 184326 - protein, 13 aa, Homo sapiens
  CDR3 for beta chain variable domain of TCR clone 92163 (TRBV6-1, TRBJ1-1)
CASSRQGSTEAFF

SEQ ID NO: 184327 - protein, 14 aa, Homo sapiens
  CDR3 for alpha chain variable domain of TCR clone 92164 (TRAV13-1, TRAJ44)
CAAKATGTASKLTF

SEQ ID NO: 184328 - protein, 17 aa, Homo sapiens
  CDR3 for beta chain variable domain of TCR clone 92164 (TRBV7-3, TRBJ2-3)
CASSLMKRMRGAGTQYF

SEQ ID NO: 184329 - protein, 17 aa, Homo sapiens
  CDR3 for alpha chain variable domain of TCR clone 92165 (TRAV12-1, TRAJ42)
CVVMRMNYGGSQGNRIF

SEQ ID NO: 184330 - protein, 13 aa, Homo sapiens
  CDR3 for beta chain variable domain of TCR clone 92165 (TRBV7-2, TRBJ1-1)
CASSLARPAEAFF

SEQ ID NO: 184331 - protein, 12 aa, Homo sapiens
  CDR3 for alpha chain variable domain of TCR clone 92166 (TRAV12-2, TRAJ21)
CAVRYTFNKFYF

SEQ ID NO: 184332 - protein, 14 aa, Homo sapiens
  CDR3 for beta chain variable domain of TCR clone 92166 (TRBV28, TRBJ2-1)
CASSYYTAYNEQFF

SEQ ID NO: 184333 - protein, 14 aa, Homo sapiens
  CDR3 for alpha chain variable domain of TCR clone 92167 (TRAV4, TRAJ6)
CLVGEAGGSYIPTF

SEQ ID NO: 184334 - protein, 16 aa, Homo sapiens
  CDR3 for beta chain variable domain of TCR clone 92167 (TRBV7-6, TRBJ2-1)
CASSLNEGPSYDEQFF

SEQ ID NO: 184335 - protein, 10 aa, Homo sapiens
  CDR3 for alpha chain variable domain of TCR clone 92168 (TRAV23/DV6, TRAJ57)
CAASSTLSQG

SEQ ID NO: 184336 - protein, 14 aa, Homo sapiens
  CDR3 for beta chain variable domain of TCR clone 92168 (TRBV4-2, TRBJ2-1)
CASGLDRAYNEQFF

SEQ ID NO: 184337 - protein, 11 aa, Homo sapiens
  CDR3 for alpha chain variable domain of TCR clone 92169 (TRAV3, TRAJ21)
CAVGNSNKFYF

SEQ ID NO: 184338 - protein, 16 aa, Homo sapiens
  CDR3 for beta chain variable domain of TCR clone 92169 (TRBV19, TRBJ2-1)
CASSKAGPSAYNEQFF

SEQ ID NO: 184339 - protein, 16 aa, Homo sapiens
  CDR3 for alpha chain variable domain of TCR clone 92170 (TRAV3, TRAJ10)
CAVRDMRAGGGNKLTF

SEQ ID NO: 184340 - protein, 11 aa, Homo sapiens
  CDR3 for beta chain variable domain of TCR clone 92170 (TRBV13, TRBJ2-3)
CASGNADTQYF

SEQ ID NO: 184341 - protein, 15 aa, Homo sapiens
  CDR3 for alpha chain variable domain of TCR clone 92171 (TRAV21, TRAJ45)
CAVSYSGGGADGLTF

SEQ ID NO: 184342 - protein, 13 aa, Homo sapiens
  CDR3 for beta chain variable domain of TCR clone 92171 (TRBV20-1, TRBJ2-5)
CSAATDLQETQYF

SEQ ID NO: 184343 - protein, 14 aa, Homo sapiens
  CDR3 for alpha chain variable domain of TCR clone 92172 (TRAV26-1, TRAJ38)
CIADNAGNNRKLIW

SEQ ID NO: 184344 - protein, 16 aa, Homo sapiens
  CDR3 for beta chain variable domain of TCR clone 92172 (TRBV27, TRBJ2-2)
CASSSSGVSNTGELFF

SEQ ID NO: 184345 - protein, 11 aa, Homo sapiens
  CDR3 for alpha chain variable domain of TCR clone 92173 (TRAV12-2, TRAJ29)
CAVTLRSPLVF

SEQ ID NO: 184346 - protein, 16 aa, Homo sapiens
  CDR3 for beta chain variable domain of TCR clone 92173 (TRBV19, TRBJ1-5)
CASSIGRGGPRQPQHF

SEQ ID NO: 184347 - protein, 13 aa, Homo sapiens
  CDR3 for alpha chain variable domain of TCR clone 92174 (TRAV23/DV6, TRAJ27)
CAASKPMQANQPL

SEQ ID NO: 184348 - protein, 14 aa, Homo sapiens
  CDR3 for beta chain variable domain of TCR clone 92174 (TRBV5-4, TRBJ1-1)
CASSLDSRRDEVFF

SEQ ID NO: 184349 - protein, 12 aa, Homo sapiens
  CDR3 for alpha chain variable domain of TCR clone 92175 (TRAV26-1, TRAJ17)
CIPQSCRQQANF

SEQ ID NO: 184350 - protein, 16 aa, Homo sapiens
  CDR3 for beta chain variable domain of TCR clone 92175 (TRBV28, TRBJ1-4)
CASSSRTGAANEKLFF

SEQ ID NO: 184351 - protein, 13 aa, Homo sapiens
  CDR3 for alpha chain variable domain of TCR clone 92176 (TRAV27, TRAJ41)
CAGEGNSGYALNF

SEQ ID NO: 184352 - protein, 14 aa, Homo sapiens
  CDR3 for beta chain variable domain of TCR clone 92176 (TRBV7-2, TRBJ1-1)
CASSFLTEATEAFF

SEQ ID NO: 184353 - protein, 14 aa, Homo sapiens
  CDR3 for alpha chain variable domain of TCR clone 92177 (TRAV2, TRAJ12)
CAVDAMDSSCKLIF

SEQ ID NO: 184354 - protein, 13 aa, Homo sapiens
  CDR3 for beta chain variable domain of TCR clone 92177 (TRBV19, TRBJ2-1)
CASKVGAGGEQFF

SEQ ID NO: 184355 - protein, 15 aa, Homo sapiens
  CDR3 for alpha chain variable domain of TCR clone 92178 (TRAV8-3, TRAJ45)
CASSYSRGGADGLTF

SEQ ID NO: 184356 - protein, 12 aa, Homo sapiens
  CDR3 for beta chain variable domain of TCR clone 92178 (TRBV12-4, TRBJ2-7)
CASSLGGYEQYF

SEQ ID NO: 184357 - protein, 11 aa, Homo sapiens
  CDR3 for alpha chain variable domain of TCR clone 92179 (TRAV35, TRAJ34)
CWARKTDKLIF

SEQ ID NO: 184358 - protein, 13 aa, Homo sapiens
  CDR3 for beta chain variable domain of TCR clone 92179 (TRBV19, TRBJ2-7)
CASSIDRTYEQYF

SEQ ID NO: 184359 - protein, 14 aa, Homo sapiens
  CDR3 for alpha chain variable domain of TCR clone 92180 (TRAV23/DV6, TRAJ37)
CAASTSSNTGKLIF

SEQ ID NO: 184360 - protein, 14 aa, Homo sapiens
  CDR3 for beta chain variable domain of TCR clone 92180 (TRBV12-5, TRBJ2-5)
CASGSRTHQETQYF

SEQ ID NO: 184361 - protein, 11 aa, Homo sapiens
  CDR3 for alpha chain variable domain of TCR clone 92181 (TRAV13-1, TRAJ6)
CATLGSYIPTF

SEQ ID NO: 184362 - protein, 12 aa, Homo sapiens
  CDR3 for beta chain variable domain of TCR clone 92181 (TRBV11-2, TRBJ2-1)
CASSPGNNERFF

SEQ ID NO: 184363 - protein, 15 aa, Homo sapiens
  CDR3 for alpha chain variable domain of TCR clone 92182 (TRAV26-1, TRAJ29)
CIVRVEGSGNTPLVF

SEQ ID NO: 184364 - protein, 17 aa, Homo sapiens
  CDR3 for beta chain variable domain of TCR clone 92182 (TRBV28, TRBJ2-3)
CASRNPSYGFSTDTQYF

SEQ ID NO: 184365 - protein, 14 aa, Homo sapiens
  CDR3 for alpha chain variable domain of TCR clone 92183 (TRAV1-2, TRAJ16)
CAVNRFSDGQKLLF

SEQ ID NO: 184366 - protein, 15 aa, Homo sapiens
  CDR3 for beta chain variable domain of TCR clone 92183 (TRBV3-1, TRBJ2-1)
CASSQDYTPRGEQFF

SEQ ID NO: 184367 - protein, 14 aa, Homo sapiens
  CDR3 for alpha chain variable domain of TCR clone 92184 (TRAV1-2, TRAJ8)
CAVREDTGFQKLVF

SEQ ID NO: 184368 - protein, 13 aa, Homo sapiens
  CDR3 for beta chain variable domain of TCR clone 92184 (TRBV2, TRBJ2-1)
CASISGGNNEQFF

SEQ ID NO: 184369 - protein, 12 aa, Homo sapiens
  CDR3 for alpha chain variable domain of TCR clone 92185 (TRAV17, TRAJ20)
CATDSNDYKLSF

SEQ ID NO: 184370 - protein, 13 aa, Homo sapiens
  CDR3 for beta chain variable domain of TCR clone 92185 (TRBV27, TRBJ2-3)
CASSLSRTDTQYF

SEQ ID NO: 184371 - protein, 13 aa, Homo sapiens
  CDR3 for alpha chain variable domain of TCR clone 92186 (TRAV21, TRAJ27)
CAARPGNAGKSTF

SEQ ID NO: 184372 - protein, 14 aa, Homo sapiens
  CDR3 for beta chain variable domain of TCR clone 92186 (TRBV5-4, TRBJ1-1)
CASSLESRRDEAFF

SEQ ID NO: 184373 - protein, 12 aa, Homo sapiens
  CDR3 for alpha chain variable domain of TCR clone 92187 (TRAV3, TRAJ43)
CAVRDPNNDMRF

SEQ ID NO: 184374 - protein, 14 aa, Homo sapiens
  CDR3 for beta chain variable domain of TCR clone 92187 (TRBV27, TRBJ1-5)
CQQSRDRVRSAQHF

SEQ ID NO: 184375 - protein, 13 aa, Homo sapiens
  CDR3 for alpha chain variable domain of TCR clone 92188 (TRAV2, TRAJ29)
CAAQNSGNTPLVF

SEQ ID NO: 184376 - protein, 14 aa, Homo sapiens
  CDR3 for beta chain variable domain of TCR clone 92188 (TRBV7-9, TRBJ1-2)
CASSRQGANYGYTF

SEQ ID NO: 184377 - protein, 11 aa, Homo sapiens
  CDR3 for alpha chain variable domain of TCR clone 92189 (TRAV1-2, TRAJ40)
CAVPGTYKYIF

SEQ ID NO: 184378 - protein, 16 aa, Homo sapiens
  CDR3 for beta chain variable domain of TCR clone 92189 (TRBV19, TRBJ2-1)
CASSIQAGGSYNEQFF

SEQ ID NO: 184379 - protein, 11 aa, Homo sapiens
  CDR3 for alpha chain variable domain of TCR clone 92190 (TRAV2, TRAJ20)
AAVYRDCKLSF

SEQ ID NO: 184380 - protein, 16 aa, Homo sapiens
  CDR3 for beta chain variable domain of TCR clone 92190 (TRBV9, TRBJ2-2)
CASSAMGKGNTGELFF

SEQ ID NO: 184381 - protein, 17 aa, Homo sapiens
  CDR3 for alpha chain variable domain of TCR clone 92191 (TRAV13-1, TRAJ52)
CAAGRNAGGTSYGKLTF

SEQ ID NO: 184382 - protein, 13 aa, Homo sapiens
  CDR3 for beta chain variable domain of TCR clone 92191 (TRBV7-2, TRBJ1-1)
CASNLKGVKVAFF

SEQ ID NO: 184383 - protein, 13 aa, Homo sapiens
  CDR3 for alpha chain variable domain of TCR clone 92192 (TRAV36/DV7, TRAJ54)
FAVDIQGAQKLVF

SEQ ID NO: 184384 - protein, 14 aa, Homo sapiens
  CDR3 for beta chain variable domain of TCR clone 92192 (TRBV19, TRBJ2-7)
CASNFRDTFTGMYF

SEQ ID NO: 184385 - protein, 12 aa, Homo sapiens
  CDR3 for alpha chain variable domain of TCR clone 92193 (TRAV12-2, TRAJ10)
WGVTGGGSKLTF

SEQ ID NO: 184386 - protein, 14 aa, Homo sapiens
  CDR3 for beta chain variable domain of TCR clone 92193 (TRBV20-1, TRBJ2-1)
CSAQIGGSANEQFF

SEQ ID NO: 184387 - protein, 14 aa, Homo sapiens
  CDR3 for alpha chain variable domain of TCR clone 92194 (TRAV12-3, TRAJ10)
SHLPLTGGGNKLTF

SEQ ID NO: 184388 - protein, 15 aa, Homo sapiens
  CDR3 for beta chain variable domain of TCR clone 92194 (TRBV4-1, TRBJ1-4)
CASSDTGGTNEKLFL

SEQ ID NO: 184389 - protein, 15 aa, Homo sapiens
  CDR3 for alpha chain variable domain of TCR clone 92195 (TRAV4, TRAJ39)
CLVGPNINAGNMLTF

SEQ ID NO: 184390 - protein, 13 aa, Homo sapiens
  CDR3 for beta chain variable domain of TCR clone 92195 (TRBV11-2, TRBJ2-5)
CASSSTGEETQYF

SEQ ID NO: 184391 - protein, 13 aa, Homo sapiens
  CDR3 for alpha chain variable domain of TCR clone 92196 (TRAV38-1, TRAJ42)
CARWGGSQGNLIF

SEQ ID NO: 184392 - protein, 17 aa, Homo sapiens
  CDR3 for beta chain variable domain of TCR clone 92196 (TRBV20-1, TRBJ2-1)
CSVRDPLAGVWDNEQFF

SEQ ID NO: 184393 - protein, 14 aa, Homo sapiens
  CDR3 for alpha chain variable domain of TCR clone 92197 (TRAV1-2, TRAJ16)
CAVNRFSDGQKLLF

SEQ ID NO: 184394 - protein, 13 aa, Homo sapiens
  CDR3 for beta chain variable domain of TCR clone 92197 (TRBV18, TRBJ2-5)
CASSLQGQETQYF

SEQ ID NO: 184395 - protein, 15 aa, Homo sapiens
  CDR3 for alpha chain variable domain of TCR clone 92198 (TRAV27, TRAJ38)
CAARRNAGNNRKLIW

SEQ ID NO: 184396 - protein, 13 aa, Homo sapiens
  CDR3 for beta chain variable domain of TCR clone 92198 (TRBV28, TRBJ2-5)
CASSFAGGETQYF

SEQ ID NO: 184397 - protein, 14 aa, Homo sapiens
  CDR3 for alpha chain variable domain of TCR clone 92199 (TRAV4, TRAJ17)
FLVGDMAAGNKLTF

SEQ ID NO: 184398 - protein, 13 aa, Homo sapiens
  CDR3 for beta chain variable domain of TCR clone 92199 (TRBV18, TRBJ2-7)
CASQSGGGYEQYF

SEQ ID NO: 184399 - protein, 14 aa, Homo sapiens
  CDR3 for alpha chain variable domain of TCR clone 92200 (TRAV27, TRAJ36)
CAGPPKRGANNLFF

SEQ ID NO: 184400 - protein, 15 aa, Homo sapiens
  CDR3 for beta chain variable domain of TCR clone 92200 (TRBV18, TRBJ2-7)
CATSPASTPNYEQYF

SEQ ID NO: 184401 - protein, 11 aa, Homo sapiens
  CDR3 for alpha chain variable domain of TCR clone 92201 (TRAV2, TRAJ33)
CAVDSNYQLIW

SEQ ID NO: 184402 - protein, 15 aa, Homo sapiens
  CDR3 for beta chain variable domain of TCR clone 92201 (TRBV2, TRBJ2-1)
CASSEEREGDNEQFF

SEQ ID NO: 184403 - protein, 11 aa, Homo sapiens
  CDR3 for alpha chain variable domain of TCR clone 92202 (TRAV12-3, TRAJ43)
CAMSVSNDMRF

SEQ ID NO: 184404 - protein, 17 aa, Homo sapiens
  CDR3 for beta chain variable domain of TCR clone 92202 (TRBV7-2, TRBJ2-3)
CASSARSSGSPTDTQYF

SEQ ID NO: 184405 - protein, 12 aa, Homo sapiens
  CDR3 for alpha chain variable domain of TCR clone 92203 (TRAV12-1, TRAJ40)
CVFYSGTYKYIF

SEQ ID NO: 184406 - protein, 13 aa, Homo sapiens
  CDR3 for beta chain variable domain of TCR clone 92203 (TRBV19, TRBJ1-2)
CASSVPGQDGYTF

SEQ ID NO: 184407 - protein, 23 aa, Homo sapiens
  CDR3 for alpha chain variable domain of TCR clone 92204 (TRAV26-1, TRAJ38)
CIAANAGNNHIQNPDPAVYQLRD

SEQ ID NO: 184408 - protein, 15 aa, Homo sapiens
  CDR3 for beta chain variable domain of TCR clone 92204 (TRBV27, TRBJ2-1)
CASSNGGGSSNEQFF

SEQ ID NO: 184409 - protein, 15 aa, Homo sapiens
  CDR3 for alpha chain variable domain of TCR clone 92205 (TRAV8-4, TRAJ37)
CAVTYGSSNTGKLIF

SEQ ID NO: 184410 - protein, 17 aa, Homo sapiens
  CDR3 for beta chain variable domain of TCR clone 92205 (TRBV20-1, TRBJ2-2)
CSVSGSGQGGLTGELFF

SEQ ID NO: 184411 - protein, 17 aa, Homo sapiens
  CDR3 for alpha chain variable domain of TCR clone 92206 (TRAV26-1, TRAJ37)
CIVRVITVSSNTGKLIF

SEQ ID NO: 184412 - protein, 13 aa, Homo sapiens
  CDR3 for beta chain variable domain of TCR clone 92206 (TRBV4-1, TRBJ2-2)
CASSQENTGELFF

SEQ ID NO: 184413 - protein, 14 aa, Homo sapiens
  CDR3 for alpha chain variable domain of TCR clone 92207 (TRAV12-1, TRAJ30)
CVVNIGGRDAKIIF

SEQ ID NO: 184414 - protein, 15 aa, Homo sapiens
  CDR3 for beta chain variable domain of TCR clone 92207 (TRBV18, TRBJ1-2)
CASSPSNTPNYGYTF

SEQ ID NO: 184415 - protein, 11 aa, Homo sapiens
  CDR3 for alpha chain variable domain of TCR clone 92208 (TRAV35, TRAJ57)
GPQGGSEKLVF

SEQ ID NO: 184416 - protein, 18 aa, Homo sapiens
  CDR3 for beta chain variable domain of TCR clone 92208 (TRBV7-2, TRBJ2-3)
CASSLKREGSGITDTQYF

SEQ ID NO: 184417 - protein, 14 aa, Homo sapiens
  CDR3 for alpha chain variable domain of TCR clone 92209 (TRAV8-4, TRAJ4)
CAVSPSGGSNKLIF

SEQ ID NO: 184418 - protein, 15 aa, Homo sapiens
  CDR3 for beta chain variable domain of TCR clone 92209 (TRBV7-8, TRBJ2-3)
CASSLSADSGGAQYF

SEQ ID NO: 184419 - protein, 17 aa, Homo sapiens
  CDR3 for alpha chain variable domain of TCR clone 92210 (TRAV8-6, TRAJ8)
CAVKEGIENTGFQKLVL

SEQ ID NO: 184420 - protein, 12 aa, Homo sapiens
  CDR3 for beta chain variable domain of TCR clone 92210 (TRBV19, TRBJ1-4)
CASKDWPGGLFF

SEQ ID NO: 184421 - protein, 13 aa, Homo sapiens
  CDR3 for alpha chain variable domain of TCR clone 92211 (TRAV3, TRAJ20)
CAVRSLNAYKLSF

SEQ ID NO: 184422 - protein, 13 aa, Homo sapiens
  CDR3 for beta chain variable domain of TCR clone 92211 (TRBV7-3, TRBJ1-1)
CASSQDWGAEAFF

SEQ ID NO: 184423 - protein, 11 aa, Homo sapiens
  CDR3 for alpha chain variable domain of TCR clone 92212 (TRAV12-2, TRAJ29)
CSVTLRSPLVF

SEQ ID NO: 184424 - protein, 15 aa, Homo sapiens
  CDR3 for beta chain variable domain of TCR clone 92212 (TRBV4-1, TRBJ2-5)
CASSQWDLYQETQYF

SEQ ID NO: 184425 - protein, 14 aa, Homo sapiens
  CDR3 for alpha chain variable domain of TCR clone 92213 (TRAV12-1, TRAJ12)
CVVTRMDSSYKLIF

SEQ ID NO: 184426 - protein, 14 aa, Homo sapiens
  CDR3 for beta chain variable domain of TCR clone 92213 (TRBV18, TRBJ2-7)
CASSPRGGAYEQYF

SEQ ID NO: 184427 - protein, 15 aa, Homo sapiens
  CDR3 for alpha chain variable domain of TCR clone 92214 (TRAV26-1, TRAJ29)
CIVRVEGSGNTPLVF

SEQ ID NO: 184428 - protein, 12 aa, Homo sapiens
  CDR3 for beta chain variable domain of TCR clone 92214 (TRBV27, TRBJ2-2)
CASKLFTGELFF

SEQ ID NO: 184429 - protein, 17 aa, Homo sapiens
  CDR3 for alpha chain variable domain of TCR clone 92215 (TRAV38-2/DV8, TRAJ28)
CAFLTLYSGAGSYQLPF

SEQ ID NO: 184430 - protein, 14 aa, Homo sapiens
  CDR3 for beta chain variable domain of TCR clone 92215 (TRBV7-2, TRBJ2-5)
CASSLSGGGETQYF

SEQ ID NO: 184431 - protein, 14 aa, Homo sapiens
  CDR3 for alpha chain variable domain of TCR clone 92216 (TRAV12-2, TRAJ45)
CAVNIGGGADGLTF

SEQ ID NO: 184432 - protein, 16 aa, Homo sapiens
  CDR3 for beta chain variable domain of TCR clone 92216 (TRBV19, TRBJ2-2)
CASRSPGTGATGELFF

SEQ ID NO: 184433 - protein, 14 aa, Homo sapiens
  CDR3 for alpha chain variable domain of TCR clone 92217 (TRAV2, TRAJ37)
CAVDFTSNTGKLIF

SEQ ID NO: 184434 - protein, 15 aa, Homo sapiens
  CDR3 for beta chain variable domain of TCR clone 92217 (TRBV10-3, TRBJ2-1)
CAIRNGTSGHNEQFF

SEQ ID NO: 184435 - protein, 16 aa, Homo sapiens
  CDR3 for alpha chain variable domain of TCR clone 92218 (TRAV30, TRAJ24)
CGTEIVDADSWGKFQF

SEQ ID NO: 184436 - protein, 14 aa, Homo sapiens
  CDR3 for beta chain variable domain of TCR clone 92218 (TRBV7-2, TRBJ2-1)
CASSLVAGRNEQFF

SEQ ID NO: 184437 - protein, 10 aa, Homo sapiens
  CDR3 for alpha chain variable domain of TCR clone 92219 (TRAV1-2, TRAJ31)
CAFFDARLMF

SEQ ID NO: 184438 - protein, 14 aa, Homo sapiens
  CDR3 for beta chain variable domain of TCR clone 92219 (TRBV19, TRBJ1-5)
CASRAPDSFLSQHF

SEQ ID NO: 184439 - protein, 15 aa, Homo sapiens
  CDR3 for alpha chain variable domain of TCR clone 92220 (TRAV3, TRAJ22)
CAVRDRGGSARQLTF

SEQ ID NO: 184440 - protein, 14 aa, Homo sapiens
  CDR3 for beta chain variable domain of TCR clone 92220 (TRBV19, TRBJ2-2)
CASSGQGIAGELFF

SEQ ID NO: 184441 - protein, 12 aa, Homo sapiens
  CDR3 for alpha chain variable domain of TCR clone 92221 (TRAV8-3, TRAJ34)
CAVRGNTDKLIF

SEQ ID NO: 184442 - protein, 17 aa, Homo sapiens
  CDR3 for beta chain variable domain of TCR clone 92221 (TRBV20-1, TRBJ2-1)
CSASSSGLAGSYNEQFF

SEQ ID NO: 184443 - protein, 14 aa, Homo sapiens
  CDR3 for alpha chain variable domain of TCR clone 92222 (TRAV4, TRAJ9)
CLVGSGTGGCKTIF

SEQ ID NO: 184444 - protein, 15 aa, Homo sapiens
  CDR3 for beta chain variable domain of TCR clone 92222 (TRBV7-2, TRBJ2-1)
CASSLASGRVNEQFF

SEQ ID NO: 184445 - protein, 13 aa, Homo sapiens
  CDR3 for alpha chain variable domain of TCR clone 92223 (TRAV12-3, TRAJ33)
CAMSVNSNYQLIW

SEQ ID NO: 184446 - protein, 13 aa, Homo sapiens
  CDR3 for beta chain variable domain of TCR clone 92223 (TRBV6-5, TRBJ2-7)
CASRTSGIHEQYF

SEQ ID NO: 184447 - protein, 14 aa, Homo sapiens
  CDR3 for alpha chain variable domain of TCR clone 92224 (TRAV3, TRAJ21)
CAVRDAYNFNKFYF

SEQ ID NO: 184448 - protein, 17 aa, Homo sapiens
  CDR3 for beta chain variable domain of TCR clone 92224 (TRBV20-1, TRBJ1-6)
CSARGGYTFSYNPPLHF

SEQ ID NO: 184449 - protein, 22 aa, Homo sapiens
  CDR3 for alpha chain variable domain of TCR clone 92225 (TRAV27, TRAJ38)
CAARRNAGNNHIQNPDPAVYQL

SEQ ID NO: 184450 - protein, 13 aa, Homo sapiens
  CDR3 for beta chain variable domain of TCR clone 92225 (TRBV12-5, TRBJ2-3)
CASGDRQSDTQCF

SEQ ID NO: 184451 - protein, 12 aa, Homo sapiens
  CDR3 for alpha chain variable domain of TCR clone 92226 (TRAV21, TRAJ58)
CAAETSGSRLTF

SEQ ID NO: 184452 - protein, 15 aa, Homo sapiens
  CDR3 for beta chain variable domain of TCR clone 92226 (TRBV20-1, TRBJ2-7)
CSARDPVKGEGEQCF

SEQ ID NO: 184453 - protein, 14 aa, Homo sapiens
  CDR3 for alpha chain variable domain of TCR clone 92227 (TRAV30, TRAJ29)
CGTELFQETHLLSF

SEQ ID NO: 184454 - protein, 15 aa, Homo sapiens
  CDR3 for beta chain variable domain of TCR clone 92227 (TRBV5-1, TRBJ2-2)
CASSLFGQNTGELFF

SEQ ID NO: 184455 - protein, 17 aa, Homo sapiens
  CDR3 for alpha chain variable domain of TCR clone 92228 (TRAV8-6, TRAJ58)
CAVSSWVGETSGSRLTF

SEQ ID NO: 184456 - protein, 15 aa, Homo sapiens
  CDR3 for beta chain variable domain of TCR clone 92228 (TRBV7-2, TRBJ2-1)
CASSSGLAGGNEQFF

SEQ ID NO: 184457 - protein, 14 aa, Homo sapiens
  CDR3 for alpha chain variable domain of TCR clone 92229 (TRAV1-2, TRAJ8)
CAAREDTGFQELVF

SEQ ID NO: 184458 - protein, 17 aa, Homo sapiens
  CDR3 for beta chain variable domain of TCR clone 92229 (TRBV11-2, TRBJ2-1)
CASSLYPPGVEYNEQFF

SEQ ID NO: 184459 - protein, 14 aa, Homo sapiens
  CDR3 for alpha chain variable domain of TCR clone 92230 (TRAV3, TRAJ22)
CAVRDYGSARQLTF

SEQ ID NO: 184460 - protein, 12 aa, Homo sapiens
  CDR3 for beta chain variable domain of TCR clone 92230 (TRBV7-8, TRBJ2-7)
CASSLGDREQYF

SEQ ID NO: 184461 - protein, 12 aa, Homo sapiens
  CDR3 for alpha chain variable domain of TCR clone 92231 (TRAV30, TRAJ43)
CGTEEMGNDMRF

SEQ ID NO: 184462 - protein, 13 aa, Homo sapiens
  CDR3 for beta chain variable domain of TCR clone 92231 (TRBV27, TRBJ2-7)
CASSFSQGYEQYF

SEQ ID NO: 184463 - protein, 15 aa, Homo sapiens
  CDR3 for alpha chain variable domain of TCR clone 92232 (TRAV35, TRAJ33)
CAGQPPRYSNYQLIW

SEQ ID NO: 184464 - protein, 13 aa, Homo sapiens
  CDR3 for beta chain variable domain of TCR clone 92232 (TRBV14, TRBJ1-2)
CASSEDRRYGYTF

SEQ ID NO: 184465 - protein, 12 aa, Homo sapiens
  CDR3 for alpha chain variable domain of TCR clone 92233 (TRAV12-3, TRAJ17)
CAMTLTGNKLTF

SEQ ID NO: 184466 - protein, 14 aa, Homo sapiens
  CDR3 for beta chain variable domain of TCR clone 92233 (TRBV27, TRBJ2-3)
CASSWAGTTDTQYF

SEQ ID NO: 184467 - protein, 14 aa, Homo sapiens
  CDR3 for alpha chain variable domain of TCR clone 92234 (TRAV1-2, TRAJ16)
CAVNRFSDGQKLLF

SEQ ID NO: 184468 - protein, 17 aa, Homo sapiens
  CDR3 for beta chain variable domain of TCR clone 92234 (TRBV7-9, TRBJ2-1)
CASSLLWGQGYNNEQFF

SEQ ID NO: 184469 - protein, 16 aa, Homo sapiens
  CDR3 for alpha chain variable domain of TCR clone 92235 (TRAV12-3, TRAJ28)
CAMMANSGAGSYQLTF

SEQ ID NO: 184470 - protein, 16 aa, Homo sapiens
  CDR3 for beta chain variable domain of TCR clone 92235 (TRBV7-2, TRBJ1-3)
CASSRLEASSGNTIYF

SEQ ID NO: 184471 - protein, 12 aa, Homo sapiens
  CDR3 for alpha chain variable domain of TCR clone 92236 (TRAV17, TRAJ12)
CATLRSSYKLIF

SEQ ID NO: 184472 - protein, 13 aa, Homo sapiens
  CDR3 for beta chain variable domain of TCR clone 92236 (TRBV4-2, TRBJ1-1)
CASSQAGNTEAFF

SEQ ID NO: 184473 - protein, 12 aa, Homo sapiens
  CDR3 for alpha chain variable domain of TCR clone 92237 (TRAV2, TRAJ31)
CAVEDNNARLMF

SEQ ID NO: 184474 - protein, 14 aa, Homo sapiens
  CDR3 for beta chain variable domain of TCR clone 92237 (TRBV28, TRBJ1-2)
CASRIQGANYGYTF

SEQ ID NO: 184475 - protein, 10 aa, Homo sapiens
  CDR3 for alpha chain variable domain of TCR clone 92238 (TRAV16, TRAJ22)
SAMNLRQLTF

SEQ ID NO: 184476 - protein, 15 aa, Homo sapiens
  CDR3 for beta chain variable domain of TCR clone 92238 (TRBV7-9, TRBJ1-6)
CASSSPGRGNSPLHF

SEQ ID NO: 184477 - protein, 15 aa, Homo sapiens
  CDR3 for alpha chain variable domain of TCR clone 92239 (TRAV26-1, TRAJ38)
CIASSNAGNNHKLIW

SEQ ID NO: 184478 - protein, 12 aa, Homo sapiens
  CDR3 for beta chain variable domain of TCR clone 92239 (TRBV5-8, TRBJ1-2)
CASSFGVYGYTF

SEQ ID NO: 184479 - protein, 13 aa, Homo sapiens
  CDR3 for alpha chain variable domain of TCR clone 92240 (TRAV1-2, TRAJ8)
CAVPGPGFQKLVF

SEQ ID NO: 184480 - protein, 14 aa, Homo sapiens
  CDR3 for beta chain variable domain of TCR clone 92240 (TRBV6-6, TRBJ2-7)
CASSIAGGVDEQYF

SEQ ID NO: 184481 - protein, 14 aa, Homo sapiens
  CDR3 for alpha chain variable domain of TCR clone 92241 (TRAV1-2, TRAJ16)
CAVNRFSDGQKLLF

SEQ ID NO: 184482 - protein, 14 aa, Homo sapiens
  CDR3 for beta chain variable domain of TCR clone 92241 (TRBV20-1, TRBJ2-4)
CSASGRVGENIQYV

SEQ ID NO: 184483 - protein, 14 aa, Homo sapiens
  CDR3 for alpha chain variable domain of TCR clone 92242 (TRAV14/DV4, TRAJ32)
SNVLPLTPTNKLIF

SEQ ID NO: 184484 - protein, 16 aa, Homo sapiens
  CDR3 for beta chain variable domain of TCR clone 92242 (TRBV12-5, TRBJ2-5)
CASGPRTSGNQETQYF

SEQ ID NO: 184485 - protein, 14 aa, Homo sapiens
  CDR3 for alpha chain variable domain of TCR clone 92243 (TRAV12-3, TRAJ10)
SHLPLTGGGNKLTF

SEQ ID NO: 184486 - protein, 13 aa, Homo sapiens
  CDR3 for beta chain variable domain of TCR clone 92243 (TRBV11-3, TRBJ1-2)
CASSQRTSRGYTF

SEQ ID NO: 184487 - protein, 11 aa, Homo sapiens
  CDR3 for alpha chain variable domain of TCR clone 92244 (TRAV12-1, TRAJ34)
CVVNKGRELIF

SEQ ID NO: 184488 - protein, 12 aa, Homo sapiens
  CDR3 for beta chain variable domain of TCR clone 92244 (TRBV2, TRBJ2-1)
CAYEPPGNEQFF

SEQ ID NO: 184489 - protein, 14 aa, Homo sapiens
  CDR3 for alpha chain variable domain of TCR clone 92245 (TRAV3, TRAJ15)
CAVTLNQAGTALIF

SEQ ID NO: 184490 - protein, 13 aa, Homo sapiens
  CDR3 for beta chain variable domain of TCR clone 92245 (TRBV12-5, TRBJ2-3)
CASGDRRSDTQYF

SEQ ID NO: 184491 - protein, 14 aa, Homo sapiens
  CDR3 for alpha chain variable domain of TCR clone 92246 (TRAV30, TRAJ18)
CGTESGSTLGRLYF

SEQ ID NO: 184492 - protein, 16 aa, Homo sapiens
  CDR3 for beta chain variable domain of TCR clone 92246 (TRBV5-1, TRBJ1-1)
CASSSGGNSLNTEAFF

SEQ ID NO: 184493 - protein, 14 aa, Homo sapiens
  CDR3 for alpha chain variable domain of TCR clone 92247 (TRAV1-2, TRAJ16)
CAVNRFSDGQKLLF

SEQ ID NO: 184494 - protein, 16 aa, Homo sapiens
  CDR3 for beta chain variable domain of TCR clone 92247 (TRBV6-1, TRBJ2-5)
CASSETPDRGAETQYF

SEQ ID NO: 184495 - protein, 15 aa, Homo sapiens
  CDR3 for alpha chain variable domain of TCR clone 92248 (TRAV17, TRAJ57)
CATGPSQGGSEKLVF

SEQ ID NO: 184496 - protein, 14 aa, Homo sapiens
  CDR3 for beta chain variable domain of TCR clone 92248 (TRBV12-5, TRBJ2-5)
CASGSRTHQETQYS

SEQ ID NO: 184497 - protein, 14 aa, Homo sapiens
  CDR3 for alpha chain variable domain of TCR clone 92249 (TRAV35, TRAJ10)
CAGILTRGGNKLTF

SEQ ID NO: 184498 - protein, 16 aa, Homo sapiens
  CDR3 for beta chain variable domain of TCR clone 92249 (TRBV12-5, TRBJ2-5)
CASGPRTSGNQETQYF

SEQ ID NO: 184499 - protein, 14 aa, Homo sapiens
  CDR3 for alpha chain variable domain of TCR clone 92250 (TRAV23/DV6, TRAJ5)
CAAKRPAGRRALTF

SEQ ID NO: 184500 - protein, 14 aa, Homo sapiens
  CDR3 for beta chain variable domain of TCR clone 92250 (TRBV11-2, TRBJ2-1)
CASTTGQGNNEQFF

SEQ ID NO: 184501 - protein, 16 aa, Homo sapiens
  CDR3 for alpha chain variable domain of TCR clone 92251 (TRAV26-1, TRAJ23)
CIVRVHPYNQGGKFIF

SEQ ID NO: 184502 - protein, 13 aa, Homo sapiens
  CDR3 for beta chain variable domain of TCR clone 92251 (TRBV20-1, TRBJ2-5)
CSARGDYQETQYF

SEQ ID NO: 184503 - protein, 15 aa, Homo sapiens
  CDR3 for alpha chain variable domain of TCR clone 92252 (TRAV38-2/DV8, TRAJ47)
CAYRTPLEYGNKLVF

SEQ ID NO: 184504 - protein, 12 aa, Homo sapiens
  CDR3 for beta chain variable domain of TCR clone 92252 (TRBV5-1, TRBJ2-3)
CASSLAADTQYF

SEQ ID NO: 184505 - protein, 12 aa, Homo sapiens
  CDR3 for alpha chain variable domain of TCR clone 92253 (TRAV30, TRAJ43)
CGTEERGNDMRF

SEQ ID NO: 184506 - protein, 13 aa, Homo sapiens
  CDR3 for beta chain variable domain of TCR clone 92253 (TRBV7-9, TRBJ2-3)
CASSPGSIDTQYF

SEQ ID NO: 184507 - protein, 15 aa, Homo sapiens
  CDR3 for alpha chain variable domain of TCR clone 92254 (TRAV23/DV6, TRAJ18)
CAASFRGSTLGRLYF

SEQ ID NO: 184508 - protein, 13 aa, Homo sapiens
  CDR3 for beta chain variable domain of TCR clone 92254 (TRBV28, TRBJ2-7)
RAILDRAGGEQYF

SEQ ID NO: 184509 - protein, 16 aa, Homo sapiens
  CDR3 for alpha chain variable domain of TCR clone 92255 (TRAV23/DV6, TRAJ9)
CAASIGGNTGGFKTIF

SEQ ID NO: 184510 - protein, 15 aa, Homo sapiens
  CDR3 for beta chain variable domain of TCR clone 92255 (TRBV7-9, TRBJ1-2)
CASSLDREPNYGYTF

SEQ ID NO: 184511 - protein, 13 aa, Homo sapiens
  CDR3 for alpha chain variable domain of TCR clone 92256 (TRAV35, TRAJ21)
CAGQLSNFNKFYF

SEQ ID NO: 184512 - protein, 16 aa, Homo sapiens
  CDR3 for beta chain variable domain of TCR clone 92256 (TRBV4-3, TRBJ2-2)
CASSHLHGSGTGELFF

SEQ ID NO: 184513 - protein, 14 aa, Homo sapiens
  CDR3 for alpha chain variable domain of TCR clone 92257 (TRAV12-1, TRAJ17)
CVVNYKAAGNKLTS

SEQ ID NO: 184514 - protein, 15 aa, Homo sapiens
  CDR3 for beta chain variable domain of TCR clone 92257 (TRBV11-2, TRBJ1-2)
CASSLEGVQRNGYTF

SEQ ID NO: 184515 - protein, 15 aa, Homo sapiens
  CDR3 for alpha chain variable domain of TCR clone 92258 (TRAV20, TRAJ23)
CAVQAVRNQGGKLIF

SEQ ID NO: 184516 - protein, 18 aa, Homo sapiens
  CDR3 for beta chain variable domain of TCR clone 92258 (TRBV27, TRBJ2-7)
CASSKQGRGWAYEQYSGR

SEQ ID NO: 184517 - protein, 14 aa, Homo sapiens
  CDR3 for alpha chain variable domain of TCR clone 92259 (TRAV16, TRAJ42)
CTLLAGGSQGNLIF

SEQ ID NO: 184518 - protein, 15 aa, Homo sapiens
  CDR3 for beta chain variable domain of TCR clone 92259 (TRBV2, TRBJ2-7)
CASSEGLARSYEQYF

SEQ ID NO: 184519 - protein, 12 aa, Homo sapiens
  CDR3 for alpha chain variable domain of TCR clone 92260 (TRAV17, TRAJ20)
CATYSNDYKLSF

SEQ ID NO: 184520 - protein, 14 aa, Homo sapiens
  CDR3 for beta chain variable domain of TCR clone 92260 (TRBV25-1, TRBJ1-1)
CASTHLGGSTEAFF

SEQ ID NO: 184521 - protein, 15 aa, Homo sapiens
  CDR3 for alpha chain variable domain of TCR clone 92261 (TRAV12-1, TRAJ48)
CVVNISNFGNEKLTF

SEQ ID NO: 184522 - protein, 17 aa, Homo sapiens
  CDR3 for beta chain variable domain of TCR clone 92261 (TRBV11-2, TRBJ2-1)
CASSLYPPGVEYNEQFF

SEQ ID NO: 184523 - protein, 14 aa, Homo sapiens
  CDR3 for alpha chain variable domain of TCR clone 92262 (TRAV12-3, TRAJ10)
SHLPLTGGGNKLTF

SEQ ID NO: 184524 - protein, 12 aa, Homo sapiens
  CDR3 for beta chain variable domain of TCR clone 92262 (TRBV11-2, TRBJ2-2)
CASSRGGGELFF

SEQ ID NO: 184525 - protein, 15 aa, Homo sapiens
  CDR3 for alpha chain variable domain of TCR clone 92263 (TRAV17, TRAJ42)
CATDHYGGSQGNPIF

SEQ ID NO: 184526 - protein, 14 aa, Homo sapiens
  CDR3 for beta chain variable domain of TCR clone 92263 (TRBV19, TRBJ2-5)
CASSIEHSQETQYF

SEQ ID NO: 184527 - protein, 14 aa, Homo sapiens
  CDR3 for alpha chain variable domain of TCR clone 92264 (TRAV1-2, TRAJ16)
CAVNRFSDGQKLLF

SEQ ID NO: 184528 - protein, 12 aa, Homo sapiens
  CDR3 for beta chain variable domain of TCR clone 92264 (TRBV28, TRBJ2-7)
CASSFSSYEQYF

SEQ ID NO: 184529 - protein, 12 aa, Homo sapiens
  CDR3 for alpha chain variable domain of TCR clone 92265 (TRAV3, TRAJ9)
CAVNTGGFKTIF

SEQ ID NO: 184530 - protein, 14 aa, Homo sapiens
  CDR3 for beta chain variable domain of TCR clone 92265 (TRBV12-4, TRBJ1-1)
CASSLGTGGTEAFF

SEQ ID NO: 184531 - protein, 14 aa, Homo sapiens
  CDR3 for alpha chain variable domain of TCR clone 92266 (TRAV1-2, TRAJ16)
CAVNRFSDGQKLLF

SEQ ID NO: 184532 - protein, 12 aa, Homo sapiens
  CDR3 for beta chain variable domain of TCR clone 92266 (TRBV28, TRBJ2-7)
CASSRSGYEQYF

SEQ ID NO: 184533 - protein, 17 aa, Homo sapiens
  CDR3 for alpha chain variable domain of TCR clone 92267 (TRAV36/DV7, TRAJ52)
CAVAQRAGGTSYGKLTF

SEQ ID NO: 184534 - protein, 11 aa, Homo sapiens
  CDR3 for beta chain variable domain of TCR clone 92267 (TRBV11-2, TRBJ1-1)
CASSINTEAFF

SEQ ID NO: 184535 - protein, 12 aa, Homo sapiens
  CDR3 for alpha chain variable domain of TCR clone 92268 (TRAV13-1, TRAJ49)
CAASPMGNQFYF

SEQ ID NO: 184536 - protein, 13 aa, Homo sapiens
  CDR3 for beta chain variable domain of TCR clone 92268 (TRBV20-1, TRBJ2-2)
CSASAAGTGELVF

SEQ ID NO: 184537 - protein, 13 aa, Homo sapiens
  CDR3 for alpha chain variable domain of TCR clone 92269 (TRAV13-1, TRAJ6)
CAASKGGSYIPTF

SEQ ID NO: 184538 - protein, 13 aa, Homo sapiens
  CDR3 for beta chain variable domain of TCR clone 92269 (TRBV7-9, TRBJ2-5)
CASLPSVRETQYF

SEQ ID NO: 184539 - protein, 11 aa, Homo sapiens
  CDR3 for alpha chain variable domain of TCR clone 92270 (TRAV8-3, TRAJ15)
CAVGPGTALIF

SEQ ID NO: 184540 - protein, 15 aa, Homo sapiens
  CDR3 for beta chain variable domain of TCR clone 92270 (TRBV7-9, TRBJ2-7)
CASSLAPAEAYEQYF

SEQ ID NO: 184541 - protein, 10 aa, Homo sapiens
  CDR3 for alpha chain variable domain of TCR clone 92271 (TRAV12-3, TRAJ49)
CAMNDDQFYF

SEQ ID NO: 184542 - protein, 14 aa, Homo sapiens
  CDR3 for beta chain variable domain of TCR clone 92271 (TRBV12-4, TRBJ1-3)
CASTLTGAGNTIYF

SEQ ID NO: 184543 - protein, 13 aa, Homo sapiens
  CDR3 for alpha chain variable domain of TCR clone 92272 (TRAV2, TRAJ40)
CAVVTSGTYKYIF

SEQ ID NO: 184544 - protein, 14 aa, Homo sapiens
  CDR3 for beta chain variable domain of TCR clone 92272 (TRBV7-9, TRBJ2-3)
CASSLEDGTDTQYF

SEQ ID NO: 184545 - protein, 12 aa, Homo sapiens
  CDR3 for alpha chain variable domain of TCR clone 92273 (TRAV17, TRAJ20)
CATQSNDYKLSF

SEQ ID NO: 184546 - protein, 13 aa, Homo sapiens
  CDR3 for beta chain variable domain of TCR clone 92273 (TRBV10-3, TRBJ1-1)
CTIIPEGGTEAFF

SEQ ID NO: 184547 - protein, 12 aa, Homo sapiens
  CDR3 for alpha chain variable domain of TCR clone 92274 (TRAV8-3, TRAJ26)
CAGDNHGQNFVF

SEQ ID NO: 184548 - protein, 15 aa, Homo sapiens
  CDR3 for beta chain variable domain of TCR clone 92274 (TRBV11-2, TRBJ2-1)
CASSLGTSGLNEQFF

SEQ ID NO: 184549 - protein, 13 aa, Homo sapiens
  CDR3 for alpha chain variable domain of TCR clone 92275 (TRAV12-1, TRAJ16)
CVVNGPDGQKLLF

SEQ ID NO: 184550 - protein, 14 aa, Homo sapiens
  CDR3 for beta chain variable domain of TCR clone 92275 (TRBV20-1, TRBJ1-1)
CSAQTRIGGTEAFF

SEQ ID NO: 184551 - protein, 12 aa, Homo sapiens
  CDR3 for alpha chain variable domain of TCR clone 92276 (TRAV1-2, TRAJ29)
CAVPSGNTPLVF

SEQ ID NO: 184552 - protein, 13 aa, Homo sapiens
  CDR3 for beta chain variable domain of TCR clone 92276 (TRBV5-4, TRBJ1-1)
CASSVDLATEAFF

SEQ ID NO: 184553 - protein, 15 aa, Homo sapiens
  CDR3 for alpha chain variable domain of TCR clone 92277 (TRAV3, TRAJ5)
CAVRDLDTGRRALTF

SEQ ID NO: 184554 - protein, 14 aa, Homo sapiens
  CDR3 for beta chain variable domain of TCR clone 92277 (TRBV25-1, TRBJ1-4)
CASSGRGQPEKLFF

SEQ ID NO: 184555 - protein, 14 aa, Homo sapiens
  CDR3 for alpha chain variable domain of TCR clone 92278 (TRAV1-2, TRAJ8)
CAVREDTGFQKLVF

SEQ ID NO: 184556 - protein, 14 aa, Homo sapiens
  CDR3 for beta chain variable domain of TCR clone 92278 (TRBV4-1, TRBJ2-2)
CASSQAVNTGELFL

SEQ ID NO: 184557 - protein, 12 aa, Homo sapiens
  CDR3 for alpha chain variable domain of TCR clone 92279 (TRAV12-3, TRAJ17)
CAMTLTGNKLTF

SEQ ID NO: 184558 - protein, 16 aa, Homo sapiens
  CDR3 for beta chain variable domain of TCR clone 92279 (TRBV18, TRBJ1-5)
CASSPYRVEGNQPQHF

SEQ ID NO: 184559 - protein, 16 aa, Homo sapiens
  CDR3 for alpha chain variable domain of TCR clone 92280 (TRAV8-3, TRAJ10)
CAVGPILTGGGHKLTF

SEQ ID NO: 184560 - protein, 16 aa, Homo sapiens
  CDR3 for beta chain variable domain of TCR clone 92280 (TRBV7-2, TRBJ2-5)
CASSSKWLSGQETQYF

SEQ ID NO: 184561 - protein, 15 aa, Homo sapiens
  CDR3 for alpha chain variable domain of TCR clone 92281 (TRAV17, TRAJ56)
CATDAIPGASSKLTF

SEQ ID NO: 184562 - protein, 12 aa, Homo sapiens
  CDR3 for beta chain variable domain of TCR clone 92281 (TRBV11-2, TRBJ2-2)
CASSLGGGELFF

SEQ ID NO: 184563 - protein, 13 aa, Homo sapiens
  CDR3 for alpha chain variable domain of TCR clone 92282 (TRAV12-3, TRAJ16)
CAVQLSDGQKLLF

SEQ ID NO: 184564 - protein, 14 aa, Homo sapiens
  CDR3 for beta chain variable domain of TCR clone 92282 (TRBV5-1, TRBJ2-1)
CDSSLDGDWNEQFF

SEQ ID NO: 184565 - protein, 14 aa, Homo sapiens
  CDR3 for alpha chain variable domain of TCR clone 92283 (TRAV1-2, TRAJ16)
CAVNRFSDGQKLLF

SEQ ID NO: 184566 - protein, 16 aa, Homo sapiens
  CDR3 for beta chain variable domain of TCR clone 92283 (TRBV7-2, TRBJ1-2)
CASSSNQDRRGHGHTF

SEQ ID NO: 184567 - protein, 21 aa, Homo sapiens
  CDR3 for alpha chain variable domain of TCR clone 92284 (TRAV8-4, TRAJ47)
HLTKPSAHMSDAAERGNKLVF

SEQ ID NO: 184568 - protein, 16 aa, Homo sapiens
  CDR3 for beta chain variable domain of TCR clone 92284 (TRBV7-3, TRBJ2-2)
CASSLKRGTLSGELFF

SEQ ID NO: 184569 - protein, 14 aa, Homo sapiens
  CDR3 for alpha chain variable domain of TCR clone 92285 (TRAV13-1, TRAJ44)
CAAKATGTASKLTF

SEQ ID NO: 184570 - protein, 17 aa, Homo sapiens
  CDR3 for beta chain variable domain of TCR clone 92285 (TRBV7-2, TRBJ2-3)
CASSSYSGTRRADTQYF

SEQ ID NO: 184571 - protein, 14 aa, Homo sapiens
  CDR3 for alpha chain variable domain of TCR clone 92286 (TRAV12-2, TRAJ40)
CAVKIPSGTYKYIF

SEQ ID NO: 184572 - protein, 13 aa, Homo sapiens
  CDR3 for beta chain variable domain of TCR clone 92286 (TRBV7-2, TRBJ1-4)
CASSLAGLEKLFF

SEQ ID NO: 184573 - protein, 15 aa, Homo sapiens
  CDR3 for alpha chain variable domain of TCR clone 92287 (TRAV8-3, TRAJ11)
CAVGLLNSGYSTLTF

SEQ ID NO: 184574 - protein, 17 aa, Homo sapiens
  CDR3 for beta chain variable domain of TCR clone 92287 (TRBV4-1, TRBJ1-4)
CASSQEGPRGVEEKLFF

SEQ ID NO: 184575 - protein, 14 aa, Homo sapiens
  CDR3 for alpha chain variable domain of TCR clone 92288 (TRAV1-2, TRAJ8)
CAVREDTGFQKLVF

SEQ ID NO: 184576 - protein, 14 aa, Homo sapiens
  CDR3 for beta chain variable domain of TCR clone 92288 (TRBV7-2, TRBJ2-5)
CASSFTQGQETQYF

SEQ ID NO: 184577 - protein, 15 aa, Homo sapiens
  CDR3 for alpha chain variable domain of TCR clone 92289 (TRAV26-2, TRAJ28)
CILVESGAGSYQLTF

SEQ ID NO: 184578 - protein, 18 aa, Homo sapiens
  CDR3 for beta chain variable domain of TCR clone 92289 (TRBV20-1, TRBJ2-3)
CSASGLAGGPGTTDTQYF

SEQ ID NO: 184579 - protein, 13 aa, Homo sapiens
  CDR3 for alpha chain variable domain of TCR clone 92290 (TRAV8-4, TRAJ48)
CAVSLFGNAKLTF

SEQ ID NO: 184580 - protein, 15 aa, Homo sapiens
  CDR3 for beta chain variable domain of TCR clone 92290 (TRBV20-1, TRBJ2-7)
CSARKGLAESYEQYF

SEQ ID NO: 184581 - protein, 13 aa, Homo sapiens
  CDR3 for alpha chain variable domain of TCR clone 92291 (TRAV38-1, TRAJ42)
CARWGGSQGNLIF

SEQ ID NO: 184582 - protein, 17 aa, Homo sapiens
  CDR3 for beta chain variable domain of TCR clone 92291 (TRBV20-1, TRBJ2-1)
CSARDPLSGVWDNEQFF

SEQ ID NO: 184583 - protein, 16 aa, Homo sapiens
  CDR3 for alpha chain variable domain of TCR clone 92292 (TRAV20, TRAJ38)
CAVQASNAGNSRKLIW

SEQ ID NO: 184584 - protein, 16 aa, Homo sapiens
  CDR3 for beta chain variable domain of TCR clone 92292 (TRBV7-8, TRBJ2-6)
CASRVGDSSGANVLTF

SEQ ID NO: 184585 - protein, 14 aa, Homo sapiens
  CDR3 for alpha chain variable domain of TCR clone 92293 (TRAV2, TRAJ29)
CAVTPPSGNTPLVF

SEQ ID NO: 184586 - protein, 16 aa, Homo sapiens
  CDR3 for beta chain variable domain of TCR clone 92293 (TRBV20-1, TRBJ1-4)
CSAPGQGLLTNEKLFF

SEQ ID NO: 184587 - protein, 12 aa, Homo sapiens
  CDR3 for alpha chain variable domain of TCR clone 92294 (TRAV27, TRAJ9)
CAGESGGFKTIF

SEQ ID NO: 184588 - protein, 15 aa, Homo sapiens
  CDR3 for beta chain variable domain of TCR clone 92294 (TRBV28, TRBJ2-1)
CASSIIAGGRSEQFF

SEQ ID NO: 184589 - protein, 19 aa, Homo sapiens
  CDR3 for alpha chain variable domain of TCR clone 92295 (TRAV3, TRAJ6)
CAVRDRNPSRSGGSYIPTF

SEQ ID NO: 184590 - protein, 15 aa, Homo sapiens
  CDR3 for beta chain variable domain of TCR clone 92295 (TRBV18, TRBJ2-7)
CASSPAFMDSYEQYF

SEQ ID NO: 184591 - protein, 23 aa, Homo sapiens
  CDR3 for alpha chain variable domain of TCR clone 92296 (TRAV2, TRAJ9)
CAVEDRGTGGLKLSLEQEQDYLL

SEQ ID NO: 184592 - protein, 16 aa, Homo sapiens
  CDR3 for beta chain variable domain of TCR clone 92296 (TRBV24-1, TRBJ2-3)
CATSDPGTGATDTQYF

SEQ ID NO: 184593 - protein, 10 aa, Homo sapiens
  CDR3 for alpha chain variable domain of TCR clone 92297 (TRAV30, TRAJ48)
CGIGNEKLTF

SEQ ID NO: 184594 - protein, 14 aa, Homo sapiens
  CDR3 for beta chain variable domain of TCR clone 92297 (TRBV12-5, TRBJ2-5)
CASGSRTHQETQYF

SEQ ID NO: 184595 - protein, 12 aa, Homo sapiens
  CDR3 for alpha chain variable domain of TCR clone 92298 (TRAV16, TRAJ27)
CALNTNAGKSTF

SEQ ID NO: 184596 - protein, 13 aa, Homo sapiens
  CDR3 for beta chain variable domain of TCR clone 92298 (TRBV20-1, TRBJ2-2)
CSASAAGTGELFF

SEQ ID NO: 184597 - protein, 14 aa, Homo sapiens
  CDR3 for alpha chain variable domain of TCR clone 92299 (TRAV4, TRAJ41)
CLVGDGDSGYALNF

SEQ ID NO: 184598 - protein, 15 aa, Homo sapiens
  CDR3 for beta chain variable domain of TCR clone 92299 (TRBV27, TRBJ2-7)
CASSVVGGGAHEQYF

SEQ ID NO: 184599 - protein, 14 aa, Homo sapiens
  CDR3 for alpha chain variable domain of TCR clone 92300 (TRAV35, TRAJ13)
CAGSPSGGYQKVTF

SEQ ID NO: 184600 - protein, 17 aa, Homo sapiens
  CDR3 for beta chain variable domain of TCR clone 92300 (TRBV18, TRBJ1-5)
CQLTTCRVRQNNQTQHF

SEQ ID NO: 184601 - protein, 14 aa, Homo sapiens
  CDR3 for alpha chain variable domain of TCR clone 92301 (TRAV9-2, TRAJ39)
CALYIYNAGNMLTF

SEQ ID NO: 184602 - protein, 17 aa, Homo sapiens
  CDR3 for beta chain variable domain of TCR clone 92301 (TRBV9, TRBJ2-3)
RASRSTAGGPSTDTQYF

SEQ ID NO: 184603 - protein, 12 aa, Homo sapiens
  CDR3 for alpha chain variable domain of TCR clone 92302 (TRAV8-3, TRAJ26)
CAGDNYGQNFVF

SEQ ID NO: 184604 - protein, 12 aa, Homo sapiens
  CDR3 for beta chain variable domain of TCR clone 92302 (TRBV6-3, TRBJ2-7)
CASSEPGFEQYF

SEQ ID NO: 184605 - protein, 13 aa, Homo sapiens
  CDR3 for alpha chain variable domain of TCR clone 92303 (TRAV3, TRAJ36)
CAVRDTGAINLFF

SEQ ID NO: 184606 - protein, 15 aa, Homo sapiens
  CDR3 for beta chain variable domain of TCR clone 92303 (TRBV24-1, TRBJ2-1)
CATSGSGGFYNEQFF

SEQ ID NO: 184607 - protein, 13 aa, Homo sapiens
  CDR3 for alpha chain variable domain of TCR clone 92304 (TRAV8-6, TRAJ49)
CAVITNTGNQFYF

SEQ ID NO: 184608 - protein, 14 aa, Homo sapiens
  CDR3 for beta chain variable domain of TCR clone 92304 (TRBV19, TRBJ2-1)
CASPTFVVSGEQFF

SEQ ID NO: 184609 - protein, 12 aa, Homo sapiens
  CDR3 for alpha chain variable domain of TCR clone 92305 (TRAV29/DV5, TRAJ34)
CAARHNTDKLIF

SEQ ID NO: 184610 - protein, 13 aa, Homo sapiens
  CDR3 for beta chain variable domain of TCR clone 92305 (TRBV24-1, TRBJ1-1)
CATSDLNSVEAFF

SEQ ID NO: 184611 - protein, 12 aa, Homo sapiens
  CDR3 for alpha chain variable domain of TCR clone 92306 (TRAV1-1, TRAJ43)
CVPRVSSNDMRF

SEQ ID NO: 184612 - protein, 15 aa, Homo sapiens
  CDR3 for beta chain variable domain of TCR clone 92306 (TRBV5-1, TRBJ2-7)
CASSLGDFTTYEQYF

SEQ ID NO: 184613 - protein, 15 aa, Homo sapiens
  CDR3 for alpha chain variable domain of TCR clone 92307 (TRAV2, TRAJ15)
CAVEDREQAGTALIF

SEQ ID NO: 184614 - protein, 14 aa, Homo sapiens
  CDR3 for beta chain variable domain of TCR clone 92307 (TRBV19, TRBJ2-2)
CASSGQGIAGELFF

SEQ ID NO: 184615 - protein, 14 aa, Homo sapiens
  CDR3 for alpha chain variable domain of TCR clone 92308 (TRAV20, TRAJ42)
CAVQAGGSQGNLIF

SEQ ID NO: 184616 - protein, 14 aa, Homo sapiens
  CDR3 for beta chain variable domain of TCR clone 92308 (TRBV28, TRBJ1-2)
CASRIQGANYCYTF

SEQ ID NO: 184617 - protein, 13 aa, Homo sapiens
  CDR3 for alpha chain variable domain of TCR clone 92309 (TRAV12-3, TRAJ21)
CAPGPHNFNKFYF

SEQ ID NO: 184618 - protein, 15 aa, Homo sapiens
  CDR3 for beta chain variable domain of TCR clone 92309 (TRBV7-2, TRBJ2-3)
CASSLRGGSTDTQYF

SEQ ID NO: 184619 - protein, 14 aa, Homo sapiens
  CDR3 for alpha chain variable domain of TCR clone 92310 (TRAV16, TRAJ44)
CALSTTGTASKLTF

SEQ ID NO: 184620 - protein, 14 aa, Homo sapiens
  CDR3 for beta chain variable domain of TCR clone 92310 (TRBV20-1, TRBJ2-7)
CSAISREASYEQYV

SEQ ID NO: 184621 - protein, 10 aa, Homo sapiens
  CDR3 for alpha chain variable domain of TCR clone 92311 (TRAV8-4, TRAJ43)
CAVSADDMRF

SEQ ID NO: 184622 - protein, 16 aa, Homo sapiens
  CDR3 for beta chain variable domain of TCR clone 92311 (TRBV19, TRBJ2-5)
CASSMTDGQGGETQYF

SEQ ID NO: 184623 - protein, 13 aa, Homo sapiens
  CDR3 for alpha chain variable domain of TCR clone 92312 (TRAV8-3, TRAJ36)
CAVGATGANNLFF

SEQ ID NO: 184624 - protein, 14 aa, Homo sapiens
  CDR3 for beta chain variable domain of TCR clone 92312 (TRBV11-2, TRBJ1-5)
CASSSRTGNQPQHF

SEQ ID NO: 184625 - protein, 16 aa, Homo sapiens
  CDR3 for alpha chain variable domain of TCR clone 92313 (TRAV12-3, TRAJ53)
CAISPGSGGSNYKLTF

SEQ ID NO: 184626 - protein, 20 aa, Homo sapiens
  CDR3 for beta chain variable domain of TCR clone 92313 (TRBV7-8, TRBJ2-2)
CASSHLFPGPTIHITGELFF

SEQ ID NO: 184627 - protein, 13 aa, Homo sapiens
  CDR3 for alpha chain variable domain of TCR clone 92314 (TRAV12-1, TRAJ3)
CVVNPRGASKIIF

SEQ ID NO: 184628 - protein, 20 aa, Homo sapiens
  CDR3 for beta chain variable domain of TCR clone 92314 (TRBV7-8, TRBJ2-2)
CASSHLFPGPTIHITGELFF

SEQ ID NO: 184629 - protein, 11 aa, Homo sapiens
  CDR3 for alpha chain variable domain of TCR clone 92315 (TRAV27, TRAJ43)
CVRYNNNDMRF

SEQ ID NO: 184630 - protein, 15 aa, Homo sapiens
  CDR3 for beta chain variable domain of TCR clone 92315 (TRBV20-1, TRBJ2-5)
CSASPLAGGQETQYF

SEQ ID NO: 184631 - protein, 15 aa, Homo sapiens
  CDR3 for alpha chain variable domain of TCR clone 92316 (TRAV17, TRAJ56)
CATDANTGANSKLTF

SEQ ID NO: 184632 - protein, 15 aa, Homo sapiens
  CDR3 for beta chain variable domain of TCR clone 92316 (TRBV7-3, TRBJ2-2)
CQQLKAGDLVRGAVF

SEQ ID NO: 184633 - protein, 12 aa, Homo sapiens
  CDR3 for alpha chain variable domain of TCR clone 92317 (TRAV21, TRAJ31)
CAVWVNNARLMF

SEQ ID NO: 184634 - protein, 16 aa, Homo sapiens
  CDR3 for beta chain variable domain of TCR clone 92317 (TRBV27, TRBJ2-5)
CASSYGPGGQKETQYF

SEQ ID NO: 184635 - protein, 14 aa, Homo sapiens
  CDR3 for alpha chain variable domain of TCR clone 92318 (TRAV26-1, TRAJ38)
CIANNAGNNRKLIL

SEQ ID NO: 184636 - protein, 13 aa, Homo sapiens
  CDR3 for beta chain variable domain of TCR clone 92318 (TRBV20-1, TRBJ1-1)
CSARGGGNTEAFF

SEQ ID NO: 184637 - protein, 13 aa, Homo sapiens
  CDR3 for alpha chain variable domain of TCR clone 92319 (TRAV1-1, TRAJ11)
CAVLNSGYSTLTF

SEQ ID NO: 184638 - protein, 15 aa, Homo sapiens
  CDR3 for beta chain variable domain of TCR clone 92319 (TRBV20-1, TRBJ2-7)
CSARDRVSGMDEQYF

SEQ ID NO: 184639 - protein, 14 aa, Homo sapiens
  CDR3 for alpha chain variable domain of TCR clone 92320 (TRAV4, TRAJ17)
CLVGYPLVGNKLTF

SEQ ID NO: 184640 - protein, 20 aa, Homo sapiens
  CDR3 for beta chain variable domain of TCR clone 92320 (TRBV20-1, TRBJ2-1)
CSARPYSVAGGPSYYNEQFF

SEQ ID NO: 184641 - protein, 14 aa, Homo sapiens
  CDR3 for alpha chain variable domain of TCR clone 92321 (TRAV12-2, TRAJ6)
CASKWGGGSYIPTF

SEQ ID NO: 184642 - protein, 13 aa, Homo sapiens
  CDR3 for beta chain variable domain of TCR clone 92321 (TRBV2, TRBJ1-1)
CASSEGRNTEAFF

SEQ ID NO: 184643 - protein, 14 aa, Homo sapiens
  CDR3 for alpha chain variable domain of TCR clone 92322 (TRAV12-2, TRAJ17)
CAVLFKAAGNKLTF

SEQ ID NO: 184644 - protein, 11 aa, Homo sapiens
  CDR3 for beta chain variable domain of TCR clone 92322 (TRBV6-3, TRBJ2-3)
CATGQADTQYF

SEQ ID NO: 184645 - protein, 16 aa, Homo sapiens
  CDR3 for alpha chain variable domain of TCR clone 92323 (TRAV1-2, TRAJ10)
CAVRGVLTGGGNKLTF

SEQ ID NO: 184646 - protein, 14 aa, Homo sapiens
  CDR3 for beta chain variable domain of TCR clone 92323 (TRBV9, TRBJ2-7)
CASSVGVGSYEQYF

SEQ ID NO: 184647 - protein, 15 aa, Homo sapiens
  CDR3 for alpha chain variable domain of TCR clone 92324 (TRAV35, TRAJ58)
CAGRRQETSGSRLTF

SEQ ID NO: 184648 - protein, 14 aa, Homo sapiens
  CDR3 for beta chain variable domain of TCR clone 92324 (TRBV7-9, TRBJ2-1)
CASSSMVGFGEQFF

SEQ ID NO: 184649 - protein, 11 aa, Homo sapiens
  CDR3 for alpha chain variable domain of TCR clone 92325 (TRAV4, TRAJ31)
CLVGDNARLMF

SEQ ID NO: 184650 - protein, 16 aa, Homo sapiens
  CDR3 for beta chain variable domain of TCR clone 92325 (TRBV7-2, TRBJ2-5)
CASSSKWLSGQENQYF

SEQ ID NO: 184651 - protein, 10 aa, Homo sapiens
  CDR3 for alpha chain variable domain of TCR clone 92326 (TRAV12-2, TRAJ43)
CAVKVLSMHF

SEQ ID NO: 184652 - protein, 14 aa, Homo sapiens
  CDR3 for beta chain variable domain of TCR clone 92326 (TRBV11-2, TRBJ2-7)
CASSLGNSLYEQYF

SEQ ID NO: 184653 - protein, 20 aa, Homo sapiens
  CDR3 for alpha chain variable domain of TCR clone 92327 (TRAV1-2, TRAJ34)
LLKELQMKDSASPNTDKLIF

SEQ ID NO: 184654 - protein, 13 aa, Homo sapiens
  CDR3 for beta chain variable domain of TCR clone 92327 (TRBV20-1, TRBJ1-1)
CSARGGGNTEAFF

SEQ ID NO: 184655 - protein, 14 aa, Homo sapiens
  CDR3 for alpha chain variable domain of TCR clone 92328 (TRAV27, TRAJ22)
CAGLPSGSARQLTF

SEQ ID NO: 184656 - protein, 14 aa, Homo sapiens
  CDR3 for beta chain variable domain of TCR clone 92328 (TRBV5-1, TRBJ2-2)
CASSLVEGSGELFF

SEQ ID NO: 184657 - protein, 15 aa, Homo sapiens
  CDR3 for alpha chain variable domain of TCR clone 92329 (TRAV23/DV6, TRAJ18)
CAARYRGSTLGRLYF

SEQ ID NO: 184658 - protein, 14 aa, Homo sapiens
  CDR3 for beta chain variable domain of TCR clone 92329 (TRBV19, TRBJ2-2)
CASSTLHRSGELFF

SEQ ID NO: 184659 - protein, 14 aa, Homo sapiens
  CDR3 for alpha chain variable domain of TCR clone 92330 (TRAV13-1, TRAJ44)
CAAKATGTASTLTF

SEQ ID NO: 184660 - protein, 14 aa, Homo sapiens
  CDR3 for beta chain variable domain of TCR clone 92330 (TRBV25-1, TRBJ1-1)
CASTHLGGNTEAFF

SEQ ID NO: 184661 - protein, 14 aa, Homo sapiens
  CDR3 for alpha chain variable domain of TCR clone 92331 (TRAV1-2, TRAJ16)
CAVNRFSDGQKLLF

SEQ ID NO: 184662 - protein, 16 aa, Homo sapiens
  CDR3 for beta chain variable domain of TCR clone 92331 (TRBV28, TRBJ2-3)
CASSLFTGVSTDTQYF

SEQ ID NO: 184663 - protein, 15 aa, Homo sapiens
  CDR3 for alpha chain variable domain of TCR clone 92332 (TRAV8-6, TRAJ10)
CAVSSKGGGGNKLTF

SEQ ID NO: 184664 - protein, 14 aa, Homo sapiens
  CDR3 for beta chain variable domain of TCR clone 92332 (TRBV19, TRBJ2-1)
CASPTFVLSGEQFF

SEQ ID NO: 184665 - protein, 13 aa, Homo sapiens
  CDR3 for alpha chain variable domain of TCR clone 92333 (TRAV12-1, TRAJ9)
CVVLNTGGFKTIF

SEQ ID NO: 184666 - protein, 15 aa, Homo sapiens
  CDR3 for beta chain variable domain of TCR clone 92333 (TRBV4-1, TRBJ2-5)
CASSQWDLYQETQYF

SEQ ID NO: 184667 - protein, 12 aa, Homo sapiens
  CDR3 for alpha chain variable domain of TCR clone 92334 (TRAV3, TRAJ43)
CAVRDTNNDMRF

SEQ ID NO: 184668 - protein, 17 aa, Homo sapiens
  CDR3 for beta chain variable domain of TCR clone 92334 (TRBV7-8, TRBJ2-6)
CASSAGTGGAGANVLTF

SEQ ID NO: 184669 - protein, 16 aa, Homo sapiens
  CDR3 for alpha chain variable domain of TCR clone 92335 (TRAV21, TRAJ17)
CAVRPGEEAAGNKLTF

SEQ ID NO: 184670 - protein, 13 aa, Homo sapiens
  CDR3 for beta chain variable domain of TCR clone 92335 (TRBV15, TRBJ1-6)
CATSGGLNSPLHF

SEQ ID NO: 184671 - protein, 15 aa, Homo sapiens
  CDR3 for alpha chain variable domain of TCR clone 92336 (TRAV13-1, TRAJ27)
CAASTFNTNAGKSTF

SEQ ID NO: 184672 - protein, 16 aa, Homo sapiens
  CDR3 for beta chain variable domain of TCR clone 92336 (TRBV5-7, TRBJ2-3)
CASSSLGGAITDTQYF

SEQ ID NO: 184673 - protein, 14 aa, Homo sapiens
  CDR3 for alpha chain variable domain of TCR clone 92337 (TRAV29/DV5, TRAJ36)
CAARRKTGANNLFF

SEQ ID NO: 184674 - protein, 15 aa, Homo sapiens
  CDR3 for beta chain variable domain of TCR clone 92337 (TRBV15, TRBJ2-1)
CATSRPGQGLHEQFF

SEQ ID NO: 184675 - protein, 14 aa, Homo sapiens
  CDR3 for alpha chain variable domain of TCR clone 92338 (TRAV12-2, TRAJ40)
CAVKIPSGTYKYIC

SEQ ID NO: 184676 - protein, 14 aa, Homo sapiens
  CDR3 for beta chain variable domain of TCR clone 92338 (TRBV20-1, TRBJ1-1)
CSAQTRIGGTEAFF

SEQ ID NO: 184677 - protein, 15 aa, Homo sapiens
  CDR3 for alpha chain variable domain of TCR clone 92339 (TRAV21, TRAJ24)
CAARSSTDSWGKLQF

SEQ ID NO: 184678 - protein, 16 aa, Homo sapiens
  CDR3 for beta chain variable domain of TCR clone 92339 (TRBV7-9, TRBJ1-2)
CASSLGFSSGEDGYTF

SEQ ID NO: 184679 - protein, 12 aa, Homo sapiens
  CDR3 for alpha chain variable domain of TCR clone 92340 (TRAV36/DV7, TRAJ40)
CAVAGGTYKSIF

SEQ ID NO: 184680 - protein, 18 aa, Homo sapiens
  CDR3 for beta chain variable domain of TCR clone 92340 (TRBV27, TRBJ2-3)
CASSKGTSGRTSTDTQYF

SEQ ID NO: 184681 - protein, 14 aa, Homo sapiens
  CDR3 for alpha chain variable domain of TCR clone 92341 (TRAV38-2/DV8, TRAJ33)
CAYRGLDSNYQLIW

SEQ ID NO: 184682 - protein, 15 aa, Homo sapiens
  CDR3 for beta chain variable domain of TCR clone 92341 (TRBV11-3, TRBJ2-7)
CASSLLSGSSYEQYF

SEQ ID NO: 184683 - protein, 13 aa, Homo sapiens
  CDR3 for alpha chain variable domain of TCR clone 92342 (TRAV13-2, TRAJ53)
CAEIMGSNYKLTF

SEQ ID NO: 184684 - protein, 13 aa, Homo sapiens
  CDR3 for beta chain variable domain of TCR clone 92342 (TRBV4-1, TRBJ2-2)
CASSQENTGELFF

SEQ ID NO: 184685 - protein, 19 aa, Homo sapiens
  CDR3 for alpha chain variable domain of TCR clone 92343 (TRAV8-3, )
CAVVTTRIPDIQNPDPAVY

SEQ ID NO: 184686 - protein, 14 aa, Homo sapiens
  CDR3 for beta chain variable domain of TCR clone 92343 (TRBV11-2, TRBJ2-7)
CASSPSTTSYEQYF

SEQ ID NO: 184687 - protein, 13 aa, Homo sapiens
  CDR3 for alpha chain variable domain of TCR clone 92344 (TRAV20, TRAJ20)
CAVQAGSGYKLSF

SEQ ID NO: 184688 - protein, 14 aa, Homo sapiens
  CDR3 for beta chain variable domain of TCR clone 92344 (TRBV7-2, TRBJ2-7)
CASSPKTSFYEQYF

SEQ ID NO: 184689 - protein, 17 aa, Homo sapiens
  CDR3 for alpha chain variable domain of TCR clone 92345 (TRAV26-2, TRAJ42)
CILRGVGYGGSQGNPIF

SEQ ID NO: 184690 - protein, 16 aa, Homo sapiens
  CDR3 for beta chain variable domain of TCR clone 92345 (TRBV12-4, TRBJ2-7)
CASSLIGGTGTYEQYF

SEQ ID NO: 184691 - protein, 15 aa, Homo sapiens
  CDR3 for alpha chain variable domain of TCR clone 92346 (TRAV3, TRAJ5)
CAVRDLDTGRRALTF

SEQ ID NO: 184692 - protein, 12 aa, Homo sapiens
  CDR3 for beta chain variable domain of TCR clone 92346 (TRBV12-4, TRBJ2-7)
CSSPTETYEQYF

SEQ ID NO: 184693 - protein, 14 aa, Homo sapiens
  CDR3 for alpha chain variable domain of TCR clone 92347 (TRAV12-2, TRAJ5)
CAVNRPTGRRALTF

SEQ ID NO: 184694 - protein, 12 aa, Homo sapiens
  CDR3 for beta chain variable domain of TCR clone 92347 (TRBV19, TRBJ1-5)
CASSIAQQTQHF

SEQ ID NO: 184695 - protein, 17 aa, Homo sapiens
  CDR3 for alpha chain variable domain of TCR clone 92348 (TRAV3, TRAJ6)
CAVRDGPRAGGSYIPTF

SEQ ID NO: 184696 - protein, 14 aa, Homo sapiens
  CDR3 for beta chain variable domain of TCR clone 92348 (TRBV7-3, TRBJ2-1)
FASSTSGGWDEQFF

SEQ ID NO: 184697 - protein, 14 aa, Homo sapiens
  CDR3 for alpha chain variable domain of TCR clone 92349 (TRAV12-2, TRAJ13)
CAVKKTGGYQKVTF

SEQ ID NO: 184698 - protein, 17 aa, Homo sapiens
  CDR3 for beta chain variable domain of TCR clone 92349 (TRBV4-1, TRBJ2-5)
CASSQDLTGGPIETQYF

SEQ ID NO: 184699 - protein, 12 aa, Homo sapiens
  CDR3 for alpha chain variable domain of TCR clone 92350 (TRAV17, TRAJ20)
CATDSNDYKLSF

SEQ ID NO: 184700 - protein, 14 aa, Homo sapiens
  CDR3 for beta chain variable domain of TCR clone 92350 (TRBV15, TRBJ2-1)
CATSGVEDYNEQFF

SEQ ID NO: 184701 - protein, 14 aa, Homo sapiens
  CDR3 for alpha chain variable domain of TCR clone 92351 (TRAV12-2, TRAJ40)
CAVKIPSGTYKYIF

SEQ ID NO: 184702 - protein, 16 aa, Homo sapiens
  CDR3 for beta chain variable domain of TCR clone 92351 (TRBV7-3, TRBJ2-5)
CASSLMGGASQETQYF

SEQ ID NO: 184703 - protein, 11 aa, Homo sapiens
  CDR3 for alpha chain variable domain of TCR clone 92352 (TRAV2, TRAJ13)
CASGGYQKVTF

SEQ ID NO: 184704 - protein, 12 aa, Homo sapiens
  CDR3 for beta chain variable domain of TCR clone 92352 (TRBV7-9, TRBJ2-7)
CATRTDAYEQYF

SEQ ID NO: 184705 - protein, 14 aa, Homo sapiens
  CDR3 for alpha chain variable domain of TCR clone 92353 (TRAV13-1, TRAJ44)
CAAKATGTASKLTF

SEQ ID NO: 184706 - protein, 17 aa, Homo sapiens
  CDR3 for beta chain variable domain of TCR clone 92353 (TRBV20-1, TRBJ2-1)
CSAPPRLAGTRYNEQFF

SEQ ID NO: 184707 - protein, 15 aa, Homo sapiens
  CDR3 for alpha chain variable domain of TCR clone 92354 (TRAV17, TRAJ22)
CATVAPSGSARQLTF

SEQ ID NO: 184708 - protein, 16 aa, Homo sapiens
  CDR3 for beta chain variable domain of TCR clone 92354 (TRBV10-3, TRBJ2-7)
CAISADFADRPCEQYF

SEQ ID NO: 184709 - protein, 16 aa, Homo sapiens
  CDR3 for alpha chain variable domain of TCR clone 92355 (TRAV17, TRAJ36)
CATVSLNWGKQPLLWD

SEQ ID NO: 184710 - protein, 13 aa, Homo sapiens
  CDR3 for beta chain variable domain of TCR clone 92355 (TRBV4-1, TRBJ1-1)
CASSQVGTGEAFF

SEQ ID NO: 184711 - protein, 16 aa, Homo sapiens
  CDR3 for alpha chain variable domain of TCR clone 92356 (TRAV4, TRAJ22)
CLVGDLYSGSARQLTF

SEQ ID NO: 184712 - protein, 13 aa, Homo sapiens
  CDR3 for beta chain variable domain of TCR clone 92356 (TRBV9, TRBJ2-1)
CASSVGQGGEQFF

SEQ ID NO: 184713 - protein, 15 aa, Homo sapiens
  CDR3 for alpha chain variable domain of TCR clone 92357 (TRAV8-4, TRAJ10)
CAVSDGPGGGKKLTF

SEQ ID NO: 184714 - protein, 13 aa, Homo sapiens
  CDR3 for beta chain variable domain of TCR clone 92357 (TRBV28, TRBJ1-3)
CASSFLGSGTIYF

SEQ ID NO: 184715 - protein, 10 aa, Homo sapiens
  CDR3 for alpha chain variable domain of TCR clone 92358 (TRAV35, TRAJ41)
DANSGYALNF

SEQ ID NO: 184716 - protein, 14 aa, Homo sapiens
  CDR3 for beta chain variable domain of TCR clone 92358 (TRBV19, TRBJ2-2)
CASSTLHRSGELFF

SEQ ID NO: 184717 - protein, 14 aa, Homo sapiens
  CDR3 for alpha chain variable domain of TCR clone 92359 (TRAV12-1, TRAJ41)
CVVLNSNSGYALNF

SEQ ID NO: 184718 - protein, 17 aa, Homo sapiens
  CDR3 for beta chain variable domain of TCR clone 92359 (TRBV11-2, TRBJ2-1)
CASSLYPPGVEYNEQFF

SEQ ID NO: 184719 - protein, 12 aa, Homo sapiens
  CDR3 for alpha chain variable domain of TCR clone 92360 (TRAV12-3, TRAJ34)
CAMGYNTDNLIF

SEQ ID NO: 184720 - protein, 14 aa, Homo sapiens
  CDR3 for beta chain variable domain of TCR clone 92360 (TRBV4-1, TRBJ2-2)
CASSQAVNTGELFF

SEQ ID NO: 184721 - protein, 12 aa, Homo sapiens
  CDR3 for alpha chain variable domain of TCR clone 92361 (TRAV20, TRAJ39)
CAVGNAGNMLTF

SEQ ID NO: 184722 - protein, 17 aa, Homo sapiens
  CDR3 for beta chain variable domain of TCR clone 92361 (TRBV4-1, TRBJ2-3)
CASSQGYASGGTDTQYF

SEQ ID NO: 184723 - protein, 14 aa, Homo sapiens
  CDR3 for alpha chain variable domain of TCR clone 92362 (TRAV12-2, TRAJ13)
CAVKKTGGYQKVAF

SEQ ID NO: 184724 - protein, 17 aa, Homo sapiens
  CDR3 for beta chain variable domain of TCR clone 92362 (TRBV13, TRBJ2-3)
CASSLSRVAGGRNTQYF

SEQ ID NO: 184725 - protein, 14 aa, Homo sapiens
  CDR3 for alpha chain variable domain of TCR clone 92363 (TRAV26-1, TRAJ39)
CTVRGSRAGNMLTF

SEQ ID NO: 184726 - protein, 15 aa, Homo sapiens
  CDR3 for beta chain variable domain of TCR clone 92363 (TRBV28, TRBJ2-5)
CASSPGQGSIETQYF

SEQ ID NO: 184727 - protein, 11 aa, Homo sapiens
  CDR3 for alpha chain variable domain of TCR clone 92364 (TRAV1-1, TRAJ23)
CAVRQGGKLIF

SEQ ID NO: 184728 - protein, 15 aa, Homo sapiens
  CDR3 for beta chain variable domain of TCR clone 92364 (TRBV7-2, TRBJ2-1)
CASSFQADEYNEQFF

SEQ ID NO: 184729 - protein, 11 aa, Homo sapiens
  CDR3 for alpha chain variable domain of TCR clone 92365 (TRAV2, TRAJ4)
CAVGWHNKLIF

SEQ ID NO: 184730 - protein, 15 aa, Homo sapiens
  CDR3 for beta chain variable domain of TCR clone 92365 (TRBV7-2, TRBJ2-2)
CASSFQRGETGELFF

SEQ ID NO: 184731 - protein, 15 aa, Homo sapiens
  CDR3 for alpha chain variable domain of TCR clone 92366 (TRAV13-1, TRAJ44)
CAASRGGGTASKLTF

SEQ ID NO: 184732 - protein, 14 aa, Homo sapiens
  CDR3 for beta chain variable domain of TCR clone 92366 (TRBV7-9, TRBJ2-2)
CASSGLADTGELFF

SEQ ID NO: 184733 - protein, 14 aa, Homo sapiens
  CDR3 for alpha chain variable domain of TCR clone 92367 (TRAV17, TRAJ39)
CATDPVRAGNILTF

SEQ ID NO: 184734 - protein, 13 aa, Homo sapiens
  CDR3 for beta chain variable domain of TCR clone 92367 (TRBV19, TRBJ1-2)
CASSVPGQDGYTF

SEQ ID NO: 184735 - protein, 15 aa, Homo sapiens
  CDR3 for alpha chain variable domain of TCR clone 92368 (TRAV20, TRAJ40)
CAVQRGTSGTYKHIF

SEQ ID NO: 184736 - protein, 19 aa, Homo sapiens
  CDR3 for beta chain variable domain of TCR clone 92368 (TRBV28, TRBJ2-7)
CASSYSGTSRLGWVYEQYF

SEQ ID NO: 184737 - protein, 15 aa, Homo sapiens
  CDR3 for alpha chain variable domain of TCR clone 92369 (TRAV12-3, TRAJ27)
CAMRAYNTNAGKSTF

SEQ ID NO: 184738 - protein, 15 aa, Homo sapiens
  CDR3 for beta chain variable domain of TCR clone 92369 (TRBV20-1, TRBJ2-1)
CSARGIGGTYNEQFF

SEQ ID NO: 184739 - protein, 13 aa, Homo sapiens
  CDR3 for alpha chain variable domain of TCR clone 92370 (TRAV1-1, TRAJ28)
CVTSGAGRYQLTF

SEQ ID NO: 184740 - protein, 17 aa, Homo sapiens
  CDR3 for beta chain variable domain of TCR clone 92370 (TRBV18, TRBJ2-2)
CASSQRSSGQGPGELFF

SEQ ID NO: 184741 - protein, 11 aa, Homo sapiens
  CDR3 for alpha chain variable domain of TCR clone 92371 (TRAV13-1, TRAJ30)
CAASRDDKNIF

SEQ ID NO: 184742 - protein, 15 aa, Homo sapiens
  CDR3 for beta chain variable domain of TCR clone 92371 (TRBV18, TRBJ1-1)
CASSPSSWVNTEAFF

SEQ ID NO: 184743 - protein, 11 aa, Homo sapiens
  CDR3 for alpha chain variable domain of TCR clone 92372 (TRAV21, TRAJ34)
CAPLATDKLIF

SEQ ID NO: 184744 - protein, 16 aa, Homo sapiens
  CDR3 for beta chain variable domain of TCR clone 92372 (TRBV5-1, TRBJ2-3)
CASSLAGDRGTDTQYF

SEQ ID NO: 184745 - protein, 13 aa, Homo sapiens
  CDR3 for alpha chain variable domain of TCR clone 92373 (TRAV29/DV5, TRAJ49)
CAASTNTGNQFYF

SEQ ID NO: 184746 - protein, 15 aa, Homo sapiens
  CDR3 for beta chain variable domain of TCR clone 92373 (TRBV7-2, TRBJ1-4)
CASSLAGLENCFLAV

SEQ ID NO: 184747 - protein, 15 aa, Homo sapiens
  CDR3 for alpha chain variable domain of TCR clone 92374 (TRAV27, TRAJ38)
CAARRNAGNNRKLIW

SEQ ID NO: 184748 - protein, 13 aa, Homo sapiens
  CDR3 for beta chain variable domain of TCR clone 92374 (TRBV12-5, TRBJ2-3)
CASGDRQSDTHYL

SEQ ID NO: 184749 - protein, 14 aa, Homo sapiens
  CDR3 for alpha chain variable domain of TCR clone 92375 (TRAV1-2, TRAJ16)
CAVNRFSDGQKLLF

SEQ ID NO: 184750 - protein, 12 aa, Homo sapiens
  CDR3 for beta chain variable domain of TCR clone 92375 (TRBV20-1, TRBJ1-2)
CSASHPSGGYTF

SEQ ID NO: 184751 - protein, 14 aa, Homo sapiens
  CDR3 for alpha chain variable domain of TCR clone 92376 (TRAV3, TRAJ6)
CAVRDPWGSYIPTF

SEQ ID NO: 184752 - protein, 16 aa, Homo sapiens
  CDR3 for beta chain variable domain of TCR clone 92376 (TRBV27, TRBJ2-5)
CASSLSRTAGGEAQYF

SEQ ID NO: 184753 - protein, 14 aa, Homo sapiens
  CDR3 for alpha chain variable domain of TCR clone 92377 (TRAV1-2, TRAJ8)
CAVREDTGFQKLLF

SEQ ID NO: 184754 - protein, 15 aa, Homo sapiens
  CDR3 for beta chain variable domain of TCR clone 92377 (TRBV4-1, TRBJ2-7)
CASSQNTGRLYEQYF

SEQ ID NO: 184755 - protein, 15 aa, Homo sapiens
  CDR3 for alpha chain variable domain of TCR clone 92378 (TRAV4, TRAJ39)
CLVGPNNNAGTMLTF

SEQ ID NO: 184756 - protein, 13 aa, Homo sapiens
  CDR3 for beta chain variable domain of TCR clone 92378 (TRBV11-3, TRBJ2-5)
CASSSTGEETQYF

SEQ ID NO: 184757 - protein, 15 aa, Homo sapiens
  CDR3 for alpha chain variable domain of TCR clone 92379 (TRAV12-3, TRAJ27)
CAMRAYNINAGKSTF

SEQ ID NO: 184758 - protein, 13 aa, Homo sapiens
  CDR3 for beta chain variable domain of TCR clone 92379 (TRBV4-1, TRBJ1-1)
CASSRKMNTEAFF

SEQ ID NO: 184759 - protein, 14 aa, Homo sapiens
  CDR3 for alpha chain variable domain of TCR clone 92380 (TRAV26-1, TRAJ21)
CIVRPPYNFNKFYF

SEQ ID NO: 184760 - protein, 16 aa, Homo sapiens
  CDR3 for beta chain variable domain of TCR clone 92380 (TRBV5-7, TRBJ2-7)
CASSSPGGRTPYEQYF

SEQ ID NO: 184761 - protein, 11 aa, Homo sapiens
  CDR3 for alpha chain variable domain of TCR clone 92381 (TRAV16, TRAJ7)
CALNGNNRLAF

SEQ ID NO: 184762 - protein, 16 aa, Homo sapiens
  CDR3 for beta chain variable domain of TCR clone 92381 (TRBV7-3, TRBJ2-2)
CASSFLPSGYTGELFF

SEQ ID NO: 184763 - protein, 14 aa, Homo sapiens
  CDR3 for alpha chain variable domain of TCR clone 92382 (TRAV1-2, TRAJ16)
CAVNRFSDGQKLLF

SEQ ID NO: 184764 - protein, 13 aa, Homo sapiens
  CDR3 for beta chain variable domain of TCR clone 92382 (TRBV14, TRBJ1-2)
CASSEDRRYGYTF

SEQ ID NO: 184765 - protein, 14 aa, Homo sapiens
  CDR3 for alpha chain variable domain of TCR clone 92383 (TRAV20, TRAJ42)
CAVQAGGSPGKLLF

SEQ ID NO: 184766 - protein, 14 aa, Homo sapiens
  CDR3 for beta chain variable domain of TCR clone 92383 (TRBV28, TRBJ1-2)
CASRIQGANYGYTF

SEQ ID NO: 184767 - protein, 11 aa, Homo sapiens
  CDR3 for alpha chain variable domain of TCR clone 92384 (TRAV13-2, TRAJ31)
CAENMDARLMF

SEQ ID NO: 184768 - protein, 15 aa, Homo sapiens
  CDR3 for beta chain variable domain of TCR clone 92384 (TRBV7-8, TRBJ1-2)
CASSLVRDGGLGHTF

SEQ ID NO: 184769 - protein, 14 aa, Homo sapiens
  CDR3 for alpha chain variable domain of TCR clone 92385 (TRAV12-3, TRAJ11)
CAMTTNSGYSTLTF

SEQ ID NO: 184770 - protein, 16 aa, Homo sapiens
  CDR3 for beta chain variable domain of TCR clone 92385 (TRBV20-1, TRBJ1-1)
FSARALTQGMNTEAFF

SEQ ID NO: 184771 - protein, 12 aa, Homo sapiens
  CDR3 for alpha chain variable domain of TCR clone 92386 (TRAV25, TRAJ29)
CAGHSGKTPLVF

SEQ ID NO: 184772 - protein, 14 aa, Homo sapiens
  CDR3 for beta chain variable domain of TCR clone 92386 (TRBV6-1, TRBJ2-7)
CASTRTGDYYEQYF

SEQ ID NO: 184773 - protein, 13 aa, Homo sapiens
  CDR3 for alpha chain variable domain of TCR clone 92387 (TRAV13-2, TRAJ13)
CAERPGDYQKVTF

SEQ ID NO: 184774 - protein, 16 aa, Homo sapiens
  CDR3 for beta chain variable domain of TCR clone 92387 (TRBV18, TRBJ2-5)
CASSPPSSGGAKTQYF

SEQ ID NO: 184775 - protein, 20 aa, Homo sapiens
  CDR3 for alpha chain variable domain of TCR clone 92388 (TRAV12-3, TRAJ41)
SLFIRDSQPSDSATPEALNF

SEQ ID NO: 184776 - protein, 13 aa, Homo sapiens
  CDR3 for beta chain variable domain of TCR clone 92388 (TRBV10-3, TRBJ2-3)
CATRDTGADTQYF

SEQ ID NO: 184777 - protein, 15 aa, Homo sapiens
  CDR3 for alpha chain variable domain of TCR clone 92389 (TRAV3, TRAJ20)
CAVRDSRSNDYQLSF

SEQ ID NO: 184778 - protein, 14 aa, Homo sapiens
  CDR3 for beta chain variable domain of TCR clone 92389 (TRBV20-1, TRBJ2-7)
CSARRGNGIYEQYF

SEQ ID NO: 184779 - protein, 14 aa, Homo sapiens
  CDR3 for alpha chain variable domain of TCR clone 92390 (TRAV17, TRAJ57)
CATDPQGGTEKLVF

SEQ ID NO: 184780 - protein, 14 aa, Homo sapiens
  CDR3 for beta chain variable domain of TCR clone 92390 (TRBV11-2, TRBJ2-3)
CASSLGGGANTQYF

SEQ ID NO: 184781 - protein, 16 aa, Homo sapiens
  CDR3 for alpha chain variable domain of TCR clone 92391 (TRAV30, TRAJ24)
CGTEIVDADSWGKFQF

SEQ ID NO: 184782 - protein, 14 aa, Homo sapiens
  CDR3 for beta chain variable domain of TCR clone 92391 (TRBV20-1, TRBJ1-1)
CSTQTRIGGTEAFF

SEQ ID NO: 184783 - protein, 16 aa, Homo sapiens
  CDR3 for alpha chain variable domain of TCR clone 92392 (TRAV4, TRAJ5)
CLVGPDHGHGQESTYF

SEQ ID NO: 184784 - protein, 17 aa, Homo sapiens
  CDR3 for beta chain variable domain of TCR clone 92392 (TRBV11-2, TRBJ2-1)
CASSLSPPGVEYNEQFF

SEQ ID NO: 184785 - protein, 16 aa, Homo sapiens
  CDR3 for alpha chain variable domain of TCR clone 92393 (TRAV30, TRAJ24)
CGTEMVDADSWGKFQF

SEQ ID NO: 184786 - protein, 15 aa, Homo sapiens
  CDR3 for beta chain variable domain of TCR clone 92393 (TRBV20-1, TRBJ2-6)
CSARDRGPGANVLTF

SEQ ID NO: 184787 - protein, 12 aa, Homo sapiens
  CDR3 for alpha chain variable domain of TCR clone 92394 (TRAV12-3, TRAJ5)
CAMDTGRRALTF

SEQ ID NO: 184788 - protein, 14 aa, Homo sapiens
  CDR3 for beta chain variable domain of TCR clone 92394 (TRBV20-1, TRBJ2-1)
CSAQIGGSANAQFF

SEQ ID NO: 184789 - protein, 14 aa, Homo sapiens
  CDR3 for alpha chain variable domain of TCR clone 92395 (TRAV13-2, TRAJ41)
RAEYLSNPGYALNF

SEQ ID NO: 184790 - protein, 19 aa, Homo sapiens
  CDR3 for beta chain variable domain of TCR clone 92395 (TRBV7-9, TRBJ2-1)
CASSHNRGALLRSYNEQFF

SEQ ID NO: 184791 - protein, 15 aa, Homo sapiens
  CDR3 for alpha chain variable domain of TCR clone 92396 (TRAV3, TRAJ22)
CAVRDRGGSARQLTF

SEQ ID NO: 184792 - protein, 15 aa, Homo sapiens
  CDR3 for beta chain variable domain of TCR clone 92396 (TRBV27, TRBJ2-1)
CASSNGGGSSSEQFF

SEQ ID NO: 184793 - protein, 13 aa, Homo sapiens
  CDR3 for alpha chain variable domain of TCR clone 92397 (TRAV12-1, TRAJ7)
CVVNMRGNNGLAF

SEQ ID NO: 184794 - protein, 15 aa, Homo sapiens
  CDR3 for beta chain variable domain of TCR clone 92397 (TRBV19, TRBJ2-7)
CASRPTPGLSIEQYF

SEQ ID NO: 184795 - protein, 17 aa, Homo sapiens
  CDR3 for alpha chain variable domain of TCR clone 92398 (TRAV3, TRAJ42)
CAVRDRDYGGSQGNLIF

SEQ ID NO: 184796 - protein, 18 aa, Homo sapiens
  CDR3 for beta chain variable domain of TCR clone 92398 (TRBV20-1, TRBJ2-3)
CSASGLAGGPGATDTQYF

SEQ ID NO: 184797 - protein, 13 aa, Homo sapiens
  CDR3 for alpha chain variable domain of TCR clone 92399 (TRAV1-1, TRAJ23)
CAVVANQGGKLIF

SEQ ID NO: 184798 - protein, 16 aa, Homo sapiens
  CDR3 for beta chain variable domain of TCR clone 92399 (TRBV5-8, TRBJ2-2)
CASSPRQGATTGELFF

SEQ ID NO: 184799 - protein, 16 aa, Homo sapiens
  CDR3 for alpha chain variable domain of TCR clone 92400 (TRAV20, TRAJ52)
CAVLPDGGTSYGKLTC

SEQ ID NO: 184800 - protein, 12 aa, Homo sapiens
  CDR3 for beta chain variable domain of TCR clone 92400 (TRBV19, TRBJ2-1)
CASSQISNEQFF

SEQ ID NO: 184801 - protein, 16 aa, Homo sapiens
  CDR3 for alpha chain variable domain of TCR clone 92401 (TRAV21, TRAJ52)
CAVTNAGGTSFGKLTF

SEQ ID NO: 184802 - protein, 13 aa, Homo sapiens
  CDR3 for beta chain variable domain of TCR clone 92401 (TRBV20-1, TRBJ2-3)
CSARLAGTDTQYF

SEQ ID NO: 184803 - protein, 16 aa, Homo sapiens
  CDR3 for alpha chain variable domain of TCR clone 92402 (TRAV26-1, TRAJ36)
CIVRVSYQTGANNLFF

SEQ ID NO: 184804 - protein, 17 aa, Homo sapiens
  CDR3 for beta chain variable domain of TCR clone 92402 (TRBV19, TRBJ2-6)
CASSTGQVFSGANVLTF

SEQ ID NO: 184805 - protein, 16 aa, Homo sapiens
  CDR3 for alpha chain variable domain of TCR clone 92403 (TRAV13-1, TRAJ28)
CAATPGPGAGSYQLTF

SEQ ID NO: 184806 - protein, 15 aa, Homo sapiens
  CDR3 for beta chain variable domain of TCR clone 92403 (TRBV19, TRBJ1-2)
CASSVGQVLNYGYTF

SEQ ID NO: 184807 - protein, 14 aa, Homo sapiens
  CDR3 for alpha chain variable domain of TCR clone 92404 (TRAV16, TRAJ44)
CALSTTGTASKLTF

SEQ ID NO: 184808 - protein, 16 aa, Homo sapiens
  CDR3 for beta chain variable domain of TCR clone 92404 (TRBV20-1, TRBJ1-4)
CSAPGQGLLTNEKLFF

SEQ ID NO: 184809 - protein, 13 aa, Homo sapiens
  CDR3 for alpha chain variable domain of TCR clone 92405 (TRAV26-2, TRAJ43)
CILRAFNNNDMRF

SEQ ID NO: 184810 - protein, 15 aa, Homo sapiens
  CDR3 for beta chain variable domain of TCR clone 92405 (TRBV7-2, TRBJ2-1)
CASTHGTGIYNEQFF

SEQ ID NO: 184811 - protein, 12 aa, Homo sapiens
  CDR3 for alpha chain variable domain of TCR clone 92406 (TRAV21, TRAJ33)
CAVQDSNYQLTW

SEQ ID NO: 184812 - protein, 14 aa, Homo sapiens
  CDR3 for beta chain variable domain of TCR clone 92406 (TRBV28, TRBJ2-1)
CASSPGEGGNEQFF

SEQ ID NO: 184813 - protein, 12 aa, Homo sapiens
  CDR3 for alpha chain variable domain of TCR clone 92407 (TRAV8-3, TRAJ26)
CAGDNYGQNFVF

SEQ ID NO: 184814 - protein, 15 aa, Homo sapiens
  CDR3 for beta chain variable domain of TCR clone 92407 (TRBV20-1, TRBJ2-3)
CSDRRGEAITDTQYF

SEQ ID NO: 184815 - protein, 22 aa, Homo sapiens
  CDR3 for alpha chain variable domain of TCR clone 92408 (TRAV27, TRAJ38)
CAARRNAGNNHIQNPDPAVYQL

SEQ ID NO: 184816 - protein, 14 aa, Homo sapiens
  CDR3 for beta chain variable domain of TCR clone 92408 (TRBV20-1, TRBJ1-4)
CSARDGSGWEKLFF

SEQ ID NO: 184817 - protein, 15 aa, Homo sapiens
  CDR3 for alpha chain variable domain of TCR clone 92409 (TRAV8-3, TRAJ11)
CAGGLLNSGYSTLTF

SEQ ID NO: 184818 - protein, 23 aa, Homo sapiens
  CDR3 for beta chain variable domain of TCR clone 92409 (TRBV7-9, TRBJ1-2)
EAQLEKSRLLSDRFSSGEDGYTF

SEQ ID NO: 184819 - protein, 13 aa, Homo sapiens
  CDR3 for alpha chain variable domain of TCR clone 92410 (TRAV12-1, TRAJ7)
CVVNMRGNNRLAF

SEQ ID NO: 184820 - protein, 15 aa, Homo sapiens
  CDR3 for beta chain variable domain of TCR clone 92410 (TRBV27, TRBJ2-3)
CASSWGLAATDTQYF

SEQ ID NO: 184821 - protein, 11 aa, Homo sapiens
  CDR3 for alpha chain variable domain of TCR clone 92411 (TRAV35, TRAJ34)
CWARNTDKLIF

SEQ ID NO: 184822 - protein, 13 aa, Homo sapiens
  CDR3 for beta chain variable domain of TCR clone 92411 (TRBV10-3, TRBJ2-7)
CASKLAVNYEQCF

SEQ ID NO: 184823 - protein, 14 aa, Homo sapiens
  CDR3 for alpha chain variable domain of TCR clone 92412 (TRAV1-2, TRAJ16)
CAVNRFSDGQKLLF

SEQ ID NO: 184824 - protein, 15 aa, Homo sapiens
  CDR3 for beta chain variable domain of TCR clone 92412 (TRBV24-1, TRBJ2-1)
CATSGSGGFYNEQFF

SEQ ID NO: 184825 - protein, 13 aa, Homo sapiens
  CDR3 for alpha chain variable domain of TCR clone 92413 (TRAV2, TRAJ40)
CAVVTSGTYKYIF

SEQ ID NO: 184826 - protein, 12 aa, Homo sapiens
  CDR3 for beta chain variable domain of TCR clone 92413 (TRBV5-7, TRBJ1-2)
CASSLVQNGYTF

SEQ ID NO: 184827 - protein, 12 aa, Homo sapiens
  CDR3 for alpha chain variable domain of TCR clone 92414 (TRAV12-1, TRAJ40)
CVFYSGTYKYIF

SEQ ID NO: 184828 - protein, 18 aa, Homo sapiens
  CDR3 for beta chain variable domain of TCR clone 92414 (TRBV12-4, TRBJ2-2)
CASILVAGTRGRTGELFF

SEQ ID NO: 184829 - protein, 18 aa, Homo sapiens
  CDR3 for alpha chain variable domain of TCR clone 92415 (TRAV26-2, TRAJ54)
CILRDVEVGIQGAQKLVF

SEQ ID NO: 184830 - protein, 14 aa, Homo sapiens
  CDR3 for beta chain variable domain of TCR clone 92415 (TRBV4-2, TRBJ1-2)
CASSPGGSNYGYTF

SEQ ID NO: 184831 - protein, 11 aa, Homo sapiens
  CDR3 for alpha chain variable domain of TCR clone 92416 (TRAV12-1, TRAJ30)
CVVNSQDKIIF

SEQ ID NO: 184832 - protein, 15 aa, Homo sapiens
  CDR3 for beta chain variable domain of TCR clone 92416 (TRBV28, TRBJ2-5)
CASSSGRTIQETQYF

SEQ ID NO: 184833 - protein, 13 aa, Homo sapiens
  CDR3 for alpha chain variable domain of TCR clone 92417 (TRAV21, TRAJ27)
CAARPGNAGKSTF

SEQ ID NO: 184834 - protein, 17 aa, Homo sapiens
  CDR3 for beta chain variable domain of TCR clone 92417 (TRBV7-6, TRBJ2-1)
CIAVPAAWGGGADEQFF

SEQ ID NO: 184835 - protein, 14 aa, Homo sapiens
  CDR3 for alpha chain variable domain of TCR clone 92418 (TRAV13-1, TRAJ35)
CAASKGGFGNVLHC

SEQ ID NO: 184836 - protein, 16 aa, Homo sapiens
  CDR3 for beta chain variable domain of TCR clone 92418 (TRBV7-2, TRBJ1-3)
CASSSGRVLSGNTIYF

SEQ ID NO: 184837 - protein, 14 aa, Homo sapiens
  CDR3 for alpha chain variable domain of TCR clone 92419 (TRAV2, TRAJ9)
CAVDPNTGGFNTIF

SEQ ID NO: 184838 - protein, 13 aa, Homo sapiens
  CDR3 for beta chain variable domain of TCR clone 92419 (TRBV20-1, TRBJ2-1)
CSASTGTSNEQFF

SEQ ID NO: 184839 - protein, 16 aa, Homo sapiens
  CDR3 for alpha chain variable domain of TCR clone 92420 (TRAV17, TRAJ35)
CATAEGGIGFGNVLHC

SEQ ID NO: 184840 - protein, 19 aa, Homo sapiens
  CDR3 for beta chain variable domain of TCR clone 92420 (TRBV19, TRBJ2-5)
CASSIVQVTDFFLGETQYF

SEQ ID NO: 184841 - protein, 14 aa, Homo sapiens
  CDR3 for alpha chain variable domain of TCR clone 92421 (TRAV1-2, TRAJ8)
CAVSEDTGFQKLVF

SEQ ID NO: 184842 - protein, 12 aa, Homo sapiens
  CDR3 for beta chain variable domain of TCR clone 92421 (TRBV11-2, TRBJ2-2)
CASSLPTGELFF

SEQ ID NO: 184843 - protein, 16 aa, Homo sapiens
  CDR3 for alpha chain variable domain of TCR clone 92422 (TRAV4, TRAJ22)
CLVGDLYSGSARQLTF

SEQ ID NO: 184844 - protein, 16 aa, Homo sapiens
  CDR3 for beta chain variable domain of TCR clone 92422 (TRBV4-2, TRBJ1-2)
CASSQERRIHYIGYTF

SEQ ID NO: 184845 - protein, 23 aa, Homo sapiens
  CDR3 for alpha chain variable domain of TCR clone 92423 (TRAV1-1, TRAJ11)
LLHELQMKDSASYFCAGYSTLTF

SEQ ID NO: 184846 - protein, 15 aa, Homo sapiens
  CDR3 for beta chain variable domain of TCR clone 92423 (TRBV6-5, TRBJ2-1)
CASRGDFDSYNEQFF

SEQ ID NO: 184847 - protein, 16 aa, Homo sapiens
  CDR3 for alpha chain variable domain of TCR clone 92424 (TRAV12-3, TRAJ53)
CAMSPGSGGSNYKLTF

SEQ ID NO: 184848 - protein, 15 aa, Homo sapiens
  CDR3 for beta chain variable domain of TCR clone 92424 (TRBV7-9, TRBJ1-4)
CASSRTGGFNEKLFF

SEQ ID NO: 184849 - protein, 14 aa, Homo sapiens
  CDR3 for alpha chain variable domain of TCR clone 92425 (TRAV12-2, TRAJ40)
CAVKIPSGTYKYIF

SEQ ID NO: 184850 - protein, 13 aa, Homo sapiens
  CDR3 for beta chain variable domain of TCR clone 92425 (TRBV7-9, TRBJ2-1)
CASRPNLSDEQFF

SEQ ID NO: 184851 - protein, 14 aa, Homo sapiens
  CDR3 for alpha chain variable domain of TCR clone 92426 (TRAV12-3, TRAJ10)
SHLHLTGGGNKLTF

SEQ ID NO: 184852 - protein, 15 aa, Homo sapiens
  CDR3 for beta chain variable domain of TCR clone 92426 (TRBV10-3, TRBJ1-1)
CAISDRGGMNTEAFF

SEQ ID NO: 184853 - protein, 11 aa, Homo sapiens
  CDR3 for alpha chain variable domain of TCR clone 92427 (TRAV1-2, TRAJ20)
CDVSNDYKLSF

SEQ ID NO: 184854 - protein, 16 aa, Homo sapiens
  CDR3 for beta chain variable domain of TCR clone 92427 (TRBV29-1, TRBJ2-6)
CSVEDITYSGANVLTF

SEQ ID NO: 184855 - protein, 13 aa, Homo sapiens
  CDR3 for alpha chain variable domain of TCR clone 92428 (TRAV13-2, TRAJ49)
CAETLHGGNQFYF

SEQ ID NO: 184856 - protein, 15 aa, Homo sapiens
  CDR3 for beta chain variable domain of TCR clone 92428 (TRBV20-1, TRBJ2-7)
CSAESGTSGAYEQYF

SEQ ID NO: 184857 - protein, 12 aa, Homo sapiens
  CDR3 for alpha chain variable domain of TCR clone 92429 (TRAV9-2, TRAJ36)
CALKKGANNLFF

SEQ ID NO: 184858 - protein, 17 aa, Homo sapiens
  CDR3 for beta chain variable domain of TCR clone 92429 (TRBV5-1, TRBJ1-5)
CASSLVGREEGNQPQHF

SEQ ID NO: 184859 - protein, 10 aa, Homo sapiens
  CDR3 for alpha chain variable domain of TCR clone 92430 (TRAV30, TRAJ48)
CGIGNEKLTF

SEQ ID NO: 184860 - protein, 16 aa, Homo sapiens
  CDR3 for beta chain variable domain of TCR clone 92430 (TRBV20-1, TRBJ1-2)
CSASMGQGVANYGYAF

SEQ ID NO: 184861 - protein, 13 aa, Homo sapiens
  CDR3 for alpha chain variable domain of TCR clone 92431 (TRAV16, TRAJ11)
CALSGPSYSTLTF

SEQ ID NO: 184862 - protein, 15 aa, Homo sapiens
  CDR3 for beta chain variable domain of TCR clone 92431 (TRBV28, TRBJ2-1)
CASSIIAGGRSEQFF

SEQ ID NO: 184863 - protein, 12 aa, Homo sapiens
  CDR3 for alpha chain variable domain of TCR clone 92432 (TRAV12-3, TRAJ17)
CAMTLTGNKLTF

SEQ ID NO: 184864 - protein, 20 aa, Homo sapiens
  CDR3 for beta chain variable domain of TCR clone 92432 (TRBV4-1, TRBJ2-2)
CASSQASPPGLASNTGELFF

SEQ ID NO: 184865 - protein, 14 aa, Homo sapiens
  CDR3 for alpha chain variable domain of TCR clone 92433 (TRAV3, TRAJ36)
CAMRDGTGANNLFF

SEQ ID NO: 184866 - protein, 16 aa, Homo sapiens
  CDR3 for beta chain variable domain of TCR clone 92433 (TRBV7-3, TRBJ2-5)
CASIQPGGSVQETQYF

SEQ ID NO: 184867 - protein, 19 aa, Homo sapiens
  CDR3 for alpha chain variable domain of TCR clone 92434 (TRAV1-2, TRAJ26)
CLLPLCCERPDNYGQNFVF

SEQ ID NO: 184868 - protein, 16 aa, Homo sapiens
  CDR3 for beta chain variable domain of TCR clone 92434 (TRBV18, TRBJ1-1)
CASSPGVGGRGGEAFF

SEQ ID NO: 184869 - protein, 14 aa, Homo sapiens
  CDR3 for alpha chain variable domain of TCR clone 92435 (TRAV8-6, TRAJ39)
CAVSERDAGNMLTF

SEQ ID NO: 184870 - protein, 15 aa, Homo sapiens
  CDR3 for beta chain variable domain of TCR clone 92435 (TRBV3-1, TRBJ2-7)
CASSQEWTGSYEQYF

SEQ ID NO: 184871 - protein, 15 aa, Homo sapiens
  CDR3 for alpha chain variable domain of TCR clone 92436 (TRAV8-3, TRAJ11)
CAVGLLNSGYSTLTF

SEQ ID NO: 184872 - protein, 12 aa, Homo sapiens
  CDR3 for beta chain variable domain of TCR clone 92436 (TRBV7-9, TRBJ1-2)
DRSSSGEDGYTF

SEQ ID NO: 184873 - protein, 16 aa, Homo sapiens
  CDR3 for alpha chain variable domain of TCR clone 92437 (TRAV23/DV6, TRAJ9)
CAASIGGNTGGCKTIF

SEQ ID NO: 184874 - protein, 15 aa, Homo sapiens
  CDR3 for beta chain variable domain of TCR clone 92437 (TRBV6-3, TRBJ2-7)
CASSSPGTVLYEQYF

SEQ ID NO: 184875 - protein, 11 aa, Homo sapiens
  CDR3 for alpha chain variable domain of TCR clone 92438 (TRAV38-1, TRAJ43)
CAFMKHNSGRH

SEQ ID NO: 184876 - protein, 11 aa, Homo sapiens
  CDR3 for beta chain variable domain of TCR clone 92438 (TRBV7-9, TRBJ2-3)
CASSHTDTQYF

SEQ ID NO: 184877 - protein, 14 aa, Homo sapiens
  CDR3 for alpha chain variable domain of TCR clone 92439 (TRAV12-3, TRAJ6)
CAMSAPGGSYIPTF

SEQ ID NO: 184878 - protein, 12 aa, Homo sapiens
  CDR3 for beta chain variable domain of TCR clone 92439 (TRBV11-2, TRBJ2-1)
CASSPGNNEQFF

SEQ ID NO: 184879 - protein, 13 aa, Homo sapiens
  CDR3 for alpha chain variable domain of TCR clone 92440 (TRAV8-3, TRAJ28)
CAVGAVGSYQLTF

SEQ ID NO: 184880 - protein, 16 aa, Homo sapiens
  CDR3 for beta chain variable domain of TCR clone 92440 (TRBV11-2, TRBJ2-1)
CQQLIPPGVEYNEQFF

SEQ ID NO: 184881 - protein, 14 aa, Homo sapiens
  CDR3 for alpha chain variable domain of TCR clone 92441 (TRAV8-6, TRAJ37)
CAARLSGNTGKLIF

SEQ ID NO: 184882 - protein, 17 aa, Homo sapiens
  CDR3 for beta chain variable domain of TCR clone 92441 (TRBV11-2, TRBJ2-1)
CASSLYPPGVEYNEQFF

SEQ ID NO: 184883 - protein, 14 aa, Homo sapiens
  CDR3 for alpha chain variable domain of TCR clone 92442 (TRAV3, TRAJ34)
CAVSDINNTDKLIF

SEQ ID NO: 184884 - protein, 15 aa, Homo sapiens
  CDR3 for beta chain variable domain of TCR clone 92442 (TRBV20-1, TRBJ2-7)
CSARDRVSGMDEQYF

SEQ ID NO: 184885 - protein, 14 aa, Homo sapiens
  CDR3 for alpha chain variable domain of TCR clone 92443 (TRAV23/DV6, TRAJ37)
CAASTSSNTGKLIF

SEQ ID NO: 184886 - protein, 16 aa, Homo sapiens
  CDR3 for beta chain variable domain of TCR clone 92443 (TRBV19, TRBJ1-1)
CASRFGGPVTGTEAFF

SEQ ID NO: 184887 - protein, 14 aa, Homo sapiens
  CDR3 for alpha chain variable domain of TCR clone 92444 (TRAV12-2, TRAJ44)
CAVNPAGTASKLTF

SEQ ID NO: 184888 - protein, 11 aa, Homo sapiens
  CDR3 for beta chain variable domain of TCR clone 92444 (TRBV7-2, TRBJ2-3)
CASSSSDTQYF

SEQ ID NO: 184889 - protein, 14 aa, Homo sapiens
  CDR3 for alpha chain variable domain of TCR clone 92445 (TRAV17, TRAJ39)
CATDPVRAGNMITF

SEQ ID NO: 184890 - protein, 13 aa, Homo sapiens
  CDR3 for beta chain variable domain of TCR clone 92445 (TRBV19, TRBJ1-2)
CASSVPGQDGYTF

SEQ ID NO: 184891 - protein, 15 aa, Homo sapiens
  CDR3 for alpha chain variable domain of TCR clone 92446 (TRAV17, TRAJ13)
CATDAGSGGYQKITF

SEQ ID NO: 184892 - protein, 17 aa, Homo sapiens
  CDR3 for beta chain variable domain of TCR clone 92446 (TRBV11-2, TRBJ2-1)
CASSLYPPGVEYNEQFF

SEQ ID NO: 184893 - protein, 14 aa, Homo sapiens
  CDR3 for alpha chain variable domain of TCR clone 92447 (TRAV12-2, TRAJ5)
CAVNRSTSRRALTF

SEQ ID NO: 184894 - protein, 12 aa, Homo sapiens
  CDR3 for beta chain variable domain of TCR clone 92447 (TRBV19, TRBJ1-5)
CASSIAQQPQHF

SEQ ID NO: 184895 - protein, 13 aa, Homo sapiens
  CDR3 for alpha chain variable domain of TCR clone 92448 (TRAV12-3, TRAJ29)
CAMTLSGNTPLVF

SEQ ID NO: 184896 - protein, 15 aa, Homo sapiens
  CDR3 for beta chain variable domain of TCR clone 92448 (TRBV5-1, TRBJ2-6)
CASSLDPSGANVLAF

SEQ ID NO: 184897 - protein, 13 aa, Homo sapiens
  CDR3 for alpha chain variable domain of TCR clone 92449 (TRAV27, TRAJ29)
CAGAHSGNTPLVF

SEQ ID NO: 184898 - protein, 14 aa, Homo sapiens
  CDR3 for beta chain variable domain of TCR clone 92449 (TRBV7-9, TRBJ2-7)
CASSIGQGAGEQFF

SEQ ID NO: 184899 - protein, 13 aa, Homo sapiens
  CDR3 for alpha chain variable domain of TCR clone 92450 (TRAV8-3, TRAJ4)
WVFYSGGYNKLIF

SEQ ID NO: 184900 - protein, 14 aa, Homo sapiens
  CDR3 for beta chain variable domain of TCR clone 92450 (TRBV19, TRBJ2-1)
CASPTFVLSGEQFF

SEQ ID NO: 184901 - protein, 13 aa, Homo sapiens
  CDR3 for alpha chain variable domain of TCR clone 92451 (TRAV22, TRAJ29)
CAVGGSGNTPLVF

SEQ ID NO: 184902 - protein, 12 aa, Homo sapiens
  CDR3 for beta chain variable domain of TCR clone 92451 (TRBV19, TRBJ2-5)
CATSRGGETQYF

SEQ ID NO: 184903 - protein, 13 aa, Homo sapiens
  CDR3 for alpha chain variable domain of TCR clone 92452 (TRAV12-3, TRAJ7)
CAMTPYGNNRLAF

SEQ ID NO: 184904 - protein, 12 aa, Homo sapiens
  CDR3 for beta chain variable domain of TCR clone 92452 (TRBV5-5, TRBJ2-5)
CASSYFGETQYF

SEQ ID NO: 184905 - protein, 17 aa, Homo sapiens
  CDR3 for alpha chain variable domain of TCR clone 92453 (TRAV17, TRAJ57)
TSVLRTNGQGGSEKLVF

SEQ ID NO: 184906 - protein, 13 aa, Homo sapiens
  CDR3 for beta chain variable domain of TCR clone 92453 (TRBV28, TRBJ2-7)
CASSLPSRYEQYF

SEQ ID NO: 184907 - protein, 15 aa, Homo sapiens
  CDR3 for alpha chain variable domain of TCR clone 92454 (TRAV26-2, TRAJ13)
CILRDLSGGYQEVTF

SEQ ID NO: 184908 - protein, 14 aa, Homo sapiens
  CDR3 for beta chain variable domain of TCR clone 92454 (TRBV4-1, TRBJ2-3)
CASSQEGSTDTQYF

SEQ ID NO: 184909 - protein, 19 aa, Homo sapiens
  CDR3 for alpha chain variable domain of TCR clone 92455 (TRAV17, TRAJ40)
TASRAADTAAYFCASKYIF

SEQ ID NO: 184910 - protein, 17 aa, Homo sapiens
  CDR3 for beta chain variable domain of TCR clone 92455 (TRBV11-2, TRBJ2-4)
CASSFLALGGAGDIQYF

SEQ ID NO: 184911 - protein, 16 aa, Homo sapiens
  CDR3 for alpha chain variable domain of TCR clone 92456 (TRAV17, TRAJ35)
CATAEGGIGFGNVLHC

SEQ ID NO: 184912 - protein, 16 aa, Homo sapiens
  CDR3 for beta chain variable domain of TCR clone 92456 (TRBV6-5, TRBJ2-7)
CASSSNPTSGFYEQYF

SEQ ID NO: 184913 - protein, 19 aa, Homo sapiens
  CDR3 for alpha chain variable domain of TCR clone 92457 (TRAV26-1, TRAJ10)
CIVRVGLEVWNQGGNKLTF

SEQ ID NO: 184914 - protein, 11 aa, Homo sapiens
  CDR3 for beta chain variable domain of TCR clone 92457 (TRBV6-1, TRBJ2-1)
CASISSNEQFF

SEQ ID NO: 184915 - protein, 16 aa, Homo sapiens
  CDR3 for alpha chain variable domain of TCR clone 92458 (TRAV16, TRAJ42)
CARKMNYGGSQGYLIF

SEQ ID NO: 184916 - protein, 15 aa, Homo sapiens
  CDR3 for beta chain variable domain of TCR clone 92458 (TRBV20-1, TRBJ2-7)
CSAREGRDSLYEQYF

SEQ ID NO: 184917 - protein, 13 aa, Homo sapiens
  CDR3 for alpha chain variable domain of TCR clone 92459 (TRAV1-2, TRAJ9)
CAALNTGGFKTIF

SEQ ID NO: 184918 - protein, 14 aa, Homo sapiens
  CDR3 for beta chain variable domain of TCR clone 92459 (TRBV19, TRBJ1-2)
CASSLQGQAYGYTF

SEQ ID NO: 184919 - protein, 12 aa, Homo sapiens
  CDR3 for alpha chain variable domain of TCR clone 92460 (TRAV16, TRAJ56)
CAPTGANSKLTF

SEQ ID NO: 184920 - protein, 12 aa, Homo sapiens
  CDR3 for beta chain variable domain of TCR clone 92460 (TRBV6-5, TRBJ2-3)
CASSDTTDTQYF

SEQ ID NO: 184921 - protein, 11 aa, Homo sapiens
  CDR3 for alpha chain variable domain of TCR clone 92461 (TRAV12-1, TRAJ8)
CVVTGFQNLVF

SEQ ID NO: 184922 - protein, 14 aa, Homo sapiens
  CDR3 for beta chain variable domain of TCR clone 92461 (TRBV19, TRBJ2-1)
CASGKSTQYNEQFF

SEQ ID NO: 184923 - protein, 17 aa, Homo sapiens
  CDR3 for alpha chain variable domain of TCR clone 92462 (TRAV23/DV6, TRAJ57)
CAASSTLSQGGSEKLVF

SEQ ID NO: 184924 - protein, 14 aa, Homo sapiens
  CDR3 for beta chain variable domain of TCR clone 92462 (TRBV7-3, TRBJ2-1)
CASSLAGGTNEQFF

SEQ ID NO: 184925 - protein, 14 aa, Homo sapiens
  CDR3 for alpha chain variable domain of TCR clone 92463 (TRAV25, TRAJ22)
CAVRSSVSARQLTF

SEQ ID NO: 184926 - protein, 16 aa, Homo sapiens
  CDR3 for beta chain variable domain of TCR clone 92463 (TRBV4-2, TRBJ1-1)
CASSPSPGRAAPEAFF

SEQ ID NO: 184927 - protein, 18 aa, Homo sapiens
  CDR3 for alpha chain variable domain of TCR clone 92464 (TRAV21, TRAJ52)
CAVRPSPAGGTSYGKLTF

SEQ ID NO: 184928 - protein, 12 aa, Homo sapiens
  CDR3 for beta chain variable domain of TCR clone 92464 (TRBV7-8, TRBJ2-1)
CASSLGHNEQFF

SEQ ID NO: 184929 - protein, 12 aa, Homo sapiens
  CDR3 for alpha chain variable domain of TCR clone 92465 (TRAV21, TRAJ11)
CAATSGYSTLTF

SEQ ID NO: 184930 - protein, 14 aa, Homo sapiens
  CDR3 for beta chain variable domain of TCR clone 92465 (TRBV7-8, TRBJ2-3)
CASSFPDGQDTQYF

SEQ ID NO: 184931 - protein, 17 aa, Homo sapiens
  CDR3 for alpha chain variable domain of TCR clone 92466 (TRAV13-1, TRAJ52)
CASSSGAGGTSYGKLTF

SEQ ID NO: 184932 - protein, 12 aa, Homo sapiens
  CDR3 for beta chain variable domain of TCR clone 92466 (TRBV11-2, TRBJ2-2)
CASSLGGGELFF

SEQ ID NO: 184933 - protein, 13 aa, Homo sapiens
  CDR3 for alpha chain variable domain of TCR clone 92467 (TRAV13-2, TRAJ13)
CAERPGGYQKVTF

SEQ ID NO: 184934 - protein, 15 aa, Homo sapiens
  CDR3 for beta chain variable domain of TCR clone 92467 (TRBV7-2, TRBJ2-1)
CASRKTGSSYNEQFF

SEQ ID NO: 184935 - protein, 11 aa, Homo sapiens
  CDR3 for alpha chain variable domain of TCR clone 92468 (TRAV21, TRAJ11)
CAVNGYSTLTF

SEQ ID NO: 184936 - protein, 11 aa, Homo sapiens
  CDR3 for beta chain variable domain of TCR clone 92468 (TRBV19, TRBJ1-1)
CASSIGSKAFY

SEQ ID NO: 184937 - protein, 14 aa, Homo sapiens
  CDR3 for alpha chain variable domain of TCR clone 92469 (TRAV1-2, TRAJ10)
CAVSPPGGGNKLTF

SEQ ID NO: 184938 - protein, 16 aa, Homo sapiens
  CDR3 for beta chain variable domain of TCR clone 92469 (TRBV7-8, TRBJ2-6)
CASRVGDSSGANVLTF

SEQ ID NO: 184939 - protein, 13 aa, Homo sapiens
  CDR3 for alpha chain variable domain of TCR clone 92470 (TRAV8-4, TRAJ10)
CASFTGGGNKLTF

SEQ ID NO: 184940 - protein, 15 aa, Homo sapiens
  CDR3 for beta chain variable domain of TCR clone 92470 (TRBV2, TRBJ2-3)
CASSDFEKATDTQYF

SEQ ID NO: 184941 - protein, 16 aa, Homo sapiens
  CDR3 for alpha chain variable domain of TCR clone 92471 (TRAV30, TRAJ24)
CGTEIVDADSWGKFQF

SEQ ID NO: 184942 - protein, 13 aa, Homo sapiens
  CDR3 for beta chain variable domain of TCR clone 92471 (TRBV28, TRBJ2-7)
CASSLPSRYEQYF

SEQ ID NO: 184943 - protein, 14 aa, Homo sapiens
  CDR3 for alpha chain variable domain of TCR clone 92472 (TRAV12-3, TRAJ29)
CAMSPYSGNTPLVF

SEQ ID NO: 184944 - protein, 15 aa, Homo sapiens
  CDR3 for beta chain variable domain of TCR clone 92472 (TRBV11-3, TRBJ2-3)
CASLKDGREGDTQYF

SEQ ID NO: 184945 - protein, 13 aa, Homo sapiens
  CDR3 for alpha chain variable domain of TCR clone 92473 (TRAV1-2, TRAJ9)
CAALNTGGFKTIF

SEQ ID NO: 184946 - protein, 17 aa, Homo sapiens
  CDR3 for beta chain variable domain of TCR clone 92473 (TRBV4-1, TRBJ1-4)
CASSQEGPRGVEEKLFF

SEQ ID NO: 184947 - protein, 18 aa, Homo sapiens
  CDR3 for alpha chain variable domain of TCR clone 92474 (TRAV13-1, TRAJ52)
CAAKNLNAGGTSYGKLTF

SEQ ID NO: 184948 - protein, 14 aa, Homo sapiens
  CDR3 for beta chain variable domain of TCR clone 92474 (TRBV7-8, TRBJ2-3)
CASSLEAGTDTQYF

SEQ ID NO: 184949 - protein, 17 aa, Homo sapiens
  CDR3 for alpha chain variable domain of TCR clone 92475 (TRAV36/DV7, TRAJ52)
CAVAQRAGGTSYGKLTF

SEQ ID NO: 184950 - protein, 13 aa, Homo sapiens
  CDR3 for beta chain variable domain of TCR clone 92475 (TRBV20-1, TRBJ1-1)
CSAGTVGNTEDFF

SEQ ID NO: 184951 - protein, 14 aa, Homo sapiens
  CDR3 for alpha chain variable domain of TCR clone 92476 (TRAV8-1, TRAJ27)
CAVNVGTNAGKSTF

SEQ ID NO: 184952 - protein, 16 aa, Homo sapiens
  CDR3 for beta chain variable domain of TCR clone 92476 (TRBV5-1, TRBJ2-2)
CASSSRTGGRTGELFF

SEQ ID NO: 184953 - protein, 15 aa, Homo sapiens
  CDR3 for alpha chain variable domain of TCR clone 92477 (TRAV17, TRAJ57)
CATGPSQGGSEKLAF

SEQ ID NO: 184954 - protein, 15 aa, Homo sapiens
  CDR3 for beta chain variable domain of TCR clone 92477 (TRBV6-3, TRBJ2-7)
CASSSPGTVFYEQYF

SEQ ID NO: 184955 - protein, 12 aa, Homo sapiens
  CDR3 for alpha chain variable domain of TCR clone 92478 (TRAV8-3, TRAJ26)
CAGDNYGQNFVF

SEQ ID NO: 184956 - protein, 13 aa, Homo sapiens
  CDR3 for beta chain variable domain of TCR clone 92478 (TRBV20-1, TRBJ1-1)
CSARGGGNTEAFF

SEQ ID NO: 184957 - protein, 17 aa, Homo sapiens
  CDR3 for alpha chain variable domain of TCR clone 92479 (TRAV3, TRAJ6)
CAVRDGPRAGGSYIPTF

SEQ ID NO: 184958 - protein, 15 aa, Homo sapiens
  CDR3 for beta chain variable domain of TCR clone 92479 (TRBV5-5, TRBJ2-2)
CASSRQASGAGELFF

SEQ ID NO: 184959 - protein, 13 aa, Homo sapiens
  CDR3 for alpha chain variable domain of TCR clone 92480 (TRAV8-3, TRAJ48)
CAVVPFGNEKLTF

SEQ ID NO: 184960 - protein, 15 aa, Homo sapiens
  CDR3 for beta chain variable domain of TCR clone 92480 (TRBV11-2, TRBJ2-1)
CASSSPSTRYSEQFF

SEQ ID NO: 184961 - protein, 16 aa, Homo sapiens
  CDR3 for alpha chain variable domain of TCR clone 92481 (TRAV8-3, TRAJ22)
CAVDLLGPGYARQLTF

SEQ ID NO: 184962 - protein, 14 aa, Homo sapiens
  CDR3 for beta chain variable domain of TCR clone 92481 (TRBV11-2, TRBJ2-7)
CASSLELEGYEQYF

SEQ ID NO: 184963 - protein, 14 aa, Homo sapiens
  CDR3 for alpha chain variable domain of TCR clone 92482 (TRAV3, TRAJ8)
CAALMNTGFQKLVF

SEQ ID NO: 184964 - protein, 15 aa, Homo sapiens
  CDR3 for beta chain variable domain of TCR clone 92482 (TRBV28, TRBJ2-5)
CASSLGLGNQETQHF

SEQ ID NO: 184965 - protein, 13 aa, Homo sapiens
  CDR3 for alpha chain variable domain of TCR clone 92483 (TRAV13-1, TRAJ21)
CSASIYNFNKFYF

SEQ ID NO: 184966 - protein, 12 aa, Homo sapiens
  CDR3 for beta chain variable domain of TCR clone 92483 (TRBV11-2, TRBJ2-1)
CASSPGNNEQFF

SEQ ID NO: 184967 - protein, 14 aa, Homo sapiens
  CDR3 for alpha chain variable domain of TCR clone 92484 (TRAV1-2, TRAJ16)
CAVNRFSDGQKLLF

SEQ ID NO: 184968 - protein, 13 aa, Homo sapiens
  CDR3 for beta chain variable domain of TCR clone 92484 (TRBV29-1, TRBJ1-1)
CSAGDSRNTEAFF

SEQ ID NO: 184969 - protein, 19 aa, Homo sapiens
  CDR3 for alpha chain variable domain of TCR clone 92485 (TRAV17, TRAJ52)
CFLLLCYGGCGTSYGKLTF

SEQ ID NO: 184970 - protein, 14 aa, Homo sapiens
  CDR3 for beta chain variable domain of TCR clone 92485 (TRBV28, TRBJ1-5)
CASSLGVLVKPQHF

SEQ ID NO: 184971 - protein, 12 aa, Homo sapiens
  CDR3 for alpha chain variable domain of TCR clone 92486 (TRAV12-2, TRAJ49)
CAVLNTGNQFYF

SEQ ID NO: 184972 - protein, 20 aa, Homo sapiens
  CDR3 for beta chain variable domain of TCR clone 92486 (TRBV28, TRBJ2-1)
CASTPIGRSPGLAGGNEQFF

SEQ ID NO: 184973 - protein, 15 aa, Homo sapiens
  CDR3 for alpha chain variable domain of TCR clone 92487 (TRAV21, TRAJ36)
CAVRRKQTGANNLFF

SEQ ID NO: 184974 - protein, 17 aa, Homo sapiens
  CDR3 for beta chain variable domain of TCR clone 92487 (TRBV11-2, TRBJ2-1)
CASSLYPPGVEYNEQFF

SEQ ID NO: 184975 - protein, 16 aa, Homo sapiens
  CDR3 for alpha chain variable domain of TCR clone 92488 (TRAV3, TRAJ18)
CAVRDGRGSTPGRLYF

SEQ ID NO: 184976 - protein, 15 aa, Homo sapiens
  CDR3 for beta chain variable domain of TCR clone 92488 (TRBV7-9, TRBJ1-6)
CASSSPGRGNSPLHF

SEQ ID NO: 184977 - protein, 13 aa, Homo sapiens
  CDR3 for alpha chain variable domain of TCR clone 92489 (TRAV2, TRAJ40)
CAVVTSGTYKYIF

SEQ ID NO: 184978 - protein, 16 aa, Homo sapiens
  CDR3 for beta chain variable domain of TCR clone 92489 (TRBV29-1, TRBJ1-2)
CSVEANRDIANYGYSF

SEQ ID NO: 184979 - protein, 18 aa, Homo sapiens
  CDR3 for alpha chain variable domain of TCR clone 92490 (TRAV9-2, TRAJ52)
CALSRHNAGGTSYGKLTF

SEQ ID NO: 184980 - protein, 13 aa, Homo sapiens
  CDR3 for beta chain variable domain of TCR clone 92490 (TRBV7-9, TRBJ1-2)
YASSLKQNYGYTF

SEQ ID NO: 184981 - protein, 15 aa, Homo sapiens
  CDR3 for alpha chain variable domain of TCR clone 92491 (TRAV26-1, TRAJ44)
CIVRICTGTASKLTF

SEQ ID NO: 184982 - protein, 15 aa, Homo sapiens
  CDR3 for beta chain variable domain of TCR clone 92491 (TRBV7-6, TRBJ2-1)
CASSSLAGEGNEQFF

SEQ ID NO: 184983 - protein, 17 aa, Homo sapiens
  CDR3 for alpha chain variable domain of TCR clone 92492 (TRAV8-6, TRAJ58)
CAVSSWVGETSGSRLTF

SEQ ID NO: 184984 - protein, 15 aa, Homo sapiens
  CDR3 for beta chain variable domain of TCR clone 92492 (TRBV7-9, TRBJ1-5)
CASSQGHQPNQPQHF

SEQ ID NO: 184985 - protein, 16 aa, Homo sapiens
  CDR3 for alpha chain variable domain of TCR clone 92493 (TRAV16, TRAJ4)
CALSRMFSGGYNKLIF

SEQ ID NO: 184986 - protein, 13 aa, Homo sapiens
  CDR3 for beta chain variable domain of TCR clone 92493 (TRBV19, TRBJ1-2)
CATSVPGQDGYTF

SEQ ID NO: 184987 - protein, 14 aa, Homo sapiens
  CDR3 for alpha chain variable domain of TCR clone 92494 (TRAV12-2, TRAJ5)
CAVNRSTGRRALTF

SEQ ID NO: 184988 - protein, 16 aa, Homo sapiens
  CDR3 for beta chain variable domain of TCR clone 92494 (TRBV7-2, TRBJ2-5)
CVSSSKWLSGQETQYF

SEQ ID NO: 184989 - protein, 14 aa, Homo sapiens
  CDR3 for alpha chain variable domain of TCR clone 92495 (TRAV12-2, TRAJ13)
CAVKKTGGYQKVTF

SEQ ID NO: 184990 - protein, 15 aa, Homo sapiens
  CDR3 for beta chain variable domain of TCR clone 92495 (TRBV24-1, TRBJ2-4)
CATSDPRDRANIQYF

SEQ ID NO: 184991 - protein, 14 aa, Homo sapiens
  CDR3 for alpha chain variable domain of TCR clone 92496 (TRAV1-2, TRAJ8)
CAVREDTGFQKLVF

SEQ ID NO: 184992 - protein, 13 aa, Homo sapiens
  CDR3 for beta chain variable domain of TCR clone 92496 (TRBV4-1, TRBJ2-3)
CASSLDFTDTQYF

SEQ ID NO: 184993 - protein, 16 aa, Homo sapiens
  CDR3 for alpha chain variable domain of TCR clone 92497 (TRAV21, TRAJ52)
CAVTNAGGTSYGKLTF

SEQ ID NO: 184994 - protein, 17 aa, Homo sapiens
  CDR3 for beta chain variable domain of TCR clone 92497 (TRBV28, TRBJ2-5)
CASSRRGGLAGAETQYF

SEQ ID NO: 184995 - protein, 15 aa, Homo sapiens
  CDR3 for alpha chain variable domain of TCR clone 92498 (TRAV3, TRAJ32)
CAVRDPGGATNKLIF

SEQ ID NO: 184996 - protein, 14 aa, Homo sapiens
  CDR3 for beta chain variable domain of TCR clone 92498 (TRBV9, TRBJ1-2)
CASSVKGDNYGYTS

SEQ ID NO: 184997 - protein, 13 aa, Homo sapiens
  CDR3 for alpha chain variable domain of TCR clone 92499 (TRAV20, TRAJ15)
CATINQAGTALLF

SEQ ID NO: 184998 - protein, 13 aa, Homo sapiens
  CDR3 for beta chain variable domain of TCR clone 92499 (TRBV12-4, TRBJ2-1)
CASRQPSNNEQFF

SEQ ID NO: 184999 - protein, 12 aa, Homo sapiens
  CDR3 for alpha chain variable domain of TCR clone 92500 (TRAV12-2, TRAJ52)
IGGGTSYGKLTF

SEQ ID NO: 185000 - protein, 13 aa, Homo sapiens
  CDR3 for beta chain variable domain of TCR clone 92500 (TRBV12-4, TRBJ1-1)
CASSPGTGFEAVF

SEQ ID NO: 185001 - protein, 12 aa, Homo sapiens
  CDR3 for alpha chain variable domain of TCR clone 92501 (TRAV12-1, TRAJ40)
CVVYSGTYKYIF

SEQ ID NO: 185002 - protein, 12 aa, Homo sapiens
  CDR3 for beta chain variable domain of TCR clone 92501 (TRBV11-2, TRBJ2-2)
CASSLPTGELFF

SEQ ID NO: 185003 - protein, 14 aa, Homo sapiens
  CDR3 for alpha chain variable domain of TCR clone 92502 (TRAV29/DV5, TRAJ57)
CAARSQGGSEKLAF

SEQ ID NO: 185004 - protein, 15 aa, Homo sapiens
  CDR3 for beta chain variable domain of TCR clone 92502 (TRBV28, TRBJ2-4)
CAAGSGTLLMGIQYF

SEQ ID NO: 185005 - protein, 15 aa, Homo sapiens
  CDR3 for alpha chain variable domain of TCR clone 92503 (TRAV12-2, TRAJ53)
CAVNGGGGGNYKLTF

SEQ ID NO: 185006 - protein, 14 aa, Homo sapiens
  CDR3 for beta chain variable domain of TCR clone 92503 (TRBV12-5, TRBJ2-5)
CASGSRTHQETQYF

SEQ ID NO: 185007 - protein, 18 aa, Homo sapiens
  CDR3 for alpha chain variable domain of TCR clone 92504 (TRAV21, TRAJ52)
FAVRPSPAGGTSYGKLTF

SEQ ID NO: 185008 - protein, 16 aa, Homo sapiens
  CDR3 for beta chain variable domain of TCR clone 92504 (TRBV7-3, TRBJ2-1)
CASSLEGYRSYNEQFF

SEQ ID NO: 185009 - protein, 13 aa, Homo sapiens
  CDR3 for alpha chain variable domain of TCR clone 92505 (TRAV12-1, TRAJ53)
CVVNAESNYKLTF

SEQ ID NO: 185010 - protein, 17 aa, Homo sapiens
  CDR3 for beta chain variable domain of TCR clone 92505 (TRBV28, TRBJ2-5)
CASSTPEGDALQETQYF

SEQ ID NO: 185011 - protein, 16 aa, Homo sapiens
  CDR3 for alpha chain variable domain of TCR clone 92506 (TRAV26-1, TRAJ52)
CIVSNAGGTSYGQLTF

SEQ ID NO: 185012 - protein, 16 aa, Homo sapiens
  CDR3 for beta chain variable domain of TCR clone 92506 (TRBV5-1, TRBJ2-1)
CASSLEGRGLYNEQFF

SEQ ID NO: 185013 - protein, 12 aa, Homo sapiens
  CDR3 for alpha chain variable domain of TCR clone 92507 (TRAV13-1, TRAJ15)
CAASQAGTALIF

SEQ ID NO: 185014 - protein, 18 aa, Homo sapiens
  CDR3 for beta chain variable domain of TCR clone 92507 (TRBV7-9, TRBJ2-3)
CASSVPINGQISTDTQYF

SEQ ID NO: 185015 - protein, 14 aa, Homo sapiens
  CDR3 for alpha chain variable domain of TCR clone 92508 (TRAV29/DV5, TRAJ44)
CEAFLVGTASKLTF

SEQ ID NO: 185016 - protein, 15 aa, Homo sapiens
  CDR3 for beta chain variable domain of TCR clone 92508 (TRBV7-3, TRBJ2-2)
CASSETGQGTGELFF

SEQ ID NO: 185017 - protein, 14 aa, Homo sapiens
  CDR3 for alpha chain variable domain of TCR clone 92509 (TRAV1-2, TRAJ16)
CAVNRFSDGQKLLF

SEQ ID NO: 185018 - protein, 18 aa, Homo sapiens
  CDR3 for beta chain variable domain of TCR clone 92509 (TRBV20-1, TRBJ2-3)
CSASGLAGGPGTTDTKYF

SEQ ID NO: 185019 - protein, 12 aa, Homo sapiens
  CDR3 for alpha chain variable domain of TCR clone 92510 (TRAV1-1, TRAJ23)
CAVTNQGGKLIF

SEQ ID NO: 185020 - protein, 17 aa, Homo sapiens
  CDR3 for beta chain variable domain of TCR clone 92510 (TRBV7-8, TRBJ2-6)
CASSAGTGGAGANVLTF

SEQ ID NO: 185021 - protein, 13 aa, Homo sapiens
  CDR3 for alpha chain variable domain of TCR clone 92511 (TRAV8-6, TRAJ49)
CAVITNTGNQFYF

SEQ ID NO: 185022 - protein, 12 aa, Homo sapiens
  CDR3 for beta chain variable domain of TCR clone 92511 (TRBV12-5, TRBJ2-5)
CASGQGVETQYF

SEQ ID NO: 185023 - protein, 12 aa, Homo sapiens
  CDR3 for alpha chain variable domain of TCR clone 92512 (TRAV8-3, TRAJ43)
CAVGAGHNDMRF

SEQ ID NO: 185024 - protein, 14 aa, Homo sapiens
  CDR3 for beta chain variable domain of TCR clone 92512 (TRBV4-2, TRBJ1-5)
CASSRDRGNQPQHF

SEQ ID NO: 185025 - protein, 11 aa, Homo sapiens
  CDR3 for alpha chain variable domain of TCR clone 92513 (TRAV12-1, TRAJ15)
CLVNAGTALIF

SEQ ID NO: 185026 - protein, 16 aa, Homo sapiens
  CDR3 for beta chain variable domain of TCR clone 92513 (TRBV28, TRBJ2-1)
CASSSRVRDSYNEQFF

SEQ ID NO: 185027 - protein, 16 aa, Homo sapiens
  CDR3 for alpha chain variable domain of TCR clone 92514 (TRAV3, TRAJ10)
CAVRDMRAGGGNKLTF

SEQ ID NO: 185028 - protein, 13 aa, Homo sapiens
  CDR3 for beta chain variable domain of TCR clone 92514 (TRBV2, TRBJ2-1)
CATSRGTDNEQFF

SEQ ID NO: 185029 - protein, 11 aa, Homo sapiens
  CDR3 for alpha chain variable domain of TCR clone 92515 (TRAV2, TRAJ13)
CASGGYQKVTF

SEQ ID NO: 185030 - protein, 16 aa, Homo sapiens
  CDR3 for beta chain variable domain of TCR clone 92515 (TRBV6-1, TRBJ2-5)
CASSETLDKGAETQYF

SEQ ID NO: 185031 - protein, 14 aa, Homo sapiens
  CDR3 for alpha chain variable domain of TCR clone 92516 (TRAV30, TRAJ33)
CGTVAPRSNYQLIW

SEQ ID NO: 185032 - protein, 13 aa, Homo sapiens
  CDR3 for beta chain variable domain of TCR clone 92516 (TRBV20-1, TRBJ1-1)
CSARGGGNTEAFF

SEQ ID NO: 185033 - protein, 16 aa, Homo sapiens
  CDR3 for alpha chain variable domain of TCR clone 92517 (TRAV16, TRAJ57)
CAPYLITQAGSEKLVF

SEQ ID NO: 185034 - protein, 17 aa, Homo sapiens
  CDR3 for beta chain variable domain of TCR clone 92517 (TRBV24-1, TRBJ2-4)
CATSDAEARGVRNIQYF

SEQ ID NO: 185035 - protein, 16 aa, Homo sapiens
  CDR3 for alpha chain variable domain of TCR clone 92518 (TRAV4, TRAJ9)
CLVGDPNRPGGVKTIF

SEQ ID NO: 185036 - protein, 13 aa, Homo sapiens
  CDR3 for beta chain variable domain of TCR clone 92518 (TRBV5-5, TRBJ1-2)
CASSFWRGEDYTF

SEQ ID NO: 185037 - protein, 15 aa, Homo sapiens
  CDR3 for alpha chain variable domain of TCR clone 92519 (TRAV25, TRAJ52)
CAGTSGGTSYGKLTF

SEQ ID NO: 185038 - protein, 17 aa, Homo sapiens
  CDR3 for beta chain variable domain of TCR clone 92519 (TRBV13, TRBJ2-3)
CASSLSRVAGGRNTQYF

SEQ ID NO: 185039 - protein, 11 aa, Homo sapiens
  CDR3 for alpha chain variable domain of TCR clone 92520 (TRAV21, TRAJ11)
CAVNGYSPLTF

SEQ ID NO: 185040 - protein, 11 aa, Homo sapiens
  CDR3 for beta chain variable domain of TCR clone 92520 (TRBV19, TRBJ1-1)
CASSIGSEAFF

SEQ ID NO: 185041 - protein, 16 aa, Homo sapiens
  CDR3 for alpha chain variable domain of TCR clone 92521 (TRAV3, TRAJ10)
CAVRDMRAGGGNKLTF

SEQ ID NO: 185042 - protein, 13 aa, Homo sapiens
  CDR3 for beta chain variable domain of TCR clone 92521 (TRBV7-2, TRBJ2-7)
CASSSPSGSEQYF

SEQ ID NO: 185043 - protein, 14 aa, Homo sapiens
  CDR3 for alpha chain variable domain of TCR clone 92522 (TRAV1-2, TRAJ8)
CAVREDTGFQKLVF

SEQ ID NO: 185044 - protein, 13 aa, Homo sapiens
  CDR3 for beta chain variable domain of TCR clone 92522 (TRBV4-2, TRBJ2-2)
CASEDRGTGGLFF

SEQ ID NO: 185045 - protein, 11 aa, Homo sapiens
  CDR3 for alpha chain variable domain of TCR clone 92523 (TRAV13-2, TRAJ54)
RAVQGAQKLVF

SEQ ID NO: 185046 - protein, 13 aa, Homo sapiens
  CDR3 for beta chain variable domain of TCR clone 92523 (TRBV20-1, TRBJ1-1)
CSARGGGNTEAFF

SEQ ID NO: 185047 - protein, 15 aa, Homo sapiens
  CDR3 for alpha chain variable domain of TCR clone 92524 (TRAV13-1, TRAJ49)
CAASTEGNTGNQFYF

SEQ ID NO: 185048 - protein, 12 aa, Homo sapiens
  CDR3 for beta chain variable domain of TCR clone 92524 (TRBV11-2, TRBJ2-2)
CASSLGGGGLFF

SEQ ID NO: 185049 - protein, 12 aa, Homo sapiens
  CDR3 for alpha chain variable domain of TCR clone 92525 (TRAV9-2, TRAJ26)
CALRGYGQNFIF

SEQ ID NO: 185050 - protein, 12 aa, Homo sapiens
  CDR3 for beta chain variable domain of TCR clone 92525 (TRBV29-1, TRBJ2-3)
CSVTGGADTQYF

SEQ ID NO: 185051 - protein, 15 aa, Homo sapiens
  CDR3 for alpha chain variable domain of TCR clone 92526 (TRAV3, TRAJ23)
CAVRDKGNQGGKLIF

SEQ ID NO: 185052 - protein, 13 aa, Homo sapiens
  CDR3 for beta chain variable domain of TCR clone 92526 (TRBV7-2, TRBJ2-7)
CASSSPSGSEQYF

SEQ ID NO: 185053 - protein, 13 aa, Homo sapiens
  CDR3 for alpha chain variable domain of TCR clone 92527 (TRAV12-1, TRAJ6)
CVVYPGGSYIPTS

SEQ ID NO: 185054 - protein, 13 aa, Homo sapiens
  CDR3 for beta chain variable domain of TCR clone 92527 (TRBV19, TRBJ1-2)
CASSVPGQDGYTF

SEQ ID NO: 185055 - protein, 13 aa, Homo sapiens
  CDR3 for alpha chain variable domain of TCR clone 92528 (TRAV21, TRAJ20)
CAVGLRVDYKLSF

SEQ ID NO: 185056 - protein, 15 aa, Homo sapiens
  CDR3 for beta chain variable domain of TCR clone 92528 (TRBV7-3, TRBJ1-1)
CASSPRADRNTEAFF

SEQ ID NO: 185057 - protein, 13 aa, Homo sapiens
  CDR3 for alpha chain variable domain of TCR clone 92529 (TRAV17, TRAJ9)
CATFLTGGFKNIF

SEQ ID NO: 185058 - protein, 16 aa, Homo sapiens
  CDR3 for beta chain variable domain of TCR clone 92529 (TRBV5-7, TRBJ1-4)
CASSPSGGLKTEKLFF

SEQ ID NO: 185059 - protein, 16 aa, Homo sapiens
  CDR3 for alpha chain variable domain of TCR clone 92530 (TRAV29/DV5, TRAJ37)
CAASAHGSSNTGKLIF

SEQ ID NO: 185060 - protein, 16 aa, Homo sapiens
  CDR3 for beta chain variable domain of TCR clone 92530 (TRBV13, TRBJ2-2)
CASSPRTGEHTGELFF

SEQ ID NO: 185061 - protein, 16 aa, Homo sapiens
  CDR3 for alpha chain variable domain of TCR clone 92531 (TRAV3, TRAJ21)
CAVRDIERGNFNKFYF

SEQ ID NO: 185062 - protein, 13 aa, Homo sapiens
  CDR3 for beta chain variable domain of TCR clone 92531 (TRBV28, TRBJ2-5)
CASSARNQETQYF

SEQ ID NO: 185063 - protein, 16 aa, Homo sapiens
  CDR3 for alpha chain variable domain of TCR clone 92532 (TRAV13-1, TRAJ48)
RAASIFGNFGNEKLTF

SEQ ID NO: 185064 - protein, 14 aa, Homo sapiens
  CDR3 for beta chain variable domain of TCR clone 92532 (TRBV24-1, TRBJ1-1)
CATSIPRGDTEAFF

SEQ ID NO: 185065 - protein, 16 aa, Homo sapiens
  CDR3 for alpha chain variable domain of TCR clone 92533 (TRAV12-2, TRAJ40)
CAVIRGGTSGTYKYIF

SEQ ID NO: 185066 - protein, 14 aa, Homo sapiens
  CDR3 for beta chain variable domain of TCR clone 92533 (TRBV7-8, TRBJ2-5)
CASSATGGQGTQYF

SEQ ID NO: 185067 - protein, 13 aa, Homo sapiens
  CDR3 for alpha chain variable domain of TCR clone 92534 (TRAV12-3, TRAJ13)
CAMSSGGYQKVTF

SEQ ID NO: 185068 - protein, 14 aa, Homo sapiens
  CDR3 for beta chain variable domain of TCR clone 92534 (TRBV7-2, TRBJ1-2)
CASSQTGSTYGCTF

SEQ ID NO: 185069 - protein, 15 aa, Homo sapiens
  CDR3 for alpha chain variable domain of TCR clone 92535 (TRAV8-3, TRAJ45)
CASSYAGGGADGLTF

SEQ ID NO: 185070 - protein, 17 aa, Homo sapiens
  CDR3 for beta chain variable domain of TCR clone 92535 (TRBV7-8, TRBJ1-2)
CASSLRPLQGHLYGYTF

SEQ ID NO: 185071 - protein, 14 aa, Homo sapiens
  CDR3 for alpha chain variable domain of TCR clone 92536 (TRAV12-3, TRAJ9)
CAMSPNTGGFKTMF

SEQ ID NO: 185072 - protein, 12 aa, Homo sapiens
  CDR3 for beta chain variable domain of TCR clone 92536 (TRBV19, TRBJ1-5)
CASSIAQQPQHF

SEQ ID NO: 185073 - protein, 16 aa, Homo sapiens
  CDR3 for alpha chain variable domain of TCR clone 92537 (TRAV30, TRAJ24)
CGPEIVDADSWGKFQF

SEQ ID NO: 185074 - protein, 14 aa, Homo sapiens
  CDR3 for beta chain variable domain of TCR clone 92537 (TRBV7-8, TRBJ2-3)
CASSLEAGTDTQYF

SEQ ID NO: 185075 - protein, 16 aa, Homo sapiens
  CDR3 for alpha chain variable domain of TCR clone 92538 (TRAV21, TRAJ37)
CAVGTAGSSNTGKLIF

SEQ ID NO: 185076 - protein, 13 aa, Homo sapiens
  CDR3 for beta chain variable domain of TCR clone 92538 (TRBV7-9, TRBJ2-5)
CASLPSGRETQYF

SEQ ID NO: 185077 - protein, 14 aa, Homo sapiens
  CDR3 for alpha chain variable domain of TCR clone 92539 (TRAV38-1, TRAJ45)
CAYYSGGGADGLTF

SEQ ID NO: 185078 - protein, 16 aa, Homo sapiens
  CDR3 for beta chain variable domain of TCR clone 92539 (TRBV7-3, TRBJ2-2)
CASSLKRGTLSGELFF

SEQ ID NO: 185079 - protein, 16 aa, Homo sapiens
  CDR3 for alpha chain variable domain of TCR clone 92540 (TRAV30, TRAJ24)
CGTEIVDAGSWGKFQF

SEQ ID NO: 185080 - protein, 15 aa, Homo sapiens
  CDR3 for beta chain variable domain of TCR clone 92540 (TRBV6-3, TRBJ2-7)
CASSSPGTVLYEQYF

SEQ ID NO: 185081 - protein, 14 aa, Homo sapiens
  CDR3 for alpha chain variable domain of TCR clone 92541 (TRAV1-2, TRAJ27)
CAVRSGTNAGKSPF

SEQ ID NO: 185082 - protein, 15 aa, Homo sapiens
  CDR3 for beta chain variable domain of TCR clone 92541 (TRBV18, TRBJ2-7)
CASSPLQGRTYEQYF

SEQ ID NO: 185083 - protein, 12 aa, Homo sapiens
  CDR3 for alpha chain variable domain of TCR clone 92542 (TRAV13-2, TRAJ23)
CAERHRGGKLIF

SEQ ID NO: 185084 - protein, 15 aa, Homo sapiens
  CDR3 for beta chain variable domain of TCR clone 92542 (TRBV20-1, TRBJ1-4)
QCSGQGLLTNEKLFF

SEQ ID NO: 185085 - protein, 16 aa, Homo sapiens
  CDR3 for alpha chain variable domain of TCR clone 92543 (TRAV30, TRAJ24)
CGTEIVDADSWGKFQF

SEQ ID NO: 185086 - protein, 13 aa, Homo sapiens
  CDR3 for beta chain variable domain of TCR clone 92543 (TRBV7-3, TRBJ1-1)
CASSQDWGAEAVF

SEQ ID NO: 185087 - protein, 14 aa, Homo sapiens
  CDR3 for alpha chain variable domain of TCR clone 92544 (TRAV3, TRAJ6)
CAVRDSRRKIHTYI

SEQ ID NO: 185088 - protein, 15 aa, Homo sapiens
  CDR3 for beta chain variable domain of TCR clone 92544 (TRBV18, TRBJ2-7)
CASSPLQGRTYEQYF

SEQ ID NO: 185089 - protein, 14 aa, Homo sapiens
  CDR3 for alpha chain variable domain of TCR clone 92545 (TRAV8-3, TRAJ12)
CAVGARDSSYKLIF

SEQ ID NO: 185090 - protein, 14 aa, Homo sapiens
  CDR3 for beta chain variable domain of TCR clone 92545 (TRBV4-2, TRBJ2-1)
CASGLDRAYNEQFF

SEQ ID NO: 185091 - protein, 13 aa, Homo sapiens
  CDR3 for alpha chain variable domain of TCR clone 92546 (TRAV12-2, TRAJ24)
CAVSTDSWGKLQF

SEQ ID NO: 185092 - protein, 14 aa, Homo sapiens
  CDR3 for beta chain variable domain of TCR clone 92546 (TRBV25-1, TRBJ1-1)
CASTHLGGNTEASF

SEQ ID NO: 185093 - protein, 16 aa, Homo sapiens
  CDR3 for alpha chain variable domain of TCR clone 92547 (TRAV30, TRAJ57)
GGTGWAPQGGSEKLVF

SEQ ID NO: 185094 - protein, 14 aa, Homo sapiens
  CDR3 for beta chain variable domain of TCR clone 92547 (TRBV18, TRBJ1-1)
CASSPGFQGVEAFF

SEQ ID NO: 185095 - protein, 14 aa, Homo sapiens
  CDR3 for alpha chain variable domain of TCR clone 92548 (TRAV38-1, TRAJ39)
CAFTYNNAGNMLTF

SEQ ID NO: 185096 - protein, 15 aa, Homo sapiens
  CDR3 for beta chain variable domain of TCR clone 92548 (TRBV19, TRBJ2-6)
CASSIGPSGANVLTF

SEQ ID NO: 185097 - protein, 13 aa, Homo sapiens
  CDR3 for alpha chain variable domain of TCR clone 92549 (TRAV21, TRAJ27)
CAALNTNAGKSTF

SEQ ID NO: 185098 - protein, 14 aa, Homo sapiens
  CDR3 for beta chain variable domain of TCR clone 92549 (TRBV27, TRBJ1-1)
FASSLLSGLSEAFF

SEQ ID NO: 185099 - protein, 13 aa, Homo sapiens
  CDR3 for alpha chain variable domain of TCR clone 92550 (TRAV20, TRAJ20)
CAVRWVRDYKLSF

SEQ ID NO: 185100 - protein, 14 aa, Homo sapiens
  CDR3 for beta chain variable domain of TCR clone 92550 (TRBV19, TRBJ2-2)
CSSTVTANTGELFF

SEQ ID NO: 185101 - protein, 15 aa, Homo sapiens
  CDR3 for alpha chain variable domain of TCR clone 92551 (TRAV21, TRAJ38)
CAARQDAGNNRKLIW

SEQ ID NO: 185102 - protein, 16 aa, Homo sapiens
  CDR3 for beta chain variable domain of TCR clone 92551 (TRBV4-2, TRBJ1-1)
CASRPLDGGGDTEAFF

SEQ ID NO: 185103 - protein, 12 aa, Homo sapiens
  CDR3 for alpha chain variable domain of TCR clone 92552 (TRAV13-2, TRAJ23)
CAERHRGGKLIF

SEQ ID NO: 185104 - protein, 13 aa, Homo sapiens
  CDR3 for beta chain variable domain of TCR clone 92552 (TRBV7-9, TRBJ2-2)
CASSLDPTGELFF

SEQ ID NO: 185105 - protein, 16 aa, Homo sapiens
  CDR3 for alpha chain variable domain of TCR clone 92553 (TRAV26-1, TRAJ53)
CIVRVAMGGSNYKLTF

SEQ ID NO: 185106 - protein, 12 aa, Homo sapiens
  CDR3 for beta chain variable domain of TCR clone 92553 (TRBV7-9, TRBJ1-5)
CASSSQGQPQHF

SEQ ID NO: 185107 - protein, 14 aa, Homo sapiens
  CDR3 for alpha chain variable domain of TCR clone 92554 (TRAV16, TRAJ42)
CALLAGGSQGNLIF

SEQ ID NO: 185108 - protein, 12 aa, Homo sapiens
  CDR3 for beta chain variable domain of TCR clone 92554 (TRBV11-2, TRBJ2-1)
CASSPGNNEQFF

SEQ ID NO: 185109 - protein, 14 aa, Homo sapiens
  CDR3 for alpha chain variable domain of TCR clone 92555 (TRAV8-4, TRAJ15)
CAVTIREAGTALIF

SEQ ID NO: 185110 - protein, 15 aa, Homo sapiens
  CDR3 for beta chain variable domain of TCR clone 92555 (TRBV9, TRBJ1-6)
CASSVAGTGDSPLHF

SEQ ID NO: 185111 - protein, 12 aa, Homo sapiens
  CDR3 for alpha chain variable domain of TCR clone 92556 (TRAV12-3, TRAJ17)
CAVTLTGNKLTF

SEQ ID NO: 185112 - protein, 15 aa, Homo sapiens
  CDR3 for beta chain variable domain of TCR clone 92556 (TRBV7-2, TRBJ2-1)
CASRKTGSSYNEQFF

SEQ ID NO: 185113 - protein, 15 aa, Homo sapiens
  CDR3 for alpha chain variable domain of TCR clone 92557 (TRAV16, TRAJ17)
CALSQIKAAGNKLTF

SEQ ID NO: 185114 - protein, 13 aa, Homo sapiens
  CDR3 for beta chain variable domain of TCR clone 92557 (TRBV4-2, TRBJ1-1)
CASSQAGNTEAFF

SEQ ID NO: 185115 - protein, 14 aa, Homo sapiens
  CDR3 for alpha chain variable domain of TCR clone 92558 (TRAV13-1, TRAJ26)
CAASSAHYGQNFVF

SEQ ID NO: 185116 - protein, 17 aa, Homo sapiens
  CDR3 for beta chain variable domain of TCR clone 92558 (TRBV11-2, TRBJ2-1)
CASSLYPPGVEYNEQFF

SEQ ID NO: 185117 - protein, 12 aa, Homo sapiens
  CDR3 for alpha chain variable domain of TCR clone 92559 (TRAV13-1, TRAJ49)
CAASIWGNKFYF

SEQ ID NO: 185118 - protein, 14 aa, Homo sapiens
  CDR3 for beta chain variable domain of TCR clone 92559 (TRBV12-4, TRBJ1-1)
CASSLDGLNTEAFF

SEQ ID NO: 185119 - protein, 15 aa, Homo sapiens
  CDR3 for alpha chain variable domain of TCR clone 92560 (TRAV17, TRAJ57)
CATGPSQGGSEKLAF

SEQ ID NO: 185120 - protein, 17 aa, Homo sapiens
  CDR3 for beta chain variable domain of TCR clone 92560 (TRBV20-1, TRBJ2-1)
CSASSSGLAGSYNEQFF

SEQ ID NO: 185121 - protein, 16 aa, Homo sapiens
  CDR3 for alpha chain variable domain of TCR clone 92561 (TRAV12-3, TRAJ53)
CAMSPGSGGSNYKLTF

SEQ ID NO: 185122 - protein, 15 aa, Homo sapiens
  CDR3 for beta chain variable domain of TCR clone 92561 (TRBV7-3, TRBJ2-1)
CASSLGQGPFGEQFF

SEQ ID NO: 185123 - protein, 14 aa, Homo sapiens
  CDR3 for alpha chain variable domain of TCR clone 92562 (TRAV8-4, TRAJ15)
CAVSEYEAGTALIF

SEQ ID NO: 185124 - protein, 17 aa, Homo sapiens
  CDR3 for beta chain variable domain of TCR clone 92562 (TRBV23-1, TRBJ2-1)
CASSQYTAAGVVMSSSS

SEQ ID NO: 185125 - protein, 14 aa, Homo sapiens
  CDR3 for alpha chain variable domain of TCR clone 92563 (TRAV1-2, TRAJ16)
CAVNRFSDGQKLLF

SEQ ID NO: 185126 - protein, 14 aa, Homo sapiens
  CDR3 for beta chain variable domain of TCR clone 92563 (TRBV18, TRBJ1-2)
CASSPEGDLYGYTF

SEQ ID NO: 185127 - protein, 13 aa, Homo sapiens
  CDR3 for alpha chain variable domain of TCR clone 92564 (TRAV8-6, TRAJ49)
CAVITNTGNQFYF

SEQ ID NO: 185128 - protein, 16 aa, Homo sapiens
  CDR3 for beta chain variable domain of TCR clone 92564 (TRBV12-4, TRBJ1-5)
CASSRPVGGSNQPQHF

SEQ ID NO: 185129 - protein, 17 aa, Homo sapiens
  CDR3 for alpha chain variable domain of TCR clone 92565 (TRAV3, TRAJ42)
CAVRDRDYGGSQGNLIF

SEQ ID NO: 185130 - protein, 14 aa, Homo sapiens
  CDR3 for beta chain variable domain of TCR clone 92565 (TRBV12-4, TRBJ1-1)
CASSLRSSGTEAFF

SEQ ID NO: 185131 - protein, 16 aa, Homo sapiens
  CDR3 for alpha chain variable domain of TCR clone 92566 (TRAV12-3, TRAJ37)
CAMSAYSSSNTGKLIF

SEQ ID NO: 185132 - protein, 15 aa, Homo sapiens
  CDR3 for beta chain variable domain of TCR clone 92566 (TRBV10-3, TRBJ2-1)
CAISDRDRGGNEQFF

SEQ ID NO: 185133 - protein, 16 aa, Homo sapiens
  CDR3 for alpha chain variable domain of TCR clone 92567 (TRAV3, TRAJ10)
CAVRYMRAGGGNKLTF

SEQ ID NO: 185134 - protein, 13 aa, Homo sapiens
  CDR3 for beta chain variable domain of TCR clone 92567 (TRBV6-1, TRBJ1-1)
CASSRQGNTEAFF

SEQ ID NO: 185135 - protein, 15 aa, Homo sapiens
  CDR3 for alpha chain variable domain of TCR clone 92568 (TRAV26-1, TRAJ29)
CIVRVEGSGNTPLVF

SEQ ID NO: 185136 - protein, 17 aa, Homo sapiens
  CDR3 for beta chain variable domain of TCR clone 92568 (TRBV19, TRBJ1-5)
CASSPGRTFYSNQPQHF

SEQ ID NO: 185137 - protein, 16 aa, Homo sapiens
  CDR3 for alpha chain variable domain of TCR clone 92569 (TRAV3, TRAJ10)
CAGRDMRAGGGNKLTF

SEQ ID NO: 185138 - protein, 12 aa, Homo sapiens
  CDR3 for beta chain variable domain of TCR clone 92569 (TRBV20-1, TRBJ2-7)
CSAGLKMGEQYF

SEQ ID NO: 185139 - protein, 16 aa, Homo sapiens
  CDR3 for alpha chain variable domain of TCR clone 92570 (TRAV30, TRAJ24)
CGTEIVDAESWGKFQF

SEQ ID NO: 185140 - protein, 17 aa, Homo sapiens
  CDR3 for beta chain variable domain of TCR clone 92570 (TRBV20-1, TRBJ2-2)
CSASGSGQGGLTGELFF

SEQ ID NO: 185141 - protein, 13 aa, Homo sapiens
  CDR3 for alpha chain variable domain of TCR clone 92571 (TRAV13-1, TRAJ21)
CAASMYNFNKFYF

SEQ ID NO: 185142 - protein, 13 aa, Homo sapiens
  CDR3 for beta chain variable domain of TCR clone 92571 (TRBV27, TRBJ1-4)
CASSLMGDEKLFF

SEQ ID NO: 185143 - protein, 14 aa, Homo sapiens
  CDR3 for alpha chain variable domain of TCR clone 92572 (TRAV12-2, TRAJ17)
CAVLFKAAGNKLTF

SEQ ID NO: 185144 - protein, 17 aa, Homo sapiens
  CDR3 for beta chain variable domain of TCR clone 92572 (TRBV4-2, TRBJ1-1)
CASTQFGGGSGNTEAFF

SEQ ID NO: 185145 - protein, 12 aa, Homo sapiens
  CDR3 for alpha chain variable domain of TCR clone 92573 (TRAV13-1, TRAJ21)
CAAKEGFNKFYF

SEQ ID NO: 185146 - protein, 20 aa, Homo sapiens
  CDR3 for beta chain variable domain of TCR clone 92573 (TRBV28, TRBJ2-1)
WASTPIGRSPGLAGGNEQFF

SEQ ID NO: 185147 - protein, 12 aa, Homo sapiens
  CDR3 for alpha chain variable domain of TCR clone 92574 (TRAV2, TRAJ10)
CASTGGGNTLTF

SEQ ID NO: 185148 - protein, 14 aa, Homo sapiens
  CDR3 for beta chain variable domain of TCR clone 92574 (TRBV7-2, TRBJ2-2)
CASRGQGAAGELFF

SEQ ID NO: 185149 - protein, 13 aa, Homo sapiens
  CDR3 for alpha chain variable domain of TCR clone 92575 (TRAV21, TRAJ20)
CAVGVFADYKLSF

SEQ ID NO: 185150 - protein, 14 aa, Homo sapiens
  CDR3 for beta chain variable domain of TCR clone 92575 (TRBV3-1, TRBJ2-5)
CASSQGPDQETQYF

SEQ ID NO: 185151 - protein, 13 aa, Homo sapiens
  CDR3 for alpha chain variable domain of TCR clone 92576 (TRAV16, TRAJ5)
CALTNTVRRALTF

SEQ ID NO: 185152 - protein, 15 aa, Homo sapiens
  CDR3 for beta chain variable domain of TCR clone 92576 (TRBV11-2, TRBJ2-4)
CASSRPGTGINIQYF

SEQ ID NO: 185153 - protein, 13 aa, Homo sapiens
  CDR3 for alpha chain variable domain of TCR clone 92577 (TRAV12-2, TRAJ23)
CAVMGNQGGKLIF

SEQ ID NO: 185154 - protein, 14 aa, Homo sapiens
  CDR3 for beta chain variable domain of TCR clone 92577 (TRBV11-2, TRBJ2-3)
CASSRLARTDTQYF

SEQ ID NO: 185155 - protein, 15 aa, Homo sapiens
  CDR3 for alpha chain variable domain of TCR clone 92578 (TRAV8-3, TRAJ45)
CASSYSGGGADGLTF

SEQ ID NO: 185156 - protein, 13 aa, Homo sapiens
  CDR3 for beta chain variable domain of TCR clone 92578 (TRBV7-9, TRBJ2-7)
CASSFSGAYEQYF

SEQ ID NO: 185157 - protein, 15 aa, Homo sapiens
  CDR3 for alpha chain variable domain of TCR clone 92579 (TRAV3, TRAJ3)
CAVRDGHSSASKIIL

SEQ ID NO: 185158 - protein, 14 aa, Homo sapiens
  CDR3 for beta chain variable domain of TCR clone 92579 (TRBV28, TRBJ1-4)
CASSFGTFDEKLFF

SEQ ID NO: 185159 - protein, 13 aa, Homo sapiens
  CDR3 for alpha chain variable domain of TCR clone 92580 (TRAV13-1, TRAJ33)
CAASRAGYYQLIW

SEQ ID NO: 185160 - protein, 12 aa, Homo sapiens
  CDR3 for beta chain variable domain of TCR clone 92580 (TRBV11-2, TRBJ1-2)
CASSREGDGYTF

SEQ ID NO: 185161 - protein, 10 aa, Homo sapiens
  CDR3 for alpha chain variable domain of TCR clone 92581 (TRAV30, TRAJ48)
CGIGNEKLTF

SEQ ID NO: 185162 - protein, 18 aa, Homo sapiens
  CDR3 for beta chain variable domain of TCR clone 92581 (TRBV7-9, TRBJ2-7)
CASSLTTSGSRTWYEQYF

SEQ ID NO: 185163 - protein, 10 aa, Homo sapiens
  CDR3 for alpha chain variable domain of TCR clone 92582 (TRAV1-2, TRAJ34)
CAVNTDKLIF

SEQ ID NO: 185164 - protein, 19 aa, Homo sapiens
  CDR3 for beta chain variable domain of TCR clone 92582 (TRBV25-1, TRBJ2-2)
CAILVYRVDRGRKTGELFF

SEQ ID NO: 185165 - protein, 13 aa, Homo sapiens
  CDR3 for alpha chain variable domain of TCR clone 92583 (TRAV2, TRAJ40)
CAVVTSGTYKYIF

SEQ ID NO: 185166 - protein, 11 aa, Homo sapiens
  CDR3 for beta chain variable domain of TCR clone 92583 (TRBV11-2, TRBJ1-1)
CASSINTEAFF

SEQ ID NO: 185167 - protein, 23 aa, Homo sapiens
  CDR3 for alpha chain variable domain of TCR clone 92584 (TRAV12-2, TRAJ36)
SLLIRDSQPSDSATLERANNLFF

SEQ ID NO: 185168 - protein, 17 aa, Homo sapiens
  CDR3 for beta chain variable domain of TCR clone 92584 (TRBV3-1, TRBJ2-3)
CANSQLLDRGHTDTQYF

SEQ ID NO: 185169 - protein, 11 aa, Homo sapiens
  CDR3 for alpha chain variable domain of TCR clone 92585 (TRAV12-1, TRAJ31)
CVVNGDARLMF

SEQ ID NO: 185170 - protein, 16 aa, Homo sapiens
  CDR3 for beta chain variable domain of TCR clone 92585 (TRBV20-1, TRBJ1-4)
CSAPGQGLLTNEKLFF

SEQ ID NO: 185171 - protein, 14 aa, Homo sapiens
  CDR3 for alpha chain variable domain of TCR clone 92586 (TRAV8-4, TRAJ43)
CAVSDPRNNNDMRF

SEQ ID NO: 185172 - protein, 15 aa, Homo sapiens
  CDR3 for beta chain variable domain of TCR clone 92586 (TRBV5-8, TRBJ2-2)
CASSLDRGATGELFF

SEQ ID NO: 185173 - protein, 16 aa, Homo sapiens
  CDR3 for alpha chain variable domain of TCR clone 92587 (TRAV30, TRAJ49)
SAAQRVWPNTGNQFYF

SEQ ID NO: 185174 - protein, 15 aa, Homo sapiens
  CDR3 for beta chain variable domain of TCR clone 92587 (TRBV2, TRBJ2-1)
CASSELAGSYNEQFF

SEQ ID NO: 185175 - protein, 13 aa, Homo sapiens
  CDR3 for alpha chain variable domain of TCR clone 92588 (TRAV8-3, TRAJ43)
CAVGPDNNNDMRF

SEQ ID NO: 185176 - protein, 19 aa, Homo sapiens
  CDR3 for beta chain variable domain of TCR clone 92588 (TRBV7-2, TRBJ2-3)
CASSFLSRNWGGGTDTPYF

SEQ ID NO: 185177 - protein, 16 aa, Homo sapiens
  CDR3 for alpha chain variable domain of TCR clone 92589 (TRAV21, TRAJ17)
CAVRPGEEAAVNKLTF

SEQ ID NO: 185178 - protein, 16 aa, Homo sapiens
  CDR3 for beta chain variable domain of TCR clone 92589 (TRBV2, TRBJ2-7)
CASSEPWTGPSYEQYF

SEQ ID NO: 185179 - protein, 17 aa, Homo sapiens
  CDR3 for alpha chain variable domain of TCR clone 92590 (TRAV12-3, TRAJ31)
CAMKDRLMFGDGTQLVV

SEQ ID NO: 185180 - protein, 16 aa, Homo sapiens
  CDR3 for beta chain variable domain of TCR clone 92590 (TRBV12-4, TRBJ2-5)
CASSFFVRGRQETQYF

SEQ ID NO: 185181 - protein, 14 aa, Homo sapiens
  CDR3 for alpha chain variable domain of TCR clone 92591 (TRAV8-4, TRAJ13)
CAVTLSGGYQKVTF

SEQ ID NO: 185182 - protein, 16 aa, Homo sapiens
  CDR3 for beta chain variable domain of TCR clone 92591 (TRBV19, TRBJ2-2)
CASRSPGTGVTGELFF

SEQ ID NO: 185183 - protein, 14 aa, Homo sapiens
  CDR3 for alpha chain variable domain of TCR clone 92592 (TRAV1-2, TRAJ8)
CAVREDTGFQKLVF

SEQ ID NO: 185184 - protein, 14 aa, Homo sapiens
  CDR3 for beta chain variable domain of TCR clone 92592 (TRBV20-1, TRBJ2-4)
CSASGRVGENIQYF

SEQ ID NO: 185185 - protein, 12 aa, Homo sapiens
  CDR3 for alpha chain variable domain of TCR clone 92593 (TRAV34, TRAJ27)
CGADTNAGKPTF

SEQ ID NO: 185186 - protein, 14 aa, Homo sapiens
  CDR3 for beta chain variable domain of TCR clone 92593 (TRBV4-1, TRBJ2-2)
CASSQAVNTGELFF

SEQ ID NO: 185187 - protein, 15 aa, Homo sapiens
  CDR3 for alpha chain variable domain of TCR clone 92594 (TRAV12-1, TRAJ9)
CVVSFGDTGGFKTIF

SEQ ID NO: 185188 - protein, 13 aa, Homo sapiens
  CDR3 for beta chain variable domain of TCR clone 92594 (TRBV2, TRBJ1-4)
CASSERGGEKLFF

SEQ ID NO: 185189 - protein, 16 aa, Homo sapiens
  CDR3 for alpha chain variable domain of TCR clone 92595 (TRAV38-2/DV8, TRAJ47)
CAYRSAIMEYGTKLVF

SEQ ID NO: 185190 - protein, 14 aa, Homo sapiens
  CDR3 for beta chain variable domain of TCR clone 92595 (TRBV19, TRBJ2-7)
CASSIFAGTYEQYF

SEQ ID NO: 185191 - protein, 15 aa, Homo sapiens
  CDR3 for alpha chain variable domain of TCR clone 92596 (TRAV8-3, TRAJ27)
CAVGPSKTNAGKSTF

SEQ ID NO: 185192 - protein, 15 aa, Homo sapiens
  CDR3 for beta chain variable domain of TCR clone 92596 (TRBV7-2, TRBJ2-1)
CASSSGLAGGNEQCF

SEQ ID NO: 185193 - protein, 16 aa, Homo sapiens
  CDR3 for alpha chain variable domain of TCR clone 92597 (TRAV30, TRAJ24)
CGTEIVDADSWGKFQF

SEQ ID NO: 185194 - protein, 14 aa, Homo sapiens
  CDR3 for beta chain variable domain of TCR clone 92597 (TRBV12-5, TRBJ2-5)
CASGPRTQQETQYF

SEQ ID NO: 185195 - protein, 12 aa, Homo sapiens
  CDR3 for alpha chain variable domain of TCR clone 92598 (TRAV13-1, TRAJ15)
CAASQAGTALIF

SEQ ID NO: 185196 - protein, 18 aa, Homo sapiens
  CDR3 for beta chain variable domain of TCR clone 92598 (TRBV7-9, TRBJ2-3)
CASSLPINGQISTDTQYS

SEQ ID NO: 185197 - protein, 11 aa, Homo sapiens
  CDR3 for alpha chain variable domain of TCR clone 92599 (TRAV12-1, TRAJ8)
CVVTGFQKLVF

SEQ ID NO: 185198 - protein, 14 aa, Homo sapiens
  CDR3 for beta chain variable domain of TCR clone 92599 (TRBV19, TRBJ2-1)
CASGKSAQYNEQFF

SEQ ID NO: 185199 - protein, 14 aa, Homo sapiens
  CDR3 for alpha chain variable domain of TCR clone 92600 (TRAV13-1, TRAJ35)
CAASKGGFGNVLHC

SEQ ID NO: 185200 - protein, 12 aa, Homo sapiens
  CDR3 for beta chain variable domain of TCR clone 92600 (TRBV11-3, TRBJ1-1)
CASSLRDSEAFF

SEQ ID NO: 185201 - protein, 14 aa, Homo sapiens
  CDR3 for alpha chain variable domain of TCR clone 92601 (TRAV26-1, TRAJ38)
CIADNAGNNRKLSW

SEQ ID NO: 185202 - protein, 13 aa, Homo sapiens
  CDR3 for beta chain variable domain of TCR clone 92601 (TRBV20-1, TRBJ1-1)
CSARGGGNTEAFF

SEQ ID NO: 185203 - protein, 13 aa, Homo sapiens
  CDR3 for alpha chain variable domain of TCR clone 92602 (TRAV36/DV7, TRAJ37)
CAVFSSNTGKLIF

SEQ ID NO: 185204 - protein, 16 aa, Homo sapiens
  CDR3 for beta chain variable domain of TCR clone 92602 (TRBV13, TRBJ2-2)
CASSPRTGEHTGELFF

SEQ ID NO: 185205 - protein, 14 aa, Homo sapiens
  CDR3 for alpha chain variable domain of TCR clone 92603 (TRAV1-2, TRAJ10)
CAVRVPGGGNKLTF

SEQ ID NO: 185206 - protein, 12 aa, Homo sapiens
  CDR3 for beta chain variable domain of TCR clone 92603 (TRBV5-4, TRBJ1-1)
CASSFGQTEAFF

SEQ ID NO: 185207 - protein, 10 aa, Homo sapiens
  CDR3 for alpha chain variable domain of TCR clone 92604 (TRAV25, TRAJ34)
CAENTDKLIF

SEQ ID NO: 185208 - protein, 16 aa, Homo sapiens
  CDR3 for beta chain variable domain of TCR clone 92604 (TRBV19, TRBJ2-2)
CASRSPGTGATGELFF

SEQ ID NO: 185209 - protein, 15 aa, Homo sapiens
  CDR3 for alpha chain variable domain of TCR clone 92605 (TRAV14/DV4, TRAJ33)
CAMREGRDSNYQLIL

SEQ ID NO: 185210 - protein, 16 aa, Homo sapiens
  CDR3 for beta chain variable domain of TCR clone 92605 (TRBV12-5, TRBJ2-5)
CASGPRTSGNQETQYF

SEQ ID NO: 185211 - protein, 14 aa, Homo sapiens
  CDR3 for alpha chain variable domain of TCR clone 92606 (TRAV3, TRAJ22)
CAVRDYGSARQLTF

SEQ ID NO: 185212 - protein, 13 aa, Homo sapiens
  CDR3 for beta chain variable domain of TCR clone 92606 (TRBV11-2, TRBJ2-5)
CASGHGAKETQYV

SEQ ID NO: 185213 - protein, 14 aa, Homo sapiens
  CDR3 for alpha chain variable domain of TCR clone 92607 (TRAV1-2, TRAJ16)
CAVNRFSDGQKLLF

SEQ ID NO: 185214 - protein, 14 aa, Homo sapiens
  CDR3 for beta chain variable domain of TCR clone 92607 (TRBV4-1, TRBJ2-2)
CASSQAVDTGELFF

SEQ ID NO: 185215 - protein, 14 aa, Homo sapiens
  CDR3 for alpha chain variable domain of TCR clone 92608 (TRAV17, TRAJ12)
CAILPMDSSYKLIF

SEQ ID NO: 185216 - protein, 15 aa, Homo sapiens
  CDR3 for beta chain variable domain of TCR clone 92608 (TRBV6-3, TRBJ2-7)
CASSSPGTVFYEQYF

SEQ ID NO: 185217 - protein, 11 aa, Homo sapiens
  CDR3 for alpha chain variable domain of TCR clone 92609 (TRAV21, TRAJ9)
CAVPGGFKTIF

SEQ ID NO: 185218 - protein, 12 aa, Homo sapiens
  CDR3 for beta chain variable domain of TCR clone 92609 (TRBV20-1, TRBJ2-3)
CSARVGKDTQYF

SEQ ID NO: 185219 - protein, 13 aa, Homo sapiens
  CDR3 for alpha chain variable domain of TCR clone 92610 (TRAV13-1, TRAJ39)
CSKYSNAGNMLTF

SEQ ID NO: 185220 - protein, 16 aa, Homo sapiens
  CDR3 for beta chain variable domain of TCR clone 92610 (TRBV7-2, TRBJ2-3)
CAGSLVALYSTDTQYF

SEQ ID NO: 185221 - protein, 13 aa, Homo sapiens
  CDR3 for alpha chain variable domain of TCR clone 92611 (TRAV13-2, TRAJ48)
CAEMDFGNEKLTF

SEQ ID NO: 185222 - protein, 15 aa, Homo sapiens
  CDR3 for beta chain variable domain of TCR clone 92611 (TRBV7-9, TRBJ1-6)
CASSSPGRRNSPLHF

SEQ ID NO: 185223 - protein, 16 aa, Homo sapiens
  CDR3 for alpha chain variable domain of TCR clone 92612 (TRAV30, TRAJ24)
CGTEIVDADSWGKFQF

SEQ ID NO: 185224 - protein, 12 aa, Homo sapiens
  CDR3 for beta chain variable domain of TCR clone 92612 (TRBV11-2, TRBJ2-2)
CASSLPTGELFL

SEQ ID NO: 185225 - protein, 14 aa, Homo sapiens
  CDR3 for alpha chain variable domain of TCR clone 92613 (TRAV2, TRAJ3)
CAVPPCSSASKIIF

SEQ ID NO: 185226 - protein, 16 aa, Homo sapiens
  CDR3 for beta chain variable domain of TCR clone 92613 (TRBV19, TRBJ2-1)
CASSKAGPSSYNEQFF

SEQ ID NO: 185227 - protein, 13 aa, Homo sapiens
  CDR3 for alpha chain variable domain of TCR clone 92614 (TRAV39, TRAJ49)
CAVDRNTGNQYYF

SEQ ID NO: 185228 - protein, 14 aa, Homo sapiens
  CDR3 for beta chain variable domain of TCR clone 92614 (TRBV4-1, TRBJ1-1)
CASSRSGQSFEAFF

SEQ ID NO: 185229 - protein, 12 aa, Homo sapiens
  CDR3 for alpha chain variable domain of TCR clone 92615 (TRAV12-3, TRAJ17)
CAMTLTGNKPTF

SEQ ID NO: 185230 - protein, 15 aa, Homo sapiens
  CDR3 for beta chain variable domain of TCR clone 92615 (TRBV20-1, TRBJ2-7)
CSARDRVAGMDEQYF

SEQ ID NO: 185231 - protein, 17 aa, Homo sapiens
  CDR3 for alpha chain variable domain of TCR clone 92616 (TRAV4, TRAJ18)
CLVGERSVGSTLGRPYF

SEQ ID NO: 185232 - protein, 18 aa, Homo sapiens
  CDR3 for beta chain variable domain of TCR clone 92616 (TRBV11-2, TRBJ2-3)
CASSLGGASRGAPNTQYF

SEQ ID NO: 185233 - protein, 14 aa, Homo sapiens
  CDR3 for alpha chain variable domain of TCR clone 92617 (TRAV8-3, TRAJ44)
CAVGLTGTASKLTF

SEQ ID NO: 185234 - protein, 14 aa, Homo sapiens
  CDR3 for beta chain variable domain of TCR clone 92617 (TRBV7-2, TRBJ2-7)
CASRSQGAAYEQYF

SEQ ID NO: 185235 - protein, 18 aa, Homo sapiens
  CDR3 for alpha chain variable domain of TCR clone 92618 (TRAV12-3, TRAJ52)
CAMSRTNAGGTRYGKLTF

SEQ ID NO: 185236 - protein, 17 aa, Homo sapiens
  CDR3 for beta chain variable domain of TCR clone 92618 (TRBV7-3, TRBJ2-3)
CASSLMKWMRGADTQYF

SEQ ID NO: 185237 - protein, 14 aa, Homo sapiens
  CDR3 for alpha chain variable domain of TCR clone 92619 (TRAV1-2, TRAJ8)
CAVREDTGFQKLVF

SEQ ID NO: 185238 - protein, 13 aa, Homo sapiens
  CDR3 for beta chain variable domain of TCR clone 92619 (TRBV10-3, TRBJ2-7)
CAISEKGGYEQYF

SEQ ID NO: 185239 - protein, 12 aa, Homo sapiens
  CDR3 for alpha chain variable domain of TCR clone 92620 (TRAV17, TRAJ15)
CATGGTGTAPIF

SEQ ID NO: 185240 - protein, 15 aa, Homo sapiens
  CDR3 for beta chain variable domain of TCR clone 92620 (TRBV2, TRBJ2-5)
CASSGGLAGQETQYF

SEQ ID NO: 185241 - protein, 14 aa, Homo sapiens
  CDR3 for alpha chain variable domain of TCR clone 92621 (TRAV1-2, TRAJ16)
CAVNRFSDGQKLLF

SEQ ID NO: 185242 - protein, 15 aa, Homo sapiens
  CDR3 for beta chain variable domain of TCR clone 92621 (TRBV15, TRBJ2-3)
CATSGAGFGTDTQYF

SEQ ID NO: 185243 - protein, 14 aa, Homo sapiens
  CDR3 for alpha chain variable domain of TCR clone 92622 (TRAV12-2, TRAJ3)
CAVSLYRSASKIIF

SEQ ID NO: 185244 - protein, 14 aa, Homo sapiens
  CDR3 for beta chain variable domain of TCR clone 92622 (TRBV27, TRBJ2-1)
CAGSIAETYNEQFF

SEQ ID NO: 185245 - protein, 16 aa, Homo sapiens
  CDR3 for alpha chain variable domain of TCR clone 92623 (TRAV26-1, TRAJ37)
CIVRGDGSGNTGKLIF

SEQ ID NO: 185246 - protein, 17 aa, Homo sapiens
  CDR3 for beta chain variable domain of TCR clone 92623 (TRBV4-1, TRBJ2-7)
CASSRDPLGFRGGEQYF

SEQ ID NO: 185247 - protein, 13 aa, Homo sapiens
  CDR3 for alpha chain variable domain of TCR clone 92624 (TRAV16, TRAJ31)
CALSAHNNARLMF

SEQ ID NO: 185248 - protein, 13 aa, Homo sapiens
  CDR3 for beta chain variable domain of TCR clone 92624 (TRBV27, TRBJ1-1)
CASSLSIGAEAFF

SEQ ID NO: 185249 - protein, 12 aa, Homo sapiens
  CDR3 for alpha chain variable domain of TCR clone 92625 (TRAV8-3, TRAJ26)
CAGDNYGQNFVF

SEQ ID NO: 185250 - protein, 16 aa, Homo sapiens
  CDR3 for beta chain variable domain of TCR clone 92625 (TRBV20-1, TRBJ1-4)
SSAPGQGLLTNEKLFF

SEQ ID NO: 185251 - protein, 17 aa, Homo sapiens
  CDR3 for alpha chain variable domain of TCR clone 92626 (TRAV2, TRAJ36)
CAVEDRGNWVKQPLLWD

SEQ ID NO: 185252 - protein, 14 aa, Homo sapiens
  CDR3 for beta chain variable domain of TCR clone 92626 (TRBV7-9, TRBJ2-5)
CASSLDTAQETQYF

SEQ ID NO: 185253 - protein, 12 aa, Homo sapiens
  CDR3 for alpha chain variable domain of TCR clone 92627 (TRAV12-3, TRAJ17)
CAMTLAGNKLTF

SEQ ID NO: 185254 - protein, 15 aa, Homo sapiens
  CDR3 for beta chain variable domain of TCR clone 92627 (TRBV6-3, TRBJ2-7)
CASSSPGTVFYEQYF

SEQ ID NO: 185255 - protein, 12 aa, Homo sapiens
  CDR3 for alpha chain variable domain of TCR clone 92628 (TRAV35, TRAJ31)
CAAASNNARLMF

SEQ ID NO: 185256 - protein, 15 aa, Homo sapiens
  CDR3 for beta chain variable domain of TCR clone 92628 (TRBV6-3, TRBJ2-7)
CASSSPGTVFYEQYF

SEQ ID NO: 185257 - protein, 16 aa, Homo sapiens
  CDR3 for alpha chain variable domain of TCR clone 92629 (TRAV9-2, TRAJ53)
CALRKNSGGSNYKLTF

SEQ ID NO: 185258 - protein, 14 aa, Homo sapiens
  CDR3 for beta chain variable domain of TCR clone 92629 (TRBV28, TRBJ2-1)
CASSLNWRNNEQFF

SEQ ID NO: 185259 - protein, 17 aa, Homo sapiens
  CDR3 for alpha chain variable domain of TCR clone 92630 (TRAV3, TRAJ6)
CAVRDGPRAGGSYIPTF

SEQ ID NO: 185260 - protein, 15 aa, Homo sapiens
  CDR3 for beta chain variable domain of TCR clone 92630 (TRBV19, TRBJ2-1)
CASSRPGQNYNEQFF

SEQ ID NO: 185261 - protein, 12 aa, Homo sapiens
  CDR3 for alpha chain variable domain of TCR clone 92631 (TRAV35, TRAJ49)
CAGWNTGNQFYF

SEQ ID NO: 185262 - protein, 16 aa, Homo sapiens
  CDR3 for beta chain variable domain of TCR clone 92631 (TRBV5-1, TRBJ2-2)
CASSLWDSTNTGELFF

SEQ ID NO: 185263 - protein, 14 aa, Homo sapiens
  CDR3 for alpha chain variable domain of TCR clone 92632 (TRAV1-2, TRAJ16)
FAVNRFSDGQKLLF

SEQ ID NO: 185264 - protein, 14 aa, Homo sapiens
  CDR3 for beta chain variable domain of TCR clone 92632 (TRBV12-4, TRBJ1-1)
CASSLGTGGTEAFF

SEQ ID NO: 185265 - protein, 11 aa, Homo sapiens
  CDR3 for alpha chain variable domain of TCR clone 92633 (TRAV12-3, TRAJ43)
CAMSVSNDMRF

SEQ ID NO: 185266 - protein, 15 aa, Homo sapiens
  CDR3 for beta chain variable domain of TCR clone 92633 (TRBV7-2, TRBJ1-2)
CASSPRAGWNYGYTF

SEQ ID NO: 185267 - protein, 12 aa, Homo sapiens
  CDR3 for alpha chain variable domain of TCR clone 92634 (TRAV21, TRAJ13)
PGPSGGYQKVTF

SEQ ID NO: 185268 - protein, 14 aa, Homo sapiens
  CDR3 for beta chain variable domain of TCR clone 92634 (TRBV7-2, TRBJ1-1)
CASSFLTGTTEAFF

SEQ ID NO: 185269 - protein, 15 aa, Homo sapiens
  CDR3 for alpha chain variable domain of TCR clone 92635 (TRAV3, TRAJ13)
CAVRVYSGGYQKVTF

SEQ ID NO: 185270 - protein, 13 aa, Homo sapiens
  CDR3 for beta chain variable domain of TCR clone 92635 (TRBV24-1, TRBJ2-2)
CATTATRTGELFF

SEQ ID NO: 185271 - protein, 14 aa, Homo sapiens
  CDR3 for alpha chain variable domain of TCR clone 92636 (TRAV27, TRAJ15)
CAGFDNQAGTALIF

SEQ ID NO: 185272 - protein, 11 aa, Homo sapiens
  CDR3 for beta chain variable domain of TCR clone 92636 (TRBV29-1, TRBJ1-1)
RSVEVGTRTFF

SEQ ID NO: 185273 - protein, 15 aa, Homo sapiens
  CDR3 for alpha chain variable domain of TCR clone 92637 (TRAV3, TRAJ5)
CAVRDLDTGRRALTF

SEQ ID NO: 185274 - protein, 15 aa, Homo sapiens
  CDR3 for beta chain variable domain of TCR clone 92637 (TRBV20-1, TRBJ1-1)
CSASRGVTGNTEAFF

SEQ ID NO: 185275 - protein, 16 aa, Homo sapiens
  CDR3 for alpha chain variable domain of TCR clone 92638 (TRAV8-3, TRAJ28)
CAVGATLVLGVTNSLS

SEQ ID NO: 185276 - protein, 14 aa, Homo sapiens
  CDR3 for beta chain variable domain of TCR clone 92638 (TRBV7-2, TRBJ2-1)
CASSLGVGYNEQFF

SEQ ID NO: 185277 - protein, 15 aa, Homo sapiens
  CDR3 for alpha chain variable domain of TCR clone 92639 (TRAV12-1, TRAJ9)
CVVSFGGTGGFKTIF

SEQ ID NO: 185278 - protein, 12 aa, Homo sapiens
  CDR3 for beta chain variable domain of TCR clone 92639 (TRBV11-3, TRBJ1-1)
CASSHRQGEAFF

SEQ ID NO: 185279 - protein, 14 aa, Homo sapiens
  CDR3 for alpha chain variable domain of TCR clone 92640 (TRAV21, TRAJ42)
CAVLGGGSQGNLIF

SEQ ID NO: 185280 - protein, 14 aa, Homo sapiens
  CDR3 for beta chain variable domain of TCR clone 92640 (TRBV11-2, TRBJ1-2)
CASSLGTANYGYTF

SEQ ID NO: 185281 - protein, 11 aa, Homo sapiens
  CDR3 for alpha chain variable domain of TCR clone 92641 (TRAV12-3, TRAJ43)
CAMSVSNDMRF

SEQ ID NO: 185282 - protein, 19 aa, Homo sapiens
  CDR3 for beta chain variable domain of TCR clone 92641 (TRBV28, TRBJ2-7)
WASSYSGTSRLGWVYEQYF

SEQ ID NO: 185283 - protein, 15 aa, Homo sapiens
  CDR3 for alpha chain variable domain of TCR clone 92642 (TRAV26-1, TRAJ29)
CIVRVEGSGNTPLVF

SEQ ID NO: 185284 - protein, 15 aa, Homo sapiens
  CDR3 for beta chain variable domain of TCR clone 92642 (TRBV20-1, TRBJ1-1)
CSASRGVTGNTEAFF

SEQ ID NO: 185285 - protein, 14 aa, Homo sapiens
  CDR3 for alpha chain variable domain of TCR clone 92643 (TRAV1-2, TRAJ16)
CAVNRFSEGQKLLF

SEQ ID NO: 185286 - protein, 15 aa, Homo sapiens
  CDR3 for beta chain variable domain of TCR clone 92643 (TRBV20-1, TRBJ2-7)
CSARDRVSGMDEQYF

SEQ ID NO: 185287 - protein, 13 aa, Homo sapiens
  CDR3 for alpha chain variable domain of TCR clone 92644 (TRAV1-1, TRAJ9)
CAAKNTGGFKTIF

SEQ ID NO: 185288 - protein, 14 aa, Homo sapiens
  CDR3 for beta chain variable domain of TCR clone 92644 (TRBV20-1, TRBJ2-1)
CSAQIRGSANEQFF

SEQ ID NO: 185289 - protein, 16 aa, Homo sapiens
  CDR3 for alpha chain variable domain of TCR clone 92645 (TRAV21, TRAJ37)
CAVRTAGSGNTGELIF

SEQ ID NO: 185290 - protein, 13 aa, Homo sapiens
  CDR3 for beta chain variable domain of TCR clone 92645 (TRBV7-9, TRBJ2-5)
CASLPSGRETHYF

SEQ ID NO: 185291 - protein, 15 aa, Homo sapiens
  CDR3 for alpha chain variable domain of TCR clone 92646 (TRAV8-4, TRAJ13)
CAVSDWGGGYQKVTF

SEQ ID NO: 185292 - protein, 14 aa, Homo sapiens
  CDR3 for beta chain variable domain of TCR clone 92646 (TRBV6-1, TRBJ1-3)
CASVQGGGGNTIYF

SEQ ID NO: 185293 - protein, 15 aa, Homo sapiens
  CDR3 for alpha chain variable domain of TCR clone 92647 (TRAV12-3, TRAJ53)
CASNASGGSNYKLTF

SEQ ID NO: 185294 - protein, 15 aa, Homo sapiens
  CDR3 for beta chain variable domain of TCR clone 92647 (TRBV7-9, TRBJ1-5)
CASSQGHQPNQPQHF

SEQ ID NO: 185295 - protein, 16 aa, Homo sapiens
  CDR3 for alpha chain variable domain of TCR clone 92648 (TRAV30, TRAJ24)
CGTEIVDADSWGKFQF

SEQ ID NO: 185296 - protein, 14 aa, Homo sapiens
  CDR3 for beta chain variable domain of TCR clone 92648 (TRBV19, TRBJ2-3)
CASSAPRGTDTQYF

SEQ ID NO: 185297 - protein, 15 aa, Homo sapiens
  CDR3 for alpha chain variable domain of TCR clone 92649 (TRAV17, TRAJ57)
CATGPSQGGSEKLVF

SEQ ID NO: 185298 - protein, 13 aa, Homo sapiens
  CDR3 for beta chain variable domain of TCR clone 92649 (TRBV6-1, TRBJ1-1)
CASSRQGNTEAFF

SEQ ID NO: 185299 - protein, 11 aa, Homo sapiens
  CDR3 for alpha chain variable domain of TCR clone 92650 (TRAV4, TRAJ28)
CLVGDNRSETL

SEQ ID NO: 185300 - protein, 13 aa, Homo sapiens
  CDR3 for beta chain variable domain of TCR clone 92650 (TRBV20-1, TRBJ2-7)
CSATHTSGYEQYF

SEQ ID NO: 185301 - protein, 13 aa, Homo sapiens
  CDR3 for alpha chain variable domain of TCR clone 92651 (TRAV12-2, TRAJ20)
CAVYPSNDYKLSF

SEQ ID NO: 185302 - protein, 15 aa, Homo sapiens
  CDR3 for beta chain variable domain of TCR clone 92651 (TRBV27, TRBJ2-5)
CASSLYRRGGETQYF

SEQ ID NO: 185303 - protein, 18 aa, Homo sapiens
  CDR3 for alpha chain variable domain of TCR clone 92652 (TRAV14/DV4, TRAJ3)
CAMREGSGGYSSASKIIF

SEQ ID NO: 185304 - protein, 15 aa, Homo sapiens
  CDR3 for beta chain variable domain of TCR clone 92652 (TRBV6-6, TRBJ2-5)
RASSPGGGLEETQYF

SEQ ID NO: 185305 - protein, 17 aa, Homo sapiens
  CDR3 for alpha chain variable domain of TCR clone 92653 (TRAV27, TRAJ42)
CAERVIYYGGSQGNLIL

SEQ ID NO: 185306 - protein, 14 aa, Homo sapiens
  CDR3 for beta chain variable domain of TCR clone 92653 (TRBV6-6, TRBJ2-3)
CASRLQREADTQYF

SEQ ID NO: 185307 - protein, 15 aa, Homo sapiens
  CDR3 for alpha chain variable domain of TCR clone 92654 (TRAV3, TRAJ22)
CAVRDRGGSARQLTF

SEQ ID NO: 185308 - protein, 16 aa, Homo sapiens
  CDR3 for beta chain variable domain of TCR clone 92654 (TRBV11-3, TRBJ2-1)
CASARGSYSHHNEQFF

SEQ ID NO: 185309 - protein, 13 aa, Homo sapiens
  CDR3 for alpha chain variable domain of TCR clone 92655 (TRAV26-2, TRAJ57)
CILSRGGSEKLVV

SEQ ID NO: 185310 - protein, 16 aa, Homo sapiens
  CDR3 for beta chain variable domain of TCR clone 92655 (TRBV18, TRBJ1-5)
CASSPRTGGGNQPQHF

SEQ ID NO: 185311 - protein, 11 aa, Homo sapiens
  CDR3 for alpha chain variable domain of TCR clone 92656 (TRAV1-2, TRAJ31)
CAVNNNARLMF

SEQ ID NO: 185312 - protein, 14 aa, Homo sapiens
  CDR3 for beta chain variable domain of TCR clone 92656 (TRBV28, TRBJ2-1)
CQQYNRGGRSEQFF

SEQ ID NO: 185313 - protein, 15 aa, Homo sapiens
  CDR3 for alpha chain variable domain of TCR clone 92657 (TRAV12-3, TRAJ6)
CAMSATSGGSYIPTF

SEQ ID NO: 185314 - protein, 11 aa, Homo sapiens
  CDR3 for beta chain variable domain of TCR clone 92657 (TRBV20-1, TRBJ1-5)
CSAQGEQPQHF

SEQ ID NO: 185315 - protein, 23 aa, Homo sapiens
  CDR3 for alpha chain variable domain of TCR clone 92658 (TRAV3, TRAJ38)
CAVRDCLNAGNNHIQNPDPAVYH

SEQ ID NO: 185316 - protein, 14 aa, Homo sapiens
  CDR3 for beta chain variable domain of TCR clone 92658 (TRBV5-5, TRBJ1-5)
CASSGQGVDQPQHF

SEQ ID NO: 185317 - protein, 15 aa, Homo sapiens
  CDR3 for alpha chain variable domain of TCR clone 92659 (TRAV13-1, TRAJ8)
FAASIPNTGFQKLVF

SEQ ID NO: 185318 - protein, 13 aa, Homo sapiens
  CDR3 for beta chain variable domain of TCR clone 92659 (TRBV5-4, TRBJ1-1)
CASSFQVNTEAFF

SEQ ID NO: 185319 - protein, 12 aa, Homo sapiens
  CDR3 for alpha chain variable domain of TCR clone 92660 (TRAV12-3, TRAJ20)
CAMVRGDYKLSF

SEQ ID NO: 185320 - protein, 12 aa, Homo sapiens
  CDR3 for beta chain variable domain of TCR clone 92660 (TRBV11-2, TRBJ2-1)
CASSPGNNEQFF

SEQ ID NO: 185321 - protein, 12 aa, Homo sapiens
  CDR3 for alpha chain variable domain of TCR clone 92661 (TRAV8-3, TRAJ41)
CAVGALGYALNF

SEQ ID NO: 185322 - protein, 16 aa, Homo sapiens
  CDR3 for beta chain variable domain of TCR clone 92661 (TRBV7-6, TRBJ2-3)
CASSDSRGGGTDTQYF

SEQ ID NO: 185323 - protein, 16 aa, Homo sapiens
  CDR3 for alpha chain variable domain of TCR clone 92662 (TRAV23/DV6, TRAJ9)
CAASIGGNTGGFNTIF

SEQ ID NO: 185324 - protein, 14 aa, Homo sapiens
  CDR3 for beta chain variable domain of TCR clone 92662 (TRBV9, TRBJ2-7)
CASSVGVGAYEQYF

SEQ ID NO: 185325 - protein, 13 aa, Homo sapiens
  CDR3 for alpha chain variable domain of TCR clone 92663 (TRAV12-2, TRAJ20)
CAVYPSNDYKPSF

SEQ ID NO: 185326 - protein, 12 aa, Homo sapiens
  CDR3 for beta chain variable domain of TCR clone 92663 (TRBV14, TRBJ2-7)
CASSRLKGEQYF

SEQ ID NO: 185327 - protein, 15 aa, Homo sapiens
  CDR3 for alpha chain variable domain of TCR clone 92664 (TRAV3, TRAJ45)
CAVRTPWGGADGLTF

SEQ ID NO: 185328 - protein, 14 aa, Homo sapiens
  CDR3 for beta chain variable domain of TCR clone 92664 (TRBV12-5, TRBJ2-5)
CASGSRTHQETQYF

SEQ ID NO: 185329 - protein, 16 aa, Homo sapiens
  CDR3 for alpha chain variable domain of TCR clone 92665 (TRAV3, TRAJ5)
CAVRNLMDTGRRALTF

SEQ ID NO: 185330 - protein, 16 aa, Homo sapiens
  CDR3 for beta chain variable domain of TCR clone 92665 (TRBV4-2, TRBJ2-7)
CASSQEGLEKSYEQYF

SEQ ID NO: 185331 - protein, 18 aa, Homo sapiens
  CDR3 for alpha chain variable domain of TCR clone 92666 (TRAV13-2, TRAJ52)
CAETTLNAGGTSYGKLTF

SEQ ID NO: 185332 - protein, 15 aa, Homo sapiens
  CDR3 for beta chain variable domain of TCR clone 92666 (TRBV7-2, TRBJ2-7)
CASSLKGALTYEQYF

SEQ ID NO: 185333 - protein, 17 aa, Homo sapiens
  CDR3 for alpha chain variable domain of TCR clone 92667 (TRAV13-1, TRAJ52)
CAASSGAGGTSYGKLTF

SEQ ID NO: 185334 - protein, 15 aa, Homo sapiens
  CDR3 for beta chain variable domain of TCR clone 92667 (TRBV28, TRBJ2-7)
CASSPGGRGFYEQYF

SEQ ID NO: 185335 - protein, 15 aa, Homo sapiens
  CDR3 for alpha chain variable domain of TCR clone 92668 (TRAV26-1, TRAJ29)
CIVRVEGSGNTPLVF

SEQ ID NO: 185336 - protein, 12 aa, Homo sapiens
  CDR3 for beta chain variable domain of TCR clone 92668 (TRBV12-4, TRBJ1-3)
CASSFSGNTIYF

SEQ ID NO: 185337 - protein, 11 aa, Homo sapiens
  CDR3 for alpha chain variable domain of TCR clone 92669 (TRAV13-2, TRAJ20)
CADSNDYKLSY

SEQ ID NO: 185338 - protein, 12 aa, Homo sapiens
  CDR3 for beta chain variable domain of TCR clone 92669 (TRBV5-1, TRBJ2-3)
CASSLAADTQYF

SEQ ID NO: 185339 - protein, 14 aa, Homo sapiens
  CDR3 for alpha chain variable domain of TCR clone 92670 (TRAV8-1, TRAJ24)
CAVNAADSWGKLQF

SEQ ID NO: 185340 - protein, 16 aa, Homo sapiens
  CDR3 for beta chain variable domain of TCR clone 92670 (TRBV7-3, TRBJ2-2)
CASSLKRGTLSGELFF

SEQ ID NO: 185341 - protein, 11 aa, Homo sapiens
  CDR3 for alpha chain variable domain of TCR clone 92671 (TRAV12-3, TRAJ43)
CAMSVSNDMRF

SEQ ID NO: 185342 - protein, 13 aa, Homo sapiens
  CDR3 for beta chain variable domain of TCR clone 92671 (TRBV7-9, TRBJ1-2)
CASSPKTGYGYTF

SEQ ID NO: 185343 - protein, 20 aa, Homo sapiens
  CDR3 for alpha chain variable domain of TCR clone 92672 (TRAV26-1, TRAJ52)
CCVLLHRPSAGGTSYGKLTF

SEQ ID NO: 185344 - protein, 14 aa, Homo sapiens
  CDR3 for beta chain variable domain of TCR clone 92672 (TRBV7-2, TRBJ1-4)
CASSHSKTNEKLLF

SEQ ID NO: 185345 - protein, 14 aa, Homo sapiens
  CDR3 for alpha chain variable domain of TCR clone 92673 (TRAV38-1, TRAJ45)
CAYYSGGGADGLHF

SEQ ID NO: 185346 - protein, 20 aa, Homo sapiens
  CDR3 for beta chain variable domain of TCR clone 92673 (TRBV28, TRBJ2-1)
CASTPIGRSPGLAGGNEQFF

SEQ ID NO: 185347 - protein, 13 aa, Homo sapiens
  CDR3 for alpha chain variable domain of TCR clone 92674 (TRAV27, TRAJ6)
CAGGTRGSYIHTF

SEQ ID NO: 185348 - protein, 13 aa, Homo sapiens
  CDR3 for beta chain variable domain of TCR clone 92674 (TRBV4-1, TRBJ2-2)
CASSQENTGELFF

SEQ ID NO: 185349 - protein, 13 aa, Homo sapiens
  CDR3 for alpha chain variable domain of TCR clone 92675 (TRAV12-3, TRAJ54)
CAMFAQGAQKLVF

SEQ ID NO: 185350 - protein, 16 aa, Homo sapiens
  CDR3 for beta chain variable domain of TCR clone 92675 (TRBV7-6, TRBJ2-3)
CASGPRRGGLGDTQYF

SEQ ID NO: 185351 - protein, 17 aa, Homo sapiens
  CDR3 for alpha chain variable domain of TCR clone 92676 (TRAV23/DV6, TRAJ12)
CAAIDLGALDSSYKLIF

SEQ ID NO: 185352 - protein, 12 aa, Homo sapiens
  CDR3 for beta chain variable domain of TCR clone 92676 (TRBV10-3, TRBJ2-2)
CAIRENTGELFF

SEQ ID NO: 185353 - protein, 14 aa, Homo sapiens
  CDR3 for alpha chain variable domain of TCR clone 92677 (TRAV16, TRAJ33)
CALSAMDSNYQLIW

SEQ ID NO: 185354 - protein, 17 aa, Homo sapiens
  CDR3 for beta chain variable domain of TCR clone 92677 (TRBV25-1, TRBJ2-7)
CASSDARVVVSSYEQYF

SEQ ID NO: 185355 - protein, 16 aa, Homo sapiens
  CDR3 for alpha chain variable domain of TCR clone 92678 (TRAV8-3, TRAJ13)
CAVGAYPSGGYQKVTF

SEQ ID NO: 185356 - protein, 13 aa, Homo sapiens
  CDR3 for beta chain variable domain of TCR clone 92678 (TRBV6-1, TRBJ1-1)
CASSRQGNTEAFF

SEQ ID NO: 185357 - protein, 14 aa, Homo sapiens
  CDR3 for alpha chain variable domain of TCR clone 92679 (TRAV9-2, TRAJ39)
CALYIYDAGNMLTF

SEQ ID NO: 185358 - protein, 15 aa, Homo sapiens
  CDR3 for beta chain variable domain of TCR clone 92679 (TRBV5-4, TRBJ2-3)
CASSLDQRATDTQYF

SEQ ID NO: 185359 - protein, 11 aa, Homo sapiens
  CDR3 for alpha chain variable domain of TCR clone 92680 (TRAV13-2, TRAJ20)
CEDSNDYKLSF

SEQ ID NO: 185360 - protein, 14 aa, Homo sapiens
  CDR3 for beta chain variable domain of TCR clone 92680 (TRBV11-2, TRBJ1-5)
CASSLDRGRQPQHF

SEQ ID NO: 185361 - protein, 14 aa, Homo sapiens
  CDR3 for alpha chain variable domain of TCR clone 92681 (TRAV2, TRAJ9)
CAVEDRSGGFKTIF

SEQ ID NO: 185362 - protein, 11 aa, Homo sapiens
  CDR3 for beta chain variable domain of TCR clone 92681 (TRBV6-3, TRBJ2-3)
CATGQADTQYF

SEQ ID NO: 185363 - protein, 12 aa, Homo sapiens
  CDR3 for alpha chain variable domain of TCR clone 92682 (TRAV12-3, TRAJ34)
RAMGYNTDKLIF

SEQ ID NO: 185364 - protein, 14 aa, Homo sapiens
  CDR3 for beta chain variable domain of TCR clone 92682 (TRBV4-1, TRBJ2-2)
CASSQAVNTGELFF

SEQ ID NO: 185365 - protein, 17 aa, Homo sapiens
  CDR3 for alpha chain variable domain of TCR clone 92683 (TRAV26-1, TRAJ10)
CIVSFSGLTGGGNKLTF

SEQ ID NO: 185366 - protein, 13 aa, Homo sapiens
  CDR3 for beta chain variable domain of TCR clone 92683 (TRBV20-1, TRBJ2-3)
CSASRQAADTQYF

SEQ ID NO: 185367 - protein, 16 aa, Homo sapiens
  CDR3 for alpha chain variable domain of TCR clone 92684 (TRAV16, TRAJ4)
CALSRMFSVGYNKLIF

SEQ ID NO: 185368 - protein, 14 aa, Homo sapiens
  CDR3 for beta chain variable domain of TCR clone 92684 (TRBV4-1, TRBJ2-2)
CASSQAVNTGELFF

SEQ ID NO: 185369 - protein, 13 aa, Homo sapiens
  CDR3 for alpha chain variable domain of TCR clone 92685 (TRAV21, TRAJ27)
CAQWGGNAGKSTF

SEQ ID NO: 185370 - protein, 16 aa, Homo sapiens
  CDR3 for beta chain variable domain of TCR clone 92685 (TRBV12-4, TRBJ2-5)
CASSFFVRGRQETQYF

SEQ ID NO: 185371 - protein, 13 aa, Homo sapiens
  CDR3 for alpha chain variable domain of TCR clone 92686 (TRAV30, TRAJ24)
CGTVTDSWGKLPF

SEQ ID NO: 185372 - protein, 15 aa, Homo sapiens
  CDR3 for beta chain variable domain of TCR clone 92686 (TRBV25-1, TRBJ1-4)
CASSPGDSTNEKLFF

SEQ ID NO: 185373 - protein, 13 aa, Homo sapiens
  CDR3 for alpha chain variable domain of TCR clone 92687 (TRAV12-3, TRAJ13)
CAMSSGGYQKVTF

SEQ ID NO: 185374 - protein, 16 aa, Homo sapiens
  CDR3 for beta chain variable domain of TCR clone 92687 (TRBV7-9, TRBJ2-7)
CASSNHGGQEKYEQYF

SEQ ID NO: 185375 - protein, 15 aa, Homo sapiens
  CDR3 for alpha chain variable domain of TCR clone 92688 (TRAV8-1, TRAJ6)
CAVNTPPGGSYIPPF

SEQ ID NO: 185376 - protein, 15 aa, Homo sapiens
  CDR3 for beta chain variable domain of TCR clone 92688 (TRBV11-2, TRBJ2-2)
CASSSDRVNAGELFF

SEQ ID NO: 185377 - protein, 14 aa, Homo sapiens
  CDR3 for alpha chain variable domain of TCR clone 92689 (TRAV13-1, TRAJ24)
CAASPADSWGKFQF

SEQ ID NO: 185378 - protein, 13 aa, Homo sapiens
  CDR3 for beta chain variable domain of TCR clone 92689 (TRBV7-3, TRBJ1-1)
CASSQDWGAEAFF

SEQ ID NO: 185379 - protein, 10 aa, Homo sapiens
  CDR3 for alpha chain variable domain of TCR clone 92690 (TRAV2, TRAJ34)
CAVVNDKLII

SEQ ID NO: 185380 - protein, 12 aa, Homo sapiens
  CDR3 for beta chain variable domain of TCR clone 92690 (TRBV7-8, TRBJ2-7)
CASSLGDREQYF

SEQ ID NO: 185381 - protein, 15 aa, Homo sapiens
  CDR3 for alpha chain variable domain of TCR clone 92691 (TRAV8-2, TRAJ16)
CVVSDGFSDGQKLLF

SEQ ID NO: 185382 - protein, 14 aa, Homo sapiens
  CDR3 for beta chain variable domain of TCR clone 92691 (TRBV7-3, TRBJ1-1)
CASSLGTGYTDAFF

SEQ ID NO: 185383 - protein, 10 aa, Homo sapiens
  CDR3 for alpha chain variable domain of TCR clone 92692 (TRAV12-1, TRAJ20)
CVVNPRKLSF

SEQ ID NO: 185384 - protein, 15 aa, Homo sapiens
  CDR3 for beta chain variable domain of TCR clone 92692 (TRBV5-1, TRBJ2-1)
CASSPPRAPYSEQFF

SEQ ID NO: 185385 - protein, 13 aa, Homo sapiens
  CDR3 for alpha chain variable domain of TCR clone 92693 (TRAV12-1, TRAJ39)
CVVPQRAGNMLTF

SEQ ID NO: 185386 - protein, 11 aa, Homo sapiens
  CDR3 for beta chain variable domain of TCR clone 92693 (TRBV19, TRBJ1-1)
CASSIGSEAFF

SEQ ID NO: 185387 - protein, 13 aa, Homo sapiens
  CDR3 for alpha chain variable domain of TCR clone 92694 (TRAV1-1, TRAJ31)
CASYLNNNARLMS

SEQ ID NO: 185388 - protein, 13 aa, Homo sapiens
  CDR3 for beta chain variable domain of TCR clone 92694 (TRBV15, TRBJ1-6)
CATSGGLNSPLHF

SEQ ID NO: 185389 - protein, 14 aa, Homo sapiens
  CDR3 for alpha chain variable domain of TCR clone 92695 (TRAV17, TRAJ34)
CATDSLEGTDKLIF

SEQ ID NO: 185390 - protein, 13 aa, Homo sapiens
  CDR3 for beta chain variable domain of TCR clone 92695 (TRBV11-2, TRBJ2-7)
CASSGTSPYEQYF

SEQ ID NO: 185391 - protein, 14 aa, Homo sapiens
  CDR3 for alpha chain variable domain of TCR clone 92696 (TRAV1-2, TRAJ16)
CAVNRFSDGQKLLF

SEQ ID NO: 185392 - protein, 15 aa, Homo sapiens
  CDR3 for beta chain variable domain of TCR clone 92696 (TRBV5-1, TRBJ2-1)
CASSPPRARYNEQFF

SEQ ID NO: 185393 - protein, 14 aa, Homo sapiens
  CDR3 for alpha chain variable domain of TCR clone 92697 (TRAV1-1, TRAJ27)
CAVIYNTNAGKSTF

SEQ ID NO: 185394 - protein, 14 aa, Homo sapiens
  CDR3 for beta chain variable domain of TCR clone 92697 (TRBV7-9, TRBJ2-2)
CASSGLADTGELFF

SEQ ID NO: 185395 - protein, 16 aa, Homo sapiens
  CDR3 for alpha chain variable domain of TCR clone 92698 (TRAV27, TRAJ53)
CAAPEGSGGSNYKLTF

SEQ ID NO: 185396 - protein, 14 aa, Homo sapiens
  CDR3 for beta chain variable domain of TCR clone 92698 (TRBV4-3, TRBJ1-5)
CASSHGGQGWPQHF

SEQ ID NO: 185397 - protein, 16 aa, Homo sapiens
  CDR3 for alpha chain variable domain of TCR clone 92699 (TRAV12-1, TRAJ43)
CVVNPHRFGAGTRLTV

SEQ ID NO: 185398 - protein, 13 aa, Homo sapiens
  CDR3 for beta chain variable domain of TCR clone 92699 (TRBV12-4, TRBJ1-2)
CASSSGPSYGYTF

SEQ ID NO: 185399 - protein, 11 aa, Homo sapiens
  CDR3 for alpha chain variable domain of TCR clone 92700 (TRAV13-2, TRAJ54)
RAVQVAQKLVF

SEQ ID NO: 185400 - protein, 15 aa, Homo sapiens
  CDR3 for beta chain variable domain of TCR clone 92700 (TRBV20-1, TRBJ2-7)
CSAESGTSGAYEQYF

SEQ ID NO: 185401 - protein, 14 aa, Homo sapiens
  CDR3 for alpha chain variable domain of TCR clone 92701 (TRAV12-2, TRAJ13)
CAVKKTGGYQKVTF

SEQ ID NO: 185402 - protein, 16 aa, Homo sapiens
  CDR3 for beta chain variable domain of TCR clone 92701 (TRBV11-3, TRBJ2-5)
CASSSVVAGSTETQYF

SEQ ID NO: 185403 - protein, 13 aa, Homo sapiens
  CDR3 for alpha chain variable domain of TCR clone 92702 (TRAV8-3, TRAJ28)
CAVGAVGSYQLTF

SEQ ID NO: 185404 - protein, 12 aa, Homo sapiens
  CDR3 for beta chain variable domain of TCR clone 92702 (TRBV11-2, TRBJ2-1)
CASSPGNNEQFF

SEQ ID NO: 185405 - protein, 14 aa, Homo sapiens
  CDR3 for alpha chain variable domain of TCR clone 92703 (TRAV12-2, TRAJ40)
CAVKIPSGTYKYIF

SEQ ID NO: 185406 - protein, 15 aa, Homo sapiens
  CDR3 for beta chain variable domain of TCR clone 92703 (TRBV20-1, TRBJ1-4)
CSARREWGVNEELFF

SEQ ID NO: 185407 - protein, 22 aa, Homo sapiens
  CDR3 for alpha chain variable domain of TCR clone 92704 (TRAV8-2, TRAJ45)
HLTKPSAHMSDAAAYSADGLTF

SEQ ID NO: 185408 - protein, 13 aa, Homo sapiens
  CDR3 for beta chain variable domain of TCR clone 92704 (TRBV7-3, TRBJ2-1)
CASSPVAYNEQFF

SEQ ID NO: 185409 - protein, 14 aa, Homo sapiens
  CDR3 for alpha chain variable domain of TCR clone 92705 (TRAV35, TRAJ13)
CAGSPSRGYQKVTF

SEQ ID NO: 185410 - protein, 13 aa, Homo sapiens
  CDR3 for beta chain variable domain of TCR clone 92705 (TRBV29-1, TRBJ1-1)
CSVGDSRNTEAFF

SEQ ID NO: 185411 - protein, 11 aa, Homo sapiens
  CDR3 for alpha chain variable domain of TCR clone 92706 (TRAV1-1, TRAJ23)
CAVRQGGKLIF

SEQ ID NO: 185412 - protein, 13 aa, Homo sapiens
  CDR3 for beta chain variable domain of TCR clone 92706 (TRBV12-4, TRBJ2-7)
CASSPTETYEQYF

SEQ ID NO: 185413 - protein, 15 aa, Homo sapiens
  CDR3 for alpha chain variable domain of TCR clone 92707 (TRAV8-3, TRAJ27)
CAVGPSKTNAGKSTF

SEQ ID NO: 185414 - protein, 13 aa, Homo sapiens
  CDR3 for beta chain variable domain of TCR clone 92707 (TRBV24-1, TRBJ2-2)
CATSDWSTGELFF

SEQ ID NO: 185415 - protein, 16 aa, Homo sapiens
  CDR3 for alpha chain variable domain of TCR clone 92708 (TRAV4, TRAJ22)
CLVGDLYSGSARQLTF

SEQ ID NO: 185416 - protein, 16 aa, Homo sapiens
  CDR3 for beta chain variable domain of TCR clone 92708 (TRBV7-9, TRBJ2-1)
CASSHVAGGSYNEQFF

SEQ ID NO: 185417 - protein, 11 aa, Homo sapiens
  CDR3 for alpha chain variable domain of TCR clone 92709 (TRAV2, TRAJ33)
CAVESNYQLIW

SEQ ID NO: 185418 - protein, 13 aa, Homo sapiens
  CDR3 for beta chain variable domain of TCR clone 92709 (TRBV2, TRBJ1-1)
CASSEGGNTEAFF

SEQ ID NO: 185419 - protein, 15 aa, Homo sapiens
  CDR3 for alpha chain variable domain of TCR clone 92710 (TRAV8-4, TRAJ9)
CAVTFNTGGFKNYLW

SEQ ID NO: 185420 - protein, 15 aa, Homo sapiens
  CDR3 for beta chain variable domain of TCR clone 92710 (TRBV7-9, TRBJ2-2)
CASSPETGAGGELFF

SEQ ID NO: 185421 - protein, 14 aa, Homo sapiens
  CDR3 for alpha chain variable domain of TCR clone 92711 (TRAV12-1, TRAJ3)
CGAARYRSASKIIF

SEQ ID NO: 185422 - protein, 15 aa, Homo sapiens
  CDR3 for beta chain variable domain of TCR clone 92711 (TRBV7-2, TRBJ2-6)
CASSREGSGANVLTF

SEQ ID NO: 185423 - protein, 13 aa, Homo sapiens
  CDR3 for alpha chain variable domain of TCR clone 92712 (TRAV12-1, TRAJ7)
CVVNMRGNNRPAF

SEQ ID NO: 185424 - protein, 15 aa, Homo sapiens
  CDR3 for beta chain variable domain of TCR clone 92712 (TRBV27, TRBJ2-3)
CASSLGLAATDTQYF

SEQ ID NO: 185425 - protein, 12 aa, Homo sapiens
  CDR3 for alpha chain variable domain of TCR clone 92713 (TRAV13-1, TRAJ11)
CAGPSGYSTLTF

SEQ ID NO: 185426 - protein, 13 aa, Homo sapiens
  CDR3 for beta chain variable domain of TCR clone 92713 (TRBV12-4, TRBJ2-1)
CASSLSPSNDQFF

SEQ ID NO: 185427 - protein, 14 aa, Homo sapiens
  CDR3 for alpha chain variable domain of TCR clone 92714 (TRAV8-4, TRAJ8)
CAVSEDTGSQKLVF

SEQ ID NO: 185428 - protein, 16 aa, Homo sapiens
  CDR3 for beta chain variable domain of TCR clone 92714 (TRBV7-3, TRBJ2-1)
CASSKPLAGGYNEQFF

SEQ ID NO: 185429 - protein, 16 aa, Homo sapiens
  CDR3 for alpha chain variable domain of TCR clone 92715 (TRAV30, TRAJ24)
CGTEIVDADSWGKFQF

SEQ ID NO: 185430 - protein, 15 aa, Homo sapiens
  CDR3 for beta chain variable domain of TCR clone 92715 (TRBV20-1, TRBJ2-7)
CSARDRASGMDEQYF

SEQ ID NO: 185431 - protein, 12 aa, Homo sapiens
  CDR3 for alpha chain variable domain of TCR clone 92716 (TRAV23/DV6, TRAJ31)
CAARRIGARLLF

SEQ ID NO: 185432 - protein, 13 aa, Homo sapiens
  CDR3 for beta chain variable domain of TCR clone 92716 (TRBV28, TRBJ2-7)
CASKAGGVYEQYF

SEQ ID NO: 185433 - protein, 10 aa, Homo sapiens
  CDR3 for alpha chain variable domain of TCR clone 92717 (TRAV8-3, TRAJ43)
CAVALAAMRF

SEQ ID NO: 185434 - protein, 14 aa, Homo sapiens
  CDR3 for beta chain variable domain of TCR clone 92717 (TRBV4-2, TRBJ2-1)
CASGLDRAYNEQFF

SEQ ID NO: 185435 - protein, 12 aa, Homo sapiens
  CDR3 for alpha chain variable domain of TCR clone 92718 (TRAV21, TRAJ58)
CAAETSGSRFTF

SEQ ID NO: 185436 - protein, 15 aa, Homo sapiens
  CDR3 for beta chain variable domain of TCR clone 92718 (TRBV20-1, TRBJ2-7)
CSARDPVKGEGEQYF

SEQ ID NO: 185437 - protein, 14 aa, Homo sapiens
  CDR3 for alpha chain variable domain of TCR clone 92719 (TRAV12-2, TRAJ44)
CAVNPAGTASKLTF

SEQ ID NO: 185438 - protein, 16 aa, Homo sapiens
  CDR3 for beta chain variable domain of TCR clone 92719 (TRBV24-1, TRBJ2-3)
CATSDPGTGATDTQYF

SEQ ID NO: 185439 - protein, 16 aa, Homo sapiens
  CDR3 for alpha chain variable domain of TCR clone 92720 (TRAV3, TRAJ37)
CAVRPHGSGNTGKIIF

SEQ ID NO: 185440 - protein, 13 aa, Homo sapiens
  CDR3 for beta chain variable domain of TCR clone 92720 (TRBV2, TRBJ1-5)
CASGTGGYQPQHF

SEQ ID NO: 185441 - protein, 18 aa, Homo sapiens
  CDR3 for alpha chain variable domain of TCR clone 92721 (TRAV21, TRAJ52)
CAVRPSPAGGTSYGKLTF

SEQ ID NO: 185442 - protein, 16 aa, Homo sapiens
  CDR3 for beta chain variable domain of TCR clone 92721 (TRBV28, TRBJ2-7)
CASSLFFETGGPEQYF

SEQ ID NO: 185443 - protein, 14 aa, Homo sapiens
  CDR3 for alpha chain variable domain of TCR clone 92722 (TRAV2, TRAJ9)
CAAEDRSGGFKTIF

SEQ ID NO: 185444 - protein, 16 aa, Homo sapiens
  CDR3 for beta chain variable domain of TCR clone 92722 (TRBV15, TRBJ2-7)
CATSRDGGIPSYEQYF

SEQ ID NO: 185445 - protein, 13 aa, Homo sapiens
  CDR3 for alpha chain variable domain of TCR clone 92723 (TRAV2, TRAJ40)
CAVVPSGTYKYIF

SEQ ID NO: 185446 - protein, 12 aa, Homo sapiens
  CDR3 for beta chain variable domain of TCR clone 92723 (TRBV11-2, TRBJ2-1)
CASSPGNNEQFF

SEQ ID NO: 185447 - protein, 14 aa, Homo sapiens
  CDR3 for alpha chain variable domain of TCR clone 92724 (TRAV17, TRAJ8)
CATDLNTGFQKLVF

SEQ ID NO: 185448 - protein, 12 aa, Homo sapiens
  CDR3 for beta chain variable domain of TCR clone 92724 (TRBV7-9, TRBJ2-7)
CASSLEGYEQYF

SEQ ID NO: 185449 - protein, 13 aa, Homo sapiens
  CDR3 for alpha chain variable domain of TCR clone 92725 (TRAV2, TRAJ24)
CAVPTDSWGKLQF

SEQ ID NO: 185450 - protein, 13 aa, Homo sapiens
  CDR3 for beta chain variable domain of TCR clone 92725 (TRBV10-3, TRBJ2-7)
CASKLAVNYEQYF

SEQ ID NO: 185451 - protein, 14 aa, Homo sapiens
  CDR3 for alpha chain variable domain of TCR clone 92726 (TRAV36/DV7, TRAJ57)
CAVGFPGGSEKLVF

SEQ ID NO: 185452 - protein, 15 aa, Homo sapiens
  CDR3 for beta chain variable domain of TCR clone 92726 (TRBV7-2, TRBJ2-2)
CASSETGQGTGELFF

SEQ ID NO: 185453 - protein, 11 aa, Homo sapiens
  CDR3 for alpha chain variable domain of TCR clone 92727 (TRAV35, TRAJ30)
CAGPGDDRIIF

SEQ ID NO: 185454 - protein, 15 aa, Homo sapiens
  CDR3 for beta chain variable domain of TCR clone 92727 (TRBV2, TRBJ2-7)
CASSEGLARSYEQYF

SEQ ID NO: 185455 - protein, 14 aa, Homo sapiens
  CDR3 for alpha chain variable domain of TCR clone 92728 (TRAV8-1, TRAJ23)
CVVGTYNQGGKLIF

SEQ ID NO: 185456 - protein, 16 aa, Homo sapiens
  CDR3 for beta chain variable domain of TCR clone 92728 (TRBV18, TRBJ1-5)
CASSPSTGNSNQPQHF

SEQ ID NO: 185457 - protein, 16 aa, Homo sapiens
  CDR3 for alpha chain variable domain of TCR clone 92729 (TRAV35, TRAJ37)
CCAFLRGSSNTGKLIF

SEQ ID NO: 185458 - protein, 13 aa, Homo sapiens
  CDR3 for beta chain variable domain of TCR clone 92729 (TRBV2, TRBJ1-2)
CASSVRGNYGYTF

SEQ ID NO: 185459 - protein, 14 aa, Homo sapiens
  CDR3 for alpha chain variable domain of TCR clone 92730 (TRAV35, TRAJ50)
CAGHRKTYYDKVIF

SEQ ID NO: 185460 - protein, 13 aa, Homo sapiens
  CDR3 for beta chain variable domain of TCR clone 92730 (TRBV7-7, TRBJ2-3)
CASSLSRADTQYF

SEQ ID NO: 185461 - protein, 14 aa, Homo sapiens
  CDR3 for alpha chain variable domain of TCR clone 92731 (TRAV16, TRAJ37)
CALDISGNTGKLIF

SEQ ID NO: 185462 - protein, 14 aa, Homo sapiens
  CDR3 for beta chain variable domain of TCR clone 92731 (TRBV7-6, TRBJ2-7)
CASSFRQGAGEQYF

SEQ ID NO: 185463 - protein, 14 aa, Homo sapiens
  CDR3 for alpha chain variable domain of TCR clone 92732 (TRAV23/DV6, TRAJ22)
CAASVSGSASQLTF

SEQ ID NO: 185464 - protein, 16 aa, Homo sapiens
  CDR3 for beta chain variable domain of TCR clone 92732 (TRBV19, TRBJ2-2)
CASSFPGQGLAGELFF

SEQ ID NO: 185465 - protein, 12 aa, Homo sapiens
  CDR3 for alpha chain variable domain of TCR clone 92733 (TRAV29/DV5, TRAJ26)
CAAIPSGQNFVF

SEQ ID NO: 185466 - protein, 15 aa, Homo sapiens
  CDR3 for beta chain variable domain of TCR clone 92733 (TRBV19, TRBJ1-5)
CASSDSGPRNQTQHF

SEQ ID NO: 185467 - protein, 17 aa, Homo sapiens
  CDR3 for alpha chain variable domain of TCR clone 92734 (TRAV3, TRAJ42)
CAVRDRDYGGSQGNLIF

SEQ ID NO: 185468 - protein, 13 aa, Homo sapiens
  CDR3 for beta chain variable domain of TCR clone 92734 (TRBV11-2, TRBJ2-5)
CASSFSSQETQYF

SEQ ID NO: 185469 - protein, 12 aa, Homo sapiens
  CDR3 for alpha chain variable domain of TCR clone 92735 (TRAV25, TRAJ29)
CAGPRGNTPLVF

SEQ ID NO: 185470 - protein, 16 aa, Homo sapiens
  CDR3 for beta chain variable domain of TCR clone 92735 (TRBV11-2, TRBJ1-1)
CASSLRQGGEHSKAFF

SEQ ID NO: 185471 - protein, 14 aa, Homo sapiens
  CDR3 for alpha chain variable domain of TCR clone 92736 (TRAV38-1, TRAJ45)
CASHSGGGADGLTF

SEQ ID NO: 185472 - protein, 16 aa, Homo sapiens
  CDR3 for beta chain variable domain of TCR clone 92736 (TRBV4-1, TRBJ1-1)
CASSQDAGMGNTEAFF

SEQ ID NO: 185473 - protein, 14 aa, Homo sapiens
  CDR3 for alpha chain variable domain of TCR clone 92737 (TRAV12-2, TRAJ13)
CAMKKTGGYQKVTF

SEQ ID NO: 185474 - protein, 10 aa, Homo sapiens
  CDR3 for beta chain variable domain of TCR clone 92737 (TRBV12-4, TRBJ1-2)
CASSFIWLHL

SEQ ID NO: 185475 - protein, 16 aa, Homo sapiens
  CDR3 for alpha chain variable domain of TCR clone 92738 (TRAV30, TRAJ24)
CGTEIVDADSWGKFQF

SEQ ID NO: 185476 - protein, 15 aa, Homo sapiens
  CDR3 for beta chain variable domain of TCR clone 92738 (TRBV5-7, TRBJ2-7)
CASSLGPGRGHEQYF

SEQ ID NO: 185477 - protein, 13 aa, Homo sapiens
  CDR3 for alpha chain variable domain of TCR clone 92739 (TRAV36/DV7, TRAJ37)
CAVFSSNTGKLIF

SEQ ID NO: 185478 - protein, 17 aa, Homo sapiens
  CDR3 for beta chain variable domain of TCR clone 92739 (TRBV7-8, TRBJ2-6)
CASSAGTGGAGANVLTF

SEQ ID NO: 185479 - protein, 15 aa, Homo sapiens
  CDR3 for alpha chain variable domain of TCR clone 92740 (TRAV17, TRAJ35)
CATAFVIGFGNVLHC

SEQ ID NO: 185480 - protein, 14 aa, Homo sapiens
  CDR3 for beta chain variable domain of TCR clone 92740 (TRBV7-8, TRBJ2-3)
CASSLEAGTDTQYF

SEQ ID NO: 185481 - protein, 11 aa, Homo sapiens
  CDR3 for alpha chain variable domain of TCR clone 92741 (TRAV12-2, TRAJ3)
CAVKRASKIIF

SEQ ID NO: 185482 - protein, 13 aa, Homo sapiens
  CDR3 for beta chain variable domain of TCR clone 92741 (TRBV7-9, TRBJ2-2)
CASSLDPTGELFF

SEQ ID NO: 185483 - protein, 15 aa, Homo sapiens
  CDR3 for alpha chain variable domain of TCR clone 92742 (TRAV3, TRAJ22)
CAVRDRGGSARQLTF

SEQ ID NO: 185484 - protein, 16 aa, Homo sapiens
  CDR3 for beta chain variable domain of TCR clone 92742 (TRBV5-4, TRBJ2-3)
CASQQPEAGGADTQYF

SEQ ID NO: 185485 - protein, 14 aa, Homo sapiens
  CDR3 for alpha chain variable domain of TCR clone 92743 (TRAV20, TRAJ22)
CAVALGGSARQLTF

SEQ ID NO: 185486 - protein, 15 aa, Homo sapiens
  CDR3 for beta chain variable domain of TCR clone 92743 (TRBV7-2, TRBJ1-1)
CVSSFAGDRDTEAFF

SEQ ID NO: 185487 - protein, 14 aa, Homo sapiens
  CDR3 for alpha chain variable domain of TCR clone 92744 (TRAV13-1, TRAJ35)
CVASKGSFGNVLHC

SEQ ID NO: 185488 - protein, 13 aa, Homo sapiens
  CDR3 for beta chain variable domain of TCR clone 92744 (TRBV7-3, TRBJ1-1)
CASSQDWGAEAFF

SEQ ID NO: 185489 - protein, 12 aa, Homo sapiens
  CDR3 for alpha chain variable domain of TCR clone 92745 (TRAV17, TRAJ30)
CATDARDDKIIF

SEQ ID NO: 185490 - protein, 18 aa, Homo sapiens
  CDR3 for beta chain variable domain of TCR clone 92745 (TRBV4-1, TRBJ2-1)
CISAPAAKGGELYNEQFF

SEQ ID NO: 185491 - protein, 15 aa, Homo sapiens
  CDR3 for alpha chain variable domain of TCR clone 92746 (TRAV8-6, TRAJ26)
CAVSDQSPGGQNFAF

SEQ ID NO: 185492 - protein, 13 aa, Homo sapiens
  CDR3 for beta chain variable domain of TCR clone 92746 (TRBV27, TRBJ2-7)
CASSLRHRYEQYF

SEQ ID NO: 185493 - protein, 18 aa, Homo sapiens
  CDR3 for alpha chain variable domain of TCR clone 92747 (TRAV12-3, TRAJ52)
CAMSRTNAGGTSYGKLTF

SEQ ID NO: 185494 - protein, 17 aa, Homo sapiens
  CDR3 for beta chain variable domain of TCR clone 92747 (TRBV13, TRBJ2-3)
CASSISRVAGGRNTQYF

SEQ ID NO: 185495 - protein, 11 aa, Homo sapiens
  CDR3 for alpha chain variable domain of TCR clone 92748 (TRAV2, TRAJ33)
CAVDSNYQLIW

SEQ ID NO: 185496 - protein, 12 aa, Homo sapiens
  CDR3 for beta chain variable domain of TCR clone 92748 (TRBV11-2, TRBJ2-2)
CASSLGGGELFF

SEQ ID NO: 185497 - protein, 13 aa, Homo sapiens
  CDR3 for alpha chain variable domain of TCR clone 92749 (TRAV21, TRAJ44)
CAGMTGTASKLTF

SEQ ID NO: 185498 - protein, 15 aa, Homo sapiens
  CDR3 for beta chain variable domain of TCR clone 92749 (TRBV7-9, TRBJ1-4)
CASSARTGGNEKLFF

SEQ ID NO: 185499 - protein, 14 aa, Homo sapiens
  CDR3 for alpha chain variable domain of TCR clone 92750 (TRAV12-2, TRAJ17)
CAVNIKAAGNKLTF

SEQ ID NO: 185500 - protein, 15 aa, Homo sapiens
  CDR3 for beta chain variable domain of TCR clone 92750 (TRBV6-6, TRBJ2-5)
CASSYGKIIQETQYF

SEQ ID NO: 185501 - protein, 15 aa, Homo sapiens
  CDR3 for alpha chain variable domain of TCR clone 92751 (TRAV3, TRAJ11)
CAVRDRGSGYSTLTF

SEQ ID NO: 185502 - protein, 17 aa, Homo sapiens
  CDR3 for beta chain variable domain of TCR clone 92751 (TRBV7-8, TRBJ2-6)
CASSAGTGGAGANVLTF

SEQ ID NO: 185503 - protein, 14 aa, Homo sapiens
  CDR3 for alpha chain variable domain of TCR clone 92752 (TRAV16, TRAJ31)
CSKWRRGDNARLMF

SEQ ID NO: 185504 - protein, 16 aa, Homo sapiens
  CDR3 for beta chain variable domain of TCR clone 92752 (TRBV28, TRBJ2-7)
CASSLFFEKGGPEQYF

SEQ ID NO: 185505 - protein, 14 aa, Homo sapiens
  CDR3 for alpha chain variable domain of TCR clone 92753 (TRAV1-2, TRAJ16)
CAVNRFSDGQKLLF

SEQ ID NO: 185506 - protein, 16 aa, Homo sapiens
  CDR3 for beta chain variable domain of TCR clone 92753 (TRBV19, TRBJ2-3)
CASSPEWDRGTETQYF

SEQ ID NO: 185507 - protein, 12 aa, Homo sapiens
  CDR3 for alpha chain variable domain of TCR clone 92754 (TRAV8-6, TRAJ13)
CAVSGGYQKVTF

SEQ ID NO: 185508 - protein, 15 aa, Homo sapiens
  CDR3 for beta chain variable domain of TCR clone 92754 (TRBV20-1, TRBJ2-7)
CSARDRVSGMDEQYF

SEQ ID NO: 185509 - protein, 14 aa, Homo sapiens
  CDR3 for alpha chain variable domain of TCR clone 92755 (TRAV1-2, TRAJ16)
CAVNRFSDGQKLLF

SEQ ID NO: 185510 - protein, 16 aa, Homo sapiens
  CDR3 for beta chain variable domain of TCR clone 92755 (TRBV3-1, TRBJ1-2)
CASSQGQGVQRDGYTF

SEQ ID NO: 185511 - protein, 11 aa, Homo sapiens
  CDR3 for alpha chain variable domain of TCR clone 92756 (TRAV12-1, TRAJ30)
CVVNGQDKIIV

SEQ ID NO: 185512 - protein, 12 aa, Homo sapiens
  CDR3 for beta chain variable domain of TCR clone 92756 (TRBV27, TRBJ2-2)
CASKLFTGELFF

SEQ ID NO: 185513 - protein, 16 aa, Homo sapiens
  CDR3 for alpha chain variable domain of TCR clone 92757 (TRAV1-2, TRAJ10)
CAVRGVLTGGGNKLTF

SEQ ID NO: 185514 - protein, 14 aa, Homo sapiens
  CDR3 for beta chain variable domain of TCR clone 92757 (TRBV7-9, TRBJ2-3)
CASSLEDGTDTQYF

SEQ ID NO: 185515 - protein, 12 aa, Homo sapiens
  CDR3 for alpha chain variable domain of TCR clone 92758 (TRAV13-2, TRAJ23)
CAERHRGGKLIF

SEQ ID NO: 185516 - protein, 18 aa, Homo sapiens
  CDR3 for beta chain variable domain of TCR clone 92758 (TRBV7-9, TRBJ2-7)
CASSLTTSGSRTWYEQYF

SEQ ID NO: 185517 - protein, 16 aa, Homo sapiens
  CDR3 for alpha chain variable domain of TCR clone 92759 (TRAV30, TRAJ24)
CGTEIVDADSWGKFQF

SEQ ID NO: 185518 - protein, 14 aa, Homo sapiens
  CDR3 for beta chain variable domain of TCR clone 92759 (TRBV6-3, TRBJ2-7)
CASSYSGDHYEQYF

SEQ ID NO: 185519 - protein, 15 aa, Homo sapiens
  CDR3 for alpha chain variable domain of TCR clone 92760 (TRAV2, TRAJ9)
CAVEDRGTGGFKTIF

SEQ ID NO: 185520 - protein, 16 aa, Homo sapiens
  CDR3 for beta chain variable domain of TCR clone 92760 (TRBV6-1, TRBJ2-5)
CASSETLDRGAETQYF

SEQ ID NO: 185521 - protein, 12 aa, Homo sapiens
  CDR3 for alpha chain variable domain of TCR clone 92761 (TRAV12-3, TRAJ17)
CAMTLTCNKLTF

SEQ ID NO: 185522 - protein, 15 aa, Homo sapiens
  CDR3 for beta chain variable domain of TCR clone 92761 (TRBV20-1, TRBJ2-7)
CSARDHVSGMDEQYF

SEQ ID NO: 185523 - protein, 14 aa, Homo sapiens
  CDR3 for alpha chain variable domain of TCR clone 92762 (TRAV35, TRAJ50)
CAGHRKTFYDKVIF

SEQ ID NO: 185524 - protein, 13 aa, Homo sapiens
  CDR3 for beta chain variable domain of TCR clone 92762 (TRBV7-7, TRBJ2-3)
CASSLSRADTQYF

SEQ ID NO: 185525 - protein, 13 aa, Homo sapiens
  CDR3 for alpha chain variable domain of TCR clone 92763 (TRAV36/DV7, TRAJ7)
CAGTRYGNNRLAL

SEQ ID NO: 185526 - protein, 14 aa, Homo sapiens
  CDR3 for beta chain variable domain of TCR clone 92763 (TRBV19, TRBJ2-1)
CASPTFVLSGEQFF

SEQ ID NO: 185527 - protein, 16 aa, Homo sapiens
  CDR3 for alpha chain variable domain of TCR clone 92764 (TRAV17, TRAJ52)
CATGITGGTSYGKLTF

SEQ ID NO: 185528 - protein, 12 aa, Homo sapiens
  CDR3 for beta chain variable domain of TCR clone 92764 (TRBV7-3, TRBJ2-1)
CASSFINNEQFF

SEQ ID NO: 185529 - protein, 14 aa, Homo sapiens
  CDR3 for alpha chain variable domain of TCR clone 92765 (TRAV9-2, TRAJ39)
CALYIYNAGNMLTF

SEQ ID NO: 185530 - protein, 16 aa, Homo sapiens
  CDR3 for beta chain variable domain of TCR clone 92765 (TRBV6-4, TRBJ1-2)
CASSEAVGDPNYGYTF

SEQ ID NO: 185531 - protein, 13 aa, Homo sapiens
  CDR3 for alpha chain variable domain of TCR clone 92766 (TRAV16, TRAJ26)
CITVLCLGQNFVF

SEQ ID NO: 185532 - protein, 14 aa, Homo sapiens
  CDR3 for beta chain variable domain of TCR clone 92766 (TRBV19, TRBJ2-5)
CASSMTGQQETQYF

SEQ ID NO: 185533 - protein, 13 aa, Homo sapiens
  CDR3 for alpha chain variable domain of TCR clone 92767 (TRAV21, TRAJ15)
CALANQAGTALIF

SEQ ID NO: 185534 - protein, 14 aa, Homo sapiens
  CDR3 for beta chain variable domain of TCR clone 92767 (TRBV27, TRBJ2-2)
CASSLGAATGELFF

SEQ ID NO: 185535 - protein, 11 aa, Homo sapiens
  CDR3 for alpha chain variable domain of TCR clone 92768 (TRAV27, TRAJ47)
SIVEYGKKLVF

SEQ ID NO: 185536 - protein, 18 aa, Homo sapiens
  CDR3 for beta chain variable domain of TCR clone 92768 (TRBV2, TRBJ2-1)
CASRGLAGGPRTYNEQFF

SEQ ID NO: 185537 - protein, 16 aa, Homo sapiens
  CDR3 for alpha chain variable domain of TCR clone 92769 (TRAV3, TRAJ18)
CAVRDGRGSTLGKLYF

SEQ ID NO: 185538 - protein, 15 aa, Homo sapiens
  CDR3 for beta chain variable domain of TCR clone 92769 (TRBV7-9, TRBJ1-6)
CASSSPGRGNSPLHF

SEQ ID NO: 185539 - protein, 15 aa, Homo sapiens
  CDR3 for alpha chain variable domain of TCR clone 92770 (TRAV26-1, TRAJ44)
CIVRANTGTASKLTF

SEQ ID NO: 185540 - protein, 16 aa, Homo sapiens
  CDR3 for beta chain variable domain of TCR clone 92770 (TRBV11-1, TRBJ1-1)
CATNPRDRAFNTEAFF

SEQ ID NO: 185541 - protein, 12 aa, Homo sapiens
  CDR3 for alpha chain variable domain of TCR clone 92771 (TRAV13-1, TRAJ21)
CAAKEGFNKFYF

SEQ ID NO: 185542 - protein, 18 aa, Homo sapiens
  CDR3 for beta chain variable domain of TCR clone 92771 (TRBV20-1, TRBJ2-6)
CSAETTPTHGSAANVLTF

SEQ ID NO: 185543 - protein, 16 aa, Homo sapiens
  CDR3 for alpha chain variable domain of TCR clone 92772 (TRAV3, TRAJ23)
CAVKIGIYNQGGKLIF

SEQ ID NO: 185544 - protein, 17 aa, Homo sapiens
  CDR3 for beta chain variable domain of TCR clone 92772 (TRBV10-3, TRBJ2-6)
CASSESTAPSGANVLTF

SEQ ID NO: 185545 - protein, 15 aa, Homo sapiens
  CDR3 for alpha chain variable domain of TCR clone 92773 (TRAV3, TRAJ22)
CAVRDRGGSARQLTF

SEQ ID NO: 185546 - protein, 16 aa, Homo sapiens
  CDR3 for beta chain variable domain of TCR clone 92773 (TRBV27, TRBJ1-6)
CASSPGTGLMGSPLHF

SEQ ID NO: 185547 - protein, 14 aa, Homo sapiens
  CDR3 for alpha chain variable domain of TCR clone 92774 (TRAV12-2, TRAJ3)
CAVSLYSSASKIIF

SEQ ID NO: 185548 - protein, 14 aa, Homo sapiens
  CDR3 for beta chain variable domain of TCR clone 92774 (TRBV27, TRBJ2-1)
CAGSIAGTYNEQFF

SEQ ID NO: 185549 - protein, 15 aa, Homo sapiens
  CDR3 for alpha chain variable domain of TCR clone 92775 (TRAV12-3, TRAJ27)
CAMRAYNTNAGKSTF

SEQ ID NO: 185550 - protein, 13 aa, Homo sapiens
  CDR3 for beta chain variable domain of TCR clone 92775 (TRBV15, TRBJ2-7)
CATSTTGHYEQYF

SEQ ID NO: 185551 - protein, 14 aa, Homo sapiens
  CDR3 for alpha chain variable domain of TCR clone 92776 (TRAV2, TRAJ9)
CAVEDRSGGFKTIF

SEQ ID NO: 185552 - protein, 13 aa, Homo sapiens
  CDR3 for beta chain variable domain of TCR clone 92776 (TRBV12-4, TRBJ1-5)
CASSPDRAQHQHF

SEQ ID NO: 185553 - protein, 14 aa, Homo sapiens
  CDR3 for alpha chain variable domain of TCR clone 92777 (TRAV12-2, TRAJ13)
CAVKKTGGYQKVTF

SEQ ID NO: 185554 - protein, 12 aa, Homo sapiens
  CDR3 for beta chain variable domain of TCR clone 92777 (TRBV7-2, TRBJ2-1)
CASSPQDIEQFF

SEQ ID NO: 185555 - protein, 12 aa, Homo sapiens
  CDR3 for alpha chain variable domain of TCR clone 92778 (TRAV16, TRAJ10)
CSRTGGGNKLTF

SEQ ID NO: 185556 - protein, 14 aa, Homo sapiens
  CDR3 for beta chain variable domain of TCR clone 92778 (TRBV13, TRBJ2-3)
CASSLGGPQRPQYF

SEQ ID NO: 185557 - protein, 14 aa, Homo sapiens
  CDR3 for alpha chain variable domain of TCR clone 92779 (TRAV16, TRAJ33)
CALSAMDSNYQLIW

SEQ ID NO: 185558 - protein, 15 aa, Homo sapiens
  CDR3 for beta chain variable domain of TCR clone 92779 (TRBV5-1, TRBJ2-3)
CASSVTSGSTDTQYF

SEQ ID NO: 185559 - protein, 15 aa, Homo sapiens
  CDR3 for alpha chain variable domain of TCR clone 92780 (TRAV4, TRAJ39)
YLVGPNNNAGNMLTF

SEQ ID NO: 185560 - protein, 13 aa, Homo sapiens
  CDR3 for beta chain variable domain of TCR clone 92780 (TRBV11-2, TRBJ2-5)
CASSSTGEETQYF

SEQ ID NO: 185561 - protein, 12 aa, Homo sapiens
  CDR3 for alpha chain variable domain of TCR clone 92781 (TRAV12-3, TRAJ4)
CAMTGAGTRLAE

SEQ ID NO: 185562 - protein, 14 aa, Homo sapiens
  CDR3 for beta chain variable domain of TCR clone 92781 (TRBV10-3, TRBJ1-1)
CAISDTDRGVEAFF

SEQ ID NO: 185563 - protein, 13 aa, Homo sapiens
  CDR3 for alpha chain variable domain of TCR clone 92782 (TRAV20, TRAJ31)
CAVQAIGGARLMF

SEQ ID NO: 185564 - protein, 13 aa, Homo sapiens
  CDR3 for beta chain variable domain of TCR clone 92782 (TRBV10-2, TRBJ2-7)
CASGASGGYEQYF

SEQ ID NO: 185565 - protein, 16 aa, Homo sapiens
  CDR3 for alpha chain variable domain of TCR clone 92783 (TRAV26-1, TRAJ48)
CIVREPPNFGNEKLTF

SEQ ID NO: 185566 - protein, 12 aa, Homo sapiens
  CDR3 for beta chain variable domain of TCR clone 92783 (TRBV19, TRBJ2-1)
CASSRQGDEQFF

SEQ ID NO: 185567 - protein, 17 aa, Homo sapiens
  CDR3 for alpha chain variable domain of TCR clone 92784 (TRAV35, TRAJ47)
GLLDCRTHTEYGNTLVF

SEQ ID NO: 185568 - protein, 11 aa, Homo sapiens
  CDR3 for beta chain variable domain of TCR clone 92784 (TRBV29-1, TRBJ1-1)
CSVEVGTRTFF

SEQ ID NO: 185569 - protein, 17 aa, Homo sapiens
  CDR3 for alpha chain variable domain of TCR clone 92785 (TRAV3, TRAJ42)
CAVRDRDYGGSQGNLIF

SEQ ID NO: 185570 - protein, 16 aa, Homo sapiens
  CDR3 for beta chain variable domain of TCR clone 92785 (TRBV7-3, TRBJ2-1)
CASSFTGRRSYNEQLF

SEQ ID NO: 185571 - protein, 12 aa, Homo sapiens
  CDR3 for alpha chain variable domain of TCR clone 92786 (TRAV12-3, TRAJ3)
CAIDRSASKIIF

SEQ ID NO: 185572 - protein, 17 aa, Homo sapiens
  CDR3 for beta chain variable domain of TCR clone 92786 (TRBV7-9, TRBJ2-3)
CASSLEEAGAYPGTQYF

SEQ ID NO: 185573 - protein, 14 aa, Homo sapiens
  CDR3 for alpha chain variable domain of TCR clone 92787 (TRAV2, TRAJ9)
CAVEDRSGGFKTIF

SEQ ID NO: 185574 - protein, 16 aa, Homo sapiens
  CDR3 for beta chain variable domain of TCR clone 92787 (TRBV7-3, TRBJ1-2)
CASSLGAPVPNYGYTF

SEQ ID NO: 185575 - protein, 14 aa, Homo sapiens
  CDR3 for alpha chain variable domain of TCR clone 92788 (TRAV17, TRAJ16)
CATADFSDGQKLLF

SEQ ID NO: 185576 - protein, 13 aa, Homo sapiens
  CDR3 for beta chain variable domain of TCR clone 92788 (TRBV10-3, TRBJ1-2)
CAINADLNYGYTF

SEQ ID NO: 185577 - protein, 14 aa, Homo sapiens
  CDR3 for alpha chain variable domain of TCR clone 92789 (TRAV12-2, TRAJ40)
CAVKIPPGTYKYIF

SEQ ID NO: 185578 - protein, 15 aa, Homo sapiens
  CDR3 for beta chain variable domain of TCR clone 92789 (TRBV2, TRBJ2-7)
CASSEGLARSYEQYF

SEQ ID NO: 185579 - protein, 15 aa, Homo sapiens
  CDR3 for alpha chain variable domain of TCR clone 92790 (TRAV3, TRAJ20)
CAVRDIKLCDYKLSF

SEQ ID NO: 185580 - protein, 15 aa, Homo sapiens
  CDR3 for beta chain variable domain of TCR clone 92790 (TRBV7-9, TRBJ1-6)
CASSSPGRGNSPLHF

SEQ ID NO: 185581 - protein, 16 aa, Homo sapiens
  CDR3 for alpha chain variable domain of TCR clone 92791 (TRAV13-1, TRAJ45)
CAASWESGGGADGLTF

SEQ ID NO: 185582 - protein, 16 aa, Homo sapiens
  CDR3 for beta chain variable domain of TCR clone 92791 (TRBV7-2, TRBJ2-6)
CASSERRASGANVLTF

SEQ ID NO: 185583 - protein, 12 aa, Homo sapiens
  CDR3 for alpha chain variable domain of TCR clone 92792 (TRAV12-1, TRAJ31)
CVSWNNNARLMF

SEQ ID NO: 185584 - protein, 15 aa, Homo sapiens
  CDR3 for beta chain variable domain of TCR clone 92792 (TRBV7-2, TRBJ1-5)
CASSLDRGQDQAQHF

SEQ ID NO: 185585 - protein, 15 aa, Homo sapiens
  CDR3 for alpha chain variable domain of TCR clone 92793 (TRAV3, TRAJ3)
CAVRDRDSSASKLIF

SEQ ID NO: 185586 - protein, 18 aa, Homo sapiens
  CDR3 for beta chain variable domain of TCR clone 92793 (TRBV25-1, TRBJ1-2)
CASSGLQNGQGLIFGYAF

SEQ ID NO: 185587 - protein, 14 aa, Homo sapiens
  CDR3 for alpha chain variable domain of TCR clone 92794 (TRAV1-2, TRAJ16)
CAVNRFSDGQKLLF

SEQ ID NO: 185588 - protein, 13 aa, Homo sapiens
  CDR3 for beta chain variable domain of TCR clone 92794 (TRBV7-9, TRBJ1-2)
CASSLKLNYGYTF

SEQ ID NO: 185589 - protein, 13 aa, Homo sapiens
  CDR3 for alpha chain variable domain of TCR clone 92795 (TRAV1-2, TRAJ9)
CAALNTGGFKTIF

SEQ ID NO: 185590 - protein, 14 aa, Homo sapiens
  CDR3 for beta chain variable domain of TCR clone 92795 (TRBV5-7, TRBJ1-5)
CASSRTGGGQPQHF

SEQ ID NO: 185591 - protein, 14 aa, Homo sapiens
  CDR3 for alpha chain variable domain of TCR clone 92796 (TRAV2, TRAJ9)
CAVEDRSGGFKTIF

SEQ ID NO: 185592 - protein, 19 aa, Homo sapiens
  CDR3 for beta chain variable domain of TCR clone 92796 (TRBV25-1, TRBJ2-2)
CAILVSRVDRGRKTGELFF

SEQ ID NO: 185593 - protein, 15 aa, Homo sapiens
  CDR3 for alpha chain variable domain of TCR clone 92797 (TRAV12-2, TRAJ53)
CAVNGGGGSSYKLTF

SEQ ID NO: 185594 - protein, 14 aa, Homo sapiens
  CDR3 for beta chain variable domain of TCR clone 92797 (TRBV19, TRBJ2-1)
CASPTFVLSGEQFF

SEQ ID NO: 185595 - protein, 15 aa, Homo sapiens
  CDR3 for alpha chain variable domain of TCR clone 92798 (TRAV17, TRAJ16)
CATALRFSDGQKLLF

SEQ ID NO: 185596 - protein, 16 aa, Homo sapiens
  CDR3 for beta chain variable domain of TCR clone 92798 (TRBV4-2, TRBJ1-2)
CASSQERRIHYIGYTF

SEQ ID NO: 185597 - protein, 19 aa, Homo sapiens
  CDR3 for alpha chain variable domain of TCR clone 92799 (TRAV26-1, TRAJ15)
CIVRVGLEVWNQAGTALIF

SEQ ID NO: 185598 - protein, 14 aa, Homo sapiens
  CDR3 for beta chain variable domain of TCR clone 92799 (TRBV19, TRBJ2-7)
CASSMGQGAIEQYF

SEQ ID NO: 185599 - protein, 13 aa, Homo sapiens
  CDR3 for alpha chain variable domain of TCR clone 92800 (TRAV3, TRAJ16)
CAVRDRNGQKLRF

SEQ ID NO: 185600 - protein, 15 aa, Homo sapiens
  CDR3 for beta chain variable domain of TCR clone 92800 (TRBV5-1, TRBJ2-1)
CASSPPRAPYNEQFF

SEQ ID NO: 185601 - protein, 14 aa, Homo sapiens
  CDR3 for alpha chain variable domain of TCR clone 92801 (TRAV26-1, TRAJ40)
CIVRLLSGTYKYIF

SEQ ID NO: 185602 - protein, 12 aa, Homo sapiens
  CDR3 for beta chain variable domain of TCR clone 92801 (TRBV11-2, TRBJ2-1)
CASSPGNNEQFF

SEQ ID NO: 185603 - protein, 16 aa, Homo sapiens
  CDR3 for alpha chain variable domain of TCR clone 92802 (TRAV30, TRAJ24)
CGTEIVDADSWGKFQF

SEQ ID NO: 185604 - protein, 12 aa, Homo sapiens
  CDR3 for beta chain variable domain of TCR clone 92802 (TRBV12-4, TRBJ2-3)
CASSSTTDTQHF

SEQ ID NO: 185605 - protein, 14 aa, Homo sapiens
  CDR3 for alpha chain variable domain of TCR clone 92803 (TRAV13-1, TRAJ44)
CAAKGTGTASKLTF

SEQ ID NO: 185606 - protein, 17 aa, Homo sapiens
  CDR3 for beta chain variable domain of TCR clone 92803 (TRBV7-3, TRBJ2-3)
CASSLMKRMRGADTQYF

SEQ ID NO: 185607 - protein, 12 aa, Homo sapiens
  CDR3 for alpha chain variable domain of TCR clone 92804 (TRAV12-1, TRAJ40)
CVVYSGTYKYIF

SEQ ID NO: 185608 - protein, 15 aa, Homo sapiens
  CDR3 for beta chain variable domain of TCR clone 92804 (TRBV11-2, TRBJ1-3)
CASSAHSSSGNTIYF

SEQ ID NO: 185609 - protein, 13 aa, Homo sapiens
  CDR3 for alpha chain variable domain of TCR clone 92805 (TRAV27, TRAJ29)
CAGAHSGNTPLVF

SEQ ID NO: 185610 - protein, 16 aa, Homo sapiens
  CDR3 for beta chain variable domain of TCR clone 92805 (TRBV11-2, TRBJ1-1)
CASSLRQGGEHSKAFF

SEQ ID NO: 185611 - protein, 14 aa, Homo sapiens
  CDR3 for alpha chain variable domain of TCR clone 92806 (TRAV26-1, TRAJ21)
CIVRPPYNFNKFYF

SEQ ID NO: 185612 - protein, 15 aa, Homo sapiens
  CDR3 for beta chain variable domain of TCR clone 92806 (TRBV19, TRBJ1-1)
CASTSGQIQNTEAFF

SEQ ID NO: 185613 - protein, 12 aa, Homo sapiens
  CDR3 for alpha chain variable domain of TCR clone 92807 (TRAV12-3, TRAJ34)
CAMGYNTDKLIF

SEQ ID NO: 185614 - protein, 17 aa, Homo sapiens
  CDR3 for beta chain variable domain of TCR clone 92807 (TRBV7-8, TRBJ2-6)
CASSAGTGGAGANVLTF

SEQ ID NO: 185615 - protein, 12 aa, Homo sapiens
  CDR3 for alpha chain variable domain of TCR clone 92808 (TRAV21, TRAJ45)
CATGGGADGLTF

SEQ ID NO: 185616 - protein, 12 aa, Homo sapiens
  CDR3 for beta chain variable domain of TCR clone 92808 (TRBV11-2, TRBJ2-2)
CASSLGGGELFF

SEQ ID NO: 185617 - protein, 11 aa, Homo sapiens
  CDR3 for alpha chain variable domain of TCR clone 92809 (TRAV17, TRAJ31)
CATDRTARLMF

SEQ ID NO: 185618 - protein, 14 aa, Homo sapiens
  CDR3 for beta chain variable domain of TCR clone 92809 (TRBV4-2, TRBJ2-3)
CASSQERGTYTQYF

SEQ ID NO: 185619 - protein, 14 aa, Homo sapiens
  CDR3 for alpha chain variable domain of TCR clone 92810 (TRAV12-2, TRAJ11)
CAVEGGSGYSTLTL

SEQ ID NO: 185620 - protein, 16 aa, Homo sapiens
  CDR3 for beta chain variable domain of TCR clone 92810 (TRBV6-1, TRBJ1-2)
CASSGAWQGRSHGYTF

SEQ ID NO: 185621 - protein, 12 aa, Homo sapiens
  CDR3 for alpha chain variable domain of TCR clone 92811 (TRAV12-3, TRAJ20)
CAMVRGDYKLSF

SEQ ID NO: 185622 - protein, 17 aa, Homo sapiens
  CDR3 for beta chain variable domain of TCR clone 92811 (TRBV25-1, TRBJ2-7)
CASSDARVVFSSYEQYF

SEQ ID NO: 185623 - protein, 13 aa, Homo sapiens
  CDR3 for alpha chain variable domain of TCR clone 92812 (TRAV38-2/DV8, TRAJ53)
CASGGGSNYKLTF

SEQ ID NO: 185624 - protein, 16 aa, Homo sapiens
  CDR3 for beta chain variable domain of TCR clone 92812 (TRBV28, TRBJ1-5)
CASRFRVAVQNQPQHF

SEQ ID NO: 185625 - protein, 17 aa, Homo sapiens
  CDR3 for alpha chain variable domain of TCR clone 92813 (TRAV12-3, TRAJ6)
CAMSARGGAGGSYIPNF

SEQ ID NO: 185626 - protein, 12 aa, Homo sapiens
  CDR3 for beta chain variable domain of TCR clone 92813 (TRBV12-4, TRBJ2-3)
CASSTLPDTQYF

SEQ ID NO: 185627 - protein, 14 aa, Homo sapiens
  CDR3 for alpha chain variable domain of TCR clone 92814 (TRAV25, TRAJ6)
CAGRESGGSYIPTF

SEQ ID NO: 185628 - protein, 17 aa, Homo sapiens
  CDR3 for beta chain variable domain of TCR clone 92814 (TRBV11-3, TRBJ2-1)
CASSLYPPGVEYNEQFF

SEQ ID NO: 185629 - protein, 15 aa, Homo sapiens
  CDR3 for alpha chain variable domain of TCR clone 92815 (TRAV8-3, TRAJ40)
CAAPSLGSGTYKYIF

SEQ ID NO: 185630 - protein, 16 aa, Homo sapiens
  CDR3 for beta chain variable domain of TCR clone 92815 (TRBV7-3, TRBJ2-3)
CASSLSGYRPEDTQCF

SEQ ID NO: 185631 - protein, 14 aa, Homo sapiens
  CDR3 for alpha chain variable domain of TCR clone 92816 (TRAV2, TRAJ9)
CAVEDRGGGFKTIF

SEQ ID NO: 185632 - protein, 15 aa, Homo sapiens
  CDR3 for beta chain variable domain of TCR clone 92816 (TRBV20-1, TRBJ2-7)
CSARDRVSGMDEQYF

SEQ ID NO: 185633 - protein, 12 aa, Homo sapiens
  CDR3 for alpha chain variable domain of TCR clone 92817 (TRAV12-3, TRAJ17)
CAMTLTGNKLTF

SEQ ID NO: 185634 - protein, 16 aa, Homo sapiens
  CDR3 for beta chain variable domain of TCR clone 92817 (TRBV25-1, TRBJ1-1)
CASSGDRDRGRIEAFF

SEQ ID NO: 185635 - protein, 15 aa, Homo sapiens
  CDR3 for alpha chain variable domain of TCR clone 92818 (TRAV17, TRAJ16)
CATALRFSDGQTLLF

SEQ ID NO: 185636 - protein, 12 aa, Homo sapiens
  CDR3 for beta chain variable domain of TCR clone 92818 (TRBV2, TRBJ2-7)
CASSDPDYEQYF

SEQ ID NO: 185637 - protein, 13 aa, Homo sapiens
  CDR3 for alpha chain variable domain of TCR clone 92819 (TRAV13-1, TRAJ39)
CAASIWAGNMLTF

SEQ ID NO: 185638 - protein, 14 aa, Homo sapiens
  CDR3 for beta chain variable domain of TCR clone 92819 (TRBV19, TRBJ2-1)
CASPTFVLSGEQFF

SEQ ID NO: 185639 - protein, 14 aa, Homo sapiens
  CDR3 for alpha chain variable domain of TCR clone 92820 (TRAV13-1, TRAJ44)
CAAKSTGTASKLTF

SEQ ID NO: 185640 - protein, 14 aa, Homo sapiens
  CDR3 for beta chain variable domain of TCR clone 92820 (TRBV19, TRBJ2-2)
CASSTLHRSGELFF

SEQ ID NO: 185641 - protein, 16 aa, Homo sapiens
  CDR3 for alpha chain variable domain of TCR clone 92821 (TRAV14/DV4, TRAJ54)
CAMREGRIQGAQKLVF

SEQ ID NO: 185642 - protein, 14 aa, Homo sapiens
  CDR3 for beta chain variable domain of TCR clone 92821 (TRBV5-5, TRBJ1-5)
CASSGQGVDQPQHF

SEQ ID NO: 185643 - protein, 15 aa, Homo sapiens
  CDR3 for alpha chain variable domain of TCR clone 92822 (TRAV17, TRAJ56)
CATEPFTGANSKLPF

SEQ ID NO: 185644 - protein, 15 aa, Homo sapiens
  CDR3 for beta chain variable domain of TCR clone 92822 (TRBV28, TRBJ1-5)
CASSRTGGYVQPQHF

SEQ ID NO: 185645 - protein, 18 aa, Homo sapiens
  CDR3 for alpha chain variable domain of TCR clone 92823 (TRAV21, TRAJ52)
CAVRPSPAGGTSYGKLTF

SEQ ID NO: 185646 - protein, 14 aa, Homo sapiens
  CDR3 for beta chain variable domain of TCR clone 92823 (TRBV6-3, TRBJ1-1)
CASRYTGESTEAFF

SEQ ID NO: 185647 - protein, 16 aa, Homo sapiens
  CDR3 for alpha chain variable domain of TCR clone 92824 (TRAV17, TRAJ35)
CATAEGGIGFGNVLHC

SEQ ID NO: 185648 - protein, 14 aa, Homo sapiens
  CDR3 for beta chain variable domain of TCR clone 92824 (TRBV25-1, TRBJ2-1)
CASSVAGLENEQFF

SEQ ID NO: 185649 - protein, 14 aa, Homo sapiens
  CDR3 for alpha chain variable domain of TCR clone 92825 (TRAV2, TRAJ11)
CAVVPNSGYSTLTF

SEQ ID NO: 185650 - protein, 15 aa, Homo sapiens
  CDR3 for beta chain variable domain of TCR clone 92825 (TRBV4-1, TRBJ1-3)
CASSQDLRVGNTLYF

SEQ ID NO: 185651 - protein, 13 aa, Homo sapiens
  CDR3 for alpha chain variable domain of TCR clone 92826 (TRAV12-1, TRAJ31)
CVVNINNNARLMF

SEQ ID NO: 185652 - protein, 15 aa, Homo sapiens
  CDR3 for beta chain variable domain of TCR clone 92826 (TRBV4-1, TRBJ1-2)
CASSQGQGAAYGYTF

SEQ ID NO: 185653 - protein, 17 aa, Homo sapiens
  CDR3 for alpha chain variable domain of TCR clone 92827 (TRAV2, TRAJ22)
ILQVREADAAEQRQLTF

SEQ ID NO: 185654 - protein, 16 aa, Homo sapiens
  CDR3 for beta chain variable domain of TCR clone 92827 (TRBV2, TRBJ2-5)
CASSETQGVGEETQHF

SEQ ID NO: 185655 - protein, 13 aa, Homo sapiens
  CDR3 for alpha chain variable domain of TCR clone 92828 (TRAV27, TRAJ41)
CAGEGNSGYALNF

SEQ ID NO: 185656 - protein, 16 aa, Homo sapiens
  CDR3 for beta chain variable domain of TCR clone 92828 (TRBV7-9, TRBJ1-2)
CASSLGFSSGEDGYTF

SEQ ID NO: 185657 - protein, 14 aa, Homo sapiens
  CDR3 for alpha chain variable domain of TCR clone 92829 (TRAV12-3, TRAJ9)
CVMSPNTGGSKTIF

SEQ ID NO: 185658 - protein, 12 aa, Homo sapiens
  CDR3 for beta chain variable domain of TCR clone 92829 (TRBV11-2, TRBJ2-2)
CASSLGGGELFF

SEQ ID NO: 185659 - protein, 13 aa, Homo sapiens
  CDR3 for alpha chain variable domain of TCR clone 92830 (TRAV12-2, TRAJ20)
CAVYPSNDYKLSF

SEQ ID NO: 185660 - protein, 15 aa, Homo sapiens
  CDR3 for beta chain variable domain of TCR clone 92830 (TRBV27, TRBJ2-5)
GASSLYPRGGETQYF

SEQ ID NO: 185661 - protein, 14 aa, Homo sapiens
  CDR3 for alpha chain variable domain of TCR clone 92831 (TRAV20, TRAJ41)
CAVQTRNSGYALNF

SEQ ID NO: 185662 - protein, 15 aa, Homo sapiens
  CDR3 for beta chain variable domain of TCR clone 92831 (TRBV5-1, TRBJ1-1)
CASSLGQGRFAEAFS

SEQ ID NO: 185663 - protein, 17 aa, Homo sapiens
  CDR3 for alpha chain variable domain of TCR clone 92832 (TRAV3, TRAJ38)
CAVRDCLNAGNNHIQTP

SEQ ID NO: 185664 - protein, 13 aa, Homo sapiens
  CDR3 for beta chain variable domain of TCR clone 92832 (TRBV12-4, TRBJ1-2)
CASSLRQGKGYTF

SEQ ID NO: 185665 - protein, 11 aa, Homo sapiens
  CDR3 for alpha chain variable domain of TCR clone 92833 (TRAV1-2, TRAJ40)
CAVPGTYKYIC

SEQ ID NO: 185666 - protein, 16 aa, Homo sapiens
  CDR3 for beta chain variable domain of TCR clone 92833 (TRBV29-1, TRBJ2-7)
CSVEVVGTSGSYEQYF

SEQ ID NO: 185667 - protein, 15 aa, Homo sapiens
  CDR3 for alpha chain variable domain of TCR clone 92834 (TRAV3, TRAJ29)
CAVRAPLSGNTHLVF

SEQ ID NO: 185668 - protein, 15 aa, Homo sapiens
  CDR3 for beta chain variable domain of TCR clone 92834 (TRBV28, TRBJ1-1)
CASRIKGGLNTEAFF

SEQ ID NO: 185669 - protein, 13 aa, Homo sapiens
  CDR3 for alpha chain variable domain of TCR clone 92835 (TRAV36/DV7, TRAJ53)
CALSGGSNYKLTF

SEQ ID NO: 185670 - protein, 12 aa, Homo sapiens
  CDR3 for beta chain variable domain of TCR clone 92835 (TRBV5-1, TRBJ2-7)
CASSLDSYEQYF

SEQ ID NO: 185671 - protein, 16 aa, Homo sapiens
  CDR3 for alpha chain variable domain of TCR clone 92836 (TRAV12-3, TRAJ53)
RAMSPGSGGSNYKLTF

SEQ ID NO: 185672 - protein, 13 aa, Homo sapiens
  CDR3 for beta chain variable domain of TCR clone 92836 (TRBV7-3, TRBJ1-1)
CASSQDWGAEALF

SEQ ID NO: 185673 - protein, 15 aa, Homo sapiens
  CDR3 for alpha chain variable domain of TCR clone 92837 (TRAV21, TRAJ32)
CAVNSYGGAPNKLIF

SEQ ID NO: 185674 - protein, 18 aa, Homo sapiens
  CDR3 for beta chain variable domain of TCR clone 92837 (TRBV7-9, TRBJ2-1)
CASSTGLAEGSSYNEQFF

SEQ ID NO: 185675 - protein, 11 aa, Homo sapiens
  CDR3 for alpha chain variable domain of TCR clone 92838 (TRAV2, TRAJ13)
CASGGYQKVTF

SEQ ID NO: 185676 - protein, 13 aa, Homo sapiens
  CDR3 for beta chain variable domain of TCR clone 92838 (TRBV20-1, TRBJ1-1)
CSAGVGGNTEAFF

SEQ ID NO: 185677 - protein, 16 aa, Homo sapiens
  CDR3 for alpha chain variable domain of TCR clone 92839 (TRAV12-1, TRAJ22)
CVVNLFLDRSARQLTF

SEQ ID NO: 185678 - protein, 13 aa, Homo sapiens
  CDR3 for beta chain variable domain of TCR clone 92839 (TRBV19, TRBJ2-7)
CASSTSGSYEQYF

SEQ ID NO: 185679 - protein, 15 aa, Homo sapiens
  CDR3 for alpha chain variable domain of TCR clone 92840 (TRAV21, TRAJ24)
CAARSSTDSWGKLPF

SEQ ID NO: 185680 - protein, 11 aa, Homo sapiens
  CDR3 for beta chain variable domain of TCR clone 92840 (TRBV11-2, TRBJ2-2)
CASSLPGELFF

SEQ ID NO: 185681 - protein, 11 aa, Homo sapiens
  CDR3 for alpha chain variable domain of TCR clone 92841 (TRAV2, TRAJ13)
CASGGYQKVTF

SEQ ID NO: 185682 - protein, 16 aa, Homo sapiens
  CDR3 for beta chain variable domain of TCR clone 92841 (TRBV6-1, TRBJ2-5)
CASSETLDMGAETQYF

SEQ ID NO: 185683 - protein, 14 aa, Homo sapiens
  CDR3 for alpha chain variable domain of TCR clone 92842 (TRAV2, TRAJ9)
CAVEDRSGGFKTIF

SEQ ID NO: 185684 - protein, 14 aa, Homo sapiens
  CDR3 for beta chain variable domain of TCR clone 92842 (TRBV20-1, TRBJ2-7)
CSAKRGRSSYEQYF

SEQ ID NO: 185685 - protein, 16 aa, Homo sapiens
  CDR3 for alpha chain variable domain of TCR clone 92843 (TRAV23/DV6, TRAJ9)
CAASIGGNTGGFKTIF

SEQ ID NO: 185686 - protein, 16 aa, Homo sapiens
  CDR3 for beta chain variable domain of TCR clone 92843 (TRBV7-2, TRBJ2-5)
CASSLAVSGRGETQYF

SEQ ID NO: 185687 - protein, 14 aa, Homo sapiens
  CDR3 for alpha chain variable domain of TCR clone 92844 (TRAV23/DV6, TRAJ24)
CAASLSDSWGKLQF

SEQ ID NO: 185688 - protein, 12 aa, Homo sapiens
  CDR3 for beta chain variable domain of TCR clone 92844 (TRBV11-2, TRBJ2-2)
CASSLGGGELFF

SEQ ID NO: 185689 - protein, 13 aa, Homo sapiens
  CDR3 for alpha chain variable domain of TCR clone 92845 (TRAV2, TRAJ5)
CAVPDTGRRALTF

SEQ ID NO: 185690 - protein, 15 aa, Homo sapiens
  CDR3 for beta chain variable domain of TCR clone 92845 (TRBV7-2, TRBJ2-2)
CASSTRTGYTGELYF

SEQ ID NO: 185691 - protein, 14 aa, Homo sapiens
  CDR3 for alpha chain variable domain of TCR clone 92846 (TRAV26-1, TRAJ38)
CIADNAGNNRKLIW

SEQ ID NO: 185692 - protein, 15 aa, Homo sapiens
  CDR3 for beta chain variable domain of TCR clone 92846 (TRBV4-1, TRBJ1-1)
CASSQGWGHYTEAFF

SEQ ID NO: 185693 - protein, 14 aa, Homo sapiens
  CDR3 for alpha chain variable domain of TCR clone 92847 (TRAV1-2, TRAJ16)
CAVNRFSDGQKLLF

SEQ ID NO: 185694 - protein, 13 aa, Homo sapiens
  CDR3 for beta chain variable domain of TCR clone 92847 (TRBV7-9, TRBJ1-2)
CASSSKQNYGYTF

SEQ ID NO: 185695 - protein, 17 aa, Homo sapiens
  CDR3 for alpha chain variable domain of TCR clone 92848 (TRAV3, TRAJ12)
CAVRDGGRMDSSYKLIF

SEQ ID NO: 185696 - protein, 16 aa, Homo sapiens
  CDR3 for beta chain variable domain of TCR clone 92848 (TRBV5-7, TRBJ1-4)
CASSPSGGLKTEKLFF

SEQ ID NO: 185697 - protein, 14 aa, Homo sapiens
  CDR3 for alpha chain variable domain of TCR clone 92849 (TRAV1-2, TRAJ16)
CAVNRFSDGQKLLF

SEQ ID NO: 185698 - protein, 15 aa, Homo sapiens
  CDR3 for beta chain variable domain of TCR clone 92849 (TRBV5-1, TRBJ1-1)
CASSLSDLGGTEAFF

SEQ ID NO: 185699 - protein, 18 aa, Homo sapiens
  CDR3 for alpha chain variable domain of TCR clone 92850 (TRAV26-2, TRAJ33)
CCVLLNPEEPASNYQLIW

SEQ ID NO: 185700 - protein, 13 aa, Homo sapiens
  CDR3 for beta chain variable domain of TCR clone 92850 (TRBV24-1, TRBJ2-2)
CATSDWSTGELFF

SEQ ID NO: 185701 - protein, 14 aa, Homo sapiens
  CDR3 for alpha chain variable domain of TCR clone 92851 (TRAV25, TRAJ27)
CAGEHLTNAGKSTF

SEQ ID NO: 185702 - protein, 12 aa, Homo sapiens
  CDR3 for beta chain variable domain of TCR clone 92851 (TRBV7-3, TRBJ2-1)
CASSFINNEQFF

SEQ ID NO: 185703 - protein, 13 aa, Homo sapiens
  CDR3 for alpha chain variable domain of TCR clone 92852 (TRAV5, TRAJ30)
CAEIANRDDKIIF

SEQ ID NO: 185704 - protein, 15 aa, Homo sapiens
  CDR3 for beta chain variable domain of TCR clone 92852 (TRBV7-2, TRBJ2-7)
CASSLKGALTYEQYF

SEQ ID NO: 185705 - protein, 15 aa, Homo sapiens
  CDR3 for alpha chain variable domain of TCR clone 92853 (TRAV29/DV5, TRAJ42)
CAAKTDGGSQGNLIF

SEQ ID NO: 185706 - protein, 15 aa, Homo sapiens
  CDR3 for beta chain variable domain of TCR clone 92853 (TRBV5-1, TRBJ2-2)
CASNSQGGNTGELFF

SEQ ID NO: 185707 - protein, 13 aa, Homo sapiens
  CDR3 for alpha chain variable domain of TCR clone 92854 (TRAV12-1, TRAJ31)
CVVNMNNNARLMF

SEQ ID NO: 185708 - protein, 13 aa, Homo sapiens
  CDR3 for beta chain variable domain of TCR clone 92854 (TRBV19, TRBJ1-2)
CASSVPGQDGYTF

SEQ ID NO: 185709 - protein, 15 aa, Homo sapiens
  CDR3 for alpha chain variable domain of TCR clone 92855 (TRAV12-3, TRAJ5)
CAMSGLVTGRRALTF

SEQ ID NO: 185710 - protein, 16 aa, Homo sapiens
  CDR3 for beta chain variable domain of TCR clone 92855 (TRBV20-1, TRBJ2-3)
CSARLHSAGAIDTQYF

SEQ ID NO: 185711 - protein, 13 aa, Homo sapiens
  CDR3 for alpha chain variable domain of TCR clone 92856 (TRAV13-1, TRAJ4)
CAASIGGYNNLIF

SEQ ID NO: 185712 - protein, 16 aa, Homo sapiens
  CDR3 for beta chain variable domain of TCR clone 92856 (TRBV20-1, TRBJ2-1)
CSAPGLAGSYSDEQFF

SEQ ID NO: 185713 - protein, 12 aa, Homo sapiens
  CDR3 for alpha chain variable domain of TCR clone 92857 (TRAV8-3, TRAJ32)
CAVEVVLQTSSS

SEQ ID NO: 185714 - protein, 15 aa, Homo sapiens
  CDR3 for beta chain variable domain of TCR clone 92857 (TRBV7-2, TRBJ2-1)
CASSSRTSREDEQFF

SEQ ID NO: 185715 - protein, 12 aa, Homo sapiens
  CDR3 for alpha chain variable domain of TCR clone 92858 (TRAV12-1, TRAJ40)
CVFYSGTYKYIF

SEQ ID NO: 185716 - protein, 18 aa, Homo sapiens
  CDR3 for beta chain variable domain of TCR clone 92858 (TRBV12-4, TRBJ2-2)
CASSLVAGTRGRTGEPFF

SEQ ID NO: 185717 - protein, 14 aa, Homo sapiens
  CDR3 for alpha chain variable domain of TCR clone 92859 (TRAV12-2, TRAJ45)
CALPERGGADGLTF

SEQ ID NO: 185718 - protein, 14 aa, Homo sapiens
  CDR3 for beta chain variable domain of TCR clone 92859 (TRBV18, TRBJ1-5)
CASSPGNSNHPQHF

SEQ ID NO: 185719 - protein, 15 aa, Homo sapiens
  CDR3 for alpha chain variable domain of TCR clone 92860 (TRAV3, TRAJ5)
CAVRDRKTGRRALTF

SEQ ID NO: 185720 - protein, 15 aa, Homo sapiens
  CDR3 for beta chain variable domain of TCR clone 92860 (TRBV7-8, TRBJ2-1)
CASSLADSLYNVQFF

SEQ ID NO: 185721 - protein, 18 aa, Homo sapiens
  CDR3 for alpha chain variable domain of TCR clone 92861 (TRAV21, TRAJ52)
CAVRPSPAGGTSYGKLTF

SEQ ID NO: 185722 - protein, 15 aa, Homo sapiens
  CDR3 for beta chain variable domain of TCR clone 92861 (TRBV11-2, TRBJ1-6)
CASTLRGTGNSPLHF

SEQ ID NO: 185723 - protein, 18 aa, Homo sapiens
  CDR3 for alpha chain variable domain of TCR clone 92862 (TRAV9-2, TRAJ52)
CALSRHNAGGTSYGKLTF

SEQ ID NO: 185724 - protein, 16 aa, Homo sapiens
  CDR3 for beta chain variable domain of TCR clone 92862 (TRBV9, TRBJ2-1)
CASSALGGIGNNEQFF

SEQ ID NO: 185725 - protein, 15 aa, Homo sapiens
  CDR3 for alpha chain variable domain of TCR clone 92863 (TRAV3, TRAJ22)
CAVRDRGGSARQLTF

SEQ ID NO: 185726 - protein, 16 aa, Homo sapiens
  CDR3 for beta chain variable domain of TCR clone 92863 (TRBV5-4, TRBJ2-3)
CASQQPGAGGGDTQYF

SEQ ID NO: 185727 - protein, 12 aa, Homo sapiens
  CDR3 for alpha chain variable domain of TCR clone 92864 (TRAV41, TRAJ58)
CAVETSGSRLTF

SEQ ID NO: 185728 - protein, 12 aa, Homo sapiens
  CDR3 for beta chain variable domain of TCR clone 92864 (TRBV11-2, TRBJ2-1)
CASSPGNNEQFF

SEQ ID NO: 185729 - protein, 14 aa, Homo sapiens
  CDR3 for alpha chain variable domain of TCR clone 92865 (TRAV5, TRAJ4)
CAASFSGGYNKLIF

SEQ ID NO: 185730 - protein, 16 aa, Homo sapiens
  CDR3 for beta chain variable domain of TCR clone 92865 (TRBV6-1, TRBJ2-5)
CASSETLDRGAETQYF

SEQ ID NO: 185731 - protein, 14 aa, Homo sapiens
  CDR3 for alpha chain variable domain of TCR clone 92866 (TRAV1-2, TRAJ16)
CAVNRLSDGQKLLF

SEQ ID NO: 185732 - protein, 16 aa, Homo sapiens
  CDR3 for beta chain variable domain of TCR clone 92866 (TRBV7-9, TRBJ1-2)
CASSLGFSSGEDGYTF

SEQ ID NO: 185733 - protein, 17 aa, Homo sapiens
  CDR3 for alpha chain variable domain of TCR clone 92867 (TRAV26-2, TRAJ42)
CILRDVGYGGSQGNLIF

SEQ ID NO: 185734 - protein, 16 aa, Homo sapiens
  CDR3 for beta chain variable domain of TCR clone 92867 (TRBV12-4, TRBJ2-7)
CAGSLIGGTGTYEQYF

SEQ ID NO: 185735 - protein, 15 aa, Homo sapiens
  CDR3 for alpha chain variable domain of TCR clone 92868 (TRAV3, TRAJ9)
CAVRDSNTGGFKTIF

SEQ ID NO: 185736 - protein, 16 aa, Homo sapiens
  CDR3 for beta chain variable domain of TCR clone 92868 (TRBV15, TRBJ2-5)
CATSTTTGQGMETQYF

SEQ ID NO: 185737 - protein, 15 aa, Homo sapiens
  CDR3 for alpha chain variable domain of TCR clone 92869 (TRAV8-4, TRAJ7)
CAVSAPSRGNNRLAF

SEQ ID NO: 185738 - protein, 17 aa, Homo sapiens
  CDR3 for beta chain variable domain of TCR clone 92869 (TRBV27, TRBJ2-1)
CLWEPSRWVGSKNEQFF

SEQ ID NO: 185739 - protein, 18 aa, Homo sapiens
  CDR3 for alpha chain variable domain of TCR clone 92870 (TRAV12-3, TRAJ52)
CAMSVGGAGGTSYGKLTF

SEQ ID NO: 185740 - protein, 13 aa, Homo sapiens
  CDR3 for beta chain variable domain of TCR clone 92870 (TRBV27, TRBJ1-1)
CASSLSIGAEAFF

SEQ ID NO: 185741 - protein, 10 aa, Homo sapiens
  CDR3 for alpha chain variable domain of TCR clone 92871 (TRAV8-4, TRAJ43)
CAVSADDMRF

SEQ ID NO: 185742 - protein, 15 aa, Homo sapiens
  CDR3 for beta chain variable domain of TCR clone 92871 (TRBV5-1, TRBJ2-3)
CASGVTSGSTDTQYF

SEQ ID NO: 185743 - protein, 17 aa, Homo sapiens
  CDR3 for alpha chain variable domain of TCR clone 92872 (TRAV4, TRAJ13)
CLVGVQGASGGYQKVTF

SEQ ID NO: 185744 - protein, 16 aa, Homo sapiens
  CDR3 for beta chain variable domain of TCR clone 92872 (TRBV28, TRBJ2-7)
CASSLFFETGGPEQYF

SEQ ID NO: 185745 - protein, 13 aa, Homo sapiens
  CDR3 for alpha chain variable domain of TCR clone 92873 (TRAV36/DV7, TRAJ38)
CVANAGNNSKLIW

SEQ ID NO: 185746 - protein, 14 aa, Homo sapiens
  CDR3 for beta chain variable domain of TCR clone 92873 (TRBV19, TRBJ2-1)
CASPTFVLSGEQFF

SEQ ID NO: 185747 - protein, 14 aa, Homo sapiens
  CDR3 for alpha chain variable domain of TCR clone 92874 (TRAV38-1, TRAJ45)
CASHSGGGADGLTF

SEQ ID NO: 185748 - protein, 14 aa, Homo sapiens
  CDR3 for beta chain variable domain of TCR clone 92874 (TRBV20-1, TRBJ1-1)
CGAQTRIGGTEAFF

SEQ ID NO: 185749 - protein, 11 aa, Homo sapiens
  CDR3 for alpha chain variable domain of TCR clone 92875 (TRAV12-3, TRAJ27)
CAMANAGKSTF

SEQ ID NO: 185750 - protein, 14 aa, Homo sapiens
  CDR3 for beta chain variable domain of TCR clone 92875 (TRBV4-1, TRBJ2-2)
CASSQAVNTGELFL

SEQ ID NO: 185751 - protein, 14 aa, Homo sapiens
  CDR3 for alpha chain variable domain of TCR clone 92876 (TRAV8-2, TRAJ11)
CVVSEKSGYSTRTF

SEQ ID NO: 185752 - protein, 16 aa, Homo sapiens
  CDR3 for beta chain variable domain of TCR clone 92876 (TRBV28, TRBJ2-1)
CASSSPEYPRDNEQFF

SEQ ID NO: 185753 - protein, 15 aa, Homo sapiens
  CDR3 for alpha chain variable domain of TCR clone 92877 (TRAV25, TRAJ53)
CPTSNSGGSNYKLTF

SEQ ID NO: 185754 - protein, 13 aa, Homo sapiens
  CDR3 for beta chain variable domain of TCR clone 92877 (TRBV11-2, TRBJ2-1)
CASSLDLVNEQFF

SEQ ID NO: 185755 - protein, 11 aa, Homo sapiens
  CDR3 for alpha chain variable domain of TCR clone 92878 (TRAV8-2, TRAJ26)
CVVTLLFGSEF

SEQ ID NO: 185756 - protein, 15 aa, Homo sapiens
  CDR3 for beta chain variable domain of TCR clone 92878 (TRBV11-2, TRBJ2-2)
CASSSDRVNAGELFF

SEQ ID NO: 185757 - protein, 13 aa, Homo sapiens
  CDR3 for alpha chain variable domain of TCR clone 92879 (TRAV21, TRAJ57)
CAVTQGGYEKLVF

SEQ ID NO: 185758 - protein, 15 aa, Homo sapiens
  CDR3 for beta chain variable domain of TCR clone 92879 (TRBV5-1, TRBJ1-1)
CASSSTTGTNTEAFF

SEQ ID NO: 185759 - protein, 11 aa, Homo sapiens
  CDR3 for alpha chain variable domain of TCR clone 92880 (TRAV1-1, TRAJ16)
CAAGGGQKLLF

SEQ ID NO: 185760 - protein, 15 aa, Homo sapiens
  CDR3 for beta chain variable domain of TCR clone 92880 (TRBV28, TRBJ1-2)
CASIPQGSDDYGYTF

SEQ ID NO: 185761 - protein, 15 aa, Homo sapiens
  CDR3 for alpha chain variable domain of TCR clone 92881 (TRAV8-3, TRAJ41)
CAVGSNSNSGYALNF

SEQ ID NO: 185762 - protein, 12 aa, Homo sapiens
  CDR3 for beta chain variable domain of TCR clone 92881 (TRBV11-2, TRBJ2-2)
CASSLGGGELFF

SEQ ID NO: 185763 - protein, 10 aa, Homo sapiens
  CDR3 for alpha chain variable domain of TCR clone 92882 (TRAV36/DV7, TRAJ49)
CALTGNQFYF

SEQ ID NO: 185764 - protein, 12 aa, Homo sapiens
  CDR3 for beta chain variable domain of TCR clone 92882 (TRBV28, TRBJ2-3)
CASSLYRDTQYF

SEQ ID NO: 185765 - protein, 12 aa, Homo sapiens
  CDR3 for alpha chain variable domain of TCR clone 92883 (TRAV12-1, TRAJ40)
CVVNGKTYKYIF

SEQ ID NO: 185766 - protein, 14 aa, Homo sapiens
  CDR3 for beta chain variable domain of TCR clone 92883 (TRBV7-9, TRBJ1-1)
CASSSTKGNTEAFF

SEQ ID NO: 185767 - protein, 12 aa, Homo sapiens
  CDR3 for alpha chain variable domain of TCR clone 92884 (TRAV12-3, TRAJ17)
CAMTLTGSKLTF

SEQ ID NO: 185768 - protein, 15 aa, Homo sapiens
  CDR3 for beta chain variable domain of TCR clone 92884 (TRBV11-3, TRBJ2-3)
CASLKDGREGDTQYF

SEQ ID NO: 185769 - protein, 14 aa, Homo sapiens
  CDR3 for alpha chain variable domain of TCR clone 92885 (TRAV13-1, TRAJ44)
CAAKATGTASKLTF

SEQ ID NO: 185770 - protein, 16 aa, Homo sapiens
  CDR3 for beta chain variable domain of TCR clone 92885 (TRBV7-9, TRBJ2-6)
CAGSLKGPLRANVLTF

SEQ ID NO: 185771 - protein, 11 aa, Homo sapiens
  CDR3 for alpha chain variable domain of TCR clone 92886 (TRAV21, TRAJ39)
LLVNAGNMLTF

SEQ ID NO: 185772 - protein, 15 aa, Homo sapiens
  CDR3 for beta chain variable domain of TCR clone 92886 (TRBV29-1, TRBJ2-1)
CSGRDRKSSYDEQFF

SEQ ID NO: 185773 - protein, 11 aa, Homo sapiens
  CDR3 for alpha chain variable domain of TCR clone 92887 (TRAV4, TRAJ23)
CLVTPGGKLIF

SEQ ID NO: 185774 - protein, 15 aa, Homo sapiens
  CDR3 for beta chain variable domain of TCR clone 92887 (TRBV7-2, TRBJ2-1)
CASSFQADEYNEQFF

SEQ ID NO: 185775 - protein, 14 aa, Homo sapiens
  CDR3 for alpha chain variable domain of TCR clone 92888 (TRAV12-3, TRAJ58)
CAMSTETSGSRLNF

SEQ ID NO: 185776 - protein, 15 aa, Homo sapiens
  CDR3 for beta chain variable domain of TCR clone 92888 (TRBV4-1, TRBJ1-4)
CASSDTGGTNEKLFF

SEQ ID NO: 185777 - protein, 14 aa, Homo sapiens
  CDR3 for alpha chain variable domain of TCR clone 92889 (TRAV35, TRAJ33)
CAGSSQDSNYQLIW

SEQ ID NO: 185778 - protein, 14 aa, Homo sapiens
  CDR3 for beta chain variable domain of TCR clone 92889 (TRBV12-5, TRBJ2-5)
CASGSRTHQETQYF

SEQ ID NO: 185779 - protein, 13 aa, Homo sapiens
  CDR3 for alpha chain variable domain of TCR clone 92890 (TRAV39, TRAJ58)
FAGEETSGSRLTF

SEQ ID NO: 185780 - protein, 13 aa, Homo sapiens
  CDR3 for beta chain variable domain of TCR clone 92890 (TRBV15, TRBJ2-7)
CATSTTGHYEQYF

SEQ ID NO: 185781 - protein, 14 aa, Homo sapiens
  CDR3 for alpha chain variable domain of TCR clone 92891 (TRAV1-2, TRAJ8)
CAVREDTGFQKLLF

SEQ ID NO: 185782 - protein, 16 aa, Homo sapiens
  CDR3 for beta chain variable domain of TCR clone 92891 (TRBV7-6, TRBJ2-6)
CASSLPGLSGAIVLTF

SEQ ID NO: 185783 - protein, 13 aa, Homo sapiens
  CDR3 for alpha chain variable domain of TCR clone 92892 (TRAV36/DV7, TRAJ33)
CAVDMDINYQLIW

SEQ ID NO: 185784 - protein, 16 aa, Homo sapiens
  CDR3 for beta chain variable domain of TCR clone 92892 (TRBV15, TRBJ2-3)
CATRLSGGRAPDTQYF

SEQ ID NO: 185785 - protein, 11 aa, Homo sapiens
  CDR3 for alpha chain variable domain of TCR clone 92893 (TRAV2, TRAJ13)
CASGGYQKVTF

SEQ ID NO: 185786 - protein, 13 aa, Homo sapiens
  CDR3 for beta chain variable domain of TCR clone 92893 (TRBV2, TRBJ1-5)
CATAGPVNQPQHF

SEQ ID NO: 185787 - protein, 13 aa, Homo sapiens
  CDR3 for alpha chain variable domain of TCR clone 92894 (TRAV12-3, TRAJ13)
CAMTSGGYQTVTF

SEQ ID NO: 185788 - protein, 13 aa, Homo sapiens
  CDR3 for beta chain variable domain of TCR clone 92894 (TRBV20-1, TRBJ2-2)
CSALSGGAGELFF

SEQ ID NO: 185789 - protein, 17 aa, Homo sapiens
  CDR3 for alpha chain variable domain of TCR clone 92895 (TRAV27, TRAJ52)
CAGAGWAGGTSYGKLTL

SEQ ID NO: 185790 - protein, 16 aa, Homo sapiens
  CDR3 for beta chain variable domain of TCR clone 92895 (TRBV19, TRBJ2-1)
CASSKAGPSSYNEQFF

SEQ ID NO: 185791 - protein, 14 aa, Homo sapiens
  CDR3 for alpha chain variable domain of TCR clone 92896 (TRAV29/DV5, TRAJ36)
CAARRKTGANNLFF

SEQ ID NO: 185792 - protein, 14 aa, Homo sapiens
  CDR3 for beta chain variable domain of TCR clone 92896 (TRBV2, TRBJ2-3)
CASSEGQNTDTQYF

SEQ ID NO: 185793 - protein, 11 aa, Homo sapiens
  CDR3 for alpha chain variable domain of TCR clone 92897 (TRAV2, TRAJ33)
CAVKSNYQLIW

SEQ ID NO: 185794 - protein, 15 aa, Homo sapiens
  CDR3 for beta chain variable domain of TCR clone 92897 (TRBV19, TRBJ1-1)
CASTSGQIQNTEAFF

SEQ ID NO: 185795 - protein, 13 aa, Homo sapiens
  CDR3 for alpha chain variable domain of TCR clone 92898 (TRAV2, TRAJ40)
CAVVTSGTYKYIF

SEQ ID NO: 185796 - protein, 15 aa, Homo sapiens
  CDR3 for beta chain variable domain of TCR clone 92898 (TRBV27, TRBJ2-1)
CASSNGGGSSNGQFF

SEQ ID NO: 185797 - protein, 14 aa, Homo sapiens
  CDR3 for alpha chain variable domain of TCR clone 92899 (TRAV1-2, TRAJ8)
CAVREDAGFQKLVF

SEQ ID NO: 185798 - protein, 16 aa, Homo sapiens
  CDR3 for beta chain variable domain of TCR clone 92899 (TRBV12-4, TRBJ1-5)
CASSRPVGGSNQPQHF

SEQ ID NO: 185799 - protein, 14 aa, Homo sapiens
  CDR3 for alpha chain variable domain of TCR clone 92900 (TRAV3, TRAJ37)
CAVKESGNTGKLIF

SEQ ID NO: 185800 - protein, 14 aa, Homo sapiens
  CDR3 for beta chain variable domain of TCR clone 92900 (TRBV2, TRBJ1-5)
RASSENRGGQPQHF

SEQ ID NO: 185801 - protein, 15 aa, Homo sapiens
  CDR3 for alpha chain variable domain of TCR clone 92901 (TRAV1-1, TRAJ5)
CAVRHMDTGRRALTF

SEQ ID NO: 185802 - protein, 15 aa, Homo sapiens
  CDR3 for beta chain variable domain of TCR clone 92901 (TRBV28, TRBJ2-7)
CASSPGGRGFYEQYF

SEQ ID NO: 185803 - protein, 15 aa, Homo sapiens
  CDR3 for alpha chain variable domain of TCR clone 92902 (TRAV8-3, TRAJ40)
CAAPSLGSGTYRYLF

SEQ ID NO: 185804 - protein, 12 aa, Homo sapiens
  CDR3 for beta chain variable domain of TCR clone 92902 (TRBV11-2, TRBJ2-2)
CASSLGGGELFF

SEQ ID NO: 185805 - protein, 17 aa, Homo sapiens
  CDR3 for alpha chain variable domain of TCR clone 92903 (TRAV8-6, TRAJ58)
CAVSSWVGETSGSRLTF

SEQ ID NO: 185806 - protein, 14 aa, Homo sapiens
  CDR3 for beta chain variable domain of TCR clone 92903 (TRBV4-2, TRBJ2-1)
CASCLDRAYNEQFF

SEQ ID NO: 185807 - protein, 16 aa, Homo sapiens
  CDR3 for alpha chain variable domain of TCR clone 92904 (TRAV16, TRAJ52)
CALSGVGGTSYGKLTF

SEQ ID NO: 185808 - protein, 18 aa, Homo sapiens
  CDR3 for beta chain variable domain of TCR clone 92904 (TRBV7-9, TRBJ2-7)
CASSLTTSGSRTWYEQYF

SEQ ID NO: 185809 - protein, 14 aa, Homo sapiens
  CDR3 for alpha chain variable domain of TCR clone 92905 (TRAV13-1, TRAJ3)
CAASKSSSASKIIF

SEQ ID NO: 185810 - protein, 16 aa, Homo sapiens
  CDR3 for beta chain variable domain of TCR clone 92905 (TRBV10-3, TRBJ2-1)
CAISGVGDGGGGEQFF

SEQ ID NO: 185811 - protein, 13 aa, Homo sapiens
  CDR3 for alpha chain variable domain of TCR clone 92906 (TRAV8-3, TRAJ44)
CAVVPGTASKPTF

SEQ ID NO: 185812 - protein, 16 aa, Homo sapiens
  CDR3 for beta chain variable domain of TCR clone 92906 (TRBV7-3, TRBJ2-2)
CASSLKRGTLSGELFF

SEQ ID NO: 185813 - protein, 14 aa, Homo sapiens
  CDR3 for alpha chain variable domain of TCR clone 92907 (TRAV8-2, TRAJ4)
CVVSPSGGYNKLIF

SEQ ID NO: 185814 - protein, 13 aa, Homo sapiens
  CDR3 for beta chain variable domain of TCR clone 92907 (TRBV29-1, TRBJ1-3)
CSADVDSGNTIYF

SEQ ID NO: 185815 - protein, 17 aa, Homo sapiens
  CDR3 for alpha chain variable domain of TCR clone 92908 (TRAV8-6, TRAJ58)
CAVSSWVGETSGSRLTF

SEQ ID NO: 185816 - protein, 14 aa, Homo sapiens
  CDR3 for beta chain variable domain of TCR clone 92908 (TRBV19, TRBJ2-1)
CASPTFVVSGEQFF

SEQ ID NO: 185817 - protein, 13 aa, Homo sapiens
  CDR3 for alpha chain variable domain of TCR clone 92909 (TRAV2, TRAJ40)
CAVVTSGTYKYIF

SEQ ID NO: 185818 - protein, 15 aa, Homo sapiens
  CDR3 for beta chain variable domain of TCR clone 92909 (TRBV7-6, TRBJ1-2)
CASSSGGRGGYGYTF

SEQ ID NO: 185819 - protein, 12 aa, Homo sapiens
  CDR3 for alpha chain variable domain of TCR clone 92910 (TRAV12-3, TRAJ17)
CAMTLTGNKLPF

SEQ ID NO: 185820 - protein, 15 aa, Homo sapiens
  CDR3 for beta chain variable domain of TCR clone 92910 (TRBV20-1, TRBJ2-7)
CSARDRVSGMDEQYF

SEQ ID NO: 185821 - protein, 14 aa, Homo sapiens
  CDR3 for alpha chain variable domain of TCR clone 92911 (TRAV20, TRAJ29)
CAVQACVGNTPLVF

SEQ ID NO: 185822 - protein, 15 aa, Homo sapiens
  CDR3 for beta chain variable domain of TCR clone 92911 (TRBV29-1, TRBJ2-7)
CSVEFFDRGSYEQYF

SEQ ID NO: 185823 - protein, 16 aa, Homo sapiens
  CDR3 for alpha chain variable domain of TCR clone 92912 (TRAV38-2/DV8, TRAJ12)
CAYRSVPMDSSYKLIF

SEQ ID NO: 185824 - protein, 14 aa, Homo sapiens
  CDR3 for beta chain variable domain of TCR clone 92912 (TRBV5-4, TRBJ1-1)
CASSLDSRRDEAFF

SEQ ID NO: 185825 - protein, 11 aa, Homo sapiens
  CDR3 for alpha chain variable domain of TCR clone 92913 (TRAV8-3, TRAJ49)
CAVNTGNQFYF

SEQ ID NO: 185826 - protein, 12 aa, Homo sapiens
  CDR3 for beta chain variable domain of TCR clone 92913 (TRBV11-2, TRBJ2-7)
CASSRPADEQYF

SEQ ID NO: 185827 - protein, 14 aa, Homo sapiens
  CDR3 for alpha chain variable domain of TCR clone 92914 (TRAV1-2, TRAJ16)
CAVNRFSDGQKLLF

SEQ ID NO: 185828 - protein, 15 aa, Homo sapiens
  CDR3 for beta chain variable domain of TCR clone 92914 (TRBV27, TRBJ1-1)
CASSPYADPYTEDFF

SEQ ID NO: 185829 - protein, 15 aa, Homo sapiens
  CDR3 for alpha chain variable domain of TCR clone 92915 (TRAV8-3, TRAJ45)
CASSYSGGGADGLTL

SEQ ID NO: 185830 - protein, 13 aa, Homo sapiens
  CDR3 for beta chain variable domain of TCR clone 92915 (TRBV20-1, TRBJ2-1)
CSASTGTSNEQFF

SEQ ID NO: 185831 - protein, 14 aa, Homo sapiens
  CDR3 for alpha chain variable domain of TCR clone 92916 (TRAV34, TRAJ44)
RGADGTGTASKLTF

SEQ ID NO: 185832 - protein, 12 aa, Homo sapiens
  CDR3 for beta chain variable domain of TCR clone 92916 (TRBV11-2, TRBJ2-2)
CASSLGGGELFF

SEQ ID NO: 185833 - protein, 15 aa, Homo sapiens
  CDR3 for alpha chain variable domain of TCR clone 92917 (TRAV3, TRAJ3)
CAVRDRDSSASKIIF

SEQ ID NO: 185834 - protein, 15 aa, Homo sapiens
  CDR3 for beta chain variable domain of TCR clone 92917 (TRBV2, TRBJ2-1)
CASSELAGSYNEQFF

SEQ ID NO: 185835 - protein, 14 aa, Homo sapiens
  CDR3 for alpha chain variable domain of TCR clone 92918 (TRAV12-1, TRAJ43)
CVVNGRNNNNDMRF

SEQ ID NO: 185836 - protein, 12 aa, Homo sapiens
  CDR3 for beta chain variable domain of TCR clone 92918 (TRBV29-1, TRBJ2-3)
CSVTGGADTQYF

SEQ ID NO: 185837 - protein, 16 aa, Homo sapiens
  CDR3 for alpha chain variable domain of TCR clone 92919 (TRAV3, TRAJ37)
CAVRPHGSGNTGKLIF

SEQ ID NO: 185838 - protein, 13 aa, Homo sapiens
  CDR3 for beta chain variable domain of TCR clone 92919 (TRBV2, TRBJ1-5)
CASGTGGYRPQHF

SEQ ID NO: 185839 - protein, 13 aa, Homo sapiens
  CDR3 for alpha chain variable domain of TCR clone 92920 (TRAV23/DV6, TRAJ16)
CAASISDGQKLLF

SEQ ID NO: 185840 - protein, 15 aa, Homo sapiens
  CDR3 for beta chain variable domain of TCR clone 92920 (TRBV2, TRBJ2-2)
CASSRETVGTGELFF

SEQ ID NO: 185841 - protein, 14 aa, Homo sapiens
  CDR3 for alpha chain variable domain of TCR clone 92921 (TRAV1-2, TRAJ8)
CAVREDTGFQKLVF

SEQ ID NO: 185842 - protein, 16 aa, Homo sapiens
  CDR3 for beta chain variable domain of TCR clone 92921 (TRBV27, TRBJ2-2)
CASSSSGVSNTGELFF

SEQ ID NO: 185843 - protein, 17 aa, Homo sapiens
  CDR3 for alpha chain variable domain of TCR clone 92922 (TRAV3, TRAJ28)
CAVREAYSGAGGYQLTF

SEQ ID NO: 185844 - protein, 18 aa, Homo sapiens
  CDR3 for beta chain variable domain of TCR clone 92922 (TRBV27, TRBJ2-1)
CASGNRAVGVGSKNEQFF

SEQ ID NO: 185845 - protein, 13 aa, Homo sapiens
  CDR3 for alpha chain variable domain of TCR clone 92923 (TRAV17, TRAJ26)
CATVDNYGQNFVF

SEQ ID NO: 185846 - protein, 14 aa, Homo sapiens
  CDR3 for beta chain variable domain of TCR clone 92923 (TRBV19, TRBJ2-1)
CASPTFVLSGEQFF

SEQ ID NO: 185847 - protein, 10 aa, Homo sapiens
  CDR3 for alpha chain variable domain of TCR clone 92924 (TRAV16, TRAJ22)
SAMYLRQLTF

SEQ ID NO: 185848 - protein, 12 aa, Homo sapiens
  CDR3 for beta chain variable domain of TCR clone 92924 (TRBV11-2, TRBJ2-2)
CASSLGGGELFF

SEQ ID NO: 185849 - protein, 14 aa, Homo sapiens
  CDR3 for alpha chain variable domain of TCR clone 92925 (TRAV25, TRAJ20)
TDVGILPHDYKLSF

SEQ ID NO: 185850 - protein, 17 aa, Homo sapiens
  CDR3 for beta chain variable domain of TCR clone 92925 (TRBV4-3, TRBJ2-1)
CASSQFSSGRASGEQFF

SEQ ID NO: 185851 - protein, 13 aa, Homo sapiens
  CDR3 for alpha chain variable domain of TCR clone 92926 (TRAV8-3, TRAJ36)
CAVGATGANNLFF

SEQ ID NO: 185852 - protein, 20 aa, Homo sapiens
  CDR3 for beta chain variable domain of TCR clone 92926 (TRBV7-8, TRBJ2-2)
CASSHLFPGPTIHITGELFF

SEQ ID NO: 185853 - protein, 16 aa, Homo sapiens
  CDR3 for alpha chain variable domain of TCR clone 92927 (TRAV14/DV4, TRAJ21)
CAMREGPANNFNKFYF

SEQ ID NO: 185854 - protein, 12 aa, Homo sapiens
  CDR3 for beta chain variable domain of TCR clone 92927 (TRBV29-1, TRBJ2-2)
CSVDKYTGELFF

SEQ ID NO: 185855 - protein, 17 aa, Homo sapiens
  CDR3 for alpha chain variable domain of TCR clone 92928 (TRAV13-1, TRAJ31)
WAPRDRLMFGDGTQLVV

SEQ ID NO: 185856 - protein, 12 aa, Homo sapiens
  CDR3 for beta chain variable domain of TCR clone 92928 (TRBV7-9, TRBJ2-7)
CASSLEGYEQYF

SEQ ID NO: 185857 - protein, 12 aa, Homo sapiens
  CDR3 for alpha chain variable domain of TCR clone 92929 (TRAV8-6, TRAJ8)
CAATPGFQKLVF

SEQ ID NO: 185858 - protein, 16 aa, Homo sapiens
  CDR3 for beta chain variable domain of TCR clone 92929 (TRBV7-3, TRBJ2-2)
CASSLKRGTLSGELFF

SEQ ID NO: 185859 - protein, 10 aa, Homo sapiens
  CDR3 for alpha chain variable domain of TCR clone 92930 (TRAV2, TRAJ15)
RGQAGTALIF

SEQ ID NO: 185860 - protein, 12 aa, Homo sapiens
  CDR3 for beta chain variable domain of TCR clone 92930 (TRBV11-2, TRBJ2-2)
CASSLGGGELFL

SEQ ID NO: 185861 - protein, 14 aa, Homo sapiens
  CDR3 for alpha chain variable domain of TCR clone 92931 (TRAV26-2, TRAJ39)
CIRSNNNAGNMLTF

SEQ ID NO: 185862 - protein, 13 aa, Homo sapiens
  CDR3 for beta chain variable domain of TCR clone 92931 (TRBV11-2, TRBJ1-2)
CASSRALNYGYTF

SEQ ID NO: 185863 - protein, 15 aa, Homo sapiens
  CDR3 for alpha chain variable domain of TCR clone 92932 (TRAV12-2, TRAJ53)
CAVNGGGGSHYKLTF

SEQ ID NO: 185864 - protein, 14 aa, Homo sapiens
  CDR3 for beta chain variable domain of TCR clone 92932 (TRBV12-5, TRBJ2-5)
CASGSRTHQETQYF

SEQ ID NO: 185865 - protein, 14 aa, Homo sapiens
  CDR3 for alpha chain variable domain of TCR clone 92933 (TRAV12-2, TRAJ40)
CAVKIPSGTYKYIF

SEQ ID NO: 185866 - protein, 19 aa, Homo sapiens
  CDR3 for beta chain variable domain of TCR clone 92933 (TRBV7-9, TRBJ2-6)
CASSLESATVLPGANVLTF

SEQ ID NO: 185867 - protein, 15 aa, Homo sapiens
  CDR3 for alpha chain variable domain of TCR clone 92934 (TRAV3, TRAJ4)
CAVRDGTGGYNKLIF

SEQ ID NO: 185868 - protein, 16 aa, Homo sapiens
  CDR3 for beta chain variable domain of TCR clone 92934 (TRBV27, TRBJ2-2)
CASSSSGVSNTGELFF

SEQ ID NO: 185869 - protein, 15 aa, Homo sapiens
  CDR3 for alpha chain variable domain of TCR clone 92935 (TRAV27, TRAJ38)
CAARRNAGNNRKLIW

SEQ ID NO: 185870 - protein, 15 aa, Homo sapiens
  CDR3 for beta chain variable domain of TCR clone 92935 (TRBV5-5, TRBJ1-5)
CASSSTPGSNQPQHF

SEQ ID NO: 185871 - protein, 17 aa, Homo sapiens
  CDR3 for alpha chain variable domain of TCR clone 92936 (TRAV26-1, TRAJ11)
CIVRVGQSNSGYSTLTF

SEQ ID NO: 185872 - protein, 14 aa, Homo sapiens
  CDR3 for beta chain variable domain of TCR clone 92936 (TRBV19, TRBJ2-1)
CASPTFVLSGEQFF

SEQ ID NO: 185873 - protein, 12 aa, Homo sapiens
  CDR3 for alpha chain variable domain of TCR clone 92937 (TRAV3, TRAJ39)
CAVIEWSNMLTF

SEQ ID NO: 185874 - protein, 18 aa, Homo sapiens
  CDR3 for beta chain variable domain of TCR clone 92937 (TRBV7-9, TRBJ2-7)
CASSLTTSGSRTWYEQYF

SEQ ID NO: 185875 - protein, 16 aa, Homo sapiens
  CDR3 for alpha chain variable domain of TCR clone 92938 (TRAV13-1, TRAJ29)
CAASKPRGFRKHTSCL

SEQ ID NO: 185876 - protein, 12 aa, Homo sapiens
  CDR3 for beta chain variable domain of TCR clone 92938 (TRBV7-8, TRBJ2-7)
CASSLGDREQYF

SEQ ID NO: 185877 - protein, 14 aa, Homo sapiens
  CDR3 for alpha chain variable domain of TCR clone 92939 (TRAV17, TRAJ11)
CATDTSRGYSTLTF

SEQ ID NO: 185878 - protein, 15 aa, Homo sapiens
  CDR3 for beta chain variable domain of TCR clone 92939 (TRBV7-8, TRBJ2-1)
CASSLADSLYNEQFF

SEQ ID NO: 185879 - protein, 12 aa, Homo sapiens
  CDR3 for alpha chain variable domain of TCR clone 92940 (TRAV35, TRAJ31)
CAAASNNARLMF

SEQ ID NO: 185880 - protein, 15 aa, Homo sapiens
  CDR3 for beta chain variable domain of TCR clone 92940 (TRBV7-9, TRBJ1-5)
CASSQGHQPNQPQHF

SEQ ID NO: 185881 - protein, 13 aa, Homo sapiens
  CDR3 for alpha chain variable domain of TCR clone 92941 (TRAV12-3, TRAJ54)
CAMTLQGAQKLVF

SEQ ID NO: 185882 - protein, 14 aa, Homo sapiens
  CDR3 for beta chain variable domain of TCR clone 92941 (TRBV4-1, TRBJ2-2)
CASSQVVNTGELFF

SEQ ID NO: 185883 - protein, 14 aa, Homo sapiens
  CDR3 for alpha chain variable domain of TCR clone 92942 (TRAV25, TRAJ37)
CAGHGSGNTGKLIF

SEQ ID NO: 185884 - protein, 14 aa, Homo sapiens
  CDR3 for beta chain variable domain of TCR clone 92942 (TRBV25-1, TRBJ1-1)
CASTHLGGNTEAFF

SEQ ID NO: 185885 - protein, 13 aa, Homo sapiens
  CDR3 for alpha chain variable domain of TCR clone 92943 (TRAV26-2, TRAJ43)
CILRAVKNNDMRF

SEQ ID NO: 185886 - protein, 15 aa, Homo sapiens
  CDR3 for beta chain variable domain of TCR clone 92943 (TRBV7-2, TRBJ2-1)
CASTHGTGIYNEQFF

SEQ ID NO: 185887 - protein, 11 aa, Homo sapiens
  CDR3 for alpha chain variable domain of TCR clone 92944 (TRAV1-2, TRAJ40)
CAVPGTYKYIF

SEQ ID NO: 185888 - protein, 16 aa, Homo sapiens
  CDR3 for beta chain variable domain of TCR clone 92944 (TRBV29-1, TRBJ2-7)
CSVEVVGTGGSYEQYF

SEQ ID NO: 185889 - protein, 20 aa, Homo sapiens
  CDR3 for alpha chain variable domain of TCR clone 92945 (TRAV12-1, TRAJ42)
SSVIQPPTSVKGGSQGNLVF

SEQ ID NO: 185890 - protein, 18 aa, Homo sapiens
  CDR3 for beta chain variable domain of TCR clone 92945 (TRBV11-2, TRBJ2-3)
CASSLGGASRGAPNTQYF

SEQ ID NO: 185891 - protein, 10 aa, Homo sapiens
  CDR3 for alpha chain variable domain of TCR clone 92946 (TRAV1-2, TRAJ23)
CAAWAGKLIF

SEQ ID NO: 185892 - protein, 13 aa, Homo sapiens
  CDR3 for beta chain variable domain of TCR clone 92946 (TRBV27, TRBJ1-1)
CASSLSIGAEAFF

SEQ ID NO: 185893 - protein, 13 aa, Homo sapiens
  CDR3 for alpha chain variable domain of TCR clone 92947 (TRAV22, TRAJ26)
CAVEHNYGQNSVF

SEQ ID NO: 185894 - protein, 16 aa, Homo sapiens
  CDR3 for beta chain variable domain of TCR clone 92947 (TRBV7-2, TRBJ2-6)
CASSERRASGANVLTF

SEQ ID NO: 185895 - protein, 14 aa, Homo sapiens
  CDR3 for alpha chain variable domain of TCR clone 92948 (TRAV9-2, TRAJ39)
CALYIYNAGNMLTF

SEQ ID NO: 185896 - protein, 15 aa, Homo sapiens
  CDR3 for beta chain variable domain of TCR clone 92948 (TRBV19, TRBJ1-1)
CASSIVGPADPEAFF

SEQ ID NO: 185897 - protein, 12 aa, Homo sapiens
  CDR3 for alpha chain variable domain of TCR clone 92949 (TRAV27, TRAJ58)
CAVARDTSRLTF

SEQ ID NO: 185898 - protein, 14 aa, Homo sapiens
  CDR3 for beta chain variable domain of TCR clone 92949 (TRBV7-3, TRBJ2-1)
CASSLGTSANEQFF

SEQ ID NO: 185899 - protein, 11 aa, Homo sapiens
  CDR3 for alpha chain variable domain of TCR clone 92950 (TRAV12-3, TRAJ27)
CAMANAGKSTF

SEQ ID NO: 185900 - protein, 13 aa, Homo sapiens
  CDR3 for beta chain variable domain of TCR clone 92950 (TRBV20-1, TRBJ1-1)
CSARVGGITEAFF

SEQ ID NO: 185901 - protein, 12 aa, Homo sapiens
  CDR3 for alpha chain variable domain of TCR clone 92951 (TRAV13-1, TRAJ11)
CAADSGYSTLTF

SEQ ID NO: 185902 - protein, 14 aa, Homo sapiens
  CDR3 for beta chain variable domain of TCR clone 92951 (TRBV28, TRBJ1-1)
CASSESGRGTEAFF

SEQ ID NO: 185903 - protein, 16 aa, Homo sapiens
  CDR3 for alpha chain variable domain of TCR clone 92952 (TRAV30, TRAJ24)
CGTEIVDADSWGKFQF

SEQ ID NO: 185904 - protein, 14 aa, Homo sapiens
  CDR3 for beta chain variable domain of TCR clone 92952 (TRBV12-5, TRBJ2-1)
CASGSRTHQETQFF

SEQ ID NO: 185905 - protein, 19 aa, Homo sapiens
  CDR3 for alpha chain variable domain of TCR clone 92953 (TRAV2, TRAJ20)
ILQVREADAAVYRDCKLSF

SEQ ID NO: 185906 - protein, 16 aa, Homo sapiens
  CDR3 for beta chain variable domain of TCR clone 92953 (TRBV19, TRBJ2-1)
CASSKAGPSPYNEQFF

SEQ ID NO: 185907 - protein, 13 aa, Homo sapiens
  CDR3 for alpha chain variable domain of TCR clone 92954 (TRAV25, TRAJ44)
LILGTGTASKLTF

SEQ ID NO: 185908 - protein, 12 aa, Homo sapiens
  CDR3 for beta chain variable domain of TCR clone 92954 (TRBV29-1, TRBJ1-3)
CSTRDSGNTIYL

SEQ ID NO: 185909 - protein, 14 aa, Homo sapiens
  CDR3 for alpha chain variable domain of TCR clone 92955 (TRAV2, TRAJ29)
CAGPFQYGNTPLVF

SEQ ID NO: 185910 - protein, 14 aa, Homo sapiens
  CDR3 for beta chain variable domain of TCR clone 92955 (TRBV6-1, TRBJ2-1)
CASSLGLAGLWEFF

SEQ ID NO: 185911 - protein, 12 aa, Homo sapiens
  CDR3 for alpha chain variable domain of TCR clone 92956 (TRAV13-1, TRAJ9)
CASHTGGFKTIF

SEQ ID NO: 185912 - protein, 18 aa, Homo sapiens
  CDR3 for beta chain variable domain of TCR clone 92956 (TRBV11-2, TRBJ2-3)
CASSLGGSSRGAPNTQYF

SEQ ID NO: 185913 - protein, 13 aa, Homo sapiens
  CDR3 for alpha chain variable domain of TCR clone 92957 (TRAV8-1, TRAJ30)
CAVIMNGDDKIIF

SEQ ID NO: 185914 - protein, 14 aa, Homo sapiens
  CDR3 for beta chain variable domain of TCR clone 92957 (TRBV7-2, TRBJ1-6)
CASSLQGANSPLHF

SEQ ID NO: 185915 - protein, 21 aa, Homo sapiens
  CDR3 for alpha chain variable domain of TCR clone 92958 (TRAV9-2, )
CALIQIGDIQNPDPAVYQLRD

SEQ ID NO: 185916 - protein, 17 aa, Homo sapiens
  CDR3 for beta chain variable domain of TCR clone 92958 (TRBV7-8, TRBJ2-6)
CASSAGTGGAGANVLTL

SEQ ID NO: 185917 - protein, 15 aa, Homo sapiens
  CDR3 for alpha chain variable domain of TCR clone 92959 (TRAV21, TRAJ40)
CAVRPQTSGTYKYIF

SEQ ID NO: 185918 - protein, 13 aa, Homo sapiens
  CDR3 for beta chain variable domain of TCR clone 92959 (TRBV7-2, TRBJ2-2)
CASSSVRAGELFF

SEQ ID NO: 185919 - protein, 14 aa, Homo sapiens
  CDR3 for alpha chain variable domain of TCR clone 92960 (TRAV25, TRAJ22)
CAVRSSGSARQLTF

SEQ ID NO: 185920 - protein, 15 aa, Homo sapiens
  CDR3 for beta chain variable domain of TCR clone 92960 (TRBV4-1, TRBJ2-3)
CASRSTRAGTDTQYF

SEQ ID NO: 185921 - protein, 13 aa, Homo sapiens
  CDR3 for alpha chain variable domain of TCR clone 92961 (TRAV12-1, TRAJ3)
CVVNPRGASKIIF

SEQ ID NO: 185922 - protein, 13 aa, Homo sapiens
  CDR3 for beta chain variable domain of TCR clone 92961 (TRBV28, TRBJ1-5)
CANSDRGNQPQHF

SEQ ID NO: 185923 - protein, 14 aa, Homo sapiens
  CDR3 for alpha chain variable domain of TCR clone 92962 (TRAV12-1, TRAJ29)
CMVNEGSGNTPLVF

SEQ ID NO: 185924 - protein, 13 aa, Homo sapiens
  CDR3 for beta chain variable domain of TCR clone 92962 (TRBV7-9, TRBJ2-3)
CASSPGSTDTQYF

SEQ ID NO: 185925 - protein, 11 aa, Homo sapiens
  CDR3 for alpha chain variable domain of TCR clone 92963 (TRAV12-3, TRAJ27)
YAMANAGKSTF

SEQ ID NO: 185926 - protein, 13 aa, Homo sapiens
  CDR3 for beta chain variable domain of TCR clone 92963 (TRBV20-1, TRBJ1-1)
CSARVGGNTEAFF

SEQ ID NO: 185927 - protein, 11 aa, Homo sapiens
  CDR3 for alpha chain variable domain of TCR clone 92964 (TRAV1-2, TRAJ20)
CAVANDYKLSF

SEQ ID NO: 185928 - protein, 18 aa, Homo sapiens
  CDR3 for beta chain variable domain of TCR clone 92964 (TRBV20-1, TRBJ2-6)
CSAETTPTHGSGSNVLTF

SEQ ID NO: 185929 - protein, 14 aa, Homo sapiens
  CDR3 for alpha chain variable domain of TCR clone 92965 (TRAV1-2, TRAJ8)
CAVREDTGFQKLVF

SEQ ID NO: 185930 - protein, 17 aa, Homo sapiens
  CDR3 for beta chain variable domain of TCR clone 92965 (TRBV28, TRBJ2-5)
CASSRQGGLVGAETQYF

SEQ ID NO: 185931 - protein, 12 aa, Homo sapiens
  CDR3 for alpha chain variable domain of TCR clone 92966 (TRAV35, TRAJ39)
LAPNNAGNMLTF

SEQ ID NO: 185932 - protein, 16 aa, Homo sapiens
  CDR3 for beta chain variable domain of TCR clone 92966 (TRBV2, TRBJ2-3)
CASSTSVEGVTGTQYF

SEQ ID NO: 185933 - protein, 16 aa, Homo sapiens
  CDR3 for alpha chain variable domain of TCR clone 92967 (TRAV14/DV4, TRAJ53)
CAMREGGGGSNYKLTF

SEQ ID NO: 185934 - protein, 13 aa, Homo sapiens
  CDR3 for beta chain variable domain of TCR clone 92967 (TRBV24-1, TRBJ2-2)
CATSDWSTGELFF

SEQ ID NO: 185935 - protein, 16 aa, Homo sapiens
  CDR3 for alpha chain variable domain of TCR clone 92968 (TRAV3, TRAJ18)
CAVRDGRGSTLGRLYF

SEQ ID NO: 185936 - protein, 15 aa, Homo sapiens
  CDR3 for beta chain variable domain of TCR clone 92968 (TRBV7-9, TRBJ1-6)
CASSSPGRGNSHLHF

SEQ ID NO: 185937 - protein, 17 aa, Homo sapiens
  CDR3 for alpha chain variable domain of TCR clone 92969 (TRAV3, TRAJ12)
CAVRDGGRMDSSYKLIF

SEQ ID NO: 185938 - protein, 15 aa, Homo sapiens
  CDR3 for beta chain variable domain of TCR clone 92969 (TRBV20-1, TRBJ2-5)
CSAEGTGGLEETQYF

SEQ ID NO: 185939 - protein, 17 aa, Homo sapiens
  CDR3 for alpha chain variable domain of TCR clone 92970 (TRAV38-2/DV8, TRAJ38)
CAYRSARGVGNNRKLIW

SEQ ID NO: 185940 - protein, 13 aa, Homo sapiens
  CDR3 for beta chain variable domain of TCR clone 92970 (TRBV6-5, TRBJ2-1)
CASRGRVGNEQFF

SEQ ID NO: 185941 - protein, 11 aa, Homo sapiens
  CDR3 for alpha chain variable domain of TCR clone 92971 (TRAV12-3, TRAJ49)
CAANTGNQFYF

SEQ ID NO: 185942 - protein, 15 aa, Homo sapiens
  CDR3 for beta chain variable domain of TCR clone 92971 (TRBV11-2, TRBJ2-1)
CASSLGTSGLNEQCF

SEQ ID NO: 185943 - protein, 12 aa, Homo sapiens
  CDR3 for alpha chain variable domain of TCR clone 92972 (TRAV22, TRAJ22)
CAPGGSARQLTF

SEQ ID NO: 185944 - protein, 13 aa, Homo sapiens
  CDR3 for beta chain variable domain of TCR clone 92972 (TRBV27, TRBJ1-1)
CASSLSIGAEAFF

SEQ ID NO: 185945 - protein, 16 aa, Homo sapiens
  CDR3 for alpha chain variable domain of TCR clone 92973 (TRAV4, TRAJ22)
CLVGDLYSGSARQLTF

SEQ ID NO: 185946 - protein, 14 aa, Homo sapiens
  CDR3 for beta chain variable domain of TCR clone 92973 (TRBV25-1, TRBJ1-1)
CASTHLGGNTEAFF

SEQ ID NO: 185947 - protein, 14 aa, Homo sapiens
  CDR3 for alpha chain variable domain of TCR clone 92974 (TRAV3, TRAJ9)
CAVRLNTGGFKTIF

SEQ ID NO: 185948 - protein, 14 aa, Homo sapiens
  CDR3 for beta chain variable domain of TCR clone 92974 (TRBV7-6, TRBJ2-3)
CASSLGTVTDTQYF

SEQ ID NO: 185949 - protein, 15 aa, Homo sapiens
  CDR3 for alpha chain variable domain of TCR clone 92975 (TRAV26-1, TRAJ29)
CNVRVEGSGNTPLVF

SEQ ID NO: 185950 - protein, 14 aa, Homo sapiens
  CDR3 for beta chain variable domain of TCR clone 92975 (TRBV18, TRBJ2-5)
CASSPGVSQETQYF

SEQ ID NO: 185951 - protein, 16 aa, Homo sapiens
  CDR3 for alpha chain variable domain of TCR clone 92976 (TRAV8-3, TRAJ13)
CAVGAYPSGGYQKVTF

SEQ ID NO: 185952 - protein, 15 aa, Homo sapiens
  CDR3 for beta chain variable domain of TCR clone 92976 (TRBV7-3, TRBJ2-1)
CASSQRGGALIEQFF

SEQ ID NO: 185953 - protein, 13 aa, Homo sapiens
  CDR3 for alpha chain variable domain of TCR clone 92977 (TRAV36/DV7, TRAJ37)
CAVFSSNTGKIIF

SEQ ID NO: 185954 - protein, 15 aa, Homo sapiens
  CDR3 for beta chain variable domain of TCR clone 92977 (TRBV20-1, TRBJ1-1)
CSARDPRGEYTEAFF

SEQ ID NO: 185955 - protein, 11 aa, Homo sapiens
  CDR3 for alpha chain variable domain of TCR clone 92978 (TRAV17, TRAJ43)
CATPRSNDMRF

SEQ ID NO: 185956 - protein, 12 aa, Homo sapiens
  CDR3 for beta chain variable domain of TCR clone 92978 (TRBV5-1, TRBJ1-2)
CASSQDTYGYTF

SEQ ID NO: 185957 - protein, 16 aa, Homo sapiens
  CDR3 for alpha chain variable domain of TCR clone 92979 (TRAV16, TRAJ52)
CALSAAGGTSYGKLTF

SEQ ID NO: 185958 - protein, 12 aa, Homo sapiens
  CDR3 for beta chain variable domain of TCR clone 92979 (TRBV12-4, TRBJ1-3)
CAGSFSGNTIYF

SEQ ID NO: 185959 - protein, 10 aa, Homo sapiens
  CDR3 for alpha chain variable domain of TCR clone 92980 (TRAV25, TRAJ20)
CAVNDYKLSF

SEQ ID NO: 185960 - protein, 14 aa, Homo sapiens
  CDR3 for beta chain variable domain of TCR clone 92980 (TRBV19, TRBJ2-2)
CATTGHANTGELFF

SEQ ID NO: 185961 - protein, 13 aa, Homo sapiens
  CDR3 for alpha chain variable domain of TCR clone 92981 (TRAV8-3, TRAJ4)
WVFYSGGYNKLIF

SEQ ID NO: 185962 - protein, 16 aa, Homo sapiens
  CDR3 for beta chain variable domain of TCR clone 92981 (TRBV7-8, TRBJ2-3)
CASNTEGQRETDTQYF

SEQ ID NO: 185963 - protein, 14 aa, Homo sapiens
  CDR3 for alpha chain variable domain of TCR clone 92982 (TRAV1-2, TRAJ8)
CAVREDTGFQKLVF

SEQ ID NO: 185964 - protein, 12 aa, Homo sapiens
  CDR3 for beta chain variable domain of TCR clone 92982 (TRBV11-2, TRBJ2-4)
CASSSASGSEYF

SEQ ID NO: 185965 - protein, 16 aa, Homo sapiens
  CDR3 for alpha chain variable domain of TCR clone 92983 (TRAV26-1, TRAJ52)
CIVSNAGGTSYGKLKF

SEQ ID NO: 185966 - protein, 16 aa, Homo sapiens
  CDR3 for beta chain variable domain of TCR clone 92983 (TRBV5-1, TRBJ2-1)
CASSLEGRGLYNEQFF

SEQ ID NO: 185967 - protein, 12 aa, Homo sapiens
  CDR3 for alpha chain variable domain of TCR clone 92984 (TRAV10, TRAJ34)
CVVSGKHRQAHL

SEQ ID NO: 185968 - protein, 14 aa, Homo sapiens
  CDR3 for beta chain variable domain of TCR clone 92984 (TRBV19, TRBJ2-1)
CASPTFVLSGEQFL

SEQ ID NO: 185969 - protein, 18 aa, Homo sapiens
  CDR3 for alpha chain variable domain of TCR clone 92985 (TRAV26-1, TRAJ52)
CIVRVEGAGGTSHGKLTF

SEQ ID NO: 185970 - protein, 13 aa, Homo sapiens
  CDR3 for beta chain variable domain of TCR clone 92985 (TRBV7-3, TRBJ1-2)
CASSLKRGYGYTF

SEQ ID NO: 185971 - protein, 18 aa, Homo sapiens
  CDR3 for alpha chain variable domain of TCR clone 92986 (TRAV21, TRAJ52)
CAVRPSPAGGTSYGKLTF

SEQ ID NO: 185972 - protein, 14 aa, Homo sapiens
  CDR3 for beta chain variable domain of TCR clone 92986 (TRBV7-8, TRBJ1-2)
CASSPDSLSYGYTF

SEQ ID NO: 185973 - protein, 22 aa, Homo sapiens
  CDR3 for alpha chain variable domain of TCR clone 92987 (TRAV4, TRAJ42)
CLVKEAKEISSLEKALNSLLNQ

SEQ ID NO: 185974 - protein, 18 aa, Homo sapiens
  CDR3 for beta chain variable domain of TCR clone 92987 (TRBV20-1, TRBJ2-3)
CSASGLAGGPGTTDTQYF

SEQ ID NO: 185975 - protein, 13 aa, Homo sapiens
  CDR3 for alpha chain variable domain of TCR clone 92988 (TRAV8-1, TRAJ28)
CAVSGAGSYQLTF

SEQ ID NO: 185976 - protein, 14 aa, Homo sapiens
  CDR3 for beta chain variable domain of TCR clone 92988 (TRBV7-2, TRBJ2-2)
CASRGKGAAGELFF

SEQ ID NO: 185977 - protein, 11 aa, Homo sapiens
  CDR3 for alpha chain variable domain of TCR clone 92989 (TRAV4, TRAJ31)
CLVCLNARLMF

SEQ ID NO: 185978 - protein, 16 aa, Homo sapiens
  CDR3 for beta chain variable domain of TCR clone 92989 (TRBV15, TRBJ2-6)
CATSVNGGFLANVLTF

SEQ ID NO: 185979 - protein, 10 aa, Homo sapiens
  CDR3 for alpha chain variable domain of TCR clone 92990 (TRAV8-4, TRAJ43)
CSVSADDMRF

SEQ ID NO: 185980 - protein, 16 aa, Homo sapiens
  CDR3 for beta chain variable domain of TCR clone 92990 (TRBV12-5, TRBJ2-5)
CASGPRTSGNQETQYF

SEQ ID NO: 185981 - protein, 11 aa, Homo sapiens
  CDR3 for alpha chain variable domain of TCR clone 92991 (TRAV8-3, TRAJ34)
CAIPGKLIFGL

SEQ ID NO: 185982 - protein, 15 aa, Homo sapiens
  CDR3 for beta chain variable domain of TCR clone 92991 (TRBV5-7, TRBJ2-1)
CASSRRLAGDNEQFF

SEQ ID NO: 185983 - protein, 17 aa, Homo sapiens
  CDR3 for alpha chain variable domain of TCR clone 92992 (TRAV8-6, TRAJ58)
CAVSSWVGETSGARLTF

SEQ ID NO: 185984 - protein, 13 aa, Homo sapiens
  CDR3 for beta chain variable domain of TCR clone 92992 (TRBV14, TRBJ2-7)
CASSQDRRYEQYF

SEQ ID NO: 185985 - protein, 14 aa, Homo sapiens
  CDR3 for alpha chain variable domain of TCR clone 92993 (TRAV1-2, TRAJ16)
CAVNRVSDGQKLLF

SEQ ID NO: 185986 - protein, 16 aa, Homo sapiens
  CDR3 for beta chain variable domain of TCR clone 92993 (TRBV7-3, TRBJ2-2)
CASSLKRGTLSGELFF

SEQ ID NO: 185987 - protein, 15 aa, Homo sapiens
  CDR3 for alpha chain variable domain of TCR clone 92994 (TRAV4, TRAJ39)
CLVGPNNNAGGMLTF

SEQ ID NO: 185988 - protein, 13 aa, Homo sapiens
  CDR3 for beta chain variable domain of TCR clone 92994 (TRBV11-2, TRBJ2-5)
CASSSTGEETQYF

SEQ ID NO: 185989 - protein, 12 aa, Homo sapiens
  CDR3 for alpha chain variable domain of TCR clone 92995 (TRAV12-2, TRAJ9)
CAVYNGGFKTIF

SEQ ID NO: 185990 - protein, 16 aa, Homo sapiens
  CDR3 for beta chain variable domain of TCR clone 92995 (TRBV19, TRBJ2-1)
CASSKAGPSSYNEQFF

SEQ ID NO: 185991 - protein, 11 aa, Homo sapiens
  CDR3 for alpha chain variable domain of TCR clone 92996 (TRAV12-3, TRAJ27)
CAMANAGKSTF

SEQ ID NO: 185992 - protein, 13 aa, Homo sapiens
  CDR3 for beta chain variable domain of TCR clone 92996 (TRBV20-1, TRBJ1-1)
CSARVGGKTEAFF

SEQ ID NO: 185993 - protein, 15 aa, Homo sapiens
  CDR3 for alpha chain variable domain of TCR clone 92997 (TRAV38-1, TRAJ37)
CAFIHGSGNTGKLIF

SEQ ID NO: 185994 - protein, 15 aa, Homo sapiens
  CDR3 for beta chain variable domain of TCR clone 92997 (TRBV20-1, TRBJ2-7)
CSARVSAAYFYEQYF

SEQ ID NO: 185995 - protein, 11 aa, Homo sapiens
  CDR3 for alpha chain variable domain of TCR clone 92998 (TRAV23/DV6, TRAJ58)
CAARLLRGETS

SEQ ID NO: 185996 - protein, 15 aa, Homo sapiens
  CDR3 for beta chain variable domain of TCR clone 92998 (TRBV6-1, TRBJ2-6)
CASSSRPSGANVLTF

SEQ ID NO: 185997 - protein, 12 aa, Homo sapiens
  CDR3 for alpha chain variable domain of TCR clone 92999 (TRAV21, TRAJ12)
CAVVDSSYKLIF

SEQ ID NO: 185998 - protein, 16 aa, Homo sapiens
  CDR3 for beta chain variable domain of TCR clone 92999 (TRBV7-9, TRBJ2-5)
CASRLEIGTRKETQYF

SEQ ID NO: 185999 - protein, 13 aa, Homo sapiens
  CDR3 for alpha chain variable domain of TCR clone 93000 (TRAV8-3, TRAJ43)
CAVVPYNNNDMRS

SEQ ID NO: 186000 - protein, 17 aa, Homo sapiens
  CDR3 for beta chain variable domain of TCR clone 93000 (TRBV7-7, TRBJ1-1)
CASIGDRPNLGVTEAFF

SEQ ID NO: 186001 - protein, 15 aa, Homo sapiens
  CDR3 for alpha chain variable domain of TCR clone 93001 (TRAV4, TRAJ36)
CLVGDRQTGANNLFF

SEQ ID NO: 186002 - protein, 11 aa, Homo sapiens
  CDR3 for beta chain variable domain of TCR clone 93001 (TRBV12-4, TRBJ2-3)
CASTATDTQYF

SEQ ID NO: 186003 - protein, 12 aa, Homo sapiens
  CDR3 for alpha chain variable domain of TCR clone 93002 (TRAV3, TRAJ43)
CAVRAPNNDMRF

SEQ ID NO: 186004 - protein, 17 aa, Homo sapiens
  CDR3 for beta chain variable domain of TCR clone 93002 (TRBV7-8, TRBJ2-6)
CASSAGTGGAGANVLTF

SEQ ID NO: 186005 - protein, 15 aa, Homo sapiens
  CDR3 for alpha chain variable domain of TCR clone 93003 (TRAV29/DV5, TRAJ42)
CAAIGYGGSQGNLIF

SEQ ID NO: 186006 - protein, 12 aa, Homo sapiens
  CDR3 for beta chain variable domain of TCR clone 93003 (TRBV11-3, TRBJ1-4)
RASSSGSPGLFF

SEQ ID NO: 186007 - protein, 12 aa, Homo sapiens
  CDR3 for alpha chain variable domain of TCR clone 93004 (TRAV27, TRAJ36)
CAGMTGANNLFF

SEQ ID NO: 186008 - protein, 14 aa, Homo sapiens
  CDR3 for beta chain variable domain of TCR clone 93004 (TRBV12-4, TRBJ2-3)
CASSVVPSTDTQYF

SEQ ID NO: 186009 - protein, 15 aa, Homo sapiens
  CDR3 for alpha chain variable domain of TCR clone 93005 (TRAV1-2, TRAJ28)
CAVQYSGAGSYQLTF

SEQ ID NO: 186010 - protein, 16 aa, Homo sapiens
  CDR3 for beta chain variable domain of TCR clone 93005 (TRBV18, TRBJ2-7)
CASSPRSQGISYEQYF

SEQ ID NO: 186011 - protein, 12 aa, Homo sapiens
  CDR3 for alpha chain variable domain of TCR clone 93006 (TRAV13-1, TRAJ21)
CAAKEGFNKFYF

SEQ ID NO: 186012 - protein, 14 aa, Homo sapiens
  CDR3 for beta chain variable domain of TCR clone 93006 (TRBV5-5, TRBJ1-5)
CASSGQGVDQPQHF

SEQ ID NO: 186013 - protein, 11 aa, Homo sapiens
  CDR3 for alpha chain variable domain of TCR clone 93007 (TRAV25, TRAJ45)
CRGGGADGLTF

SEQ ID NO: 186014 - protein, 11 aa, Homo sapiens
  CDR3 for beta chain variable domain of TCR clone 93007 (TRBV6-1, TRBJ2-1)
CASISSNEQFF

SEQ ID NO: 186015 - protein, 14 aa, Homo sapiens
  CDR3 for alpha chain variable domain of TCR clone 93008 (TRAV1-2, TRAJ16)
CAVNRFSDGQKLLF

SEQ ID NO: 186016 - protein, 13 aa, Homo sapiens
  CDR3 for beta chain variable domain of TCR clone 93008 (TRBV13, TRBJ2-5)
CASSLGGEETQYF

SEQ ID NO: 186017 - protein, 15 aa, Homo sapiens
  CDR3 for alpha chain variable domain of TCR clone 93009 (TRAV3, TRAJ22)
CALRDRGGSARQLTF

SEQ ID NO: 186018 - protein, 13 aa, Homo sapiens
  CDR3 for beta chain variable domain of TCR clone 93009 (TRBV12-4, TRBJ1-2)
CASSLRQGKGYTF

SEQ ID NO: 186019 - protein, 12 aa, Homo sapiens
  CDR3 for alpha chain variable domain of TCR clone 93010 (TRAV27, TRAJ9)
CAGESGGFKTIF

SEQ ID NO: 186020 - protein, 16 aa, Homo sapiens
  CDR3 for beta chain variable domain of TCR clone 93010 (TRBV5-7, TRBJ2-7)
PAANEGGGRGSYEQYF

SEQ ID NO: 186021 - protein, 12 aa, Homo sapiens
  CDR3 for alpha chain variable domain of TCR clone 93011 (TRAV27, TRAJ35)
CVGADFGNVLHC

SEQ ID NO: 186022 - protein, 16 aa, Homo sapiens
  CDR3 for beta chain variable domain of TCR clone 93011 (TRBV6-1, TRBJ2-1)
CASILRQGSSYNEQFF

SEQ ID NO: 186023 - protein, 10 aa, Homo sapiens
  CDR3 for alpha chain variable domain of TCR clone 93012 (TRAV12-3, TRAJ49)
CAMNDDQFYF

SEQ ID NO: 186024 - protein, 14 aa, Homo sapiens
  CDR3 for beta chain variable domain of TCR clone 93012 (TRBV7-2, TRBJ2-1)
CASSRGGARNEQFF

SEQ ID NO: 186025 - protein, 12 aa, Homo sapiens
  CDR3 for alpha chain variable domain of TCR clone 93013 (TRAV12-3, TRAJ17)
CAMTLTGNKLTF

SEQ ID NO: 186026 - protein, 15 aa, Homo sapiens
  CDR3 for beta chain variable domain of TCR clone 93013 (TRBV7-9, TRBJ1-6)
CASSSPGRGKSPLHF

SEQ ID NO: 186027 - protein, 14 aa, Homo sapiens
  CDR3 for alpha chain variable domain of TCR clone 93014 (TRAV1-2, TRAJ16)
CAVNRCSDGQKLLF

SEQ ID NO: 186028 - protein, 13 aa, Homo sapiens
  CDR3 for beta chain variable domain of TCR clone 93014 (TRBV7-9, TRBJ1-2)
CASSLKQNYGYTF

SEQ ID NO: 186029 - protein, 14 aa, Homo sapiens
  CDR3 for alpha chain variable domain of TCR clone 93015 (TRAV1-2, TRAJ16)
CAVIRFSDGQKLLF

SEQ ID NO: 186030 - protein, 14 aa, Homo sapiens
  CDR3 for beta chain variable domain of TCR clone 93015 (TRBV19, TRBJ2-1)
CASGKSTQYNEQFF

SEQ ID NO: 186031 - protein, 14 aa, Homo sapiens
  CDR3 for alpha chain variable domain of TCR clone 93016 (TRAV1-2, TRAJ16)
CAVNRFSDGQKLPF

SEQ ID NO: 186032 - protein, 16 aa, Homo sapiens
  CDR3 for beta chain variable domain of TCR clone 93016 (TRBV11-2, TRBJ1-2)
CASSLDTGGADYGYTF

SEQ ID NO: 186033 - protein, 14 aa, Homo sapiens
  CDR3 for alpha chain variable domain of TCR clone 93017 (TRAV12-3, TRAJ10)
SHLPLTGGGNKLTF

SEQ ID NO: 186034 - protein, 14 aa, Homo sapiens
  CDR3 for beta chain variable domain of TCR clone 93017 (TRBV28, TRBJ1-4)
CASSRTVGNEKLFF

SEQ ID NO: 186035 - protein, 11 aa, Homo sapiens
  CDR3 for alpha chain variable domain of TCR clone 93018 (TRAV22, TRAJ30)
CAGNRDDKIIF

SEQ ID NO: 186036 - protein, 12 aa, Homo sapiens
  CDR3 for beta chain variable domain of TCR clone 93018 (TRBV11-2, TRBJ2-2)
CASSLGGGELFF

SEQ ID NO: 186037 - protein, 18 aa, Homo sapiens
  CDR3 for alpha chain variable domain of TCR clone 93019 (TRAV12-3, TRAJ52)
CAMSVGGAGGTSYGKLTF

SEQ ID NO: 186038 - protein, 15 aa, Homo sapiens
  CDR3 for beta chain variable domain of TCR clone 93019 (TRBV27, TRBJ1-6)
CASSSDRGLGSPLHF

SEQ ID NO: 186039 - protein, 14 aa, Homo sapiens
  CDR3 for alpha chain variable domain of TCR clone 93020 (TRAV8-4, TRAJ9)
CAVRINTGGFKTIF

SEQ ID NO: 186040 - protein, 15 aa, Homo sapiens
  CDR3 for beta chain variable domain of TCR clone 93020 (TRBV10-2, TRBJ2-6)
CASSEQGNGANVLTF

SEQ ID NO: 186041 - protein, 10 aa, Homo sapiens
  CDR3 for alpha chain variable domain of TCR clone 93021 (TRAV12-2, TRAJ22)
CAVNDTQLTF

SEQ ID NO: 186042 - protein, 13 aa, Homo sapiens
  CDR3 for beta chain variable domain of TCR clone 93021 (TRBV6-5, TRBJ2-6)
CASSTSGPLRLDF

SEQ ID NO: 186043 - protein, 14 aa, Homo sapiens
  CDR3 for alpha chain variable domain of TCR clone 93022 (TRAV8-3, TRAJ4)
CAVGAAGGYNKLIF

SEQ ID NO: 186044 - protein, 18 aa, Homo sapiens
  CDR3 for beta chain variable domain of TCR clone 93022 (TRBV7-2, TRBJ2-2)
CASSLESGPRMNTGELFF

SEQ ID NO: 186045 - protein, 14 aa, Homo sapiens
  CDR3 for alpha chain variable domain of TCR clone 93023 (TRAV3, TRAJ33)
CAVRDMDSNYQLIW

SEQ ID NO: 186046 - protein, 19 aa, Homo sapiens
  CDR3 for beta chain variable domain of TCR clone 93023 (TRBV7-3, TRBJ1-2)
CASSFPQGNDGEPWLHLRF

SEQ ID NO: 186047 - protein, 16 aa, Homo sapiens
  CDR3 for alpha chain variable domain of TCR clone 93024 (TRAV14/DV4, TRAJ54)
CAMREGRIQGAQKLVV

SEQ ID NO: 186048 - protein, 15 aa, Homo sapiens
  CDR3 for beta chain variable domain of TCR clone 93024 (TRBV20-1, TRBJ2-7)
CSARDRVSGMDEQYF

SEQ ID NO: 186049 - protein, 13 aa, Homo sapiens
  CDR3 for alpha chain variable domain of TCR clone 93025 (TRAV27, TRAJ56)
CAGKPGANSKLTF

SEQ ID NO: 186050 - protein, 17 aa, Homo sapiens
  CDR3 for beta chain variable domain of TCR clone 93025 (TRBV11-2, TRBJ2-3)
CQQLRGGLAGAPNTQYF

SEQ ID NO: 186051 - protein, 15 aa, Homo sapiens
  CDR3 for alpha chain variable domain of TCR clone 93026 (TRAV35, TRAJ38)
CAGFSNAGSNRKLIW

SEQ ID NO: 186052 - protein, 15 aa, Homo sapiens
  CDR3 for beta chain variable domain of TCR clone 93026 (TRBV7-8, TRBJ2-1)
CASSLAGGLYNEQFF

SEQ ID NO: 186053 - protein, 15 aa, Homo sapiens
  CDR3 for alpha chain variable domain of TCR clone 93027 (TRAV12-2, TRAJ43)
CAFDMRFGAGTRLTV

SEQ ID NO: 186054 - protein, 14 aa, Homo sapiens
  CDR3 for beta chain variable domain of TCR clone 93027 (TRBV11-2, TRBJ2-3)
CASSRLARTDTQYF

SEQ ID NO: 186055 - protein, 16 aa, Homo sapiens
  CDR3 for alpha chain variable domain of TCR clone 93028 (TRAV26-1, TRAJ37)
CIVRGDGSGNTGNLIF

SEQ ID NO: 186056 - protein, 17 aa, Homo sapiens
  CDR3 for beta chain variable domain of TCR clone 93028 (TRBV4-1, TRBJ2-7)
CASSRDPLGVRGGEQYF

SEQ ID NO: 186057 - protein, 14 aa, Homo sapiens
  CDR3 for alpha chain variable domain of TCR clone 93029 (TRAV1-2, TRAJ16)
CAVNRFSDGQKLLF

SEQ ID NO: 186058 - protein, 20 aa, Homo sapiens
  CDR3 for beta chain variable domain of TCR clone 93029 (TRBV7-8, TRBJ2-2)
CASSHLFPGPTIQITGELFF

SEQ ID NO: 186059 - protein, 23 aa, Homo sapiens
  CDR3 for alpha chain variable domain of TCR clone 93030 (TRAV13-2, TRAJ6)
CAEEVHQEEATYLHLEEEPALLF

SEQ ID NO: 186060 - protein, 14 aa, Homo sapiens
  CDR3 for beta chain variable domain of TCR clone 93030 (TRBV19, TRBJ2-1)
CASPTFVLSGEQFF

SEQ ID NO: 186061 - protein, 14 aa, Homo sapiens
  CDR3 for alpha chain variable domain of TCR clone 93031 (TRAV26-1, TRAJ21)
CIVRPPYNFNTFYF

SEQ ID NO: 186062 - protein, 14 aa, Homo sapiens
  CDR3 for beta chain variable domain of TCR clone 93031 (TRBV11-3, TRBJ2-1)
CASSATTSGSIQFF

SEQ ID NO: 186063 - protein, 12 aa, Homo sapiens
  CDR3 for alpha chain variable domain of TCR clone 93032 (TRAV26-1, TRAJ36)
CIVRVRADNLFF

SEQ ID NO: 186064 - protein, 13 aa, Homo sapiens
  CDR3 for beta chain variable domain of TCR clone 93032 (TRBV19, TRBJ1-5)
CASSTQDGQPQHF

SEQ ID NO: 186065 - protein, 13 aa, Homo sapiens
  CDR3 for alpha chain variable domain of TCR clone 93033 (TRAV12-2, TRAJ20)
CAVYPSNDYKLSF

SEQ ID NO: 186066 - protein, 14 aa, Homo sapiens
  CDR3 for beta chain variable domain of TCR clone 93033 (TRBV9, TRBJ2-7)
CASSVGVGSYEQYF

SEQ ID NO: 186067 - protein, 15 aa, Homo sapiens
  CDR3 for alpha chain variable domain of TCR clone 93034 (TRAV3, TRAJ22)
CAVRDRGGSARHLTF

SEQ ID NO: 186068 - protein, 14 aa, Homo sapiens
  CDR3 for beta chain variable domain of TCR clone 93034 (TRBV20-1, TRBJ1-1)
CSAQTRIGGTEAFF

SEQ ID NO: 186069 - protein, 13 aa, Homo sapiens
  CDR3 for alpha chain variable domain of TCR clone 93035 (TRAV12-3, TRAJ53)
CAMRGGSNYKLPF

SEQ ID NO: 186070 - protein, 15 aa, Homo sapiens
  CDR3 for beta chain variable domain of TCR clone 93035 (TRBV2, TRBJ2-1)
CATQARLVMIGEQFF

SEQ ID NO: 186071 - protein, 14 aa, Homo sapiens
  CDR3 for alpha chain variable domain of TCR clone 93036 (TRAV17, TRAJ12)
CAILPMDSSYKLIF

SEQ ID NO: 186072 - protein, 15 aa, Homo sapiens
  CDR3 for beta chain variable domain of TCR clone 93036 (TRBV7-9, TRBJ1-4)
CASSRTGGFNEKLFF

SEQ ID NO: 186073 - protein, 16 aa, Homo sapiens
  CDR3 for alpha chain variable domain of TCR clone 93037 (TRAV12-2, TRAJ43)
CAGDDMRFGAGTRLTV

SEQ ID NO: 186074 - protein, 17 aa, Homo sapiens
  CDR3 for beta chain variable domain of TCR clone 93037 (TRBV7-3, TRBJ2-3)
CASSLMKRMRGADTQYF

SEQ ID NO: 186075 - protein, 13 aa, Homo sapiens
  CDR3 for alpha chain variable domain of TCR clone 93038 (TRAV8-3, TRAJ34)
CAVGPYNTDKLIF

SEQ ID NO: 186076 - protein, 15 aa, Homo sapiens
  CDR3 for beta chain variable domain of TCR clone 93038 (TRBV3-1, TRBJ2-1)
CASSQQPSGGNEQFF

SEQ ID NO: 186077 - protein, 12 aa, Homo sapiens
  CDR3 for alpha chain variable domain of TCR clone 93039 (TRAV35, TRAJ36)
CWPRIGANNLFF

SEQ ID NO: 186078 - protein, 15 aa, Homo sapiens
  CDR3 for beta chain variable domain of TCR clone 93039 (TRBV28, TRBJ2-5)
CASSPPWSYQETQYF

SEQ ID NO: 186079 - protein, 14 aa, Homo sapiens
  CDR3 for alpha chain variable domain of TCR clone 93040 (TRAV3, TRAJ27)
CSVRDDTNAGKSTF

SEQ ID NO: 186080 - protein, 15 aa, Homo sapiens
  CDR3 for beta chain variable domain of TCR clone 93040 (TRBV7-7, TRBJ2-2)
CATSKLAKNTGELFF

SEQ ID NO: 186081 - protein, 13 aa, Homo sapiens
  CDR3 for alpha chain variable domain of TCR clone 93041 (TRAV16, TRAJ37)
CALRGSNTGKLTF

SEQ ID NO: 186082 - protein, 15 aa, Homo sapiens
  CDR3 for beta chain variable domain of TCR clone 93041 (TRBV20-1, TRBJ2-1)
CSARGRGLSYNEQFL

SEQ ID NO: 186083 - protein, 11 aa, Homo sapiens
  CDR3 for alpha chain variable domain of TCR clone 93042 (TRAV21, TRAJ34)
CAVTNTDKLIF

SEQ ID NO: 186084 - protein, 15 aa, Homo sapiens
  CDR3 for beta chain variable domain of TCR clone 93042 (TRBV13, TRBJ1-5)
CASSRTGRGHQPQHF

SEQ ID NO: 186085 - protein, 10 aa, Homo sapiens
  CDR3 for alpha chain variable domain of TCR clone 93043 (TRAV12-3, TRAJ49)
CAMNDDQFYF

SEQ ID NO: 186086 - protein, 15 aa, Homo sapiens
  CDR3 for beta chain variable domain of TCR clone 93043 (TRBV20-1, TRBJ2-7)
CSARDRVSGMDEQYS

SEQ ID NO: 186087 - protein, 17 aa, Homo sapiens
  CDR3 for alpha chain variable domain of TCR clone 93044 (TRAV13-2, TRAJ42)
CAEKGNNYGGSQGNLIF

SEQ ID NO: 186088 - protein, 16 aa, Homo sapiens
  CDR3 for beta chain variable domain of TCR clone 93044 (TRBV7-9, TRBJ2-1)
CASSLGTGWDYNEQFF

SEQ ID NO: 186089 - protein, 11 aa, Homo sapiens
  CDR3 for alpha chain variable domain of TCR clone 93045 (TRAV23/DV6, TRAJ9)
CAASLSPPNTG

SEQ ID NO: 186090 - protein, 18 aa, Homo sapiens
  CDR3 for beta chain variable domain of TCR clone 93045 (TRBV4-1, TRBJ2-7)
CASSHDTGAGSGLNEQYF

SEQ ID NO: 186091 - protein, 11 aa, Homo sapiens
  CDR3 for alpha chain variable domain of TCR clone 93046 (TRAV3, TRAJ21)
CAVGNFNKFYF

SEQ ID NO: 186092 - protein, 16 aa, Homo sapiens
  CDR3 for beta chain variable domain of TCR clone 93046 (TRBV19, TRBJ2-1)
CAGGKAGPSSYNEQFF

SEQ ID NO: 186093 - protein, 15 aa, Homo sapiens
  CDR3 for alpha chain variable domain of TCR clone 93047 (TRAV17, TRAJ57)
CATGPSRGGSEKLVF

SEQ ID NO: 186094 - protein, 11 aa, Homo sapiens
  CDR3 for beta chain variable domain of TCR clone 93047 (TRBV29-1, TRBJ2-5)
CSEDRTGTQYF

SEQ ID NO: 186095 - protein, 12 aa, Homo sapiens
  CDR3 for alpha chain variable domain of TCR clone 93048 (TRAV12-3, TRAJ20)
CAMVRGDYELSF

SEQ ID NO: 186096 - protein, 12 aa, Homo sapiens
  CDR3 for beta chain variable domain of TCR clone 93048 (TRBV6-1, TRBJ2-7)
CASSDYSYEQYF

SEQ ID NO: 186097 - protein, 15 aa, Homo sapiens
  CDR3 for alpha chain variable domain of TCR clone 93049 (TRAV12-3, TRAJ49)
CAMAVTPNTGNQFYF

SEQ ID NO: 186098 - protein, 14 aa, Homo sapiens
  CDR3 for beta chain variable domain of TCR clone 93049 (TRBV7-9, TRBJ2-1)
CASSQGQAEAEQFF

SEQ ID NO: 186099 - protein, 15 aa, Homo sapiens
  CDR3 for alpha chain variable domain of TCR clone 93050 (TRAV26-1, TRAJ39)
CIVRVAGNAGNMLTF

SEQ ID NO: 186100 - protein, 14 aa, Homo sapiens
  CDR3 for beta chain variable domain of TCR clone 93050 (TRBV7-6, TRBJ2-3)
CASSVAGGTDTQYF

SEQ ID NO: 186101 - protein, 16 aa, Homo sapiens
  CDR3 for alpha chain variable domain of TCR clone 93051 (TRAV30, TRAJ24)
CGTEIVDADSWGKFQF

SEQ ID NO: 186102 - protein, 16 aa, Homo sapiens
  CDR3 for beta chain variable domain of TCR clone 93051 (TRBV4-2, TRBJ2-3)
CASSLSSGGHTDTQYF

SEQ ID NO: 186103 - protein, 14 aa, Homo sapiens
  CDR3 for alpha chain variable domain of TCR clone 93052 (TRAV1-2, TRAJ8)
CAVREDTGFQKLVF

SEQ ID NO: 186104 - protein, 14 aa, Homo sapiens
  CDR3 for beta chain variable domain of TCR clone 93052 (TRBV7-2, TRBJ2-7)
CASSPKTSLYEQYF

SEQ ID NO: 186105 - protein, 14 aa, Homo sapiens
  CDR3 for alpha chain variable domain of TCR clone 93053 (TRAV8-3, TRAJ27)
CAEGRNTNAGKSTF

SEQ ID NO: 186106 - protein, 15 aa, Homo sapiens
  CDR3 for beta chain variable domain of TCR clone 93053 (TRBV11-3, TRBJ2-5)
CASSLRGRVQETQYF

SEQ ID NO: 186107 - protein, 12 aa, Homo sapiens
  CDR3 for alpha chain variable domain of TCR clone 93054 (TRAV13-1, TRAJ21)
CAAKEGLNKFYF

SEQ ID NO: 186108 - protein, 16 aa, Homo sapiens
  CDR3 for beta chain variable domain of TCR clone 93054 (TRBV2, TRBJ2-5)
CASSTLRDRDRETQYF

SEQ ID NO: 186109 - protein, 14 aa, Homo sapiens
  CDR3 for alpha chain variable domain of TCR clone 93055 (TRAV8-2, TRAJ23)
CVVSDDNQGGKLIF

SEQ ID NO: 186110 - protein, 14 aa, Homo sapiens
  CDR3 for beta chain variable domain of TCR clone 93055 (TRBV2, TRBJ2-3)
CASSEGQNTDTQYF

SEQ ID NO: 186111 - protein, 17 aa, Homo sapiens
  CDR3 for alpha chain variable domain of TCR clone 93056 (TRAV3, TRAJ6)
CAVRDGPRAGGSYIPTF

SEQ ID NO: 186112 - protein, 11 aa, Homo sapiens
  CDR3 for beta chain variable domain of TCR clone 93056 (TRBV11-2, TRBJ1-1)
CASSINTEAFF

SEQ ID NO: 186113 - protein, 14 aa, Homo sapiens
  CDR3 for alpha chain variable domain of TCR clone 93057 (TRAV12-3, TRAJ54)
CAMRGIHGAQKLVF

SEQ ID NO: 186114 - protein, 13 aa, Homo sapiens
  CDR3 for beta chain variable domain of TCR clone 93057 (TRBV19, TRBJ1-1)
CASSPSNGGEAFF

SEQ ID NO: 186115 - protein, 18 aa, Homo sapiens
  CDR3 for alpha chain variable domain of TCR clone 93058 (TRAV8-3, TRAJ4)
WVRDPPSNDPGGYNKLIF

SEQ ID NO: 186116 - protein, 13 aa, Homo sapiens
  CDR3 for beta chain variable domain of TCR clone 93058 (TRBV20-1, TRBJ1-2)
CSATGIQGSGYTF

SEQ ID NO: 186117 - protein, 16 aa, Homo sapiens
  CDR3 for alpha chain variable domain of TCR clone 93059 (TRAV3, TRAJ37)
CAVRGKGAGNTGKLIF

SEQ ID NO: 186118 - protein, 13 aa, Homo sapiens
  CDR3 for beta chain variable domain of TCR clone 93059 (TRBV19, TRBJ1-2)
CASSVPGQDGYTF

SEQ ID NO: 186119 - protein, 12 aa, Homo sapiens
  CDR3 for alpha chain variable domain of TCR clone 93060 (TRAV21, TRAJ33)
CAKMDSNYQLIW

SEQ ID NO: 186120 - protein, 17 aa, Homo sapiens
  CDR3 for beta chain variable domain of TCR clone 93060 (TRBV20-1, TRBJ2-3)
CSARDGWNAKERDTQYF

SEQ ID NO: 186121 - protein, 15 aa, Homo sapiens
  CDR3 for alpha chain variable domain of TCR clone 93061 (TRAV21, TRAJ40)
CAVRPQTSGTYKYIF

SEQ ID NO: 186122 - protein, 15 aa, Homo sapiens
  CDR3 for beta chain variable domain of TCR clone 93061 (TRBV11-3, TRBJ2-3)
CASLKDGREGDTQYF

SEQ ID NO: 186123 - protein, 16 aa, Homo sapiens
  CDR3 for alpha chain variable domain of TCR clone 93062 (TRAV30, TRAJ24)
CGTEIVDADSWGKFQV

SEQ ID NO: 186124 - protein, 15 aa, Homo sapiens
  CDR3 for beta chain variable domain of TCR clone 93062 (TRBV20-1, TRBJ2-6)
CSARDRGPGANVLTF

SEQ ID NO: 186125 - protein, 14 aa, Homo sapiens
  CDR3 for alpha chain variable domain of TCR clone 93063 (TRAV1-1, TRAJ35)
CAVRSIGFGNMLHC

SEQ ID NO: 186126 - protein, 14 aa, Homo sapiens
  CDR3 for beta chain variable domain of TCR clone 93063 (TRBV5-7, TRBJ2-7)
CASSGGLSSYEQYF

SEQ ID NO: 186127 - protein, 11 aa, Homo sapiens
  CDR3 for alpha chain variable domain of TCR clone 93064 (TRAV21, TRAJ34)
CAHCNTDKLIF

SEQ ID NO: 186128 - protein, 13 aa, Homo sapiens
  CDR3 for beta chain variable domain of TCR clone 93064 (TRBV7-6, TRBJ1-2)
CASSLVADYGYTF

SEQ ID NO: 186129 - protein, 13 aa, Homo sapiens
  CDR3 for alpha chain variable domain of TCR clone 93065 (TRAV8-6, TRAJ49)
CAVITNTGNQFYF

SEQ ID NO: 186130 - protein, 15 aa, Homo sapiens
  CDR3 for beta chain variable domain of TCR clone 93065 (TRBV12-4, TRBJ2-7)
CASSQRTSGNYEQYF

SEQ ID NO: 186131 - protein, 14 aa, Homo sapiens
  CDR3 for alpha chain variable domain of TCR clone 93066 (TRAV1-2, TRAJ8)
CAVREDTGFQKLVF

SEQ ID NO: 186132 - protein, 14 aa, Homo sapiens
  CDR3 for beta chain variable domain of TCR clone 93066 (TRBV20-1, TRBJ2-2)
CSAPDTANTGELFF

SEQ ID NO: 186133 - protein, 16 aa, Homo sapiens
  CDR3 for alpha chain variable domain of TCR clone 93067 (TRAV3, TRAJ37)
CAVRGKGSGNTGQLIF

SEQ ID NO: 186134 - protein, 16 aa, Homo sapiens
  CDR3 for beta chain variable domain of TCR clone 93067 (TRBV12-5, TRBJ2-5)
CASGPRTSGSQETQYF

SEQ ID NO: 186135 - protein, 16 aa, Homo sapiens
  CDR3 for alpha chain variable domain of TCR clone 93068 (TRAV21, TRAJ37)
RAVRTAGSSDTGKLIF

SEQ ID NO: 186136 - protein, 13 aa, Homo sapiens
  CDR3 for beta chain variable domain of TCR clone 93068 (TRBV7-9, TRBJ2-5)
CASLPSGRETQYF

SEQ ID NO: 186137 - protein, 14 aa, Homo sapiens
  CDR3 for alpha chain variable domain of TCR clone 93069 (TRAV23/DV6, TRAJ4)
CAANLSGDYNKLIF

SEQ ID NO: 186138 - protein, 17 aa, Homo sapiens
  CDR3 for beta chain variable domain of TCR clone 93069 (TRBV4-1, TRBJ1-3)
CASSPQRGIRFGNTIYF

SEQ ID NO: 186139 - protein, 13 aa, Homo sapiens
  CDR3 for alpha chain variable domain of TCR clone 93070 (TRAV12-1, TRAJ40)
CVVPTSRTYKYIF

SEQ ID NO: 186140 - protein, 18 aa, Homo sapiens
  CDR3 for beta chain variable domain of TCR clone 93070 (TRBV7-6, TRBJ2-1)
CASSPRTSGMSSYNEQFF

SEQ ID NO: 186141 - protein, 14 aa, Homo sapiens
  CDR3 for alpha chain variable domain of TCR clone 93071 (TRAV27, TRAJ22)
CAGVSVLGKRQLTF

SEQ ID NO: 186142 - protein, 17 aa, Homo sapiens
  CDR3 for beta chain variable domain of TCR clone 93071 (TRBV7-3, TRBJ2-3)
CANSLMKRMRGADTQYF

SEQ ID NO: 186143 - protein, 13 aa, Homo sapiens
  CDR3 for alpha chain variable domain of TCR clone 93072 (TRAV3, TRAJ20)
CAVRSLNDCKLSF

SEQ ID NO: 186144 - protein, 12 aa, Homo sapiens
  CDR3 for beta chain variable domain of TCR clone 93072 (TRBV6-1, TRBJ2-1)
CASYSTYNEQFF

SEQ ID NO: 186145 - protein, 16 aa, Homo sapiens
  CDR3 for alpha chain variable domain of TCR clone 93073 (TRAV12-2, TRAJ40)
CAVIRGGTSGTYKYLF

SEQ ID NO: 186146 - protein, 14 aa, Homo sapiens
  CDR3 for beta chain variable domain of TCR clone 93073 (TRBV20-1, TRBJ2-5)
CSARDGRAGETQYF

SEQ ID NO: 186147 - protein, 11 aa, Homo sapiens
  CDR3 for alpha chain variable domain of TCR clone 93074 (TRAV21, TRAJ11)
CAVNGYSTLTI

SEQ ID NO: 186148 - protein, 11 aa, Homo sapiens
  CDR3 for beta chain variable domain of TCR clone 93074 (TRBV19, TRBJ1-1)
CASSIGSEAFF

SEQ ID NO: 186149 - protein, 12 aa, Homo sapiens
  CDR3 for alpha chain variable domain of TCR clone 93075 (TRAV8-3, TRAJ43)
CAVGAGNNDMRF

SEQ ID NO: 186150 - protein, 14 aa, Homo sapiens
  CDR3 for beta chain variable domain of TCR clone 93075 (TRBV4-2, TRBJ1-5)
CASSRDRGDQPQHF

SEQ ID NO: 186151 - protein, 15 aa, Homo sapiens
  CDR3 for alpha chain variable domain of TCR clone 93076 (TRAV26-2, TRAJ45)
CILRDRVDQEEVLTD

SEQ ID NO: 186152 - protein, 15 aa, Homo sapiens
  CDR3 for beta chain variable domain of TCR clone 93076 (TRBV7-6, TRBJ2-5)
CASSKPTGPKETQYF

SEQ ID NO: 186153 - protein, 11 aa, Homo sapiens
  CDR3 for alpha chain variable domain of TCR clone 93077 (TRAV2, TRAJ33)
CAVDSNYQLIW

SEQ ID NO: 186154 - protein, 15 aa, Homo sapiens
  CDR3 for beta chain variable domain of TCR clone 93077 (TRBV7-3, TRBJ2-2)
CASSETGQGTGELFF

SEQ ID NO: 186155 - protein, 15 aa, Homo sapiens
  CDR3 for alpha chain variable domain of TCR clone 93078 (TRAV20, TRAJ53)
CAVQASGGSNYKLTF

SEQ ID NO: 186156 - protein, 13 aa, Homo sapiens
  CDR3 for beta chain variable domain of TCR clone 93078 (TRBV10-3, TRBJ2-7)
CASKLAVNYEQYF

SEQ ID NO: 186157 - protein, 14 aa, Homo sapiens
  CDR3 for alpha chain variable domain of TCR clone 93079 (TRAV16, TRAJ17)
CALSGRAAGKKLTF

SEQ ID NO: 186158 - protein, 15 aa, Homo sapiens
  CDR3 for beta chain variable domain of TCR clone 93079 (TRBV3-1, TRBJ1-2)
CASSPTRLPEGGYTF

SEQ ID NO: 186159 - protein, 14 aa, Homo sapiens
  CDR3 for alpha chain variable domain of TCR clone 93080 (TRAV13-1, TRAJ3)
CAASKSSSASKIIF

SEQ ID NO: 186160 - protein, 13 aa, Homo sapiens
  CDR3 for beta chain variable domain of TCR clone 93080 (TRBV14, TRBJ2-7)
CASSQDRRYEQYF

SEQ ID NO: 186161 - protein, 15 aa, Homo sapiens
  CDR3 for alpha chain variable domain of TCR clone 93081 (TRAV26-1, TRAJ48)
CIVRVGDFGNEKLTF

SEQ ID NO: 186162 - protein, 16 aa, Homo sapiens
  CDR3 for beta chain variable domain of TCR clone 93081 (TRBV4-1, TRBJ2-3)
CAGSQRAGGLTDTQYF

SEQ ID NO: 186163 - protein, 14 aa, Homo sapiens
  CDR3 for alpha chain variable domain of TCR clone 93082 (TRAV12-2, TRAJ17)
CAVNIKAAGNKLTF

SEQ ID NO: 186164 - protein, 14 aa, Homo sapiens
  CDR3 for beta chain variable domain of TCR clone 93082 (TRBV25-1, TRBJ1-1)
CASTHLGGNTEAFF

SEQ ID NO: 186165 - protein, 14 aa, Homo sapiens
  CDR3 for alpha chain variable domain of TCR clone 93083 (TRAV35, TRAJ38)
CAGSNAGNNRKLIW

SEQ ID NO: 186166 - protein, 15 aa, Homo sapiens
  CDR3 for beta chain variable domain of TCR clone 93083 (TRBV5-1, TRBJ2-7)
CASSLDLTSSYEQYF

SEQ ID NO: 186167 - protein, 14 aa, Homo sapiens
  CDR3 for alpha chain variable domain of TCR clone 93084 (TRAV12-2, TRAJ13)
CAVKKTGGYQKVTF

SEQ ID NO: 186168 - protein, 14 aa, Homo sapiens
  CDR3 for beta chain variable domain of TCR clone 93084 (TRBV7-6, TRBJ2-3)
CARSLGTVTDTQYF

SEQ ID NO: 186169 - protein, 14 aa, Homo sapiens
  CDR3 for alpha chain variable domain of TCR clone 93085 (TRAV12-1, TRAJ12)
CVVTRMASSYKLIF

SEQ ID NO: 186170 - protein, 13 aa, Homo sapiens
  CDR3 for beta chain variable domain of TCR clone 93085 (TRBV20-1, TRBJ1-1)
CSARGGGNTEAFF

SEQ ID NO: 186171 - protein, 14 aa, Homo sapiens
  CDR3 for alpha chain variable domain of TCR clone 93086 (TRAV17, TRAJ16)
CATTDFSDGQKLLF

SEQ ID NO: 186172 - protein, 12 aa, Homo sapiens
  CDR3 for beta chain variable domain of TCR clone 93086 (TRBV24-1, TRBJ1-1)
CATLYPDTEAFF

SEQ ID NO: 186173 - protein, 14 aa, Homo sapiens
  CDR3 for alpha chain variable domain of TCR clone 93087 (TRAV20, TRAJ18)
CAVGRGSTLGGLYF

SEQ ID NO: 186174 - protein, 14 aa, Homo sapiens
  CDR3 for beta chain variable domain of TCR clone 93087 (TRBV28, TRBJ2-4)
CASTQVTGVNIQYF

SEQ ID NO: 186175 - protein, 15 aa, Homo sapiens
  CDR3 for alpha chain variable domain of TCR clone 93088 (TRAV13-1, TRAJ10)
CAATILTRGGNKLTF

SEQ ID NO: 186176 - protein, 15 aa, Homo sapiens
  CDR3 for beta chain variable domain of TCR clone 93088 (TRBV2, TRBJ2-7)
CASTLLGSGATEQYF

SEQ ID NO: 186177 - protein, 14 aa, Homo sapiens
  CDR3 for alpha chain variable domain of TCR clone 93089 (TRAV1-2, TRAJ16)
CAVNRFSDGQKLLF

SEQ ID NO: 186178 - protein, 16 aa, Homo sapiens
  CDR3 for beta chain variable domain of TCR clone 93089 (TRBV12-4, TRBJ1-5)
CAGSRPVGGSNQPQHF

SEQ ID NO: 186179 - protein, 14 aa, Homo sapiens
  CDR3 for alpha chain variable domain of TCR clone 93090 (TRAV16, TRAJ31)
CALSGRNNNARLIF

SEQ ID NO: 186180 - protein, 12 aa, Homo sapiens
  CDR3 for beta chain variable domain of TCR clone 93090 (TRBV11-2, TRBJ1-2)
CASSREGDGYTF

SEQ ID NO: 186181 - protein, 15 aa, Homo sapiens
  CDR3 for alpha chain variable domain of TCR clone 93091 (TRAV26-1, TRAJ42)
CIVRVAEGSQGNLIF

SEQ ID NO: 186182 - protein, 14 aa, Homo sapiens
  CDR3 for beta chain variable domain of TCR clone 93091 (TRBV11-2, TRBJ2-1)
CASTTGQGNNEQFF

SEQ ID NO: 186183 - protein, 14 aa, Homo sapiens
  CDR3 for alpha chain variable domain of TCR clone 93092 (TRAV12-1, TRAJ17)
CVVNYKAAGNKRTF

SEQ ID NO: 186184 - protein, 14 aa, Homo sapiens
  CDR3 for beta chain variable domain of TCR clone 93092 (TRBV7-8, TRBJ2-3)
CASSLEAGTDTQYF

SEQ ID NO: 186185 - protein, 14 aa, Homo sapiens
  CDR3 for alpha chain variable domain of TCR clone 93093 (TRAV20, TRAJ22)
CDVALGGSARQLTF

SEQ ID NO: 186186 - protein, 15 aa, Homo sapiens
  CDR3 for beta chain variable domain of TCR clone 93093 (TRBV7-2, TRBJ1-1)
CASSFAGDRDTEAFF

SEQ ID NO: 186187 - protein, 16 aa, Homo sapiens
  CDR3 for alpha chain variable domain of TCR clone 93094 (TRAV3, TRAJ37)
CAVRGKGSGNTGKLIF

SEQ ID NO: 186188 - protein, 15 aa, Homo sapiens
  CDR3 for beta chain variable domain of TCR clone 93094 (TRBV28, TRBJ2-1)
CASSIIAGGRSEQFF

SEQ ID NO: 186189 - protein, 17 aa, Homo sapiens
  CDR3 for alpha chain variable domain of TCR clone 93095 (TRAV3, TRAJ6)
CAVRDGPRAGGSYIPAF

SEQ ID NO: 186190 - protein, 12 aa, Homo sapiens
  CDR3 for beta chain variable domain of TCR clone 93095 (TRBV11-2, TRBJ2-2)
CASSLGGGELFF

SEQ ID NO: 186191 - protein, 14 aa, Homo sapiens
  CDR3 for alpha chain variable domain of TCR clone 93096 (TRAV29/DV5, TRAJ37)
CAASGSGDTGKLIF

SEQ ID NO: 186192 - protein, 17 aa, Homo sapiens
  CDR3 for beta chain variable domain of TCR clone 93096 (TRBV4-1, TRBJ2-7)
CASSPFLTSGGVVEQYF

SEQ ID NO: 186193 - protein, 13 aa, Homo sapiens
  CDR3 for alpha chain variable domain of TCR clone 93097 (TRAV21, TRAJ20)
CAVGLRVDYKLSF

SEQ ID NO: 186194 - protein, 13 aa, Homo sapiens
  CDR3 for beta chain variable domain of TCR clone 93097 (TRBV20-1, TRBJ1-1)
CSAGTVGNTEAFF

SEQ ID NO: 186195 - protein, 12 aa, Homo sapiens
  CDR3 for alpha chain variable domain of TCR clone 93098 (TRAV8-3, TRAJ20)
CAGDFNDYKLSF

SEQ ID NO: 186196 - protein, 13 aa, Homo sapiens
  CDR3 for beta chain variable domain of TCR clone 93098 (TRBV5-7, TRBJ2-3)
CASSLGRTDTQYF

SEQ ID NO: 186197 - protein, 15 aa, Homo sapiens
  CDR3 for alpha chain variable domain of TCR clone 93099 (TRAV13-1, TRAJ52)
SYYNAGGTSYGKLTF

SEQ ID NO: 186198 - protein, 11 aa, Homo sapiens
  CDR3 for beta chain variable domain of TCR clone 93099 (TRBV12-4, TRBJ2-2)
CASSPAGELFF

SEQ ID NO: 186199 - protein, 14 aa, Homo sapiens
  CDR3 for alpha chain variable domain of TCR clone 93100 (TRAV12-2, TRAJ11)
CAVNRESGYSTFTF

SEQ ID NO: 186200 - protein, 10 aa, Homo sapiens
  CDR3 for beta chain variable domain of TCR clone 93100 (TRBV20-1, TRBJ2-5)
CSARFETQYF

SEQ ID NO: 186201 - protein, 11 aa, Homo sapiens
  CDR3 for alpha chain variable domain of TCR clone 93101 (TRAV4, TRAJ23)
CLVAPGGKLIF

SEQ ID NO: 186202 - protein, 14 aa, Homo sapiens
  CDR3 for beta chain variable domain of TCR clone 93101 (TRBV7-2, TRBJ2-7)
CASRSQGAAYEQYF

SEQ ID NO: 186203 - protein, 17 aa, Homo sapiens
  CDR3 for alpha chain variable domain of TCR clone 93102 (TRAV13-1, TRAJ52)
CAAGRNGGGTSYGKLTF

SEQ ID NO: 186204 - protein, 13 aa, Homo sapiens
  CDR3 for beta chain variable domain of TCR clone 93102 (TRBV7-2, TRBJ1-1)
CASNLKGAKVAFF

SEQ ID NO: 186205 - protein, 14 aa, Homo sapiens
  CDR3 for alpha chain variable domain of TCR clone 93103 (TRAV1-2, TRAJ8)
CAVREDTGFQKLVF

SEQ ID NO: 186206 - protein, 12 aa, Homo sapiens
  CDR3 for beta chain variable domain of TCR clone 93103 (TRBV6-1, TRBJ2-7)
CASSEPLYEQYF

SEQ ID NO: 186207 - protein, 15 aa, Homo sapiens
  CDR3 for alpha chain variable domain of TCR clone 93104 (TRAV17, TRAJ35)
CATAFVIGFGNVLPC

SEQ ID NO: 186208 - protein, 16 aa, Homo sapiens
  CDR3 for beta chain variable domain of TCR clone 93104 (TRBV11-2, TRBJ2-7)
CASSPLAGGPRYEQYF

SEQ ID NO: 186209 - protein, 12 aa, Homo sapiens
  CDR3 for alpha chain variable domain of TCR clone 93105 (TRAV2, TRAJ10)
CASTGGGNKLTC

SEQ ID NO: 186210 - protein, 14 aa, Homo sapiens
  CDR3 for beta chain variable domain of TCR clone 93105 (TRBV7-2, TRBJ2-2)
CASRGQGAAGELFF

SEQ ID NO: 186211 - protein, 18 aa, Homo sapiens
  CDR3 for alpha chain variable domain of TCR clone 93106 (TRAV13-1, TRAJ52)
CAAKNPNAGGTSYGKLTF

SEQ ID NO: 186212 - protein, 14 aa, Homo sapiens
  CDR3 for beta chain variable domain of TCR clone 93106 (TRBV2, TRBJ2-1)
CASSEALIYNEQFF

SEQ ID NO: 186213 - protein, 18 aa, Homo sapiens
  CDR3 for alpha chain variable domain of TCR clone 93107 (TRAV16, TRAJ52)
CALSGVDAGDTSYGKLTF

SEQ ID NO: 186214 - protein, 15 aa, Homo sapiens
  CDR3 for beta chain variable domain of TCR clone 93107 (TRBV11-2, TRBJ2-2)
CASSSDRVNAGELFF

SEQ ID NO: 186215 - protein, 12 aa, Homo sapiens
  CDR3 for alpha chain variable domain of TCR clone 93108 (TRAV16, TRAJ10)
CSRTGGGNKLTY

SEQ ID NO: 186216 - protein, 15 aa, Homo sapiens
  CDR3 for beta chain variable domain of TCR clone 93108 (TRBV6-3, TRBJ2-7)
CASSSPGTVFYEQYF

SEQ ID NO: 186217 - protein, 14 aa, Homo sapiens
  CDR3 for alpha chain variable domain of TCR clone 93109 (TRAV8-1, TRAJ5)
CAVRTDTGRRALTS

SEQ ID NO: 186218 - protein, 14 aa, Homo sapiens
  CDR3 for beta chain variable domain of TCR clone 93109 (TRBV7-8, TRBJ2-3)
CASSFPDGQDTQYF

SEQ ID NO: 186219 - protein, 13 aa, Homo sapiens
  CDR3 for alpha chain variable domain of TCR clone 93110 (TRAV14/DV4, TRAJ4)
CAMKAGGYNKLIF

SEQ ID NO: 186220 - protein, 15 aa, Homo sapiens
  CDR3 for beta chain variable domain of TCR clone 93110 (TRBV6-3, TRBJ2-7)
CASSSPGTVFYEQYF

SEQ ID NO: 186221 - protein, 14 aa, Homo sapiens
  CDR3 for alpha chain variable domain of TCR clone 93111 (TRAV26-1, TRAJ44)
CIVKSTGTASKLTF

SEQ ID NO: 186222 - protein, 15 aa, Homo sapiens
  CDR3 for beta chain variable domain of TCR clone 93111 (TRBV4-1, TRBJ1-3)
CASSHPGTSGNTIYF

SEQ ID NO: 186223 - protein, 14 aa, Homo sapiens
  CDR3 for alpha chain variable domain of TCR clone 93112 (TRAV1-2, TRAJ8)
CAVREDAGFQKLVF

SEQ ID NO: 186224 - protein, 15 aa, Homo sapiens
  CDR3 for beta chain variable domain of TCR clone 93112 (TRBV28, TRBJ2-4)
CAAGSGTLLMGIQYF

SEQ ID NO: 186225 - protein, 12 aa, Homo sapiens
  CDR3 for alpha chain variable domain of TCR clone 93113 (TRAV21, TRAJ39)
CAADNAGNMLTF

SEQ ID NO: 186226 - protein, 12 aa, Homo sapiens
  CDR3 for beta chain variable domain of TCR clone 93113 (TRBV5-4, TRBJ2-7)
CDSSWAGQGENF

SEQ ID NO: 186227 - protein, 13 aa, Homo sapiens
  CDR3 for alpha chain variable domain of TCR clone 93114 (TRAV21, TRAJ27)
CAARPGNAGKSTF

SEQ ID NO: 186228 - protein, 13 aa, Homo sapiens
  CDR3 for beta chain variable domain of TCR clone 93114 (TRBV20-1, TRBJ1-6)
CSAPLGVGSPLHF

SEQ ID NO: 186229 - protein, 15 aa, Homo sapiens
  CDR3 for alpha chain variable domain of TCR clone 93115 (TRAV27, TRAJ38)
CAARRNAGNNRKLIW

SEQ ID NO: 186230 - protein, 15 aa, Homo sapiens
  CDR3 for beta chain variable domain of TCR clone 93115 (TRBV4-3, TRBJ1-2)
CASSQNYGVMDGYTF

SEQ ID NO: 186231 - protein, 10 aa, Homo sapiens
  CDR3 for alpha chain variable domain of TCR clone 93116 (TRAV1-2, TRAJ20)
CACNDYKLSF

SEQ ID NO: 186232 - protein, 16 aa, Homo sapiens
  CDR3 for beta chain variable domain of TCR clone 93116 (TRBV20-1, TRBJ2-1)
CSARDIKQGMNNEQFF

SEQ ID NO: 186233 - protein, 16 aa, Homo sapiens
  CDR3 for alpha chain variable domain of TCR clone 93117 (TRAV26-1, TRAJ53)
CIVRVAMGGSNYKLTC

SEQ ID NO: 186234 - protein, 12 aa, Homo sapiens
  CDR3 for beta chain variable domain of TCR clone 93117 (TRBV7-9, TRBJ1-5)
CASSPQGQPQHF

SEQ ID NO: 186235 - protein, 17 aa, Homo sapiens
  CDR3 for alpha chain variable domain of TCR clone 93118 (TRAV35, TRAJ28)
CAGLQVYSGAGCYQLTF

SEQ ID NO: 186236 - protein, 15 aa, Homo sapiens
  CDR3 for beta chain variable domain of TCR clone 93118 (TRBV2, TRBJ1-2)
CASSEIGGANYGYTF

SEQ ID NO: 186237 - protein, 17 aa, Homo sapiens
  CDR3 for alpha chain variable domain of TCR clone 93119 (TRAV17, TRAJ28)
CATDPRRGGAGSYQLTF

SEQ ID NO: 186238 - protein, 16 aa, Homo sapiens
  CDR3 for beta chain variable domain of TCR clone 93119 (TRBV25-1, TRBJ1-1)
WASSGDRDRGRIEAFF

SEQ ID NO: 186239 - protein, 16 aa, Homo sapiens
  CDR3 for alpha chain variable domain of TCR clone 93120 (TRAV12-2, TRAJ45)
CAVKRNPGGGADGLTF

SEQ ID NO: 186240 - protein, 12 aa, Homo sapiens
  CDR3 for beta chain variable domain of TCR clone 93120 (TRBV6-1, TRBJ2-5)
CASSEGRENQYF

SEQ ID NO: 186241 - protein, 16 aa, Homo sapiens
  CDR3 for alpha chain variable domain of TCR clone 93121 (TRAV3, TRAJ4)
WAVRPSPSGGYNKLIF

SEQ ID NO: 186242 - protein, 12 aa, Homo sapiens
  CDR3 for beta chain variable domain of TCR clone 93121 (TRBV7-9, TRBJ2-7)
CASSQGVYEQYF

SEQ ID NO: 186243 - protein, 14 aa, Homo sapiens
  CDR3 for alpha chain variable domain of TCR clone 93122 (TRAV21, TRAJ21)
CAVKGFGNFNKFYF

SEQ ID NO: 186244 - protein, 15 aa, Homo sapiens
  CDR3 for beta chain variable domain of TCR clone 93122 (TRBV5-4, TRBJ1-1)
CASSSLGWANTEAFF

SEQ ID NO: 186245 - protein, 14 aa, Homo sapiens
  CDR3 for alpha chain variable domain of TCR clone 93123 (TRAV8-1, TRAJ5)
CAVKTDTGRRALTF

SEQ ID NO: 186246 - protein, 15 aa, Homo sapiens
  CDR3 for beta chain variable domain of TCR clone 93123 (TRBV7-3, TRBJ2-1)
CASSPTGGGEVEQFF

SEQ ID NO: 186247 - protein, 12 aa, Homo sapiens
  CDR3 for alpha chain variable domain of TCR clone 93124 (TRAV12-1, TRAJ20)
FVVNPDDYKLSF

SEQ ID NO: 186248 - protein, 12 aa, Homo sapiens
  CDR3 for beta chain variable domain of TCR clone 93124 (TRBV11-2, TRBJ2-2)
CASSLGGGELFF

SEQ ID NO: 186249 - protein, 16 aa, Homo sapiens
  CDR3 for alpha chain variable domain of TCR clone 93125 (TRAV16, TRAJ4)
CALSRMFSGGYNKLIF

SEQ ID NO: 186250 - protein, 14 aa, Homo sapiens
  CDR3 for beta chain variable domain of TCR clone 93125 (TRBV7-2, TRBJ2-1)
CASSLSGVYNEQFF

SEQ ID NO: 186251 - protein, 12 aa, Homo sapiens
  CDR3 for alpha chain variable domain of TCR clone 93126 (TRAV2, TRAJ31)
CAVDDNNARLMF

SEQ ID NO: 186252 - protein, 12 aa, Homo sapiens
  CDR3 for beta chain variable domain of TCR clone 93126 (TRBV28, TRBJ2-3)
CASSLYRDTQYF

SEQ ID NO: 186253 - protein, 18 aa, Homo sapiens
  CDR3 for alpha chain variable domain of TCR clone 93127 (TRAV13-1, TRAJ52)
CAASKRSAGGTSYGKLTF

SEQ ID NO: 186254 - protein, 13 aa, Homo sapiens
  CDR3 for beta chain variable domain of TCR clone 93127 (TRBV7-6, TRBJ1-2)
CASSLVADYGYTF

SEQ ID NO: 186255 - protein, 16 aa, Homo sapiens
  CDR3 for alpha chain variable domain of TCR clone 93128 (TRAV30, TRAJ24)
CGTEIVDADSWGKFQF

SEQ ID NO: 186256 - protein, 15 aa, Homo sapiens
  CDR3 for beta chain variable domain of TCR clone 93128 (TRBV12-4, TRBJ1-1)
CASSLAVSRGAEAFF

SEQ ID NO: 186257 - protein, 16 aa, Homo sapiens
  CDR3 for alpha chain variable domain of TCR clone 93129 (TRAV21, TRAJ52)
CAVTNAGGTSYGKLTF

SEQ ID NO: 186258 - protein, 13 aa, Homo sapiens
  CDR3 for beta chain variable domain of TCR clone 93129 (TRBV7-9, TRBJ2-5)
CASLSPGQETQYF

SEQ ID NO: 186259 - protein, 13 aa, Homo sapiens
  CDR3 for alpha chain variable domain of TCR clone 93130 (TRAV13-2, TRAJ13)
CAERPGGYQKVTF

SEQ ID NO: 186260 - protein, 11 aa, Homo sapiens
  CDR3 for beta chain variable domain of TCR clone 93130 (TRBV12-4, TRBJ2-3)
CASTATDTQYF

SEQ ID NO: 186261 - protein, 14 aa, Homo sapiens
  CDR3 for alpha chain variable domain of TCR clone 93131 (TRAV17, TRAJ57)
CATDPQGGSEKLVF

SEQ ID NO: 186262 - protein, 15 aa, Homo sapiens
  CDR3 for beta chain variable domain of TCR clone 93131 (TRBV20-1, TRBJ1-1)
CSASRGVTGNTEAFF

SEQ ID NO: 186263 - protein, 14 aa, Homo sapiens
  CDR3 for alpha chain variable domain of TCR clone 93132 (TRAV1-2, TRAJ16)
CVVNRFSDGQKLLF

SEQ ID NO: 186264 - protein, 14 aa, Homo sapiens
  CDR3 for beta chain variable domain of TCR clone 93132 (TRBV19, TRBJ2-1)
CASEVTGARNEQFF

SEQ ID NO: 186265 - protein, 16 aa, Homo sapiens
  CDR3 for alpha chain variable domain of TCR clone 93133 (TRAV26-1, TRAJ33)
CIVPFWGEDSNYQLIW

SEQ ID NO: 186266 - protein, 16 aa, Homo sapiens
  CDR3 for beta chain variable domain of TCR clone 93133 (TRBV15, TRBJ1-2)
CATSRGPRTGGGGYTF

SEQ ID NO: 186267 - protein, 12 aa, Homo sapiens
  CDR3 for alpha chain variable domain of TCR clone 93134 (TRAV21, TRAJ33)
CAKMDSNYQLIW

SEQ ID NO: 186268 - protein, 16 aa, Homo sapiens
  CDR3 for beta chain variable domain of TCR clone 93134 (TRBV11-2, TRBJ2-3)
CASSSRTSGGAGTQYF

SEQ ID NO: 186269 - protein, 11 aa, Homo sapiens
  CDR3 for alpha chain variable domain of TCR clone 93135 (TRAV3, TRAJ21)
CAVGTFNKFYF

SEQ ID NO: 186270 - protein, 16 aa, Homo sapiens
  CDR3 for beta chain variable domain of TCR clone 93135 (TRBV19, TRBJ2-1)
CAGSKAGPSSYNEQFF

SEQ ID NO: 186271 - protein, 14 aa, Homo sapiens
  CDR3 for alpha chain variable domain of TCR clone 93136 (TRAV38-1, TRAJ45)
CAYYSGGGADGLTF

SEQ ID NO: 186272 - protein, 12 aa, Homo sapiens
  CDR3 for beta chain variable domain of TCR clone 93136 (TRBV11-2, TRBJ2-1)
CASSPGNNEQFF

SEQ ID NO: 186273 - protein, 14 aa, Homo sapiens
  CDR3 for alpha chain variable domain of TCR clone 93137 (TRAV29/DV5, TRAJ52)
CAATDGTSYGKLTF

SEQ ID NO: 186274 - protein, 12 aa, Homo sapiens
  CDR3 for beta chain variable domain of TCR clone 93137 (TRBV19, TRBJ1-5)
CASSIAQQPKHF

SEQ ID NO: 186275 - protein, 14 aa, Homo sapiens
  CDR3 for alpha chain variable domain of TCR clone 93138 (TRAV13-1, TRAJ13)
CAASRVGGYQKVTF

SEQ ID NO: 186276 - protein, 17 aa, Homo sapiens
  CDR3 for beta chain variable domain of TCR clone 93138 (TRBV15, TRBJ1-5)
CATSRAPPGTRNRPQHF

SEQ ID NO: 186277 - protein, 15 aa, Homo sapiens
  CDR3 for alpha chain variable domain of TCR clone 93139 (TRAV20, TRAJ50)
CAVRQMKTSYDKVIF

SEQ ID NO: 186278 - protein, 12 aa, Homo sapiens
  CDR3 for beta chain variable domain of TCR clone 93139 (TRBV11-2, TRBJ2-2)
CASSLGGGELFF

SEQ ID NO: 186279 - protein, 13 aa, Homo sapiens
  CDR3 for alpha chain variable domain of TCR clone 93140 (TRAV16, TRAJ9)
CALRATGGFKTIF

SEQ ID NO: 186280 - protein, 16 aa, Homo sapiens
  CDR3 for beta chain variable domain of TCR clone 93140 (TRBV4-1, TRBJ1-2)
CASSQDAGQVLYGYTF

SEQ ID NO: 186281 - protein, 15 aa, Homo sapiens
  CDR3 for alpha chain variable domain of TCR clone 93141 (TRAV3, TRAJ9)
CAVRARNTGGFKTTF

SEQ ID NO: 186282 - protein, 15 aa, Homo sapiens
  CDR3 for beta chain variable domain of TCR clone 93141 (TRBV27, TRBJ1-1)
CASSPYADPYTEAFF

SEQ ID NO: 186283 - protein, 12 aa, Homo sapiens
  CDR3 for alpha chain variable domain of TCR clone 93142 (TRAV13-1, TRAJ9)
CAIPTGGFKTIF

SEQ ID NO: 186284 - protein, 13 aa, Homo sapiens
  CDR3 for beta chain variable domain of TCR clone 93142 (TRBV7-9, TRBJ1-2)
CASSLKQNYGYTF

SEQ ID NO: 186285 - protein, 16 aa, Homo sapiens
  CDR3 for alpha chain variable domain of TCR clone 93143 (TRAV12-3, TRAJ53)
CAMSPGSGGSNYKLTF

SEQ ID NO: 186286 - protein, 16 aa, Homo sapiens
  CDR3 for beta chain variable domain of TCR clone 93143 (TRBV29-1, TRBJ2-7)
CSVEVVGTSGSYEQYF

SEQ ID NO: 186287 - protein, 11 aa, Homo sapiens
  CDR3 for alpha chain variable domain of TCR clone 93144 (TRAV23/DV6, TRAJ48)
CAPRWGEKLTF

SEQ ID NO: 186288 - protein, 14 aa, Homo sapiens
  CDR3 for beta chain variable domain of TCR clone 93144 (TRBV4-2, TRBJ2-3)
CASSQERGTDTQYF

SEQ ID NO: 186289 - protein, 15 aa, Homo sapiens
  CDR3 for alpha chain variable domain of TCR clone 93145 (TRAV36/DV7, TRAJ54)
CAVEKPVQGAQKLVF

SEQ ID NO: 186290 - protein, 14 aa, Homo sapiens
  CDR3 for beta chain variable domain of TCR clone 93145 (TRBV4-3, TRBJ2-2)
CASSQGRVTGELFF

SEQ ID NO: 186291 - protein, 16 aa, Homo sapiens
  CDR3 for alpha chain variable domain of TCR clone 93146 (TRAV3, TRAJ37)
CAVRGKGSGNTGKLLF

SEQ ID NO: 186292 - protein, 13 aa, Homo sapiens
  CDR3 for beta chain variable domain of TCR clone 93146 (TRBV19, TRBJ1-2)
CASSVPGQDGYTF

SEQ ID NO: 186293 - protein, 14 aa, Homo sapiens
  CDR3 for alpha chain variable domain of TCR clone 93147 (TRAV26-1, TRAJ38)
CIADNAGNNRKLIW

SEQ ID NO: 186294 - protein, 16 aa, Homo sapiens
  CDR3 for beta chain variable domain of TCR clone 93147 (TRBV7-9, TRBJ2-1)
CASSGVAGGSYNEQFF

SEQ ID NO: 186295 - protein, 14 aa, Homo sapiens
  CDR3 for alpha chain variable domain of TCR clone 93148 (TRAV12-2, TRAJ13)
CAVKKTGGYQKVAF

SEQ ID NO: 186296 - protein, 15 aa, Homo sapiens
  CDR3 for beta chain variable domain of TCR clone 93148 (TRBV27, TRBJ2-1)
CASSNGGGSSNEQFL

SEQ ID NO: 186297 - protein, 14 aa, Homo sapiens
  CDR3 for alpha chain variable domain of TCR clone 93149 (TRAV17, TRAJ57)
CAKDPQGGSEKLVF

SEQ ID NO: 186298 - protein, 18 aa, Homo sapiens
  CDR3 for beta chain variable domain of TCR clone 93149 (TRBV6-6, TRBJ1-3)
CASSYPKWDSISGNTIYF

SEQ ID NO: 186299 - protein, 16 aa, Homo sapiens
  CDR3 for alpha chain variable domain of TCR clone 93150 (TRAV3, TRAJ32)
CAVRDMGGGATNKLIF

SEQ ID NO: 186300 - protein, 11 aa, Homo sapiens
  CDR3 for beta chain variable domain of TCR clone 93150 (TRBV12-4, TRBJ2-1)
CASSRLNEHFF

SEQ ID NO: 186301 - protein, 13 aa, Homo sapiens
  CDR3 for alpha chain variable domain of TCR clone 93151 (TRAV12-1, TRAJ21)
CVVIGDNFNKFYF

SEQ ID NO: 186302 - protein, 14 aa, Homo sapiens
  CDR3 for beta chain variable domain of TCR clone 93151 (TRBV7-3, TRBJ2-2)
CASSLYPLTGELLF

SEQ ID NO: 186303 - protein, 13 aa, Homo sapiens
  CDR3 for alpha chain variable domain of TCR clone 93152 (TRAV13-1, TRAJ21)
CAASIYNFNKFYF

SEQ ID NO: 186304 - protein, 13 aa, Homo sapiens
  CDR3 for beta chain variable domain of TCR clone 93152 (TRBV27, TRBJ1-4)
CASSLMGVEKLFF

SEQ ID NO: 186305 - protein, 15 aa, Homo sapiens
  CDR3 for alpha chain variable domain of TCR clone 93153 (TRAV2, TRAJ15)
CAVEDRGQAGTALIF

SEQ ID NO: 186306 - protein, 13 aa, Homo sapiens
  CDR3 for beta chain variable domain of TCR clone 93153 (TRBV10-2, TRBJ2-7)
CASGASGGYEQNF

SEQ ID NO: 186307 - protein, 13 aa, Homo sapiens
  CDR3 for alpha chain variable domain of TCR clone 93154 (TRAV2, TRAJ40)
CAVVTSGTYKYIF

SEQ ID NO: 186308 - protein, 12 aa, Homo sapiens
  CDR3 for beta chain variable domain of TCR clone 93154 (TRBV12-5, TRBJ2-5)
CASGQGVETQYF

SEQ ID NO: 186309 - protein, 13 aa, Homo sapiens
  CDR3 for alpha chain variable domain of TCR clone 93155 (TRAV9-2, TRAJ53)
CALSGGSNYKLTF

SEQ ID NO: 186310 - protein, 17 aa, Homo sapiens
  CDR3 for beta chain variable domain of TCR clone 93155 (TRBV11-2, TRBJ2-1)
CASSLYPPGVEHNEQFF

SEQ ID NO: 186311 - protein, 11 aa, Homo sapiens
  CDR3 for alpha chain variable domain of TCR clone 93156 (TRAV2, TRAJ13)
CASGGYQKVTF

SEQ ID NO: 186312 - protein, 16 aa, Homo sapiens
  CDR3 for beta chain variable domain of TCR clone 93156 (TRBV19, TRBJ2-1)
CASSKAGQSSYNEQFL

SEQ ID NO: 186313 - protein, 16 aa, Homo sapiens
  CDR3 for alpha chain variable domain of TCR clone 93157 (TRAV12-1, TRAJ48)
CVVNMRGNFGNEKLTF

SEQ ID NO: 186314 - protein, 16 aa, Homo sapiens
  CDR3 for beta chain variable domain of TCR clone 93157 (TRBV7-6, TRBJ2-1)
CASSSVVAGTYNEQFF

SEQ ID NO: 186315 - protein, 14 aa, Homo sapiens
  CDR3 for alpha chain variable domain of TCR clone 93158 (TRAV2, TRAJ9)
CAVEDRGGGFKTIF

SEQ ID NO: 186316 - protein, 12 aa, Homo sapiens
  CDR3 for beta chain variable domain of TCR clone 93158 (TRBV12-5, TRBJ2-5)
CASGQGVETQYF

SEQ ID NO: 186317 - protein, 14 aa, Homo sapiens
  CDR3 for alpha chain variable domain of TCR clone 93159 (TRAV1-2, TRAJ29)
CAVRELTSATPLGF

SEQ ID NO: 186318 - protein, 14 aa, Homo sapiens
  CDR3 for beta chain variable domain of TCR clone 93159 (TRBV3-1, TRBJ2-5)
CASSQGPDQETQYF

SEQ ID NO: 186319 - protein, 14 aa, Homo sapiens
  CDR3 for alpha chain variable domain of TCR clone 93160 (TRAV12-3, TRAJ43)
CAMSLGGAGTRLTV

SEQ ID NO: 186320 - protein, 13 aa, Homo sapiens
  CDR3 for beta chain variable domain of TCR clone 93160 (TRBV7-9, TRBJ1-2)
CASSLKQNYGYAF

SEQ ID NO: 186321 - protein, 20 aa, Homo sapiens
  CDR3 for alpha chain variable domain of TCR clone 93161 (TRAV12-3, TRAJ41)
SLFIRDSQPSDSATPEALNF

SEQ ID NO: 186322 - protein, 16 aa, Homo sapiens
  CDR3 for beta chain variable domain of TCR clone 93161 (TRBV19, TRBJ1-6)
CARRLEGNLHNSPLHF

SEQ ID NO: 186323 - protein, 14 aa, Homo sapiens
  CDR3 for alpha chain variable domain of TCR clone 93162 (TRAV12-3, TRAJ10)
SHLPLTGGGNKLTF

SEQ ID NO: 186324 - protein, 15 aa, Homo sapiens
  CDR3 for beta chain variable domain of TCR clone 93162 (TRBV7-9, TRBJ2-5)
CASSRRTGGGETQYF

SEQ ID NO: 186325 - protein, 15 aa, Homo sapiens
  CDR3 for alpha chain variable domain of TCR clone 93163 (TRAV8-1, TRAJ6)
CAVNTPPGGSYIPTF

SEQ ID NO: 186326 - protein, 15 aa, Homo sapiens
  CDR3 for beta chain variable domain of TCR clone 93163 (TRBV11-2, TRBJ2-2)
CVSSSDRVNAGELFF

SEQ ID NO: 186327 - protein, 14 aa, Homo sapiens
  CDR3 for alpha chain variable domain of TCR clone 93164 (TRAV16, TRAJ26)
CALSSVNYGQNFVF

SEQ ID NO: 186328 - protein, 12 aa, Homo sapiens
  CDR3 for beta chain variable domain of TCR clone 93164 (TRBV6-5, TRBJ2-2)
CASRTGTGELFF

SEQ ID NO: 186329 - protein, 12 aa, Homo sapiens
  CDR3 for alpha chain variable domain of TCR clone 93165 (TRAV13-1, TRAJ15)
CAASQAVTALIF

SEQ ID NO: 186330 - protein, 18 aa, Homo sapiens
  CDR3 for beta chain variable domain of TCR clone 93165 (TRBV7-9, TRBJ2-3)
CASSLPINGQISTDTQYF

SEQ ID NO: 186331 - protein, 17 aa, Homo sapiens
  CDR3 for alpha chain variable domain of TCR clone 93166 (TRAV8-1, TRAJ43)
CAVTNDMRFGAGTRLTV

SEQ ID NO: 186332 - protein, 18 aa, Homo sapiens
  CDR3 for beta chain variable domain of TCR clone 93166 (TRBV11-2, TRBJ2-3)
CASSLGGASRGAPNTQYF

SEQ ID NO: 186333 - protein, 17 aa, Homo sapiens
  CDR3 for alpha chain variable domain of TCR clone 93167 (TRAV14/DV4, TRAJ28)
CAMRGTSSGAGSYKLTF

SEQ ID NO: 186334 - protein, 13 aa, Homo sapiens
  CDR3 for beta chain variable domain of TCR clone 93167 (TRBV28, TRBJ2-5)
CASSFAGGETQYF

SEQ ID NO: 186335 - protein, 16 aa, Homo sapiens
  CDR3 for alpha chain variable domain of TCR clone 93168 (TRAV8-1, TRAJ52)
CRDLPAGGTSYGKLTF

SEQ ID NO: 186336 - protein, 15 aa, Homo sapiens
  CDR3 for beta chain variable domain of TCR clone 93168 (TRBV10-3, TRBJ2-3)
CAIDTSGRRTDTQYF

SEQ ID NO: 186337 - protein, 16 aa, Homo sapiens
  CDR3 for alpha chain variable domain of TCR clone 93169 (TRAV25, TRAJ53)
CAGPKGSGGSNYKLTF

SEQ ID NO: 186338 - protein, 19 aa, Homo sapiens
  CDR3 for beta chain variable domain of TCR clone 93169 (TRBV25-1, TRBJ2-2)
CAILVYRVDRGRKTGELFF

SEQ ID NO: 186339 - protein, 14 aa, Homo sapiens
  CDR3 for alpha chain variable domain of TCR clone 93170 (TRAV17, TRAJ32)
CATDPGGATNKLIF

SEQ ID NO: 186340 - protein, 12 aa, Homo sapiens
  CDR3 for beta chain variable domain of TCR clone 93170 (TRBV11-2, TRBJ2-2)
CASSLGGGELFF

SEQ ID NO: 186341 - protein, 15 aa, Homo sapiens
  CDR3 for alpha chain variable domain of TCR clone 93171 (TRAV26-1, TRAJ44)
CIVRANTGTASKLTF

SEQ ID NO: 186342 - protein, 16 aa, Homo sapiens
  CDR3 for beta chain variable domain of TCR clone 93171 (TRBV7-7, TRBJ2-1)
CASSLASGPSYNEQFF

SEQ ID NO: 186343 - protein, 11 aa, Homo sapiens
  CDR3 for alpha chain variable domain of TCR clone 93172 (TRAV2, TRAJ13)
CASAGYQKVTF

SEQ ID NO: 186344 - protein, 16 aa, Homo sapiens
  CDR3 for beta chain variable domain of TCR clone 93172 (TRBV19, TRBJ2-1)
CASSKAGPSSYNEQFF

SEQ ID NO: 186345 - protein, 14 aa, Homo sapiens
  CDR3 for alpha chain variable domain of TCR clone 93173 (TRAV26-1, TRAJ39)
FIVRAYNAGNMLTF

SEQ ID NO: 186346 - protein, 16 aa, Homo sapiens
  CDR3 for beta chain variable domain of TCR clone 93173 (TRBV15, TRBJ2-7)
CATSRDFGAAVYEQYF

SEQ ID NO: 186347 - protein, 16 aa, Homo sapiens
  CDR3 for alpha chain variable domain of TCR clone 93174 (TRAV4, TRAJ18)
CCVLLIGGSTLGRLYF

SEQ ID NO: 186348 - protein, 16 aa, Homo sapiens
  CDR3 for beta chain variable domain of TCR clone 93174 (TRBV6-1, TRBJ2-1)
CASILRQGSSYNEQFF

SEQ ID NO: 186349 - protein, 15 aa, Homo sapiens
  CDR3 for alpha chain variable domain of TCR clone 93175 (TRAV21, TRAJ32)
CAVRRYGGATNKLIF

SEQ ID NO: 186350 - protein, 17 aa, Homo sapiens
  CDR3 for beta chain variable domain of TCR clone 93175 (TRBV13, TRBJ2-3)
CASSLSRVAGGRNTQYF

SEQ ID NO: 186351 - protein, 11 aa, Homo sapiens
  CDR3 for alpha chain variable domain of TCR clone 93176 (TRAV13-1, TRAJ40)
CAVSGTYKYIF

SEQ ID NO: 186352 - protein, 16 aa, Homo sapiens
  CDR3 for beta chain variable domain of TCR clone 93176 (TRBV10-3, TRBJ2-3)
CAISVSRLALTGTQYF

SEQ ID NO: 186353 - protein, 15 aa, Homo sapiens
  CDR3 for alpha chain variable domain of TCR clone 93177 (TRAV10, TRAJ6)
CVVRPRTGGSYIPTF

SEQ ID NO: 186354 - protein, 16 aa, Homo sapiens
  CDR3 for beta chain variable domain of TCR clone 93177 (TRBV7-2, TRBJ1-2)
CASSSNQDRRGHGYTF

SEQ ID NO: 186355 - protein, 15 aa, Homo sapiens
  CDR3 for alpha chain variable domain of TCR clone 93178 (TRAV13-1, TRAJ45)
CAASGSGGGADGPTF

SEQ ID NO: 186356 - protein, 12 aa, Homo sapiens
  CDR3 for beta chain variable domain of TCR clone 93178 (TRBV11-2, TRBJ2-2)
CASSLGGGELFF

SEQ ID NO: 186357 - protein, 12 aa, Homo sapiens
  CDR3 for alpha chain variable domain of TCR clone 93179 (TRAV8-3, TRAJ20)
CAVDFNDYKLSF

SEQ ID NO: 186358 - protein, 16 aa, Homo sapiens
  CDR3 for beta chain variable domain of TCR clone 93179 (TRBV7-3, TRBJ2-2)
CASSLKRGTLSGELFF

SEQ ID NO: 186359 - protein, 12 aa, Homo sapiens
  CDR3 for alpha chain variable domain of TCR clone 93180 (TRAV27, TRAJ9)
CAGESGGFKTIF

SEQ ID NO: 186360 - protein, 14 aa, Homo sapiens
  CDR3 for beta chain variable domain of TCR clone 93180 (TRBV12-5, TRBJ2-5)
CASGSRTHQETQYF

SEQ ID NO: 186361 - protein, 11 aa, Homo sapiens
  CDR3 for alpha chain variable domain of TCR clone 93181 (TRAV4, TRAJ23)
CLVAPGGKLIS

SEQ ID NO: 186362 - protein, 13 aa, Homo sapiens
  CDR3 for beta chain variable domain of TCR clone 93181 (TRBV7-9, TRBJ1-2)
CASSLKQNYGYTF

SEQ ID NO: 186363 - protein, 12 aa, Homo sapiens
  CDR3 for alpha chain variable domain of TCR clone 93182 (TRAV21, TRAJ11)
CAVRGGNSTLTF

SEQ ID NO: 186364 - protein, 14 aa, Homo sapiens
  CDR3 for beta chain variable domain of TCR clone 93182 (TRBV11-2, TRBJ2-5)
CASSRTGGIETQYF

SEQ ID NO: 186365 - protein, 17 aa, Homo sapiens
  CDR3 for alpha chain variable domain of TCR clone 93183 (TRAV3, TRAJ6)
CAVSDGPRAGGSYIPTF

SEQ ID NO: 186366 - protein, 14 aa, Homo sapiens
  CDR3 for beta chain variable domain of TCR clone 93183 (TRBV7-2, TRBJ2-7)
CASSPKTSFYEQYF

SEQ ID NO: 186367 - protein, 16 aa, Homo sapiens
  CDR3 for alpha chain variable domain of TCR clone 93184 (TRAV3, TRAJ10)
CAVRDMRAGGGNKLTF

SEQ ID NO: 186368 - protein, 13 aa, Homo sapiens
  CDR3 for beta chain variable domain of TCR clone 93184 (TRBV25-1, TRBJ1-1)
CQHPPGGNTEAFF

SEQ ID NO: 186369 - protein, 12 aa, Homo sapiens
  CDR3 for alpha chain variable domain of TCR clone 93185 (TRAV13-2, TRAJ23)
CAERHRGGKLIF

SEQ ID NO: 186370 - protein, 15 aa, Homo sapiens
  CDR3 for beta chain variable domain of TCR clone 93185 (TRBV3-1, TRBJ2-5)
CASSANLGGPETQYF

SEQ ID NO: 186371 - protein, 14 aa, Homo sapiens
  CDR3 for alpha chain variable domain of TCR clone 93186 (TRAV26-1, TRAJ29)
CIVRVEPGNTPLVF

SEQ ID NO: 186372 - protein, 13 aa, Homo sapiens
  CDR3 for beta chain variable domain of TCR clone 93186 (TRBV10-3, TRBJ2-5)
CAMTSGAGETQYF

SEQ ID NO: 186373 - protein, 14 aa, Homo sapiens
  CDR3 for alpha chain variable domain of TCR clone 93187 (TRAV25, TRAJ23)
CAGQGDNQRGKLIF

SEQ ID NO: 186374 - protein, 12 aa, Homo sapiens
  CDR3 for beta chain variable domain of TCR clone 93187 (TRBV7-9, TRBJ1-1)
CASSLVRGEAFF

SEQ ID NO: 186375 - protein, 14 aa, Homo sapiens
  CDR3 for alpha chain variable domain of TCR clone 93188 (TRAV13-1, TRAJ31)
CAASSRPNNARLMF

SEQ ID NO: 186376 - protein, 14 aa, Homo sapiens
  CDR3 for beta chain variable domain of TCR clone 93188 (TRBV5-4, TRBJ2-2)
CASRLDGGTGELFF

SEQ ID NO: 186377 - protein, 14 aa, Homo sapiens
  CDR3 for alpha chain variable domain of TCR clone 93189 (TRAV2, TRAJ9)
CAVEDRSGGFKTIF

SEQ ID NO: 186378 - protein, 16 aa, Homo sapiens
  CDR3 for beta chain variable domain of TCR clone 93189 (TRBV7-3, TRBJ2-2)
CASSLKRGALSGELFF

SEQ ID NO: 186379 - protein, 13 aa, Homo sapiens
  CDR3 for alpha chain variable domain of TCR clone 93190 (TRAV3, TRAJ21)
CAVREPDFNKFYF

SEQ ID NO: 186380 - protein, 15 aa, Homo sapiens
  CDR3 for beta chain variable domain of TCR clone 93190 (TRBV7-9, TRBJ1-2)
CASSLDREPNYGYTF

SEQ ID NO: 186381 - protein, 12 aa, Homo sapiens
  CDR3 for alpha chain variable domain of TCR clone 93191 (TRAV13-1, TRAJ21)
CAAKEGFDKFYF

SEQ ID NO: 186382 - protein, 15 aa, Homo sapiens
  CDR3 for beta chain variable domain of TCR clone 93191 (TRBV15, TRBJ1-5)
CATSRDPVSNQPQHF

SEQ ID NO: 186383 - protein, 15 aa, Homo sapiens
  CDR3 for alpha chain variable domain of TCR clone 93192 (TRAV12-3, TRAJ6)
CAMSATSGGSYIPTF

SEQ ID NO: 186384 - protein, 11 aa, Homo sapiens
  CDR3 for beta chain variable domain of TCR clone 93192 (TRBV20-1, TRBJ1-5)
CSAQGDQPHHF

SEQ ID NO: 186385 - protein, 12 aa, Homo sapiens
  CDR3 for alpha chain variable domain of TCR clone 93193 (TRAV20, TRAJ54)
CAAQEGAQKLVF

SEQ ID NO: 186386 - protein, 17 aa, Homo sapiens
  CDR3 for beta chain variable domain of TCR clone 93193 (TRBV13, TRBJ2-3)
CASSLSRVAGGGNTQYF

SEQ ID NO: 186387 - protein, 16 aa, Homo sapiens
  CDR3 for alpha chain variable domain of TCR clone 93194 (TRAV8-3, TRAJ13)
CAVGDYPSGGYQKVTF

SEQ ID NO: 186388 - protein, 15 aa, Homo sapiens
  CDR3 for beta chain variable domain of TCR clone 93194 (TRBV19, TRBJ1-5)
CASSIVWADNQPQHF

SEQ ID NO: 186389 - protein, 13 aa, Homo sapiens
  CDR3 for alpha chain variable domain of TCR clone 93195 (TRAV2, TRAJ40)
CAVVTSGTYRYIF

SEQ ID NO: 186390 - protein, 14 aa, Homo sapiens
  CDR3 for beta chain variable domain of TCR clone 93195 (TRBV19, TRBJ2-1)
RASPTFVLSGEQFF

SEQ ID NO: 186391 - protein, 14 aa, Homo sapiens
  CDR3 for alpha chain variable domain of TCR clone 93196 (TRAV8-3, TRAJ4)
CAVGAAGGYNKLIF

SEQ ID NO: 186392 - protein, 16 aa, Homo sapiens
  CDR3 for beta chain variable domain of TCR clone 93196 (TRBV9, TRBJ2-1)
CASSVGGGGNYNEQFF

SEQ ID NO: 186393 - protein, 11 aa, Homo sapiens
  CDR3 for alpha chain variable domain of TCR clone 93197 (TRAV3, TRAJ21)
CAVGNFNKFYF

SEQ ID NO: 186394 - protein, 15 aa, Homo sapiens
  CDR3 for beta chain variable domain of TCR clone 93197 (TRBV5-8, TRBJ1-5)
CASSWTPGTPQPQHF

SEQ ID NO: 186395 - protein, 14 aa, Homo sapiens
  CDR3 for alpha chain variable domain of TCR clone 93198 (TRAV23/DV6, TRAJ26)
CAVRGNNYGQNFVF

SEQ ID NO: 186396 - protein, 15 aa, Homo sapiens
  CDR3 for beta chain variable domain of TCR clone 93198 (TRBV11-2, TRBJ1-1)
CASSPSGRLNTEAFF

SEQ ID NO: 186397 - protein, 12 aa, Homo sapiens
  CDR3 for alpha chain variable domain of TCR clone 93199 (TRAV16, TRAJ9)
CALRAGGFKTIF

SEQ ID NO: 186398 - protein, 14 aa, Homo sapiens
  CDR3 for beta chain variable domain of TCR clone 93199 (TRBV20-1, TRBJ2-1)
CSAQIGGSANEQFF

SEQ ID NO: 186399 - protein, 15 aa, Homo sapiens
  CDR3 for alpha chain variable domain of TCR clone 93200 (TRAV17, TRAJ56)
CATEPFTGANSKLTF

SEQ ID NO: 186400 - protein, 15 aa, Homo sapiens
  CDR3 for beta chain variable domain of TCR clone 93200 (TRBV18, TRBJ2-2)
CASSPPVGFTGELFF

SEQ ID NO: 186401 - protein, 14 aa, Homo sapiens
  CDR3 for alpha chain variable domain of TCR clone 93201 (TRAV23/DV6, TRAJ13)
CAASETGGYQKVTF

SEQ ID NO: 186402 - protein, 17 aa, Homo sapiens
  CDR3 for beta chain variable domain of TCR clone 93201 (TRBV13, TRBJ2-3)
CASSLSRVAGGRNTQYF

SEQ ID NO: 186403 - protein, 14 aa, Homo sapiens
  CDR3 for alpha chain variable domain of TCR clone 93202 (TRAV12-2, TRAJ13)
CAVRKTGGYQKVTF

SEQ ID NO: 186404 - protein, 11 aa, Homo sapiens
  CDR3 for beta chain variable domain of TCR clone 93202 (TRBV29-1, TRBJ2-5)
CSEDRTGTQYF

SEQ ID NO: 186405 - protein, 13 aa, Homo sapiens
  CDR3 for alpha chain variable domain of TCR clone 93203 (TRAV29/DV5, TRAJ31)
CAASRNNNARLMF

SEQ ID NO: 186406 - protein, 18 aa, Homo sapiens
  CDR3 for beta chain variable domain of TCR clone 93203 (TRBV7-9, TRBJ2-1)
CASSTGLAEGSSYNEQFF

SEQ ID NO: 186407 - protein, 14 aa, Homo sapiens
  CDR3 for alpha chain variable domain of TCR clone 93204 (TRAV20, TRAJ56)
CAVRFGGASSKLTF

SEQ ID NO: 186408 - protein, 14 aa, Homo sapiens
  CDR3 for beta chain variable domain of TCR clone 93204 (TRBV20-1, TRBJ2-7)
CSAKRGRSSYEHYF

SEQ ID NO: 186409 - protein, 16 aa, Homo sapiens
  CDR3 for alpha chain variable domain of TCR clone 93205 (TRAV38-1, TRAJ56)
CAFMKRQTGANSKLTF

SEQ ID NO: 186410 - protein, 12 aa, Homo sapiens
  CDR3 for beta chain variable domain of TCR clone 93205 (TRBV11-2, TRBJ2-2)
CASSLPTGELFF

SEQ ID NO: 186411 - protein, 17 aa, Homo sapiens
  CDR3 for alpha chain variable domain of TCR clone 93206 (TRAV26-1, TRAJ53)
CIVRVDDSGGSNYQLTF

SEQ ID NO: 186412 - protein, 15 aa, Homo sapiens
  CDR3 for beta chain variable domain of TCR clone 93206 (TRBV20-1, TRBJ2-7)
CSARVPAAYFYEQYF

SEQ ID NO: 186413 - protein, 13 aa, Homo sapiens
  CDR3 for alpha chain variable domain of TCR clone 93207 (TRAV8-4, TRAJ10)
CAAFTVGGNKLTF

SEQ ID NO: 186414 - protein, 15 aa, Homo sapiens
  CDR3 for beta chain variable domain of TCR clone 93207 (TRBV2, TRBJ2-3)
CASSDFEKATDTQYF

SEQ ID NO: 186415 - protein, 15 aa, Homo sapiens
  CDR3 for alpha chain variable domain of TCR clone 93208 (TRAV8-3, TRAJ45)
CASSYSGGGADGLTF

SEQ ID NO: 186416 - protein, 15 aa, Homo sapiens
  CDR3 for beta chain variable domain of TCR clone 93208 (TRBV20-1, TRBJ2-7)
CSARDRVYGMDEQYF

SEQ ID NO: 186417 - protein, 12 aa, Homo sapiens
  CDR3 for alpha chain variable domain of TCR clone 93209 (TRAV16, TRAJ22)
CALELSARQLTF

SEQ ID NO: 186418 - protein, 14 aa, Homo sapiens
  CDR3 for beta chain variable domain of TCR clone 93209 (TRBV11-2, TRBJ2-3)
CASSSIASTDTQYF

SEQ ID NO: 186419 - protein, 14 aa, Homo sapiens
  CDR3 for alpha chain variable domain of TCR clone 93210 (TRAV16, TRAJ17)
CAPRIKAAGNKLTF

SEQ ID NO: 186420 - protein, 17 aa, Homo sapiens
  CDR3 for beta chain variable domain of TCR clone 93210 (TRBV7-2, TRBJ2-3)
CAISSYSGTRRADTQYF

SEQ ID NO: 186421 - protein, 13 aa, Homo sapiens
  CDR3 for alpha chain variable domain of TCR clone 93211 (TRAV12-2, TRAJ3)
CAFQYSSAPKIIF

SEQ ID NO: 186422 - protein, 11 aa, Homo sapiens
  CDR3 for beta chain variable domain of TCR clone 93211 (TRBV20-1, TRBJ2-3)
CSGTSSTTQYF

SEQ ID NO: 186423 - protein, 12 aa, Homo sapiens
  CDR3 for alpha chain variable domain of TCR clone 93212 (TRAV12-3, TRAJ17)
CAMTLTGNKLTF

SEQ ID NO: 186424 - protein, 15 aa, Homo sapiens
  CDR3 for beta chain variable domain of TCR clone 93212 (TRBV20-1, TRBJ2-7)
CSARDQVSGTDEQYF

SEQ ID NO: 186425 - protein, 16 aa, Homo sapiens
  CDR3 for alpha chain variable domain of TCR clone 93213 (TRAV26-1, TRAJ36)
CIVRVSQKSGANNLFF

SEQ ID NO: 186426 - protein, 11 aa, Homo sapiens
  CDR3 for beta chain variable domain of TCR clone 93213 (TRBV7-2, TRBJ2-3)
CASSASDTQYF

SEQ ID NO: 186427 - protein, 16 aa, Homo sapiens
  CDR3 for alpha chain variable domain of TCR clone 93214 (TRAV3, TRAJ37)
CAVRGKGSGNTGKLTF

SEQ ID NO: 186428 - protein, 13 aa, Homo sapiens
  CDR3 for beta chain variable domain of TCR clone 93214 (TRBV7-2, TRBJ2-2)
CASSSVRAGELFF

SEQ ID NO: 186429 - protein, 16 aa, Homo sapiens
  CDR3 for alpha chain variable domain of TCR clone 93215 (TRAV12-2, TRAJ45)
CAVNMYSGGGADGLTF

SEQ ID NO: 186430 - protein, 17 aa, Homo sapiens
  CDR3 for beta chain variable domain of TCR clone 93215 (TRBV11-2, TRBJ2-1)
CASSLYPPGVEYNEQFF

SEQ ID NO: 186431 - protein, 14 aa, Homo sapiens
  CDR3 for alpha chain variable domain of TCR clone 93216 (TRAV2, TRAJ9)
CAVEDRSGGFKTIL

SEQ ID NO: 186432 - protein, 16 aa, Homo sapiens
  CDR3 for beta chain variable domain of TCR clone 93216 (TRBV7-3, TRBJ2-2)
CASSLKRGTLSGELFF

SEQ ID NO: 186433 - protein, 15 aa, Homo sapiens
  CDR3 for alpha chain variable domain of TCR clone 93217 (TRAV8-2, TRAJ42)
CVVSAYMGSQGNLIF

SEQ ID NO: 186434 - protein, 11 aa, Homo sapiens
  CDR3 for beta chain variable domain of TCR clone 93217 (TRBV5-1, TRBJ2-1)
CDSSIGQEQFF

SEQ ID NO: 186435 - protein, 11 aa, Homo sapiens
  CDR3 for alpha chain variable domain of TCR clone 93218 (TRAV3, TRAJ21)
CAVGNFNKFYF

SEQ ID NO: 186436 - protein, 19 aa, Homo sapiens
  CDR3 for beta chain variable domain of TCR clone 93218 (TRBV19, TRBJ2-2)
CASTRPGLAGGRVTGELFF

SEQ ID NO: 186437 - protein, 14 aa, Homo sapiens
  CDR3 for alpha chain variable domain of TCR clone 93219 (TRAV26-1, TRAJ44)
FISPLPGTASKLTF

SEQ ID NO: 186438 - protein, 16 aa, Homo sapiens
  CDR3 for beta chain variable domain of TCR clone 93219 (TRBV19, TRBJ2-1)
CASSKAGPSSYNEQFF

SEQ ID NO: 186439 - protein, 11 aa, Homo sapiens
  CDR3 for alpha chain variable domain of TCR clone 93220 (TRAV29/DV5, TRAJ31)
CAAMNNARLMF

SEQ ID NO: 186440 - protein, 16 aa, Homo sapiens
  CDR3 for beta chain variable domain of TCR clone 93220 (TRBV5-1, TRBJ1-1)
CASSSGGNSLNTEAFF

SEQ ID NO: 186441 - protein, 13 aa, Homo sapiens
  CDR3 for alpha chain variable domain of TCR clone 93221 (TRAV2, TRAJ40)
CAVVTSGTYKYIF

SEQ ID NO: 186442 - protein, 14 aa, Homo sapiens
  CDR3 for beta chain variable domain of TCR clone 93221 (TRBV19, TRBJ2-1)
RASPAFVLSGEQFF

SEQ ID NO: 186443 - protein, 10 aa, Homo sapiens
  CDR3 for alpha chain variable domain of TCR clone 93222 (TRAV12-3, TRAJ49)
CAMNDDQFYF

SEQ ID NO: 186444 - protein, 13 aa, Homo sapiens
  CDR3 for beta chain variable domain of TCR clone 93222 (TRBV12-4, TRBJ1-1)
FASSPGTGFEAFF

SEQ ID NO: 186445 - protein, 12 aa, Homo sapiens
  CDR3 for alpha chain variable domain of TCR clone 93223 (TRAV12-2, TRAJ20)
CAVRPSDYKLSF

SEQ ID NO: 186446 - protein, 17 aa, Homo sapiens
  CDR3 for beta chain variable domain of TCR clone 93223 (TRBV11-2, TRBJ2-1)
CASSLYPPGVEYNEQFF

SEQ ID NO: 186447 - protein, 11 aa, Homo sapiens
  CDR3 for alpha chain variable domain of TCR clone 93224 (TRAV12-3, TRAJ41)
CAMNAREALNF

SEQ ID NO: 186448 - protein, 16 aa, Homo sapiens
  CDR3 for beta chain variable domain of TCR clone 93224 (TRBV7-8, TRBJ2-3)
CASSTEGQRETDTLYF

SEQ ID NO: 186449 - protein, 16 aa, Homo sapiens
  CDR3 for alpha chain variable domain of TCR clone 93225 (TRAV14/DV4, TRAJ20)
CAMREGRSRDDYKLSF

SEQ ID NO: 186450 - protein, 16 aa, Homo sapiens
  CDR3 for beta chain variable domain of TCR clone 93225 (TRBV3-1, TRBJ2-5)
CASSPGQFNGFGTQYF

SEQ ID NO: 186451 - protein, 14 aa, Homo sapiens
  CDR3 for alpha chain variable domain of TCR clone 93226 (TRAV12-3, TRAJ10)
SHLPLTGGGNKLTF

SEQ ID NO: 186452 - protein, 14 aa, Homo sapiens
  CDR3 for beta chain variable domain of TCR clone 93226 (TRBV7-6, TRBJ2-3)
CASSVAGGTDTQYF

SEQ ID NO: 186453 - protein, 12 aa, Homo sapiens
  CDR3 for alpha chain variable domain of TCR clone 93227 (TRAV1-1, TRAJ39)
CAVPVVGNMLTF

SEQ ID NO: 186454 - protein, 15 aa, Homo sapiens
  CDR3 for beta chain variable domain of TCR clone 93227 (TRBV19, TRBJ1-6)
CASITQGAVGSPLHF

SEQ ID NO: 186455 - protein, 12 aa, Homo sapiens
  CDR3 for alpha chain variable domain of TCR clone 93228 (TRAV12-3, TRAJ17)
CAMTLTGNKLTF

SEQ ID NO: 186456 - protein, 14 aa, Homo sapiens
  CDR3 for beta chain variable domain of TCR clone 93228 (TRBV7-3, TRBJ2-1)
CASSVAGGTNEQFF

SEQ ID NO: 186457 - protein, 12 aa, Homo sapiens
  CDR3 for alpha chain variable domain of TCR clone 93229 (TRAV12-3, TRAJ52)
CAMTLTGNKLTF

SEQ ID NO: 186458 - protein, 17 aa, Homo sapiens
  CDR3 for beta chain variable domain of TCR clone 93229 (TRBV11-2, TRBJ2-1)
CASSLYPPGVEYNEQFF

SEQ ID NO: 186459 - protein, 11 aa, Homo sapiens
  CDR3 for alpha chain variable domain of TCR clone 93230 (TRAV2, TRAJ13)
CASGGYQKVTF

SEQ ID NO: 186460 - protein, 16 aa, Homo sapiens
  CDR3 for beta chain variable domain of TCR clone 93230 (TRBV19, TRBJ2-1)
YASSKAGPSSYNEQFF

SEQ ID NO: 186461 - protein, 13 aa, Homo sapiens
  CDR3 for alpha chain variable domain of TCR clone 93231 (TRAV2, TRAJ40)
CAVVTSGTYKYIF

SEQ ID NO: 186462 - protein, 13 aa, Homo sapiens
  CDR3 for beta chain variable domain of TCR clone 93231 (TRBV27, TRBJ2-7)
CASSLTTGYEQYF

SEQ ID NO: 186463 - protein, 14 aa, Homo sapiens
  CDR3 for alpha chain variable domain of TCR clone 93232 (TRAV1-2, TRAJ16)
CAVNRFSDGQKLLF

SEQ ID NO: 186464 - protein, 19 aa, Homo sapiens
  CDR3 for beta chain variable domain of TCR clone 93232 (TRBV6-6, TRBJ2-1)
AAPSQTSVYFCASSYEQFF

SEQ ID NO: 186465 - protein, 13 aa, Homo sapiens
  CDR3 for alpha chain variable domain of TCR clone 93233 (TRAV13-2, TRAJ40)
CAEFTSGTYKYIF

SEQ ID NO: 186466 - protein, 15 aa, Homo sapiens
  CDR3 for beta chain variable domain of TCR clone 93233 (TRBV6-1, TRBJ2-3)
CASSERGGITDTQYF

SEQ ID NO: 186467 - protein, 16 aa, Homo sapiens
  CDR3 for alpha chain variable domain of TCR clone 93234 (TRAV20, TRAJ10)
CAVLRGLTGGGNKLTS

SEQ ID NO: 186468 - protein, 14 aa, Homo sapiens
  CDR3 for beta chain variable domain of TCR clone 93234 (TRBV19, TRBJ1-5)
CASRAPDSFLSQHF

SEQ ID NO: 186469 - protein, 14 aa, Homo sapiens
  CDR3 for alpha chain variable domain of TCR clone 93235 (TRAV9-2, TRAJ39)
CALYIYNAGNMLTF

SEQ ID NO: 186470 - protein, 14 aa, Homo sapiens
  CDR3 for beta chain variable domain of TCR clone 93235 (TRBV19, TRBJ2-1)
CASGKSTQYNEQFF

SEQ ID NO: 186471 - protein, 15 aa, Homo sapiens
  CDR3 for alpha chain variable domain of TCR clone 93236 (TRAV8-1, TRAJ37)
CAVKKGSGSTGKLIF

SEQ ID NO: 186472 - protein, 17 aa, Homo sapiens
  CDR3 for beta chain variable domain of TCR clone 93236 (TRBV12-4, TRBJ1-1)
CASSLSGFRTMNTEAFF

SEQ ID NO: 186473 - protein, 14 aa, Homo sapiens
  CDR3 for alpha chain variable domain of TCR clone 93237 (TRAV8-3, TRAJ17)
CAVGARTAGNKLTF

SEQ ID NO: 186474 - protein, 11 aa, Homo sapiens
  CDR3 for beta chain variable domain of TCR clone 93237 (TRBV29-1, TRBJ1-4)
CSVSSGEKLFF

SEQ ID NO: 186475 - protein, 12 aa, Homo sapiens
  CDR3 for alpha chain variable domain of TCR clone 93238 (TRAV13-1, TRAJ9)
CAASYLGFKTIF

SEQ ID NO: 186476 - protein, 14 aa, Homo sapiens
  CDR3 for beta chain variable domain of TCR clone 93238 (TRBV12-5, TRBJ2-5)
CASGSRTHQETQYF

SEQ ID NO: 186477 - protein, 14 aa, Homo sapiens
  CDR3 for alpha chain variable domain of TCR clone 93239 (TRAV9-2, TRAJ39)
CALYIYNAGNMLTF

SEQ ID NO: 186478 - protein, 15 aa, Homo sapiens
  CDR3 for beta chain variable domain of TCR clone 93239 (TRBV19, TRBJ2-7)
CASSPAGSGEALRYF

SEQ ID NO: 186479 - protein, 16 aa, Homo sapiens
  CDR3 for alpha chain variable domain of TCR clone 93240 (TRAV17, TRAJ54)
CATDSDIIQGAQKLVF

SEQ ID NO: 186480 - protein, 15 aa, Homo sapiens
  CDR3 for beta chain variable domain of TCR clone 93240 (TRBV10-1, TRBJ2-1)
CASSTGTELYNEQFF

SEQ ID NO: 186481 - protein, 21 aa, Homo sapiens
  CDR3 for alpha chain variable domain of TCR clone 93241 (TRAV12-1, TRAJ32)
SSVIRPPTSMNYGGATNKLIF

SEQ ID NO: 186482 - protein, 15 aa, Homo sapiens
  CDR3 for beta chain variable domain of TCR clone 93241 (TRBV7-9, TRBJ2-2)
CASGPLDTFPGELFF

SEQ ID NO: 186483 - protein, 15 aa, Homo sapiens
  CDR3 for alpha chain variable domain of TCR clone 93242 (TRAV21, TRAJ53)
CATLNSGGSNYKLTF

SEQ ID NO: 186484 - protein, 11 aa, Homo sapiens
  CDR3 for beta chain variable domain of TCR clone 93242 (TRBV11-2, TRBJ1-1)
CASSINTEAFF

SEQ ID NO: 186485 - protein, 14 aa, Homo sapiens
  CDR3 for alpha chain variable domain of TCR clone 93243 (TRAV1-2, TRAJ16)
CAVNRFSDGQKLLF

SEQ ID NO: 186486 - protein, 13 aa, Homo sapiens
  CDR3 for beta chain variable domain of TCR clone 93243 (TRBV7-2, TRBJ2-4)
CASSREHANIQYF

SEQ ID NO: 186487 - protein, 16 aa, Homo sapiens
  CDR3 for alpha chain variable domain of TCR clone 93244 (TRAV3, TRAJ10)
CAVRDMRAVGGNKLTF

SEQ ID NO: 186488 - protein, 15 aa, Homo sapiens
  CDR3 for beta chain variable domain of TCR clone 93244 (TRBV20-1, TRBJ2-7)
CSARDRVSGMDEQYF

SEQ ID NO: 186489 - protein, 15 aa, Homo sapiens
  CDR3 for alpha chain variable domain of TCR clone 93245 (TRAV26-1, TRAJ29)
CIVRVQGSGNTPLVF

SEQ ID NO: 186490 - protein, 15 aa, Homo sapiens
  CDR3 for beta chain variable domain of TCR clone 93245 (TRBV7-9, TRBJ1-5)
CASSKGHQPNQPQHF

SEQ ID NO: 186491 - protein, 15 aa, Homo sapiens
  CDR3 for alpha chain variable domain of TCR clone 93246 (TRAV29/DV5, TRAJ29)
CAASERSSGNTTLVF

SEQ ID NO: 186492 - protein, 14 aa, Homo sapiens
  CDR3 for beta chain variable domain of TCR clone 93246 (TRBV7-2, TRBJ2-7)
CASSPKTSFYEQYF

SEQ ID NO: 186493 - protein, 13 aa, Homo sapiens
  CDR3 for alpha chain variable domain of TCR clone 93247 (TRAV21, TRAJ47)
CAVSGLYGNKLGF

SEQ ID NO: 186494 - protein, 17 aa, Homo sapiens
  CDR3 for beta chain variable domain of TCR clone 93247 (TRBV15, TRBJ2-3)
CATSGTTSEEGTDTQYF

SEQ ID NO: 186495 - protein, 12 aa, Homo sapiens
  CDR3 for alpha chain variable domain of TCR clone 93248 (TRAV12-3, TRAJ17)
CAMTLTGKQLTF

SEQ ID NO: 186496 - protein, 15 aa, Homo sapiens
  CDR3 for beta chain variable domain of TCR clone 93248 (TRBV20-1, TRBJ2-7)
CSARDRVSGMDEQYF

SEQ ID NO: 186497 - protein, 15 aa, Homo sapiens
  CDR3 for alpha chain variable domain of TCR clone 93249 (TRAV12-1, TRAJ10)
CVVNKLTGGGNKLTF

SEQ ID NO: 186498 - protein, 17 aa, Homo sapiens
  CDR3 for beta chain variable domain of TCR clone 93249 (TRBV5-1, TRBJ1-6)
CASSPSLQGADNSPLHF

SEQ ID NO: 186499 - protein, 14 aa, Homo sapiens
  CDR3 for alpha chain variable domain of TCR clone 93250 (TRAV13-1, TRAJ9)
CAASALTGGFKTIF

SEQ ID NO: 186500 - protein, 14 aa, Homo sapiens
  CDR3 for beta chain variable domain of TCR clone 93250 (TRBV7-9, TRBJ2-7)
CASSLSQGSYEQYF

SEQ ID NO: 186501 - protein, 13 aa, Homo sapiens
  CDR3 for alpha chain variable domain of TCR clone 93251 (TRAV8-3, TRAJ48)
CCGCNFGNEKLTF

SEQ ID NO: 186502 - protein, 12 aa, Homo sapiens
  CDR3 for beta chain variable domain of TCR clone 93251 (TRBV18, TRBJ2-1)
CASSPGTSEGFF

SEQ ID NO: 186503 - protein, 17 aa, Homo sapiens
  CDR3 for alpha chain variable domain of TCR clone 93252 (TRAV23/DV6, TRAJ57)
CAASSTLSQGGSEKLVF

SEQ ID NO: 186504 - protein, 15 aa, Homo sapiens
  CDR3 for beta chain variable domain of TCR clone 93252 (TRBV19, TRBJ1-2)
CASSVGQVLNYGYTF

SEQ ID NO: 186505 - protein, 14 aa, Homo sapiens
  CDR3 for alpha chain variable domain of TCR clone 93253 (TRAV38-1, TRAJ40)
CALRPTSGTYKYIF

SEQ ID NO: 186506 - protein, 17 aa, Homo sapiens
  CDR3 for beta chain variable domain of TCR clone 93253 (TRBV7-3, TRBJ2-5)
CASSLGSGRSGSETQYF

SEQ ID NO: 186507 - protein, 13 aa, Homo sapiens
  CDR3 for alpha chain variable domain of TCR clone 93254 (TRAV12-2, TRAJ6)
CAVNVSRKLHTYI

SEQ ID NO: 186508 - protein, 15 aa, Homo sapiens
  CDR3 for beta chain variable domain of TCR clone 93254 (TRBV5-5, TRBJ1-5)
CASSLKGGGEQPQHF

SEQ ID NO: 186509 - protein, 16 aa, Homo sapiens
  CDR3 for alpha chain variable domain of TCR clone 93255 (TRAV38-1, TRAJ37)
CAFKGDGSSNTGKLIS

SEQ ID NO: 186510 - protein, 13 aa, Homo sapiens
  CDR3 for beta chain variable domain of TCR clone 93255 (TRBV12-4, TRBJ2-5)
CASSLFRRETQYF

SEQ ID NO: 186511 - protein, 18 aa, Homo sapiens
  CDR3 for alpha chain variable domain of TCR clone 93256 (TRAV21, TRAJ52)
CAVGPSPAGGTSYGKLTF

SEQ ID NO: 186512 - protein, 15 aa, Homo sapiens
  CDR3 for beta chain variable domain of TCR clone 93256 (TRBV20-1, TRBJ2-7)
CSARKGLAESYEQYF

SEQ ID NO: 186513 - protein, 12 aa, Homo sapiens
  CDR3 for alpha chain variable domain of TCR clone 93257 (TRAV3, TRAJ20)
CAVRDGDYKLSF

SEQ ID NO: 186514 - protein, 13 aa, Homo sapiens
  CDR3 for beta chain variable domain of TCR clone 93257 (TRBV9, TRBJ2-1)
CASSVGQAGEQFF

SEQ ID NO: 186515 - protein, 14 aa, Homo sapiens
  CDR3 for alpha chain variable domain of TCR clone 93258 (TRAV26-1, TRAJ45)
CIEVTGGGADGLTF

SEQ ID NO: 186516 - protein, 15 aa, Homo sapiens
  CDR3 for beta chain variable domain of TCR clone 93258 (TRBV7-8, TRBJ2-7)
CASSLRHFEAYEQYF

SEQ ID NO: 186517 - protein, 12 aa, Homo sapiens
  CDR3 for alpha chain variable domain of TCR clone 93259 (TRAV13-1, TRAJ21)
CAAKEGFNKFYF

SEQ ID NO: 186518 - protein, 15 aa, Homo sapiens
  CDR3 for beta chain variable domain of TCR clone 93259 (TRBV4-1, TRBJ2-3)
CASSRGQGIPDTQYF

SEQ ID NO: 186519 - protein, 12 aa, Homo sapiens
  CDR3 for alpha chain variable domain of TCR clone 93260 (TRAV27, TRAJ36)
ASTTAGANNLFF

SEQ ID NO: 186520 - protein, 13 aa, Homo sapiens
  CDR3 for beta chain variable domain of TCR clone 93260 (TRBV7-9, TRBJ2-3)
CASSPGSTDTQYF

SEQ ID NO: 186521 - protein, 14 aa, Homo sapiens
  CDR3 for alpha chain variable domain of TCR clone 93261 (TRAV13-1, TRAJ9)
CAASALTGGFKTIF

SEQ ID NO: 186522 - protein, 20 aa, Homo sapiens
  CDR3 for beta chain variable domain of TCR clone 93261 (TRBV7-8, TRBJ2-2)
CASSHLFPGPTIHITGELFF

SEQ ID NO: 186523 - protein, 16 aa, Homo sapiens
  CDR3 for alpha chain variable domain of TCR clone 93262 (TRAV30, TRAJ24)
CGTEIVDADSWGKFQV

SEQ ID NO: 186524 - protein, 16 aa, Homo sapiens
  CDR3 for beta chain variable domain of TCR clone 93262 (TRBV6-1, TRBJ2-1)
CASILRQGSSYNEQFF

SEQ ID NO: 186525 - protein, 14 aa, Homo sapiens
  CDR3 for alpha chain variable domain of TCR clone 93263 (TRAV12-2, TRAJ9)
CAVNMEGGGFKTIF

SEQ ID NO: 186526 - protein, 14 aa, Homo sapiens
  CDR3 for beta chain variable domain of TCR clone 93263 (TRBV2, TRBJ2-5)
CASSEVLAKETQYF

SEQ ID NO: 186527 - protein, 11 aa, Homo sapiens
  CDR3 for alpha chain variable domain of TCR clone 93264 (TRAV4, TRAJ31)
CLMGDNARLMF

SEQ ID NO: 186528 - protein, 16 aa, Homo sapiens
  CDR3 for beta chain variable domain of TCR clone 93264 (TRBV7-2, TRBJ2-5)
CASSSKWLSGQETQYF

SEQ ID NO: 186529 - protein, 14 aa, Homo sapiens
  CDR3 for alpha chain variable domain of TCR clone 93265 (TRAV4, TRAJ30)
CLVGDMNRDGKIIF

SEQ ID NO: 186530 - protein, 16 aa, Homo sapiens
  CDR3 for beta chain variable domain of TCR clone 93265 (TRBV20-1, TRBJ1-4)
CSAPGQGLLTNEKLFF

SEQ ID NO: 186531 - protein, 15 aa, Homo sapiens
  CDR3 for alpha chain variable domain of TCR clone 93266 (TRAV38-1, TRAJ57)
CAFMDSQGGSEKLVF

SEQ ID NO: 186532 - protein, 14 aa, Homo sapiens
  CDR3 for beta chain variable domain of TCR clone 93266 (TRBV4-1, TRBJ2-2)
CASSQAVNTGELFF

SEQ ID NO: 186533 - protein, 14 aa, Homo sapiens
  CDR3 for alpha chain variable domain of TCR clone 93267 (TRAV17, TRAJ20)
CATPHPSNDYKLSF

SEQ ID NO: 186534 - protein, 13 aa, Homo sapiens
  CDR3 for beta chain variable domain of TCR clone 93267 (TRBV2, TRBJ1-1)
CASRWTVNTEAFF

SEQ ID NO: 186535 - protein, 12 aa, Homo sapiens
  CDR3 for alpha chain variable domain of TCR clone 93268 (TRAV12-3, TRAJ17)
CAMTLTGNKLTF

SEQ ID NO: 186536 - protein, 14 aa, Homo sapiens
  CDR3 for beta chain variable domain of TCR clone 93268 (TRBV28, TRBJ2-1)
CASSLVAPYNEQFF

SEQ ID NO: 186537 - protein, 12 aa, Homo sapiens
  CDR3 for alpha chain variable domain of TCR clone 93269 (TRAV8-3, TRAJ20)
CAVGANDYKLSF

SEQ ID NO: 186538 - protein, 12 aa, Homo sapiens
  CDR3 for beta chain variable domain of TCR clone 93269 (TRBV19, TRBJ2-2)
CASRSPGTGATG

SEQ ID NO: 186539 - protein, 12 aa, Homo sapiens
  CDR3 for alpha chain variable domain of TCR clone 93270 (TRAV12-3, TRAJ17)
CAMTLTGNKLTF

SEQ ID NO: 186540 - protein, 15 aa, Homo sapiens
  CDR3 for beta chain variable domain of TCR clone 93270 (TRBV7-2, TRBJ2-7)
CASSWGQGAIYEQYF

SEQ ID NO: 186541 - protein, 15 aa, Homo sapiens
  CDR3 for alpha chain variable domain of TCR clone 93271 (TRAV13-1, TRAJ17)
CAASIHGGCRQQANF

SEQ ID NO: 186542 - protein, 14 aa, Homo sapiens
  CDR3 for beta chain variable domain of TCR clone 93271 (TRBV20-1, TRBJ2-4)
CSARDRGQWGIQYF

SEQ ID NO: 186543 - protein, 14 aa, Homo sapiens
  CDR3 for alpha chain variable domain of TCR clone 93272 (TRAV8-3, TRAJ27)
CAGGRNTNAGKSTF

SEQ ID NO: 186544 - protein, 13 aa, Homo sapiens
  CDR3 for beta chain variable domain of TCR clone 93272 (TRBV10-3, TRBJ2-7)
CASKLAVNYEQYF

SEQ ID NO: 186545 - protein, 15 aa, Homo sapiens
  CDR3 for alpha chain variable domain of TCR clone 93273 (TRAV4, TRAJ39)
CLVGPNNNAGNMLTF

SEQ ID NO: 186546 - protein, 13 aa, Homo sapiens
  CDR3 for beta chain variable domain of TCR clone 93273 (TRBV11-2, TRBJ2-5)
CASSSTGEVTQYF

SEQ ID NO: 186547 - protein, 14 aa, Homo sapiens
  CDR3 for alpha chain variable domain of TCR clone 93274 (TRAV16, TRAJ42)
CALLAGGSQGNIIF

SEQ ID NO: 186548 - protein, 13 aa, Homo sapiens
  CDR3 for beta chain variable domain of TCR clone 93274 (TRBV7-9, TRBJ1-2)
CASSLKQNYGYTF

SEQ ID NO: 186549 - protein, 16 aa, Homo sapiens
  CDR3 for alpha chain variable domain of TCR clone 93275 (TRAV20, TRAJ22)
CAVQASSSGSARQLTF

SEQ ID NO: 186550 - protein, 15 aa, Homo sapiens
  CDR3 for beta chain variable domain of TCR clone 93275 (TRBV4-3, TRBJ2-7)
CASSQGDWGDYEQYF

SEQ ID NO: 186551 - protein, 13 aa, Homo sapiens
  CDR3 for alpha chain variable domain of TCR clone 93276 (TRAV20, TRAJ49)
CAVQARAGNQFYF

SEQ ID NO: 186552 - protein, 14 aa, Homo sapiens
  CDR3 for beta chain variable domain of TCR clone 93276 (TRBV7-2, TRBJ2-7)
CASSPKTSFYEQYF

SEQ ID NO: 186553 - protein, 13 aa, Homo sapiens
  CDR3 for alpha chain variable domain of TCR clone 93277 (TRAV13-1, TRAJ11)
CAAVLAGYSTLIF

SEQ ID NO: 186554 - protein, 17 aa, Homo sapiens
  CDR3 for beta chain variable domain of TCR clone 93277 (TRBV25-1, TRBJ2-7)
CASSDARVVFSSYEQYF

SEQ ID NO: 186555 - protein, 12 aa, Homo sapiens
  CDR3 for alpha chain variable domain of TCR clone 93278 (TRAV3, TRAJ20)
CAVRDPDYKLSF

SEQ ID NO: 186556 - protein, 15 aa, Homo sapiens
  CDR3 for beta chain variable domain of TCR clone 93278 (TRBV5-1, TRBJ2-1)
CASSLVANSYNEQFF

SEQ ID NO: 186557 - protein, 13 aa, Homo sapiens
  CDR3 for alpha chain variable domain of TCR clone 93279 (TRAV1-2, TRAJ33)
CAVSEDSNYQLIW

SEQ ID NO: 186558 - protein, 16 aa, Homo sapiens
  CDR3 for beta chain variable domain of TCR clone 93279 (TRBV4-2, TRBJ2-7)
RASSQDGVERGYEQYF

SEQ ID NO: 186559 - protein, 14 aa, Homo sapiens
  CDR3 for alpha chain variable domain of TCR clone 93280 (TRAV12-3, TRAJ42)
CAMNYGGSQGNLIF

SEQ ID NO: 186560 - protein, 14 aa, Homo sapiens
  CDR3 for beta chain variable domain of TCR clone 93280 (TRBV5-1, TRBJ2-2)
CASSLIWIPGELFF

SEQ ID NO: 186561 - protein, 14 aa, Homo sapiens
  CDR3 for alpha chain variable domain of TCR clone 93281 (TRAV17, TRAJ54)
CATDANQGAQKLVC

SEQ ID NO: 186562 - protein, 12 aa, Homo sapiens
  CDR3 for beta chain variable domain of TCR clone 93281 (TRBV6-3, TRBJ2-1)
CASSGSYNEQFF

SEQ ID NO: 186563 - protein, 13 aa, Homo sapiens
  CDR3 for alpha chain variable domain of TCR clone 93282 (TRAV3, TRAJ21)
CAVREPAFNKFYF

SEQ ID NO: 186564 - protein, 12 aa, Homo sapiens
  CDR3 for beta chain variable domain of TCR clone 93282 (TRBV5-1, TRBJ2-4)
LAGEWTKNIQYF

SEQ ID NO: 186565 - protein, 11 aa, Homo sapiens
  CDR3 for alpha chain variable domain of TCR clone 93283 (TRAV12-3, TRAJ41)
CAMNAREALNF

SEQ ID NO: 186566 - protein, 16 aa, Homo sapiens
  CDR3 for beta chain variable domain of TCR clone 93283 (TRBV7-8, TRBJ2-3)
CASSTEGQLETDTQYF

SEQ ID NO: 186567 - protein, 14 aa, Homo sapiens
  CDR3 for alpha chain variable domain of TCR clone 93284 (TRAV12-1, TRAJ9)
CVVTGYTGGFKAIF

SEQ ID NO: 186568 - protein, 13 aa, Homo sapiens
  CDR3 for beta chain variable domain of TCR clone 93284 (TRBV20-1, TRBJ1-1)
CSARAGGSTEAFF

SEQ ID NO: 186569 - protein, 14 aa, Homo sapiens
  CDR3 for alpha chain variable domain of TCR clone 93285 (TRAV3, TRAJ21)
CAVESQANFNKFYF

SEQ ID NO: 186570 - protein, 18 aa, Homo sapiens
  CDR3 for beta chain variable domain of TCR clone 93285 (TRBV7-9, TRBJ2-1)
CASSLAVSETSGRNEQFF

SEQ ID NO: 186571 - protein, 14 aa, Homo sapiens
  CDR3 for alpha chain variable domain of TCR clone 93286 (TRAV12-3, TRAJ39)
SATYLSNAGNMLTF

SEQ ID NO: 186572 - protein, 13 aa, Homo sapiens
  CDR3 for beta chain variable domain of TCR clone 93286 (TRBV28, TRBJ1-2)
CASSPGSRNCYTF

SEQ ID NO: 186573 - protein, 12 aa, Homo sapiens
  CDR3 for alpha chain variable domain of TCR clone 93287 (TRAV3, TRAJ43)
CAMRDPNNDMRF

SEQ ID NO: 186574 - protein, 15 aa, Homo sapiens
  CDR3 for beta chain variable domain of TCR clone 93287 (TRBV6-5, TRBJ2-1)
CASSYDAGAGNEQFF

SEQ ID NO: 186575 - protein, 15 aa, Homo sapiens
  CDR3 for alpha chain variable domain of TCR clone 93288 (TRAV26-2, TRAJ13)
CILSDLSGGYQKVTF

SEQ ID NO: 186576 - protein, 11 aa, Homo sapiens
  CDR3 for beta chain variable domain of TCR clone 93288 (TRBV7-9, TRBJ2-5)
CASSLSATQYF

SEQ ID NO: 186577 - protein, 13 aa, Homo sapiens
  CDR3 for alpha chain variable domain of TCR clone 93289 (TRAV30, TRAJ24)
CGTATDSWGKLQF

SEQ ID NO: 186578 - protein, 14 aa, Homo sapiens
  CDR3 for beta chain variable domain of TCR clone 93289 (TRBV6-3, TRBJ2-2)
CASTYTPDTGELFF

SEQ ID NO: 186579 - protein, 13 aa, Homo sapiens
  CDR3 for alpha chain variable domain of TCR clone 93290 (TRAV26-1, TRAJ33)
CIVRVAGNYQLIW

SEQ ID NO: 186580 - protein, 16 aa, Homo sapiens
  CDR3 for beta chain variable domain of TCR clone 93290 (TRBV15, TRBJ2-7)
CATSRDRGRRRGEQYF

SEQ ID NO: 186581 - protein, 17 aa, Homo sapiens
  CDR3 for alpha chain variable domain of TCR clone 93291 (TRAV3, TRAJ6)
CAVRDGPRAGGSHIPTF

SEQ ID NO: 186582 - protein, 17 aa, Homo sapiens
  CDR3 for beta chain variable domain of TCR clone 93291 (TRBV20-1, TRBJ1-5)
CSASLSPGQGGNQPQHF

SEQ ID NO: 186583 - protein, 16 aa, Homo sapiens
  CDR3 for alpha chain variable domain of TCR clone 93292 (TRAV17, TRAJ22)
CATDAISSGSARQLTF

SEQ ID NO: 186584 - protein, 15 aa, Homo sapiens
  CDR3 for beta chain variable domain of TCR clone 93292 (TRBV5-1, TRBJ2-1)
CASSLPRAPYNEQFF

SEQ ID NO: 186585 - protein, 16 aa, Homo sapiens
  CDR3 for alpha chain variable domain of TCR clone 93293 (TRAV12-1, TRAJ12)
CVVNTLLMESSYKLIF

SEQ ID NO: 186586 - protein, 13 aa, Homo sapiens
  CDR3 for beta chain variable domain of TCR clone 93293 (TRBV11-2, TRBJ2-1)
CASSSEAYNEQFF

SEQ ID NO: 186587 - protein, 14 aa, Homo sapiens
  CDR3 for alpha chain variable domain of TCR clone 93294 (TRAV17, TRAJ16)
CATADFSDGQKLLF

SEQ ID NO: 186588 - protein, 13 aa, Homo sapiens
  CDR3 for beta chain variable domain of TCR clone 93294 (TRBV11-2, TRBJ1-1)
CASSLGRNTEAFF

SEQ ID NO: 186589 - protein, 14 aa, Homo sapiens
  CDR3 for alpha chain variable domain of TCR clone 93295 (TRAV12-2, TRAJ40)
CAVEIPSGTYKYIF

SEQ ID NO: 186590 - protein, 20 aa, Homo sapiens
  CDR3 for beta chain variable domain of TCR clone 93295 (TRBV28, TRBJ2-1)
CASTPIGRSPGLAGGNEQFF

SEQ ID NO: 186591 - protein, 16 aa, Homo sapiens
  CDR3 for alpha chain variable domain of TCR clone 93296 (TRAV27, TRAJ13)
CAGAKSDSGGYQKVTF

SEQ ID NO: 186592 - protein, 11 aa, Homo sapiens
  CDR3 for beta chain variable domain of TCR clone 93296 (TRBV19, TRBJ1-2)
CASSISSGYTF

SEQ ID NO: 186593 - protein, 14 aa, Homo sapiens
  CDR3 for alpha chain variable domain of TCR clone 93297 (TRAV8-6, TRAJ54)
CAVSLIQGAQKLVF

SEQ ID NO: 186594 - protein, 14 aa, Homo sapiens
  CDR3 for beta chain variable domain of TCR clone 93297 (TRBV25-1, TRBJ1-1)
CASTHLGGNTEAFF

SEQ ID NO: 186595 - protein, 15 aa, Homo sapiens
  CDR3 for alpha chain variable domain of TCR clone 93298 (TRAV26-1, TRAJ48)
CIVRVGDFGSEKLTF

SEQ ID NO: 186596 - protein, 16 aa, Homo sapiens
  CDR3 for beta chain variable domain of TCR clone 93298 (TRBV4-1, TRBJ2-3)
CASSQRAGGLTDTQYF

SEQ ID NO: 186597 - protein, 12 aa, Homo sapiens
  CDR3 for alpha chain variable domain of TCR clone 93299 (TRAV21, TRAJ33)
GAKMDSNYQLIW

SEQ ID NO: 186598 - protein, 14 aa, Homo sapiens
  CDR3 for beta chain variable domain of TCR clone 93299 (TRBV2, TRBJ2-7)
CASSLTSGGYEQYF

SEQ ID NO: 186599 - protein, 23 aa, Homo sapiens
  CDR3 for alpha chain variable domain of TCR clone 93300 (TRAV8-6, )
CAVRNAGNNNIQNPDPAVYQLRD

SEQ ID NO: 186600 - protein, 15 aa, Homo sapiens
  CDR3 for beta chain variable domain of TCR clone 93300 (TRBV4-1, TRBJ2-2)
CASSEGQGITGELFF

SEQ ID NO: 186601 - protein, 19 aa, Homo sapiens
  CDR3 for alpha chain variable domain of TCR clone 93301 (TRAV26-1, TRAJ22)
CCVLLHRWVFSGSAGQLTF

SEQ ID NO: 186602 - protein, 19 aa, Homo sapiens
  CDR3 for beta chain variable domain of TCR clone 93301 (TRBV19, TRBJ2-5)
CASSIGQVTDFFLGETQYF

SEQ ID NO: 186603 - protein, 15 aa, Homo sapiens
  CDR3 for alpha chain variable domain of TCR clone 93302 (TRAV8-3, TRAJ45)
CASSYSGGGADGLTF

SEQ ID NO: 186604 - protein, 13 aa, Homo sapiens
  CDR3 for beta chain variable domain of TCR clone 93302 (TRBV12-4, TRBJ1-2)
CASSLRQGKGYTF

SEQ ID NO: 186605 - protein, 14 aa, Homo sapiens
  CDR3 for alpha chain variable domain of TCR clone 93303 (TRAV12-2, TRAJ40)
CAVKIPSGTYKYIF

SEQ ID NO: 186606 - protein, 12 aa, Homo sapiens
  CDR3 for beta chain variable domain of TCR clone 93303 (TRBV11-2, TRBJ2-1)
RASSPGNNEQFF

SEQ ID NO: 186607 - protein, 13 aa, Homo sapiens
  CDR3 for alpha chain variable domain of TCR clone 93304 (TRAV35, TRAJ42)
CAGFPGSQRNLIF

SEQ ID NO: 186608 - protein, 14 aa, Homo sapiens
  CDR3 for beta chain variable domain of TCR clone 93304 (TRBV4-1, TRBJ2-2)
CASSQAVNTGELFF

SEQ ID NO: 186609 - protein, 14 aa, Homo sapiens
  CDR3 for alpha chain variable domain of TCR clone 93305 (TRAV12-2, TRAJ11)
CAVNRESGYSTLTF

SEQ ID NO: 186610 - protein, 10 aa, Homo sapiens
  CDR3 for beta chain variable domain of TCR clone 93305 (TRBV20-1, TRBJ2-5)
CSARFETRYF

SEQ ID NO: 186611 - protein, 18 aa, Homo sapiens
  CDR3 for alpha chain variable domain of TCR clone 93306 (TRAV26-1, TRAJ22)
CIVRVALISSVSARQLTF

SEQ ID NO: 186612 - protein, 13 aa, Homo sapiens
  CDR3 for beta chain variable domain of TCR clone 93306 (TRBV13, TRBJ2-5)
CASSPEVGETQYF

SEQ ID NO: 186613 - protein, 12 aa, Homo sapiens
  CDR3 for alpha chain variable domain of TCR clone 93307 (TRAV2, TRAJ37)
CAVTMNTGKLIF

SEQ ID NO: 186614 - protein, 15 aa, Homo sapiens
  CDR3 for beta chain variable domain of TCR clone 93307 (TRBV5-1, TRBJ2-5)
CASSFGGPLQETQYF

SEQ ID NO: 186615 - protein, 11 aa, Homo sapiens
  CDR3 for alpha chain variable domain of TCR clone 93308 (TRAV2, TRAJ13)
CASGGYPKVTF

SEQ ID NO: 186616 - protein, 17 aa, Homo sapiens
  CDR3 for beta chain variable domain of TCR clone 93308 (TRBV7-3, TRBJ2-3)
CASSLMKRMRGADTQYF

SEQ ID NO: 186617 - protein, 11 aa, Homo sapiens
  CDR3 for alpha chain variable domain of TCR clone 93309 (TRAV3, TRAJ21)
CAVGNFNKLYF

SEQ ID NO: 186618 - protein, 16 aa, Homo sapiens
  CDR3 for beta chain variable domain of TCR clone 93309 (TRBV19, TRBJ2-1)
CAGSKAGPSSYNEQFF

SEQ ID NO: 186619 - protein, 10 aa, Homo sapiens
  CDR3 for alpha chain variable domain of TCR clone 93310 (TRAV38-2/DV8, TRAJ40)
CASGTYKYIF

SEQ ID NO: 186620 - protein, 14 aa, Homo sapiens
  CDR3 for beta chain variable domain of TCR clone 93310 (TRBV7-9, TRBJ2-1)
CASSPRDSLYEHFF

SEQ ID NO: 186621 - protein, 13 aa, Homo sapiens
  CDR3 for alpha chain variable domain of TCR clone 93311 (TRAV26-1, )
CIVSHRVEGFWNQ

SEQ ID NO: 186622 - protein, 14 aa, Homo sapiens
  CDR3 for beta chain variable domain of TCR clone 93311 (TRBV12-5, TRBJ2-5)
CASGSRTHQETQYF

SEQ ID NO: 186623 - protein, 15 aa, Homo sapiens
  CDR3 for alpha chain variable domain of TCR clone 93312 (TRAV2, TRAJ15)
CAVEDREQAGTALIF

SEQ ID NO: 186624 - protein, 17 aa, Homo sapiens
  CDR3 for beta chain variable domain of TCR clone 93312 (TRBV7-8, TRBJ2-6)
CASSAGTGGAGANVLTS

SEQ ID NO: 186625 - protein, 13 aa, Homo sapiens
  CDR3 for alpha chain variable domain of TCR clone 93313 (TRAV20, TRAJ26)
CAVPTSYGQTFVF

SEQ ID NO: 186626 - protein, 16 aa, Homo sapiens
  CDR3 for beta chain variable domain of TCR clone 93313 (TRBV28, TRBJ2-7)
CASSSPQGRDVYEQYF

SEQ ID NO: 186627 - protein, 11 aa, Homo sapiens
  CDR3 for alpha chain variable domain of TCR clone 93314 (TRAV8-3, TRAJ15)
CAVGPGTSLIF

SEQ ID NO: 186628 - protein, 18 aa, Homo sapiens
  CDR3 for beta chain variable domain of TCR clone 93314 (TRBV18, TRBJ2-3)
CASSYTSGAAGGTDTQYF

SEQ ID NO: 186629 - protein, 17 aa, Homo sapiens
  CDR3 for alpha chain variable domain of TCR clone 93315 (TRAV3, TRAJ42)
CAVRARDYGGSQGNLIF

SEQ ID NO: 186630 - protein, 12 aa, Homo sapiens
  CDR3 for beta chain variable domain of TCR clone 93315 (TRBV11-2, TRBJ2-1)
CASSPGNNEQFF

SEQ ID NO: 186631 - protein, 14 aa, Homo sapiens
  CDR3 for alpha chain variable domain of TCR clone 93316 (TRAV1-2, TRAJ8)
SAVREDTGFQKLVF

SEQ ID NO: 186632 - protein, 14 aa, Homo sapiens
  CDR3 for beta chain variable domain of TCR clone 93316 (TRBV12-5, TRBJ2-5)
CASGSRTHQETQYF

SEQ ID NO: 186633 - protein, 16 aa, Homo sapiens
  CDR3 for alpha chain variable domain of TCR clone 93317 (TRAV1-1, TRAJ29)
CAVRSTRNSGNTPLVF

SEQ ID NO: 186634 - protein, 16 aa, Homo sapiens
  CDR3 for beta chain variable domain of TCR clone 93317 (TRBV27, TRBJ1-1)
CASSSRGRTGYTEAVF

SEQ ID NO: 186635 - protein, 14 aa, Homo sapiens
  CDR3 for alpha chain variable domain of TCR clone 93318 (TRAV35, TRAJ50)
CSGHRKTSYDKVIF

SEQ ID NO: 186636 - protein, 13 aa, Homo sapiens
  CDR3 for beta chain variable domain of TCR clone 93318 (TRBV7-7, TRBJ2-3)
CASSLSRADTQYF

SEQ ID NO: 186637 - protein, 12 aa, Homo sapiens
  CDR3 for alpha chain variable domain of TCR clone 93319 (TRAV12-1, TRAJ9)
CVVNPASFKTIF

SEQ ID NO: 186638 - protein, 15 aa, Homo sapiens
  CDR3 for beta chain variable domain of TCR clone 93319 (TRBV7-2, TRBJ2-3)
CASSSTGLETDTQYF

SEQ ID NO: 186639 - protein, 14 aa, Homo sapiens
  CDR3 for alpha chain variable domain of TCR clone 93320 (TRAV8-4, TRAJ17)
CAVSDQAAGNKLTF

SEQ ID NO: 186640 - protein, 17 aa, Homo sapiens
  CDR3 for beta chain variable domain of TCR clone 93320 (TRBV28, TRBJ2-5)
CASSRQGGLAGAETQYF

SEQ ID NO: 186641 - protein, 13 aa, Homo sapiens
  CDR3 for alpha chain variable domain of TCR clone 93321 (TRAV35, TRAJ57)
CAGSQGGSEKLVF

SEQ ID NO: 186642 - protein, 15 aa, Homo sapiens
  CDR3 for beta chain variable domain of TCR clone 93321 (TRBV5-1, TRBJ2-7)
CASSPQGRPLDEQYF

SEQ ID NO: 186643 - protein, 14 aa, Homo sapiens
  CDR3 for alpha chain variable domain of TCR clone 93322 (TRAV29/DV5, TRAJ45)
CAPYSGGGSDGLTF

SEQ ID NO: 186644 - protein, 13 aa, Homo sapiens
  CDR3 for beta chain variable domain of TCR clone 93322 (TRBV29-1, TRBJ2-3)
CSATRGGRDTQYF

SEQ ID NO: 186645 - protein, 16 aa, Homo sapiens
  CDR3 for alpha chain variable domain of TCR clone 93323 (TRAV16, TRAJ4)
CALSRMFSGGYNKLIF

SEQ ID NO: 186646 - protein, 14 aa, Homo sapiens
  CDR3 for beta chain variable domain of TCR clone 93323 (TRBV4-2, TRBJ2-1)
CASGLDRAYNEQFF

SEQ ID NO: 186647 - protein, 15 aa, Homo sapiens
  CDR3 for alpha chain variable domain of TCR clone 93324 (TRAV21, TRAJ24)
CAARSSTDSWGKLQF

SEQ ID NO: 186648 - protein, 12 aa, Homo sapiens
  CDR3 for beta chain variable domain of TCR clone 93324 (TRBV19, TRBJ2-1)
CASSQISNEQFF

SEQ ID NO: 186649 - protein, 15 aa, Homo sapiens
  CDR3 for alpha chain variable domain of TCR clone 93325 (TRAV3, TRAJ22)
CAVRDRGGSARQLTF

SEQ ID NO: 186650 - protein, 14 aa, Homo sapiens
  CDR3 for beta chain variable domain of TCR clone 93325 (TRBV20-1, TRBJ1-1)
CSAQTRIGGTEAFL

SEQ ID NO: 186651 - protein, 10 aa, Homo sapiens
  CDR3 for alpha chain variable domain of TCR clone 93326 (TRAV36/DV7, TRAJ49)
CALTGNQFYF

SEQ ID NO: 186652 - protein, 17 aa, Homo sapiens
  CDR3 for beta chain variable domain of TCR clone 93326 (TRBV28, TRBJ2-5)
CASSRQGGLAGAETQYF

SEQ ID NO: 186653 - protein, 10 aa, Homo sapiens
  CDR3 for alpha chain variable domain of TCR clone 93327 (TRAV12-1, TRAJ23)
CVVSGGKLIF

SEQ ID NO: 186654 - protein, 14 aa, Homo sapiens
  CDR3 for beta chain variable domain of TCR clone 93327 (TRBV12-5, TRBJ2-5)
CASGSRTHQETQYF

SEQ ID NO: 186655 - protein, 12 aa, Homo sapiens
  CDR3 for alpha chain variable domain of TCR clone 93328 (TRAV21, TRAJ3)
CCFYSSASKIIF

SEQ ID NO: 186656 - protein, 13 aa, Homo sapiens
  CDR3 for beta chain variable domain of TCR clone 93328 (TRBV20-1, TRBJ1-1)
CSAPLGGGTEAFF

SEQ ID NO: 186657 - protein, 18 aa, Homo sapiens
  CDR3 for alpha chain variable domain of TCR clone 93329 (TRAV21, TRAJ52)
CAVRPSPAGGTSYGKLTF

SEQ ID NO: 186658 - protein, 17 aa, Homo sapiens
  CDR3 for beta chain variable domain of TCR clone 93329 (TRBV25-1, TRBJ2-1)
CASSACGQGRGVYEQFF

SEQ ID NO: 186659 - protein, 13 aa, Homo sapiens
  CDR3 for alpha chain variable domain of TCR clone 93330 (TRAV17, TRAJ5)
CAPMDTGRIALTF

SEQ ID NO: 186660 - protein, 15 aa, Homo sapiens
  CDR3 for beta chain variable domain of TCR clone 93330 (TRBV6-6, TRBJ2-5)
CASSPGGGLEETQYF

SEQ ID NO: 186661 - protein, 10 aa, Homo sapiens
  CDR3 for alpha chain variable domain of TCR clone 93331 (TRAV23/DV6, TRAJ10)
CAASRLFYSR

SEQ ID NO: 186662 - protein, 15 aa, Homo sapiens
  CDR3 for beta chain variable domain of TCR clone 93331 (TRBV20-1, TRBJ2-1)
CSAEGGLLAGDEQFF

SEQ ID NO: 186663 - protein, 13 aa, Homo sapiens
  CDR3 for alpha chain variable domain of TCR clone 93332 (TRAV29/DV5, TRAJ31)
CAASRNNNAILMF

SEQ ID NO: 186664 - protein, 12 aa, Homo sapiens
  CDR3 for beta chain variable domain of TCR clone 93332 (TRBV14, TRBJ2-7)
CASSLYKDEQYF

SEQ ID NO: 186665 - protein, 12 aa, Homo sapiens
  CDR3 for alpha chain variable domain of TCR clone 93333 (TRAV17, TRAJ57)
CATDGGSEKLVV

SEQ ID NO: 186666 - protein, 12 aa, Homo sapiens
  CDR3 for beta chain variable domain of TCR clone 93333 (TRBV29-1, TRBJ2-2)
CSVDKYTGELFF

SEQ ID NO: 186667 - protein, 12 aa, Homo sapiens
  CDR3 for alpha chain variable domain of TCR clone 93334 (TRAV17, TRAJ47)
CAPTVRGNKLVF

SEQ ID NO: 186668 - protein, 13 aa, Homo sapiens
  CDR3 for beta chain variable domain of TCR clone 93334 (TRBV7-2, TRBJ2-4)
CASSLAEGGSQYF

SEQ ID NO: 186669 - protein, 13 aa, Homo sapiens
  CDR3 for alpha chain variable domain of TCR clone 93335 (TRAV13-1, TRAJ21)
CAASIYNFNKFYF

SEQ ID NO: 186670 - protein, 13 aa, Homo sapiens
  CDR3 for beta chain variable domain of TCR clone 93335 (TRBV11-2, TRBJ2-5)
CASSRGPSETQYF

SEQ ID NO: 186671 - protein, 13 aa, Homo sapiens
  CDR3 for alpha chain variable domain of TCR clone 93336 (TRAV2, TRAJ21)
CAVEDRNFNKFYF

SEQ ID NO: 186672 - protein, 15 aa, Homo sapiens
  CDR3 for beta chain variable domain of TCR clone 93336 (TRBV28, TRBJ2-5)
CASSPGQGSIETQYF

SEQ ID NO: 186673 - protein, 17 aa, Homo sapiens
  CDR3 for alpha chain variable domain of TCR clone 93337 (TRAV21, TRAJ52)
CCEASPAGGTSYGKLTF

SEQ ID NO: 186674 - protein, 17 aa, Homo sapiens
  CDR3 for beta chain variable domain of TCR clone 93337 (TRBV20-1, TRBJ2-2)
CSASGSGQGGLTGELFF

SEQ ID NO: 186675 - protein, 18 aa, Homo sapiens
  CDR3 for alpha chain variable domain of TCR clone 93338 (TRAV21, TRAJ52)
CAVRPSPAGGTSYGNLTF

SEQ ID NO: 186676 - protein, 14 aa, Homo sapiens
  CDR3 for beta chain variable domain of TCR clone 93338 (TRBV28, TRBJ1-1)
CASSPRTRWAEAFF

SEQ ID NO: 186677 - protein, 12 aa, Homo sapiens
  CDR3 for alpha chain variable domain of TCR clone 93339 (TRAV2, TRAJ33)
CAVPDSNYQLIW

SEQ ID NO: 186678 - protein, 17 aa, Homo sapiens
  CDR3 for beta chain variable domain of TCR clone 93339 (TRBV6-5, TRBJ2-3)
CASSYGTSLYKSDTQYS

SEQ ID NO: 186679 - protein, 15 aa, Homo sapiens
  CDR3 for alpha chain variable domain of TCR clone 93340 (TRAV38-1, TRAJ57)
CAFMDSQGGSEKLVF

SEQ ID NO: 186680 - protein, 16 aa, Homo sapiens
  CDR3 for beta chain variable domain of TCR clone 93340 (TRBV10-3, TRBJ2-1)
CATRGGGRGDYNEQFF

SEQ ID NO: 186681 - protein, 16 aa, Homo sapiens
  CDR3 for alpha chain variable domain of TCR clone 93341 (TRAV21, TRAJ52)
CAVTNAGGTSYGKLTF

SEQ ID NO: 186682 - protein, 15 aa, Homo sapiens
  CDR3 for beta chain variable domain of TCR clone 93341 (TRBV6-3, TRBJ2-7)
CASSSPGTVFYEQYF

SEQ ID NO: 186683 - protein, 11 aa, Homo sapiens
  CDR3 for alpha chain variable domain of TCR clone 93342 (TRAV21, TRAJ48)
CTVDGNEKLTF

SEQ ID NO: 186684 - protein, 16 aa, Homo sapiens
  CDR3 for beta chain variable domain of TCR clone 93342 (TRBV12-4, TRBJ1-5)
CASSSGPRGSNQPQHF

SEQ ID NO: 186685 - protein, 16 aa, Homo sapiens
  CDR3 for alpha chain variable domain of TCR clone 93343 (TRAV26-1, TRAJ37)
CIVRGDGSGNTGKLIF

SEQ ID NO: 186686 - protein, 17 aa, Homo sapiens
  CDR3 for beta chain variable domain of TCR clone 93343 (TRBV4-1, TRBJ2-7)
CASSRDPLGVSGGEQYF

SEQ ID NO: 186687 - protein, 13 aa, Homo sapiens
  CDR3 for alpha chain variable domain of TCR clone 93344 (TRAV29/DV5, TRAJ33)
CAASVESNYQLIW

SEQ ID NO: 186688 - protein, 14 aa, Homo sapiens
  CDR3 for beta chain variable domain of TCR clone 93344 (TRBV11-2, TRBJ2-5)
CASSRAGGIETQYF

SEQ ID NO: 186689 - protein, 17 aa, Homo sapiens
  CDR3 for alpha chain variable domain of TCR clone 93345 (TRAV17, TRAJ52)
CATERPSGGTSYGKLTF

SEQ ID NO: 186690 - protein, 15 aa, Homo sapiens
  CDR3 for beta chain variable domain of TCR clone 93345 (TRBV5-1, TRBJ2-1)
CASSLVANSYNEQFS

SEQ ID NO: 186691 - protein, 13 aa, Homo sapiens
  CDR3 for alpha chain variable domain of TCR clone 93346 (TRAV27, TRAJ29)
CAGAHSGNTPLVF

SEQ ID NO: 186692 - protein, 17 aa, Homo sapiens
  CDR3 for beta chain variable domain of TCR clone 93346 (TRBV7-8, TRBJ2-6)
CASSAGTGGAGANVLTF

SEQ ID NO: 186693 - protein, 14 aa, Homo sapiens
  CDR3 for alpha chain variable domain of TCR clone 93347 (TRAV12-3, TRAJ11)
CAMSRNSGYSTLTF

SEQ ID NO: 186694 - protein, 13 aa, Homo sapiens
  CDR3 for beta chain variable domain of TCR clone 93347 (TRBV20-1, TRBJ2-1)
CSARPPMGNEQFF

SEQ ID NO: 186695 - protein, 15 aa, Homo sapiens
  CDR3 for alpha chain variable domain of TCR clone 93348 (TRAV12-1, TRAJ44)
CVADLPTGTASKLTF

SEQ ID NO: 186696 - protein, 14 aa, Homo sapiens
  CDR3 for beta chain variable domain of TCR clone 93348 (TRBV12-4, TRBJ1-1)
CASSLGTGGTEAFF

SEQ ID NO: 186697 - protein, 12 aa, Homo sapiens
  CDR3 for alpha chain variable domain of TCR clone 93349 (TRAV13-1, TRAJ21)
CAAKEGFNKFYF

SEQ ID NO: 186698 - protein, 16 aa, Homo sapiens
  CDR3 for beta chain variable domain of TCR clone 93349 (TRBV24-1, TRBJ2-3)
CATSDAISGITDTQYF

SEQ ID NO: 186699 - protein, 14 aa, Homo sapiens
  CDR3 for alpha chain variable domain of TCR clone 93350 (TRAV1-2, TRAJ16)
CAVNRFSDGQKLLF

SEQ ID NO: 186700 - protein, 14 aa, Homo sapiens
  CDR3 for beta chain variable domain of TCR clone 93350 (TRBV25-1, TRBJ1-1)
CASTHMGGNTEAFF

SEQ ID NO: 186701 - protein, 13 aa, Homo sapiens
  CDR3 for alpha chain variable domain of TCR clone 93351 (TRAV13-1, TRAJ6)
CAARRGGSYIPTF

SEQ ID NO: 186702 - protein, 16 aa, Homo sapiens
  CDR3 for beta chain variable domain of TCR clone 93351 (TRBV7-9, TRBJ2-2)
CASSLATGVGTGELLF

SEQ ID NO: 186703 - protein, 22 aa, Homo sapiens
  CDR3 for alpha chain variable domain of TCR clone 93352 (TRAV27, TRAJ38)
CAARRNAGNNHLQNPDPAVYQL

SEQ ID NO: 186704 - protein, 13 aa, Homo sapiens
  CDR3 for beta chain variable domain of TCR clone 93352 (TRBV12-5, TRBJ2-3)
CASGDRQSDTQYF

SEQ ID NO: 186705 - protein, 12 aa, Homo sapiens
  CDR3 for alpha chain variable domain of TCR clone 93353 (TRAV20, TRAJ37)
CGCSSNTGKLIF

SEQ ID NO: 186706 - protein, 11 aa, Homo sapiens
  CDR3 for beta chain variable domain of TCR clone 93353 (TRBV12-4, TRBJ2-3)
CASTATDTQYF

SEQ ID NO: 186707 - protein, 15 aa, Homo sapiens
  CDR3 for alpha chain variable domain of TCR clone 93354 (TRAV21, TRAJ24)
CAAWSSTDSWGKLQF

SEQ ID NO: 186708 - protein, 13 aa, Homo sapiens
  CDR3 for beta chain variable domain of TCR clone 93354 (TRBV11-2, TRBJ2-5)
CASSSTGEETQYF

SEQ ID NO: 186709 - protein, 17 aa, Homo sapiens
  CDR3 for alpha chain variable domain of TCR clone 93355 (TRAV35, TRAJ47)
WLLDCRTHTEYGNKLVF

SEQ ID NO: 186710 - protein, 11 aa, Homo sapiens
  CDR3 for beta chain variable domain of TCR clone 93355 (TRBV29-1, TRBJ1-1)
CSVEVGTRTFF

SEQ ID NO: 186711 - protein, 15 aa, Homo sapiens
  CDR3 for alpha chain variable domain of TCR clone 93356 (TRAV23/DV6, TRAJ53)
CAASKLGSGGSNYQL

SEQ ID NO: 186712 - protein, 14 aa, Homo sapiens
  CDR3 for beta chain variable domain of TCR clone 93356 (TRBV7-9, TRBJ2-3)
CASSLEQGTNTQYF

SEQ ID NO: 186713 - protein, 22 aa, Homo sapiens
  CDR3 for alpha chain variable domain of TCR clone 93357 (TRAV12-2, TRAJ32)
CSSETPSPVIKPPKSATNKLIF

SEQ ID NO: 186714 - protein, 14 aa, Homo sapiens
  CDR3 for beta chain variable domain of TCR clone 93357 (TRBV7-3, TRBJ2-1)
CASSLSGSYNEQFF

SEQ ID NO: 186715 - protein, 14 aa, Homo sapiens
  CDR3 for alpha chain variable domain of TCR clone 93358 (TRAV14/DV4, TRAJ41)
CARGGPDSGYALNF

SEQ ID NO: 186716 - protein, 15 aa, Homo sapiens
  CDR3 for beta chain variable domain of TCR clone 93358 (TRBV19, TRBJ2-1)
CASSIQATAYNEQFF

SEQ ID NO: 186717 - protein, 11 aa, Homo sapiens
  CDR3 for alpha chain variable domain of TCR clone 93359 (TRAV12-3, TRAJ27)
CGMANAGKSTF

SEQ ID NO: 186718 - protein, 13 aa, Homo sapiens
  CDR3 for beta chain variable domain of TCR clone 93359 (TRBV20-1, TRBJ1-1)
CSARVGGNTEAFF

SEQ ID NO: 186719 - protein, 11 aa, Homo sapiens
  CDR3 for alpha chain variable domain of TCR clone 93360 (TRAV8-3, TRAJ15)
FAVGPGTALIF

SEQ ID NO: 186720 - protein, 15 aa, Homo sapiens
  CDR3 for beta chain variable domain of TCR clone 93360 (TRBV7-9, TRBJ2-7)
CASSLALAEAYEQYF

SEQ ID NO: 186721 - protein, 13 aa, Homo sapiens
  CDR3 for alpha chain variable domain of TCR clone 93361 (TRAV12-3, TRAJ49)
CAMLSNTGNQFYF

SEQ ID NO: 186722 - protein, 13 aa, Homo sapiens
  CDR3 for beta chain variable domain of TCR clone 93361 (TRBV7-7, TRBJ2-2)
CASSLTSAGELFF

SEQ ID NO: 186723 - protein, 13 aa, Homo sapiens
  CDR3 for alpha chain variable domain of TCR clone 93362 (TRAV12-3, TRAJ7)
CAMTPYGNNRLAF

SEQ ID NO: 186724 - protein, 12 aa, Homo sapiens
  CDR3 for beta chain variable domain of TCR clone 93362 (TRBV11-2, TRBJ2-1)
CASSPGNNEQFF

SEQ ID NO: 186725 - protein, 17 aa, Homo sapiens
  CDR3 for alpha chain variable domain of TCR clone 93363 (TRAV4, TRAJ18)
CLVGERSVGSTLGRLYF

SEQ ID NO: 186726 - protein, 14 aa, Homo sapiens
  CDR3 for beta chain variable domain of TCR clone 93363 (TRBV6-5, TRBJ1-2)
CASSYDGTGCGYTF

SEQ ID NO: 186727 - protein, 18 aa, Homo sapiens
  CDR3 for alpha chain variable domain of TCR clone 93364 (TRAV13-1, TRAJ52)
CAAKNPNAGGTSYGKLTF

SEQ ID NO: 186728 - protein, 16 aa, Homo sapiens
  CDR3 for beta chain variable domain of TCR clone 93364 (TRBV4-1, TRBJ1-3)
CASGQDELLAGNTIYF

SEQ ID NO: 186729 - protein, 17 aa, Homo sapiens
  CDR3 for alpha chain variable domain of TCR clone 93365 (TRAV3, TRAJ6)
CAMRDGPRAGGSYIPTF

SEQ ID NO: 186730 - protein, 18 aa, Homo sapiens
  CDR3 for beta chain variable domain of TCR clone 93365 (TRBV25-1, TRBJ1-2)
CASSGLQNGQGLIFGYTF

SEQ ID NO: 186731 - protein, 13 aa, Homo sapiens
  CDR3 for alpha chain variable domain of TCR clone 93366 (TRAV21, TRAJ57)
CAVTQGGSEKLVF

SEQ ID NO: 186732 - protein, 13 aa, Homo sapiens
  CDR3 for beta chain variable domain of TCR clone 93366 (TRBV20-1, TRBJ1-1)
CSARLGQGTEAFF

SEQ ID NO: 186733 - protein, 13 aa, Homo sapiens
  CDR3 for alpha chain variable domain of TCR clone 93367 (TRAV14/DV4, TRAJ20)
CAMREGRDYKLSF

SEQ ID NO: 186734 - protein, 14 aa, Homo sapiens
  CDR3 for beta chain variable domain of TCR clone 93367 (TRBV19, TRBJ2-1)
CASPTFVLSGEQFF

SEQ ID NO: 186735 - protein, 12 aa, Homo sapiens
  CDR3 for alpha chain variable domain of TCR clone 93368 (TRAV23/DV6, TRAJ30)
CAASKGDDKSIF

SEQ ID NO: 186736 - protein, 15 aa, Homo sapiens
  CDR3 for beta chain variable domain of TCR clone 93368 (TRBV20-1, TRBJ2-7)
CSARDRVSGMDEQYF

SEQ ID NO: 186737 - protein, 17 aa, Homo sapiens
  CDR3 for alpha chain variable domain of TCR clone 93369 (TRAV26-1, TRAJ47)
CIVPSLLYMDYGNKLVF

SEQ ID NO: 186738 - protein, 14 aa, Homo sapiens
  CDR3 for beta chain variable domain of TCR clone 93369 (TRBV7-3, TRBJ1-5)
RASSFSGCNQPQHF

SEQ ID NO: 186739 - protein, 14 aa, Homo sapiens
  CDR3 for alpha chain variable domain of TCR clone 93370 (TRAV13-1, TRAJ35)
CAASKGGFGNVLHC

SEQ ID NO: 186740 - protein, 13 aa, Homo sapiens
  CDR3 for beta chain variable domain of TCR clone 93370 (TRBV7-3, TRBJ1-1)
CASSQDWGGEAFF

SEQ ID NO: 186741 - protein, 12 aa, Homo sapiens
  CDR3 for alpha chain variable domain of TCR clone 93371 (TRAV12-2, TRAJ9)
CAVYNVGFKTIF

SEQ ID NO: 186742 - protein, 14 aa, Homo sapiens
  CDR3 for beta chain variable domain of TCR clone 93371 (TRBV6-1, TRBJ1-5)
CASSETGMEQPQHF

SEQ ID NO: 186743 - protein, 13 aa, Homo sapiens
  CDR3 for alpha chain variable domain of TCR clone 93372 (TRAV20, TRAJ42)
CAVQGGSPGNLIF

SEQ ID NO: 186744 - protein, 15 aa, Homo sapiens
  CDR3 for beta chain variable domain of TCR clone 93372 (TRBV10-1, TRBJ2-1)
CASSEWRGTYNEQFF

SEQ ID NO: 186745 - protein, 14 aa, Homo sapiens
  CDR3 for alpha chain variable domain of TCR clone 93373 (TRAV12-2, TRAJ13)
CAVKKTGGYQKVTF

SEQ ID NO: 186746 - protein, 17 aa, Homo sapiens
  CDR3 for beta chain variable domain of TCR clone 93373 (TRBV7-2, TRBJ2-3)
CASSLEARGTSTDTQYF

SEQ ID NO: 186747 - protein, 13 aa, Homo sapiens
  CDR3 for alpha chain variable domain of TCR clone 93374 (TRAV12-1, TRAJ33)
CGDAPDSNYQLIW

SEQ ID NO: 186748 - protein, 13 aa, Homo sapiens
  CDR3 for beta chain variable domain of TCR clone 93374 (TRBV12-4, TRBJ1-5)
CASSPDRAQPQHF

SEQ ID NO: 186749 - protein, 15 aa, Homo sapiens
  CDR3 for alpha chain variable domain of TCR clone 93375 (TRAV26-1, TRAJ29)
CIVRVEGSGSTPPVF

SEQ ID NO: 186750 - protein, 15 aa, Homo sapiens
  CDR3 for beta chain variable domain of TCR clone 93375 (TRBV7-9, TRBJ1-5)
CASSQGHQPNQPQHF

SEQ ID NO: 186751 - protein, 14 aa, Homo sapiens
  CDR3 for alpha chain variable domain of TCR clone 93376 (TRAV12-2, TRAJ13)
CAVKKTGGYQKVTF

SEQ ID NO: 186752 - protein, 13 aa, Homo sapiens
  CDR3 for beta chain variable domain of TCR clone 93376 (TRBV9, TRBJ2-1)
CASSPSGGNEQFF

SEQ ID NO: 186753 - protein, 14 aa, Homo sapiens
  CDR3 for alpha chain variable domain of TCR clone 93377 (TRAV20, TRAJ20)
CAVRRGYNDYKLSF

SEQ ID NO: 186754 - protein, 13 aa, Homo sapiens
  CDR3 for beta chain variable domain of TCR clone 93377 (TRBV19, TRBJ2-5)
CASSETAPETHYF

SEQ ID NO: 186755 - protein, 12 aa, Homo sapiens
  CDR3 for alpha chain variable domain of TCR clone 93378 (TRAV21, TRAJ33)
CAIQDSDYQLIW

SEQ ID NO: 186756 - protein, 14 aa, Homo sapiens
  CDR3 for beta chain variable domain of TCR clone 93378 (TRBV28, TRBJ2-1)
CASSPGEGGNEQFF

SEQ ID NO: 186757 - protein, 16 aa, Homo sapiens
  CDR3 for alpha chain variable domain of TCR clone 93379 (TRAV30, TRAJ24)
CGTEIGDADSWGKFKF

SEQ ID NO: 186758 - protein, 14 aa, Homo sapiens
  CDR3 for beta chain variable domain of TCR clone 93379 (TRBV12-5, TRBJ2-5)
CASGSRTHQETQYF

SEQ ID NO: 186759 - protein, 14 aa, Homo sapiens
  CDR3 for alpha chain variable domain of TCR clone 93380 (TRAV2, TRAJ29)
CAVEPLSGNTPLVF

SEQ ID NO: 186760 - protein, 12 aa, Homo sapiens
  CDR3 for beta chain variable domain of TCR clone 93380 (TRBV2, TRBJ2-7)
CASKRGSYEQYF

SEQ ID NO: 186761 - protein, 14 aa, Homo sapiens
  CDR3 for alpha chain variable domain of TCR clone 93381 (TRAV1-2, TRAJ16)
CAVNRVSDGQKLLF

SEQ ID NO: 186762 - protein, 15 aa, Homo sapiens
  CDR3 for beta chain variable domain of TCR clone 93381 (TRBV20-1, TRBJ2-7)
CSARDRVSGMDEQYF

SEQ ID NO: 186763 - protein, 16 aa, Homo sapiens
  CDR3 for alpha chain variable domain of TCR clone 93382 (TRAV30, TRAJ24)
CGTEIVDADSWGKFQF

SEQ ID NO: 186764 - protein, 16 aa, Homo sapiens
  CDR3 for beta chain variable domain of TCR clone 93382 (TRBV24-1, TRBJ2-2)
CATSDTGQGGTGELFF

SEQ ID NO: 186765 - protein, 14 aa, Homo sapiens
  CDR3 for alpha chain variable domain of TCR clone 93383 (TRAV12-3, TRAJ9)
CAMSPNTGGFKTIF

SEQ ID NO: 186766 - protein, 13 aa, Homo sapiens
  CDR3 for beta chain variable domain of TCR clone 93383 (TRBV27, TRBJ1-1)
CASSLSIGAEAFF

SEQ ID NO: 186767 - protein, 13 aa, Homo sapiens
  CDR3 for alpha chain variable domain of TCR clone 93384 (TRAV26-2, TRAJ57)
CILSRGGSEKLGF

SEQ ID NO: 186768 - protein, 16 aa, Homo sapiens
  CDR3 for beta chain variable domain of TCR clone 93384 (TRBV18, TRBJ1-5)
CASSPRTGGGNQPQHF

SEQ ID NO: 186769 - protein, 13 aa, Homo sapiens
  CDR3 for alpha chain variable domain of TCR clone 93385 (TRAV20, TRAJ48)
CAVHLFGNEKLTF

SEQ ID NO: 186770 - protein, 15 aa, Homo sapiens
  CDR3 for beta chain variable domain of TCR clone 93385 (TRBV6-5, TRBJ2-6)
CASRQWEAGANVLTF

SEQ ID NO: 186771 - protein, 14 aa, Homo sapiens
  CDR3 for alpha chain variable domain of TCR clone 93386 (TRAV16, TRAJ37)
CALDISGNTGKLIF

SEQ ID NO: 186772 - protein, 13 aa, Homo sapiens
  CDR3 for beta chain variable domain of TCR clone 93386 (TRBV7-9, TRBJ1-2)
CASSLGGLRGYTF

SEQ ID NO: 186773 - protein, 11 aa, Homo sapiens
  CDR3 for alpha chain variable domain of TCR clone 93387 (TRAV2, TRAJ13)
SASGGYQKVTF

SEQ ID NO: 186774 - protein, 15 aa, Homo sapiens
  CDR3 for beta chain variable domain of TCR clone 93387 (TRBV19, TRBJ1-2)
CASSVGQVLNYGYTF

SEQ ID NO: 186775 - protein, 14 aa, Homo sapiens
  CDR3 for alpha chain variable domain of TCR clone 93388 (TRAV12-3, TRAJ29)
CAMILLSGNTPLVF

SEQ ID NO: 186776 - protein, 16 aa, Homo sapiens
  CDR3 for beta chain variable domain of TCR clone 93388 (TRBV28, TRBJ2-7)
CASSSGTSGRGYEQYV

SEQ ID NO: 186777 - protein, 13 aa, Homo sapiens
  CDR3 for alpha chain variable domain of TCR clone 93389 (TRAV8-3, TRAJ28)
CAVGAVGSYQLTF

SEQ ID NO: 186778 - protein, 14 aa, Homo sapiens
  CDR3 for beta chain variable domain of TCR clone 93389 (TRBV7-2, TRBJ2-7)
CASRSQGAAYEQFF

SEQ ID NO: 186779 - protein, 11 aa, Homo sapiens
  CDR3 for alpha chain variable domain of TCR clone 93390 (TRAV21, TRAJ34)
CAVTNTDKLIF

SEQ ID NO: 186780 - protein, 16 aa, Homo sapiens
  CDR3 for beta chain variable domain of TCR clone 93390 (TRBV12-5, TRBJ2-5)
CASGPRTSGNQETQYL

SEQ ID NO: 186781 - protein, 16 aa, Homo sapiens
  CDR3 for alpha chain variable domain of TCR clone 93391 (TRAV3, TRAJ10)
CAVRDMRAGGGNKLTF

SEQ ID NO: 186782 - protein, 17 aa, Homo sapiens
  CDR3 for beta chain variable domain of TCR clone 93391 (TRBV13, TRBJ2-3)
RASSLSRVAGGRNTQYF

SEQ ID NO: 186783 - protein, 15 aa, Homo sapiens
  CDR3 for alpha chain variable domain of TCR clone 93392 (TRAV13-1, TRAJ10)
CAATVLTGGGNKLTF

SEQ ID NO: 186784 - protein, 15 aa, Homo sapiens
  CDR3 for beta chain variable domain of TCR clone 93392 (TRBV2, TRBJ2-7)
CASTLLGSGATEQYF

SEQ ID NO: 186785 - protein, 11 aa, Homo sapiens
  CDR3 for alpha chain variable domain of TCR clone 93393 (TRAV23/DV6, TRAJ58)
CAARLLRGETS

SEQ ID NO: 186786 - protein, 20 aa, Homo sapiens
  CDR3 for beta chain variable domain of TCR clone 93393 (TRBV28, TRBJ2-1)
CASTPIGRSPGLAGGNEQFF

SEQ ID NO: 186787 - protein, 11 aa, Homo sapiens
  CDR3 for alpha chain variable domain of TCR clone 93394 (TRAV21, TRAJ11)
CAVNGYSTLTF

SEQ ID NO: 186788 - protein, 11 aa, Homo sapiens
  CDR3 for beta chain variable domain of TCR clone 93394 (TRBV19, TRBJ1-1)
CPSSIGSEAFF

SEQ ID NO: 186789 - protein, 17 aa, Homo sapiens
  CDR3 for alpha chain variable domain of TCR clone 93395 (TRAV3, TRAJ6)
CAVRDGPRVGGSYIPTF

SEQ ID NO: 186790 - protein, 12 aa, Homo sapiens
  CDR3 for beta chain variable domain of TCR clone 93395 (TRBV11-2, TRBJ2-2)
CAGSLGCGELFF

SEQ ID NO: 186791 - protein, 11 aa, Homo sapiens
  CDR3 for alpha chain variable domain of TCR clone 93396 (TRAV27, TRAJ45)
CAGAQEEVLTY

SEQ ID NO: 186792 - protein, 17 aa, Homo sapiens
  CDR3 for beta chain variable domain of TCR clone 93396 (TRBV11-2, TRBJ2-1)
CASSLYPPGVEYNEQFF

SEQ ID NO: 186793 - protein, 14 aa, Homo sapiens
  CDR3 for alpha chain variable domain of TCR clone 93397 (TRAV9-2, TRAJ39)
CALYIYNAGNMLTF

SEQ ID NO: 186794 - protein, 15 aa, Homo sapiens
  CDR3 for beta chain variable domain of TCR clone 93397 (TRBV4-2, TRBJ1-1)
CASSQEDLPRTEAFF

SEQ ID NO: 186795 - protein, 15 aa, Homo sapiens
  CDR3 for alpha chain variable domain of TCR clone 93398 (TRAV13-1, TRAJ9)
CAASTLNIGGFKTIF

SEQ ID NO: 186796 - protein, 15 aa, Homo sapiens
  CDR3 for beta chain variable domain of TCR clone 93398 (TRBV6-5, TRBJ2-4)
CASSLRESPKNIQYF

SEQ ID NO: 186797 - protein, 13 aa, Homo sapiens
  CDR3 for alpha chain variable domain of TCR clone 93399 (TRAV12-2, TRAJ37)
CAGSSGNTGKLIF

SEQ ID NO: 186798 - protein, 14 aa, Homo sapiens
  CDR3 for beta chain variable domain of TCR clone 93399 (TRBV6-1, TRBJ2-6)
CASQQGAGANVLTF

SEQ ID NO: 186799 - protein, 11 aa, Homo sapiens
  CDR3 for alpha chain variable domain of TCR clone 93400 (TRAV12-1, TRAJ33)
CAVGSNYQLIW

SEQ ID NO: 186800 - protein, 14 aa, Homo sapiens
  CDR3 for beta chain variable domain of TCR clone 93400 (TRBV6-1, TRBJ2-2)
CASVEHIESGELFF

SEQ ID NO: 186801 - protein, 14 aa, Homo sapiens
  CDR3 for alpha chain variable domain of TCR clone 93401 (TRAV12-2, TRAJ11)
CAVNRESGYSTLNF

SEQ ID NO: 186802 - protein, 10 aa, Homo sapiens
  CDR3 for beta chain variable domain of TCR clone 93401 (TRBV20-1, TRBJ2-5)
CSARFETQYF

SEQ ID NO: 186803 - protein, 15 aa, Homo sapiens
  CDR3 for alpha chain variable domain of TCR clone 93402 (TRAV21, TRAJ52)
CAVRGGGTSYGKLTF

SEQ ID NO: 186804 - protein, 15 aa, Homo sapiens
  CDR3 for beta chain variable domain of TCR clone 93402 (TRBV18, TRBJ1-5)
CASSPSDRSDQPQHF

SEQ ID NO: 186805 - protein, 10 aa, Homo sapiens
  CDR3 for alpha chain variable domain of TCR clone 93403 (TRAV13-1, TRAJ52)
CAAKTPMLVV

SEQ ID NO: 186806 - protein, 14 aa, Homo sapiens
  CDR3 for beta chain variable domain of TCR clone 93403 (TRBV6-5, TRBJ1-1)
CASSFGRGLTEAFF

SEQ ID NO: 186807 - protein, 16 aa, Homo sapiens
  CDR3 for alpha chain variable domain of TCR clone 93404 (TRAV12-1, TRAJ13)
WVVNLEVSGGYQKVTF

SEQ ID NO: 186808 - protein, 16 aa, Homo sapiens
  CDR3 for beta chain variable domain of TCR clone 93404 (TRBV24-1, TRBJ2-6)
CATSDRRASGANVLTF

SEQ ID NO: 186809 - protein, 13 aa, Homo sapiens
  CDR3 for alpha chain variable domain of TCR clone 93405 (TRAV12-3, TRAJ40)
CAMSDSGTYKYIF

SEQ ID NO: 186810 - protein, 13 aa, Homo sapiens
  CDR3 for beta chain variable domain of TCR clone 93405 (TRBV11-3, TRBJ1-1)
CASSRQPNTEAFF

SEQ ID NO: 186811 - protein, 11 aa, Homo sapiens
  CDR3 for alpha chain variable domain of TCR clone 93406 (TRAV8-4, TRAJ26)
CAGGEGQNFVF

SEQ ID NO: 186812 - protein, 17 aa, Homo sapiens
  CDR3 for beta chain variable domain of TCR clone 93406 (TRBV7-9, TRBJ2-3)
CASSPTVAGYLTDTQYF

SEQ ID NO: 186813 - protein, 17 aa, Homo sapiens
  CDR3 for alpha chain variable domain of TCR clone 93407 (TRAV3, TRAJ6)
CAVRDGTRAGGSYIPTF

SEQ ID NO: 186814 - protein, 14 aa, Homo sapiens
  CDR3 for beta chain variable domain of TCR clone 93407 (TRBV7-2, TRBJ2-7)
CASSPKTSFYEQYV

SEQ ID NO: 186815 - protein, 19 aa, Homo sapiens
  CDR3 for alpha chain variable domain of TCR clone 93408 (TRAV13-1, TRAJ37)
RAASDRQHRQTNLWARDNF

SEQ ID NO: 186816 - protein, 15 aa, Homo sapiens
  CDR3 for beta chain variable domain of TCR clone 93408 (TRBV7-9, TRBJ1-4)
CASSARTGGNEKLFF

SEQ ID NO: 186817 - protein, 13 aa, Homo sapiens
  CDR3 for alpha chain variable domain of TCR clone 93409 (TRAV12-3, TRAJ54)
CAMTLQGAQNLVF

SEQ ID NO: 186818 - protein, 14 aa, Homo sapiens
  CDR3 for beta chain variable domain of TCR clone 93409 (TRBV4-1, TRBJ2-2)
CASSQAVNTGELFF

SEQ ID NO: 186819 - protein, 12 aa, Homo sapiens
  CDR3 for alpha chain variable domain of TCR clone 93410 (TRAV21, TRAJ12)
CAVMDSSYKLIL

SEQ ID NO: 186820 - protein, 16 aa, Homo sapiens
  CDR3 for beta chain variable domain of TCR clone 93410 (TRBV7-9, TRBJ2-5)
CASRLEIGTRKETQYF

SEQ ID NO: 186821 - protein, 13 aa, Homo sapiens
  CDR3 for alpha chain variable domain of TCR clone 93411 (TRAV12-2, TRAJ9)
CAVEWAGGFKTIF

SEQ ID NO: 186822 - protein, 13 aa, Homo sapiens
  CDR3 for beta chain variable domain of TCR clone 93411 (TRBV7-3, TRBJ1-1)
CASSQDWGAEAFF

SEQ ID NO: 186823 - protein, 15 aa, Homo sapiens
  CDR3 for alpha chain variable domain of TCR clone 93412 (TRAV3, TRAJ22)
CAVRDRGGSARQLTF

SEQ ID NO: 186824 - protein, 13 aa, Homo sapiens
  CDR3 for beta chain variable domain of TCR clone 93412 (TRBV2, TRBJ1-5)
CATAGPGNQPQHF

SEQ ID NO: 186825 - protein, 15 aa, Homo sapiens
  CDR3 for alpha chain variable domain of TCR clone 93413 (TRAV4, TRAJ39)
CLVGPNSSAGNMLTF

SEQ ID NO: 186826 - protein, 16 aa, Homo sapiens
  CDR3 for beta chain variable domain of TCR clone 93413 (TRBV13, TRBJ2-2)
CASSPRTGEHTGELFF

SEQ ID NO: 186827 - protein, 14 aa, Homo sapiens
  CDR3 for alpha chain variable domain of TCR clone 93414 (TRAV3, TRAJ40)
CAVRDRRGTYKYIF

SEQ ID NO: 186828 - protein, 15 aa, Homo sapiens
  CDR3 for beta chain variable domain of TCR clone 93414 (TRBV29-1, TRBJ2-7)
CSVEFFDRGSYEQYF

SEQ ID NO: 186829 - protein, 14 aa, Homo sapiens
  CDR3 for alpha chain variable domain of TCR clone 93415 (TRAV2, TRAJ37)
CAVDFTSDTGKLIF

SEQ ID NO: 186830 - protein, 13 aa, Homo sapiens
  CDR3 for beta chain variable domain of TCR clone 93415 (TRBV4-1, TRBJ2-2)
CASSQENTGELFF

SEQ ID NO: 186831 - protein, 11 aa, Homo sapiens
  CDR3 for alpha chain variable domain of TCR clone 93416 (TRAV8-3, TRAJ15)
CAVGPGTALIF

SEQ ID NO: 186832 - protein, 18 aa, Homo sapiens
  CDR3 for beta chain variable domain of TCR clone 93416 (TRBV18, TRBJ2-3)
CASSYTSGAAGGTDTQYV

SEQ ID NO: 186833 - protein, 14 aa, Homo sapiens
  CDR3 for alpha chain variable domain of TCR clone 93417 (TRAV8-3, TRAJ39)
CAVGANNAGNMLTF

SEQ ID NO: 186834 - protein, 15 aa, Homo sapiens
  CDR3 for beta chain variable domain of TCR clone 93417 (TRBV4-3, TRBJ1-1)
CASSQELGRGTEALF

SEQ ID NO: 186835 - protein, 14 aa, Homo sapiens
  CDR3 for alpha chain variable domain of TCR clone 93418 (TRAV26-1, TRAJ38)
CIADNDGNNRKLIW

SEQ ID NO: 186836 - protein, 15 aa, Homo sapiens
  CDR3 for beta chain variable domain of TCR clone 93418 (TRBV20-1, TRBJ2-7)
CSARDRVSGMDEQYF

SEQ ID NO: 186837 - protein, 16 aa, Homo sapiens
  CDR3 for alpha chain variable domain of TCR clone 93419 (TRAV3, TRAJ21)
CAVRDFERGNFNKFYF

SEQ ID NO: 186838 - protein, 13 aa, Homo sapiens
  CDR3 for beta chain variable domain of TCR clone 93419 (TRBV27, TRBJ2-7)
CASSLTTGYEQYF

SEQ ID NO: 186839 - protein, 12 aa, Homo sapiens
  CDR3 for alpha chain variable domain of TCR clone 93420 (TRAV38-1, TRAJ43)
CAFMTRLADMRF

SEQ ID NO: 186840 - protein, 15 aa, Homo sapiens
  CDR3 for beta chain variable domain of TCR clone 93420 (TRBV2, TRBJ2-5)
CASSEQGLIGETQYF

SEQ ID NO: 186841 - protein, 11 aa, Homo sapiens
  CDR3 for alpha chain variable domain of TCR clone 93421 (TRAV1-2, TRAJ20)
CAVSNDYKLSF

SEQ ID NO: 186842 - protein, 16 aa, Homo sapiens
  CDR3 for beta chain variable domain of TCR clone 93421 (TRBV5-4, TRBJ2-3)
CASQQPGAGGADTQYF

SEQ ID NO: 186843 - protein, 11 aa, Homo sapiens
  CDR3 for alpha chain variable domain of TCR clone 93422 (TRAV12-3, TRAJ43)
CAMSVSNDMRF

SEQ ID NO: 186844 - protein, 16 aa, Homo sapiens
  CDR3 for beta chain variable domain of TCR clone 93422 (TRBV7-9, TRBJ1-2)
CASSLGFSSGEDGYTF

SEQ ID NO: 186845 - protein, 13 aa, Homo sapiens
  CDR3 for alpha chain variable domain of TCR clone 93423 (TRAV1-2, TRAJ9)
CAALNTGGFKTIF

SEQ ID NO: 186846 - protein, 11 aa, Homo sapiens
  CDR3 for beta chain variable domain of TCR clone 93423 (TRBV19, TRBJ1-1)
CASSIGSEAFF

SEQ ID NO: 186847 - protein, 13 aa, Homo sapiens
  CDR3 for alpha chain variable domain of TCR clone 93424 (TRAV2, TRAJ15)
CAVASQAGTALIF

SEQ ID NO: 186848 - protein, 16 aa, Homo sapiens
  CDR3 for beta chain variable domain of TCR clone 93424 (TRBV7-8, TRBJ2-4)
CASSAERTLAKNSQYF

SEQ ID NO: 186849 - protein, 16 aa, Homo sapiens
  CDR3 for alpha chain variable domain of TCR clone 93425 (TRAV20, TRAJ22)
CAVQASSSGSARQLTF

SEQ ID NO: 186850 - protein, 13 aa, Homo sapiens
  CDR3 for beta chain variable domain of TCR clone 93425 (TRBV7-2, TRBJ2-5)
CTSSQTSVETQYF

SEQ ID NO: 186851 - protein, 13 aa, Homo sapiens
  CDR3 for alpha chain variable domain of TCR clone 93426 (TRAV17, TRAJ9)
CATGSTGGFKTIF

SEQ ID NO: 186852 - protein, 14 aa, Homo sapiens
  CDR3 for beta chain variable domain of TCR clone 93426 (TRBV7-8, TRBJ2-7)
CASTVRGGPNEQYF

SEQ ID NO: 186853 - protein, 14 aa, Homo sapiens
  CDR3 for alpha chain variable domain of TCR clone 93427 (TRAV12-2, TRAJ24)
CAVTPADSWGKLQF

SEQ ID NO: 186854 - protein, 16 aa, Homo sapiens
  CDR3 for beta chain variable domain of TCR clone 93427 (TRBV7-9, TRBJ2-1)
CASSDVAGGSYNEQFF

SEQ ID NO: 186855 - protein, 12 aa, Homo sapiens
  CDR3 for alpha chain variable domain of TCR clone 93428 (TRAV17, TRAJ4)
CATDGGYNKLIF

SEQ ID NO: 186856 - protein, 13 aa, Homo sapiens
  CDR3 for beta chain variable domain of TCR clone 93428 (TRBV29-1, TRBJ2-2)
CITTGVNTGELFF

SEQ ID NO: 186857 - protein, 17 aa, Homo sapiens
  CDR3 for alpha chain variable domain of TCR clone 93429 (TRAV27, TRAJ18)
CAGLHRGRGSTLGRLYF

SEQ ID NO: 186858 - protein, 11 aa, Homo sapiens
  CDR3 for beta chain variable domain of TCR clone 93429 (TRBV29-1, TRBJ2-5)
CSEDRTGTQYF

SEQ ID NO: 186859 - protein, 12 aa, Homo sapiens
  CDR3 for alpha chain variable domain of TCR clone 93430 (TRAV13-1, TRAJ49)
CAASIWGNQFYF

SEQ ID NO: 186860 - protein, 11 aa, Homo sapiens
  CDR3 for beta chain variable domain of TCR clone 93430 (TRBV4-1, TRBJ2-2)
CASEHTGELFF

SEQ ID NO: 186861 - protein, 16 aa, Homo sapiens
  CDR3 for alpha chain variable domain of TCR clone 93431 (TRAV17, TRAJ22)
CATGPISSGSARQLTF

SEQ ID NO: 186862 - protein, 13 aa, Homo sapiens
  CDR3 for beta chain variable domain of TCR clone 93431 (TRBV12-5, TRBJ2-3)
CASGDRQSDTQYF

SEQ ID NO: 186863 - protein, 12 aa, Homo sapiens
  CDR3 for alpha chain variable domain of TCR clone 93432 (TRAV12-1, TRAJ40)
CVVYSGTYKYIF

SEQ ID NO: 186864 - protein, 18 aa, Homo sapiens
  CDR3 for beta chain variable domain of TCR clone 93432 (TRBV11-2, TRBJ2-3)
CASSLGGASRGAPNTQYY

SEQ ID NO: 186865 - protein, 18 aa, Homo sapiens
  CDR3 for alpha chain variable domain of TCR clone 93433 (TRAV26-1, TRAJ52)
CIVDPVGAGGTSYGKLTF

SEQ ID NO: 186866 - protein, 15 aa, Homo sapiens
  CDR3 for beta chain variable domain of TCR clone 93433 (TRBV2, TRBJ2-7)
EDSAMYFCASSEQYF

SEQ ID NO: 186867 - protein, 15 aa, Homo sapiens
  CDR3 for alpha chain variable domain of TCR clone 93434 (TRAV12-1, TRAJ36)
CVVSEHQTGANNLFF

SEQ ID NO: 186868 - protein, 12 aa, Homo sapiens
  CDR3 for beta chain variable domain of TCR clone 93434 (TRBV29-1, TRBJ2-3)
CSVTGGADTQYF

SEQ ID NO: 186869 - protein, 10 aa, Homo sapiens
  CDR3 for alpha chain variable domain of TCR clone 93435 (TRAV27, TRAJ11)
CAGARVASPF

SEQ ID NO: 186870 - protein, 13 aa, Homo sapiens
  CDR3 for beta chain variable domain of TCR clone 93435 (TRBV20-1, TRBJ2-1)
CSASTGGYNEQFF

SEQ ID NO: 186871 - protein, 14 aa, Homo sapiens
  CDR3 for alpha chain variable domain of TCR clone 93436 (TRAV2, TRAJ9)
CAVEDRSGGFKTIF

SEQ ID NO: 186872 - protein, 14 aa, Homo sapiens
  CDR3 for beta chain variable domain of TCR clone 93436 (TRBV7-9, TRBJ2-7)
CASRPSGGQNEQYF

SEQ ID NO: 186873 - protein, 14 aa, Homo sapiens
  CDR3 for alpha chain variable domain of TCR clone 93437 (TRAV13-1, TRAJ44)
CAAKTTGTASKLTF

SEQ ID NO: 186874 - protein, 17 aa, Homo sapiens
  CDR3 for beta chain variable domain of TCR clone 93437 (TRBV11-2, TRBJ2-1)
CASSLYPPGVEYNEQFF

SEQ ID NO: 186875 - protein, 11 aa, Homo sapiens
  CDR3 for alpha chain variable domain of TCR clone 93438 (TRAV12-3, TRAJ43)
CAMSVSNDMRF

SEQ ID NO: 186876 - protein, 13 aa, Homo sapiens
  CDR3 for beta chain variable domain of TCR clone 93438 (TRBV20-1, TRBJ1-1)
CSAPLGGGTEVFF

SEQ ID NO: 186877 - protein, 14 aa, Homo sapiens
  CDR3 for alpha chain variable domain of TCR clone 93439 (TRAV12-1, TRAJ30)
CVVNIGGRDDKIIF

SEQ ID NO: 186878 - protein, 14 aa, Homo sapiens
  CDR3 for beta chain variable domain of TCR clone 93439 (TRBV7-6, TRBJ2-3)
CTSSLGTVTDTQYF

SEQ ID NO: 186879 - protein, 11 aa, Homo sapiens
  CDR3 for alpha chain variable domain of TCR clone 93440 (TRAV2, TRAJ21)
CAVFNFNKFYF

SEQ ID NO: 186880 - protein, 14 aa, Homo sapiens
  CDR3 for beta chain variable domain of TCR clone 93440 (TRBV7-6, TRBJ2-3)
CASSLGTVTDTQYF

SEQ ID NO: 186881 - protein, 15 aa, Homo sapiens
  CDR3 for alpha chain variable domain of TCR clone 93441 (TRAV3, TRAJ40)
CAVRDFTSGTYKYIF

SEQ ID NO: 186882 - protein, 13 aa, Homo sapiens
  CDR3 for beta chain variable domain of TCR clone 93441 (TRBV7-9, TRBJ1-2)
CASSLKQNYGYTF

SEQ ID NO: 186883 - protein, 14 aa, Homo sapiens
  CDR3 for alpha chain variable domain of TCR clone 93442 (TRAV27, TRAJ15)
CAGFDNQARTALIF

SEQ ID NO: 186884 - protein, 11 aa, Homo sapiens
  CDR3 for beta chain variable domain of TCR clone 93442 (TRBV29-1, TRBJ1-1)
CSVEVGTRTFF

SEQ ID NO: 186885 - protein, 14 aa, Homo sapiens
  CDR3 for alpha chain variable domain of TCR clone 93443 (TRAV30, TRAJ33)
CGTVAPRSNYQLIW

SEQ ID NO: 186886 - protein, 16 aa, Homo sapiens
  CDR3 for beta chain variable domain of TCR clone 93443 (TRBV20-1, TRBJ1-4)
CSAPGQGLLTNEKLFF

SEQ ID NO: 186887 - protein, 16 aa, Homo sapiens
  CDR3 for alpha chain variable domain of TCR clone 93444 (TRAV3, TRAJ37)
CAVRGKGSGNTGKLIF

SEQ ID NO: 186888 - protein, 15 aa, Homo sapiens
  CDR3 for beta chain variable domain of TCR clone 93444 (TRBV7-9, TRBJ1-6)
CACSSPGRGNSPLHF

SEQ ID NO: 186889 - protein, 10 aa, Homo sapiens
  CDR3 for alpha chain variable domain of TCR clone 93445 (TRAV3, TRAJ20)
CAVRPSVTTT

SEQ ID NO: 186890 - protein, 16 aa, Homo sapiens
  CDR3 for beta chain variable domain of TCR clone 93445 (TRBV12-5, TRBJ2-5)
CASGPRTSGNQETQYF

SEQ ID NO: 186891 - protein, 15 aa, Homo sapiens
  CDR3 for alpha chain variable domain of TCR clone 93446 (TRAV13-1, TRAJ49)
CAASTEGNNGNQFYF

SEQ ID NO: 186892 - protein, 12 aa, Homo sapiens
  CDR3 for beta chain variable domain of TCR clone 93446 (TRBV11-2, TRBJ2-2)
CASSLGGGELFF

SEQ ID NO: 186893 - protein, 14 aa, Homo sapiens
  CDR3 for alpha chain variable domain of TCR clone 93447 (TRAV2, TRAJ37)
CAVDFTSNTGKLIF

SEQ ID NO: 186894 - protein, 15 aa, Homo sapiens
  CDR3 for beta chain variable domain of TCR clone 93447 (TRBV6-1, TRBJ2-3)
CASSERGGITDTQYF

SEQ ID NO: 186895 - protein, 14 aa, Homo sapiens
  CDR3 for alpha chain variable domain of TCR clone 93448 (TRAV30, TRAJ33)
CGTVAPRSNYQLIW

SEQ ID NO: 186896 - protein, 15 aa, Homo sapiens
  CDR3 for beta chain variable domain of TCR clone 93448 (TRBV2, TRBJ2-1)
CASSEEREGDNEQFF

SEQ ID NO: 186897 - protein, 14 aa, Homo sapiens
  CDR3 for alpha chain variable domain of TCR clone 93449 (TRAV3, TRAJ26)
CAVRDYNYGQNFVF

SEQ ID NO: 186898 - protein, 15 aa, Homo sapiens
  CDR3 for beta chain variable domain of TCR clone 93449 (TRBV20-1, TRBJ2-5)
CSATPPGRGGETQYF

SEQ ID NO: 186899 - protein, 14 aa, Homo sapiens
  CDR3 for alpha chain variable domain of TCR clone 93450 (TRAV14/DV4, TRAJ47)
CAMREGRGGNKLVF

SEQ ID NO: 186900 - protein, 14 aa, Homo sapiens
  CDR3 for beta chain variable domain of TCR clone 93450 (TRBV12-4, TRBJ1-4)
CASSGDRGSEKLFF

SEQ ID NO: 186901 - protein, 13 aa, Homo sapiens
  CDR3 for alpha chain variable domain of TCR clone 93451 (TRAV13-1, TRAJ21)
CAASIYNFNKFYF

SEQ ID NO: 186902 - protein, 12 aa, Homo sapiens
  CDR3 for beta chain variable domain of TCR clone 93451 (TRBV19, TRBJ2-1)
CASSRQGAEQFF

SEQ ID NO: 186903 - protein, 15 aa, Homo sapiens
  CDR3 for alpha chain variable domain of TCR clone 93452 (TRAV26-1, TRAJ29)
CIVRVEGSGNTPLVL

SEQ ID NO: 186904 - protein, 15 aa, Homo sapiens
  CDR3 for beta chain variable domain of TCR clone 93452 (TRBV7-9, TRBJ1-5)
CASSQGHQPTQPQHF

SEQ ID NO: 186905 - protein, 13 aa, Homo sapiens
  CDR3 for alpha chain variable domain of TCR clone 93453 (TRAV12-2, TRAJ6)
CAVNVSRKLHTYI

SEQ ID NO: 186906 - protein, 12 aa, Homo sapiens
  CDR3 for beta chain variable domain of TCR clone 93453 (TRBV29-1, TRBJ2-3)
CIVTGGADTQYF

SEQ ID NO: 186907 - protein, 13 aa, Homo sapiens
  CDR3 for alpha chain variable domain of TCR clone 93454 (TRAV27, TRAJ58)
CAGAETSGPRLTF

SEQ ID NO: 186908 - protein, 13 aa, Homo sapiens
  CDR3 for beta chain variable domain of TCR clone 93454 (TRBV7-2, TRBJ2-1)
CASNRDRWNEQFF

SEQ ID NO: 186909 - protein, 11 aa, Homo sapiens
  CDR3 for alpha chain variable domain of TCR clone 93455 (TRAV17, TRAJ39)
CATGAGNMLTF

SEQ ID NO: 186910 - protein, 16 aa, Homo sapiens
  CDR3 for beta chain variable domain of TCR clone 93455 (TRBV5-1, TRBJ2-1)
CASSFGVSGSYNEQFL

SEQ ID NO: 186911 - protein, 12 aa, Homo sapiens
  CDR3 for alpha chain variable domain of TCR clone 93456 (TRAV27, TRAJ9)
CAGESGGFKTIF

SEQ ID NO: 186912 - protein, 16 aa, Homo sapiens
  CDR3 for beta chain variable domain of TCR clone 93456 (TRBV12-5, TRBJ2-5)
CASGPRTSGNQETQYF

SEQ ID NO: 186913 - protein, 14 aa, Homo sapiens
  CDR3 for alpha chain variable domain of TCR clone 93457 (TRAV12-2, TRAJ17)
CAVLFKAVGNKLTF

SEQ ID NO: 186914 - protein, 12 aa, Homo sapiens
  CDR3 for beta chain variable domain of TCR clone 93457 (TRBV11-2, TRBJ2-2)
CASSLGGGELFF

SEQ ID NO: 186915 - protein, 17 aa, Homo sapiens
  CDR3 for alpha chain variable domain of TCR clone 93458 (TRAV3, TRAJ52)
CAVRDGPRAGGSYIPTF

SEQ ID NO: 186916 - protein, 15 aa, Homo sapiens
  CDR3 for beta chain variable domain of TCR clone 93458 (TRBV27, TRBJ1-6)
CASSFDRGLGSPLHF

SEQ ID NO: 186917 - protein, 10 aa, Homo sapiens
  CDR3 for alpha chain variable domain of TCR clone 93459 (TRAV8-3, TRAJ48)
CNFGNEKLTF

SEQ ID NO: 186918 - protein, 12 aa, Homo sapiens
  CDR3 for beta chain variable domain of TCR clone 93459 (TRBV7-2, TRBJ2-5)
CASSQYQETQYF

SEQ ID NO: 186919 - protein, 13 aa, Homo sapiens
  CDR3 for alpha chain variable domain of TCR clone 93460 (TRAV12-3, TRAJ33)
CAMSVNSNYQLIW

SEQ ID NO: 186920 - protein, 18 aa, Homo sapiens
  CDR3 for beta chain variable domain of TCR clone 93460 (TRBV11-2, TRBJ2-3)
CASSLGGASRGAPNTQYF

SEQ ID NO: 186921 - protein, 13 aa, Homo sapiens
  CDR3 for alpha chain variable domain of TCR clone 93461 (TRAV21, TRAJ20)
CAVGLRVDYKLSF

SEQ ID NO: 186922 - protein, 13 aa, Homo sapiens
  CDR3 for beta chain variable domain of TCR clone 93461 (TRBV6-1, TRBJ1-1)
CASSRQGNTGSFF

SEQ ID NO: 186923 - protein, 11 aa, Homo sapiens
  CDR3 for alpha chain variable domain of TCR clone 93462 (TRAV12-3, TRAJ27)
GAMANAGKSTF

SEQ ID NO: 186924 - protein, 13 aa, Homo sapiens
  CDR3 for beta chain variable domain of TCR clone 93462 (TRBV20-1, TRBJ1-1)
CSARVGGNTEAFF

SEQ ID NO: 186925 - protein, 14 aa, Homo sapiens
  CDR3 for alpha chain variable domain of TCR clone 93463 (TRAV13-1, TRAJ35)
CAASKGGFGNVLHC

SEQ ID NO: 186926 - protein, 16 aa, Homo sapiens
  CDR3 for beta chain variable domain of TCR clone 93463 (TRBV7-2, TRBJ2-1)
CASSLVAGAGYNEQFF

SEQ ID NO: 186927 - protein, 13 aa, Homo sapiens
  CDR3 for alpha chain variable domain of TCR clone 93464 (TRAV12-2, TRAJ20)
CAVYPSNDYKPSF

SEQ ID NO: 186928 - protein, 15 aa, Homo sapiens
  CDR3 for beta chain variable domain of TCR clone 93464 (TRBV6-1, TRBJ2-5)
CASSEGWGIQETQYF

SEQ ID NO: 186929 - protein, 15 aa, Homo sapiens
  CDR3 for alpha chain variable domain of TCR clone 93465 (TRAV3, TRAJ5)
CAVRDLDTGRRALTF

SEQ ID NO: 186930 - protein, 15 aa, Homo sapiens
  CDR3 for beta chain variable domain of TCR clone 93465 (TRBV9, TRBJ1-6)
CASSVAGTGDSPLHF

SEQ ID NO: 186931 - protein, 14 aa, Homo sapiens
  CDR3 for alpha chain variable domain of TCR clone 93466 (TRAV2, TRAJ9)
CAVEDRSGGFKTIF

SEQ ID NO: 186932 - protein, 16 aa, Homo sapiens
  CDR3 for beta chain variable domain of TCR clone 93466 (TRBV20-1, TRBJ2-1)
CSARDLKQGMNNEQFF

SEQ ID NO: 186933 - protein, 18 aa, Homo sapiens
  CDR3 for alpha chain variable domain of TCR clone 93467 (TRAV17, TRAJ45)
CATSLDLYSGGGADGLTF

SEQ ID NO: 186934 - protein, 16 aa, Homo sapiens
  CDR3 for beta chain variable domain of TCR clone 93467 (TRBV7-2, TRBJ2-1)
CASSLVAGAGYNGQFF

SEQ ID NO: 186935 - protein, 17 aa, Homo sapiens
  CDR3 for alpha chain variable domain of TCR clone 93468 (TRAV12-1, TRAJ42)
CVVMRMNYGRSQGNLIF

SEQ ID NO: 186936 - protein, 13 aa, Homo sapiens
  CDR3 for beta chain variable domain of TCR clone 93468 (TRBV7-2, TRBJ1-1)
CASSLARPAEAFF

SEQ ID NO: 186937 - protein, 14 aa, Homo sapiens
  CDR3 for alpha chain variable domain of TCR clone 93469 (TRAV1-2, TRAJ16)
CAVNRFSDGHKLLF

SEQ ID NO: 186938 - protein, 16 aa, Homo sapiens
  CDR3 for beta chain variable domain of TCR clone 93469 (TRBV12-4, TRBJ2-5)
CASSFFVRGRQETQYF

SEQ ID NO: 186939 - protein, 14 aa, Homo sapiens
  CDR3 for alpha chain variable domain of TCR clone 93470 (TRAV17, TRAJ31)
CATVLRNNNARLMF

SEQ ID NO: 186940 - protein, 14 aa, Homo sapiens
  CDR3 for beta chain variable domain of TCR clone 93470 (TRBV12-4, TRBJ2-5)
CASSLWKKQETQYF

SEQ ID NO: 186941 - protein, 13 aa, Homo sapiens
  CDR3 for alpha chain variable domain of TCR clone 93471 (TRAV3, TRAJ27)
CAVRPLGAGKSTF

SEQ ID NO: 186942 - protein, 15 aa, Homo sapiens
  CDR3 for beta chain variable domain of TCR clone 93471 (TRBV7-9, TRBJ1-4)
CASSRTGGFNEKLFF

SEQ ID NO: 186943 - protein, 12 aa, Homo sapiens
  CDR3 for alpha chain variable domain of TCR clone 93472 (TRAV8-3, TRAJ26)
CAGDNYGQNFVF

SEQ ID NO: 186944 - protein, 17 aa, Homo sapiens
  CDR3 for beta chain variable domain of TCR clone 93472 (TRBV4-2, TRBJ1-1)
CASTQFGGGSGNTEAFF

SEQ ID NO: 186945 - protein, 13 aa, Homo sapiens
  CDR3 for alpha chain variable domain of TCR clone 93473 (TRAV21, TRAJ20)
CAVGLRVDYKLSF

SEQ ID NO: 186946 - protein, 15 aa, Homo sapiens
  CDR3 for beta chain variable domain of TCR clone 93473 (TRBV27, TRBJ2-5)
CASSLIPSGGETQYF

SEQ ID NO: 186947 - protein, 13 aa, Homo sapiens
  CDR3 for alpha chain variable domain of TCR clone 93474 (TRAV16, TRAJ26)
CITVLCLGQNFVF

SEQ ID NO: 186948 - protein, 12 aa, Homo sapiens
  CDR3 for beta chain variable domain of TCR clone 93474 (TRBV11-2, TRBJ2-1)
FASSPGNNEQFF

SEQ ID NO: 186949 - protein, 13 aa, Homo sapiens
  CDR3 for alpha chain variable domain of TCR clone 93475 (TRAV20, TRAJ21)
CAVEGYNFNKFYF

SEQ ID NO: 186950 - protein, 16 aa, Homo sapiens
  CDR3 for beta chain variable domain of TCR clone 93475 (TRBV12-4, TRBJ1-5)
CASRQPVEGSNQPQHF

SEQ ID NO: 186951 - protein, 13 aa, Homo sapiens
  CDR3 for alpha chain variable domain of TCR clone 93476 (TRAV27, TRAJ6)
CAGGTRGSYLPTF

SEQ ID NO: 186952 - protein, 13 aa, Homo sapiens
  CDR3 for beta chain variable domain of TCR clone 93476 (TRBV4-1, TRBJ2-2)
CASSQENTGELFF

SEQ ID NO: 186953 - protein, 15 aa, Homo sapiens
  CDR3 for alpha chain variable domain of TCR clone 93477 (TRAV8-4, TRAJ29)
CAVSEDFRGNKPLVF

SEQ ID NO: 186954 - protein, 12 aa, Homo sapiens
  CDR3 for beta chain variable domain of TCR clone 93477 (TRBV14, TRBJ2-7)
CASSSLKGEQYF

SEQ ID NO: 186955 - protein, 13 aa, Homo sapiens
  CDR3 for alpha chain variable domain of TCR clone 93478 (TRAV13-1, TRAJ39)
CAASIVMQATCSP

SEQ ID NO: 186956 - protein, 13 aa, Homo sapiens
  CDR3 for beta chain variable domain of TCR clone 93478 (TRBV7-9, TRBJ1-2)
CASSLKQNYGYTF

SEQ ID NO: 186957 - protein, 12 aa, Homo sapiens
  CDR3 for alpha chain variable domain of TCR clone 93479 (TRAV12-2, TRAJ21)
CAVNSNFNKFYF

SEQ ID NO: 186958 - protein, 14 aa, Homo sapiens
  CDR3 for beta chain variable domain of TCR clone 93479 (TRBV12-4, TRBJ2-3)
CASSLSGATDTQYF

SEQ ID NO: 186959 - protein, 15 aa, Homo sapiens
  CDR3 for alpha chain variable domain of TCR clone 93480 (TRAV12-2, TRAJ32)
CAVNHYGGATNKLIF

SEQ ID NO: 186960 - protein, 14 aa, Homo sapiens
  CDR3 for beta chain variable domain of TCR clone 93480 (TRBV27, TRBJ2-1)
CASSCGREANEQFF

SEQ ID NO: 186961 - protein, 19 aa, Homo sapiens
  CDR3 for alpha chain variable domain of TCR clone 93481 (TRAV17, TRAJ40)
TASRAADTASYFCASKYIF

SEQ ID NO: 186962 - protein, 14 aa, Homo sapiens
  CDR3 for beta chain variable domain of TCR clone 93481 (TRBV10-3, TRBJ2-7)
CHQCGTSETYEQYF

SEQ ID NO: 186963 - protein, 15 aa, Homo sapiens
  CDR3 for alpha chain variable domain of TCR clone 93482 (TRAV12-3, TRAJ42)
CAMSGHGGSQGNFIF

SEQ ID NO: 186964 - protein, 13 aa, Homo sapiens
  CDR3 for beta chain variable domain of TCR clone 93482 (TRBV19, TRBJ2-5)
CASSGRAGETQYF

SEQ ID NO: 186965 - protein, 12 aa, Homo sapiens
  CDR3 for alpha chain variable domain of TCR clone 93483 (TRAV27, TRAJ9)
CAGASGGFKTIF

SEQ ID NO: 186966 - protein, 18 aa, Homo sapiens
  CDR3 for beta chain variable domain of TCR clone 93483 (TRBV10-2, TRBJ2-2)
CISAPAVHRQADAGELFF

SEQ ID NO: 186967 - protein, 17 aa, Homo sapiens
  CDR3 for alpha chain variable domain of TCR clone 93484 (TRAV26-1, TRAJ27)
CIVSTPWINTNAGKSTL

SEQ ID NO: 186968 - protein, 16 aa, Homo sapiens
  CDR3 for beta chain variable domain of TCR clone 93484 (TRBV7-9, TRBJ2-1)
CASSLDPGLAIDEQFF

SEQ ID NO: 186969 - protein, 11 aa, Homo sapiens
  CDR3 for alpha chain variable domain of TCR clone 93485 (TRAV21, TRAJ34)
CAVTNTVKLIF

SEQ ID NO: 186970 - protein, 12 aa, Homo sapiens
  CDR3 for beta chain variable domain of TCR clone 93485 (TRBV11-2, TRBJ2-2)
CASSLGGGELFF

SEQ ID NO: 186971 - protein, 14 aa, Homo sapiens
  CDR3 for alpha chain variable domain of TCR clone 93486 (TRAV21, TRAJ45)
CAVYSGGGADGLTF

SEQ ID NO: 186972 - protein, 15 aa, Homo sapiens
  CDR3 for beta chain variable domain of TCR clone 93486 (TRBV6-3, TRBJ2-7)
CASSSPGTVFYEQYF

SEQ ID NO: 186973 - protein, 15 aa, Homo sapiens
  CDR3 for alpha chain variable domain of TCR clone 93487 (TRAV35, TRAJ50)
CAGQLRKTSYDKVIF

SEQ ID NO: 186974 - protein, 12 aa, Homo sapiens
  CDR3 for beta chain variable domain of TCR clone 93487 (TRBV5-1, TRBJ2-5)
CASSWGLETQYF

SEQ ID NO: 186975 - protein, 14 aa, Homo sapiens
  CDR3 for alpha chain variable domain of TCR clone 93488 (TRAV12-1, TRAJ23)
CVVIVYNQGRKLIF

SEQ ID NO: 186976 - protein, 15 aa, Homo sapiens
  CDR3 for beta chain variable domain of TCR clone 93488 (TRBV20-1, TRBJ1-5)
CSAKPPGQGPQPQHF

SEQ ID NO: 186977 - protein, 14 aa, Homo sapiens
  CDR3 for alpha chain variable domain of TCR clone 93489 (TRAV17, TRAJ39)
CATEPVRAGNMLTF

SEQ ID NO: 186978 - protein, 15 aa, Homo sapiens
  CDR3 for beta chain variable domain of TCR clone 93489 (TRBV13, TRBJ1-5)
CASSFGQGGVQPQHF

SEQ ID NO: 186979 - protein, 15 aa, Homo sapiens
  CDR3 for alpha chain variable domain of TCR clone 93490 (TRAV8-2, TRAJ16)
CVVSDGFSDGQKLLF

SEQ ID NO: 186980 - protein, 12 aa, Homo sapiens
  CDR3 for beta chain variable domain of TCR clone 93490 (TRBV12-4, TRBJ2-7)
CASSLGGYERYF

SEQ ID NO: 186981 - protein, 15 aa, Homo sapiens
  CDR3 for alpha chain variable domain of TCR clone 93491 (TRAV12-2, TRAJ53)
CAVNGGGGSNYKLTF

SEQ ID NO: 186982 - protein, 17 aa, Homo sapiens
  CDR3 for beta chain variable domain of TCR clone 93491 (TRBV7-3, TRBJ2-3)
CASSLLKRMRGADTQYF

SEQ ID NO: 186983 - protein, 17 aa, Homo sapiens
  CDR3 for alpha chain variable domain of TCR clone 93492 (TRAV26-1, TRAJ58)
CIVRVGAEETSGSRWTF

SEQ ID NO: 186984 - protein, 18 aa, Homo sapiens
  CDR3 for beta chain variable domain of TCR clone 93492 (TRBV7-9, TRBJ2-7)
CASSLTTSGSRTWYEQYF

SEQ ID NO: 186985 - protein, 14 aa, Homo sapiens
  CDR3 for alpha chain variable domain of TCR clone 93493 (TRAV16, TRAJ17)
CALSGRAAGNKLTL

SEQ ID NO: 186986 - protein, 17 aa, Homo sapiens
  CDR3 for beta chain variable domain of TCR clone 93493 (TRBV18, TRBJ2-6)
CASSPRQGAVGANVLTF

SEQ ID NO: 186987 - protein, 13 aa, Homo sapiens
  CDR3 for alpha chain variable domain of TCR clone 93494 (TRAV12-2, TRAJ39)
CAVNNKAGNMLTF

SEQ ID NO: 186988 - protein, 13 aa, Homo sapiens
  CDR3 for beta chain variable domain of TCR clone 93494 (TRBV2, TRBJ1-5)
CATAGPGNQPQHF

SEQ ID NO: 186989 - protein, 14 aa, Homo sapiens
  CDR3 for alpha chain variable domain of TCR clone 93495 (TRAV12-3, TRAJ12)
CAMSRMDSSYKLIF

SEQ ID NO: 186990 - protein, 14 aa, Homo sapiens
  CDR3 for beta chain variable domain of TCR clone 93495 (TRBV20-1, TRBJ1-4)
CSARSGQSNENLFF

SEQ ID NO: 186991 - protein, 17 aa, Homo sapiens
  CDR3 for alpha chain variable domain of TCR clone 93496 (TRAV26-2, TRAJ42)
CILRDVGYGGSQGNLIF

SEQ ID NO: 186992 - protein, 16 aa, Homo sapiens
  CDR3 for beta chain variable domain of TCR clone 93496 (TRBV12-4, TRBJ2-7)
CASSLIGGTWTYEQYF

SEQ ID NO: 186993 - protein, 13 aa, Homo sapiens
  CDR3 for alpha chain variable domain of TCR clone 93497 (TRAV3, TRAJ29)
CAVGDWGNTPLVF

SEQ ID NO: 186994 - protein, 15 aa, Homo sapiens
  CDR3 for beta chain variable domain of TCR clone 93497 (TRBV12-4, TRBJ2-5)
CASIGRTGEGETQYF

SEQ ID NO: 186995 - protein, 14 aa, Homo sapiens
  CDR3 for alpha chain variable domain of TCR clone 93498 (TRAV8-4, TRAJ34)
CAVSDPGDTDKLIF

SEQ ID NO: 186996 - protein, 15 aa, Homo sapiens
  CDR3 for beta chain variable domain of TCR clone 93498 (TRBV7-2, TRBJ2-1)
CASSSRTSREDEQFF

SEQ ID NO: 186997 - protein, 15 aa, Homo sapiens
  CDR3 for alpha chain variable domain of TCR clone 93499 (TRAV36/DV7, TRAJ53)
CAVEGIGGSNYKLTF

SEQ ID NO: 186998 - protein, 16 aa, Homo sapiens
  CDR3 for beta chain variable domain of TCR clone 93499 (TRBV27, TRBJ2-2)
CASSLSGFWVTGELFF

SEQ ID NO: 186999 - protein, 15 aa, Homo sapiens
  CDR3 for alpha chain variable domain of TCR clone 93500 (TRAV2, TRAJ15)
CAVEDRGQAGTALIF

SEQ ID NO: 187000 - protein, 14 aa, Homo sapiens
  CDR3 for beta chain variable domain of TCR clone 93500 (TRBV2, TRBJ2-7)
CASSLTSGGYEQYF

SEQ ID NO: 187001 - protein, 14 aa, Homo sapiens
  CDR3 for alpha chain variable domain of TCR clone 93501 (TRAV26-1, TRAJ52)
CIAAGGTSYGKLTF

SEQ ID NO: 187002 - protein, 15 aa, Homo sapiens
  CDR3 for beta chain variable domain of TCR clone 93501 (TRBV28, TRBJ2-5)
CASSSGRTIQETQYF

SEQ ID NO: 187003 - protein, 13 aa, Homo sapiens
  CDR3 for alpha chain variable domain of TCR clone 93502 (TRAV2, TRAJ40)
CAVVTSGTYKYIF

SEQ ID NO: 187004 - protein, 14 aa, Homo sapiens
  CDR3 for beta chain variable domain of TCR clone 93502 (TRBV7-9, TRBJ2-1)
RASSSMVGFGEQFF

SEQ ID NO: 187005 - protein, 15 aa, Homo sapiens
  CDR3 for alpha chain variable domain of TCR clone 93503 (TRAV27, TRAJ53)
CRAINSGGSNYKLTF

SEQ ID NO: 187006 - protein, 13 aa, Homo sapiens
  CDR3 for beta chain variable domain of TCR clone 93503 (TRBV7-3, TRBJ2-1)
CQQLSGGTNEQFF

SEQ ID NO: 187007 - protein, 14 aa, Homo sapiens
  CDR3 for alpha chain variable domain of TCR clone 93504 (TRAV17, TRAJ22)
CATSPYGSARQLTF

SEQ ID NO: 187008 - protein, 15 aa, Homo sapiens
  CDR3 for beta chain variable domain of TCR clone 93504 (TRBV4-1, TRBJ2-5)
CASSQWGLYQETQYF

SEQ ID NO: 187009 - protein, 11 aa, Homo sapiens
  CDR3 for alpha chain variable domain of TCR clone 93505 (TRAV23/DV6, TRAJ49)
CAVAPVTSSIL

SEQ ID NO: 187010 - protein, 16 aa, Homo sapiens
  CDR3 for beta chain variable domain of TCR clone 93505 (TRBV7-9, TRBJ1-2)
CASSLGFSSGEDGYTF

SEQ ID NO: 187011 - protein, 14 aa, Homo sapiens
  CDR3 for alpha chain variable domain of TCR clone 93506 (TRAV17, TRAJ54)
CATDANQGAQKLVL

SEQ ID NO: 187012 - protein, 18 aa, Homo sapiens
  CDR3 for beta chain variable domain of TCR clone 93506 (TRBV20-1, TRBJ2-6)
CSAETTPTHGSGANVLTF

SEQ ID NO: 187013 - protein, 14 aa, Homo sapiens
  CDR3 for alpha chain variable domain of TCR clone 93507 (TRAV8-6, TRAJ41)
CAVSESNSGYALNF

SEQ ID NO: 187014 - protein, 17 aa, Homo sapiens
  CDR3 for beta chain variable domain of TCR clone 93507 (TRBV28, TRBJ2-3)
CASSPTPAGGRVDTQYF

SEQ ID NO: 187015 - protein, 14 aa, Homo sapiens
  CDR3 for alpha chain variable domain of TCR clone 93508 (TRAV2, TRAJ37)
CAVDFTSNTGKLIF

SEQ ID NO: 187016 - protein, 13 aa, Homo sapiens
  CDR3 for beta chain variable domain of TCR clone 93508 (TRBV7-2, TRBJ2-5)
CASSQTSVETQYF

SEQ ID NO: 187017 - protein, 15 aa, Homo sapiens
  CDR3 for alpha chain variable domain of TCR clone 93509 (TRAV12-1, TRAJ42)
CVVMRDGGSQGNLIF

SEQ ID NO: 187018 - protein, 14 aa, Homo sapiens
  CDR3 for beta chain variable domain of TCR clone 93509 (TRBV11-2, TRBJ2-3)
CASSLGGGANTQYF

SEQ ID NO: 187019 - protein, 14 aa, Homo sapiens
  CDR3 for alpha chain variable domain of TCR clone 93510 (TRAV17, TRAJ16)
CATADFSDGLKLLF

SEQ ID NO: 187020 - protein, 12 aa, Homo sapiens
  CDR3 for beta chain variable domain of TCR clone 93510 (TRBV24-1, TRBJ1-1)
CATLYPDTEAFF

SEQ ID NO: 187021 - protein, 17 aa, Homo sapiens
  CDR3 for alpha chain variable domain of TCR clone 93511 (TRAV4, TRAJ18)
CLVGERSVGSTLGRLSF

SEQ ID NO: 187022 - protein, 14 aa, Homo sapiens
  CDR3 for beta chain variable domain of TCR clone 93511 (TRBV6-5, TRBJ1-2)
CASSYDGTGGGYTF

SEQ ID NO: 187023 - protein, 15 aa, Homo sapiens
  CDR3 for alpha chain variable domain of TCR clone 93512 (TRAV35, TRAJ40)
CAGQLWDSGTYKCIF

SEQ ID NO: 187024 - protein, 12 aa, Homo sapiens
  CDR3 for beta chain variable domain of TCR clone 93512 (TRBV7-8, TRBJ2-7)
CASSLAGYEQYF

SEQ ID NO: 187025 - protein, 15 aa, Homo sapiens
  CDR3 for alpha chain variable domain of TCR clone 93513 (TRAV17, TRAJ10)
CATVLLTGGGNKLTF

SEQ ID NO: 187026 - protein, 15 aa, Homo sapiens
  CDR3 for beta chain variable domain of TCR clone 93513 (TRBV7-2, TRBJ2-5)
CASSAGGSIVETQYF

SEQ ID NO: 187027 - protein, 15 aa, Homo sapiens
  CDR3 for alpha chain variable domain of TCR clone 93514 (TRAV29/DV5, TRAJ29)
CAASERSSGNTPLVF

SEQ ID NO: 187028 - protein, 17 aa, Homo sapiens
  CDR3 for beta chain variable domain of TCR clone 93514 (TRBV4-1, TRBJ1-4)
CASSQEGPRGEEEKLFF

SEQ ID NO: 187029 - protein, 12 aa, Homo sapiens
  CDR3 for alpha chain variable domain of TCR clone 93515 (TRAV12-1, TRAJ20)
RVVNPDDYKLSF

SEQ ID NO: 187030 - protein, 14 aa, Homo sapiens
  CDR3 for beta chain variable domain of TCR clone 93515 (TRBV7-2, TRBJ2-7)
CASSPKTSFYEQYF

SEQ ID NO: 187031 - protein, 12 aa, Homo sapiens
  CDR3 for alpha chain variable domain of TCR clone 93516 (TRAV25, TRAJ38)
CSGTGNNRKLIW

SEQ ID NO: 187032 - protein, 14 aa, Homo sapiens
  CDR3 for beta chain variable domain of TCR clone 93516 (TRBV19, TRBJ1-5)
CASSKMTGPQPQHF

SEQ ID NO: 187033 - protein, 12 aa, Homo sapiens
  CDR3 for alpha chain variable domain of TCR clone 93517 (TRAV13-1, TRAJ21)
CSAKEGFNKFYF

SEQ ID NO: 187034 - protein, 15 aa, Homo sapiens
  CDR3 for beta chain variable domain of TCR clone 93517 (TRBV7-9, TRBJ1-6)
CASSSPGRGNSPLHF

SEQ ID NO: 187035 - protein, 15 aa, Homo sapiens
  CDR3 for alpha chain variable domain of TCR clone 93518 (TRAV12-2, TRAJ8)
CAVREENAGFQKLVF

SEQ ID NO: 187036 - protein, 15 aa, Homo sapiens
  CDR3 for beta chain variable domain of TCR clone 93518 (TRBV28, TRBJ2-4)
CAAGSGTLLMGIQYF

SEQ ID NO: 187037 - protein, 18 aa, Homo sapiens
  CDR3 for alpha chain variable domain of TCR clone 93519 (TRAV12-3, TRAJ52)
CAMSVGGAGGTSYGKLTF

SEQ ID NO: 187038 - protein, 15 aa, Homo sapiens
  CDR3 for beta chain variable domain of TCR clone 93519 (TRBV7-9, TRBJ1-4)
CASSRTGGFNEKLFF

SEQ ID NO: 187039 - protein, 13 aa, Homo sapiens
  CDR3 for alpha chain variable domain of TCR clone 93520 (TRAV12-2, TRAJ42)
CAVKRGSQGNPIF

SEQ ID NO: 187040 - protein, 13 aa, Homo sapiens
  CDR3 for beta chain variable domain of TCR clone 93520 (TRBV7-9, TRBJ2-3)
CASSPGSTDTQYF

SEQ ID NO: 187041 - protein, 15 aa, Homo sapiens
  CDR3 for alpha chain variable domain of TCR clone 93521 (TRAV13-1, TRAJ32)
CAASIYGGATNKIIF

SEQ ID NO: 187042 - protein, 12 aa, Homo sapiens
  CDR3 for beta chain variable domain of TCR clone 93521 (TRBV7-6, TRBJ2-3)
CASSTGTDTQYF

SEQ ID NO: 187043 - protein, 14 aa, Homo sapiens
  CDR3 for alpha chain variable domain of TCR clone 93522 (TRAV13-1, TRAJ13)
CAASRVRGYQKVTF

SEQ ID NO: 187044 - protein, 17 aa, Homo sapiens
  CDR3 for beta chain variable domain of TCR clone 93522 (TRBV15, TRBJ1-5)
CATSRAPPGTRNQPQHF

SEQ ID NO: 187045 - protein, 11 aa, Homo sapiens
  CDR3 for alpha chain variable domain of TCR clone 93523 (TRAV23/DV6, TRAJ48)
CAPRWGEKLTF

SEQ ID NO: 187046 - protein, 13 aa, Homo sapiens
  CDR3 for beta chain variable domain of TCR clone 93523 (TRBV12-4, TRBJ2-5)
CASSPGTEDTQYF

SEQ ID NO: 187047 - protein, 16 aa, Homo sapiens
  CDR3 for alpha chain variable domain of TCR clone 93524 (TRAV1-2, TRAJ6)
CAVRDQGTGGSYIPTF

SEQ ID NO: 187048 - protein, 13 aa, Homo sapiens
  CDR3 for beta chain variable domain of TCR clone 93524 (TRBV28, TRBJ2-7)
CASTPGRAGEQYF

SEQ ID NO: 187049 - protein, 12 aa, Homo sapiens
  CDR3 for alpha chain variable domain of TCR clone 93525 (TRAV29/DV5, TRAJ49)
CAATDTGNQFYF

SEQ ID NO: 187050 - protein, 19 aa, Homo sapiens
  CDR3 for beta chain variable domain of TCR clone 93525 (TRBV25-1, TRBJ2-2)
CAILVYRVHRGRKTGELFF

SEQ ID NO: 187051 - protein, 11 aa, Homo sapiens
  CDR3 for alpha chain variable domain of TCR clone 93526 (TRAV13-1, TRAJ5)
CAPKGRRALTF

SEQ ID NO: 187052 - protein, 15 aa, Homo sapiens
  CDR3 for beta chain variable domain of TCR clone 93526 (TRBV11-2, TRBJ1-1)
CASSSRSSLLLSLGK

SEQ ID NO: 187053 - protein, 16 aa, Homo sapiens
  CDR3 for alpha chain variable domain of TCR clone 93527 (TRAV30, TRAJ24)
CGTEIVDADSWGRFQF

SEQ ID NO: 187054 - protein, 15 aa, Homo sapiens
  CDR3 for beta chain variable domain of TCR clone 93527 (TRBV27, TRBJ2-1)
CASSNGGGSSNEQFF

SEQ ID NO: 187055 - protein, 21 aa, Homo sapiens
  CDR3 for alpha chain variable domain of TCR clone 93528 (TRAV12-1, TRAJ32)
SSVIQPPTSMNYGGATNKLIF

SEQ ID NO: 187056 - protein, 15 aa, Homo sapiens
  CDR3 for beta chain variable domain of TCR clone 93528 (TRBV7-9, TRBJ2-2)
RASGPLDTFPGELFF

SEQ ID NO: 187057 - protein, 18 aa, Homo sapiens
  CDR3 for alpha chain variable domain of TCR clone 93529 (TRAV20, TRAJ4)
CAVQPYYMFSGGYNKMIF

SEQ ID NO: 187058 - protein, 13 aa, Homo sapiens
  CDR3 for beta chain variable domain of TCR clone 93529 (TRBV19, TRBJ2-3)
CATWDKITDTQYF

SEQ ID NO: 187059 - protein, 13 aa, Homo sapiens
  CDR3 for alpha chain variable domain of TCR clone 93530 (TRAV13-1, TRAJ37)
CAARSGNPGKLIF

SEQ ID NO: 187060 - protein, 14 aa, Homo sapiens
  CDR3 for beta chain variable domain of TCR clone 93530 (TRBV12-4, TRBJ2-3)
CASSLGQGTDTQYF

SEQ ID NO: 187061 - protein, 18 aa, Homo sapiens
  CDR3 for alpha chain variable domain of TCR clone 93531 (TRAV21, TRAJ52)
CAVRPSPAGGTSYGKLTF

SEQ ID NO: 187062 - protein, 15 aa, Homo sapiens
  CDR3 for beta chain variable domain of TCR clone 93531 (TRBV19, TRBJ1-1)
CASTSGQIQNAEAFF

SEQ ID NO: 187063 - protein, 15 aa, Homo sapiens
  CDR3 for alpha chain variable domain of TCR clone 93532 (TRAV26-1, TRAJ44)
CIVRANTGTASKLTF

SEQ ID NO: 187064 - protein, 15 aa, Homo sapiens
  CDR3 for beta chain variable domain of TCR clone 93532 (TRBV5-5, TRBJ2-2)
CASSRQASGAGELFF

SEQ ID NO: 187065 - protein, 16 aa, Homo sapiens
  CDR3 for alpha chain variable domain of TCR clone 93533 (TRAV12-2, TRAJ10)
CAVNRVLTGGGNKLTF

SEQ ID NO: 187066 - protein, 12 aa, Homo sapiens
  CDR3 for beta chain variable domain of TCR clone 93533 (TRBV28, TRBJ2-7)
CASSFSSYEQHF

SEQ ID NO: 187067 - protein, 14 aa, Homo sapiens
  CDR3 for alpha chain variable domain of TCR clone 93534 (TRAV27, TRAJ22)
CAGLPSGSARQLTF

SEQ ID NO: 187068 - protein, 16 aa, Homo sapiens
  CDR3 for beta chain variable domain of TCR clone 93534 (TRBV7-3, TRBJ2-2)
CASSLKRGTVSGELFF

SEQ ID NO: 187069 - protein, 14 aa, Homo sapiens
  CDR3 for alpha chain variable domain of TCR clone 93535 (TRAV8-3, TRAJ4)
CAVGAAGGYNKLIF

SEQ ID NO: 187070 - protein, 14 aa, Homo sapiens
  CDR3 for beta chain variable domain of TCR clone 93535 (TRBV19, TRBJ1-4)
CASAIEAEGEKLFF

SEQ ID NO: 187071 - protein, 14 aa, Homo sapiens
  CDR3 for alpha chain variable domain of TCR clone 93536 (TRAV1-2, TRAJ16)
CAVNRFSDGQKLLS

SEQ ID NO: 187072 - protein, 12 aa, Homo sapiens
  CDR3 for beta chain variable domain of TCR clone 93536 (TRBV7-9, TRBJ2-7)
CASSLEGYEQYF

SEQ ID NO: 187073 - protein, 14 aa, Homo sapiens
  CDR3 for alpha chain variable domain of TCR clone 93537 (TRAV26-1, TRAJ48)
CIVGLNFGNEKLTF

SEQ ID NO: 187074 - protein, 17 aa, Homo sapiens
  CDR3 for beta chain variable domain of TCR clone 93537 (TRBV5-1, TRBJ2-5)
CASSPVAPGQNQETQYF

SEQ ID NO: 187075 - protein, 12 aa, Homo sapiens
  CDR3 for alpha chain variable domain of TCR clone 93538 (TRAV21, TRAJ3)
CCFYSSASKIIF

SEQ ID NO: 187076 - protein, 16 aa, Homo sapiens
  CDR3 for beta chain variable domain of TCR clone 93538 (TRBV19, TRBJ2-1)
CASSEAGPSSYNEQFF

SEQ ID NO: 187077 - protein, 13 aa, Homo sapiens
  CDR3 for alpha chain variable domain of TCR clone 93539 (TRAV26-1, )
CIVSHRVEGFRNQ

SEQ ID NO: 187078 - protein, 14 aa, Homo sapiens
  CDR3 for beta chain variable domain of TCR clone 93539 (TRBV20-1, TRBJ2-7)
CSAWTALSSYEQYF

SEQ ID NO: 187079 - protein, 14 aa, Homo sapiens
  CDR3 for alpha chain variable domain of TCR clone 93540 (TRAV12-3, TRAJ10)
SHLPLTGGGNKLTF

SEQ ID NO: 187080 - protein, 15 aa, Homo sapiens
  CDR3 for beta chain variable domain of TCR clone 93540 (TRBV4-1, TRBJ1-4)
CASSDTGGTNERLFF

SEQ ID NO: 187081 - protein, 13 aa, Homo sapiens
  CDR3 for alpha chain variable domain of TCR clone 93541 (TRAV38-2/DV8, TRAJ49)
CAYRGRTGNQFYF

SEQ ID NO: 187082 - protein, 15 aa, Homo sapiens
  CDR3 for beta chain variable domain of TCR clone 93541 (TRBV24-1, TRBJ1-1)
CATSDSKTVNTEAFF

SEQ ID NO: 187083 - protein, 12 aa, Homo sapiens
  CDR3 for alpha chain variable domain of TCR clone 93542 (TRAV16, TRAJ10)
CSRTGGGNKLTF

SEQ ID NO: 187084 - protein, 18 aa, Homo sapiens
  CDR3 for beta chain variable domain of TCR clone 93542 (TRBV7-9, TRBJ2-7)
CASSLTTSGSRTWYEQYF

SEQ ID NO: 187085 - protein, 12 aa, Homo sapiens
  CDR3 for alpha chain variable domain of TCR clone 93543 (TRAV17, TRAJ12)
CATLRSSDKLIF

SEQ ID NO: 187086 - protein, 16 aa, Homo sapiens
  CDR3 for beta chain variable domain of TCR clone 93543 (TRBV28, TRBJ2-7)
CASSLFFETGGPEQYF

SEQ ID NO: 187087 - protein, 20 aa, Homo sapiens
  CDR3 for alpha chain variable domain of TCR clone 93544 (TRAV1-1, TRAJ4)
CLLLLRREGFLSGGYNKLIF

SEQ ID NO: 187088 - protein, 16 aa, Homo sapiens
  CDR3 for beta chain variable domain of TCR clone 93544 (TRBV28, TRBJ1-4)
CASSPPYRGRSEKLFF

SEQ ID NO: 187089 - protein, 13 aa, Homo sapiens
  CDR3 for alpha chain variable domain of TCR clone 93545 (TRAV8-3, TRAJ28)
CAVGAVGSYQLTF

SEQ ID NO: 187090 - protein, 15 aa, Homo sapiens
  CDR3 for beta chain variable domain of TCR clone 93545 (TRBV7-9, TRBJ1-5)
CASSQGNQPNQPQHF

SEQ ID NO: 187091 - protein, 11 aa, Homo sapiens
  CDR3 for alpha chain variable domain of TCR clone 93546 (TRAV2, TRAJ33)
CAVESNYQLIW

SEQ ID NO: 187092 - protein, 15 aa, Homo sapiens
  CDR3 for beta chain variable domain of TCR clone 93546 (TRBV19, TRBJ1-1)
CASTSGQIQHTEAFF

SEQ ID NO: 187093 - protein, 14 aa, Homo sapiens
  CDR3 for alpha chain variable domain of TCR clone 93547 (TRAV8-2, TRAJ4)
CVVSPSGGYNKLIF

SEQ ID NO: 187094 - protein, 15 aa, Homo sapiens
  CDR3 for beta chain variable domain of TCR clone 93547 (TRBV2, TRBJ2-1)
CASSELAGIYNEQFF

SEQ ID NO: 187095 - protein, 14 aa, Homo sapiens
  CDR3 for alpha chain variable domain of TCR clone 93548 (TRAV12-2, TRAJ40)
CAVKIPSGTYKYIF

SEQ ID NO: 187096 - protein, 14 aa, Homo sapiens
  CDR3 for beta chain variable domain of TCR clone 93548 (TRBV7-2, TRBJ2-7)
CASSLRWEVNEQYF

SEQ ID NO: 187097 - protein, 13 aa, Homo sapiens
  CDR3 for alpha chain variable domain of TCR clone 93549 (TRAV20, TRAJ20)
CAVRWVRDYKLSF

SEQ ID NO: 187098 - protein, 14 aa, Homo sapiens
  CDR3 for beta chain variable domain of TCR clone 93549 (TRBV19, TRBJ2-2)
CASTVTANTGELSF

SEQ ID NO: 187099 - protein, 14 aa, Homo sapiens
  CDR3 for alpha chain variable domain of TCR clone 93550 (TRAV12-2, TRAJ17)
CAVLFKAAGNKLTF

SEQ ID NO: 187100 - protein, 12 aa, Homo sapiens
  CDR3 for beta chain variable domain of TCR clone 93550 (TRBV29-1, TRBJ2-3)
CSVTRGADTQYF

SEQ ID NO: 187101 - protein, 13 aa, Homo sapiens
  CDR3 for alpha chain variable domain of TCR clone 93551 (TRAV1-1, TRAJ31)
CASYLNNNARLVF

SEQ ID NO: 187102 - protein, 14 aa, Homo sapiens
  CDR3 for beta chain variable domain of TCR clone 93551 (TRBV4-1, TRBJ2-5)
CASSRSGSGETQYF

SEQ ID NO: 187103 - protein, 14 aa, Homo sapiens
  CDR3 for alpha chain variable domain of TCR clone 93552 (TRAV1-1, TRAJ30)
CAVRSLNRDDKIIF

SEQ ID NO: 187104 - protein, 15 aa, Homo sapiens
  CDR3 for beta chain variable domain of TCR clone 93552 (TRBV27, TRBJ1-4)
CTSSAQQDLNEKLFF

SEQ ID NO: 187105 - protein, 15 aa, Homo sapiens
  CDR3 for alpha chain variable domain of TCR clone 93553 (TRAV17, TRAJ57)
CATGPSQGGSEKLVF

SEQ ID NO: 187106 - protein, 16 aa, Homo sapiens
  CDR3 for beta chain variable domain of TCR clone 93553 (TRBV12-4, TRBJ1-5)
YASSRPVGGSNQPQHF

SEQ ID NO: 187107 - protein, 13 aa, Homo sapiens
  CDR3 for alpha chain variable domain of TCR clone 93554 (TRAV13-1, TRAJ5)
CAASDTGRRALAF

SEQ ID NO: 187108 - protein, 12 aa, Homo sapiens
  CDR3 for beta chain variable domain of TCR clone 93554 (TRBV28, TRBJ2-3)
CASSLYRDTQYF

SEQ ID NO: 187109 - protein, 12 aa, Homo sapiens
  CDR3 for alpha chain variable domain of TCR clone 93555 (TRAV17, TRAJ12)
CATLRSSYKLII

SEQ ID NO: 187110 - protein, 16 aa, Homo sapiens
  CDR3 for beta chain variable domain of TCR clone 93555 (TRBV28, TRBJ2-7)
CASSLFFETGGPEQYF

SEQ ID NO: 187111 - protein, 14 aa, Homo sapiens
  CDR3 for alpha chain variable domain of TCR clone 93556 (TRAV1-2, TRAJ16)
CAVNRFSDGQKLLF

SEQ ID NO: 187112 - protein, 14 aa, Homo sapiens
  CDR3 for beta chain variable domain of TCR clone 93556 (TRBV20-1, TRBJ1-5)
CSAPGTGVGQSQHF

SEQ ID NO: 187113 - protein, 15 aa, Homo sapiens
  CDR3 for alpha chain variable domain of TCR clone 93557 (TRAV8-3, TRAJ45)
CASSYSGGGADGLTF

SEQ ID NO: 187114 - protein, 16 aa, Homo sapiens
  CDR3 for beta chain variable domain of TCR clone 93557 (TRBV7-9, TRBJ2-2)
CASSSFGGANTGELFF

SEQ ID NO: 187115 - protein, 16 aa, Homo sapiens
  CDR3 for alpha chain variable domain of TCR clone 93558 (TRAV23/DV6, TRAJ9)
CAASIGGNTGGFKTIF

SEQ ID NO: 187116 - protein, 17 aa, Homo sapiens
  CDR3 for beta chain variable domain of TCR clone 93558 (TRBV7-8, TRBJ2-1)
CASSPPTGTLAYNEQFF

SEQ ID NO: 187117 - protein, 13 aa, Homo sapiens
  CDR3 for alpha chain variable domain of TCR clone 93559 (TRAV29/DV5, TRAJ31)
CAASRNNNARLMF

SEQ ID NO: 187118 - protein, 12 aa, Homo sapiens
  CDR3 for beta chain variable domain of TCR clone 93559 (TRBV11-2, TRBJ2-1)
CASSHGNNEQFF

SEQ ID NO: 187119 - protein, 13 aa, Homo sapiens
  CDR3 for alpha chain variable domain of TCR clone 93560 (TRAV2, TRAJ15)
CAMASQAGTALIF

SEQ ID NO: 187120 - protein, 16 aa, Homo sapiens
  CDR3 for beta chain variable domain of TCR clone 93560 (TRBV20-1, TRBJ1-4)
CSAPGQGLLTNEKLFF

SEQ ID NO: 187121 - protein, 15 aa, Homo sapiens
  CDR3 for alpha chain variable domain of TCR clone 93561 (TRAV1-2, TRAJ38)
CAVSENAGNNRKRIW

SEQ ID NO: 187122 - protein, 16 aa, Homo sapiens
  CDR3 for beta chain variable domain of TCR clone 93561 (TRBV4-1, TRBJ2-7)
CASSLTAGQATYEQYF

SEQ ID NO: 187123 - protein, 17 aa, Homo sapiens
  CDR3 for alpha chain variable domain of TCR clone 93562 (TRAV13-1, TRAJ52)
CAASSGAGGTSYGKLTF

SEQ ID NO: 187124 - protein, 15 aa, Homo sapiens
  CDR3 for beta chain variable domain of TCR clone 93562 (TRBV7-3, TRBJ2-2)
CASSETGQGTGELFF

SEQ ID NO: 187125 - protein, 13 aa, Homo sapiens
  CDR3 for alpha chain variable domain of TCR clone 93563 (TRAV12-1, TRAJ37)
CVVNAGDTGKLIF

SEQ ID NO: 187126 - protein, 14 aa, Homo sapiens
  CDR3 for beta chain variable domain of TCR clone 93563 (TRBV7-2, TRBJ2-3)
CASRRGLAADTQYF

SEQ ID NO: 187127 - protein, 14 aa, Homo sapiens
  CDR3 for alpha chain variable domain of TCR clone 93564 (TRAV12-2, TRAJ44)
CAVNPAGTTSKLTF

SEQ ID NO: 187128 - protein, 12 aa, Homo sapiens
  CDR3 for beta chain variable domain of TCR clone 93564 (TRBV27, TRBJ2-5)
CASSPTGETQYF

SEQ ID NO: 187129 - protein, 14 aa, Homo sapiens
  CDR3 for alpha chain variable domain of TCR clone 93565 (TRAV12-1, TRAJ17)
CVVNYKAAGNKLTF

SEQ ID NO: 187130 - protein, 15 aa, Homo sapiens
  CDR3 for beta chain variable domain of TCR clone 93565 (TRBV19, TRBJ1-1)
CASTSGQIQNTEAFF

SEQ ID NO: 187131 - protein, 16 aa, Homo sapiens
  CDR3 for alpha chain variable domain of TCR clone 93566 (TRAV12-3, TRAJ53)
CAMSPGSGGSNYKLTF

SEQ ID NO: 187132 - protein, 18 aa, Homo sapiens
  CDR3 for beta chain variable domain of TCR clone 93566 (TRBV20-1, TRBJ2-3)
CSASGLAGGPGTTDTQYF

SEQ ID NO: 187133 - protein, 14 aa, Homo sapiens
  CDR3 for alpha chain variable domain of TCR clone 93567 (TRAV1-2, TRAJ16)
CAVNRFSDGQKLLF

SEQ ID NO: 187134 - protein, 13 aa, Homo sapiens
  CDR3 for beta chain variable domain of TCR clone 93567 (TRBV10-3, TRBJ2-7)
CASQLAVNYEQYF

SEQ ID NO: 187135 - protein, 15 aa, Homo sapiens
  CDR3 for alpha chain variable domain of TCR clone 93568 (TRAV8-3, TRAJ20)
CAVEAKGSNDYKLSF

SEQ ID NO: 187136 - protein, 15 aa, Homo sapiens
  CDR3 for beta chain variable domain of TCR clone 93568 (TRBV15, TRBJ2-3)
CATSRDPRGTDTQYF

SEQ ID NO: 187137 - protein, 14 aa, Homo sapiens
  CDR3 for alpha chain variable domain of TCR clone 93569 (TRAV8-3, TRAJ13)
CDVGAQEGYQKVTF

SEQ ID NO: 187138 - protein, 15 aa, Homo sapiens
  CDR3 for beta chain variable domain of TCR clone 93569 (TRBV3-1, TRBJ1-1)
CASKMRATMNTEAFF

SEQ ID NO: 187139 - protein, 15 aa, Homo sapiens
  CDR3 for alpha chain variable domain of TCR clone 93570 (TRAV3, TRAJ29)
CAVRAPLSGNTPFVF

SEQ ID NO: 187140 - protein, 15 aa, Homo sapiens
  CDR3 for beta chain variable domain of TCR clone 93570 (TRBV28, TRBJ1-1)
CASRIKGGLNTEAFF

SEQ ID NO: 187141 - protein, 14 aa, Homo sapiens
  CDR3 for alpha chain variable domain of TCR clone 93571 (TRAV13-1, TRAJ20)
CAARPGSNDYKLSF

SEQ ID NO: 187142 - protein, 14 aa, Homo sapiens
  CDR3 for beta chain variable domain of TCR clone 93571 (TRBV7-2, TRBJ2-7)
CASSPKTSFYEQYF

SEQ ID NO: 187143 - protein, 14 aa, Homo sapiens
  CDR3 for alpha chain variable domain of TCR clone 93572 (TRAV26-1, TRAJ38)
CIADNAGNNRKPIW

SEQ ID NO: 187144 - protein, 16 aa, Homo sapiens
  CDR3 for beta chain variable domain of TCR clone 93572 (TRBV20-1, TRBJ2-7)
CSASTSGRLSSYEQYF

SEQ ID NO: 187145 - protein, 14 aa, Homo sapiens
  CDR3 for alpha chain variable domain of TCR clone 93573 (TRAV8-3, TRAJ6)
CAVGASGGSYIPTF

SEQ ID NO: 187146 - protein, 17 aa, Homo sapiens
  CDR3 for beta chain variable domain of TCR clone 93573 (TRBV18, TRBJ2-2)
CASSPSDPWQNTGELFF

SEQ ID NO: 187147 - protein, 16 aa, Homo sapiens
  CDR3 for alpha chain variable domain of TCR clone 93574 (TRAV3, TRAJ21)
CAVRDIERGNFNKFYF

SEQ ID NO: 187148 - protein, 13 aa, Homo sapiens
  CDR3 for beta chain variable domain of TCR clone 93574 (TRBV25-1, TRBJ2-7)
CASSLTTGYEQYF

SEQ ID NO: 187149 - protein, 13 aa, Homo sapiens
  CDR3 for alpha chain variable domain of TCR clone 93575 (TRAV38-2/DV8, TRAJ49)
CAYRRRTGNQFYF

SEQ ID NO: 187150 - protein, 15 aa, Homo sapiens
  CDR3 for beta chain variable domain of TCR clone 93575 (TRBV24-1, TRBJ1-1)
CATSDSKMVNTEAFF

SEQ ID NO: 187151 - protein, 16 aa, Homo sapiens
  CDR3 for alpha chain variable domain of TCR clone 93576 (TRAV30, TRAJ24)
CGTEIVDADSWGKFQF

SEQ ID NO: 187152 - protein, 15 aa, Homo sapiens
  CDR3 for beta chain variable domain of TCR clone 93576 (TRBV7-2, TRBJ2-2)
CASSPTGANTGELFF

SEQ ID NO: 187153 - protein, 15 aa, Homo sapiens
  CDR3 for alpha chain variable domain of TCR clone 93577 (TRAV27, TRAJ38)
CAARRNAGNNRKLFW

SEQ ID NO: 187154 - protein, 17 aa, Homo sapiens
  CDR3 for beta chain variable domain of TCR clone 93577 (TRBV20-1, TRBJ2-2)
CSASGSGQGGLTGELFF

SEQ ID NO: 187155 - protein, 17 aa, Homo sapiens
  CDR3 for alpha chain variable domain of TCR clone 93578 (TRAV4, TRAJ42)
CLVGVLNYGGSQGNLIF

SEQ ID NO: 187156 - protein, 12 aa, Homo sapiens
  CDR3 for beta chain variable domain of TCR clone 93578 (TRBV20-1, TRBJ2-1)
CIAQYTYNEQFF

SEQ ID NO: 187157 - protein, 13 aa, Homo sapiens
  CDR3 for alpha chain variable domain of TCR clone 93579 (TRAV1-2, TRAJ9)
CAALNTGGFKTIF

SEQ ID NO: 187158 - protein, 15 aa, Homo sapiens
  CDR3 for beta chain variable domain of TCR clone 93579 (TRBV5-7, TRBJ1-4)
CASSLWHQGGEKLFF

SEQ ID NO: 187159 - protein, 14 aa, Homo sapiens
  CDR3 for alpha chain variable domain of TCR clone 93580 (TRAV17, TRAJ6)
CATDASGGSYKPTF

SEQ ID NO: 187160 - protein, 19 aa, Homo sapiens
  CDR3 for beta chain variable domain of TCR clone 93580 (TRBV4-3, TRBJ2-7)
CASSQEFIGWQVTPYEQYF

SEQ ID NO: 187161 - protein, 11 aa, Homo sapiens
  CDR3 for alpha chain variable domain of TCR clone 93581 (TRAV21, TRAJ34)
CAHYNTDKLIF

SEQ ID NO: 187162 - protein, 16 aa, Homo sapiens
  CDR3 for beta chain variable domain of TCR clone 93581 (TRBV20-1, TRBJ1-2)
CSASMGQGVANYGYTF

SEQ ID NO: 187163 - protein, 13 aa, Homo sapiens
  CDR3 for alpha chain variable domain of TCR clone 93582 (TRAV21, TRAJ15)
CAVANQAGTALIF

SEQ ID NO: 187164 - protein, 17 aa, Homo sapiens
  CDR3 for beta chain variable domain of TCR clone 93582 (TRBV11-2, TRBJ2-1)
CASSLYPPGVEYNEQFF

SEQ ID NO: 187165 - protein, 12 aa, Homo sapiens
  CDR3 for alpha chain variable domain of TCR clone 93583 (TRAV12-1, TRAJ31)
CVSWNNNARPMF

SEQ ID NO: 187166 - protein, 15 aa, Homo sapiens
  CDR3 for beta chain variable domain of TCR clone 93583 (TRBV7-2, TRBJ1-5)
CASSLDRGQDQPQHF

SEQ ID NO: 187167 - protein, 10 aa, Homo sapiens
  CDR3 for alpha chain variable domain of TCR clone 93584 (TRAV13-2, TRAJ49)
CADTGNQFYF

SEQ ID NO: 187168 - protein, 13 aa, Homo sapiens
  CDR3 for beta chain variable domain of TCR clone 93584 (TRBV25-1, TRBJ2-5)
CASSPGGVETQYF

SEQ ID NO: 187169 - protein, 12 aa, Homo sapiens
  CDR3 for alpha chain variable domain of TCR clone 93585 (TRAV13-2, TRAJ8)
CAPWLGFQKLVF

SEQ ID NO: 187170 - protein, 13 aa, Homo sapiens
  CDR3 for beta chain variable domain of TCR clone 93585 (TRBV7-2, TRBJ2-2)
CASSLAVTGELFF

SEQ ID NO: 187171 - protein, 14 aa, Homo sapiens
  CDR3 for alpha chain variable domain of TCR clone 93586 (TRAV13-1, TRAJ9)
CAAGALTGGFKTIF

SEQ ID NO: 187172 - protein, 16 aa, Homo sapiens
  CDR3 for beta chain variable domain of TCR clone 93586 (TRBV12-4, TRBJ1-5)
CASSRPVGGSNQPQHF

SEQ ID NO: 187173 - protein, 16 aa, Homo sapiens
  CDR3 for alpha chain variable domain of TCR clone 93587 (TRAV1-2, TRAJ10)
CAVRGVLTGGGNKLTF

SEQ ID NO: 187174 - protein, 14 aa, Homo sapiens
  CDR3 for beta chain variable domain of TCR clone 93587 (TRBV4-1, TRBJ2-2)
CASSQAVNTGELFL

SEQ ID NO: 187175 - protein, 11 aa, Homo sapiens
  CDR3 for alpha chain variable domain of TCR clone 93588 (TRAV13-1, TRAJ39)
CASHAGNMLTF

SEQ ID NO: 187176 - protein, 15 aa, Homo sapiens
  CDR3 for beta chain variable domain of TCR clone 93588 (TRBV6-3, TRBJ2-7)
CASSSPGTAFYEQYF

SEQ ID NO: 187177 - protein, 22 aa, Homo sapiens
  CDR3 for alpha chain variable domain of TCR clone 93589 (TRAV2, TRAJ10)
ILQVREADAAVYYTGGGNKLTF

SEQ ID NO: 187178 - protein, 15 aa, Homo sapiens
  CDR3 for beta chain variable domain of TCR clone 93589 (TRBV9, TRBJ1-6)
CASSVAGTGDSPLHF

SEQ ID NO: 187179 - protein, 15 aa, Homo sapiens
  CDR3 for alpha chain variable domain of TCR clone 93590 (TRAV3, TRAJ22)
CAVRDRGGSARQLTF

SEQ ID NO: 187180 - protein, 15 aa, Homo sapiens
  CDR3 for beta chain variable domain of TCR clone 93590 (TRBV7-8, TRBJ2-1)
CASSLAGGLYNEQFF

SEQ ID NO: 187181 - protein, 17 aa, Homo sapiens
  CDR3 for alpha chain variable domain of TCR clone 93591 (TRAV17, TRAJ28)
CATDPRRGGAWSYQLTF

SEQ ID NO: 187182 - protein, 16 aa, Homo sapiens
  CDR3 for beta chain variable domain of TCR clone 93591 (TRBV25-1, TRBJ1-1)
CASSGDRDRGRIEAFF

SEQ ID NO: 187183 - protein, 12 aa, Homo sapiens
  CDR3 for alpha chain variable domain of TCR clone 93592 (TRAV21, TRAJ13)
PGPSGGYQKVTF

SEQ ID NO: 187184 - protein, 14 aa, Homo sapiens
  CDR3 for beta chain variable domain of TCR clone 93592 (TRBV2, TRBJ2-1)
CASRANQGHNEQFF

SEQ ID NO: 187185 - protein, 13 aa, Homo sapiens
  CDR3 for alpha chain variable domain of TCR clone 93593 (TRAV2, TRAJ40)
CALVTSGTYKYIF

SEQ ID NO: 187186 - protein, 15 aa, Homo sapiens
  CDR3 for beta chain variable domain of TCR clone 93593 (TRBV7-3, TRBJ2-1)
CASSPTGGGEVEQFF

SEQ ID NO: 187187 - protein, 18 aa, Homo sapiens
  CDR3 for alpha chain variable domain of TCR clone 93594 (TRAV13-1, TRAJ52)
CAAKNPNAGGTSYGKLTF

SEQ ID NO: 187188 - protein, 15 aa, Homo sapiens
  CDR3 for beta chain variable domain of TCR clone 93594 (TRBV6-1, TRBJ2-3)
CASRERGGITDTQYF

SEQ ID NO: 187189 - protein, 14 aa, Homo sapiens
  CDR3 for alpha chain variable domain of TCR clone 93595 (TRAV17, TRAJ57)
CATDPQGGSEKLVF

SEQ ID NO: 187190 - protein, 14 aa, Homo sapiens
  CDR3 for beta chain variable domain of TCR clone 93595 (TRBV7-3, TRBJ2-1)
CASSLAGGTNEQFF

SEQ ID NO: 187191 - protein, 13 aa, Homo sapiens
  CDR3 for alpha chain variable domain of TCR clone 93596 (TRAV21, TRAJ27)
CAARPGNAGKSTF

SEQ ID NO: 187192 - protein, 17 aa, Homo sapiens
  CDR3 for beta chain variable domain of TCR clone 93596 (TRBV7-3, TRBJ2-3)
CASSLMKRMRGADTQYF

SEQ ID NO: 187193 - protein, 11 aa, Homo sapiens
  CDR3 for alpha chain variable domain of TCR clone 93597 (TRAV23/DV6, TRAJ9)
CAASLSPPNTG

SEQ ID NO: 187194 - protein, 18 aa, Homo sapiens
  CDR3 for beta chain variable domain of TCR clone 93597 (TRBV4-1, TRBJ2-7)
CASSQDTGAGSGLNDQYF

SEQ ID NO: 187195 - protein, 15 aa, Homo sapiens
  CDR3 for alpha chain variable domain of TCR clone 93598 (TRAV3, TRAJ5)
RAVRDLDTGRRALTF

SEQ ID NO: 187196 - protein, 13 aa, Homo sapiens
  CDR3 for beta chain variable domain of TCR clone 93598 (TRBV12-4, TRBJ2-7)
CASSSTETYEQYF

SEQ ID NO: 187197 - protein, 14 aa, Homo sapiens
  CDR3 for alpha chain variable domain of TCR clone 93599 (TRAV1-2, TRAJ8)
CAVREDTGFQKLVF

SEQ ID NO: 187198 - protein, 15 aa, Homo sapiens
  CDR3 for beta chain variable domain of TCR clone 93599 (TRBV7-2, TRBJ2-3)
CASSLAGAFIDTQYF

SEQ ID NO: 187199 - protein, 14 aa, Homo sapiens
  CDR3 for alpha chain variable domain of TCR clone 93600 (TRAV8-4, TRAJ13)
CAVTLSGGYQKVTF

SEQ ID NO: 187200 - protein, 16 aa, Homo sapiens
  CDR3 for beta chain variable domain of TCR clone 93600 (TRBV5-7, TRBJ1-4)
CASSPSGGLRTEKLFF

SEQ ID NO: 187201 - protein, 14 aa, Homo sapiens
  CDR3 for alpha chain variable domain of TCR clone 93601 (TRAV12-3, TRAJ10)
SHLPLTGGGNKLTF

SEQ ID NO: 187202 - protein, 13 aa, Homo sapiens
  CDR3 for beta chain variable domain of TCR clone 93601 (TRBV28, TRBJ2-5)
CASSFAGGETQYF

SEQ ID NO: 187203 - protein, 11 aa, Homo sapiens
  CDR3 for alpha chain variable domain of TCR clone 93602 (TRAV2, TRAJ13)
CASGGYQKVTF

SEQ ID NO: 187204 - protein, 15 aa, Homo sapiens
  CDR3 for beta chain variable domain of TCR clone 93602 (TRBV13, TRBJ1-5)
CASSFGQGGVQPQHF

SEQ ID NO: 187205 - protein, 14 aa, Homo sapiens
  CDR3 for alpha chain variable domain of TCR clone 93603 (TRAV2, TRAJ9)
CAVEDRCGGFKTIF

SEQ ID NO: 187206 - protein, 14 aa, Homo sapiens
  CDR3 for beta chain variable domain of TCR clone 93603 (TRBV6-1, TRBJ1-3)
CASVQGGGGNTIYF

SEQ ID NO: 187207 - protein, 14 aa, Homo sapiens
  CDR3 for alpha chain variable domain of TCR clone 93604 (TRAV2, TRAJ37)
CAVDFTSNTGKLIF

SEQ ID NO: 187208 - protein, 13 aa, Homo sapiens
  CDR3 for beta chain variable domain of TCR clone 93604 (TRBV7-9, TRBJ2-5)
CASSSGLTETQYF

SEQ ID NO: 187209 - protein, 15 aa, Homo sapiens
  CDR3 for alpha chain variable domain of TCR clone 93605 (TRAV8-3, TRAJ45)
CASSYSGGGADGLTF

SEQ ID NO: 187210 - protein, 13 aa, Homo sapiens
  CDR3 for beta chain variable domain of TCR clone 93605 (TRBV7-9, TRBJ2-7)
CASSFAGAYEQYL

SEQ ID NO: 187211 - protein, 13 aa, Homo sapiens
  CDR3 for alpha chain variable domain of TCR clone 93606 (TRAV2, TRAJ40)
CAVVTSGTYKYIF

SEQ ID NO: 187212 - protein, 17 aa, Homo sapiens
  CDR3 for beta chain variable domain of TCR clone 93606 (TRBV24-1, TRBJ2-1)
CATSDVSTSGTYNEQFF

SEQ ID NO: 187213 - protein, 12 aa, Homo sapiens
  CDR3 for alpha chain variable domain of TCR clone 93607 (TRAV12-1, TRAJ40)
CVVYSGTYKYIF

SEQ ID NO: 187214 - protein, 18 aa, Homo sapiens
  CDR3 for beta chain variable domain of TCR clone 93607 (TRBV11-2, TRBJ2-5)
CASSLGGASRGAPNTQYF

SEQ ID NO: 187215 - protein, 17 aa, Homo sapiens
  CDR3 for alpha chain variable domain of TCR clone 93608 (TRAV36/DV7, TRAJ42)
CAGGGMNYGGSQGNLIF

SEQ ID NO: 187216 - protein, 13 aa, Homo sapiens
  CDR3 for beta chain variable domain of TCR clone 93608 (TRBV5-5, TRBJ1-2)
CASSFWRGEDYTF

SEQ ID NO: 187217 - protein, 23 aa, Homo sapiens
  CDR3 for alpha chain variable domain of TCR clone 93609 (TRAV26-1, )
CIVRPLNAGNHHIQNPDPAVYQL

SEQ ID NO: 187218 - protein, 13 aa, Homo sapiens
  CDR3 for beta chain variable domain of TCR clone 93609 (TRBV18, TRBJ1-1)
CASSPNGDTEAFF

SEQ ID NO: 187219 - protein, 16 aa, Homo sapiens
  CDR3 for alpha chain variable domain of TCR clone 93610 (TRAV30, TRAJ24)
CSTEIVDADSWGKFQF

SEQ ID NO: 187220 - protein, 16 aa, Homo sapiens
  CDR3 for beta chain variable domain of TCR clone 93610 (TRBV12-5, TRBJ2-5)
CASGPRTSGNQETQYF

SEQ ID NO: 187221 - protein, 11 aa, Homo sapiens
  CDR3 for alpha chain variable domain of TCR clone 93611 (TRAV1-2, TRAJ31)
CAVNNNARLMF

SEQ ID NO: 187222 - protein, 13 aa, Homo sapiens
  CDR3 for beta chain variable domain of TCR clone 93611 (TRBV7-2, TRBJ2-2)
CASSLAVTGELFF

SEQ ID NO: 187223 - protein, 13 aa, Homo sapiens
  CDR3 for alpha chain variable domain of TCR clone 93612 (TRAV27, TRAJ41)
CAGEGNSGYALNF

SEQ ID NO: 187224 - protein, 13 aa, Homo sapiens
  CDR3 for beta chain variable domain of TCR clone 93612 (TRBV14, TRBJ1-1)
CASSQEAGTEAFF

SEQ ID NO: 187225 - protein, 12 aa, Homo sapiens
  CDR3 for alpha chain variable domain of TCR clone 93613 (TRAV8-3, TRAJ26)
CAGDNCGQNFVF

SEQ ID NO: 187226 - protein, 15 aa, Homo sapiens
  CDR3 for beta chain variable domain of TCR clone 93613 (TRBV20-1, TRBJ2-3)
CSARRGEAITDTQYF

SEQ ID NO: 187227 - protein, 13 aa, Homo sapiens
  CDR3 for alpha chain variable domain of TCR clone 93614 (TRAV26-1, TRAJ30)
CIVRVESSDKIIF

SEQ ID NO: 187228 - protein, 17 aa, Homo sapiens
  CDR3 for beta chain variable domain of TCR clone 93614 (TRBV13, TRBJ2-3)
CASSLSRVAGGRNTQYF

SEQ ID NO: 187229 - protein, 14 aa, Homo sapiens
  CDR3 for alpha chain variable domain of TCR clone 93615 (TRAV12-1, TRAJ23)
WVVIVYNQGGKLIF

SEQ ID NO: 187230 - protein, 15 aa, Homo sapiens
  CDR3 for beta chain variable domain of TCR clone 93615 (TRBV20-1, TRBJ1-5)
CSAKPPGQGPQPQHF

SEQ ID NO: 187231 - protein, 11 aa, Homo sapiens
  CDR3 for alpha chain variable domain of TCR clone 93616 (TRAV3, TRAJ21)
CAVGNFNKFYF

SEQ ID NO: 187232 - protein, 13 aa, Homo sapiens
  CDR3 for beta chain variable domain of TCR clone 93616 (TRBV12-4, TRBJ2-1)
CASSHYTDNEQFF

SEQ ID NO: 187233 - protein, 11 aa, Homo sapiens
  CDR3 for alpha chain variable domain of TCR clone 93617 (TRAV17, TRAJ9)
CATTGGFKTIF

SEQ ID NO: 187234 - protein, 16 aa, Homo sapiens
  CDR3 for beta chain variable domain of TCR clone 93617 (TRBV4-1, TRBJ2-3)
CASSQSTSGAEDTQYF

SEQ ID NO: 187235 - protein, 12 aa, Homo sapiens
  CDR3 for alpha chain variable domain of TCR clone 93618 (TRAV36/DV7, TRAJ54)
CAEVRGAQKLVF

SEQ ID NO: 187236 - protein, 14 aa, Homo sapiens
  CDR3 for beta chain variable domain of TCR clone 93618 (TRBV7-3, TRBJ1-1)
CASSLKGGNTEAFF

SEQ ID NO: 187237 - protein, 13 aa, Homo sapiens
  CDR3 for alpha chain variable domain of TCR clone 93619 (TRAV12-1, TRAJ22)
CVASGGSARQLAF

SEQ ID NO: 187238 - protein, 12 aa, Homo sapiens
  CDR3 for beta chain variable domain of TCR clone 93619 (TRBV29-1, TRBJ2-3)
CSVTGGADTQYF

SEQ ID NO: 187239 - protein, 11 aa, Homo sapiens
  CDR3 for alpha chain variable domain of TCR clone 93620 (TRAV23/DV6, TRAJ58)
CSARLLRGETS

SEQ ID NO: 187240 - protein, 14 aa, Homo sapiens
  CDR3 for beta chain variable domain of TCR clone 93620 (TRBV2, TRBJ2-7)
CASSLTSGGYEQYF

SEQ ID NO: 187241 - protein, 13 aa, Homo sapiens
  CDR3 for alpha chain variable domain of TCR clone 93621 (TRAV17, TRAJ40)
CAGALGGTYRYIF

SEQ ID NO: 187242 - protein, 16 aa, Homo sapiens
  CDR3 for beta chain variable domain of TCR clone 93621 (TRBV7-2, TRBJ1-4)
CASSLAPGRRDEKLFF

SEQ ID NO: 187243 - protein, 15 aa, Homo sapiens
  CDR3 for alpha chain variable domain of TCR clone 93622 (TRAV3, TRAJ32)
CAVSSYSGATNKLIF

SEQ ID NO: 187244 - protein, 13 aa, Homo sapiens
  CDR3 for beta chain variable domain of TCR clone 93622 (TRBV20-1, TRBJ2-7)
CSARPSTNYEQYF

SEQ ID NO: 187245 - protein, 12 aa, Homo sapiens
  CDR3 for alpha chain variable domain of TCR clone 93623 (TRAV13-1, TRAJ9)
CSSHTGGFKTIF

SEQ ID NO: 187246 - protein, 13 aa, Homo sapiens
  CDR3 for beta chain variable domain of TCR clone 93623 (TRBV12-4, TRBJ1-2)
CASSSGSKDGYTF

SEQ ID NO: 187247 - protein, 14 aa, Homo sapiens
  CDR3 for alpha chain variable domain of TCR clone 93624 (TRAV35, TRAJ22)
CAGLRPGSARQLTF

SEQ ID NO: 187248 - protein, 13 aa, Homo sapiens
  CDR3 for beta chain variable domain of TCR clone 93624 (TRBV20-1, TRBJ1-1)
CSARGGGNTEVFF

SEQ ID NO: 187249 - protein, 14 aa, Homo sapiens
  CDR3 for alpha chain variable domain of TCR clone 93625 (TRAV13-1, TRAJ31)
CAASSRPNNARLMF

SEQ ID NO: 187250 - protein, 15 aa, Homo sapiens
  CDR3 for beta chain variable domain of TCR clone 93625 (TRBV4-2, TRBJ2-4)
CARSPLGAAKNIQYF

SEQ ID NO: 187251 - protein, 16 aa, Homo sapiens
  CDR3 for alpha chain variable domain of TCR clone 93626 (TRAV3, TRAJ10)
CAVRDMRAGGGNKLTF

SEQ ID NO: 187252 - protein, 13 aa, Homo sapiens
  CDR3 for beta chain variable domain of TCR clone 93626 (TRBV4-2, TRBJ1-1)
CASGQAGNTEAFF

SEQ ID NO: 187253 - protein, 14 aa, Homo sapiens
  CDR3 for alpha chain variable domain of TCR clone 93627 (TRAV3, TRAJ33)
CAVRDMDSNYQLIL

SEQ ID NO: 187254 - protein, 19 aa, Homo sapiens
  CDR3 for beta chain variable domain of TCR clone 93627 (TRBV7-3, TRBJ1-2)
CASSFPQGNDGELWLHLRF

SEQ ID NO: 187255 - protein, 12 aa, Homo sapiens
  CDR3 for alpha chain variable domain of TCR clone 93628 (TRAV21, TRAJ49)
CAVTNTGNQFHF

SEQ ID NO: 187256 - protein, 17 aa, Homo sapiens
  CDR3 for beta chain variable domain of TCR clone 93628 (TRBV13, TRBJ2-3)
CASSLSRVAGGRNTQYF

SEQ ID NO: 187257 - protein, 14 aa, Homo sapiens
  CDR3 for alpha chain variable domain of TCR clone 93629 (TRAV26-1, TRAJ44)
CIVKSTGTASKLTF

SEQ ID NO: 187258 - protein, 13 aa, Homo sapiens
  CDR3 for beta chain variable domain of TCR clone 93629 (TRBV12-5, TRBJ2-3)
CASGDRQSDTQYF

SEQ ID NO: 187259 - protein, 14 aa, Homo sapiens
  CDR3 for alpha chain variable domain of TCR clone 93630 (TRAV13-1, TRAJ9)
CAASALTGGFKTIF

SEQ ID NO: 187260 - protein, 13 aa, Homo sapiens
  CDR3 for beta chain variable domain of TCR clone 93630 (TRBV19, TRBJ1-2)
CASSVPGQDGYTF

SEQ ID NO: 187261 - protein, 11 aa, Homo sapiens
  CDR3 for alpha chain variable domain of TCR clone 93631 (TRAV1-2, TRAJ20)
CAVSNDYKLSF

SEQ ID NO: 187262 - protein, 13 aa, Homo sapiens
  CDR3 for beta chain variable domain of TCR clone 93631 (TRBV7-2, TRBJ2-2)
CASSLAVTGELFF

SEQ ID NO: 187263 - protein, 15 aa, Homo sapiens
  CDR3 for alpha chain variable domain of TCR clone 93632 (TRAV8-3, TRAJ27)
CAVGPSKTNAGKSTF

SEQ ID NO: 187264 - protein, 15 aa, Homo sapiens
  CDR3 for beta chain variable domain of TCR clone 93632 (TRBV7-2, TRBJ2-1)
CASSLVGSSYNEQFF

SEQ ID NO: 187265 - protein, 15 aa, Homo sapiens
  CDR3 for alpha chain variable domain of TCR clone 93633 (TRAV17, TRAJ40)
CATVSSTSGTYEYIF

SEQ ID NO: 187266 - protein, 15 aa, Homo sapiens
  CDR3 for beta chain variable domain of TCR clone 93633 (TRBV5-1, TRBJ2-1)
CASSQAGYWWNEQFF

SEQ ID NO: 187267 - protein, 16 aa, Homo sapiens
  CDR3 for alpha chain variable domain of TCR clone 93634 (TRAV38-1, TRAJ32)
CAFMKGGGGATNKLIF

SEQ ID NO: 187268 - protein, 13 aa, Homo sapiens
  CDR3 for beta chain variable domain of TCR clone 93634 (TRBV20-1, TRBJ2-5)
CSAREAFQETQFF

SEQ ID NO: 187269 - protein, 13 aa, Homo sapiens
  CDR3 for alpha chain variable domain of TCR clone 93635 (TRAV35, TRAJ48)
CAGHEFGNEKLTF

SEQ ID NO: 187270 - protein, 15 aa, Homo sapiens
  CDR3 for beta chain variable domain of TCR clone 93635 (TRBV6-1, TRBJ2-3)
CASSERGGITDTQYF

SEQ ID NO: 187271 - protein, 12 aa, Homo sapiens
  CDR3 for alpha chain variable domain of TCR clone 93636 (TRAV12-3, TRAJ17)
CAMTLTGNKLTF

SEQ ID NO: 187272 - protein, 18 aa, Homo sapiens
  CDR3 for beta chain variable domain of TCR clone 93636 (TRBV28, TRBJ2-6)
CASSLAGRAVSGPNVLTF

SEQ ID NO: 187273 - protein, 15 aa, Homo sapiens
  CDR3 for alpha chain variable domain of TCR clone 93637 (TRAV2, TRAJ9)
CAVEGRGTGGFKTIF

SEQ ID NO: 187274 - protein, 13 aa, Homo sapiens
  CDR3 for beta chain variable domain of TCR clone 93637 (TRBV19, TRBJ1-2)
CASSVPGQDGYTF

SEQ ID NO: 187275 - protein, 12 aa, Homo sapiens
  CDR3 for alpha chain variable domain of TCR clone 93638 (TRAV13-1, TRAJ15)
CAASQAGTALIF

SEQ ID NO: 187276 - protein, 18 aa, Homo sapiens
  CDR3 for beta chain variable domain of TCR clone 93638 (TRBV7-9, TRBJ2-3)
CASSLPINAQISTDTQYF

SEQ ID NO: 187277 - protein, 11 aa, Homo sapiens
  CDR3 for alpha chain variable domain of TCR clone 93639 (TRAV1-1, TRAJ23)
CAVRQGGKLIF

SEQ ID NO: 187278 - protein, 13 aa, Homo sapiens
  CDR3 for beta chain variable domain of TCR clone 93639 (TRBV19, TRBJ2-1)
CATSRGVYNERFF

SEQ ID NO: 187279 - protein, 11 aa, Homo sapiens
  CDR3 for alpha chain variable domain of TCR clone 93640 (TRAV21, TRAJ34)
CAVTNTDKLIF

SEQ ID NO: 187280 - protein, 16 aa, Homo sapiens
  CDR3 for beta chain variable domain of TCR clone 93640 (TRBV18, TRBJ1-1)
CASSPGVGGRGGETFF

SEQ ID NO: 187281 - protein, 14 aa, Homo sapiens
  CDR3 for alpha chain variable domain of TCR clone 93641 (TRAV12-2, TRAJ40)
CAVKIPSGTYKYIF

SEQ ID NO: 187282 - protein, 13 aa, Homo sapiens
  CDR3 for beta chain variable domain of TCR clone 93641 (TRBV25-1, TRBJ2-5)
CASSESGRETQYF

SEQ ID NO: 187283 - protein, 14 aa, Homo sapiens
  CDR3 for alpha chain variable domain of TCR clone 93642 (TRAV17, TRAJ57)
CATDPQGGSEKLVV

SEQ ID NO: 187284 - protein, 18 aa, Homo sapiens
  CDR3 for beta chain variable domain of TCR clone 93642 (TRBV6-6, TRBJ1-3)
CASSYSKWDSISGNTIYF

SEQ ID NO: 187285 - protein, 14 aa, Homo sapiens
  CDR3 for alpha chain variable domain of TCR clone 93643 (TRAV23/DV6, TRAJ27)
CAASMDTNAGKSTF

SEQ ID NO: 187286 - protein, 13 aa, Homo sapiens
  CDR3 for beta chain variable domain of TCR clone 93643 (TRBV20-1, TRBJ1-5)
CSASGRGNQPQHF

SEQ ID NO: 187287 - protein, 15 aa, Homo sapiens
  CDR3 for alpha chain variable domain of TCR clone 93644 (TRAV12-2, TRAJ53)
CAVNGWGGSNYKLTF

SEQ ID NO: 187288 - protein, 13 aa, Homo sapiens
  CDR3 for beta chain variable domain of TCR clone 93644 (TRBV3-1, TRBJ1-1)
CASSPGVITEAFF

SEQ ID NO: 187289 - protein, 12 aa, Homo sapiens
  CDR3 for alpha chain variable domain of TCR clone 93645 (TRAV26-2, TRAJ21)
CILKGNFNKFYF

SEQ ID NO: 187290 - protein, 14 aa, Homo sapiens
  CDR3 for beta chain variable domain of TCR clone 93645 (TRBV11-2, TRBJ2-5)
CASSRTGGIETQYF

SEQ ID NO: 187291 - protein, 15 aa, Homo sapiens
  CDR3 for alpha chain variable domain of TCR clone 93646 (TRAV26-1, TRAJ15)
CIVRAAKQAGTALIF

SEQ ID NO: 187292 - protein, 15 aa, Homo sapiens
  CDR3 for beta chain variable domain of TCR clone 93646 (TRBV20-1, TRBJ1-1)
CSARSAATSNTEAFF

SEQ ID NO: 187293 - protein, 18 aa, Homo sapiens
  CDR3 for alpha chain variable domain of TCR clone 93647 (TRAV29/DV5, TRAJ52)
QCTSVQQAEGTSYGKLTF

SEQ ID NO: 187294 - protein, 13 aa, Homo sapiens
  CDR3 for beta chain variable domain of TCR clone 93647 (TRBV7-2, TRBJ1-1)
CASNLKGAKVAFF

SEQ ID NO: 187295 - protein, 14 aa, Homo sapiens
  CDR3 for alpha chain variable domain of TCR clone 93648 (TRAV12-2, TRAJ53)
CAVKGGGSNYKLTF

SEQ ID NO: 187296 - protein, 16 aa, Homo sapiens
  CDR3 for beta chain variable domain of TCR clone 93648 (TRBV7-8, TRBJ2-6)
CASRVGDSSGANALTF

SEQ ID NO: 187297 - protein, 14 aa, Homo sapiens
  CDR3 for alpha chain variable domain of TCR clone 93649 (TRAV12-3, TRAJ10)
SHLPLTGGGNKLTF

SEQ ID NO: 187298 - protein, 17 aa, Homo sapiens
  CDR3 for beta chain variable domain of TCR clone 93649 (TRBV28, TRBJ2-5)
CASSTPEGNALQETQYF

SEQ ID NO: 187299 - protein, 12 aa, Homo sapiens
  CDR3 for alpha chain variable domain of TCR clone 93650 (TRAV17, TRAJ20)
CATYSTDYKLSF

SEQ ID NO: 187300 - protein, 11 aa, Homo sapiens
  CDR3 for beta chain variable domain of TCR clone 93650 (TRBV4-1, TRBJ2-2)
CASEHTGELFF

SEQ ID NO: 187301 - protein, 13 aa, Homo sapiens
  CDR3 for alpha chain variable domain of TCR clone 93651 (TRAV20, TRAJ34)
CAGGSYNTDKLIF

SEQ ID NO: 187302 - protein, 19 aa, Homo sapiens
  CDR3 for beta chain variable domain of TCR clone 93651 (TRBV25-1, TRBJ2-2)
CAILVYRVDRGRKTGELFF

SEQ ID NO: 187303 - protein, 15 aa, Homo sapiens
  CDR3 for alpha chain variable domain of TCR clone 93652 (TRAV21, TRAJ38)
CAVRQDAGNNRKLIW

SEQ ID NO: 187304 - protein, 12 aa, Homo sapiens
  CDR3 for beta chain variable domain of TCR clone 93652 (TRBV2, TRBJ2-1)
CAYGPPGNEQFF

SEQ ID NO: 187305 - protein, 13 aa, Homo sapiens
  CDR3 for alpha chain variable domain of TCR clone 93653 (TRAV27, TRAJ45)
CRSSGGGADGLTF

SEQ ID NO: 187306 - protein, 17 aa, Homo sapiens
  CDR3 for beta chain variable domain of TCR clone 93653 (TRBV11-2, TRBJ2-1)
CASSLFPPGVEYNEQFF

SEQ ID NO: 187307 - protein, 14 aa, Homo sapiens
  CDR3 for alpha chain variable domain of TCR clone 93654 (TRAV12-1, TRAJ34)
CVVNLDYNTDKLIF

SEQ ID NO: 187308 - protein, 16 aa, Homo sapiens
  CDR3 for beta chain variable domain of TCR clone 93654 (TRBV19, TRBJ2-1)
CASSKAGPSSYNEQFF

SEQ ID NO: 187309 - protein, 15 aa, Homo sapiens
  CDR3 for alpha chain variable domain of TCR clone 93655 (TRAV1-1, TRAJ20)
CAVRDNVANDYKLSF

SEQ ID NO: 187310 - protein, 16 aa, Homo sapiens
  CDR3 for beta chain variable domain of TCR clone 93655 (TRBV12-4, TRBJ2-5)
CASSWRPSGDLETQYF

SEQ ID NO: 187311 - protein, 13 aa, Homo sapiens
  CDR3 for alpha chain variable domain of TCR clone 93656 (TRAV12-1, TRAJ9)
CGEINTGGFKTIF

SEQ ID NO: 187312 - protein, 15 aa, Homo sapiens
  CDR3 for beta chain variable domain of TCR clone 93656 (TRBV7-9, TRBJ1-6)
CASSSPGRGNSPLHF

SEQ ID NO: 187313 - protein, 11 aa, Homo sapiens
  CDR3 for alpha chain variable domain of TCR clone 93657 (TRAV17, TRAJ36)
CAPTGANNLVF

SEQ ID NO: 187314 - protein, 12 aa, Homo sapiens
  CDR3 for beta chain variable domain of TCR clone 93657 (TRBV29-1, TRBJ2-3)
CSVTGGADTQYF

SEQ ID NO: 187315 - protein, 16 aa, Homo sapiens
  CDR3 for alpha chain variable domain of TCR clone 93658 (TRAV3, TRAJ37)
CAVRPHGSGNKGKLIF

SEQ ID NO: 187316 - protein, 17 aa, Homo sapiens
  CDR3 for beta chain variable domain of TCR clone 93658 (TRBV5-1, TRBJ2-5)
CASSPVALGQNQETQYF

SEQ ID NO: 187317 - protein, 18 aa, Homo sapiens
  CDR3 for alpha chain variable domain of TCR clone 93659 (TRAV21, TRAJ52)
CAVRPSPAGGTSYGKLTF

SEQ ID NO: 187318 - protein, 19 aa, Homo sapiens
  CDR3 for beta chain variable domain of TCR clone 93659 (TRBV24-1, TRBJ2-1)
TSVPPVIFPNNSSYNEQFF

SEQ ID NO: 187319 - protein, 14 aa, Homo sapiens
  CDR3 for alpha chain variable domain of TCR clone 93660 (TRAV38-1, TRAJ40)
CALRPTSGTYKYIF

SEQ ID NO: 187320 - protein, 14 aa, Homo sapiens
  CDR3 for beta chain variable domain of TCR clone 93660 (TRBV2, TRBJ2-7)
CASSLTSGGYEQYF

SEQ ID NO: 187321 - protein, 13 aa, Homo sapiens
  CDR3 for alpha chain variable domain of TCR clone 93661 (TRAV12-3, TRAJ7)
CAMTPYGNNRLAF

SEQ ID NO: 187322 - protein, 16 aa, Homo sapiens
  CDR3 for beta chain variable domain of TCR clone 93661 (TRBV20-1, TRBJ1-4)
CSARPYGGELNEKLVF

SEQ ID NO: 187323 - protein, 14 aa, Homo sapiens
  CDR3 for alpha chain variable domain of TCR clone 93662 (TRAV29/DV5, TRAJ36)
RAARRKTGANNLFF

SEQ ID NO: 187324 - protein, 16 aa, Homo sapiens
  CDR3 for beta chain variable domain of TCR clone 93662 (TRBV12-5, TRBJ2-5)
CASGPRTSGNQETQYF

SEQ ID NO: 187325 - protein, 13 aa, Homo sapiens
  CDR3 for alpha chain variable domain of TCR clone 93663 (TRAV13-2, TRAJ53)
CAENMGSNYKLRF

SEQ ID NO: 187326 - protein, 13 aa, Homo sapiens
  CDR3 for beta chain variable domain of TCR clone 93663 (TRBV4-1, TRBJ2-2)
CASSQENTGELFF

SEQ ID NO: 187327 - protein, 12 aa, Homo sapiens
  CDR3 for alpha chain variable domain of TCR clone 93664 (TRAV35, TRAJ39)
LAPNNAGNMLTF

SEQ ID NO: 187328 - protein, 18 aa, Homo sapiens
  CDR3 for beta chain variable domain of TCR clone 93664 (TRBV11-2, TRBJ2-3)
CASSLGGASRGAPNTQYF

SEQ ID NO: 187329 - protein, 16 aa, Homo sapiens
  CDR3 for alpha chain variable domain of TCR clone 93665 (TRAV4, TRAJ22)
CLVGDLYSGSARQLTF

SEQ ID NO: 187330 - protein, 15 aa, Homo sapiens
  CDR3 for beta chain variable domain of TCR clone 93665 (TRBV28, TRBJ2-7)
CASSPGGRGFYEQYF

SEQ ID NO: 187331 - protein, 15 aa, Homo sapiens
  CDR3 for alpha chain variable domain of TCR clone 93666 (TRAV25, TRAJ52)
CAGRPGGTSYGKLTF

SEQ ID NO: 187332 - protein, 15 aa, Homo sapiens
  CDR3 for beta chain variable domain of TCR clone 93666 (TRBV28, TRBJ2-3)
CASSPDRQGANTQYF

SEQ ID NO: 187333 - protein, 14 aa, Homo sapiens
  CDR3 for alpha chain variable domain of TCR clone 93667 (TRAV13-2, TRAJ17)
CAENSKAAGNKLTF

SEQ ID NO: 187334 - protein, 16 aa, Homo sapiens
  CDR3 for beta chain variable domain of TCR clone 93667 (TRBV7-2, TRBJ2-5)
CASSPFPTGGEETQYF

SEQ ID NO: 187335 - protein, 10 aa, Homo sapiens
  CDR3 for alpha chain variable domain of TCR clone 93668 (TRAV30, TRAJ24)
CGQRLWMLTA

SEQ ID NO: 187336 - protein, 14 aa, Homo sapiens
  CDR3 for beta chain variable domain of TCR clone 93668 (TRBV12-5, TRBJ2-5)
CASGSRTHQETQYF

SEQ ID NO: 187337 - protein, 16 aa, Homo sapiens
  CDR3 for alpha chain variable domain of TCR clone 93669 (TRAV20, TRAJ52)
CAVLPDGGTIYGKLTF

SEQ ID NO: 187338 - protein, 12 aa, Homo sapiens
  CDR3 for beta chain variable domain of TCR clone 93669 (TRBV19, TRBJ2-1)
CASSQISNEQFF

SEQ ID NO: 187339 - protein, 11 aa, Homo sapiens
  CDR3 for alpha chain variable domain of TCR clone 93670 (TRAV13-1, TRAJ30)
CAASRDDKIIV

SEQ ID NO: 187340 - protein, 15 aa, Homo sapiens
  CDR3 for beta chain variable domain of TCR clone 93670 (TRBV18, TRBJ1-1)
CASSPSSWVNTEAFF

SEQ ID NO: 187341 - protein, 12 aa, Homo sapiens
  CDR3 for alpha chain variable domain of TCR clone 93671 (TRAV12-3, TRAJ20)
CAMVRGDYKLSF

SEQ ID NO: 187342 - protein, 13 aa, Homo sapiens
  CDR3 for beta chain variable domain of TCR clone 93671 (TRBV12-4, TRBJ1-2)
CASSLRQGKGYTF

SEQ ID NO: 187343 - protein, 10 aa, Homo sapiens
  CDR3 for alpha chain variable domain of TCR clone 93672 (TRAV13-1, TRAJ30)
CAARDDKIIF

SEQ ID NO: 187344 - protein, 12 aa, Homo sapiens
  CDR3 for beta chain variable domain of TCR clone 93672 (TRBV14, TRBJ2-5)
CASSQLKETQYF

SEQ ID NO: 187345 - protein, 16 aa, Homo sapiens
  CDR3 for alpha chain variable domain of TCR clone 93673 (TRAV13-2, TRAJ32)
CAENMNYGGATNKLIF

SEQ ID NO: 187346 - protein, 14 aa, Homo sapiens
  CDR3 for beta chain variable domain of TCR clone 93673 (TRBV15, TRBJ2-5)
CATGSTGYQETQYF

SEQ ID NO: 187347 - protein, 13 aa, Homo sapiens
  CDR3 for alpha chain variable domain of TCR clone 93674 (TRAV27, TRAJ45)
CRSSGGGADGLTF

SEQ ID NO: 187348 - protein, 14 aa, Homo sapiens
  CDR3 for beta chain variable domain of TCR clone 93674 (TRBV5-5, TRBJ1-2)
CASSLDPYNYGYTF

SEQ ID NO: 187349 - protein, 14 aa, Homo sapiens
  CDR3 for alpha chain variable domain of TCR clone 93675 (TRAV3, TRAJ34)
CAVRAPGNTDKLIF

SEQ ID NO: 187350 - protein, 14 aa, Homo sapiens
  CDR3 for beta chain variable domain of TCR clone 93675 (TRBV20-1, TRBJ2-4)
CSASGRVGENIQYF

SEQ ID NO: 187351 - protein, 12 aa, Homo sapiens
  CDR3 for alpha chain variable domain of TCR clone 93676 (TRAV12-2, TRAJ16)
CAVAPDGQKLLF

SEQ ID NO: 187352 - protein, 14 aa, Homo sapiens
  CDR3 for beta chain variable domain of TCR clone 93676 (TRBV11-2, TRBJ2-7)
CASSSTGEGYEQYF

SEQ ID NO: 187353 - protein, 11 aa, Homo sapiens
  CDR3 for alpha chain variable domain of TCR clone 93677 (TRAV21, TRAJ11)
CAVNGYSTLTF

SEQ ID NO: 187354 - protein, 11 aa, Homo sapiens
  CDR3 for beta chain variable domain of TCR clone 93677 (TRBV11-2, TRBJ2-7)
CASSADYEQYF

SEQ ID NO: 187355 - protein, 14 aa, Homo sapiens
  CDR3 for alpha chain variable domain of TCR clone 93678 (TRAV20, TRAJ20)
CAVRRGYNDYKLSF

SEQ ID NO: 187356 - protein, 17 aa, Homo sapiens
  CDR3 for beta chain variable domain of TCR clone 93678 (TRBV15, TRBJ1-4)
CATSRYGTGDPNEKLFF

SEQ ID NO: 187357 - protein, 16 aa, Homo sapiens
  CDR3 for alpha chain variable domain of TCR clone 93679 (TRAV23/DV6, TRAJ9)
CAASIGGNTGGFKTIF

SEQ ID NO: 187358 - protein, 17 aa, Homo sapiens
  CDR3 for beta chain variable domain of TCR clone 93679 (TRBV19, TRBJ2-6)
CASSTGQVFSGANVLTF

SEQ ID NO: 187359 - protein, 12 aa, Homo sapiens
  CDR3 for alpha chain variable domain of TCR clone 93680 (TRAV2, TRAJ10)
CASTGGGNKLTF

SEQ ID NO: 187360 - protein, 12 aa, Homo sapiens
  CDR3 for beta chain variable domain of TCR clone 93680 (TRBV19, TRBJ1-1)
CASSIMNTEAFF

SEQ ID NO: 187361 - protein, 11 aa, Homo sapiens
  CDR3 for alpha chain variable domain of TCR clone 93681 (TRAV1-1, TRAJ23)
CAVRQGGKLIF

SEQ ID NO: 187362 - protein, 13 aa, Homo sapiens
  CDR3 for beta chain variable domain of TCR clone 93681 (TRBV7-2, TRBJ2-4)
CASSREHANIQYF

SEQ ID NO: 187363 - protein, 11 aa, Homo sapiens
  CDR3 for alpha chain variable domain of TCR clone 93682 (TRAV29/DV5, TRAJ30)
CAVREVDKIIS

SEQ ID NO: 187364 - protein, 16 aa, Homo sapiens
  CDR3 for beta chain variable domain of TCR clone 93682 (TRBV27, TRBJ1-5)
CASSLSGGASNQPQHF

SEQ ID NO: 187365 - protein, 13 aa, Homo sapiens
  CDR3 for alpha chain variable domain of TCR clone 93683 (TRAV8-4, TRAJ49)
CAVSDSTGNQFYF

SEQ ID NO: 187366 - protein, 12 aa, Homo sapiens
  CDR3 for beta chain variable domain of TCR clone 93683 (TRBV3-1, TRBJ2-5)
CASSQRGETQYF

SEQ ID NO: 187367 - protein, 14 aa, Homo sapiens
  CDR3 for alpha chain variable domain of TCR clone 93684 (TRAV1-2, TRAJ8)
CAVREDTGFQKLVF

SEQ ID NO: 187368 - protein, 14 aa, Homo sapiens
  CDR3 for beta chain variable domain of TCR clone 93684 (TRBV7-9, TRBJ1-1)
CARSLGGANTEAFF

SEQ ID NO: 187369 - protein, 13 aa, Homo sapiens
  CDR3 for alpha chain variable domain of TCR clone 93685 (TRAV8-3, TRAJ21)
CAVGAYNFNEFYF

SEQ ID NO: 187370 - protein, 16 aa, Homo sapiens
  CDR3 for beta chain variable domain of TCR clone 93685 (TRBV19, TRBJ2-1)
CASSMGGGSSYNEQFF

SEQ ID NO: 187371 - protein, 14 aa, Homo sapiens
  CDR3 for alpha chain variable domain of TCR clone 93686 (TRAV1-2, TRAJ8)
CAVREDTGFQKLVF

SEQ ID NO: 187372 - protein, 15 aa, Homo sapiens
  CDR3 for beta chain variable domain of TCR clone 93686 (TRBV6-3, TRBJ2-7)
CANSSPGTVFYEQYF

SEQ ID NO: 187373 - protein, 14 aa, Homo sapiens
  CDR3 for alpha chain variable domain of TCR clone 93687 (TRAV8-3, TRAJ36)
CAVGPITGVNNLFF

SEQ ID NO: 187374 - protein, 15 aa, Homo sapiens
  CDR3 for beta chain variable domain of TCR clone 93687 (TRBV4-1, TRBJ2-1)
CASSQDPGNYNEQFF

SEQ ID NO: 187375 - protein, 13 aa, Homo sapiens
  CDR3 for alpha chain variable domain of TCR clone 93688 (TRAV3, TRAJ27)
CSVRPLGAGKSTF

SEQ ID NO: 187376 - protein, 13 aa, Homo sapiens
  CDR3 for beta chain variable domain of TCR clone 93688 (TRBV7-9, TRBJ2-3)
CASSPGSTGTQYF

SEQ ID NO: 187377 - protein, 13 aa, Homo sapiens
  CDR3 for alpha chain variable domain of TCR clone 93689 (TRAV16, TRAJ52)
CALRGTSYGRLTF

SEQ ID NO: 187378 - protein, 18 aa, Homo sapiens
  CDR3 for beta chain variable domain of TCR clone 93689 (TRBV13, TRBJ2-6)
CASSPMTSGGSGANVLTF

SEQ ID NO: 187379 - protein, 11 aa, Homo sapiens
  CDR3 for alpha chain variable domain of TCR clone 93690 (TRAV2, TRAJ13)
CASGGYQKVTF

SEQ ID NO: 187380 - protein, 13 aa, Homo sapiens
  CDR3 for beta chain variable domain of TCR clone 93690 (TRBV7-9, TRBJ1-2)
CASSLKQNYGYAF

SEQ ID NO: 187381 - protein, 14 aa, Homo sapiens
  CDR3 for alpha chain variable domain of TCR clone 93691 (TRAV13-2, TRAJ17)
CAENSKAAGNKLTF

SEQ ID NO: 187382 - protein, 14 aa, Homo sapiens
  CDR3 for beta chain variable domain of TCR clone 93691 (TRBV19, TRBJ2-1)
CASPTFVLGGEQFF

SEQ ID NO: 187383 - protein, 15 aa, Homo sapiens
  CDR3 for alpha chain variable domain of TCR clone 93692 (TRAV20, TRAJ43)
CAVQAGKSSNNYMRF

SEQ ID NO: 187384 - protein, 14 aa, Homo sapiens
  CDR3 for beta chain variable domain of TCR clone 93692 (TRBV27, TRBJ2-1)
CASRHLGGGKEQFF

SEQ ID NO: 187385 - protein, 15 aa, Homo sapiens
  CDR3 for alpha chain variable domain of TCR clone 93693 (TRAV12-1, TRAJ44)
CVADLPTGTTSKLPF

SEQ ID NO: 187386 - protein, 13 aa, Homo sapiens
  CDR3 for beta chain variable domain of TCR clone 93693 (TRBV6-5, TRBJ2-5)
CASSPQGGETQYF

SEQ ID NO: 187387 - protein, 15 aa, Homo sapiens
  CDR3 for alpha chain variable domain of TCR clone 93694 (TRAV13-1, TRAJ20)
CAASTVRSNDYKLSF

SEQ ID NO: 187388 - protein, 15 aa, Homo sapiens
  CDR3 for beta chain variable domain of TCR clone 93694 (TRBV12-4, TRBJ2-1)
CASSLLATGNNEQFF

SEQ ID NO: 187389 - protein, 15 aa, Homo sapiens
  CDR3 for alpha chain variable domain of TCR clone 93695 (TRAV27, TRAJ38)
CAARRNAGNNRKLIW

SEQ ID NO: 187390 - protein, 11 aa, Homo sapiens
  CDR3 for beta chain variable domain of TCR clone 93695 (TRBV19, TRBJ1-1)
CASSIGSEAFF

SEQ ID NO: 187391 - protein, 12 aa, Homo sapiens
  CDR3 for alpha chain variable domain of TCR clone 93696 (TRAV4, TRAJ26)
CLVGDYGQNFVS

SEQ ID NO: 187392 - protein, 16 aa, Homo sapiens
  CDR3 for beta chain variable domain of TCR clone 93696 (TRBV7-2, TRBJ1-2)
CASSSNQDRRGHGYTF

SEQ ID NO: 187393 - protein, 14 aa, Homo sapiens
  CDR3 for alpha chain variable domain of TCR clone 93697 (TRAV34, TRAJ44)
CGADGTGTASKLTF

SEQ ID NO: 187394 - protein, 20 aa, Homo sapiens
  CDR3 for beta chain variable domain of TCR clone 93697 (TRBV28, TRBJ2-1)
CTSTPIGRSPGLAGGNEQFF

SEQ ID NO: 187395 - protein, 13 aa, Homo sapiens
  CDR3 for alpha chain variable domain of TCR clone 93698 (TRAV27, TRAJ29)
CAGAHSGNTPLVF

SEQ ID NO: 187396 - protein, 14 aa, Homo sapiens
  CDR3 for beta chain variable domain of TCR clone 93698 (TRBV7-8, TRBJ2-3)
CASSLEAGTDTQYF

SEQ ID NO: 187397 - protein, 14 aa, Homo sapiens
  CDR3 for alpha chain variable domain of TCR clone 93699 (TRAV8-1, TRAJ49)
CASSIANTGNQFYF

SEQ ID NO: 187398 - protein, 13 aa, Homo sapiens
  CDR3 for beta chain variable domain of TCR clone 93699 (TRBV11-2, TRBJ2-5)
CASSFSSRETQYF

SEQ ID NO: 187399 - protein, 13 aa, Homo sapiens
  CDR3 for alpha chain variable domain of TCR clone 93700 (TRAV8-6, TRAJ49)
CAVITNTGNQFYF

SEQ ID NO: 187400 - protein, 15 aa, Homo sapiens
  CDR3 for beta chain variable domain of TCR clone 93700 (TRBV7-2, TRBJ2-3)
CASSSTGLETDTQYF

SEQ ID NO: 187401 - protein, 11 aa, Homo sapiens
  CDR3 for alpha chain variable domain of TCR clone 93701 (TRAV20, TRAJ23)
CACNQGGKLIF

SEQ ID NO: 187402 - protein, 13 aa, Homo sapiens
  CDR3 for beta chain variable domain of TCR clone 93701 (TRBV10-3, TRBJ2-7)
CASKLAVNYEQYF

SEQ ID NO: 187403 - protein, 16 aa, Homo sapiens
  CDR3 for alpha chain variable domain of TCR clone 93702 (TRAV12-2, TRAJ6)
CAAPLAGSGGSYIPTF

SEQ ID NO: 187404 - protein, 10 aa, Homo sapiens
  CDR3 for beta chain variable domain of TCR clone 93702 (TRBV28, TRBJ1-2)
CASSSYRAVF

SEQ ID NO: 187405 - protein, 14 aa, Homo sapiens
  CDR3 for alpha chain variable domain of TCR clone 93703 (TRAV1-2, TRAJ16)
CAVNRFSDGQKLLF

SEQ ID NO: 187406 - protein, 11 aa, Homo sapiens
  CDR3 for beta chain variable domain of TCR clone 93703 (TRBV5-1, TRBJ2-1)
CASSIGQEQFF

SEQ ID NO: 187407 - protein, 12 aa, Homo sapiens
  CDR3 for alpha chain variable domain of TCR clone 93704 (TRAV12-3, TRAJ17)
CAMTLTGNKLTF

SEQ ID NO: 187408 - protein, 11 aa, Homo sapiens
  CDR3 for beta chain variable domain of TCR clone 93704 (TRBV20-1, TRBJ2-7)
CSARLSYEQYF

SEQ ID NO: 187409 - protein, 15 aa, Homo sapiens
  CDR3 for alpha chain variable domain of TCR clone 93705 (TRAV25, TRAJ53)
CPTSNSGGSNYKLTF

SEQ ID NO: 187410 - protein, 17 aa, Homo sapiens
  CDR3 for beta chain variable domain of TCR clone 93705 (TRBV13, TRBJ2-3)
CASSLSRVAGGRNTQYF

SEQ ID NO: 187411 - protein, 13 aa, Homo sapiens
  CDR3 for alpha chain variable domain of TCR clone 93706 (TRAV13-1, TRAJ39)
CAASIVMQATCPP

SEQ ID NO: 187412 - protein, 13 aa, Homo sapiens
  CDR3 for beta chain variable domain of TCR clone 93706 (TRBV20-1, TRBJ1-1)
CSARGGGNTEAFF

SEQ ID NO: 187413 - protein, 14 aa, Homo sapiens
  CDR3 for alpha chain variable domain of TCR clone 93707 (TRAV2, TRAJ37)
CAVDFTSNTGKLIF

SEQ ID NO: 187414 - protein, 16 aa, Homo sapiens
  CDR3 for beta chain variable domain of TCR clone 93707 (TRBV6-1, TRBJ2-5)
CASSETLDRGAETQYF

SEQ ID NO: 187415 - protein, 16 aa, Homo sapiens
  CDR3 for alpha chain variable domain of TCR clone 93708 (TRAV12-2, TRAJ18)
CAVTTDRGSNLGRLYF

SEQ ID NO: 187416 - protein, 14 aa, Homo sapiens
  CDR3 for beta chain variable domain of TCR clone 93708 (TRBV4-2, TRBJ1-5)
CASSQDSINQPQHF

SEQ ID NO: 187417 - protein, 14 aa, Homo sapiens
  CDR3 for alpha chain variable domain of TCR clone 93709 (TRAV13-1, TRAJ32)
CAARGSGATNKLIF

SEQ ID NO: 187418 - protein, 13 aa, Homo sapiens
  CDR3 for beta chain variable domain of TCR clone 93709 (TRBV12-5, TRBJ2-3)
CASGDRQSDTQYF

SEQ ID NO: 187419 - protein, 17 aa, Homo sapiens
  CDR3 for alpha chain variable domain of TCR clone 93710 (TRAV3, TRAJ42)
CAVRDRDYGVSQGNLIF

SEQ ID NO: 187420 - protein, 15 aa, Homo sapiens
  CDR3 for beta chain variable domain of TCR clone 93710 (TRBV2, TRBJ2-7)
CASSEGLARSYEQYF

SEQ ID NO: 187421 - protein, 14 aa, Homo sapiens
  CDR3 for alpha chain variable domain of TCR clone 93711 (TRAV8-3, TRAJ39)
CAVESWNAGNMLTF

SEQ ID NO: 187422 - protein, 13 aa, Homo sapiens
  CDR3 for beta chain variable domain of TCR clone 93711 (TRBV24-1, TRBJ2-2)
CATSDWSTGELFF

SEQ ID NO: 187423 - protein, 16 aa, Homo sapiens
  CDR3 for alpha chain variable domain of TCR clone 93712 (TRAV8-6, TRAJ53)
CAVRENSGGSNYKLTF

SEQ ID NO: 187424 - protein, 14 aa, Homo sapiens
  CDR3 for beta chain variable domain of TCR clone 93712 (TRBV25-1, TRBJ1-1)
CASTHLGGNTEAFF

SEQ ID NO: 187425 - protein, 14 aa, Homo sapiens
  CDR3 for alpha chain variable domain of TCR clone 93713 (TRAV2, TRAJ9)
CAVEDRSGGFKTIF

SEQ ID NO: 187426 - protein, 14 aa, Homo sapiens
  CDR3 for beta chain variable domain of TCR clone 93713 (TRBV2, TRBJ1-5)
CASSGTVSNQPQHF

SEQ ID NO: 187427 - protein, 10 aa, Homo sapiens
  CDR3 for alpha chain variable domain of TCR clone 93714 (TRAV1-2, TRAJ31)
CAFFDARLMF

SEQ ID NO: 187428 - protein, 13 aa, Homo sapiens
  CDR3 for beta chain variable domain of TCR clone 93714 (TRBV7-7, TRBJ1-1)
CASSLGANTEAFF

SEQ ID NO: 187429 - protein, 11 aa, Homo sapiens
  CDR3 for alpha chain variable domain of TCR clone 93715 (TRAV4, TRAJ23)
CLVAPGGKLIF

SEQ ID NO: 187430 - protein, 10 aa, Homo sapiens
  CDR3 for beta chain variable domain of TCR clone 93715 (TRBV7-9, TRBJ1-2)
CASSLSRTMA

SEQ ID NO: 187431 - protein, 14 aa, Homo sapiens
  CDR3 for alpha chain variable domain of TCR clone 93716 (TRAV8-1, TRAJ5)
CAVRTDTGRRALTF

SEQ ID NO: 187432 - protein, 14 aa, Homo sapiens
  CDR3 for beta chain variable domain of TCR clone 93716 (TRBV5-5, TRBJ1-2)
CASSLDTYNYGYTF

SEQ ID NO: 187433 - protein, 15 aa, Homo sapiens
  CDR3 for alpha chain variable domain of TCR clone 93717 (TRAV21, TRAJ32)
CAVNSYGGATTKLIF

SEQ ID NO: 187434 - protein, 18 aa, Homo sapiens
  CDR3 for beta chain variable domain of TCR clone 93717 (TRBV7-9, TRBJ2-1)
CASSTGLAEGSSYNEQFF

SEQ ID NO: 187435 - protein, 15 aa, Homo sapiens
  CDR3 for alpha chain variable domain of TCR clone 93718 (TRAV21, TRAJ24)
CAARSSTDSWGKLQL

SEQ ID NO: 187436 - protein, 15 aa, Homo sapiens
  CDR3 for beta chain variable domain of TCR clone 93718 (TRBV5-1, TRBJ2-1)
CASSPPRAPYNEQFF

SEQ ID NO: 187437 - protein, 16 aa, Homo sapiens
  CDR3 for alpha chain variable domain of TCR clone 93719 (TRAV30, TRAJ24)
CGTEIVYADSWGKFQF

SEQ ID NO: 187438 - protein, 15 aa, Homo sapiens
  CDR3 for beta chain variable domain of TCR clone 93719 (TRBV20-1, TRBJ2-7)
CSARDRVSGMDEQYF

SEQ ID NO: 187439 - protein, 16 aa, Homo sapiens
  CDR3 for alpha chain variable domain of TCR clone 93720 (TRAV3, TRAJ37)
CSVRPHGSGNTGKLIF

SEQ ID NO: 187440 - protein, 14 aa, Homo sapiens
  CDR3 for beta chain variable domain of TCR clone 93720 (TRBV25-1, TRBJ1-1)
CASTHLGGNTEAFF

SEQ ID NO: 187441 - protein, 14 aa, Homo sapiens
  CDR3 for alpha chain variable domain of TCR clone 93721 (TRAV12-2, TRAJ15)
CAPHTGQAGTALIF

SEQ ID NO: 187442 - protein, 15 aa, Homo sapiens
  CDR3 for beta chain variable domain of TCR clone 93721 (TRBV11-2, TRBJ1-2)
CASSLEGVQRNGYTF

SEQ ID NO: 187443 - protein, 14 aa, Homo sapiens
  CDR3 for alpha chain variable domain of TCR clone 93722 (TRAV25, TRAJ35)
CACRMEGFGNVLHC

SEQ ID NO: 187444 - protein, 13 aa, Homo sapiens
  CDR3 for beta chain variable domain of TCR clone 93722 (TRBV7-2, TRBJ1-4)
CASSLAGLEKLFF

SEQ ID NO: 187445 - protein, 14 aa, Homo sapiens
  CDR3 for alpha chain variable domain of TCR clone 93723 (TRAV26-1, TRAJ26)
CIVRATFLGQNFVF

SEQ ID NO: 187446 - protein, 16 aa, Homo sapiens
  CDR3 for beta chain variable domain of TCR clone 93723 (TRBV12-4, TRBJ2-7)
CASRSTGTVPSYEQYF

SEQ ID NO: 187447 - protein, 15 aa, Homo sapiens
  CDR3 for alpha chain variable domain of TCR clone 93724 (TRAV17, TRAJ16)
CATALRFSDGQKLLF

SEQ ID NO: 187448 - protein, 22 aa, Homo sapiens
  CDR3 for beta chain variable domain of TCR clone 93724 (TRBV11-2, TRBJ1-4)
CASSLDITRRGIPRKDNEKLFF

SEQ ID NO: 187449 - protein, 14 aa, Homo sapiens
  CDR3 for alpha chain variable domain of TCR clone 93725 (TRAV12-2, TRAJ24)
CAVTPADSWGKLQF

SEQ ID NO: 187450 - protein, 12 aa, Homo sapiens
  CDR3 for beta chain variable domain of TCR clone 93725 (TRBV3-1, TRBJ2-1)
CASSQGYSGQFF

SEQ ID NO: 187451 - protein, 14 aa, Homo sapiens
  CDR3 for alpha chain variable domain of TCR clone 93726 (TRAV12-1, TRAJ29)
CVVNEGSGNTPLVF

SEQ ID NO: 187452 - protein, 13 aa, Homo sapiens
  CDR3 for beta chain variable domain of TCR clone 93726 (TRBV7-9, TRBJ2-3)
CASSPGSTDMQYF

SEQ ID NO: 187453 - protein, 18 aa, Homo sapiens
  CDR3 for alpha chain variable domain of TCR clone 93727 (TRAV13-1, TRAJ52)
CAASKRSAGGTSYGKLTF

SEQ ID NO: 187454 - protein, 13 aa, Homo sapiens
  CDR3 for beta chain variable domain of TCR clone 93727 (TRBV12-4, TRBJ1-2)
CASSLRQGKRYTF

SEQ ID NO: 187455 - protein, 12 aa, Homo sapiens
  CDR3 for alpha chain variable domain of TCR clone 93728 (TRAV12-3, TRAJ3)
CAIDSSASKIIF

SEQ ID NO: 187456 - protein, 17 aa, Homo sapiens
  CDR3 for beta chain variable domain of TCR clone 93728 (TRBV7-9, TRBJ2-3)
CASSIEEAGAYPDTQYF

SEQ ID NO: 187457 - protein, 12 aa, Homo sapiens
  CDR3 for alpha chain variable domain of TCR clone 93729 (TRAV13-2, TRAJ8)
CAPWLGFQKLVF

SEQ ID NO: 187458 - protein, 14 aa, Homo sapiens
  CDR3 for beta chain variable domain of TCR clone 93729 (TRBV7-9, TRBJ2-3)
CASSLEDGTDTQYF

SEQ ID NO: 187459 - protein, 12 aa, Homo sapiens
  CDR3 for alpha chain variable domain of TCR clone 93730 (TRAV13-2, TRAJ23)
CAERHRGGKLIF

SEQ ID NO: 187460 - protein, 16 aa, Homo sapiens
  CDR3 for beta chain variable domain of TCR clone 93730 (TRBV7-2, TRBJ2-6)
CAILSGVSSGAKVLTF

SEQ ID NO: 187461 - protein, 14 aa, Homo sapiens
  CDR3 for alpha chain variable domain of TCR clone 93731 (TRAV8-4, TRAJ9)
CAVRINTGGFKTII

SEQ ID NO: 187462 - protein, 15 aa, Homo sapiens
  CDR3 for beta chain variable domain of TCR clone 93731 (TRBV10-2, TRBJ2-6)
CASSEQGTGANVLTF

SEQ ID NO: 187463 - protein, 12 aa, Homo sapiens
  CDR3 for alpha chain variable domain of TCR clone 93732 (TRAV13-1, TRAJ21)
CAAKEGFNKFYF

SEQ ID NO: 187464 - protein, 14 aa, Homo sapiens
  CDR3 for beta chain variable domain of TCR clone 93732 (TRBV5-4, TRBJ1-1)
CASRLDSRRDEAFF

SEQ ID NO: 187465 - protein, 14 aa, Homo sapiens
  CDR3 for alpha chain variable domain of TCR clone 93733 (TRAV26-1, TRAJ48)
CIVRTNFGNEKLTF

SEQ ID NO: 187466 - protein, 16 aa, Homo sapiens
  CDR3 for beta chain variable domain of TCR clone 93733 (TRBV19, TRBJ2-2)
CASRSPGTGATGELFF

SEQ ID NO: 187467 - protein, 12 aa, Homo sapiens
  CDR3 for alpha chain variable domain of TCR clone 93734 (TRAV13-2, TRAJ23)
CAESHRGGKLIF

SEQ ID NO: 187468 - protein, 16 aa, Homo sapiens
  CDR3 for beta chain variable domain of TCR clone 93734 (TRBV4-1, TRBJ2-5)
CASSHADRAGGETQYF

SEQ ID NO: 187469 - protein, 14 aa, Homo sapiens
  CDR3 for alpha chain variable domain of TCR clone 93735 (TRAV1-2, TRAJ8)
CAVREDTGFQTLVF

SEQ ID NO: 187470 - protein, 12 aa, Homo sapiens
  CDR3 for beta chain variable domain of TCR clone 93735 (TRBV29-1, TRBJ2-3)
CSVTGGADTQYF

SEQ ID NO: 187471 - protein, 14 aa, Homo sapiens
  CDR3 for alpha chain variable domain of TCR clone 93736 (TRAV12-1, TRAJ4)
CVVPLKSGYNKLIF

SEQ ID NO: 187472 - protein, 14 aa, Homo sapiens
  CDR3 for beta chain variable domain of TCR clone 93736 (TRBV19, TRBJ2-1)
CASPTFVLSGEQFF

SEQ ID NO: 187473 - protein, 13 aa, Homo sapiens
  CDR3 for alpha chain variable domain of TCR clone 93737 (TRAV12-2, TRAJ21)
CVVTLYNFNKFYF

SEQ ID NO: 187474 - protein, 20 aa, Homo sapiens
  CDR3 for beta chain variable domain of TCR clone 93737 (TRBV7-8, TRBJ2-1)
CASSLAHRLAGVRSYNEQFF

SEQ ID NO: 187475 - protein, 14 aa, Homo sapiens
  CDR3 for alpha chain variable domain of TCR clone 93738 (TRAV26-1, TRAJ44)
CIVKSTGTASKLTF

SEQ ID NO: 187476 - protein, 13 aa, Homo sapiens
  CDR3 for beta chain variable domain of TCR clone 93738 (TRBV29-1, TRBJ2-1)
CSVEGGRVNEQFF

SEQ ID NO: 187477 - protein, 14 aa, Homo sapiens
  CDR3 for alpha chain variable domain of TCR clone 93739 (TRAV1-2, TRAJ27)
CAVRSGTNAGKSTF

SEQ ID NO: 187478 - protein, 15 aa, Homo sapiens
  CDR3 for beta chain variable domain of TCR clone 93739 (TRBV18, TRBJ2-7)
CASSPLQGGTYEQYF

SEQ ID NO: 187479 - protein, 11 aa, Homo sapiens
  CDR3 for alpha chain variable domain of TCR clone 93740 (TRAV17, TRAJ31)
CATSNNARLMF

SEQ ID NO: 187480 - protein, 16 aa, Homo sapiens
  CDR3 for beta chain variable domain of TCR clone 93740 (TRBV19, TRBJ2-1)
CASSKAGPSSYNEQFF

SEQ ID NO: 187481 - protein, 14 aa, Homo sapiens
  CDR3 for alpha chain variable domain of TCR clone 93741 (TRAV12-3, TRAJ10)
SHLPLTGGGNKLTF

SEQ ID NO: 187482 - protein, 15 aa, Homo sapiens
  CDR3 for beta chain variable domain of TCR clone 93741 (TRBV7-3, TRBJ2-2)
CANSETGQGTGELFF

SEQ ID NO: 187483 - protein, 13 aa, Homo sapiens
  CDR3 for alpha chain variable domain of TCR clone 93742 (TRAV8-6, TRAJ40)
CAVSVTGTYKYIF

SEQ ID NO: 187484 - protein, 16 aa, Homo sapiens
  CDR3 for beta chain variable domain of TCR clone 93742 (TRBV12-5, TRBJ2-5)
CASGPRTSGNQETQYF

SEQ ID NO: 187485 - protein, 15 aa, Homo sapiens
  CDR3 for alpha chain variable domain of TCR clone 93743 (TRAV26-1, TRAJ29)
CIVRVEGSGDAPLVF

SEQ ID NO: 187486 - protein, 15 aa, Homo sapiens
  CDR3 for beta chain variable domain of TCR clone 93743 (TRBV7-9, TRBJ1-5)
CASSQGHQPNQPQHF

SEQ ID NO: 187487 - protein, 11 aa, Homo sapiens
  CDR3 for alpha chain variable domain of TCR clone 93744 (TRAV12-1, TRAJ40)
CGLLRNLKYIF

SEQ ID NO: 187488 - protein, 18 aa, Homo sapiens
  CDR3 for beta chain variable domain of TCR clone 93744 (TRBV11-2, TRBJ2-3)
CASSLGGASRGAPNTQYF

SEQ ID NO: 187489 - protein, 14 aa, Homo sapiens
  CDR3 for alpha chain variable domain of TCR clone 93745 (TRAV21, TRAJ35)
CAVMPIGFGNVLHC

SEQ ID NO: 187490 - protein, 14 aa, Homo sapiens
  CDR3 for beta chain variable domain of TCR clone 93745 (TRBV20-1, TRBJ1-5)
CSARDDRGNQPQHF

SEQ ID NO: 187491 - protein, 14 aa, Homo sapiens
  CDR3 for alpha chain variable domain of TCR clone 93746 (TRAV12-2, TRAJ17)
CAVLFKAAGNKLTF

SEQ ID NO: 187492 - protein, 15 aa, Homo sapiens
  CDR3 for beta chain variable domain of TCR clone 93746 (TRBV5-1, TRBJ2-3)
CASSVTSGSTDTQYF

SEQ ID NO: 187493 - protein, 13 aa, Homo sapiens
  CDR3 for alpha chain variable domain of TCR clone 93747 (TRAV26-1, TRAJ33)
CIVRVEGNYQLIW

SEQ ID NO: 187494 - protein, 17 aa, Homo sapiens
  CDR3 for beta chain variable domain of TCR clone 93747 (TRBV13, TRBJ2-3)
CASSLSRVAGGRNTQYF

SEQ ID NO: 187495 - protein, 14 aa, Homo sapiens
  CDR3 for alpha chain variable domain of TCR clone 93748 (TRAV35, TRAJ33)
CWPRGRDSNYQLIW

SEQ ID NO: 187496 - protein, 11 aa, Homo sapiens
  CDR3 for beta chain variable domain of TCR clone 93748 (TRBV10-3, TRBJ2-7)
CAISEGLQQYF

SEQ ID NO: 187497 - protein, 16 aa, Homo sapiens
  CDR3 for alpha chain variable domain of TCR clone 93749 (TRAV30, TRAJ24)
CGTEIVDADSWGKFQF

SEQ ID NO: 187498 - protein, 18 aa, Homo sapiens
  CDR3 for beta chain variable domain of TCR clone 93749 (TRBV11-2, TRBJ2-3)
FASSLGGASRGAPNTQYF

SEQ ID NO: 187499 - protein, 14 aa, Homo sapiens
  CDR3 for alpha chain variable domain of TCR clone 93750 (TRAV35, TRAJ33)
CWPRGRDSNYQLIW

SEQ ID NO: 187500 - protein, 11 aa, Homo sapiens
  CDR3 for beta chain variable domain of TCR clone 93750 (TRBV10-3, TRBJ2-7)
CAISEGPEQYF

SEQ ID NO: 187501 - protein, 16 aa, Homo sapiens
  CDR3 for alpha chain variable domain of TCR clone 93751 (TRAV4, TRAJ22)
CLVGDLYSGSARQLTF

SEQ ID NO: 187502 - protein, 16 aa, Homo sapiens
  CDR3 for beta chain variable domain of TCR clone 93751 (TRBV7-9, TRBJ2-1)
WASSDVAGGSYNEQFF

SEQ ID NO: 187503 - protein, 11 aa, Homo sapiens
  CDR3 for alpha chain variable domain of TCR clone 93752 (TRAV1-2, TRAJ40)
CAVPGTYKYIF

SEQ ID NO: 187504 - protein, 16 aa, Homo sapiens
  CDR3 for beta chain variable domain of TCR clone 93752 (TRBV7-7, TRBJ2-1)
CASSLASGTSYNEQFF

SEQ ID NO: 187505 - protein, 15 aa, Homo sapiens
  CDR3 for alpha chain variable domain of TCR clone 93753 (TRAV29/DV5, TRAJ23)
CAASNLYNQGGKLIF

SEQ ID NO: 187506 - protein, 12 aa, Homo sapiens
  CDR3 for beta chain variable domain of TCR clone 93753 (TRBV11-2, TRBJ2-2)
CASSLPTGELFF

SEQ ID NO: 187507 - protein, 16 aa, Homo sapiens
  CDR3 for alpha chain variable domain of TCR clone 93754 (TRAV8-6, TRAJ4)
CAVTKILSGGYNKLIS

SEQ ID NO: 187508 - protein, 13 aa, Homo sapiens
  CDR3 for beta chain variable domain of TCR clone 93754 (TRBV29-1, TRBJ2-1)
CSEGTSGYNEQFF

SEQ ID NO: 187509 - protein, 13 aa, Homo sapiens
  CDR3 for alpha chain variable domain of TCR clone 93755 (TRAV21, TRAJ20)
CAVGLRVDYKLSF

SEQ ID NO: 187510 - protein, 13 aa, Homo sapiens
  CDR3 for beta chain variable domain of TCR clone 93755 (TRBV19, TRBJ1-1)
CASKLPLNTEAFF

SEQ ID NO: 187511 - protein, 16 aa, Homo sapiens
  CDR3 for alpha chain variable domain of TCR clone 93756 (TRAV29/DV5, TRAJ18)
CAASANRGSTLGRLYF

SEQ ID NO: 187512 - protein, 16 aa, Homo sapiens
  CDR3 for beta chain variable domain of TCR clone 93756 (TRBV5-7, TRBJ2-3)
CASSSLGGAITDTQYF

SEQ ID NO: 187513 - protein, 15 aa, Homo sapiens
  CDR3 for alpha chain variable domain of TCR clone 93757 (TRAV2, TRAJ9)
CAVEDRGTGGFKTIF

SEQ ID NO: 187514 - protein, 13 aa, Homo sapiens
  CDR3 for beta chain variable domain of TCR clone 93757 (TRBV11-2, TRBJ2-5)
CASSFGSQETQYF

SEQ ID NO: 187515 - protein, 14 aa, Homo sapiens
  CDR3 for alpha chain variable domain of TCR clone 93758 (TRAV2, TRAJ37)
CAVDFTSNTGKLIF

SEQ ID NO: 187516 - protein, 15 aa, Homo sapiens
  CDR3 for beta chain variable domain of TCR clone 93758 (TRBV29-1, TRBJ2-1)
CSGRDRKSSYNEQFF

SEQ ID NO: 187517 - protein, 13 aa, Homo sapiens
  CDR3 for alpha chain variable domain of TCR clone 93759 (TRAV1-2, TRAJ9)
CAALNTGGFKTIF

SEQ ID NO: 187518 - protein, 12 aa, Homo sapiens
  CDR3 for beta chain variable domain of TCR clone 93759 (TRBV12-4, TRBJ1-1)
CASSLAGLEAFF

SEQ ID NO: 187519 - protein, 12 aa, Homo sapiens
  CDR3 for alpha chain variable domain of TCR clone 93760 (TRAV13-1, TRAJ49)
CAASIWGNQFNF

SEQ ID NO: 187520 - protein, 14 aa, Homo sapiens
  CDR3 for beta chain variable domain of TCR clone 93760 (TRBV12-4, TRBJ1-1)
CASSLDGLNTEAFF

SEQ ID NO: 187521 - protein, 12 aa, Homo sapiens
  CDR3 for alpha chain variable domain of TCR clone 93761 (TRAV12-2, TRAJ47)
CAVAEYVNKLVF

SEQ ID NO: 187522 - protein, 14 aa, Homo sapiens
  CDR3 for beta chain variable domain of TCR clone 93761 (TRBV20-1, TRBJ1-1)
CSAMGGTANTEAFF

SEQ ID NO: 187523 - protein, 23 aa, Homo sapiens
  CDR3 for alpha chain variable domain of TCR clone 93762 (TRAV8-3, )
CAVVTTRIPDIQNPDTAVYQLRD

SEQ ID NO: 187524 - protein, 14 aa, Homo sapiens
  CDR3 for beta chain variable domain of TCR clone 93762 (TRBV11-2, TRBJ2-7)
CASSPSTTSYEQYF

SEQ ID NO: 187525 - protein, 11 aa, Homo sapiens
  CDR3 for alpha chain variable domain of TCR clone 93763 (TRAV13-1, TRAJ39)
CASHTGNMLTF

SEQ ID NO: 187526 - protein, 14 aa, Homo sapiens
  CDR3 for beta chain variable domain of TCR clone 93763 (TRBV11-2, TRBJ1-5)
CASSLDRGRQPQHF

SEQ ID NO: 187527 - protein, 11 aa, Homo sapiens
  CDR3 for alpha chain variable domain of TCR clone 93764 (TRAV21, TRAJ9)
CAVPGGFKTIF

SEQ ID NO: 187528 - protein, 17 aa, Homo sapiens
  CDR3 for beta chain variable domain of TCR clone 93764 (TRBV13, TRBJ2-3)
CASSLSRVAGGRNTQYF

SEQ ID NO: 187529 - protein, 13 aa, Homo sapiens
  CDR3 for alpha chain variable domain of TCR clone 93765 (TRAV2, TRAJ40)
CAVVTSGTYKYIF

SEQ ID NO: 187530 - protein, 15 aa, Homo sapiens
  CDR3 for beta chain variable domain of TCR clone 93765 (TRBV11-3, TRBJ2-3)
CASLKDGREGDTQYF

SEQ ID NO: 187531 - protein, 13 aa, Homo sapiens
  CDR3 for alpha chain variable domain of TCR clone 93766 (TRAV3, TRAJ8)
CAVSFTGFQKLVF

SEQ ID NO: 187532 - protein, 12 aa, Homo sapiens
  CDR3 for beta chain variable domain of TCR clone 93766 (TRBV2, TRBJ1-2)
CASSGQTYGYTF

SEQ ID NO: 187533 - protein, 14 aa, Homo sapiens
  CDR3 for alpha chain variable domain of TCR clone 93767 (TRAV26-1, TRAJ38)
CIADNAGNNRKLIW

SEQ ID NO: 187534 - protein, 16 aa, Homo sapiens
  CDR3 for beta chain variable domain of TCR clone 93767 (TRBV7-2, TRBJ2-5)
CASSSKWLSGQETQYF

SEQ ID NO: 187535 - protein, 12 aa, Homo sapiens
  CDR3 for alpha chain variable domain of TCR clone 93768 (TRAV12-1, TRAJ40)
CVVYSGTYEYIF

SEQ ID NO: 187536 - protein, 14 aa, Homo sapiens
  CDR3 for beta chain variable domain of TCR clone 93768 (TRBV19, TRBJ2-1)
CASPTFVLSGEQFF

SEQ ID NO: 187537 - protein, 15 aa, Homo sapiens
  CDR3 for alpha chain variable domain of TCR clone 93769 (TRAV4, TRAJ39)
CLVGPNNNAGNMLTF

SEQ ID NO: 187538 - protein, 15 aa, Homo sapiens
  CDR3 for beta chain variable domain of TCR clone 93769 (TRBV7-9, TRBJ2-2)
CASGPLDTFPGELFF

SEQ ID NO: 187539 - protein, 10 aa, Homo sapiens
  CDR3 for alpha chain variable domain of TCR clone 93770 (TRAV23/DV6, TRAJ31)
CARGCARLMF

SEQ ID NO: 187540 - protein, 14 aa, Homo sapiens
  CDR3 for beta chain variable domain of TCR clone 93770 (TRBV7-8, TRBJ1-2)
CASSPDSLSYGYTF

SEQ ID NO: 187541 - protein, 13 aa, Homo sapiens
  CDR3 for alpha chain variable domain of TCR clone 93771 (TRAV29/DV5, TRAJ34)
CAARVDNTDKLIF

SEQ ID NO: 187542 - protein, 13 aa, Homo sapiens
  CDR3 for beta chain variable domain of TCR clone 93771 (TRBV7-3, TRBJ1-1)
CASSQDWGAEAFF

SEQ ID NO: 187543 - protein, 13 aa, Homo sapiens
  CDR3 for alpha chain variable domain of TCR clone 93772 (TRAV17, TRAJ5)
CAPMDTGRRALTF

SEQ ID NO: 187544 - protein, 16 aa, Homo sapiens
  CDR3 for beta chain variable domain of TCR clone 93772 (TRBV27, TRBJ2-7)
CANSSERRDSPYEQYF

SEQ ID NO: 187545 - protein, 14 aa, Homo sapiens
  CDR3 for alpha chain variable domain of TCR clone 93773 (TRAV1-2, TRAJ16)
CAVNRFSDGQKLLF

SEQ ID NO: 187546 - protein, 14 aa, Homo sapiens
  CDR3 for beta chain variable domain of TCR clone 93773 (TRBV5-1, TRBJ2-7)
CASSLQGAVDEQYF

SEQ ID NO: 187547 - protein, 14 aa, Homo sapiens
  CDR3 for alpha chain variable domain of TCR clone 93774 (TRAV26-1, TRAJ53)
CIAPPDGSNYKLTF

SEQ ID NO: 187548 - protein, 13 aa, Homo sapiens
  CDR3 for beta chain variable domain of TCR clone 93774 (TRBV2, TRBJ1-5)
CATAGPGNQPQHF

SEQ ID NO: 187549 - protein, 15 aa, Homo sapiens
  CDR3 for alpha chain variable domain of TCR clone 93775 (TRAV26-1, TRAJ22)
CIVRVSFWFCKATDL

SEQ ID NO: 187550 - protein, 13 aa, Homo sapiens
  CDR3 for beta chain variable domain of TCR clone 93775 (TRBV7-9, TRBJ1-2)
CASSLKQNFGYTF

SEQ ID NO: 187551 - protein, 13 aa, Homo sapiens
  CDR3 for alpha chain variable domain of TCR clone 93776 (TRAV21, TRAJ27)
CAARPGNAGKSTF

SEQ ID NO: 187552 - protein, 15 aa, Homo sapiens
  CDR3 for beta chain variable domain of TCR clone 93776 (TRBV7-2, TRBJ2-3)
CASSLNLRDTDTQYF

SEQ ID NO: 187553 - protein, 18 aa, Homo sapiens
  CDR3 for alpha chain variable domain of TCR clone 93777 (TRAV21, TRAJ52)
CAVRPSPAGGTSYGKLTF

SEQ ID NO: 187554 - protein, 17 aa, Homo sapiens
  CDR3 for beta chain variable domain of TCR clone 93777 (TRBV13, TRBJ2-3)
CASSLSRVAGGRNTQSF

SEQ ID NO: 187555 - protein, 15 aa, Homo sapiens
  CDR3 for alpha chain variable domain of TCR clone 93778 (TRAV3, TRAJ42)
CAVRGGTGSQGNLIF

SEQ ID NO: 187556 - protein, 13 aa, Homo sapiens
  CDR3 for beta chain variable domain of TCR clone 93778 (TRBV7-9, TRBJ1-2)
CASSLKQNYGYTF

SEQ ID NO: 187557 - protein, 12 aa, Homo sapiens
  CDR3 for alpha chain variable domain of TCR clone 93779 (TRAV12-3, TRAJ17)
CAMTLTGNKLTF

SEQ ID NO: 187558 - protein, 15 aa, Homo sapiens
  CDR3 for beta chain variable domain of TCR clone 93779 (TRBV20-1, TRBJ2-7)
CSARDQVSGMDEQHF

SEQ ID NO: 187559 - protein, 13 aa, Homo sapiens
  CDR3 for alpha chain variable domain of TCR clone 93780 (TRAV3, TRAJ27)
CAVRPLGAGKLTF

SEQ ID NO: 187560 - protein, 12 aa, Homo sapiens
  CDR3 for beta chain variable domain of TCR clone 93780 (TRBV7-9, TRBJ2-7)
CATRTDAYEQYF

SEQ ID NO: 187561 - protein, 14 aa, Homo sapiens
  CDR3 for alpha chain variable domain of TCR clone 93781 (TRAV1-2, TRAJ16)
CAVNRFSDGQKMLF

SEQ ID NO: 187562 - protein, 15 aa, Homo sapiens
  CDR3 for beta chain variable domain of TCR clone 93781 (TRBV3-1, TRBJ2-5)
CASSANLGGPETQYF

SEQ ID NO: 187563 - protein, 15 aa, Homo sapiens
  CDR3 for alpha chain variable domain of TCR clone 93782 (TRAV13-1, TRAJ44)
CAASRGGGTASKLTF

SEQ ID NO: 187564 - protein, 15 aa, Homo sapiens
  CDR3 for beta chain variable domain of TCR clone 93782 (TRBV20-1, TRBJ2-2)
CSAIPGHSNTGELFF

SEQ ID NO: 187565 - protein, 14 aa, Homo sapiens
  CDR3 for alpha chain variable domain of TCR clone 93783 (TRAV12-2, TRAJ17)
CAVLFKAAGNKLTF

SEQ ID NO: 187566 - protein, 14 aa, Homo sapiens
  CDR3 for beta chain variable domain of TCR clone 93783 (TRBV7-8, TRBJ2-5)
CASSATGGQETLYF

SEQ ID NO: 187567 - protein, 13 aa, Homo sapiens
  CDR3 for alpha chain variable domain of TCR clone 93784 (TRAV35, TRAJ40)
CAGRLSGTYKYIF

SEQ ID NO: 187568 - protein, 14 aa, Homo sapiens
  CDR3 for beta chain variable domain of TCR clone 93784 (TRBV3-1, TRBJ2-5)
CASSLQLAGETQYF

SEQ ID NO: 187569 - protein, 14 aa, Homo sapiens
  CDR3 for alpha chain variable domain of TCR clone 93785 (TRAV16, TRAJ16)
CSPGGGSDGQKLLF

SEQ ID NO: 187570 - protein, 15 aa, Homo sapiens
  CDR3 for beta chain variable domain of TCR clone 93785 (TRBV20-1, TRBJ2-7)
CSARDRVSGMDEQYF

SEQ ID NO: 187571 - protein, 14 aa, Homo sapiens
  CDR3 for alpha chain variable domain of TCR clone 93786 (TRAV3, TRAJ33)
CAVRDMDSNYQLIW

SEQ ID NO: 187572 - protein, 19 aa, Homo sapiens
  CDR3 for beta chain variable domain of TCR clone 93786 (TRBV7-3, TRBJ1-2)
CAGSFPQGNDGELWLHLRF

SEQ ID NO: 187573 - protein, 12 aa, Homo sapiens
  CDR3 for alpha chain variable domain of TCR clone 93787 (TRAV8-3, TRAJ26)
CAGDNYGQNFVF

SEQ ID NO: 187574 - protein, 15 aa, Homo sapiens
  CDR3 for beta chain variable domain of TCR clone 93787 (TRBV9, TRBJ2-1)
CASSLAGSSYNEQVF

SEQ ID NO: 187575 - protein, 12 aa, Homo sapiens
  CDR3 for alpha chain variable domain of TCR clone 93788 (TRAV13-1, TRAJ21)
CAVKEGFNKFYF

SEQ ID NO: 187576 - protein, 15 aa, Homo sapiens
  CDR3 for beta chain variable domain of TCR clone 93788 (TRBV27, TRBJ2-1)
CASSNGGGSSNEQFF

SEQ ID NO: 187577 - protein, 15 aa, Homo sapiens
  CDR3 for alpha chain variable domain of TCR clone 93789 (TRAV34, TRAJ38)
CGADFTPGNNRKLIW

SEQ ID NO: 187578 - protein, 15 aa, Homo sapiens
  CDR3 for beta chain variable domain of TCR clone 93789 (TRBV12-4, TRBJ2-5)
CASSPPTGLQETQYF

SEQ ID NO: 187579 - protein, 15 aa, Homo sapiens
  CDR3 for alpha chain variable domain of TCR clone 93790 (TRAV12-1, TRAJ44)
CVVFVNTGTASKITF

SEQ ID NO: 187580 - protein, 17 aa, Homo sapiens
  CDR3 for beta chain variable domain of TCR clone 93790 (TRBV7-8, TRBJ2-6)
CASSAGTGGAGANVLTF

SEQ ID NO: 187581 - protein, 16 aa, Homo sapiens
  CDR3 for alpha chain variable domain of TCR clone 93791 (TRAV14/DV4, TRAJ15)
CAMREGPAQAGTALIF

SEQ ID NO: 187582 - protein, 12 aa, Homo sapiens
  CDR3 for beta chain variable domain of TCR clone 93791 (TRBV20-1, TRBJ2-5)
CSAGGAGETQYF

SEQ ID NO: 187583 - protein, 17 aa, Homo sapiens
  CDR3 for alpha chain variable domain of TCR clone 93792 (TRAV29/DV5, TRAJ10)
CSVLLGRATGGGNKLTF

SEQ ID NO: 187584 - protein, 16 aa, Homo sapiens
  CDR3 for beta chain variable domain of TCR clone 93792 (TRBV20-1, TRBJ1-4)
CSAPGQGLLTNEKLFF

SEQ ID NO: 187585 - protein, 19 aa, Homo sapiens
  CDR3 for alpha chain variable domain of TCR clone 93793 (TRAV2, TRAJ20)
ILQVREADAAVYRDCKLSF

SEQ ID NO: 187586 - protein, 16 aa, Homo sapiens
  CDR3 for beta chain variable domain of TCR clone 93793 (TRBV19, TRBJ2-1)
YASSKAGPSSYNEQFF

SEQ ID NO: 187587 - protein, 11 aa, Homo sapiens
  CDR3 for alpha chain variable domain of TCR clone 93794 (TRAV13-1, TRAJ27)
CAAYNAGKSTF

SEQ ID NO: 187588 - protein, 16 aa, Homo sapiens
  CDR3 for beta chain variable domain of TCR clone 93794 (TRBV6-1, TRBJ2-3)
CASMKPGQTFTDTQYF

SEQ ID NO: 187589 - protein, 17 aa, Homo sapiens
  CDR3 for alpha chain variable domain of TCR clone 93795 (TRAV17, TRAJ52)
CATERPSGGTSYGKLTF

SEQ ID NO: 187590 - protein, 15 aa, Homo sapiens
  CDR3 for beta chain variable domain of TCR clone 93795 (TRBV5-1, TRBJ2-1)
CASSLVANSYNERFF

SEQ ID NO: 187591 - protein, 14 aa, Homo sapiens
  CDR3 for alpha chain variable domain of TCR clone 93796 (TRAV1-2, TRAJ16)
CAVNRFSDGQKLLF

SEQ ID NO: 187592 - protein, 14 aa, Homo sapiens
  CDR3 for beta chain variable domain of TCR clone 93796 (TRBV7-2, TRBJ2-1)
CASSRGGARNEQFF

SEQ ID NO: 187593 - protein, 12 aa, Homo sapiens
  CDR3 for alpha chain variable domain of TCR clone 93797 (TRAV8-3, TRAJ26)
CAGDNYGQNSVF

SEQ ID NO: 187594 - protein, 17 aa, Homo sapiens
  CDR3 for beta chain variable domain of TCR clone 93797 (TRBV7-8, TRBJ2-6)
CASSAGTGGAGANVLTF

SEQ ID NO: 187595 - protein, 14 aa, Homo sapiens
  CDR3 for alpha chain variable domain of TCR clone 93798 (TRAV12-2, TRAJ13)
CAVKKTGGYQKVTF

SEQ ID NO: 187596 - protein, 12 aa, Homo sapiens
  CDR3 for beta chain variable domain of TCR clone 93798 (TRBV12-4, TRBJ2-7)
CASSLGGYEQHF

SEQ ID NO: 187597 - protein, 16 aa, Homo sapiens
  CDR3 for alpha chain variable domain of TCR clone 93799 (TRAV26-1, TRAJ23)
CIVRVHPYNQGGKLIF

SEQ ID NO: 187598 - protein, 15 aa, Homo sapiens
  CDR3 for beta chain variable domain of TCR clone 93799 (TRBV5-7, TRBJ2-7)
CASSPYFEGSYERYF

SEQ ID NO: 187599 - protein, 18 aa, Homo sapiens
  CDR3 for alpha chain variable domain of TCR clone 93800 (TRAV13-1, TRAJ52)
CAASKRSPGGTSYGKLTF

SEQ ID NO: 187600 - protein, 13 aa, Homo sapiens
  CDR3 for beta chain variable domain of TCR clone 93800 (TRBV12-4, TRBJ1-2)
CASSLRQGKGYTF

SEQ ID NO: 187601 - protein, 14 aa, Homo sapiens
  CDR3 for alpha chain variable domain of TCR clone 93801 (TRAV1-2, TRAJ16)
CAVNRFSDGQKPLF

SEQ ID NO: 187602 - protein, 10 aa, Homo sapiens
  CDR3 for beta chain variable domain of TCR clone 93801 (TRBV20-1, TRBJ1-4)
PQGANEKLFF

SEQ ID NO: 187603 - protein, 14 aa, Homo sapiens
  CDR3 for alpha chain variable domain of TCR clone 93802 (TRAV12-3, TRAJ9)
CAMSPNTGGFKTIF

SEQ ID NO: 187604 - protein, 12 aa, Homo sapiens
  CDR3 for beta chain variable domain of TCR clone 93802 (TRBV19, TRBJ1-5)
CASSIAQQPQRF

SEQ ID NO: 187605 - protein, 12 aa, Homo sapiens
  CDR3 for alpha chain variable domain of TCR clone 93803 (TRAV12-3, TRAJ40)
CAMSLGTYKYIF

SEQ ID NO: 187606 - protein, 15 aa, Homo sapiens
  CDR3 for beta chain variable domain of TCR clone 93803 (TRBV7-3, TRBJ2-2)
CASSETGQGTGELFF

SEQ ID NO: 187607 - protein, 14 aa, Homo sapiens
  CDR3 for alpha chain variable domain of TCR clone 93804 (TRAV16, TRAJ33)
CALSAMDNNYQLIW

SEQ ID NO: 187608 - protein, 12 aa, Homo sapiens
  CDR3 for beta chain variable domain of TCR clone 93804 (TRBV5-1, TRBJ1-2)
CASSQDTYGYTF

SEQ ID NO: 187609 - protein, 13 aa, Homo sapiens
  CDR3 for alpha chain variable domain of TCR clone 93805 (TRAV25, TRAJ24)
CAGGTDSWGKFQF

SEQ ID NO: 187610 - protein, 18 aa, Homo sapiens
  CDR3 for beta chain variable domain of TCR clone 93805 (TRBV23-1, TRBJ2-1)
CASGMLRLALSSYNEQFF

SEQ ID NO: 187611 - protein, 15 aa, Homo sapiens
  CDR3 for alpha chain variable domain of TCR clone 93806 (TRAV3, TRAJ22)
CAVRDRGGSARQLTF

SEQ ID NO: 187612 - protein, 14 aa, Homo sapiens
  CDR3 for beta chain variable domain of TCR clone 93806 (TRBV11-2, TRBJ2-5)
CASSRTGGIETQYF

SEQ ID NO: 187613 - protein, 12 aa, Homo sapiens
  CDR3 for alpha chain variable domain of TCR clone 93807 (TRAV8-3, TRAJ26)
CAGDNYGQNFVF

SEQ ID NO: 187614 - protein, 15 aa, Homo sapiens
  CDR3 for beta chain variable domain of TCR clone 93807 (TRBV9, TRBJ2-1)
CASSLAGSSYNEHFF

SEQ ID NO: 187615 - protein, 16 aa, Homo sapiens
  CDR3 for alpha chain variable domain of TCR clone 93808 (TRAV21, TRAJ37)
CAVRTAGSSNTGKLIF

SEQ ID NO: 187616 - protein, 13 aa, Homo sapiens
  CDR3 for beta chain variable domain of TCR clone 93808 (TRBV7-9, TRBJ2-5)
CAGLPSGRGTQYF

SEQ ID NO: 187617 - protein, 14 aa, Homo sapiens
  CDR3 for alpha chain variable domain of TCR clone 93809 (TRAV12-2, TRAJ13)
CAVKKTGGYQKVNF

SEQ ID NO: 187618 - protein, 15 aa, Homo sapiens
  CDR3 for beta chain variable domain of TCR clone 93809 (TRBV27, TRBJ2-1)
CASSNGGVSSNEQFF

SEQ ID NO: 187619 - protein, 12 aa, Homo sapiens
  CDR3 for alpha chain variable domain of TCR clone 93810 (TRAV13-1, TRAJ43)
CAAGRFNNDMRF

SEQ ID NO: 187620 - protein, 16 aa, Homo sapiens
  CDR3 for beta chain variable domain of TCR clone 93810 (TRBV2, TRBJ2-5)
CASSETQGVGEETQYF

SEQ ID NO: 187621 - protein, 14 aa, Homo sapiens
  CDR3 for alpha chain variable domain of TCR clone 93811 (TRAV2, TRAJ9)
CAVEDRSGGFKTIF

SEQ ID NO: 187622 - protein, 13 aa, Homo sapiens
  CDR3 for beta chain variable domain of TCR clone 93811 (TRBV4-1, TRBJ2-7)
CASSQGQAYEQYF

SEQ ID NO: 187623 - protein, 15 aa, Homo sapiens
  CDR3 for alpha chain variable domain of TCR clone 93812 (TRAV20, TRAJ53)
CAVQSSGGSNYKLTF

SEQ ID NO: 187624 - protein, 12 aa, Homo sapiens
  CDR3 for beta chain variable domain of TCR clone 93812 (TRBV7-8, TRBJ2-7)
CASSLGDREQYF

SEQ ID NO: 187625 - protein, 16 aa, Homo sapiens
  CDR3 for alpha chain variable domain of TCR clone 93813 (TRAV4, TRAJ5)
CLVGPDNGHGQESTYF

SEQ ID NO: 187626 - protein, 15 aa, Homo sapiens
  CDR3 for beta chain variable domain of TCR clone 93813 (TRBV27, TRBJ2-5)
CASSLIPSGGETQYF

SEQ ID NO: 187627 - protein, 10 aa, Homo sapiens
  CDR3 for alpha chain variable domain of TCR clone 93814 (TRAV20, TRAJ22)
CAAPARQLTF

SEQ ID NO: 187628 - protein, 14 aa, Homo sapiens
  CDR3 for beta chain variable domain of TCR clone 93814 (TRBV19, TRBJ2-1)
CASSMGRGAPEQFF

SEQ ID NO: 187629 - protein, 14 aa, Homo sapiens
  CDR3 for alpha chain variable domain of TCR clone 93815 (TRAV8-6, TRAJ29)
CAVSRASGNTPLVF

SEQ ID NO: 187630 - protein, 13 aa, Homo sapiens
  CDR3 for beta chain variable domain of TCR clone 93815 (TRBV19, TRBJ1-5)
CASSEGSNQPRHF

SEQ ID NO: 187631 - protein, 13 aa, Homo sapiens
  CDR3 for alpha chain variable domain of TCR clone 93816 (TRAV35, TRAJ22)
CAGLSGSARQLTF

SEQ ID NO: 187632 - protein, 16 aa, Homo sapiens
  CDR3 for beta chain variable domain of TCR clone 93816 (TRBV7-9, TRBJ2-1)
CASSLVPTGQGNEQFF

SEQ ID NO: 187633 - protein, 14 aa, Homo sapiens
  CDR3 for alpha chain variable domain of TCR clone 93817 (TRAV12-2, TRAJ13)
CAGKKTGSYQKVTF

SEQ ID NO: 187634 - protein, 15 aa, Homo sapiens
  CDR3 for beta chain variable domain of TCR clone 93817 (TRBV27, TRBJ2-1)
CASSNGGGSSNEQFF

SEQ ID NO: 187635 - protein, 14 aa, Homo sapiens
  CDR3 for alpha chain variable domain of TCR clone 93818 (TRAV13-1, TRAJ44)
CAAKATGTASKLTF

SEQ ID NO: 187636 - protein, 17 aa, Homo sapiens
  CDR3 for beta chain variable domain of TCR clone 93818 (TRBV7-3, TRBJ2-3)
SASSLMKRMRGADTQYF

SEQ ID NO: 187637 - protein, 12 aa, Homo sapiens
  CDR3 for alpha chain variable domain of TCR clone 93819 (TRAV12-3, TRAJ17)
CAMTLTGNKLTF

SEQ ID NO: 187638 - protein, 13 aa, Homo sapiens
  CDR3 for beta chain variable domain of TCR clone 93819 (TRBV5-1, TRBJ1-1)
CASSADWDTEASF

SEQ ID NO: 187639 - protein, 13 aa, Homo sapiens
  CDR3 for alpha chain variable domain of TCR clone 93820 (TRAV13-1, TRAJ6)
CAARRGGNYIPTF

SEQ ID NO: 187640 - protein, 16 aa, Homo sapiens
  CDR3 for beta chain variable domain of TCR clone 93820 (TRBV7-9, TRBJ2-2)
CASSLATGVGTGELFF

SEQ ID NO: 187641 - protein, 10 aa, Homo sapiens
  CDR3 for alpha chain variable domain of TCR clone 93821 (TRAV16, TRAJ22)
SAMYLRQLTF

SEQ ID NO: 187642 - protein, 15 aa, Homo sapiens
  CDR3 for beta chain variable domain of TCR clone 93821 (TRBV7-9, TRBJ1-6)
CASSSPGGGNSPLHF

SEQ ID NO: 187643 - protein, 14 aa, Homo sapiens
  CDR3 for alpha chain variable domain of TCR clone 93822 (TRAV16, TRAJ33)
CDLSAMDSNYQLIW

SEQ ID NO: 187644 - protein, 15 aa, Homo sapiens
  CDR3 for beta chain variable domain of TCR clone 93822 (TRBV28, TRBJ2-7)
CASSLEAYPIYEQYF

SEQ ID NO: 187645 - protein, 12 aa, Homo sapiens
  CDR3 for alpha chain variable domain of TCR clone 93823 (TRAV27, TRAJ42)
CAGGGSHGNLIF

SEQ ID NO: 187646 - protein, 13 aa, Homo sapiens
  CDR3 for beta chain variable domain of TCR clone 93823 (TRBV19, TRBJ2-7)
CASSIRSSYEQYF

SEQ ID NO: 187647 - protein, 12 aa, Homo sapiens
  CDR3 for alpha chain variable domain of TCR clone 93824 (TRAV26-1, TRAJ26)
YIVYNYGQNFVF

SEQ ID NO: 187648 - protein, 15 aa, Homo sapiens
  CDR3 for beta chain variable domain of TCR clone 93824 (TRBV7-2, TRBJ2-3)
CASSLRGGSTDTQYF

SEQ ID NO: 187649 - protein, 20 aa, Homo sapiens
  CDR3 for alpha chain variable domain of TCR clone 93825 (TRAV1-1, TRAJ4)
CLLLLRCEGFLSGGYNKLIF

SEQ ID NO: 187650 - protein, 16 aa, Homo sapiens
  CDR3 for beta chain variable domain of TCR clone 93825 (TRBV28, TRBJ1-4)
CASSPPYRGRSEKLFS

SEQ ID NO: 187651 - protein, 17 aa, Homo sapiens
  CDR3 for alpha chain variable domain of TCR clone 93826 (TRAV3, TRAJ12)
CAVRDGGRMDSSYKLIF

SEQ ID NO: 187652 - protein, 17 aa, Homo sapiens
  CDR3 for beta chain variable domain of TCR clone 93826 (TRBV7-8, TRBJ2-6)
CASSAGTGGAGANVLTF

SEQ ID NO: 187653 - protein, 14 aa, Homo sapiens
  CDR3 for alpha chain variable domain of TCR clone 93827 (TRAV13-1, TRAJ44)
CAAKATGTASKLTF

SEQ ID NO: 187654 - protein, 22 aa, Homo sapiens
  CDR3 for beta chain variable domain of TCR clone 93827 (TRBV19, TRBJ2-1)
CARSVRDRVTGTSGRIYNEQFF

SEQ ID NO: 187655 - protein, 15 aa, Homo sapiens
  CDR3 for alpha chain variable domain of TCR clone 93828 (TRAV12-3, TRAJ6)
CAMSATSGGSYIPSF

SEQ ID NO: 187656 - protein, 11 aa, Homo sapiens
  CDR3 for beta chain variable domain of TCR clone 93828 (TRBV20-1, TRBJ1-5)
CSAQGDQPQHF

SEQ ID NO: 187657 - protein, 13 aa, Homo sapiens
  CDR3 for alpha chain variable domain of TCR clone 93829 (TRAV21, TRAJ27)
CAARPGNAGKSTF

SEQ ID NO: 187658 - protein, 15 aa, Homo sapiens
  CDR3 for beta chain variable domain of TCR clone 93829 (TRBV11-2, TRBJ2-3)
CASRGAGLAMVAQYF

SEQ ID NO: 187659 - protein, 12 aa, Homo sapiens
  CDR3 for alpha chain variable domain of TCR clone 93830 (TRAV12-3, TRAJ17)
CAMTLTGNKRTF

SEQ ID NO: 187660 - protein, 15 aa, Homo sapiens
  CDR3 for beta chain variable domain of TCR clone 93830 (TRBV20-1, TRBJ2-7)
CSARDWVSGMDEQYF

SEQ ID NO: 187661 - protein, 12 aa, Homo sapiens
  CDR3 for alpha chain variable domain of TCR clone 93831 (TRAV35, TRAJ39)
LAPNNAGNMLIF

SEQ ID NO: 187662 - protein, 16 aa, Homo sapiens
  CDR3 for beta chain variable domain of TCR clone 93831 (TRBV2, TRBJ2-3)
CASSTSVEGVTDTQYF

SEQ ID NO: 187663 - protein, 10 aa, Homo sapiens
  CDR3 for alpha chain variable domain of TCR clone 93832 (TRAV23/DV6, TRAJ45)
TGGGADGLTF

SEQ ID NO: 187664 - protein, 14 aa, Homo sapiens
  CDR3 for beta chain variable domain of TCR clone 93832 (TRBV7-2, TRBJ2-7)
CASSPKTSFYEQYF

SEQ ID NO: 187665 - protein, 13 aa, Homo sapiens
  CDR3 for alpha chain variable domain of TCR clone 93833 (TRAV3, TRAJ20)
CAVRDTPRYKLSF

SEQ ID NO: 187666 - protein, 16 aa, Homo sapiens
  CDR3 for beta chain variable domain of TCR clone 93833 (TRBV5-1, TRBJ2-3)
CASSLALAVVSDTQYF

SEQ ID NO: 187667 - protein, 14 aa, Homo sapiens
  CDR3 for alpha chain variable domain of TCR clone 93834 (TRAV14/DV4, TRAJ41)
CARGGPDSGDALNF

SEQ ID NO: 187668 - protein, 15 aa, Homo sapiens
  CDR3 for beta chain variable domain of TCR clone 93834 (TRBV19, TRBJ2-1)
CASSIQATSYNEQFF

SEQ ID NO: 187669 - protein, 11 aa, Homo sapiens
  CDR3 for alpha chain variable domain of TCR clone 93835 (TRAV1-1, TRAJ23)
CAVRQGGKLIF

SEQ ID NO: 187670 - protein, 17 aa, Homo sapiens
  CDR3 for beta chain variable domain of TCR clone 93835 (TRBV19, TRBJ2-6)
CASSTGQVFSGANVLTF

SEQ ID NO: 187671 - protein, 16 aa, Homo sapiens
  CDR3 for alpha chain variable domain of TCR clone 93836 (TRAV26-1, TRAJ53)
CIVRVAMGGSNYKLTF

SEQ ID NO: 187672 - protein, 12 aa, Homo sapiens
  CDR3 for beta chain variable domain of TCR clone 93836 (TRBV7-9, TRBJ1-5)
CASSPQGQPRHF

SEQ ID NO: 187673 - protein, 16 aa, Homo sapiens
  CDR3 for alpha chain variable domain of TCR clone 93837 (TRAV3, TRAJ37)
CAVRGKGSGNTGKLIF

SEQ ID NO: 187674 - protein, 13 aa, Homo sapiens
  CDR3 for beta chain variable domain of TCR clone 93837 (TRBV14, TRBJ2-7)
CASSHQGAYEQYF

SEQ ID NO: 187675 - protein, 16 aa, Homo sapiens
  CDR3 for alpha chain variable domain of TCR clone 93838 (TRAV12-3, TRAJ53)
CAVSTGSGGSNYKLTF

SEQ ID NO: 187676 - protein, 11 aa, Homo sapiens
  CDR3 for beta chain variable domain of TCR clone 93838 (TRBV29-1, TRBJ2-5)
CSEDRTGTQYF

SEQ ID NO: 187677 - protein, 18 aa, Homo sapiens
  CDR3 for alpha chain variable domain of TCR clone 93839 (TRAV26-2, TRAJ54)
CILRDVEVGIQGAQKLVF

SEQ ID NO: 187678 - protein, 14 aa, Homo sapiens
  CDR3 for beta chain variable domain of TCR clone 93839 (TRBV7-2, TRBJ1-2)
CASSQTGSTYGYTF

SEQ ID NO: 187679 - protein, 16 aa, Homo sapiens
  CDR3 for alpha chain variable domain of TCR clone 93840 (TRAV23/DV6, TRAJ9)
CAASIGGNTGGFKTIF

SEQ ID NO: 187680 - protein, 14 aa, Homo sapiens
  CDR3 for beta chain variable domain of TCR clone 93840 (TRBV9, TRBJ2-7)
CASSVGLGSYEQYF

SEQ ID NO: 187681 - protein, 14 aa, Homo sapiens
  CDR3 for alpha chain variable domain of TCR clone 93841 (TRAV3, TRAJ33)
CAVRDMGSNYQLIW

SEQ ID NO: 187682 - protein, 14 aa, Homo sapiens
  CDR3 for beta chain variable domain of TCR clone 93841 (TRBV6-1, TRBJ1-3)
CASVQGGGGNTIYF

SEQ ID NO: 187683 - protein, 11 aa, Homo sapiens
  CDR3 for alpha chain variable domain of TCR clone 93842 (TRAV4, TRAJ31)
CLVGDNARLMF

SEQ ID NO: 187684 - protein, 15 aa, Homo sapiens
  CDR3 for beta chain variable domain of TCR clone 93842 (TRBV5-1, TRBJ2-7)
CASSLNGGPAREQYF

SEQ ID NO: 187685 - protein, 11 aa, Homo sapiens
  CDR3 for alpha chain variable domain of TCR clone 93843 (TRAV13-2, TRAJ20)
CADSDDYKLSF

SEQ ID NO: 187686 - protein, 12 aa, Homo sapiens
  CDR3 for beta chain variable domain of TCR clone 93843 (TRBV11-2, TRBJ2-2)
CASSLGGGELFF

SEQ ID NO: 187687 - protein, 16 aa, Homo sapiens
  CDR3 for alpha chain variable domain of TCR clone 93844 (TRAV26-1, TRAJ37)
CLVRGDGSGNTGKLIF

SEQ ID NO: 187688 - protein, 17 aa, Homo sapiens
  CDR3 for beta chain variable domain of TCR clone 93844 (TRBV4-1, TRBJ2-7)
CASSRDPLGVRGGEQYF

SEQ ID NO: 187689 - protein, 13 aa, Homo sapiens
  CDR3 for alpha chain variable domain of TCR clone 93845 (TRAV13-1, TRAJ5)
CAASDTGRRALTF

SEQ ID NO: 187690 - protein, 12 aa, Homo sapiens
  CDR3 for beta chain variable domain of TCR clone 93845 (TRBV28, TRBJ2-3)
CTSSLYRDTQYF

SEQ ID NO: 187691 - protein, 17 aa, Homo sapiens
  CDR3 for alpha chain variable domain of TCR clone 93846 (TRAV3, TRAJ6)
CAVRDGPRAGGSYIPTF

SEQ ID NO: 187692 - protein, 17 aa, Homo sapiens
  CDR3 for beta chain variable domain of TCR clone 93846 (TRBV13, TRBJ2-3)
CASSSLGTSGLTDTQYF

SEQ ID NO: 187693 - protein, 16 aa, Homo sapiens
  CDR3 for alpha chain variable domain of TCR clone 93847 (TRAV30, TRAJ24)
CGTEIVDSDSWGKFQF

SEQ ID NO: 187694 - protein, 16 aa, Homo sapiens
  CDR3 for beta chain variable domain of TCR clone 93847 (TRBV12-5, TRBJ2-5)
CASGPRTSGNQETQYF

SEQ ID NO: 187695 - protein, 19 aa, Homo sapiens
  CDR3 for alpha chain variable domain of TCR clone 93848 (TRAV25, TRAJ20)
TATQTTDVGILPHDYKLSF

SEQ ID NO: 187696 - protein, 16 aa, Homo sapiens
  CDR3 for beta chain variable domain of TCR clone 93848 (TRBV5-5, TRBJ2-2)
CASSGRREGATGELFF

SEQ ID NO: 187697 - protein, 14 aa, Homo sapiens
  CDR3 for alpha chain variable domain of TCR clone 93849 (TRAV12-2, TRAJ40)
CAVKIPSGTYKYIF

SEQ ID NO: 187698 - protein, 15 aa, Homo sapiens
  CDR3 for beta chain variable domain of TCR clone 93849 (TRBV28, TRBJ2-4)
CAAGSGTLLMGIQYF

SEQ ID NO: 187699 - protein, 12 aa, Homo sapiens
  CDR3 for alpha chain variable domain of TCR clone 93850 (TRAV12-3, TRAJ40)
CAMTSGTYKYIF

SEQ ID NO: 187700 - protein, 17 aa, Homo sapiens
  CDR3 for beta chain variable domain of TCR clone 93850 (TRBV7-8, TRBJ2-6)
CASSAGTGGAGANVLTF

SEQ ID NO: 187701 - protein, 13 aa, Homo sapiens
  CDR3 for alpha chain variable domain of TCR clone 93851 (TRAV22, TRAJ26)
CAVEHNYGQNFVF

SEQ ID NO: 187702 - protein, 16 aa, Homo sapiens
  CDR3 for beta chain variable domain of TCR clone 93851 (TRBV7-2, TRBJ2-6)
CASSERRASGANALTF

SEQ ID NO: 187703 - protein, 13 aa, Homo sapiens
  CDR3 for alpha chain variable domain of TCR clone 93852 (TRAV2, TRAJ36)
CAVDQTGANNPFF

SEQ ID NO: 187704 - protein, 12 aa, Homo sapiens
  CDR3 for beta chain variable domain of TCR clone 93852 (TRBV19, TRBJ1-1)
CASMNRYTEAFF

SEQ ID NO: 187705 - protein, 17 aa, Homo sapiens
  CDR3 for alpha chain variable domain of TCR clone 93853 (TRAV3, TRAJ6)
CAVRDGPRAGGSYIPTF

SEQ ID NO: 187706 - protein, 13 aa, Homo sapiens
  CDR3 for beta chain variable domain of TCR clone 93853 (TRBV7-2, TRBJ2-7)
ASSPKTSFYEQYF

SEQ ID NO: 187707 - protein, 15 aa, Homo sapiens
  CDR3 for alpha chain variable domain of TCR clone 93854 (TRAV14/DV4, TRAJ12)
CSMRELMDSSYKLIF

SEQ ID NO: 187708 - protein, 10 aa, Homo sapiens
  CDR3 for beta chain variable domain of TCR clone 93854 (TRBV20-1, TRBJ2-7)
CSEGYYEQYF

SEQ ID NO: 187709 - protein, 15 aa, Homo sapiens
  CDR3 for alpha chain variable domain of TCR clone 93855 (TRAV1-2, TRAJ28)
CAVQYSGAGSYQLTF

SEQ ID NO: 187710 - protein, 13 aa, Homo sapiens
  CDR3 for beta chain variable domain of TCR clone 93855 (TRBV20-1, TRBJ2-7)
RSATHTSGYEQYF

SEQ ID NO: 187711 - protein, 10 aa, Homo sapiens
  CDR3 for alpha chain variable domain of TCR clone 93856 (TRAV16, TRAJ22)
SAMYLRQLTF

SEQ ID NO: 187712 - protein, 15 aa, Homo sapiens
  CDR3 for beta chain variable domain of TCR clone 93856 (TRBV7-9, TRBJ1-6)
CASSSPVRGNSPLHF

SEQ ID NO: 187713 - protein, 15 aa, Homo sapiens
  CDR3 for alpha chain variable domain of TCR clone 93857 (TRAV14/DV4, TRAJ26)
CAMREGQNYGQNFVF

SEQ ID NO: 187714 - protein, 14 aa, Homo sapiens
  CDR3 for beta chain variable domain of TCR clone 93857 (TRBV28, TRBJ2-1)
CASSIQGTVGEQFF

SEQ ID NO: 187715 - protein, 16 aa, Homo sapiens
  CDR3 for alpha chain variable domain of TCR clone 93858 (TRAV29/DV5, TRAJ36)
CAASAHYQSGAKNLFF

SEQ ID NO: 187716 - protein, 16 aa, Homo sapiens
  CDR3 for beta chain variable domain of TCR clone 93858 (TRBV20-1, TRBJ1-4)
CSAPGQGLLTNEKLFF

SEQ ID NO: 187717 - protein, 16 aa, Homo sapiens
  CDR3 for alpha chain variable domain of TCR clone 93859 (TRAV16, TRAJ4)
CALSRMFSGGYNKLIF

SEQ ID NO: 187718 - protein, 13 aa, Homo sapiens
  CDR3 for beta chain variable domain of TCR clone 93859 (TRBV18, TRBJ2-3)
CASSTGRTDTQYF

SEQ ID NO: 187719 - protein, 16 aa, Homo sapiens
  CDR3 for alpha chain variable domain of TCR clone 93860 (TRAV3, TRAJ10)
CAVRDMRAGGGNKLTF

SEQ ID NO: 187720 - protein, 13 aa, Homo sapiens
  CDR3 for beta chain variable domain of TCR clone 93860 (TRBV11-2, TRBJ2-5)
CASSRGPSETQYF

SEQ ID NO: 187721 - protein, 14 aa, Homo sapiens
  CDR3 for alpha chain variable domain of TCR clone 93861 (TRAV38-1, TRAJ40)
CALRPTSGTYKYIF

SEQ ID NO: 187722 - protein, 16 aa, Homo sapiens
  CDR3 for beta chain variable domain of TCR clone 93861 (TRBV6-1, TRBJ1-2)
CASSEAWQGRSHGYTF

SEQ ID NO: 187723 - protein, 15 aa, Homo sapiens
  CDR3 for alpha chain variable domain of TCR clone 93862 (TRAV6, TRAJ4)
CALGGVSGGYNKLIF

SEQ ID NO: 187724 - protein, 13 aa, Homo sapiens
  CDR3 for beta chain variable domain of TCR clone 93862 (TRBV19, TRBJ1-2)
CASSVPGQDGYTF

SEQ ID NO: 187725 - protein, 13 aa, Homo sapiens
  CDR3 for alpha chain variable domain of TCR clone 93863 (TRAV25, TRAJ26)
CAGMDNYGQNFVF

SEQ ID NO: 187726 - protein, 15 aa, Homo sapiens
  CDR3 for beta chain variable domain of TCR clone 93863 (TRBV10-3, TRBJ2-1)
CAIRIGTSGHNEQFF

SEQ ID NO: 187727 - protein, 14 aa, Homo sapiens
  CDR3 for alpha chain variable domain of TCR clone 93864 (TRAV1-2, TRAJ29)
CAVRELTSATPLVF

SEQ ID NO: 187728 - protein, 13 aa, Homo sapiens
  CDR3 for beta chain variable domain of TCR clone 93864 (TRBV2, TRBJ1-1)
CARNPTGGFHAFF

SEQ ID NO: 187729 - protein, 13 aa, Homo sapiens
  CDR3 for alpha chain variable domain of TCR clone 93865 (TRAV27, TRAJ29)
CAGAPSGNTPLVF

SEQ ID NO: 187730 - protein, 14 aa, Homo sapiens
  CDR3 for beta chain variable domain of TCR clone 93865 (TRBV7-9, TRBJ2-7)
CASSIGQGAGEQYF

SEQ ID NO: 187731 - protein, 15 aa, Homo sapiens
  CDR3 for alpha chain variable domain of TCR clone 93866 (TRAV12-1, TRAJ45)
CVVLSGGGGADGLTF

SEQ ID NO: 187732 - protein, 16 aa, Homo sapiens
  CDR3 for beta chain variable domain of TCR clone 93866 (TRBV12-4, TRBJ1-5)
CASSRPVGGSNQPQHF

SEQ ID NO: 187733 - protein, 15 aa, Homo sapiens
  CDR3 for alpha chain variable domain of TCR clone 93867 (TRAV12-3, TRAJ6)
CAMSATTGGSYIPTF

SEQ ID NO: 187734 - protein, 16 aa, Homo sapiens
  CDR3 for beta chain variable domain of TCR clone 93867 (TRBV20-1, TRBJ1-2)
CSASMGQGVAGYGYTF

SEQ ID NO: 187735 - protein, 14 aa, Homo sapiens
  CDR3 for alpha chain variable domain of TCR clone 93868 (TRAV16, TRAJ33)
CALSAMDSNYQLIW

SEQ ID NO: 187736 - protein, 15 aa, Homo sapiens
  CDR3 for beta chain variable domain of TCR clone 93868 (TRBV7-3, TRBJ2-1)
CASSPTGGGEVEQFF

SEQ ID NO: 187737 - protein, 14 aa, Homo sapiens
  CDR3 for alpha chain variable domain of TCR clone 93869 (TRAV35, TRAJ42)
CAGRYGGSQGNIIF

SEQ ID NO: 187738 - protein, 15 aa, Homo sapiens
  CDR3 for beta chain variable domain of TCR clone 93869 (TRBV7-9, TRBJ2-1)
CASSLGWGRANEQFF

SEQ ID NO: 187739 - protein, 12 aa, Homo sapiens
  CDR3 for alpha chain variable domain of TCR clone 93870 (TRAV13-1, TRAJ49)
CAASIRSNQFYF

SEQ ID NO: 187740 - protein, 14 aa, Homo sapiens
  CDR3 for beta chain variable domain of TCR clone 93870 (TRBV7-2, TRBJ2-1)
CASSPGQAGNEQFF

SEQ ID NO: 187741 - protein, 14 aa, Homo sapiens
  CDR3 for alpha chain variable domain of TCR clone 93871 (TRAV13-2, TRAJ47)
CAESSMEYGNKLVF

SEQ ID NO: 187742 - protein, 13 aa, Homo sapiens
  CDR3 for beta chain variable domain of TCR clone 93871 (TRBV4-1, TRBJ2-2)
CASSQENTGELFF

SEQ ID NO: 187743 - protein, 13 aa, Homo sapiens
  CDR3 for alpha chain variable domain of TCR clone 93872 (TRAV1-1, TRAJ31)
CASYLNNNARLMF

SEQ ID NO: 187744 - protein, 13 aa, Homo sapiens
  CDR3 for beta chain variable domain of TCR clone 93872 (TRBV15, TRBJ1-6)
CATSGGVNSPLHF

SEQ ID NO: 187745 - protein, 16 aa, Homo sapiens
  CDR3 for alpha chain variable domain of TCR clone 93873 (TRAV12-3, TRAJ53)
CAMSPGSGGSNYKLTF

SEQ ID NO: 187746 - protein, 17 aa, Homo sapiens
  CDR3 for beta chain variable domain of TCR clone 93873 (TRBV19, TRBJ2-7)
CASSISFYDSYPYEQYF

SEQ ID NO: 187747 - protein, 17 aa, Homo sapiens
  CDR3 for alpha chain variable domain of TCR clone 93874 (TRAV13-1, TRAJ52)
CAASSGAGGTSYGKLTF

SEQ ID NO: 187748 - protein, 16 aa, Homo sapiens
  CDR3 for beta chain variable domain of TCR clone 93874 (TRBV20-1, TRBJ1-2)
CSASMGQGVANYGYTF

SEQ ID NO: 187749 - protein, 13 aa, Homo sapiens
  CDR3 for alpha chain variable domain of TCR clone 93875 (TRAV23/DV6, TRAJ41)
CAAIGDSGYALNF

SEQ ID NO: 187750 - protein, 14 aa, Homo sapiens
  CDR3 for beta chain variable domain of TCR clone 93875 (TRBV27, TRBJ1-2)
CASRTTGANYGYTF

SEQ ID NO: 187751 - protein, 13 aa, Homo sapiens
  CDR3 for alpha chain variable domain of TCR clone 93876 (TRAV3, TRAJ21)
CAVREPDFNKFYF

SEQ ID NO: 187752 - protein, 12 aa, Homo sapiens
  CDR3 for beta chain variable domain of TCR clone 93876 (TRBV6-1, TRBJ2-7)
CASSDYSYEQYF

SEQ ID NO: 187753 - protein, 14 aa, Homo sapiens
  CDR3 for alpha chain variable domain of TCR clone 93877 (TRAV4, TRAJ9)
CLVGSGTGGFKTIF

SEQ ID NO: 187754 - protein, 18 aa, Homo sapiens
  CDR3 for beta chain variable domain of TCR clone 93877 (TRBV7-9, TRBJ2-7)
CASSLTTSGSRTWYEQYF

SEQ ID NO: 187755 - protein, 14 aa, Homo sapiens
  CDR3 for alpha chain variable domain of TCR clone 93878 (TRAV13-1, TRAJ35)
CAASKGGFWNVLHC

SEQ ID NO: 187756 - protein, 13 aa, Homo sapiens
  CDR3 for beta chain variable domain of TCR clone 93878 (TRBV7-3, TRBJ1-1)
CASSQDWGAEAFF

SEQ ID NO: 187757 - protein, 15 aa, Homo sapiens
  CDR3 for alpha chain variable domain of TCR clone 93879 (TRAV26-1, TRAJ44)
CIVRANTGTASKLTF

SEQ ID NO: 187758 - protein, 16 aa, Homo sapiens
  CDR3 for beta chain variable domain of TCR clone 93879 (TRBV7-7, TRBJ2-1)
CASSLASGTSYNQQFF

SEQ ID NO: 187759 - protein, 15 aa, Homo sapiens
  CDR3 for alpha chain variable domain of TCR clone 93880 (TRAV3, TRAJ9)
CAVRARNTGGFKTIF

SEQ ID NO: 187760 - protein, 13 aa, Homo sapiens
  CDR3 for beta chain variable domain of TCR clone 93880 (TRBV7-3, TRBJ1-1)
CASSQDWGAEAFF

SEQ ID NO: 187761 - protein, 15 aa, Homo sapiens
  CDR3 for alpha chain variable domain of TCR clone 93881 (TRAV17, TRAJ37)
CATDGGSSNKGKLIF

SEQ ID NO: 187762 - protein, 15 aa, Homo sapiens
  CDR3 for beta chain variable domain of TCR clone 93881 (TRBV28, TRBJ2-5)
CASSSGRTIQETQYF

SEQ ID NO: 187763 - protein, 14 aa, Homo sapiens
  CDR3 for alpha chain variable domain of TCR clone 93882 (TRAV17, TRAJ22)
CATSPSGSARQLTF

SEQ ID NO: 187764 - protein, 20 aa, Homo sapiens
  CDR3 for beta chain variable domain of TCR clone 93882 (TRBV7-8, TRBJ2-2)
CASSHLFPGPTIHITGELSF

SEQ ID NO: 187765 - protein, 15 aa, Homo sapiens
  CDR3 for alpha chain variable domain of TCR clone 93883 (TRAV3, TRAJ20)
CAVRNIKLSDYKLSF

SEQ ID NO: 187766 - protein, 15 aa, Homo sapiens
  CDR3 for beta chain variable domain of TCR clone 93883 (TRBV7-9, TRBJ1-6)
CASSSPGRGNSPLHF

SEQ ID NO: 187767 - protein, 13 aa, Homo sapiens
  CDR3 for alpha chain variable domain of TCR clone 93884 (TRAV23/DV6, TRAJ16)
CAASISDSQKLLF

SEQ ID NO: 187768 - protein, 15 aa, Homo sapiens
  CDR3 for beta chain variable domain of TCR clone 93884 (TRBV2, TRBJ2-2)
CASSRETVGTGELFF

SEQ ID NO: 187769 - protein, 10 aa, Homo sapiens
  CDR3 for alpha chain variable domain of TCR clone 93885 (TRAV26-1, TRAJ40)
CIAGTYKYIF

SEQ ID NO: 187770 - protein, 17 aa, Homo sapiens
  CDR3 for beta chain variable domain of TCR clone 93885 (TRBV13, TRBJ2-3)
CASSLSRVAGGRNTQYF

SEQ ID NO: 187771 - protein, 14 aa, Homo sapiens
  CDR3 for alpha chain variable domain of TCR clone 93886 (TRAV1-2, TRAJ8)
CAVREDTGFQKLVF

SEQ ID NO: 187772 - protein, 13 aa, Homo sapiens
  CDR3 for beta chain variable domain of TCR clone 93886 (TRBV27, TRBJ2-7)
CASSFSQGYEQYF

SEQ ID NO: 187773 - protein, 17 aa, Homo sapiens
  CDR3 for alpha chain variable domain of TCR clone 93887 (TRAV1-1, TRAJ32)
CAVRVDELCWCYKQAHL

SEQ ID NO: 187774 - protein, 12 aa, Homo sapiens
  CDR3 for beta chain variable domain of TCR clone 93887 (TRBV7-8, TRBJ2-1)
CASSLGHNEQFF

SEQ ID NO: 187775 - protein, 17 aa, Homo sapiens
  CDR3 for alpha chain variable domain of TCR clone 93888 (TRAV3, TRAJ6)
CAVRDGPRAGGSHIPTF

SEQ ID NO: 187776 - protein, 13 aa, Homo sapiens
  CDR3 for beta chain variable domain of TCR clone 93888 (TRBV20-1, TRBJ1-1)
CSARGGGNTEAFF

SEQ ID NO: 187777 - protein, 13 aa, Homo sapiens
  CDR3 for alpha chain variable domain of TCR clone 93889 (TRAV26-1, TRAJ48)
CIVRVVGDEKLTF

SEQ ID NO: 187778 - protein, 19 aa, Homo sapiens
  CDR3 for beta chain variable domain of TCR clone 93889 (TRBV11-3, TRBJ2-2)
CASSTHPGAKTTNTGELFF

SEQ ID NO: 187779 - protein, 15 aa, Homo sapiens
  CDR3 for alpha chain variable domain of TCR clone 93890 (TRAV3, TRAJ22)
CAVRDRGGSARQLTF

SEQ ID NO: 187780 - protein, 16 aa, Homo sapiens
  CDR3 for beta chain variable domain of TCR clone 93890 (TRBV5-4, TRBJ2-3)
CTSQQPGAGGADTQYF

SEQ ID NO: 187781 - protein, 15 aa, Homo sapiens
  CDR3 for alpha chain variable domain of TCR clone 93891 (TRAV12-1, TRAJ44)
CVADLPTGTASKLTF

SEQ ID NO: 187782 - protein, 13 aa, Homo sapiens
  CDR3 for beta chain variable domain of TCR clone 93891 (TRBV6-5, TRBJ2-5)
CAISPQGGETQYF

SEQ ID NO: 187783 - protein, 16 aa, Homo sapiens
  CDR3 for alpha chain variable domain of TCR clone 93892 (TRAV26-1, TRAJ32)
CIVRTNYGGATNKLIF

SEQ ID NO: 187784 - protein, 14 aa, Homo sapiens
  CDR3 for beta chain variable domain of TCR clone 93892 (TRBV27, TRBJ1-1)
CAGSLLSGLSEAFF

SEQ ID NO: 187785 - protein, 13 aa, Homo sapiens
  CDR3 for alpha chain variable domain of TCR clone 93893 (TRAV21, TRAJ27)
CAARPGNAGKSTF

SEQ ID NO: 187786 - protein, 12 aa, Homo sapiens
  CDR3 for beta chain variable domain of TCR clone 93893 (TRBV5-1, TRBJ1-2)
CASSQDTYGYTF

SEQ ID NO: 187787 - protein, 15 aa, Homo sapiens
  CDR3 for alpha chain variable domain of TCR clone 93894 (TRAV12-2, TRAJ53)
CAVNGGGGSNYKLTF

SEQ ID NO: 187788 - protein, 14 aa, Homo sapiens
  CDR3 for beta chain variable domain of TCR clone 93894 (TRBV19, TRBJ2-5)
CASSMTGQQETQYF

SEQ ID NO: 187789 - protein, 13 aa, Homo sapiens
  CDR3 for alpha chain variable domain of TCR clone 93895 (TRAV27, TRAJ8)
CAGGPTGFQKLVF

SEQ ID NO: 187790 - protein, 16 aa, Homo sapiens
  CDR3 for beta chain variable domain of TCR clone 93895 (TRBV24-1, TRBJ2-3)
CATSDPGTGATDTQYF

SEQ ID NO: 187791 - protein, 17 aa, Homo sapiens
  CDR3 for alpha chain variable domain of TCR clone 93896 (TRAV27, TRAJ18)
CAGLHRGRGSTLGRLYF

SEQ ID NO: 187792 - protein, 17 aa, Homo sapiens
  CDR3 for beta chain variable domain of TCR clone 93896 (TRBV13, TRBJ2-3)
CASSLSRVAGGRNTQYF

SEQ ID NO: 187793 - protein, 14 aa, Homo sapiens
  CDR3 for alpha chain variable domain of TCR clone 93897 (TRAV13-1, TRAJ44)
CAAKATGTASKLAF

SEQ ID NO: 187794 - protein, 17 aa, Homo sapiens
  CDR3 for beta chain variable domain of TCR clone 93897 (TRBV7-3, TRBJ2-3)
CASSLMKGMRGADTQYF

SEQ ID NO: 187795 - protein, 16 aa, Homo sapiens
  CDR3 for alpha chain variable domain of TCR clone 93898 (TRAV3, TRAJ5)
CAVRNLIDTGRRALTF

SEQ ID NO: 187796 - protein, 16 aa, Homo sapiens
  CDR3 for beta chain variable domain of TCR clone 93898 (TRBV4-2, TRBJ2-7)
CASSQEGLANSYEQYF

SEQ ID NO: 187797 - protein, 13 aa, Homo sapiens
  CDR3 for alpha chain variable domain of TCR clone 93899 (TRAV26-1, TRAJ33)
CIVRVEGNYQLTW

SEQ ID NO: 187798 - protein, 13 aa, Homo sapiens
  CDR3 for beta chain variable domain of TCR clone 93899 (TRBV6-3, TRBJ2-7)
CASTWGSSYEQYF

SEQ ID NO: 187799 - protein, 14 aa, Homo sapiens
  CDR3 for alpha chain variable domain of TCR clone 93900 (TRAV12-1, TRAJ9)
CVVTGYTGGFNTIF

SEQ ID NO: 187800 - protein, 13 aa, Homo sapiens
  CDR3 for beta chain variable domain of TCR clone 93900 (TRBV20-1, TRBJ1-1)
CSARAGGNTEAFF

SEQ ID NO: 187801 - protein, 16 aa, Homo sapiens
  CDR3 for alpha chain variable domain of TCR clone 93901 (TRAV3, TRAJ18)
CAVRDGRCSTLGRLYF

SEQ ID NO: 187802 - protein, 15 aa, Homo sapiens
  CDR3 for beta chain variable domain of TCR clone 93901 (TRBV7-9, TRBJ1-6)
CASSSPGRGNSPLHF

SEQ ID NO: 187803 - protein, 14 aa, Homo sapiens
  CDR3 for alpha chain variable domain of TCR clone 93902 (TRAV1-2, TRAJ16)
CAARGFSDGQKLLF

SEQ ID NO: 187804 - protein, 16 aa, Homo sapiens
  CDR3 for beta chain variable domain of TCR clone 93902 (TRBV20-1, TRBJ2-1)
CSARDHLAGGRGEQFF

SEQ ID NO: 187805 - protein, 11 aa, Homo sapiens
  CDR3 for alpha chain variable domain of TCR clone 93903 (TRAV3, TRAJ21)
CAVGNFNKFHF

SEQ ID NO: 187806 - protein, 14 aa, Homo sapiens
  CDR3 for beta chain variable domain of TCR clone 93903 (TRBV20-1, TRBJ2-2)
CSAPDTANTGELFF

SEQ ID NO: 187807 - protein, 13 aa, Homo sapiens
  CDR3 for alpha chain variable domain of TCR clone 93904 (TRAV17, TRAJ9)
CATGSTGGFKTIF

SEQ ID NO: 187808 - protein, 14 aa, Homo sapiens
  CDR3 for beta chain variable domain of TCR clone 93904 (TRBV7-8, TRBJ2-7)
CASTFRRGPNEQYF

SEQ ID NO: 187809 - protein, 11 aa, Homo sapiens
  CDR3 for alpha chain variable domain of TCR clone 93905 (TRAV35, TRAJ30)
CAPGGDDKIIF

SEQ ID NO: 187810 - protein, 14 aa, Homo sapiens
  CDR3 for beta chain variable domain of TCR clone 93905 (TRBV7-6, TRBJ2-1)
CASSLGGGADEQFL

SEQ ID NO: 187811 - protein, 13 aa, Homo sapiens
  CDR3 for alpha chain variable domain of TCR clone 93906 (TRAV23/DV6, TRAJ48)
CAEMDFGNEKLTF

SEQ ID NO: 187812 - protein, 15 aa, Homo sapiens
  CDR3 for beta chain variable domain of TCR clone 93906 (TRBV7-9, TRBJ1-6)
CASSSPGRGNSPLHF

SEQ ID NO: 187813 - protein, 15 aa, Homo sapiens
  CDR3 for alpha chain variable domain of TCR clone 93907 (TRAV35, TRAJ58)
CAGRRQETSGSRLTF

SEQ ID NO: 187814 - protein, 16 aa, Homo sapiens
  CDR3 for beta chain variable domain of TCR clone 93907 (TRBV12-4, TRBJ1-5)
CASSRPVGGSNQPQHF

SEQ ID NO: 187815 - protein, 11 aa, Homo sapiens
  CDR3 for alpha chain variable domain of TCR clone 93908 (TRAV2, TRAJ13)
CASGGYQKVIF

SEQ ID NO: 187816 - protein, 16 aa, Homo sapiens
  CDR3 for beta chain variable domain of TCR clone 93908 (TRBV6-1, TRBJ2-5)
CASSETLDRGAETQYF

SEQ ID NO: 187817 - protein, 16 aa, Homo sapiens
  CDR3 for alpha chain variable domain of TCR clone 93909 (TRAV3, TRAJ5)
CAVRNLMDTGRRAPTF

SEQ ID NO: 187818 - protein, 16 aa, Homo sapiens
  CDR3 for beta chain variable domain of TCR clone 93909 (TRBV12-5, TRBJ2-5)
CASGPRTSGNQETQYF

SEQ ID NO: 187819 - protein, 13 aa, Homo sapiens
  CDR3 for alpha chain variable domain of TCR clone 93910 (TRAV12-3, TRAJ9)
CAMRNTGGFKTIF

SEQ ID NO: 187820 - protein, 13 aa, Homo sapiens
  CDR3 for beta chain variable domain of TCR clone 93910 (TRBV7-8, TRBJ2-3)
CASSRTATDTQYF

SEQ ID NO: 187821 - protein, 12 aa, Homo sapiens
  CDR3 for alpha chain variable domain of TCR clone 93911 (TRAV8-3, TRAJ26)
CAGDNYGQNFVF

SEQ ID NO: 187822 - protein, 16 aa, Homo sapiens
  CDR3 for beta chain variable domain of TCR clone 93911 (TRBV24-1, TRBJ2-3)
CATSEAREGRGDTQYF

SEQ ID NO: 187823 - protein, 14 aa, Homo sapiens
  CDR3 for alpha chain variable domain of TCR clone 93912 (TRAV12-2, TRAJ13)
CAVKKTGGYQKVTF

SEQ ID NO: 187824 - protein, 13 aa, Homo sapiens
  CDR3 for beta chain variable domain of TCR clone 93912 (TRBV2, TRBJ1-4)
CASSERAGEKLFF

SEQ ID NO: 187825 - protein, 16 aa, Homo sapiens
  CDR3 for alpha chain variable domain of TCR clone 93913 (TRAV12-1, TRAJ48)
CVVNMVANFGNEKLTF

SEQ ID NO: 187826 - protein, 18 aa, Homo sapiens
  CDR3 for beta chain variable domain of TCR clone 93913 (TRBV11-2, TRBJ2-6)
CASSLNPFLGTGANVLTF

SEQ ID NO: 187827 - protein, 16 aa, Homo sapiens
  CDR3 for alpha chain variable domain of TCR clone 93914 (TRAV23/DV6, TRAJ52)
CAARPSGGTSSGKLTF

SEQ ID NO: 187828 - protein, 13 aa, Homo sapiens
  CDR3 for beta chain variable domain of TCR clone 93914 (TRBV7-9, TRBJ1-1)
CASSLSGETEAFF

SEQ ID NO: 187829 - protein, 15 aa, Homo sapiens
  CDR3 for alpha chain variable domain of TCR clone 93915 (TRAV20, TRAJ37)
CAVQARSSNTGKLIF

SEQ ID NO: 187830 - protein, 16 aa, Homo sapiens
  CDR3 for beta chain variable domain of TCR clone 93915 (TRBV13, TRBJ2-2)
CASSPRTGEHTGELFF

SEQ ID NO: 187831 - protein, 14 aa, Homo sapiens
  CDR3 for alpha chain variable domain of TCR clone 93916 (TRAV8-3, TRAJ13)
CAVGGTFGYQKVTF

SEQ ID NO: 187832 - protein, 17 aa, Homo sapiens
  CDR3 for beta chain variable domain of TCR clone 93916 (TRBV7-9, TRBJ2-1)
CASSAGTVGRSYNEQFF

SEQ ID NO: 187833 - protein, 15 aa, Homo sapiens
  CDR3 for alpha chain variable domain of TCR clone 93917 (TRAV2, TRAJ15)
CAVEDREQAGTALIF

SEQ ID NO: 187834 - protein, 13 aa, Homo sapiens
  CDR3 for beta chain variable domain of TCR clone 93917 (TRBV10-2, TRBJ2-3)
CASSESGDNTQYF

SEQ ID NO: 187835 - protein, 14 aa, Homo sapiens
  CDR3 for alpha chain variable domain of TCR clone 93918 (TRAV8-1, TRAJ5)
CAVRPDTGRRALTF

SEQ ID NO: 187836 - protein, 14 aa, Homo sapiens
  CDR3 for beta chain variable domain of TCR clone 93918 (TRBV7-8, TRBJ2-3)
CASSFPDGQDTQYF

SEQ ID NO: 187837 - protein, 12 aa, Homo sapiens
  CDR3 for alpha chain variable domain of TCR clone 93919 (TRAV13-1, TRAJ54)
CAASGGAQKLVF

SEQ ID NO: 187838 - protein, 15 aa, Homo sapiens
  CDR3 for beta chain variable domain of TCR clone 93919 (TRBV9, TRBJ1-6)
CASSVAGTGDSPLHF

SEQ ID NO: 187839 - protein, 14 aa, Homo sapiens
  CDR3 for alpha chain variable domain of TCR clone 93920 (TRAV6, TRAJ8)
CALERGTGFQKLGF

SEQ ID NO: 187840 - protein, 15 aa, Homo sapiens
  CDR3 for beta chain variable domain of TCR clone 93920 (TRBV7-9, TRBJ2-7)
CASSLALAEAYEQYF

SEQ ID NO: 187841 - protein, 12 aa, Homo sapiens
  CDR3 for alpha chain variable domain of TCR clone 93921 (TRAV1-2, TRAJ29)
CAVPSGNTPLVF

SEQ ID NO: 187842 - protein, 15 aa, Homo sapiens
  CDR3 for beta chain variable domain of TCR clone 93921 (TRBV19, TRBJ2-4)
CASRGPRRGENIQYF

SEQ ID NO: 187843 - protein, 15 aa, Homo sapiens
  CDR3 for alpha chain variable domain of TCR clone 93922 (TRAV3, TRAJ5)
CGVRDLDTGRRALTF

SEQ ID NO: 187844 - protein, 13 aa, Homo sapiens
  CDR3 for beta chain variable domain of TCR clone 93922 (TRBV12-4, TRBJ2-7)
CASSPTETYEQYF

SEQ ID NO: 187845 - protein, 12 aa, Homo sapiens
  CDR3 for alpha chain variable domain of TCR clone 93923 (TRAV2, TRAJ9)
CAVGAGGFKTIF

SEQ ID NO: 187846 - protein, 16 aa, Homo sapiens
  CDR3 for beta chain variable domain of TCR clone 93923 (TRBV13, TRBJ2-2)
CASSPRTGEHTGEPFL

SEQ ID NO: 187847 - protein, 11 aa, Homo sapiens
  CDR3 for alpha chain variable domain of TCR clone 93924 (TRAV2, TRAJ33)
CAVESNYQLIW

SEQ ID NO: 187848 - protein, 15 aa, Homo sapiens
  CDR3 for beta chain variable domain of TCR clone 93924 (TRBV19, TRBJ1-1)
CASTSGQIQNTEAFF

SEQ ID NO: 187849 - protein, 13 aa, Homo sapiens
  CDR3 for alpha chain variable domain of TCR clone 93925 (TRAV3, TRAJ27)
CAVRPLGAGTSTV

SEQ ID NO: 187850 - protein, 13 aa, Homo sapiens
  CDR3 for beta chain variable domain of TCR clone 93925 (TRBV7-9, TRBJ2-3)
CASSPGSTDTQYF

SEQ ID NO: 187851 - protein, 16 aa, Homo sapiens
  CDR3 for alpha chain variable domain of TCR clone 93926 (TRAV2, TRAJ13)
CAARILGVTRKLPLEL

SEQ ID NO: 187852 - protein, 15 aa, Homo sapiens
  CDR3 for beta chain variable domain of TCR clone 93926 (TRBV7-3, TRBJ2-1)
CASSLDGNSYNEQFF

SEQ ID NO: 187853 - protein, 14 aa, Homo sapiens
  CDR3 for alpha chain variable domain of TCR clone 93927 (TRAV35, TRAJ33)
CAGSSQDSNYQLIW

SEQ ID NO: 187854 - protein, 17 aa, Homo sapiens
  CDR3 for beta chain variable domain of TCR clone 93927 (TRBV28, TRBJ2-1)
CASSLFTSGSGHNEQFF

SEQ ID NO: 187855 - protein, 15 aa, Homo sapiens
  CDR3 for alpha chain variable domain of TCR clone 93928 (TRAV17, TRAJ57)
CATGPSQGGSEKLVY

SEQ ID NO: 187856 - protein, 16 aa, Homo sapiens
  CDR3 for beta chain variable domain of TCR clone 93928 (TRBV12-4, TRBJ1-5)
CASSRPVGGSNQPQHF

SEQ ID NO: 187857 - protein, 11 aa, Homo sapiens
  CDR3 for alpha chain variable domain of TCR clone 93929 (TRAV12-3, TRAJ49)
CAANTGNQFYF

SEQ ID NO: 187858 - protein, 11 aa, Homo sapiens
  CDR3 for beta chain variable domain of TCR clone 93929 (TRBV29-1, TRBJ2-5)
CSEDRTGTQYF

SEQ ID NO: 187859 - protein, 15 aa, Homo sapiens
  CDR3 for alpha chain variable domain of TCR clone 93930 (TRAV21, TRAJ22)
CAVRLFSWFCKATDL

SEQ ID NO: 187860 - protein, 14 aa, Homo sapiens
  CDR3 for beta chain variable domain of TCR clone 93930 (TRBV19, TRBJ1-5)
CASRAPDSFLSQHF

SEQ ID NO: 187861 - protein, 16 aa, Homo sapiens
  CDR3 for alpha chain variable domain of TCR clone 93931 (TRAV30, TRAJ24)
GGTEIVDADSWGKFQF

SEQ ID NO: 187862 - protein, 15 aa, Homo sapiens
  CDR3 for beta chain variable domain of TCR clone 93931 (TRBV7-9, TRBJ1-4)
CASSARTGGNEKLFF

SEQ ID NO: 187863 - protein, 13 aa, Homo sapiens
  CDR3 for alpha chain variable domain of TCR clone 93932 (TRAV17, TRAJ34)
CATVYYNTDKLIF

SEQ ID NO: 187864 - protein, 13 aa, Homo sapiens
  CDR3 for beta chain variable domain of TCR clone 93932 (TRBV4-2, TRBJ1-1)
CASSQAGNTEAFF

SEQ ID NO: 187865 - protein, 16 aa, Homo sapiens
  CDR3 for alpha chain variable domain of TCR clone 93933 (TRAV4, TRAJ22)
CLVGDLYSGSARQLTF

SEQ ID NO: 187866 - protein, 16 aa, Homo sapiens
  CDR3 for beta chain variable domain of TCR clone 93933 (TRBV7-9, TRBJ2-3)
CASSPWREVGTDTQYC

SEQ ID NO: 187867 - protein, 10 aa, Homo sapiens
  CDR3 for alpha chain variable domain of TCR clone 93934 (TRAV36/DV7, TRAJ38)
CAANNRKLIW

SEQ ID NO: 187868 - protein, 15 aa, Homo sapiens
  CDR3 for beta chain variable domain of TCR clone 93934 (TRBV20-1, TRBJ2-7)
CSARNRVSGMDEQYF

SEQ ID NO: 187869 - protein, 11 aa, Homo sapiens
  CDR3 for alpha chain variable domain of TCR clone 93935 (TRAV3, TRAJ21)
CAVGNFNKFYF

SEQ ID NO: 187870 - protein, 15 aa, Homo sapiens
  CDR3 for beta chain variable domain of TCR clone 93935 (TRBV18, TRBJ1-5)
CASSPSDRSNQPQHF

SEQ ID NO: 187871 - protein, 14 aa, Homo sapiens
  CDR3 for alpha chain variable domain of TCR clone 93936 (TRAV23/DV6, TRAJ11)
CAASLESGYSTLTF

SEQ ID NO: 187872 - protein, 13 aa, Homo sapiens
  CDR3 for beta chain variable domain of TCR clone 93936 (TRBV4-1, TRBJ2-5)
CASSLPRGETQYF

SEQ ID NO: 187873 - protein, 11 aa, Homo sapiens
  CDR3 for alpha chain variable domain of TCR clone 93937 (TRAV1-1, TRAJ23)
CAVRQGGKLIF

SEQ ID NO: 187874 - protein, 13 aa, Homo sapiens
  CDR3 for beta chain variable domain of TCR clone 93937 (TRBV11-2, TRBJ2-5)
CASSSTGEETQYF

SEQ ID NO: 187875 - protein, 13 aa, Homo sapiens
  CDR3 for alpha chain variable domain of TCR clone 93938 (TRAV3, TRAJ21)
CAVREPDFNKFYF

SEQ ID NO: 187876 - protein, 20 aa, Homo sapiens
  CDR3 for beta chain variable domain of TCR clone 93938 (TRBV28, TRBJ2-1)
CASTPIGRSPGLAGGNEQFF

SEQ ID NO: 187877 - protein, 17 aa, Homo sapiens
  CDR3 for alpha chain variable domain of TCR clone 93939 (TRAV13-1, TRAJ28)
CAASPPHSGAGSYQLTF

SEQ ID NO: 187878 - protein, 13 aa, Homo sapiens
  CDR3 for beta chain variable domain of TCR clone 93939 (TRBV12-4, TRBJ2-7)
CASSPTETYEQYF

SEQ ID NO: 187879 - protein, 16 aa, Homo sapiens
  CDR3 for alpha chain variable domain of TCR clone 93940 (TRAV30, TRAJ24)
CGTEIVDADSWGKFQF

SEQ ID NO: 187880 - protein, 15 aa, Homo sapiens
  CDR3 for beta chain variable domain of TCR clone 93940 (TRBV12-4, TRBJ2-2)
SASSPNDSGTGELFF

SEQ ID NO: 187881 - protein, 15 aa, Homo sapiens
  CDR3 for alpha chain variable domain of TCR clone 93941 (TRAV12-2, TRAJ53)
CAVNGGGGSNYKLTF

SEQ ID NO: 187882 - protein, 13 aa, Homo sapiens
  CDR3 for beta chain variable domain of TCR clone 93941 (TRBV3-1, TRBJ1-1)
CASSMGVITEAFF

SEQ ID NO: 187883 - protein, 13 aa, Homo sapiens
  CDR3 for alpha chain variable domain of TCR clone 93942 (TRAV2, TRAJ15)
RAVASQAGTALIF

SEQ ID NO: 187884 - protein, 15 aa, Homo sapiens
  CDR3 for beta chain variable domain of TCR clone 93942 (TRBV5-1, TRBJ2-2)
CASSLRQGDTGELFF

SEQ ID NO: 187885 - protein, 13 aa, Homo sapiens
  CDR3 for alpha chain variable domain of TCR clone 93943 (TRAV12-1, TRAJ29)
CVADTSGNTPLVF

SEQ ID NO: 187886 - protein, 14 aa, Homo sapiens
  CDR3 for beta chain variable domain of TCR clone 93943 (TRBV12-4, TRBJ2-3)
CASSLVPSTDTQYF

SEQ ID NO: 187887 - protein, 14 aa, Homo sapiens
  CDR3 for alpha chain variable domain of TCR clone 93944 (TRAV38-1, TRAJ45)
CASHSGGGADGLTF

SEQ ID NO: 187888 - protein, 13 aa, Homo sapiens
  CDR3 for beta chain variable domain of TCR clone 93944 (TRBV10-3, TRBJ1-2)
CAISERDSYDYTF

SEQ ID NO: 187889 - protein, 11 aa, Homo sapiens
  CDR3 for alpha chain variable domain of TCR clone 93945 (TRAV16, TRAJ49)
CSLNTGNQFYF

SEQ ID NO: 187890 - protein, 12 aa, Homo sapiens
  CDR3 for beta chain variable domain of TCR clone 93945 (TRBV7-9, TRBJ1-4)
CASSTDREKLSF

SEQ ID NO: 187891 - protein, 11 aa, Homo sapiens
  CDR3 for alpha chain variable domain of TCR clone 93946 (TRAV1-2, TRAJ20)
CAVSNDYKLSF

SEQ ID NO: 187892 - protein, 16 aa, Homo sapiens
  CDR3 for beta chain variable domain of TCR clone 93946 (TRBV29-1, TRBJ2-6)
CSVEDIAYSGANVLTF

SEQ ID NO: 187893 - protein, 14 aa, Homo sapiens
  CDR3 for alpha chain variable domain of TCR clone 93947 (TRAV8-4, TRAJ8)
CAVSLNTGFQKLGF

SEQ ID NO: 187894 - protein, 13 aa, Homo sapiens
  CDR3 for beta chain variable domain of TCR clone 93947 (TRBV7-9, TRBJ2-3)
CASSPGSTDTQYF

SEQ ID NO: 187895 - protein, 14 aa, Homo sapiens
  CDR3 for alpha chain variable domain of TCR clone 93948 (TRAV17, TRAJ54)
CATDANQGAQKLVF

SEQ ID NO: 187896 - protein, 13 aa, Homo sapiens
  CDR3 for beta chain variable domain of TCR clone 93948 (TRBV7-9, TRBJ2-3)
CASSPGSTDTQYF

SEQ ID NO: 187897 - protein, 13 aa, Homo sapiens
  CDR3 for alpha chain variable domain of TCR clone 93949 (TRAV2, TRAJ15)
CAVASQAGTALIF

SEQ ID NO: 187898 - protein, 14 aa, Homo sapiens
  CDR3 for beta chain variable domain of TCR clone 93949 (TRBV15, TRBJ2-3)
CATRSGTSTDTQYF

SEQ ID NO: 187899 - protein, 12 aa, Homo sapiens
  CDR3 for alpha chain variable domain of TCR clone 93950 (TRAV26-2, TRAJ21)
CILQGNFNKFYF

SEQ ID NO: 187900 - protein, 14 aa, Homo sapiens
  CDR3 for beta chain variable domain of TCR clone 93950 (TRBV7-9, TRBJ1-1)
CASTPLQSYTEAFF

SEQ ID NO: 187901 - protein, 15 aa, Homo sapiens
  CDR3 for alpha chain variable domain of TCR clone 93951 (TRAV35, TRAJ58)
CAGRRQETSGSRLPF

SEQ ID NO: 187902 - protein, 11 aa, Homo sapiens
  CDR3 for beta chain variable domain of TCR clone 93951 (TRBV11-2, TRBJ1-1)
CASSINTEAFF

SEQ ID NO: 187903 - protein, 13 aa, Homo sapiens
  CDR3 for alpha chain variable domain of TCR clone 93952 (TRAV27, TRAJ29)
CAGAHSGNTPLVF

SEQ ID NO: 187904 - protein, 14 aa, Homo sapiens
  CDR3 for beta chain variable domain of TCR clone 93952 (TRBV7-9, TRBJ2-7)
CASSIGQGADEQYF

SEQ ID NO: 187905 - protein, 12 aa, Homo sapiens
  CDR3 for alpha chain variable domain of TCR clone 93953 (TRAV35, TRAJ30)
CAGLNRDDKIIF

SEQ ID NO: 187906 - protein, 16 aa, Homo sapiens
  CDR3 for beta chain variable domain of TCR clone 93953 (TRBV19, TRBJ2-1)
CASSKAGPSSYNEQFF

SEQ ID NO: 187907 - protein, 21 aa, Homo sapiens
  CDR3 for alpha chain variable domain of TCR clone 93954 (TRAV1-2, TRAJ37)
CLLPLCCERFHGSGNTGKLIF

SEQ ID NO: 187908 - protein, 14 aa, Homo sapiens
  CDR3 for beta chain variable domain of TCR clone 93954 (TRBV2, TRBJ2-5)
CAGSEVLAQETQYF

SEQ ID NO: 187909 - protein, 11 aa, Homo sapiens
  CDR3 for alpha chain variable domain of TCR clone 93955 (TRAV2, TRAJ33)
CAVESNYQLIW

SEQ ID NO: 187910 - protein, 14 aa, Homo sapiens
  CDR3 for beta chain variable domain of TCR clone 93955 (TRBV7-3, TRBJ2-2)
CASSSGGYTGELFF

SEQ ID NO: 187911 - protein, 13 aa, Homo sapiens
  CDR3 for alpha chain variable domain of TCR clone 93956 (TRAV26-1, TRAJ33)
CILRVEGNYQLIW

SEQ ID NO: 187912 - protein, 16 aa, Homo sapiens
  CDR3 for beta chain variable domain of TCR clone 93956 (TRBV15, TRBJ2-7)
CATSRDRGRRRGEQYF

SEQ ID NO: 187913 - protein, 15 aa, Homo sapiens
  CDR3 for alpha chain variable domain of TCR clone 93957 (TRAV8-3, TRAJ45)
CASSYSGGGADGLTF

SEQ ID NO: 187914 - protein, 17 aa, Homo sapiens
  CDR3 for beta chain variable domain of TCR clone 93957 (TRBV7-8, TRBJ1-2)
CAISLRPLQGHLYGYTF

SEQ ID NO: 187915 - protein, 15 aa, Homo sapiens
  CDR3 for alpha chain variable domain of TCR clone 93958 (TRAV14/DV4, TRAJ12)
CAMREGRDSSYKLIF

SEQ ID NO: 187916 - protein, 16 aa, Homo sapiens
  CDR3 for beta chain variable domain of TCR clone 93958 (TRBV13, TRBJ2-2)
CASSPRTGEHTGELFF

SEQ ID NO: 187917 - protein, 14 aa, Homo sapiens
  CDR3 for alpha chain variable domain of TCR clone 93959 (TRAV1-2, TRAJ16)
CAVNRFSDGQKLLF

SEQ ID NO: 187918 - protein, 15 aa, Homo sapiens
  CDR3 for beta chain variable domain of TCR clone 93959 (TRBV7-8, TRBJ2-7)
CASSLRHFEAYEQYF

SEQ ID NO: 187919 - protein, 14 aa, Homo sapiens
  CDR3 for alpha chain variable domain of TCR clone 93960 (TRAV1-2, TRAJ16)
RAVNRFSDGQKLLF

SEQ ID NO: 187920 - protein, 16 aa, Homo sapiens
  CDR3 for beta chain variable domain of TCR clone 93960 (TRBV7-3, TRBJ2-2)
CASSLKRGTLSGELFF

SEQ ID NO: 187921 - protein, 14 aa, Homo sapiens
  CDR3 for alpha chain variable domain of TCR clone 93961 (TRAV1-2, TRAJ8)
CAVREDTGFQKLVF

SEQ ID NO: 187922 - protein, 15 aa, Homo sapiens
  CDR3 for beta chain variable domain of TCR clone 93961 (TRBV25-1, TRBJ1-4)
CASSKRIATNEKLFF

SEQ ID NO: 187923 - protein, 14 aa, Homo sapiens
  CDR3 for alpha chain variable domain of TCR clone 93962 (TRAV17, TRAJ32)
CATDLGGATNKLIF

SEQ ID NO: 187924 - protein, 14 aa, Homo sapiens
  CDR3 for beta chain variable domain of TCR clone 93962 (TRBV2, TRBJ1-5)
CASSENRGGQPQHF

SEQ ID NO: 187925 - protein, 16 aa, Homo sapiens
  CDR3 for alpha chain variable domain of TCR clone 93963 (TRAV35, TRAJ28)
CAGQKYSGAGSYQLTF

SEQ ID NO: 187926 - protein, 16 aa, Homo sapiens
  CDR3 for beta chain variable domain of TCR clone 93963 (TRBV7-3, TRBJ2-2)
CASSLKRGTLSGGLFF

SEQ ID NO: 187927 - protein, 14 aa, Homo sapiens
  CDR3 for alpha chain variable domain of TCR clone 93964 (TRAV1-2, TRAJ16)
CAVNRFSDGQKLLF

SEQ ID NO: 187928 - protein, 15 aa, Homo sapiens
  CDR3 for beta chain variable domain of TCR clone 93964 (TRBV7-9, TRBJ1-6)
CASSSPGRGNSQLHF

SEQ ID NO: 187929 - protein, 14 aa, Homo sapiens
  CDR3 for alpha chain variable domain of TCR clone 93965 (TRAV1-2, TRAJ16)
CAVNRFSDGQKLLF

SEQ ID NO: 187930 - protein, 15 aa, Homo sapiens
  CDR3 for beta chain variable domain of TCR clone 93965 (TRBV19, TRBJ2-1)
CASSIQATSYNEQFF

SEQ ID NO: 187931 - protein, 19 aa, Homo sapiens
  CDR3 for alpha chain variable domain of TCR clone 93966 (TRAV25, TRAJ20)
TATQTTDVGILPHDYKLSF

SEQ ID NO: 187932 - protein, 15 aa, Homo sapiens
  CDR3 for beta chain variable domain of TCR clone 93966 (TRBV11-3, TRBJ2-3)
CASLKDGREGDTQYF

SEQ ID NO: 187933 - protein, 14 aa, Homo sapiens
  CDR3 for alpha chain variable domain of TCR clone 93967 (TRAV8-3, TRAJ4)
CAVGASGGYNKLIF

SEQ ID NO: 187934 - protein, 11 aa, Homo sapiens
  CDR3 for beta chain variable domain of TCR clone 93967 (TRBV19, TRBJ1-1)
CASSIGSEAFF

SEQ ID NO: 187935 - protein, 15 aa, Homo sapiens
  CDR3 for alpha chain variable domain of TCR clone 93968 (TRAV8-3, TRAJ23)
CAVGDRYNQGGKLIF

SEQ ID NO: 187936 - protein, 17 aa, Homo sapiens
  CDR3 for beta chain variable domain of TCR clone 93968 (TRBV4-1, TRBJ1-4)
CASSQEGPRGVEETLFF

SEQ ID NO: 187937 - protein, 14 aa, Homo sapiens
  CDR3 for alpha chain variable domain of TCR clone 93969 (TRAV13-2, TRAJ23)
CAENIGPVGGKLIF

SEQ ID NO: 187938 - protein, 13 aa, Homo sapiens
  CDR3 for beta chain variable domain of TCR clone 93969 (TRBV19, TRBJ2-5)
CASSETAPETQYF

SEQ ID NO: 187939 - protein, 13 aa, Homo sapiens
  CDR3 for alpha chain variable domain of TCR clone 93970 (TRAV13-1, TRAJ6)
CAASKGGSYIPTF

SEQ ID NO: 187940 - protein, 12 aa, Homo sapiens
  CDR3 for beta chain variable domain of TCR clone 93970 (TRBV12-4, TRBJ1-3)
CASSFSGNTIYF

SEQ ID NO: 187941 - protein, 21 aa, Homo sapiens
  CDR3 for alpha chain variable domain of TCR clone 93971 (TRAV23/DV6, TRAJ30)
PSLETQPPTSVQQAGDDKIIF

SEQ ID NO: 187942 - protein, 17 aa, Homo sapiens
  CDR3 for beta chain variable domain of TCR clone 93971 (TRBV10-3, TRBJ1-2)
CAISETRDRGLEYGYTF

SEQ ID NO: 187943 - protein, 15 aa, Homo sapiens
  CDR3 for alpha chain variable domain of TCR clone 93972 (TRAV2, TRAJ9)
CAVEDRGTGGFKTIF

SEQ ID NO: 187944 - protein, 19 aa, Homo sapiens
  CDR3 for beta chain variable domain of TCR clone 93972 (TRBV28, TRBJ2-7)
CASSYSGTSRLGWVYEQYV

SEQ ID NO: 187945 - protein, 14 aa, Homo sapiens
  CDR3 for alpha chain variable domain of TCR clone 93973 (TRAV26-1, TRAJ38)
CIADNAGNNRKLIW

SEQ ID NO: 187946 - protein, 16 aa, Homo sapiens
  CDR3 for beta chain variable domain of TCR clone 93973 (TRBV5-7, TRBJ2-5)
CASSFGQGGYQETQYF

SEQ ID NO: 187947 - protein, 13 aa, Homo sapiens
  CDR3 for alpha chain variable domain of TCR clone 93974 (TRAV16, TRAJ9)
CALSNTGGFKTIF

SEQ ID NO: 187948 - protein, 14 aa, Homo sapiens
  CDR3 for beta chain variable domain of TCR clone 93974 (TRBV5-1, TRBJ2-1)
CASSLEGPVYEQFF

SEQ ID NO: 187949 - protein, 16 aa, Homo sapiens
  CDR3 for alpha chain variable domain of TCR clone 93975 (TRAV3, TRAJ10)
CAVRDMRAGGGNKLTF

SEQ ID NO: 187950 - protein, 16 aa, Homo sapiens
  CDR3 for beta chain variable domain of TCR clone 93975 (TRBV13, TRBJ2-2)
CASSPRTGEHTGELFF

SEQ ID NO: 187951 - protein, 13 aa, Homo sapiens
  CDR3 for alpha chain variable domain of TCR clone 93976 (TRAV2, TRAJ40)
CAVVTSGTYKYIF

SEQ ID NO: 187952 - protein, 14 aa, Homo sapiens
  CDR3 for beta chain variable domain of TCR clone 93976 (TRBV20-1, TRBJ2-2)
CSAPDTANTGELFF

SEQ ID NO: 187953 - protein, 14 aa, Homo sapiens
  CDR3 for alpha chain variable domain of TCR clone 93977 (TRAV13-1, TRAJ10)
CAAKETGGGNKLTF

SEQ ID NO: 187954 - protein, 14 aa, Homo sapiens
  CDR3 for beta chain variable domain of TCR clone 93977 (TRBV6-6, TRBJ2-7)
CASSDSGAGYEQYF

SEQ ID NO: 187955 - protein, 20 aa, Homo sapiens
  CDR3 for alpha chain variable domain of TCR clone 93978 (TRAV8-3, TRAJ45)
LSTSVLWGSYSGGGADGLTF

SEQ ID NO: 187956 - protein, 11 aa, Homo sapiens
  CDR3 for beta chain variable domain of TCR clone 93978 (TRBV20-1, TRBJ2-5)
CSADGAETQYF

SEQ ID NO: 187957 - protein, 12 aa, Homo sapiens
  CDR3 for alpha chain variable domain of TCR clone 93979 (TRAV17, TRAJ20)
CATQANNYKLSF

SEQ ID NO: 187958 - protein, 12 aa, Homo sapiens
  CDR3 for beta chain variable domain of TCR clone 93979 (TRBV6-1, TRBJ1-1)
CASNSPTAEAFF

SEQ ID NO: 187959 - protein, 13 aa, Homo sapiens
  CDR3 for alpha chain variable domain of TCR clone 93980 (TRAV21, TRAJ27)
CAALNTNAGKSTF

SEQ ID NO: 187960 - protein, 14 aa, Homo sapiens
  CDR3 for beta chain variable domain of TCR clone 93980 (TRBV27, TRBJ1-1)
CASSLLSSLSEAFF

SEQ ID NO: 187961 - protein, 20 aa, Homo sapiens
  CDR3 for alpha chain variable domain of TCR clone 93981 (TRAV1-1, TRAJ39)
CLLLLRCESSAYNAGNILTF

SEQ ID NO: 187962 - protein, 13 aa, Homo sapiens
  CDR3 for beta chain variable domain of TCR clone 93981 (TRBV12-4, TRBJ1-5)
CASSPDRAQPQHF

SEQ ID NO: 187963 - protein, 11 aa, Homo sapiens
  CDR3 for alpha chain variable domain of TCR clone 93982 (TRAV27, TRAJ20)
CAGLNDYKLSF

SEQ ID NO: 187964 - protein, 13 aa, Homo sapiens
  CDR3 for beta chain variable domain of TCR clone 93982 (TRBV6-1, TRBJ1-1)
CQTPLQMNTEAFF

SEQ ID NO: 187965 - protein, 12 aa, Homo sapiens
  CDR3 for alpha chain variable domain of TCR clone 93983 (TRAV12-2, TRAJ10)
WGVTGGGNKLTF

SEQ ID NO: 187966 - protein, 16 aa, Homo sapiens
  CDR3 for beta chain variable domain of TCR clone 93983 (TRBV11-2, TRBJ2-2)
CASSTHRGSDTGELFF

SEQ ID NO: 187967 - protein, 17 aa, Homo sapiens
  CDR3 for alpha chain variable domain of TCR clone 93984 (TRAV1-2, TRAJ8)
CAVRDPDENTGFQKLVF

SEQ ID NO: 187968 - protein, 17 aa, Homo sapiens
  CDR3 for beta chain variable domain of TCR clone 93984 (TRBV25-1, TRBJ2-7)
CASSDARVVFSSYEQYF

SEQ ID NO: 187969 - protein, 14 aa, Homo sapiens
  CDR3 for alpha chain variable domain of TCR clone 93985 (TRAV8-1, TRAJ6)
CAVTASGGSYIPTF

SEQ ID NO: 187970 - protein, 13 aa, Homo sapiens
  CDR3 for beta chain variable domain of TCR clone 93985 (TRBV20-1, TRBJ2-5)
CSAREGGKETQYF

SEQ ID NO: 187971 - protein, 15 aa, Homo sapiens
  CDR3 for alpha chain variable domain of TCR clone 93986 (TRAV38-2/DV8, TRAJ45)
CSYWDSGGGADGLTF

SEQ ID NO: 187972 - protein, 16 aa, Homo sapiens
  CDR3 for beta chain variable domain of TCR clone 93986 (TRBV19, TRBJ1-1)
CASSPTRFWPGTEAFF

SEQ ID NO: 187973 - protein, 12 aa, Homo sapiens
  CDR3 for alpha chain variable domain of TCR clone 93987 (TRAV21, TRAJ31)
CAVWGNNARLMF

SEQ ID NO: 187974 - protein, 15 aa, Homo sapiens
  CDR3 for beta chain variable domain of TCR clone 93987 (TRBV18, TRBJ1-1)
CASSPRQGENTEAFF

SEQ ID NO: 187975 - protein, 11 aa, Homo sapiens
  CDR3 for alpha chain variable domain of TCR clone 93988 (TRAV13-2, TRAJ23)
CAESPRGKLIF

SEQ ID NO: 187976 - protein, 14 aa, Homo sapiens
  CDR3 for beta chain variable domain of TCR clone 93988 (TRBV6-1, TRBJ1-3)
CASVQGGGGNTIYF

SEQ ID NO: 187977 - protein, 12 aa, Homo sapiens
  CDR3 for alpha chain variable domain of TCR clone 93989 (TRAV21, TRAJ58)
CAAETSGSRLTF

SEQ ID NO: 187978 - protein, 14 aa, Homo sapiens
  CDR3 for beta chain variable domain of TCR clone 93989 (TRBV4-1, TRBJ2-7)
CASSQGTTSYEQYF

SEQ ID NO: 187979 - protein, 14 aa, Homo sapiens
  CDR3 for alpha chain variable domain of TCR clone 93990 (TRAV8-6, TRAJ34)
CAVSDQGNTDKLIF

SEQ ID NO: 187980 - protein, 13 aa, Homo sapiens
  CDR3 for beta chain variable domain of TCR clone 93990 (TRBV7-3, TRBJ1-1)
CASSQDWGAEAFF

SEQ ID NO: 187981 - protein, 13 aa, Homo sapiens
  CDR3 for alpha chain variable domain of TCR clone 93991 (TRAV20, TRAJ21)
CAVEGYNFNKFYF

SEQ ID NO: 187982 - protein, 14 aa, Homo sapiens
  CDR3 for beta chain variable domain of TCR clone 93991 (TRBV2, TRBJ1-2)
CASRRTGSPYGYTF

SEQ ID NO: 187983 - protein, 18 aa, Homo sapiens
  CDR3 for alpha chain variable domain of TCR clone 93992 (TRAV21, TRAJ52)
CAVRPSPAGGTSYGKLTF

SEQ ID NO: 187984 - protein, 17 aa, Homo sapiens
  CDR3 for beta chain variable domain of TCR clone 93992 (TRBV13, TRBJ2-3)
CATSLSRVAGGRNTQYF

SEQ ID NO: 187985 - protein, 13 aa, Homo sapiens
  CDR3 for alpha chain variable domain of TCR clone 93993 (TRAV8-3, TRAJ48)
CAVVPFGKEKLTF

SEQ ID NO: 187986 - protein, 12 aa, Homo sapiens
  CDR3 for beta chain variable domain of TCR clone 93993 (TRBV11-2, TRBJ2-2)
CASSLGGGELFF

SEQ ID NO: 187987 - protein, 12 aa, Homo sapiens
  CDR3 for alpha chain variable domain of TCR clone 93994 (TRAV12-2, TRAJ43)
CAVNVNNNDMRF

SEQ ID NO: 187988 - protein, 12 aa, Homo sapiens
  CDR3 for beta chain variable domain of TCR clone 93994 (TRBV7-8, TRBJ2-7)
CASSLGDREQYF

SEQ ID NO: 187989 - protein, 11 aa, Homo sapiens
  CDR3 for alpha chain variable domain of TCR clone 93995 (TRAV2, TRAJ13)
CASGGYQKVTF

SEQ ID NO: 187990 - protein, 15 aa, Homo sapiens
  CDR3 for beta chain variable domain of TCR clone 93995 (TRBV7-2, TRBJ1-2)
CASSLVSGGDYGYTF

SEQ ID NO: 187991 - protein, 15 aa, Homo sapiens
  CDR3 for alpha chain variable domain of TCR clone 93996 (TRAV12-1, TRAJ41)
CVVNSRTGSGCALNF

SEQ ID NO: 187992 - protein, 11 aa, Homo sapiens
  CDR3 for beta chain variable domain of TCR clone 93996 (TRBV6-4, TRBJ2-1)
CASSDSYAQFF

SEQ ID NO: 187993 - protein, 14 aa, Homo sapiens
  CDR3 for alpha chain variable domain of TCR clone 93997 (TRAV20, TRAJ20)
CAVRRGYKDYKLSF

SEQ ID NO: 187994 - protein, 13 aa, Homo sapiens
  CDR3 for beta chain variable domain of TCR clone 93997 (TRBV19, TRBJ2-5)
CASSETAPETQYF

SEQ ID NO: 187995 - protein, 16 aa, Homo sapiens
  CDR3 for alpha chain variable domain of TCR clone 93998 (TRAV26-1, TRAJ45)
CIVEKYSGGGADGLTF

SEQ ID NO: 187996 - protein, 15 aa, Homo sapiens
  CDR3 for beta chain variable domain of TCR clone 93998 (TRBV15, TRBJ2-7)
CHQQRPTQQAYEQYF

SEQ ID NO: 187997 - protein, 14 aa, Homo sapiens
  CDR3 for alpha chain variable domain of TCR clone 93999 (TRAV1-2, TRAJ8)
CAVREDTGFEKLVF

SEQ ID NO: 187998 - protein, 15 aa, Homo sapiens
  CDR3 for beta chain variable domain of TCR clone 93999 (TRBV12-4, TRBJ2-5)
CASSPPTGLQETQYF

SEQ ID NO: 187999 - protein, 14 aa, Homo sapiens
  CDR3 for alpha chain variable domain of TCR clone 94000 (TRAV12-2, TRAJ24)
CAVTPADSWGKLQF

SEQ ID NO: 188000 - protein, 12 aa, Homo sapiens
  CDR3 for beta chain variable domain of TCR clone 94000 (TRBV3-1, TRBJ2-1)
CASSQWSSGQFF

SEQ ID NO: 188001 - protein, 13 aa, Homo sapiens
  CDR3 for alpha chain variable domain of TCR clone 94001 (TRAV13-2, TRAJ48)
CAEMDFGNEKLTF

SEQ ID NO: 188002 - protein, 11 aa, Homo sapiens
  CDR3 for beta chain variable domain of TCR clone 94001 (TRBV7-9, TRBJ2-3)
CASSGPDTQYF

SEQ ID NO: 188003 - protein, 15 aa, Homo sapiens
  CDR3 for alpha chain variable domain of TCR clone 94002 (TRAV14/DV4, TRAJ26)
CAMREGQNYGQNFVF

SEQ ID NO: 188004 - protein, 13 aa, Homo sapiens
  CDR3 for beta chain variable domain of TCR clone 94002 (TRBV7-2, TRBJ2-5)
CASSQTSVETQYF

SEQ ID NO: 188005 - protein, 14 aa, Homo sapiens
  CDR3 for alpha chain variable domain of TCR clone 94003 (TRAV12-2, TRAJ17)
CAVNIKAAGNKLTF

SEQ ID NO: 188006 - protein, 12 aa, Homo sapiens
  CDR3 for beta chain variable domain of TCR clone 94003 (TRBV28, TRBJ2-3)
CASSLYRDTQYF

SEQ ID NO: 188007 - protein, 15 aa, Homo sapiens
  CDR3 for alpha chain variable domain of TCR clone 94004 (TRAV8-6, TRAJ45)
CAVSEQGGGADGLTF

SEQ ID NO: 188008 - protein, 14 aa, Homo sapiens
  CDR3 for beta chain variable domain of TCR clone 94004 (TRBV28, TRBJ2-5)
CASRGSSFRETLYF

SEQ ID NO: 188009 - protein, 12 aa, Homo sapiens
  CDR3 for alpha chain variable domain of TCR clone 94005 (TRAV12-3, TRAJ17)
CAMTLTGNKLTF

SEQ ID NO: 188010 - protein, 16 aa, Homo sapiens
  CDR3 for beta chain variable domain of TCR clone 94005 (TRBV5-1, TRBJ2-7)
CASSWGTGGRAWEQYF

SEQ ID NO: 188011 - protein, 13 aa, Homo sapiens
  CDR3 for alpha chain variable domain of TCR clone 94006 (TRAV21, TRAJ3)
CAVTGSSASKIIF

SEQ ID NO: 188012 - protein, 14 aa, Homo sapiens
  CDR3 for beta chain variable domain of TCR clone 94006 (TRBV19, TRBJ2-1)
CASPTFVLSGEQFF

SEQ ID NO: 188013 - protein, 12 aa, Homo sapiens
  CDR3 for alpha chain variable domain of TCR clone 94007 (TRAV12-3, TRAJ17)
CAMTLTGNKLTF

SEQ ID NO: 188014 - protein, 15 aa, Homo sapiens
  CDR3 for beta chain variable domain of TCR clone 94007 (TRBV11-2, TRBJ2-2)
CASSSDRVNAGEQFF

SEQ ID NO: 188015 - protein, 14 aa, Homo sapiens
  CDR3 for alpha chain variable domain of TCR clone 94008 (TRAV17, TRAJ12)
CATDEKDSGYKLIF

SEQ ID NO: 188016 - protein, 16 aa, Homo sapiens
  CDR3 for beta chain variable domain of TCR clone 94008 (TRBV11-2, TRBJ2-1)
CASSPRLAGVYNEQFF

SEQ ID NO: 188017 - protein, 15 aa, Homo sapiens
  CDR3 for alpha chain variable domain of TCR clone 94009 (TRAV26-1, TRAJ22)
CIVRVSFWFCKATDL

SEQ ID NO: 188018 - protein, 14 aa, Homo sapiens
  CDR3 for beta chain variable domain of TCR clone 94009 (TRBV18, TRBJ2-7)
CASSPRGGACEQYF

SEQ ID NO: 188019 - protein, 14 aa, Homo sapiens
  CDR3 for alpha chain variable domain of TCR clone 94010 (TRAV2, TRAJ20)
CAVEDGTNDYKLSF

SEQ ID NO: 188020 - protein, 13 aa, Homo sapiens
  CDR3 for beta chain variable domain of TCR clone 94010 (TRBV7-2, TRBJ1-1)
CASSRNTNTEAFV

SEQ ID NO: 188021 - protein, 16 aa, Homo sapiens
  CDR3 for alpha chain variable domain of TCR clone 94011 (TRAV2, TRAJ4)
CAVEDRFSGGYNKLIF

SEQ ID NO: 188022 - protein, 13 aa, Homo sapiens
  CDR3 for beta chain variable domain of TCR clone 94011 (TRBV7-7, TRBJ2-5)
CARSRSGQETQYF

SEQ ID NO: 188023 - protein, 14 aa, Homo sapiens
  CDR3 for alpha chain variable domain of TCR clone 94012 (TRAV13-1, TRAJ35)
CAASKGGFGNVLNC

SEQ ID NO: 188024 - protein, 14 aa, Homo sapiens
  CDR3 for beta chain variable domain of TCR clone 94012 (TRBV4-1, TRBJ2-2)
CASSQAVNTGELFF

SEQ ID NO: 188025 - protein, 15 aa, Homo sapiens
  CDR3 for alpha chain variable domain of TCR clone 94013 (TRAV17, TRAJ56)
CATEPFTGANSKLTF

SEQ ID NO: 188026 - protein, 16 aa, Homo sapiens
  CDR3 for beta chain variable domain of TCR clone 94013 (TRBV28, TRBJ2-3)
CASSSFGTGGTDTQYF

SEQ ID NO: 188027 - protein, 15 aa, Homo sapiens
  CDR3 for alpha chain variable domain of TCR clone 94014 (TRAV21, TRAJ53)
CATLNSGGRNYKLTF

SEQ ID NO: 188028 - protein, 16 aa, Homo sapiens
  CDR3 for beta chain variable domain of TCR clone 94014 (TRBV29-1, TRBJ1-2)
CSVEANRDIANYGYTF

SEQ ID NO: 188029 - protein, 12 aa, Homo sapiens
  CDR3 for alpha chain variable domain of TCR clone 94015 (TRAV12-3, TRAJ17)
CAMTLTGNKLTF

SEQ ID NO: 188030 - protein, 13 aa, Homo sapiens
  CDR3 for beta chain variable domain of TCR clone 94015 (TRBV5-1, TRBJ1-5)
CASSLAQDQPQHF

SEQ ID NO: 188031 - protein, 16 aa, Homo sapiens
  CDR3 for alpha chain variable domain of TCR clone 94016 (TRAV3, TRAJ37)
CAVRPHGSGNTGKLIF

SEQ ID NO: 188032 - protein, 16 aa, Homo sapiens
  CDR3 for beta chain variable domain of TCR clone 94016 (TRBV19, TRBJ2-1)
CASSKAGPSSYNEQFF

SEQ ID NO: 188033 - protein, 16 aa, Homo sapiens
  CDR3 for alpha chain variable domain of TCR clone 94017 (TRAV17, TRAJ35)
CATAEGGIGFGNVRHC

SEQ ID NO: 188034 - protein, 16 aa, Homo sapiens
  CDR3 for beta chain variable domain of TCR clone 94017 (TRBV6-5, TRBJ2-7)
CASSSDPTSGFYEQYF

SEQ ID NO: 188035 - protein, 18 aa, Homo sapiens
  CDR3 for alpha chain variable domain of TCR clone 94018 (TRAV13-1, TRAJ52)
CAAKNPNAGGTSYGKLTF

SEQ ID NO: 188036 - protein, 12 aa, Homo sapiens
  CDR3 for beta chain variable domain of TCR clone 94018 (TRBV19, TRBJ1-5)
CASSIAQQPQHF

SEQ ID NO: 188037 - protein, 21 aa, Homo sapiens
  CDR3 for alpha chain variable domain of TCR clone 94019 (TRAV8-3, TRAJ10)
CAVGHTHGRRKQTHLWDRRSA

SEQ ID NO: 188038 - protein, 10 aa, Homo sapiens
  CDR3 for beta chain variable domain of TCR clone 94019 (TRBV20-1, TRBJ2-5)
CSARFETQYF

SEQ ID NO: 188039 - protein, 16 aa, Homo sapiens
  CDR3 for alpha chain variable domain of TCR clone 94020 (TRAV26-1, TRAJ53)
CIVRVAMGGSIYKLTF

SEQ ID NO: 188040 - protein, 12 aa, Homo sapiens
  CDR3 for beta chain variable domain of TCR clone 94020 (TRBV7-9, TRBJ1-5)
CASSPQGQPQHF

SEQ ID NO: 188041 - protein, 13 aa, Homo sapiens
  CDR3 for alpha chain variable domain of TCR clone 94021 (TRAV8-1, TRAJ28)
CAASGAGSYQLTF

SEQ ID NO: 188042 - protein, 14 aa, Homo sapiens
  CDR3 for beta chain variable domain of TCR clone 94021 (TRBV7-2, TRBJ2-2)
CASRGQGAAGELFF

SEQ ID NO: 188043 - protein, 13 aa, Homo sapiens
  CDR3 for alpha chain variable domain of TCR clone 94022 (TRAV12-1, TRAJ16)
CVVNGPDGQKLLF

SEQ ID NO: 188044 - protein, 16 aa, Homo sapiens
  CDR3 for beta chain variable domain of TCR clone 94022 (TRBV19, TRBJ2-1)
CASSKAGPSSYNEQFF

SEQ ID NO: 188045 - protein, 13 aa, Homo sapiens
  CDR3 for alpha chain variable domain of TCR clone 94023 (TRAV2, TRAJ16)
CAVEFGDGQKLLF

SEQ ID NO: 188046 - protein, 14 aa, Homo sapiens
  CDR3 for beta chain variable domain of TCR clone 94023 (TRBV6-3, TRBJ2-5)
CASSYSLRERTQYF

SEQ ID NO: 188047 - protein, 12 aa, Homo sapiens
  CDR3 for alpha chain variable domain of TCR clone 94024 (TRAV12-3, TRAJ20)
CAMVRGAYKLSF

SEQ ID NO: 188048 - protein, 12 aa, Homo sapiens
  CDR3 for beta chain variable domain of TCR clone 94024 (TRBV6-1, TRBJ2-7)
CASSDYSYEQYF

SEQ ID NO: 188049 - protein, 16 aa, Homo sapiens
  CDR3 for alpha chain variable domain of TCR clone 94025 (TRAV23/DV6, TRAJ9)
CAASIGGTTGGFKTIF

SEQ ID NO: 188050 - protein, 14 aa, Homo sapiens
  CDR3 for beta chain variable domain of TCR clone 94025 (TRBV9, TRBJ2-7)
CASSVGVGSYEQYF

SEQ ID NO: 188051 - protein, 13 aa, Homo sapiens
  CDR3 for alpha chain variable domain of TCR clone 94026 (TRAV21, TRAJ57)
CAVTQGGSEKLVF

SEQ ID NO: 188052 - protein, 15 aa, Homo sapiens
  CDR3 for beta chain variable domain of TCR clone 94026 (TRBV5-1, TRBJ1-1)
YASSSTTGTNTEAFF

SEQ ID NO: 188053 - protein, 14 aa, Homo sapiens
  CDR3 for alpha chain variable domain of TCR clone 94027 (TRAV38-1, TRAJ31)
CAFMKHDNNARLMF

SEQ ID NO: 188054 - protein, 16 aa, Homo sapiens
  CDR3 for beta chain variable domain of TCR clone 94027 (TRBV23-1, TRBJ2-1)
CISSPATGPTYNEQFF

SEQ ID NO: 188055 - protein, 13 aa, Homo sapiens
  CDR3 for alpha chain variable domain of TCR clone 94028 (TRAV8-3, TRAJ43)
CAVVPYNNNDMRF

SEQ ID NO: 188056 - protein, 15 aa, Homo sapiens
  CDR3 for beta chain variable domain of TCR clone 94028 (TRBV7-2, TRBJ2-7)
CASSLSSGRTYEQYF

SEQ ID NO: 188057 - protein, 12 aa, Homo sapiens
  CDR3 for alpha chain variable domain of TCR clone 94029 (TRAV17, TRAJ12)
CATLRSSYKLIF

SEQ ID NO: 188058 - protein, 15 aa, Homo sapiens
  CDR3 for beta chain variable domain of TCR clone 94029 (TRBV7-2, TRBJ2-1)
CASSSGLAGGNEQFF

SEQ ID NO: 188059 - protein, 13 aa, Homo sapiens
  CDR3 for alpha chain variable domain of TCR clone 94030 (TRAV35, TRAJ42)
CAGFPGSQGNLIF

SEQ ID NO: 188060 - protein, 14 aa, Homo sapiens
  CDR3 for beta chain variable domain of TCR clone 94030 (TRBV19, TRBJ2-1)
CASPTFVLRGEQFF

SEQ ID NO: 188061 - protein, 14 aa, Homo sapiens
  CDR3 for alpha chain variable domain of TCR clone 94031 (TRAV38-1, TRAJ39)
CAFAYNNAVNMLTF

SEQ ID NO: 188062 - protein, 15 aa, Homo sapiens
  CDR3 for beta chain variable domain of TCR clone 94031 (TRBV19, TRBJ2-6)
CASSIGPSGANVLTF

SEQ ID NO: 188063 - protein, 17 aa, Homo sapiens
  CDR3 for alpha chain variable domain of TCR clone 94032 (TRAV36/DV7, TRAJ52)
CAVAQRAGGTSYGKLTF

SEQ ID NO: 188064 - protein, 15 aa, Homo sapiens
  CDR3 for beta chain variable domain of TCR clone 94032 (TRBV20-1, TRBJ2-7)
CSADSGTSGAYEQYF

SEQ ID NO: 188065 - protein, 14 aa, Homo sapiens
  CDR3 for alpha chain variable domain of TCR clone 94033 (TRAV23/DV6, TRAJ28)
CAASSGAGSYQLTF

SEQ ID NO: 188066 - protein, 13 aa, Homo sapiens
  CDR3 for beta chain variable domain of TCR clone 94033 (TRBV7-3, TRBJ2-1)
CASSLDSYNEQFF

SEQ ID NO: 188067 - protein, 15 aa, Homo sapiens
  CDR3 for alpha chain variable domain of TCR clone 94034 (TRAV13-2, TRAJ35)
CAESPNIGFGNVLHC

SEQ ID NO: 188068 - protein, 13 aa, Homo sapiens
  CDR3 for beta chain variable domain of TCR clone 94034 (TRBV10-2, TRBJ2-5)
CASSTLAREAQYF

SEQ ID NO: 188069 - protein, 14 aa, Homo sapiens
  CDR3 for alpha chain variable domain of TCR clone 94035 (TRAV12-2, TRAJ13)
CAVKKTGGYQKVTF

SEQ ID NO: 188070 - protein, 12 aa, Homo sapiens
  CDR3 for beta chain variable domain of TCR clone 94035 (TRBV5-4, TRBJ1-1)
CASSLDRREAFF

SEQ ID NO: 188071 - protein, 15 aa, Homo sapiens
  CDR3 for alpha chain variable domain of TCR clone 94036 (TRAV17, TRAJ35)
CATAFVIGFGNVLHC

SEQ ID NO: 188072 - protein, 13 aa, Homo sapiens
  CDR3 for beta chain variable domain of TCR clone 94036 (TRBV5-5, TRBJ1-2)
CASSFWRGEDYTF

SEQ ID NO: 188073 - protein, 16 aa, Homo sapiens
  CDR3 for alpha chain variable domain of TCR clone 94037 (TRAV1-2, TRAJ10)
CAVRGVLTGGGNKLTF

SEQ ID NO: 188074 - protein, 19 aa, Homo sapiens
  CDR3 for beta chain variable domain of TCR clone 94037 (TRBV7-2, TRBJ2-3)
CASSPGLAGGGLTTDTQYF

SEQ ID NO: 188075 - protein, 14 aa, Homo sapiens
  CDR3 for alpha chain variable domain of TCR clone 94038 (TRAV27, TRAJ15)
CAGFDNQAGTALIL

SEQ ID NO: 188076 - protein, 11 aa, Homo sapiens
  CDR3 for beta chain variable domain of TCR clone 94038 (TRBV29-1, TRBJ1-1)
CSVEVGTRTFF

SEQ ID NO: 188077 - protein, 12 aa, Homo sapiens
  CDR3 for alpha chain variable domain of TCR clone 94039 (TRAV29/DV5, TRAJ34)
CAASGNTDKLIF

SEQ ID NO: 188078 - protein, 12 aa, Homo sapiens
  CDR3 for beta chain variable domain of TCR clone 94039 (TRBV11-2, TRBJ2-2)
CASSLPTGELFF

SEQ ID NO: 188079 - protein, 15 aa, Homo sapiens
  CDR3 for alpha chain variable domain of TCR clone 94040 (TRAV8-3, TRAJ40)
CAAPSLGSGTYRYTF

SEQ ID NO: 188080 - protein, 16 aa, Homo sapiens
  CDR3 for beta chain variable domain of TCR clone 94040 (TRBV7-3, TRBJ2-3)
CASSLSGYRPEDTQYF

SEQ ID NO: 188081 - protein, 15 aa, Homo sapiens
  CDR3 for alpha chain variable domain of TCR clone 94041 (TRAV12-2, TRAJ53)
CAVNGGGGSNYKLTF

SEQ ID NO: 188082 - protein, 13 aa, Homo sapiens
  CDR3 for beta chain variable domain of TCR clone 94041 (TRBV19, TRBJ1-2)
CASSVPGQDGYTF

SEQ ID NO: 188083 - protein, 13 aa, Homo sapiens
  CDR3 for alpha chain variable domain of TCR clone 94042 (TRAV16, TRAJ48)
CSPLNFGNEKLTF

SEQ ID NO: 188084 - protein, 13 aa, Homo sapiens
  CDR3 for beta chain variable domain of TCR clone 94042 (TRBV29-1, TRBJ2-2)
CSTTGVNTGELFF

SEQ ID NO: 188085 - protein, 13 aa, Homo sapiens
  CDR3 for alpha chain variable domain of TCR clone 94043 (TRAV26-1, TRAJ40)
CIVRVEGTYKYIF

SEQ ID NO: 188086 - protein, 13 aa, Homo sapiens
  CDR3 for beta chain variable domain of TCR clone 94043 (TRBV19, TRBJ1-2)
CASSVPGQDGYTF

SEQ ID NO: 188087 - protein, 16 aa, Homo sapiens
  CDR3 for alpha chain variable domain of TCR clone 94044 (TRAV12-2, TRAJ28)
CAVITDSGAGSYQLTF

SEQ ID NO: 188088 - protein, 15 aa, Homo sapiens
  CDR3 for beta chain variable domain of TCR clone 94044 (TRBV5-1, TRBJ2-1)
CASTGSGRTYNEQFF

SEQ ID NO: 188089 - protein, 13 aa, Homo sapiens
  CDR3 for alpha chain variable domain of TCR clone 94045 (TRAV3, TRAJ30)
CAVRDRGDDTIIF

SEQ ID NO: 188090 - protein, 16 aa, Homo sapiens
  CDR3 for beta chain variable domain of TCR clone 94045 (TRBV7-3, TRBJ2-2)
CASSLKRGTLSGELFF

SEQ ID NO: 188091 - protein, 13 aa, Homo sapiens
  CDR3 for alpha chain variable domain of TCR clone 94046 (TRAV26-1, TRAJ30)
CIVRVESNDKIIF

SEQ ID NO: 188092 - protein, 17 aa, Homo sapiens
  CDR3 for beta chain variable domain of TCR clone 94046 (TRBV13, TRBJ2-3)
CASSLSRVAGGWNTQYF

SEQ ID NO: 188093 - protein, 15 aa, Homo sapiens
  CDR3 for alpha chain variable domain of TCR clone 94047 (TRAV3, TRAJ22)
CAVRDRGGSARQLAF

SEQ ID NO: 188094 - protein, 18 aa, Homo sapiens
  CDR3 for beta chain variable domain of TCR clone 94047 (TRBV28, TRBJ2-1)
CASSSTSGRANSYNEQFF

SEQ ID NO: 188095 - protein, 13 aa, Homo sapiens
  CDR3 for alpha chain variable domain of TCR clone 94048 (TRAV1-1, TRAJ9)
CAAKNTGGFKTIF

SEQ ID NO: 188096 - protein, 17 aa, Homo sapiens
  CDR3 for beta chain variable domain of TCR clone 94048 (TRBV7-8, TRBJ2-1)
CASSPPTGTLAYNEQFF

SEQ ID NO: 188097 - protein, 18 aa, Homo sapiens
  CDR3 for alpha chain variable domain of TCR clone 94049 (TRAV13-1, TRAJ52)
CAAKNPNAGGTSYGKLTF

SEQ ID NO: 188098 - protein, 16 aa, Homo sapiens
  CDR3 for beta chain variable domain of TCR clone 94049 (TRBV7-9, TRBJ1-2)
CASSLGFSSGEDGYTF

SEQ ID NO: 188099 - protein, 13 aa, Homo sapiens
  CDR3 for alpha chain variable domain of TCR clone 94050 (TRAV8-3, TRAJ36)
CAVGATGANNLFF

SEQ ID NO: 188100 - protein, 15 aa, Homo sapiens
  CDR3 for beta chain variable domain of TCR clone 94050 (TRBV7-2, TRBJ1-2)
CASSARAGWNYGYTF

SEQ ID NO: 188101 - protein, 15 aa, Homo sapiens
  CDR3 for alpha chain variable domain of TCR clone 94051 (TRAV12-3, TRAJ6)
CAMSAASGGSYIPTF

SEQ ID NO: 188102 - protein, 13 aa, Homo sapiens
  CDR3 for beta chain variable domain of TCR clone 94051 (TRBV20-1, TRBJ1-2)
CSASPEFNYCYTF

SEQ ID NO: 188103 - protein, 12 aa, Homo sapiens
  CDR3 for alpha chain variable domain of TCR clone 94052 (TRAV24, TRAJ26)
CALDNYGQNFVF

SEQ ID NO: 188104 - protein, 15 aa, Homo sapiens
  CDR3 for beta chain variable domain of TCR clone 94052 (TRBV7-3, TRBJ2-1)
CASSPGGGAYNEQFF

SEQ ID NO: 188105 - protein, 14 aa, Homo sapiens
  CDR3 for alpha chain variable domain of TCR clone 94053 (TRAV12-2, TRAJ17)
CAVNIKAAGNKLTF

SEQ ID NO: 188106 - protein, 17 aa, Homo sapiens
  CDR3 for beta chain variable domain of TCR clone 94053 (TRBV13, TRBJ2-3)
CASSLSRVAGGRNTQYF

SEQ ID NO: 188107 - protein, 16 aa, Homo sapiens
  CDR3 for alpha chain variable domain of TCR clone 94054 (TRAV12-3, TRAJ53)
CAMSPGSGGGNYKLTF

SEQ ID NO: 188108 - protein, 13 aa, Homo sapiens
  CDR3 for beta chain variable domain of TCR clone 94054 (TRBV10-3, TRBJ2-7)
CASKLAVNYEQYF

SEQ ID NO: 188109 - protein, 16 aa, Homo sapiens
  CDR3 for alpha chain variable domain of TCR clone 94055 (TRAV12-2, TRAJ32)
CTVNLGQGGATNKLIF

SEQ ID NO: 188110 - protein, 15 aa, Homo sapiens
  CDR3 for beta chain variable domain of TCR clone 94055 (TRBV20-1, TRBJ2-7)
CSARGPLAGGREQYF

SEQ ID NO: 188111 - protein, 12 aa, Homo sapiens
  CDR3 for alpha chain variable domain of TCR clone 94056 (TRAV1-1, TRAJ8)
CAGGTGSQKLVF

SEQ ID NO: 188112 - protein, 13 aa, Homo sapiens
  CDR3 for beta chain variable domain of TCR clone 94056 (TRBV7-3, TRBJ1-1)
CASSQDWGAEAFF

SEQ ID NO: 188113 - protein, 14 aa, Homo sapiens
  CDR3 for alpha chain variable domain of TCR clone 94057 (TRAV1-2, TRAJ8)
CAVREDTGFQKLVF

SEQ ID NO: 188114 - protein, 13 aa, Homo sapiens
  CDR3 for beta chain variable domain of TCR clone 94057 (TRBV27, TRBJ1-1)
CACSLSIGAEAFF

SEQ ID NO: 188115 - protein, 13 aa, Homo sapiens
  CDR3 for alpha chain variable domain of TCR clone 94058 (TRAV21, TRAJ20)
CAVGVFAGYKLSF

SEQ ID NO: 188116 - protein, 14 aa, Homo sapiens
  CDR3 for beta chain variable domain of TCR clone 94058 (TRBV4-2, TRBJ1-4)
CASSPSSGNEKLFF

SEQ ID NO: 188117 - protein, 15 aa, Homo sapiens
  CDR3 for alpha chain variable domain of TCR clone 94059 (TRAV12-3, TRAJ49)
CAMTAPGNTGNQFYF

SEQ ID NO: 188118 - protein, 17 aa, Homo sapiens
  CDR3 for beta chain variable domain of TCR clone 94059 (TRBV7-3, TRBJ2-3)
CASSLMKRMRGADTQYF

SEQ ID NO: 188119 - protein, 11 aa, Homo sapiens
  CDR3 for alpha chain variable domain of TCR clone 94060 (TRAV2, TRAJ13)
CAPGGYQKVTF

SEQ ID NO: 188120 - protein, 16 aa, Homo sapiens
  CDR3 for beta chain variable domain of TCR clone 94060 (TRBV6-1, TRBJ2-5)
CASSETLDKGAETQYF

SEQ ID NO: 188121 - protein, 13 aa, Homo sapiens
  CDR3 for alpha chain variable domain of TCR clone 94061 (TRAV1-2, TRAJ9)
CAALNTGGFKTIF

SEQ ID NO: 188122 - protein, 16 aa, Homo sapiens
  CDR3 for beta chain variable domain of TCR clone 94061 (TRBV27, TRBJ2-2)
CASSLRPGGAPGELFF

SEQ ID NO: 188123 - protein, 11 aa, Homo sapiens
  CDR3 for alpha chain variable domain of TCR clone 94062 (TRAV12-3, TRAJ27)
CAMANAGKSTF

SEQ ID NO: 188124 - protein, 17 aa, Homo sapiens
  CDR3 for beta chain variable domain of TCR clone 94062 (TRBV20-1, TRBJ2-1)
CSASSSGLAGSYNEQFF

SEQ ID NO: 188125 - protein, 17 aa, Homo sapiens
  CDR3 for alpha chain variable domain of TCR clone 94063 (TRAV13-1, TRAJ52)
CAAGRNAGGTSYGKMTF

SEQ ID NO: 188126 - protein, 15 aa, Homo sapiens
  CDR3 for beta chain variable domain of TCR clone 94063 (TRBV6-3, TRBJ2-7)
CASSSPGTVFYEQYF

SEQ ID NO: 188127 - protein, 16 aa, Homo sapiens
  CDR3 for alpha chain variable domain of TCR clone 94064 (TRAV3, TRAJ37)
CSVRVRGSGNTGKLIF

SEQ ID NO: 188128 - protein, 11 aa, Homo sapiens
  CDR3 for beta chain variable domain of TCR clone 94064 (TRBV11-2, TRBJ2-2)
CASSLPGELFF

SEQ ID NO: 188129 - protein, 16 aa, Homo sapiens
  CDR3 for alpha chain variable domain of TCR clone 94065 (TRAV12-2, TRAJ28)
CAVITDSGAGSYQLTF

SEQ ID NO: 188130 - protein, 13 aa, Homo sapiens
  CDR3 for beta chain variable domain of TCR clone 94065 (TRBV20-1, TRBJ1-1)
CSARGGGNTEAFF

SEQ ID NO: 188131 - protein, 13 aa, Homo sapiens
  CDR3 for alpha chain variable domain of TCR clone 94066 (TRAV20, TRAJ11)
CAVQARGYSTLTF

SEQ ID NO: 188132 - protein, 12 aa, Homo sapiens
  CDR3 for beta chain variable domain of TCR clone 94066 (TRBV12-4, TRBJ2-3)
CASSTLPDTQYF

SEQ ID NO: 188133 - protein, 17 aa, Homo sapiens
  CDR3 for alpha chain variable domain of TCR clone 94067 (TRAV3, TRAJ38)
CAVRDCLNAGNNRKLIW

SEQ ID NO: 188134 - protein, 12 aa, Homo sapiens
  CDR3 for beta chain variable domain of TCR clone 94067 (TRBV11-2, TRBJ2-1)
CASSPENNEQFF

SEQ ID NO: 188135 - protein, 12 aa, Homo sapiens
  CDR3 for alpha chain variable domain of TCR clone 94068 (TRAV12-3, TRAJ17)
CAMTLTGNKLTF

SEQ ID NO: 188136 - protein, 17 aa, Homo sapiens
  CDR3 for beta chain variable domain of TCR clone 94068 (TRBV20-1, TRBJ2-1)
CSASASGLAGSYNEQFF

SEQ ID NO: 188137 - protein, 20 aa, Homo sapiens
  CDR3 for alpha chain variable domain of TCR clone 94069 (TRAV1-2, TRAJ27)
CLLPLCCERTPNTNVGKSTF

SEQ ID NO: 188138 - protein, 13 aa, Homo sapiens
  CDR3 for beta chain variable domain of TCR clone 94069 (TRBV6-1, TRBJ1-2)
CASSAREGYGYTF

SEQ ID NO: 188139 - protein, 14 aa, Homo sapiens
  CDR3 for alpha chain variable domain of TCR clone 94070 (TRAV38-1, TRAJ45)
CGSHSGGGADGLTF

SEQ ID NO: 188140 - protein, 13 aa, Homo sapiens
  CDR3 for beta chain variable domain of TCR clone 94070 (TRBV10-3, TRBJ1-2)
CAISERDSYGYTF

SEQ ID NO: 188141 - protein, 14 aa, Homo sapiens
  CDR3 for alpha chain variable domain of TCR clone 94071 (TRAV13-1, TRAJ35)
CAASKGGFGNVLHC

SEQ ID NO: 188142 - protein, 16 aa, Homo sapiens
  CDR3 for beta chain variable domain of TCR clone 94071 (TRBV28, TRBJ2-7)
CASSLFFETGGPEQYF

SEQ ID NO: 188143 - protein, 15 aa, Homo sapiens
  CDR3 for alpha chain variable domain of TCR clone 94072 (TRAV4, TRAJ8)
GLVGEQHTGFQKLVF

SEQ ID NO: 188144 - protein, 15 aa, Homo sapiens
  CDR3 for beta chain variable domain of TCR clone 94072 (TRBV7-9, TRBJ2-5)
CASSNRDYLQETQYF

SEQ ID NO: 188145 - protein, 14 aa, Homo sapiens
  CDR3 for alpha chain variable domain of TCR clone 94073 (TRAV12-2, TRAJ45)
CAVNIGGGADGLTF

SEQ ID NO: 188146 - protein, 17 aa, Homo sapiens
  CDR3 for beta chain variable domain of TCR clone 94073 (TRBV13, TRBJ2-3)
CASSLSRVAGGRNTQYF

SEQ ID NO: 188147 - protein, 14 aa, Homo sapiens
  CDR3 for alpha chain variable domain of TCR clone 94074 (TRAV12-3, TRAJ10)
SHLPLTGGGNKLTF

SEQ ID NO: 188148 - protein, 15 aa, Homo sapiens
  CDR3 for beta chain variable domain of TCR clone 94074 (TRBV27, TRBJ1-4)
CASSAQQDLNEKLFF

SEQ ID NO: 188149 - protein, 14 aa, Homo sapiens
  CDR3 for alpha chain variable domain of TCR clone 94075 (TRAV1-2, TRAJ17)
CALRRGAAGNKLAF

SEQ ID NO: 188150 - protein, 13 aa, Homo sapiens
  CDR3 for beta chain variable domain of TCR clone 94075 (TRBV9, TRBJ2-1)
CASSVGQGGEQFF

SEQ ID NO: 188151 - protein, 12 aa, Homo sapiens
  CDR3 for alpha chain variable domain of TCR clone 94076 (TRAV12-1, TRAJ5)
CVVNTGRRALTF

SEQ ID NO: 188152 - protein, 15 aa, Homo sapiens
  CDR3 for beta chain variable domain of TCR clone 94076 (TRBV7-3, TRBJ2-2)
CASSETGQGTGELFF

SEQ ID NO: 188153 - protein, 14 aa, Homo sapiens
  CDR3 for alpha chain variable domain of TCR clone 94077 (TRAV9-2, TRAJ38)
CALSNAGNNRKLIW

SEQ ID NO: 188154 - protein, 15 aa, Homo sapiens
  CDR3 for beta chain variable domain of TCR clone 94077 (TRBV9, TRBJ2-1)
CARSLAGSSYNEQFF

SEQ ID NO: 188155 - protein, 15 aa, Homo sapiens
  CDR3 for alpha chain variable domain of TCR clone 94078 (TRAV21, TRAJ53)
CATLNSGGSNYKLTF

SEQ ID NO: 188156 - protein, 16 aa, Homo sapiens
  CDR3 for beta chain variable domain of TCR clone 94078 (TRBV20-1, TRBJ1-2)
CSASMGQGVANYSYTF

SEQ ID NO: 188157 - protein, 14 aa, Homo sapiens
  CDR3 for alpha chain variable domain of TCR clone 94079 (TRAV21, TRAJ45)
CAVHSGGGADGLPF

SEQ ID NO: 188158 - protein, 14 aa, Homo sapiens
  CDR3 for beta chain variable domain of TCR clone 94079 (TRBV20-1, TRBJ2-1)
CSARRLAEANEQFF

SEQ ID NO: 188159 - protein, 12 aa, Homo sapiens
  CDR3 for alpha chain variable domain of TCR clone 94080 (TRAV23/DV6, TRAJ53)
CAASKLGSGGSN

SEQ ID NO: 188160 - protein, 12 aa, Homo sapiens
  CDR3 for beta chain variable domain of TCR clone 94080 (TRBV11-2, TRBJ2-3)
GASRGAPNTQYF

SEQ ID NO: 188161 - protein, 13 aa, Homo sapiens
  CDR3 for alpha chain variable domain of TCR clone 94081 (TRAV23/DV6, TRAJ22)
CAPYSGSARQLTF

SEQ ID NO: 188162 - protein, 11 aa, Homo sapiens
  CDR3 for beta chain variable domain of TCR clone 94081 (TRBV29-1, TRBJ2-5)
CSEDRTGTQYF

SEQ ID NO: 188163 - protein, 14 aa, Homo sapiens
  CDR3 for alpha chain variable domain of TCR clone 94082 (TRAV23/DV6, TRAJ23)
CAAGPYNQGGNLIF

SEQ ID NO: 188164 - protein, 17 aa, Homo sapiens
  CDR3 for beta chain variable domain of TCR clone 94082 (TRBV4-2, TRBJ1-1)
CASSQVATGGMNTEAFF

SEQ ID NO: 188165 - protein, 14 aa, Homo sapiens
  CDR3 for alpha chain variable domain of TCR clone 94083 (TRAV1-2, TRAJ16)
CAVNRFSDGQKLLF

SEQ ID NO: 188166 - protein, 17 aa, Homo sapiens
  CDR3 for beta chain variable domain of TCR clone 94083 (TRBV25-1, TRBJ2-5)
CASSRRGGRGGQETQYF

SEQ ID NO: 188167 - protein, 13 aa, Homo sapiens
  CDR3 for alpha chain variable domain of TCR clone 94084 (TRAV3, TRAJ21)
CAVRESDFNKFYF

SEQ ID NO: 188168 - protein, 13 aa, Homo sapiens
  CDR3 for beta chain variable domain of TCR clone 94084 (TRBV9, TRBJ2-1)
CASSPSGGNEQFF

SEQ ID NO: 188169 - protein, 13 aa, Homo sapiens
  CDR3 for alpha chain variable domain of TCR clone 94085 (TRAV1-2, TRAJ7)
CAGPYYGNNRLAF

SEQ ID NO: 188170 - protein, 14 aa, Homo sapiens
  CDR3 for beta chain variable domain of TCR clone 94085 (TRBV7-8, TRBJ2-3)
CASSLEAGTDTQYF

SEQ ID NO: 188171 - protein, 13 aa, Homo sapiens
  CDR3 for alpha chain variable domain of TCR clone 94086 (TRAV3, TRAJ20)
CAVRPLNDYKLSF

SEQ ID NO: 188172 - protein, 12 aa, Homo sapiens
  CDR3 for beta chain variable domain of TCR clone 94086 (TRBV6-1, TRBJ2-1)
CATYGLNNEQFL

SEQ ID NO: 188173 - protein, 15 aa, Homo sapiens
  CDR3 for alpha chain variable domain of TCR clone 94087 (TRAV8-3, TRAJ45)
CASSYSGGGADGLTF

SEQ ID NO: 188174 - protein, 17 aa, Homo sapiens
  CDR3 for beta chain variable domain of TCR clone 94087 (TRBV7-8, TRBJ1-2)
CASSLSPLQGHLYGYTF

SEQ ID NO: 188175 - protein, 19 aa, Homo sapiens
  CDR3 for alpha chain variable domain of TCR clone 94088 (TRAV26-1, TRAJ52)
CIVRAHRNAGGTSHGKLTF

SEQ ID NO: 188176 - protein, 13 aa, Homo sapiens
  CDR3 for beta chain variable domain of TCR clone 94088 (TRBV20-1, TRBJ1-6)
CSAPLGVGSPLHF

SEQ ID NO: 188177 - protein, 13 aa, Homo sapiens
  CDR3 for alpha chain variable domain of TCR clone 94089 (TRAV12-2, TRAJ40)
CAVKRTGTNKYIF

SEQ ID NO: 188178 - protein, 15 aa, Homo sapiens
  CDR3 for beta chain variable domain of TCR clone 94089 (TRBV12-4, TRBJ1-2)
CASSPITGGGYGYTF

SEQ ID NO: 188179 - protein, 18 aa, Homo sapiens
  CDR3 for alpha chain variable domain of TCR clone 94090 (TRAV3, TRAJ17)
CAVRARRGGRSCRQQANF

SEQ ID NO: 188180 - protein, 14 aa, Homo sapiens
  CDR3 for beta chain variable domain of TCR clone 94090 (TRBV4-1, TRBJ2-2)
CASSQAVNNGELFF

SEQ ID NO: 188181 - protein, 12 aa, Homo sapiens
  CDR3 for alpha chain variable domain of TCR clone 94091 (TRAV8-3, TRAJ20)
CAVGANDYKLSF

SEQ ID NO: 188182 - protein, 15 aa, Homo sapiens
  CDR3 for beta chain variable domain of TCR clone 94091 (TRBV7-2, TRBJ2-2)
CASSLGLASTGELFF

SEQ ID NO: 188183 - protein, 13 aa, Homo sapiens
  CDR3 for alpha chain variable domain of TCR clone 94092 (TRAV21, TRAJ10)
CAVRPGGGNRLTF

SEQ ID NO: 188184 - protein, 14 aa, Homo sapiens
  CDR3 for beta chain variable domain of TCR clone 94092 (TRBV5-4, TRBJ2-7)
CASSADAGSYEQYF

SEQ ID NO: 188185 - protein, 13 aa, Homo sapiens
  CDR3 for alpha chain variable domain of TCR clone 94093 (TRAV36/DV7, TRAJ37)
CAVFSSNTGQLIF

SEQ ID NO: 188186 - protein, 15 aa, Homo sapiens
  CDR3 for beta chain variable domain of TCR clone 94093 (TRBV5-1, TRBJ2-2)
CASSSQGGNTGELFF

SEQ ID NO: 188187 - protein, 13 aa, Homo sapiens
  CDR3 for alpha chain variable domain of TCR clone 94094 (TRAV20, TRAJ54)
CAVQAGGAQKLVF

SEQ ID NO: 188188 - protein, 14 aa, Homo sapiens
  CDR3 for beta chain variable domain of TCR clone 94094 (TRBV20-1, TRBJ2-7)
CSAKTETGGYEQYF

SEQ ID NO: 188189 - protein, 13 aa, Homo sapiens
  CDR3 for alpha chain variable domain of TCR clone 94095 (TRAV13-1, TRAJ39)
CSKYSNAGNMLTF

SEQ ID NO: 188190 - protein, 14 aa, Homo sapiens
  CDR3 for beta chain variable domain of TCR clone 94095 (TRBV7-2, TRBJ2-7)
CASSPKTSFYEQYF

SEQ ID NO: 188191 - protein, 13 aa, Homo sapiens
  CDR3 for alpha chain variable domain of TCR clone 94096 (TRAV1-2, TRAJ9)
CAVLNTGGFKTIF

SEQ ID NO: 188192 - protein, 14 aa, Homo sapiens
  CDR3 for beta chain variable domain of TCR clone 94096 (TRBV20-1, TRBJ2-3)
CSARRGTSTDTQYF

SEQ ID NO: 188193 - protein, 12 aa, Homo sapiens
  CDR3 for alpha chain variable domain of TCR clone 94097 (TRAV13-1, TRAJ21)
CAAKEGFNKFYF

SEQ ID NO: 188194 - protein, 20 aa, Homo sapiens
  CDR3 for beta chain variable domain of TCR clone 94097 (TRBV28, TRBJ2-1)
CASTPIGRSPGLAGGNERFF

SEQ ID NO: 188195 - protein, 15 aa, Homo sapiens
  CDR3 for alpha chain variable domain of TCR clone 94098 (TRAV8-3, TRAJ45)
CASSYSGGGADGLTF

SEQ ID NO: 188196 - protein, 14 aa, Homo sapiens
  CDR3 for beta chain variable domain of TCR clone 94098 (TRBV19, TRBJ2-1)
CASLTFVLSGEQFF

SEQ ID NO: 188197 - protein, 14 aa, Homo sapiens
  CDR3 for alpha chain variable domain of TCR clone 94099 (TRAV13-1, TRAJ35)
CAASKGGFGNVLHC

SEQ ID NO: 188198 - protein, 14 aa, Homo sapiens
  CDR3 for beta chain variable domain of TCR clone 94099 (TRBV7-2, TRBJ2-5)
CASSPRGSSETQYF

SEQ ID NO: 188199 - protein, 11 aa, Homo sapiens
  CDR3 for alpha chain variable domain of TCR clone 94100 (TRAV21, TRAJ34)
CSVTNTDKLIF

SEQ ID NO: 188200 - protein, 17 aa, Homo sapiens
  CDR3 for beta chain variable domain of TCR clone 94100 (TRBV20-1, TRBJ2-1)
CSARSPSGGPPTMSSSS

SEQ ID NO: 188201 - protein, 14 aa, Homo sapiens
  CDR3 for alpha chain variable domain of TCR clone 94101 (TRAV12-2, TRAJ24)
CAVTPADSWGKLQF

SEQ ID NO: 188202 - protein, 14 aa, Homo sapiens
  CDR3 for beta chain variable domain of TCR clone 94101 (TRBV11-2, TRBJ2-5)
CASSRTGGIETQYF

SEQ ID NO: 188203 - protein, 12 aa, Homo sapiens
  CDR3 for alpha chain variable domain of TCR clone 94102 (TRAV27, TRAJ35)
CAGADFGNVLHC

SEQ ID NO: 188204 - protein, 15 aa, Homo sapiens
  CDR3 for beta chain variable domain of TCR clone 94102 (TRBV7-9, TRBJ2-1)
CASSLLIGSYNEQFF

SEQ ID NO: 188205 - protein, 16 aa, Homo sapiens
  CDR3 for alpha chain variable domain of TCR clone 94103 (TRAV3, TRAJ10)
CAVRDMRAGGGNKLTF

SEQ ID NO: 188206 - protein, 15 aa, Homo sapiens
  CDR3 for beta chain variable domain of TCR clone 94103 (TRBV7-2, TRBJ1-5)
CASSRGQGDKQPQHF

SEQ ID NO: 188207 - protein, 14 aa, Homo sapiens
  CDR3 for alpha chain variable domain of TCR clone 94104 (TRAV12-2, TRAJ13)
CAVKKTGGYQKVTF

SEQ ID NO: 188208 - protein, 16 aa, Homo sapiens
  CDR3 for beta chain variable domain of TCR clone 94104 (TRBV6-1, TRBJ2-1)
CASILRQGSSYNEQFF

SEQ ID NO: 188209 - protein, 11 aa, Homo sapiens
  CDR3 for alpha chain variable domain of TCR clone 94105 (TRAV16, TRAJ49)
CSLNTVNQFYF

SEQ ID NO: 188210 - protein, 12 aa, Homo sapiens
  CDR3 for beta chain variable domain of TCR clone 94105 (TRBV7-9, TRBJ1-4)
CASSTDREKLFF

SEQ ID NO: 188211 - protein, 14 aa, Homo sapiens
  CDR3 for alpha chain variable domain of TCR clone 94106 (TRAV8-3, TRAJ35)
CAVVPQGFGNVLHF

SEQ ID NO: 188212 - protein, 15 aa, Homo sapiens
  CDR3 for beta chain variable domain of TCR clone 94106 (TRBV27, TRBJ2-1)
CASSNGGGSSNEQFF

SEQ ID NO: 188213 - protein, 13 aa, Homo sapiens
  CDR3 for alpha chain variable domain of TCR clone 94107 (TRAV12-1, TRAJ39)
CVVPQRAGNMLTF

SEQ ID NO: 188214 - protein, 17 aa, Homo sapiens
  CDR3 for beta chain variable domain of TCR clone 94107 (TRBV4-1, TRBJ2-5)
CASSQELTGGPIETQYF

SEQ ID NO: 188215 - protein, 11 aa, Homo sapiens
  CDR3 for alpha chain variable domain of TCR clone 94108 (TRAV20, TRAJ23)
CACNQGGKLIF

SEQ ID NO: 188216 - protein, 16 aa, Homo sapiens
  CDR3 for beta chain variable domain of TCR clone 94108 (TRBV7-8, TRBJ2-5)
CARSFGGQPAQETQYF

SEQ ID NO: 188217 - protein, 17 aa, Homo sapiens
  CDR3 for alpha chain variable domain of TCR clone 94109 (TRAV26-2, TRAJ42)
CILRDVGYGGSQGNLIF

SEQ ID NO: 188218 - protein, 14 aa, Homo sapiens
  CDR3 for beta chain variable domain of TCR clone 94109 (TRBV7-9, TRBJ2-2)
CASSGLADTGELFF

SEQ ID NO: 188219 - protein, 15 aa, Homo sapiens
  CDR3 for alpha chain variable domain of TCR clone 94110 (TRAV21, TRAJ24)
CSARSSTDSWGKLQF

SEQ ID NO: 188220 - protein, 15 aa, Homo sapiens
  CDR3 for beta chain variable domain of TCR clone 94110 (TRBV4-1, TRBJ2-7)
CASSQNTGRLYEQYF

SEQ ID NO: 188221 - protein, 14 aa, Homo sapiens
  CDR3 for alpha chain variable domain of TCR clone 94111 (TRAV12-2, TRAJ13)
CAVKKTGGYQKVTF

SEQ ID NO: 188222 - protein, 16 aa, Homo sapiens
  CDR3 for beta chain variable domain of TCR clone 94111 (TRBV5-7, TRBJ2-5)
CASTLAPAGGRETQYF

SEQ ID NO: 188223 - protein, 12 aa, Homo sapiens
  CDR3 for alpha chain variable domain of TCR clone 94112 (TRAV1-1, TRAJ15)
CAVGQAGTALIF

SEQ ID NO: 188224 - protein, 14 aa, Homo sapiens
  CDR3 for beta chain variable domain of TCR clone 94112 (TRBV6-1, TRBJ1-3)
CASVQGGGGNTIYF

SEQ ID NO: 188225 - protein, 16 aa, Homo sapiens
  CDR3 for alpha chain variable domain of TCR clone 94113 (TRAV12-3, TRAJ53)
CAMSPGSGGSNYKLTF

SEQ ID NO: 188226 - protein, 11 aa, Homo sapiens
  CDR3 for beta chain variable domain of TCR clone 94113 (TRBV29-1, TRBJ2-5)
SAEDRTGTQYF

SEQ ID NO: 188227 - protein, 13 aa, Homo sapiens
  CDR3 for alpha chain variable domain of TCR clone 94114 (TRAV30, TRAJ24)
RGTVTDSWGKLQF

SEQ ID NO: 188228 - protein, 14 aa, Homo sapiens
  CDR3 for beta chain variable domain of TCR clone 94114 (TRBV6-3, TRBJ2-2)
CASTYTPDTGELFF

SEQ ID NO: 188229 - protein, 16 aa, Homo sapiens
  CDR3 for alpha chain variable domain of TCR clone 94115 (TRAV26-1, )
CIDIQNPDPAVYQLRD

SEQ ID NO: 188230 - protein, 12 aa, Homo sapiens
  CDR3 for beta chain variable domain of TCR clone 94115 (TRBV12-4, TRBJ2-7)
CASSLGGYEQYF

SEQ ID NO: 188231 - protein, 14 aa, Homo sapiens
  CDR3 for alpha chain variable domain of TCR clone 94116 (TRAV20, TRAJ9)
CAVQEGTGGFKTIF

SEQ ID NO: 188232 - protein, 16 aa, Homo sapiens
  CDR3 for beta chain variable domain of TCR clone 94116 (TRBV27, TRBJ2-2)
CASSFRGLVRTGELFF

SEQ ID NO: 188233 - protein, 11 aa, Homo sapiens
  CDR3 for alpha chain variable domain of TCR clone 94117 (TRAV3, TRAJ17)
PRGAAGNKLTF

SEQ ID NO: 188234 - protein, 16 aa, Homo sapiens
  CDR3 for beta chain variable domain of TCR clone 94117 (TRBV7-6, TRBJ2-1)
CASSAPGPSSYNEQYF

SEQ ID NO: 188235 - protein, 16 aa, Homo sapiens
  CDR3 for alpha chain variable domain of TCR clone 94118 (TRAV4, TRAJ22)
CLVGDLYSGSTRQLTF

SEQ ID NO: 188236 - protein, 16 aa, Homo sapiens
  CDR3 for beta chain variable domain of TCR clone 94118 (TRBV7-9, TRBJ2-1)
CASSDVAGGSYNEQFF

SEQ ID NO: 188237 - protein, 14 aa, Homo sapiens
  CDR3 for alpha chain variable domain of TCR clone 94119 (TRAV26-1, TRAJ26)
CIVRATFLGQNFVF

SEQ ID NO: 188238 - protein, 16 aa, Homo sapiens
  CDR3 for beta chain variable domain of TCR clone 94119 (TRBV12-4, TRBJ2-7)
CASRSTGKGPSYEQYF

SEQ ID NO: 188239 - protein, 15 aa, Homo sapiens
  CDR3 for alpha chain variable domain of TCR clone 94120 (TRAV12-2, TRAJ53)
CAVNGGGGSNYNLTF

SEQ ID NO: 188240 - protein, 17 aa, Homo sapiens
  CDR3 for beta chain variable domain of TCR clone 94120 (TRBV7-3, TRBJ2-3)
RASSLMKRMRGADTQYF

SEQ ID NO: 188241 - protein, 14 aa, Homo sapiens
  CDR3 for alpha chain variable domain of TCR clone 94121 (TRAV1-2, TRAJ6)
CTVSLSGGSCIPTF

SEQ ID NO: 188242 - protein, 14 aa, Homo sapiens
  CDR3 for beta chain variable domain of TCR clone 94121 (TRBV13, TRBJ2-7)
CASSLSRISYEQYF

SEQ ID NO: 188243 - protein, 15 aa, Homo sapiens
  CDR3 for alpha chain variable domain of TCR clone 94122 (TRAV8-3, TRAJ45)
CASSYSGGGADGLTF

SEQ ID NO: 188244 - protein, 14 aa, Homo sapiens
  CDR3 for beta chain variable domain of TCR clone 94122 (TRBV19, TRBJ2-2)
CASSGQGIAGELFF

SEQ ID NO: 188245 - protein, 14 aa, Homo sapiens
  CDR3 for alpha chain variable domain of TCR clone 94123 (TRAV1-2, TRAJ16)
CAVIRFSDGQKLLF

SEQ ID NO: 188246 - protein, 16 aa, Homo sapiens
  CDR3 for beta chain variable domain of TCR clone 94123 (TRBV7-3, TRBJ2-2)
CASSLKRGTLSGELFF

SEQ ID NO: 188247 - protein, 16 aa, Homo sapiens
  CDR3 for alpha chain variable domain of TCR clone 94124 (TRAV3, TRAJ37)
CAVRGKGSGNTGKLIF

SEQ ID NO: 188248 - protein, 13 aa, Homo sapiens
  CDR3 for beta chain variable domain of TCR clone 94124 (TRBV5-1, TRBJ2-7)
CASSATGGNEQYF

SEQ ID NO: 188249 - protein, 15 aa, Homo sapiens
  CDR3 for alpha chain variable domain of TCR clone 94125 (TRAV17, TRAJ54)
CATEKLGQGAQKLVF

SEQ ID NO: 188250 - protein, 14 aa, Homo sapiens
  CDR3 for beta chain variable domain of TCR clone 94125 (TRBV7-9, TRBJ2-1)
CASSPRDSLYEQFF

SEQ ID NO: 188251 - protein, 12 aa, Homo sapiens
  CDR3 for alpha chain variable domain of TCR clone 94126 (TRAV8-3, TRAJ40)
CAVTSGTYKYIF

SEQ ID NO: 188252 - protein, 15 aa, Homo sapiens
  CDR3 for beta chain variable domain of TCR clone 94126 (TRBV5-1, TRBJ2-1)
CASSPLRAPYNEQFF

SEQ ID NO: 188253 - protein, 16 aa, Homo sapiens
  CDR3 for alpha chain variable domain of TCR clone 94127 (TRAV1-2, TRAJ6)
CAVRDQGTGGSYIPTF

SEQ ID NO: 188254 - protein, 13 aa, Homo sapiens
  CDR3 for beta chain variable domain of TCR clone 94127 (TRBV28, TRBJ2-7)
CASDPGLAGEQYF

SEQ ID NO: 188255 - protein, 15 aa, Homo sapiens
  CDR3 for alpha chain variable domain of TCR clone 94128 (TRAV14/DV4, TRAJ10)
CAMRGLTGGGNKLTF

SEQ ID NO: 188256 - protein, 18 aa, Homo sapiens
  CDR3 for beta chain variable domain of TCR clone 94128 (TRBV7-9, TRBJ2-7)
CASSLTTSGSRTWYEQYF

SEQ ID NO: 188257 - protein, 14 aa, Homo sapiens
  CDR3 for alpha chain variable domain of TCR clone 94129 (TRAV25, TRAJ27)
CAGPGNTSAGKSTF

SEQ ID NO: 188258 - protein, 16 aa, Homo sapiens
  CDR3 for beta chain variable domain of TCR clone 94129 (TRBV4-1, TRBJ2-6)
CASSQDGGPGANVLTF

SEQ ID NO: 188259 - protein, 14 aa, Homo sapiens
  CDR3 for alpha chain variable domain of TCR clone 94130 (TRAV13-1, TRAJ35)
CAASKGGFGNGLHF

SEQ ID NO: 188260 - protein, 13 aa, Homo sapiens
  CDR3 for beta chain variable domain of TCR clone 94130 (TRBV7-3, TRBJ1-1)
CASSQDWGAEAFF

SEQ ID NO: 188261 - protein, 13 aa, Homo sapiens
  CDR3 for alpha chain variable domain of TCR clone 94131 (TRAV36/DV7, TRAJ37)
CAVFSSNPGKLIF

SEQ ID NO: 188262 - protein, 12 aa, Homo sapiens
  CDR3 for beta chain variable domain of TCR clone 94131 (TRBV11-2, TRBJ2-2)
CASSLGGGELFF

SEQ ID NO: 188263 - protein, 16 aa, Homo sapiens
  CDR3 for alpha chain variable domain of TCR clone 94132 (TRAV30, TRAJ24)
CGTEIVDADSWGKFQF

SEQ ID NO: 188264 - protein, 14 aa, Homo sapiens
  CDR3 for beta chain variable domain of TCR clone 94132 (TRBV19, TRBJ1-5)
CASSLGPGGEPQHF

SEQ ID NO: 188265 - protein, 16 aa, Homo sapiens
  CDR3 for alpha chain variable domain of TCR clone 94133 (TRAV1-2, TRAJ10)
CAARGVLTGGGNKLTF

SEQ ID NO: 188266 - protein, 20 aa, Homo sapiens
  CDR3 for beta chain variable domain of TCR clone 94133 (TRBV7-8, TRBJ2-2)
CASSHLFPGPTIHITGELFF

SEQ ID NO: 188267 - protein, 14 aa, Homo sapiens
  CDR3 for alpha chain variable domain of TCR clone 94134 (TRAV35, TRAJ22)
CAGLRPRSARQLTF

SEQ ID NO: 188268 - protein, 15 aa, Homo sapiens
  CDR3 for beta chain variable domain of TCR clone 94134 (TRBV12-4, TRBJ2-5)
CASSPPTGLQETQYF

SEQ ID NO: 188269 - protein, 13 aa, Homo sapiens
  CDR3 for alpha chain variable domain of TCR clone 94135 (TRAV21, TRAJ20)
CAVGLRVDYKLSF

SEQ ID NO: 188270 - protein, 15 aa, Homo sapiens
  CDR3 for beta chain variable domain of TCR clone 94135 (TRBV7-3, TRBJ2-2)
CASSETGQGTGELFF

SEQ ID NO: 188271 - protein, 11 aa, Homo sapiens
  CDR3 for alpha chain variable domain of TCR clone 94136 (TRAV3, TRAJ17)
PRGAAGNKLNF

SEQ ID NO: 188272 - protein, 16 aa, Homo sapiens
  CDR3 for beta chain variable domain of TCR clone 94136 (TRBV7-6, TRBJ2-1)
CASSAPGPSSYNEQFF

SEQ ID NO: 188273 - protein, 15 aa, Homo sapiens
  CDR3 for alpha chain variable domain of TCR clone 94137 (TRAV26-1, TRAJ15)
CIVRAANQAGTALNF

SEQ ID NO: 188274 - protein, 15 aa, Homo sapiens
  CDR3 for beta chain variable domain of TCR clone 94137 (TRBV20-1, TRBJ1-1)
CSARSAATSNTEAFF

SEQ ID NO: 188275 - protein, 13 aa, Homo sapiens
  CDR3 for alpha chain variable domain of TCR clone 94138 (TRAV21, TRAJ10)
CAVPTGGGNKLTF

SEQ ID NO: 188276 - protein, 12 aa, Homo sapiens
  CDR3 for beta chain variable domain of TCR clone 94138 (TRBV12-4, TRBJ2-7)
CASSLGGYEQYF

SEQ ID NO: 188277 - protein, 15 aa, Homo sapiens
  CDR3 for alpha chain variable domain of TCR clone 94139 (TRAV21, TRAJ53)
CATLNSGGSDYKLTF

SEQ ID NO: 188278 - protein, 15 aa, Homo sapiens
  CDR3 for beta chain variable domain of TCR clone 94139 (TRBV6-3, TRBJ2-7)
CASSSPGTVFYEQYF

SEQ ID NO: 188279 - protein, 13 aa, Homo sapiens
  CDR3 for alpha chain variable domain of TCR clone 94140 (TRAV39, TRAJ49)
CAVDRNTGNQFYF

SEQ ID NO: 188280 - protein, 16 aa, Homo sapiens
  CDR3 for beta chain variable domain of TCR clone 94140 (TRBV2, TRBJ2-7)
CASSEPWTGPSYEQYF

SEQ ID NO: 188281 - protein, 15 aa, Homo sapiens
  CDR3 for alpha chain variable domain of TCR clone 94141 (TRAV17, TRAJ13)
CATDAGSGGYQKVTF

SEQ ID NO: 188282 - protein, 17 aa, Homo sapiens
  CDR3 for beta chain variable domain of TCR clone 94141 (TRBV11-2, TRBJ2-1)
CASSLYPPGVEYNEQYF

SEQ ID NO: 188283 - protein, 17 aa, Homo sapiens
  CDR3 for alpha chain variable domain of TCR clone 94142 (TRAV3, TRAJ6)
CAVRAGPRAGGSYIPTF

SEQ ID NO: 188284 - protein, 14 aa, Homo sapiens
  CDR3 for beta chain variable domain of TCR clone 94142 (TRBV7-2, TRBJ2-7)
CASSPKTRFYEQYF

SEQ ID NO: 188285 - protein, 15 aa, Homo sapiens
  CDR3 for alpha chain variable domain of TCR clone 94143 (TRAV4, TRAJ10)
CLVGDEEGGGNKLTC

SEQ ID NO: 188286 - protein, 15 aa, Homo sapiens
  CDR3 for beta chain variable domain of TCR clone 94143 (TRBV7-2, TRBJ2-7)
CASSLTGQGTYEQYF

SEQ ID NO: 188287 - protein, 14 aa, Homo sapiens
  CDR3 for alpha chain variable domain of TCR clone 94144 (TRAV1-2, TRAJ8)
CAVREDAGFQKLVF

SEQ ID NO: 188288 - protein, 15 aa, Homo sapiens
  CDR3 for beta chain variable domain of TCR clone 94144 (TRBV19, TRBJ2-1)
CASSTGTSSYNEQFF

SEQ ID NO: 188289 - protein, 17 aa, Homo sapiens
  CDR3 for alpha chain variable domain of TCR clone 94145 (TRAV17, TRAJ28)
CATDPRRGGAGSYQLTF

SEQ ID NO: 188290 - protein, 16 aa, Homo sapiens
  CDR3 for beta chain variable domain of TCR clone 94145 (TRBV25-1, TRBJ1-1)
CASSGDRDRGRIEAFV

SEQ ID NO: 188291 - protein, 11 aa, Homo sapiens
  CDR3 for alpha chain variable domain of TCR clone 94146 (TRAV2, TRAJ13)
CASGGYQKVTF

SEQ ID NO: 188292 - protein, 13 aa, Homo sapiens
  CDR3 for beta chain variable domain of TCR clone 94146 (TRBV11-2, TRBJ2-1)
CASSSRPNNEQFF

SEQ ID NO: 188293 - protein, 14 aa, Homo sapiens
  CDR3 for alpha chain variable domain of TCR clone 94147 (TRAV12-2, TRAJ13)
CAVKKTGGYQKVTF

SEQ ID NO: 188294 - protein, 14 aa, Homo sapiens
  CDR3 for beta chain variable domain of TCR clone 94147 (TRBV20-1, TRBJ2-7)
CSARDPTGLDEQYF

SEQ ID NO: 188295 - protein, 14 aa, Homo sapiens
  CDR3 for alpha chain variable domain of TCR clone 94148 (TRAV2, TRAJ9)
CAVEDRSGGFKTIF

SEQ ID NO: 188296 - protein, 13 aa, Homo sapiens
  CDR3 for beta chain variable domain of TCR clone 94148 (TRBV7-2, TRBJ2-2)
CASSLAVTGELFF

SEQ ID NO: 188297 - protein, 12 aa, Homo sapiens
  CDR3 for alpha chain variable domain of TCR clone 94149 (TRAV12-2, TRAJ31)
CAVNTPDARLMF

SEQ ID NO: 188298 - protein, 17 aa, Homo sapiens
  CDR3 for beta chain variable domain of TCR clone 94149 (TRBV20-1, TRBJ1-6)
CSARGGYTFSYNSPLYF

SEQ ID NO: 188299 - protein, 11 aa, Homo sapiens
  CDR3 for alpha chain variable domain of TCR clone 94150 (TRAV12-1, TRAJ42)
CERRKPRKSHL

SEQ ID NO: 188300 - protein, 18 aa, Homo sapiens
  CDR3 for beta chain variable domain of TCR clone 94150 (TRBV11-2, TRBJ2-3)
CASSLGGASRGAPNTQYF

SEQ ID NO: 188301 - protein, 17 aa, Homo sapiens
  CDR3 for alpha chain variable domain of TCR clone 94151 (TRAV12-3, TRAJ6)
CAMSARGGAGGSYIPTF

SEQ ID NO: 188302 - protein, 12 aa, Homo sapiens
  CDR3 for beta chain variable domain of TCR clone 94151 (TRBV12-4, TRBJ2-3)
CASSTLPDTQYV

SEQ ID NO: 188303 - protein, 12 aa, Homo sapiens
  CDR3 for alpha chain variable domain of TCR clone 94152 (TRAV9-2, TRAJ24)
CAQTDSWGKLQF

SEQ ID NO: 188304 - protein, 13 aa, Homo sapiens
  CDR3 for beta chain variable domain of TCR clone 94152 (TRBV12-4, TRBJ2-1)
CARSFQGYNEQFF

SEQ ID NO: 188305 - protein, 19 aa, Homo sapiens
  CDR3 for alpha chain variable domain of TCR clone 94153 (TRAV17, TRAJ17)
CATDGRPGVIKAAGNKITF

SEQ ID NO: 188306 - protein, 17 aa, Homo sapiens
  CDR3 for beta chain variable domain of TCR clone 94153 (TRBV12-4, TRBJ1-1)
CASSLSGFRTMNTEAFF

SEQ ID NO: 188307 - protein, 14 aa, Homo sapiens
  CDR3 for alpha chain variable domain of TCR clone 94154 (TRAV4, TRAJ12)
CLVGYMDSSYKLIF

SEQ ID NO: 188308 - protein, 14 aa, Homo sapiens
  CDR3 for beta chain variable domain of TCR clone 94154 (TRBV27, TRBJ1-1)
CASSPGGGANEAFF

SEQ ID NO: 188309 - protein, 14 aa, Homo sapiens
  CDR3 for alpha chain variable domain of TCR clone 94155 (TRAV3, TRAJ9)
CAVRLNTGGFKTIF

SEQ ID NO: 188310 - protein, 15 aa, Homo sapiens
  CDR3 for beta chain variable domain of TCR clone 94155 (TRBV7-2, TRBJ2-1)
CASSLASGRVNEPFF

SEQ ID NO: 188311 - protein, 12 aa, Homo sapiens
  CDR3 for alpha chain variable domain of TCR clone 94156 (TRAV36/DV7, TRAJ54)
CAVVRGAHKLVF

SEQ ID NO: 188312 - protein, 14 aa, Homo sapiens
  CDR3 for beta chain variable domain of TCR clone 94156 (TRBV7-3, TRBJ1-1)
CASSLKGGNTEAFF

SEQ ID NO: 188313 - protein, 16 aa, Homo sapiens
  CDR3 for alpha chain variable domain of TCR clone 94157 (TRAV26-1, TRAJ47)
CIVRVVLSQYGNKLFF

SEQ ID NO: 188314 - protein, 16 aa, Homo sapiens
  CDR3 for beta chain variable domain of TCR clone 94157 (TRBV5-1, TRBJ2-1)
CASSFGVSGSYNEQFF

SEQ ID NO: 188315 - protein, 13 aa, Homo sapiens
  CDR3 for alpha chain variable domain of TCR clone 94158 (TRAV2, TRAJ20)
CAVEDPSEYKLSF

SEQ ID NO: 188316 - protein, 16 aa, Homo sapiens
  CDR3 for beta chain variable domain of TCR clone 94158 (TRBV25-1, TRBJ2-7)
CASSELTGGGSYEQYF

SEQ ID NO: 188317 - protein, 13 aa, Homo sapiens
  CDR3 for alpha chain variable domain of TCR clone 94159 (TRAV12-1, TRAJ21)
CVVIGDNVNKFYF

SEQ ID NO: 188318 - protein, 14 aa, Homo sapiens
  CDR3 for beta chain variable domain of TCR clone 94159 (TRBV7-3, TRBJ2-2)
CASSLYPLTGELFF

SEQ ID NO: 188319 - protein, 14 aa, Homo sapiens
  CDR3 for alpha chain variable domain of TCR clone 94160 (TRAV1-2, TRAJ16)
CAVNRFSDGQKLLF

SEQ ID NO: 188320 - protein, 14 aa, Homo sapiens
  CDR3 for beta chain variable domain of TCR clone 94160 (TRBV6-1, TRBJ1-6)
CASGGTAYNSPLHF

SEQ ID NO: 188321 - protein, 11 aa, Homo sapiens
  CDR3 for alpha chain variable domain of TCR clone 94161 (TRAV23/DV6, TRAJ48)
CAPRWGEKLTF

SEQ ID NO: 188322 - protein, 14 aa, Homo sapiens
  CDR3 for beta chain variable domain of TCR clone 94161 (TRBV29-1, TRBJ1-3)
CSVADRVVGNTIYL

SEQ ID NO: 188323 - protein, 17 aa, Homo sapiens
  CDR3 for alpha chain variable domain of TCR clone 94162 (TRAV3, TRAJ12)
CAVRDGRRMDSSYKLIF

SEQ ID NO: 188324 - protein, 13 aa, Homo sapiens
  CDR3 for beta chain variable domain of TCR clone 94162 (TRBV15, TRBJ1-6)
CATSGGLNSPLHF

SEQ ID NO: 188325 - protein, 13 aa, Homo sapiens
  CDR3 for alpha chain variable domain of TCR clone 94163 (TRAV39, TRAJ58)
CAGEETSGSRLTF

SEQ ID NO: 188326 - protein, 13 aa, Homo sapiens
  CDR3 for beta chain variable domain of TCR clone 94163 (TRBV15, TRBJ2-7)
CATSTTGHYEQYV

SEQ ID NO: 188327 - protein, 13 aa, Homo sapiens
  CDR3 for alpha chain variable domain of TCR clone 94164 (TRAV9-2, TRAJ53)
CALSGGSNYKLTF

SEQ ID NO: 188328 - protein, 16 aa, Homo sapiens
  CDR3 for beta chain variable domain of TCR clone 94164 (TRBV20-1, TRBJ2-2)
CSASASGIPGAGELFF

SEQ ID NO: 188329 - protein, 20 aa, Homo sapiens
  CDR3 for alpha chain variable domain of TCR clone 94165 (TRAV26-1, TRAJ42)
CCVLLPRQTYYGGSQGNLIF

SEQ ID NO: 188330 - protein, 16 aa, Homo sapiens
  CDR3 for beta chain variable domain of TCR clone 94165 (TRBV7-3, TRBJ2-2)
CASSLKRGTLSGELFF

SEQ ID NO: 188331 - protein, 12 aa, Homo sapiens
  CDR3 for alpha chain variable domain of TCR clone 94166 (TRAV16, TRAJ49)
CALNEGGNQFYF

SEQ ID NO: 188332 - protein, 14 aa, Homo sapiens
  CDR3 for beta chain variable domain of TCR clone 94166 (TRBV7-9, TRBJ2-1)
CASRPTVLRNEQFF

SEQ ID NO: 188333 - protein, 15 aa, Homo sapiens
  CDR3 for alpha chain variable domain of TCR clone 94167 (TRAV38-1, TRAJ37)
CAFIFGSGNTGKLIF

SEQ ID NO: 188334 - protein, 12 aa, Homo sapiens
  CDR3 for beta chain variable domain of TCR clone 94167 (TRBV7-9, TRBJ2-7)
CASILEGYEQYF

SEQ ID NO: 188335 - protein, 15 aa, Homo sapiens
  CDR3 for alpha chain variable domain of TCR clone 94168 (TRAV3, TRAJ22)
CAVRDRGGYARQLTF

SEQ ID NO: 188336 - protein, 13 aa, Homo sapiens
  CDR3 for beta chain variable domain of TCR clone 94168 (TRBV7-3, TRBJ2-5)
CASSFRGGETQYF

SEQ ID NO: 188337 - protein, 13 aa, Homo sapiens
  CDR3 for alpha chain variable domain of TCR clone 94169 (TRAV12-1, TRAJ40)
CVVPTSGTYKYIF

SEQ ID NO: 188338 - protein, 18 aa, Homo sapiens
  CDR3 for beta chain variable domain of TCR clone 94169 (TRBV7-6, TRBJ2-1)
CASSPRTRGMSSYNEQFF

SEQ ID NO: 188339 - protein, 11 aa, Homo sapiens
  CDR3 for alpha chain variable domain of TCR clone 94170 (TRAV2, TRAJ13)
CASGGYQKVTF

SEQ ID NO: 188340 - protein, 13 aa, Homo sapiens
  CDR3 for beta chain variable domain of TCR clone 94170 (TRBV20-1, TRBJ1-1)
CSARVGGNTEASF

SEQ ID NO: 188341 - protein, 15 aa, Homo sapiens
  CDR3 for alpha chain variable domain of TCR clone 94171 (TRAV3, TRAJ3)
CAVRDGHSSASKIIF

SEQ ID NO: 188342 - protein, 14 aa, Homo sapiens
  CDR3 for beta chain variable domain of TCR clone 94171 (TRBV28, TRBJ1-4)
CASSFGTVDEKLFF

SEQ ID NO: 188343 - protein, 13 aa, Homo sapiens
  CDR3 for alpha chain variable domain of TCR clone 94172 (TRAV27, TRAJ6)
CAGGTRGRYIPTF

SEQ ID NO: 188344 - protein, 15 aa, Homo sapiens
  CDR3 for beta chain variable domain of TCR clone 94172 (TRBV11-2, TRBJ1-3)
CASSLSPLVRDTIYF

SEQ ID NO: 188345 - protein, 14 aa, Homo sapiens
  CDR3 for alpha chain variable domain of TCR clone 94173 (TRAV30, TRAJ26)
CGTEIVSYGQNFVF

SEQ ID NO: 188346 - protein, 16 aa, Homo sapiens
  CDR3 for beta chain variable domain of TCR clone 94173 (TRBV19, TRBJ2-1)
CASSKAGPSSYNEQFF

SEQ ID NO: 188347 - protein, 14 aa, Homo sapiens
  CDR3 for alpha chain variable domain of TCR clone 94174 (TRAV1-2, TRAJ16)
CAVSRFSDGQKLLF

SEQ ID NO: 188348 - protein, 13 aa, Homo sapiens
  CDR3 for beta chain variable domain of TCR clone 94174 (TRBV7-6, TRBJ2-3)
CASSLGSDNTQYF

SEQ ID NO: 188349 - protein, 14 aa, Homo sapiens
  CDR3 for alpha chain variable domain of TCR clone 94175 (TRAV24, TRAJ42)
CAQNYGGSQGNLIF

SEQ ID NO: 188350 - protein, 16 aa, Homo sapiens
  CDR3 for beta chain variable domain of TCR clone 94175 (TRBV19, TRBJ2-1)
CASSKAGPSSYNEQFF

SEQ ID NO: 188351 - protein, 13 aa, Homo sapiens
  CDR3 for alpha chain variable domain of TCR clone 94176 (TRAV1-1, TRAJ9)
CAAKNTGGFKTIF

SEQ ID NO: 188352 - protein, 13 aa, Homo sapiens
  CDR3 for beta chain variable domain of TCR clone 94176 (TRBV20-1, TRBJ1-1)
CSAPLGGGTEAFF

SEQ ID NO: 188353 - protein, 13 aa, Homo sapiens
  CDR3 for alpha chain variable domain of TCR clone 94177 (TRAV2, TRAJ47)
CAVDREYGNKMVF

SEQ ID NO: 188354 - protein, 17 aa, Homo sapiens
  CDR3 for beta chain variable domain of TCR clone 94177 (TRBV15, TRBJ1-5)
CATSRVKGIYSNQPQHF

SEQ ID NO: 188355 - protein, 16 aa, Homo sapiens
  CDR3 for alpha chain variable domain of TCR clone 94178 (TRAV4, TRAJ18)
CCVLLIGGSTLGRLYF

SEQ ID NO: 188356 - protein, 15 aa, Homo sapiens
  CDR3 for beta chain variable domain of TCR clone 94178 (TRBV10-3, TRBJ2-6)
CATPAAASGANVLTF

SEQ ID NO: 188357 - protein, 14 aa, Homo sapiens
  CDR3 for alpha chain variable domain of TCR clone 94179 (TRAV1-2, TRAJ16)
CAVNRFSDGQKLLF

SEQ ID NO: 188358 - protein, 16 aa, Homo sapiens
  CDR3 for beta chain variable domain of TCR clone 94179 (TRBV7-2, TRBJ2-7)
CASSLDLSGGAYEQYV

SEQ ID NO: 188359 - protein, 11 aa, Homo sapiens
  CDR3 for alpha chain variable domain of TCR clone 94180 (TRAV1-1, TRAJ23)
CAVRQGGKLIF

SEQ ID NO: 188360 - protein, 14 aa, Homo sapiens
  CDR3 for beta chain variable domain of TCR clone 94180 (TRBV7-3, TRBJ2-2)
CASSSGGYTGELFF

SEQ ID NO: 188361 - protein, 13 aa, Homo sapiens
  CDR3 for alpha chain variable domain of TCR clone 94181 (TRAV17, TRAJ9)
CATDYTGGFKTIF

SEQ ID NO: 188362 - protein, 15 aa, Homo sapiens
  CDR3 for beta chain variable domain of TCR clone 94181 (TRBV19, TRBJ1-2)
CASSVGQVLNYGYTF

SEQ ID NO: 188363 - protein, 12 aa, Homo sapiens
  CDR3 for alpha chain variable domain of TCR clone 94182 (TRAV29/DV5, TRAJ15)
CASNQAGTALIF

SEQ ID NO: 188364 - protein, 15 aa, Homo sapiens
  CDR3 for beta chain variable domain of TCR clone 94182 (TRBV11-2, TRBJ2-2)
CASSSDRVNDGELFF

SEQ ID NO: 188365 - protein, 14 aa, Homo sapiens
  CDR3 for alpha chain variable domain of TCR clone 94183 (TRAV23/DV6, TRAJ8)
CAASTATGFQKLVF

SEQ ID NO: 188366 - protein, 15 aa, Homo sapiens
  CDR3 for beta chain variable domain of TCR clone 94183 (TRBV28, TRBJ2-3)
CASSPDRRGANTQYF

SEQ ID NO: 188367 - protein, 12 aa, Homo sapiens
  CDR3 for alpha chain variable domain of TCR clone 94184 (TRAV25, TRAJ11)
CAGASGYSTLTF

SEQ ID NO: 188368 - protein, 14 aa, Homo sapiens
  CDR3 for beta chain variable domain of TCR clone 94184 (TRBV5-8, TRBJ2-3)
CASSLGRGTDTQYF

SEQ ID NO: 188369 - protein, 15 aa, Homo sapiens
  CDR3 for alpha chain variable domain of TCR clone 94185 (TRAV26-2, TRAJ39)
CSLRGNNNAGNMLTF

SEQ ID NO: 188370 - protein, 15 aa, Homo sapiens
  CDR3 for beta chain variable domain of TCR clone 94185 (TRBV5-4, TRBJ1-1)
CASSSLGWANTEALF

SEQ ID NO: 188371 - protein, 13 aa, Homo sapiens
  CDR3 for alpha chain variable domain of TCR clone 94186 (TRAV13-1, TRAJ10)
CAALEGGGNKLTF

SEQ ID NO: 188372 - protein, 13 aa, Homo sapiens
  CDR3 for beta chain variable domain of TCR clone 94186 (TRBV12-4, TRBJ1-2)
CASSLRQGKGYTS

SEQ ID NO: 188373 - protein, 12 aa, Homo sapiens
  CDR3 for alpha chain variable domain of TCR clone 94187 (TRAV16, TRAJ8)
CAPLGGFQKLVF

SEQ ID NO: 188374 - protein, 16 aa, Homo sapiens
  CDR3 for beta chain variable domain of TCR clone 94187 (TRBV13, TRBJ2-2)
CASSPRTGEHTGELFF

SEQ ID NO: 188375 - protein, 12 aa, Homo sapiens
  CDR3 for alpha chain variable domain of TCR clone 94188 (TRAV3, TRAJ20)
CAVRDPDYKLSF

SEQ ID NO: 188376 - protein, 11 aa, Homo sapiens
  CDR3 for beta chain variable domain of TCR clone 94188 (TRBV11-2, TRBJ2-7)
CASSSDYEQYF

SEQ ID NO: 188377 - protein, 14 aa, Homo sapiens
  CDR3 for alpha chain variable domain of TCR clone 94189 (TRAV1-1, TRAJ34)
CAVSPSYNTDKLIF

SEQ ID NO: 188378 - protein, 16 aa, Homo sapiens
  CDR3 for beta chain variable domain of TCR clone 94189 (TRBV19, TRBJ2-1)
CASNSKGTRSYNEQFF

SEQ ID NO: 188379 - protein, 13 aa, Homo sapiens
  CDR3 for alpha chain variable domain of TCR clone 94190 (TRAV17, TRAJ26)
CATVDNYGQNFVF

SEQ ID NO: 188380 - protein, 16 aa, Homo sapiens
  CDR3 for beta chain variable domain of TCR clone 94190 (TRBV2, TRBJ2-1)
CASSVVGSLSYNEQFF

SEQ ID NO: 188381 - protein, 15 aa, Homo sapiens
  CDR3 for alpha chain variable domain of TCR clone 94191 (TRAV12-2, TRAJ42)
CAVNSHGGSQGNIIF

SEQ ID NO: 188382 - protein, 13 aa, Homo sapiens
  CDR3 for beta chain variable domain of TCR clone 94191 (TRBV27, TRBJ1-1)
CASSVSANTEAFF

SEQ ID NO: 188383 - protein, 14 aa, Homo sapiens
  CDR3 for alpha chain variable domain of TCR clone 94192 (TRAV12-3, TRAJ20)
CAVSARRGDYKLSF

SEQ ID NO: 188384 - protein, 14 aa, Homo sapiens
  CDR3 for beta chain variable domain of TCR clone 94192 (TRBV7-3, TRBJ2-3)
CASSPSARTDTQYF

SEQ ID NO: 188385 - protein, 13 aa, Homo sapiens
  CDR3 for alpha chain variable domain of TCR clone 94193 (TRAV21, TRAJ27)
CAARPGNTGKSTF

SEQ ID NO: 188386 - protein, 14 aa, Homo sapiens
  CDR3 for beta chain variable domain of TCR clone 94193 (TRBV11-2, TRBJ2-7)
CASSLGAGAYEQYF

SEQ ID NO: 188387 - protein, 12 aa, Homo sapiens
  CDR3 for alpha chain variable domain of TCR clone 94194 (TRAV12-3, TRAJ17)
CAMTLTGNKLTF

SEQ ID NO: 188388 - protein, 15 aa, Homo sapiens
  CDR3 for beta chain variable domain of TCR clone 94194 (TRBV19, TRBJ2-1)
CASSILGEGRNEQFF

SEQ ID NO: 188389 - protein, 13 aa, Homo sapiens
  CDR3 for alpha chain variable domain of TCR clone 94195 (TRAV8-6, TRAJ49)
CAVITNTGNQFYF

SEQ ID NO: 188390 - protein, 14 aa, Homo sapiens
  CDR3 for beta chain variable domain of TCR clone 94195 (TRBV5-1, TRBJ2-7)
CTSSRGESLYEQYF

SEQ ID NO: 188391 - protein, 13 aa, Homo sapiens
  CDR3 for alpha chain variable domain of TCR clone 94196 (TRAV27, TRAJ49)
CAPLPYTGNQFYF

SEQ ID NO: 188392 - protein, 18 aa, Homo sapiens
  CDR3 for beta chain variable domain of TCR clone 94196 (TRBV7-3, TRBJ2-5)
CASSLGGAAQGRWETQYF

SEQ ID NO: 188393 - protein, 18 aa, Homo sapiens
  CDR3 for alpha chain variable domain of TCR clone 94197 (TRAV12-3, TRAJ52)
CAMSVGGAGGTSSGKLTF

SEQ ID NO: 188394 - protein, 15 aa, Homo sapiens
  CDR3 for beta chain variable domain of TCR clone 94197 (TRBV27, TRBJ1-6)
CASSFDRGLGSPLHF

SEQ ID NO: 188395 - protein, 13 aa, Homo sapiens
  CDR3 for alpha chain variable domain of TCR clone 94198 (TRAV1-1, TRAJ13)
CAVNSGGYQKVIF

SEQ ID NO: 188396 - protein, 12 aa, Homo sapiens
  CDR3 for beta chain variable domain of TCR clone 94198 (TRBV28, TRBJ2-1)
CASSVQINEQFF

SEQ ID NO: 188397 - protein, 13 aa, Homo sapiens
  CDR3 for alpha chain variable domain of TCR clone 94199 (TRAV2, TRAJ29)
CAAGNSGNTPLVL

SEQ ID NO: 188398 - protein, 16 aa, Homo sapiens
  CDR3 for beta chain variable domain of TCR clone 94199 (TRBV7-9, TRBJ1-2)
CASSPGGGAINYGYTF

SEQ ID NO: 188399 - protein, 14 aa, Homo sapiens
  CDR3 for alpha chain variable domain of TCR clone 94200 (TRAV23/DV6, TRAJ11)
CAASLESVYSTLTF

SEQ ID NO: 188400 - protein, 13 aa, Homo sapiens
  CDR3 for beta chain variable domain of TCR clone 94200 (TRBV4-1, TRBJ2-5)
CASSLTRGETQYF

SEQ ID NO: 188401 - protein, 11 aa, Homo sapiens
  CDR3 for alpha chain variable domain of TCR clone 94201 (TRAV4, TRAJ31)
CLVGDNARIMF

SEQ ID NO: 188402 - protein, 16 aa, Homo sapiens
  CDR3 for beta chain variable domain of TCR clone 94201 (TRBV7-2, TRBJ2-5)
CASSSKWLSGQETQYF

SEQ ID NO: 188403 - protein, 14 aa, Homo sapiens
  CDR3 for alpha chain variable domain of TCR clone 94202 (TRAV12-3, TRAJ10)
SHLPLTGGGNKLTF

SEQ ID NO: 188404 - protein, 13 aa, Homo sapiens
  CDR3 for beta chain variable domain of TCR clone 94202 (TRBV6-5, TRBJ2-5)
CASSPQGGETQYF

SEQ ID NO: 188405 - protein, 13 aa, Homo sapiens
  CDR3 for alpha chain variable domain of TCR clone 94203 (TRAV3, TRAJ15)
CAVRDQAGTALIF

SEQ ID NO: 188406 - protein, 12 aa, Homo sapiens
  CDR3 for beta chain variable domain of TCR clone 94203 (TRBV19, TRBJ2-1)
CASSRQGAEQFF

SEQ ID NO: 188407 - protein, 12 aa, Homo sapiens
  CDR3 for alpha chain variable domain of TCR clone 94204 (TRAV12-3, TRAJ17)
CAMTLTGNKLTF

SEQ ID NO: 188408 - protein, 12 aa, Homo sapiens
  CDR3 for beta chain variable domain of TCR clone 94204 (TRBV7-8, TRBJ2-7)
CASSLAGYEQYF

SEQ ID NO: 188409 - protein, 16 aa, Homo sapiens
  CDR3 for alpha chain variable domain of TCR clone 94205 (TRAV12-1, TRAJ13)
CVVNLEVSGGYQKVTF

SEQ ID NO: 188410 - protein, 11 aa, Homo sapiens
  CDR3 for beta chain variable domain of TCR clone 94205 (TRBV11-2, TRBJ2-2)
CASSLPGELFF

SEQ ID NO: 188411 - protein, 12 aa, Homo sapiens
  CDR3 for alpha chain variable domain of TCR clone 94206 (TRAV13-2, TRAJ5)
CREDTGRRALTF

SEQ ID NO: 188412 - protein, 13 aa, Homo sapiens
  CDR3 for beta chain variable domain of TCR clone 94206 (TRBV7-3, TRBJ1-1)
CASSQDWGAEAFF

SEQ ID NO: 188413 - protein, 14 aa, Homo sapiens
  CDR3 for alpha chain variable domain of TCR clone 94207 (TRAV12-2, TRAJ13)
CAVKKTGGYQKVTF

SEQ ID NO: 188414 - protein, 14 aa, Homo sapiens
  CDR3 for beta chain variable domain of TCR clone 94207 (TRBV2, TRBJ2-1)
CASRTGSSYNEQFF

SEQ ID NO: 188415 - protein, 14 aa, Homo sapiens
  CDR3 for alpha chain variable domain of TCR clone 94208 (TRAV8-3, TRAJ6)
CAVCASGGSYIPTF

SEQ ID NO: 188416 - protein, 17 aa, Homo sapiens
  CDR3 for beta chain variable domain of TCR clone 94208 (TRBV18, TRBJ2-2)
CASSPSDPWQNTGELFF

SEQ ID NO: 188417 - protein, 14 aa, Homo sapiens
  CDR3 for alpha chain variable domain of TCR clone 94209 (TRAV35, TRAJ33)
CAGSSQDSNYQLIC

SEQ ID NO: 188418 - protein, 15 aa, Homo sapiens
  CDR3 for beta chain variable domain of TCR clone 94209 (TRBV6-5, TRBJ2-1)
CASSYDAGAGNEQFF

SEQ ID NO: 188419 - protein, 13 aa, Homo sapiens
  CDR3 for alpha chain variable domain of TCR clone 94210 (TRAV3, TRAJ21)
CAVREPDFNKFYF

SEQ ID NO: 188420 - protein, 15 aa, Homo sapiens
  CDR3 for beta chain variable domain of TCR clone 94210 (TRBV6-5, TRBJ2-1)
CASSYDAGAGNEQFF

SEQ ID NO: 188421 - protein, 13 aa, Homo sapiens
  CDR3 for alpha chain variable domain of TCR clone 94211 (TRAV2, TRAJ15)
CAVASQAGTVLIF

SEQ ID NO: 188422 - protein, 16 aa, Homo sapiens
  CDR3 for beta chain variable domain of TCR clone 94211 (TRBV7-8, TRBJ2-4)
CASSAERTLAKNIQYF

SEQ ID NO: 188423 - protein, 13 aa, Homo sapiens
  CDR3 for alpha chain variable domain of TCR clone 94212 (TRAV2, TRAJ40)
CAVGTSGTYKYIF

SEQ ID NO: 188424 - protein, 15 aa, Homo sapiens
  CDR3 for beta chain variable domain of TCR clone 94212 (TRBV11-3, TRBJ2-3)
CASLKDGREGDTQYF

SEQ ID NO: 188425 - protein, 13 aa, Homo sapiens
  CDR3 for alpha chain variable domain of TCR clone 94213 (TRAV36/DV7, TRAJ37)
CAVFSSNTGKLIF

SEQ ID NO: 188426 - protein, 15 aa, Homo sapiens
  CDR3 for beta chain variable domain of TCR clone 94213 (TRBV7-2, TRBJ2-1)
CASTHGTGIYNEQFF

SEQ ID NO: 188427 - protein, 14 aa, Homo sapiens
  CDR3 for alpha chain variable domain of TCR clone 94214 (TRAV1-2, TRAJ8)
CAVREDTGSQKLVF

SEQ ID NO: 188428 - protein, 16 aa, Homo sapiens
  CDR3 for beta chain variable domain of TCR clone 94214 (TRBV29-1, TRBJ2-7)
CSVEVVGTSGSYEQYF

SEQ ID NO: 188429 - protein, 12 aa, Homo sapiens
  CDR3 for alpha chain variable domain of TCR clone 94215 (TRAV8-3, TRAJ20)
CAVDFKDYKLSF

SEQ ID NO: 188430 - protein, 13 aa, Homo sapiens
  CDR3 for beta chain variable domain of TCR clone 94215 (TRBV5-7, TRBJ2-3)
CASSLGRTDTQYF

SEQ ID NO: 188431 - protein, 13 aa, Homo sapiens
  CDR3 for alpha chain variable domain of TCR clone 94216 (TRAV20, TRAJ37)
CAGCSSNTGKLIF

SEQ ID NO: 188432 - protein, 13 aa, Homo sapiens
  CDR3 for beta chain variable domain of TCR clone 94216 (TRBV10-3, TRBJ2-7)
CASKLAVNYEQYF

SEQ ID NO: 188433 - protein, 15 aa, Homo sapiens
  CDR3 for alpha chain variable domain of TCR clone 94217 (TRAV26-1, TRAJ48)
CIVRGGDFGNEKLTF

SEQ ID NO: 188434 - protein, 16 aa, Homo sapiens
  CDR3 for beta chain variable domain of TCR clone 94217 (TRBV4-1, TRBJ2-3)
CASSQRAGGLTDTQYF

SEQ ID NO: 188435 - protein, 15 aa, Homo sapiens
  CDR3 for alpha chain variable domain of TCR clone 94218 (TRAV8-1, TRAJ6)
CAVNAGAGGSYIPPF

SEQ ID NO: 188436 - protein, 14 aa, Homo sapiens
  CDR3 for beta chain variable domain of TCR clone 94218 (TRBV25-1, TRBJ1-6)
CASSLSADISPLHF

SEQ ID NO: 188437 - protein, 11 aa, Homo sapiens
  CDR3 for alpha chain variable domain of TCR clone 94219 (TRAV12-1, TRAJ26)
CVVAYGQNFVF

SEQ ID NO: 188438 - protein, 15 aa, Homo sapiens
  CDR3 for beta chain variable domain of TCR clone 94219 (TRBV12-4, TRBJ2-5)
CASSGTGQAQETQYL

SEQ ID NO: 188439 - protein, 11 aa, Homo sapiens
  CDR3 for alpha chain variable domain of TCR clone 94220 (TRAV35, TRAJ34)
CWARNTDKLIF

SEQ ID NO: 188440 - protein, 17 aa, Homo sapiens
  CDR3 for beta chain variable domain of TCR clone 94220 (TRBV20-1, TRBJ2-2)
CSASGSGQGGLTGELFF

SEQ ID NO: 188441 - protein, 15 aa, Homo sapiens
  CDR3 for alpha chain variable domain of TCR clone 94221 (TRAV8-3, TRAJ45)
CASSYSGGGADGLTF

SEQ ID NO: 188442 - protein, 13 aa, Homo sapiens
  CDR3 for beta chain variable domain of TCR clone 94221 (TRBV10-3, TRBJ2-7)
CASKLTVNYEHYF

SEQ ID NO: 188443 - protein, 16 aa, Homo sapiens
  CDR3 for alpha chain variable domain of TCR clone 94222 (TRAV16, TRAJ52)
CALSGVGGTSYGKLTF

SEQ ID NO: 188444 - protein, 14 aa, Homo sapiens
  CDR3 for beta chain variable domain of TCR clone 94222 (TRBV19, TRBJ1-2)
CASSLQWQAYGYTF

SEQ ID NO: 188445 - protein, 16 aa, Homo sapiens
  CDR3 for alpha chain variable domain of TCR clone 94223 (TRAV26-1, TRAJ23)
CIVRPHGNNQGGKLNF

SEQ ID NO: 188446 - protein, 14 aa, Homo sapiens
  CDR3 for beta chain variable domain of TCR clone 94223 (TRBV19, TRBJ2-1)
CASPTFVLSGEQFF

SEQ ID NO: 188447 - protein, 14 aa, Homo sapiens
  CDR3 for alpha chain variable domain of TCR clone 94224 (TRAV9-2, TRAJ39)
CALYIYNAGNMLTV

SEQ ID NO: 188448 - protein, 14 aa, Homo sapiens
  CDR3 for beta chain variable domain of TCR clone 94224 (TRBV6-1, TRBJ1-3)
CASVQGGGGNTIYF

SEQ ID NO: 188449 - protein, 14 aa, Homo sapiens
  CDR3 for alpha chain variable domain of TCR clone 94225 (TRAV14/DV4, TRAJ15)
CAMRRDQAGTALIL

SEQ ID NO: 188450 - protein, 11 aa, Homo sapiens
  CDR3 for beta chain variable domain of TCR clone 94225 (TRBV7-2, TRBJ2-7)
CASSSGLWQYF

SEQ ID NO: 188451 - protein, 15 aa, Homo sapiens
  CDR3 for alpha chain variable domain of TCR clone 94226 (TRAV8-2, TRAJ40)
CVVLGTTSGTYKYIF

SEQ ID NO: 188452 - protein, 16 aa, Homo sapiens
  CDR3 for beta chain variable domain of TCR clone 94226 (TRBV7-3, TRBJ2-1)
GASSLEGYRSYNEQFF

SEQ ID NO: 188453 - protein, 13 aa, Homo sapiens
  CDR3 for alpha chain variable domain of TCR clone 94227 (TRAV2, TRAJ15)
YAVASQAGTALIF

SEQ ID NO: 188454 - protein, 17 aa, Homo sapiens
  CDR3 for beta chain variable domain of TCR clone 94227 (TRBV20-1, TRBJ2-2)
CSASGSGQGGLTGELFF

SEQ ID NO: 188455 - protein, 15 aa, Homo sapiens
  CDR3 for alpha chain variable domain of TCR clone 94228 (TRAV1-2, TRAJ30)
CAVRPHGNRDDKIIF

SEQ ID NO: 188456 - protein, 13 aa, Homo sapiens
  CDR3 for beta chain variable domain of TCR clone 94228 (TRBV4-1, TRBJ2-7)
CASSQGQAYEQYV

SEQ ID NO: 188457 - protein, 10 aa, Homo sapiens
  CDR3 for alpha chain variable domain of TCR clone 94229 (TRAV23/DV6, TRAJ57)
CAASSTLSQS

SEQ ID NO: 188458 - protein, 15 aa, Homo sapiens
  CDR3 for beta chain variable domain of TCR clone 94229 (TRBV11-2, TRBJ2-1)
CASSLGTSGLNEQFF

SEQ ID NO: 188459 - protein, 15 aa, Homo sapiens
  CDR3 for alpha chain variable domain of TCR clone 94230 (TRAV26-1, TRAJ29)
CIVRVEGSGNTPLVF

SEQ ID NO: 188460 - protein, 13 aa, Homo sapiens
  CDR3 for beta chain variable domain of TCR clone 94230 (TRBV12-5, TRBJ2-3)
CASGDRQSDTQYF

SEQ ID NO: 188461 - protein, 13 aa, Homo sapiens
  CDR3 for alpha chain variable domain of TCR clone 94231 (TRAV3, TRAJ20)
CAVRGLNDYKLSF

SEQ ID NO: 188462 - protein, 13 aa, Homo sapiens
  CDR3 for beta chain variable domain of TCR clone 94231 (TRBV6-1, TRBJ2-1)
CAGMDPTNNEQFF

SEQ ID NO: 188463 - protein, 14 aa, Homo sapiens
  CDR3 for alpha chain variable domain of TCR clone 94232 (TRAV26-1, TRAJ45)
CIEVTGGGADGLTF

SEQ ID NO: 188464 - protein, 14 aa, Homo sapiens
  CDR3 for beta chain variable domain of TCR clone 94232 (TRBV19, TRBJ2-1)
CASPTFVLSGEQFF

SEQ ID NO: 188465 - protein, 14 aa, Homo sapiens
  CDR3 for alpha chain variable domain of TCR clone 94233 (TRAV1-2, TRAJ8)
CAVREDTGFEKLVF

SEQ ID NO: 188466 - protein, 16 aa, Homo sapiens
  CDR3 for beta chain variable domain of TCR clone 94233 (TRBV28, TRBJ1-4)
CASSPPYRGRSEKLFF

SEQ ID NO: 188467 - protein, 16 aa, Homo sapiens
  CDR3 for alpha chain variable domain of TCR clone 94234 (TRAV3, TRAJ4)
CAVRPPPSGGYNKLIF

SEQ ID NO: 188468 - protein, 12 aa, Homo sapiens
  CDR3 for beta chain variable domain of TCR clone 94234 (TRBV7-9, TRBJ2-7)
CASSQGVYEQYF

SEQ ID NO: 188469 - protein, 21 aa, Homo sapiens
  CDR3 for alpha chain variable domain of TCR clone 94235 (TRAV36/DV7, TRAJ39)
TATQTGDSAIYLPNAGNMLTF

SEQ ID NO: 188470 - protein, 15 aa, Homo sapiens
  CDR3 for beta chain variable domain of TCR clone 94235 (TRBV2, TRBJ2-3)
CASSDFEKATDTQYF

SEQ ID NO: 188471 - protein, 15 aa, Homo sapiens
  CDR3 for alpha chain variable domain of TCR clone 94236 (TRAV13-1, TRAJ10)
CAATILTGGGNKLTL

SEQ ID NO: 188472 - protein, 15 aa, Homo sapiens
  CDR3 for beta chain variable domain of TCR clone 94236 (TRBV2, TRBJ2-7)
CASTLLGSGATGQYF

SEQ ID NO: 188473 - protein, 15 aa, Homo sapiens
  CDR3 for alpha chain variable domain of TCR clone 94237 (TRAV12-1, TRAJ9)
CVVSFGDTGGFKTIF

SEQ ID NO: 188474 - protein, 13 aa, Homo sapiens
  CDR3 for beta chain variable domain of TCR clone 94237 (TRBV2, TRBJ1-4)
CASSERSWEKLFF

SEQ ID NO: 188475 - protein, 13 aa, Homo sapiens
  CDR3 for alpha chain variable domain of TCR clone 94238 (TRAV13-1, TRAJ5)
CAARVTGRRALTF

SEQ ID NO: 188476 - protein, 15 aa, Homo sapiens
  CDR3 for beta chain variable domain of TCR clone 94238 (TRBV7-9, TRBJ2-7)
CASSPGGGLTYAQYF

SEQ ID NO: 188477 - protein, 10 aa, Homo sapiens
  CDR3 for alpha chain variable domain of TCR clone 94239 (TRAV12-1, TRAJ37)
ARGNTGELIF

SEQ ID NO: 188478 - protein, 14 aa, Homo sapiens
  CDR3 for beta chain variable domain of TCR clone 94239 (TRBV7-2, TRBJ2-7)
CASSPKTSFYEQYF

SEQ ID NO: 188479 - protein, 16 aa, Homo sapiens
  CDR3 for alpha chain variable domain of TCR clone 94240 (TRAV27, TRAJ48)
TAAQPGDTGLYLPLTF

SEQ ID NO: 188480 - protein, 12 aa, Homo sapiens
  CDR3 for beta chain variable domain of TCR clone 94240 (TRBV11-2, TRBJ2-2)
CASSLGGGELFF

SEQ ID NO: 188481 - protein, 15 aa, Homo sapiens
  CDR3 for alpha chain variable domain of TCR clone 94241 (TRAV8-3, TRAJ23)
CAVGDRYNQGGNLIF

SEQ ID NO: 188482 - protein, 22 aa, Homo sapiens
  CDR3 for beta chain variable domain of TCR clone 94241 (TRBV29-1, TRBJ2-5)
TVSNMSPEDSSIYLCSAGTQYF

SEQ ID NO: 188483 - protein, 15 aa, Homo sapiens
  CDR3 for alpha chain variable domain of TCR clone 94242 (TRAV29/DV5, TRAJ24)
CAASGATDSWGKFQF

SEQ ID NO: 188484 - protein, 14 aa, Homo sapiens
  CDR3 for beta chain variable domain of TCR clone 94242 (TRBV11-2, TRBJ2-5)
CASSRTGGIETQYF

SEQ ID NO: 188485 - protein, 16 aa, Homo sapiens
  CDR3 for alpha chain variable domain of TCR clone 94243 (TRAV3, TRAJ22)
CAVRDMGSGSARQLTF

SEQ ID NO: 188486 - protein, 15 aa, Homo sapiens
  CDR3 for beta chain variable domain of TCR clone 94243 (TRBV7-2, TRBJ2-3)
CASSLRGGSTDTQYF

SEQ ID NO: 188487 - protein, 15 aa, Homo sapiens
  CDR3 for alpha chain variable domain of TCR clone 94244 (TRAV3, TRAJ12)
CAVRDIRDSSYKLIF

SEQ ID NO: 188488 - protein, 15 aa, Homo sapiens
  CDR3 for beta chain variable domain of TCR clone 94244 (TRBV2, TRBJ2-1)
CASDIGLAGEGEQFF

SEQ ID NO: 188489 - protein, 14 aa, Homo sapiens
  CDR3 for alpha chain variable domain of TCR clone 94245 (TRAV1-1, TRAJ27)
CAVIYSTNAGKSTF

SEQ ID NO: 188490 - protein, 15 aa, Homo sapiens
  CDR3 for beta chain variable domain of TCR clone 94245 (TRBV6-3, TRBJ2-7)
CASSSPGTVFYEQYF

SEQ ID NO: 188491 - protein, 14 aa, Homo sapiens
  CDR3 for alpha chain variable domain of TCR clone 94246 (TRAV29/DV5, TRAJ20)
CAASAPIEDYKLSF

SEQ ID NO: 188492 - protein, 13 aa, Homo sapiens
  CDR3 for beta chain variable domain of TCR clone 94246 (TRBV28, TRBJ2-4)
CASSQSSKNIQYF

SEQ ID NO: 188493 - protein, 13 aa, Homo sapiens
  CDR3 for alpha chain variable domain of TCR clone 94247 (TRAV17, TRAJ21)
CATDGGNFNKFYF

SEQ ID NO: 188494 - protein, 20 aa, Homo sapiens
  CDR3 for beta chain variable domain of TCR clone 94247 (TRBV7-8, TRBJ2-2)
CASSHLFPGPTIHITGELFF

SEQ ID NO: 188495 - protein, 15 aa, Homo sapiens
  CDR3 for alpha chain variable domain of TCR clone 94248 (TRAV20, TRAJ4)
CAVEGSSGGYNNLIF

SEQ ID NO: 188496 - protein, 14 aa, Homo sapiens
  CDR3 for beta chain variable domain of TCR clone 94248 (TRBV7-8, TRBJ2-7)
CASTLGGALGEQYF

SEQ ID NO: 188497 - protein, 16 aa, Homo sapiens
  CDR3 for alpha chain variable domain of TCR clone 94249 (TRAV29/DV5, TRAJ39)
CAASLLFNNAGNILTF

SEQ ID NO: 188498 - protein, 16 aa, Homo sapiens
  CDR3 for beta chain variable domain of TCR clone 94249 (TRBV19, TRBJ2-6)
CASSMSGLSGANVLTF

SEQ ID NO: 188499 - protein, 14 aa, Homo sapiens
  CDR3 for alpha chain variable domain of TCR clone 94250 (TRAV12-3, TRAJ41)
CAMSAGNSGYALNF

SEQ ID NO: 188500 - protein, 11 aa, Homo sapiens
  CDR3 for beta chain variable domain of TCR clone 94250 (TRBV7-2, TRBJ2-3)
CASSSSDTQYL

SEQ ID NO: 188501 - protein, 15 aa, Homo sapiens
  CDR3 for alpha chain variable domain of TCR clone 94251 (TRAV16, TRAJ4)
CALEDPSGGCNKLIF

SEQ ID NO: 188502 - protein, 13 aa, Homo sapiens
  CDR3 for beta chain variable domain of TCR clone 94251 (TRBV7-3, TRBJ2-7)
CASSQAGGYEQYF

SEQ ID NO: 188503 - protein, 18 aa, Homo sapiens
  CDR3 for alpha chain variable domain of TCR clone 94252 (TRAV9-2, TRAJ52)
CALSRHNAGGTSYGKLTF

SEQ ID NO: 188504 - protein, 13 aa, Homo sapiens
  CDR3 for beta chain variable domain of TCR clone 94252 (TRBV7-9, TRBJ1-2)
SASSLKQNYGYTF

SEQ ID NO: 188505 - protein, 17 aa, Homo sapiens
  CDR3 for alpha chain variable domain of TCR clone 94253 (TRAV12-2, TRAJ5)
CAVNKKMTDTGRRALTF

SEQ ID NO: 188506 - protein, 15 aa, Homo sapiens
  CDR3 for beta chain variable domain of TCR clone 94253 (TRBV20-1, TRBJ2-7)
CSAESGTSGAYEQYF

SEQ ID NO: 188507 - protein, 15 aa, Homo sapiens
  CDR3 for alpha chain variable domain of TCR clone 94254 (TRAV38-1, TRAJ37)
CAFIFGSGNTGKLIF

SEQ ID NO: 188508 - protein, 14 aa, Homo sapiens
  CDR3 for beta chain variable domain of TCR clone 94254 (TRBV18, TRBJ2-5)
CASSPGVSQETQYF

SEQ ID NO: 188509 - protein, 13 aa, Homo sapiens
  CDR3 for alpha chain variable domain of TCR clone 94255 (TRAV21, TRAJ40)
CAVRPSRAYKHIF

SEQ ID NO: 188510 - protein, 12 aa, Homo sapiens
  CDR3 for beta chain variable domain of TCR clone 94255 (TRBV14, TRBJ2-5)
CASSQLKETQYF

SEQ ID NO: 188511 - protein, 15 aa, Homo sapiens
  CDR3 for alpha chain variable domain of TCR clone 94256 (TRAV3, TRAJ27)
CAVRDMSTNAGKSTF

SEQ ID NO: 188512 - protein, 12 aa, Homo sapiens
  CDR3 for beta chain variable domain of TCR clone 94256 (TRBV12-4, TRBJ1-3)
CASSFSGNTIYF

SEQ ID NO: 188513 - protein, 13 aa, Homo sapiens
  CDR3 for alpha chain variable domain of TCR clone 94257 (TRAV12-3, TRAJ5)
CAMIYTGRRALTF

SEQ ID NO: 188514 - protein, 16 aa, Homo sapiens
  CDR3 for beta chain variable domain of TCR clone 94257 (TRBV19, TRBJ2-7)
CASSLIAGTYFYEQYF

SEQ ID NO: 188515 - protein, 14 aa, Homo sapiens
  CDR3 for alpha chain variable domain of TCR clone 94258 (TRAV2, TRAJ37)
TTVPGSSNPGKLIF

SEQ ID NO: 188516 - protein, 14 aa, Homo sapiens
  CDR3 for beta chain variable domain of TCR clone 94258 (TRBV7-8, TRBJ2-7)
CASSLWQSSYEQYF

SEQ ID NO: 188517 - protein, 15 aa, Homo sapiens
  CDR3 for alpha chain variable domain of TCR clone 94259 (TRAV3, TRAJ17)
CAVRDTGAAGNKLTF

SEQ ID NO: 188518 - protein, 13 aa, Homo sapiens
  CDR3 for beta chain variable domain of TCR clone 94259 (TRBV7-3, TRBJ1-1)
CASSQDWGAEAFF

SEQ ID NO: 188519 - protein, 13 aa, Homo sapiens
  CDR3 for alpha chain variable domain of TCR clone 94260 (TRAV1-2, TRAJ12)
CAVSMDSSYKLNF

SEQ ID NO: 188520 - protein, 15 aa, Homo sapiens
  CDR3 for beta chain variable domain of TCR clone 94260 (TRBV27, TRBJ2-5)
CASSLIPSGGETQYF

SEQ ID NO: 188521 - protein, 13 aa, Homo sapiens
  CDR3 for alpha chain variable domain of TCR clone 94261 (TRAV20, TRAJ49)
CAVQARTGNQFYF

SEQ ID NO: 188522 - protein, 13 aa, Homo sapiens
  CDR3 for beta chain variable domain of TCR clone 94261 (TRBV11-2, TRBJ2-5)
CASSSTGEETQYF

SEQ ID NO: 188523 - protein, 13 aa, Homo sapiens
  CDR3 for alpha chain variable domain of TCR clone 94262 (TRAV13-1, TRAJ12)
CAASPDSSYKFIF

SEQ ID NO: 188524 - protein, 16 aa, Homo sapiens
  CDR3 for beta chain variable domain of TCR clone 94262 (TRBV15, TRBJ2-1)
CATSRERLAGAYEQFF

SEQ ID NO: 188525 - protein, 12 aa, Homo sapiens
  CDR3 for alpha chain variable domain of TCR clone 94263 (TRAV12-3, TRAJ34)
CAMGYSTDKLIF

SEQ ID NO: 188526 - protein, 15 aa, Homo sapiens
  CDR3 for beta chain variable domain of TCR clone 94263 (TRBV28, TRBJ2-1)
CASSIIAGGRSEQFF

SEQ ID NO: 188527 - protein, 17 aa, Homo sapiens
  CDR3 for alpha chain variable domain of TCR clone 94264 (TRAV38-2/DV8, TRAJ23)
CALSRKLIFGQGTELSV

SEQ ID NO: 188528 - protein, 13 aa, Homo sapiens
  CDR3 for beta chain variable domain of TCR clone 94264 (TRBV7-9, TRBJ1-2)
CASSLKQNYGYTF

SEQ ID NO: 188529 - protein, 13 aa, Homo sapiens
  CDR3 for alpha chain variable domain of TCR clone 94265 (TRAV20, TRAJ37)
CAGCSSNTGKLIF

SEQ ID NO: 188530 - protein, 19 aa, Homo sapiens
  CDR3 for beta chain variable domain of TCR clone 94265 (TRBV25-1, TRBJ2-2)
CAILVYRVDRGRKTGELFF

SEQ ID NO: 188531 - protein, 13 aa, Homo sapiens
  CDR3 for alpha chain variable domain of TCR clone 94266 (TRAV8-3, TRAJ28)
CAVGAVGSYQLTF

SEQ ID NO: 188532 - protein, 15 aa, Homo sapiens
  CDR3 for beta chain variable domain of TCR clone 94266 (TRBV10-1, TRBJ2-1)
CASSEWRGTYNEQFF

SEQ ID NO: 188533 - protein, 14 aa, Homo sapiens
  CDR3 for alpha chain variable domain of TCR clone 94267 (TRAV1-2, TRAJ16)
CAVNRVSDGQKLLF

SEQ ID NO: 188534 - protein, 14 aa, Homo sapiens
  CDR3 for beta chain variable domain of TCR clone 94267 (TRBV19, TRBJ2-1)
CASPTFVLSGEQFF

SEQ ID NO: 188535 - protein, 14 aa, Homo sapiens
  CDR3 for alpha chain variable domain of TCR clone 94268 (TRAV12-2, TRAJ48)
CAVNAFFGHEKLTF

SEQ ID NO: 188536 - protein, 13 aa, Homo sapiens
  CDR3 for beta chain variable domain of TCR clone 94268 (TRBV28, TRBJ2-7)
CAGAQQGLDEQYF

SEQ ID NO: 188537 - protein, 13 aa, Homo sapiens
  CDR3 for alpha chain variable domain of TCR clone 94269 (TRAV12-1, TRAJ11)
CVVNRAGYSTPTF

SEQ ID NO: 188538 - protein, 15 aa, Homo sapiens
  CDR3 for beta chain variable domain of TCR clone 94269 (TRBV7-3, TRBJ2-2)
CASSETGQGTGELFF

SEQ ID NO: 188539 - protein, 15 aa, Homo sapiens
  CDR3 for alpha chain variable domain of TCR clone 94270 (TRAV3, TRAJ47)
RAVRDIGEYGNKLVF

SEQ ID NO: 188540 - protein, 14 aa, Homo sapiens
  CDR3 for beta chain variable domain of TCR clone 94270 (TRBV13, TRBJ2-5)
CASSLERVGETQYF

SEQ ID NO: 188541 - protein, 14 aa, Homo sapiens
  CDR3 for alpha chain variable domain of TCR clone 94271 (TRAV12-2, TRAJ44)
CAVNPAGTASKLTF

SEQ ID NO: 188542 - protein, 15 aa, Homo sapiens
  CDR3 for beta chain variable domain of TCR clone 94271 (TRBV29-1, TRBJ2-7)
CSVEFLDRGSYEQYF

SEQ ID NO: 188543 - protein, 12 aa, Homo sapiens
  CDR3 for alpha chain variable domain of TCR clone 94272 (TRAV13-1, TRAJ21)
CAAKECFNKFYF

SEQ ID NO: 188544 - protein, 14 aa, Homo sapiens
  CDR3 for beta chain variable domain of TCR clone 94272 (TRBV5-4, TRBJ1-1)
CASSLDSRRDEAFF

SEQ ID NO: 188545 - protein, 17 aa, Homo sapiens
  CDR3 for alpha chain variable domain of TCR clone 94273 (TRAV13-1, TRAJ52)
CAAGRNAGGTSYGKLTF

SEQ ID NO: 188546 - protein, 13 aa, Homo sapiens
  CDR3 for beta chain variable domain of TCR clone 94273 (TRBV7-2, TRBJ1-1)
CASNLNGAKVAFF

SEQ ID NO: 188547 - protein, 15 aa, Homo sapiens
  CDR3 for alpha chain variable domain of TCR clone 94274 (TRAV2, TRAJ9)
CAVEDRGTGGFKTIF

SEQ ID NO: 188548 - protein, 14 aa, Homo sapiens
  CDR3 for beta chain variable domain of TCR clone 94274 (TRBV28, TRBJ2-7)
CASRVAGVGYEQYF

SEQ ID NO: 188549 - protein, 15 aa, Homo sapiens
  CDR3 for alpha chain variable domain of TCR clone 94275 (TRAV8-3, TRAJ15)
CAVGAPNQAGTARIF

SEQ ID NO: 188550 - protein, 14 aa, Homo sapiens
  CDR3 for beta chain variable domain of TCR clone 94275 (TRBV20-1, TRBJ2-1)
CSPNDEASYNEQFF

SEQ ID NO: 188551 - protein, 15 aa, Homo sapiens
  CDR3 for alpha chain variable domain of TCR clone 94276 (TRAV3, TRAJ22)
CAVRDRVGSARQLTF

SEQ ID NO: 188552 - protein, 15 aa, Homo sapiens
  CDR3 for beta chain variable domain of TCR clone 94276 (TRBV27, TRBJ2-1)
CASSNGGGSSNEQFF

SEQ ID NO: 188553 - protein, 15 aa, Homo sapiens
  CDR3 for alpha chain variable domain of TCR clone 94277 (TRAV3, TRAJ5)
CAVRDRKTGRRALTF

SEQ ID NO: 188554 - protein, 14 aa, Homo sapiens
  CDR3 for beta chain variable domain of TCR clone 94277 (TRBV7-6, TRBJ2-3)
CASSLGTVTDTQYF

SEQ ID NO: 188555 - protein, 14 aa, Homo sapiens
  CDR3 for alpha chain variable domain of TCR clone 94278 (TRAV2, TRAJ9)
CAVEDRSGGFETIF

SEQ ID NO: 188556 - protein, 18 aa, Homo sapiens
  CDR3 for beta chain variable domain of TCR clone 94278 (TRBV11-2, TRBJ2-3)
CASSLGGASRGAPNTQYF

SEQ ID NO: 188557 - protein, 16 aa, Homo sapiens
  CDR3 for alpha chain variable domain of TCR clone 94279 (TRAV16, TRAJ4)
CALSRMFSGGYNKLIF

SEQ ID NO: 188558 - protein, 16 aa, Homo sapiens
  CDR3 for beta chain variable domain of TCR clone 94279 (TRBV24-1, TRBJ2-3)
CATSDPGTGARDTQYF

SEQ ID NO: 188559 - protein, 13 aa, Homo sapiens
  CDR3 for alpha chain variable domain of TCR clone 94280 (TRAV12-1, TRAJ6)
CVVYPGGSYIPTF

SEQ ID NO: 188560 - protein, 13 aa, Homo sapiens
  CDR3 for beta chain variable domain of TCR clone 94280 (TRBV4-2, TRBJ1-1)
CASSQAGNNGAFF

SEQ ID NO: 188561 - protein, 14 aa, Homo sapiens
  CDR3 for alpha chain variable domain of TCR clone 94281 (TRAV35, TRAJ33)
CAGSSQDSNYQLIW

SEQ ID NO: 188562 - protein, 15 aa, Homo sapiens
  CDR3 for beta chain variable domain of TCR clone 94281 (TRBV19, TRBJ1-1)
CASTSGQIQNTEAFF

SEQ ID NO: 188563 - protein, 14 aa, Homo sapiens
  CDR3 for alpha chain variable domain of TCR clone 94282 (TRAV23/DV6, TRAJ40)
CAASLTSGTYKYIF

SEQ ID NO: 188564 - protein, 14 aa, Homo sapiens
  CDR3 for beta chain variable domain of TCR clone 94282 (TRBV5-1, TRBJ2-3)
CASSRGQDGGTQYF

SEQ ID NO: 188565 - protein, 12 aa, Homo sapiens
  CDR3 for alpha chain variable domain of TCR clone 94283 (TRAV13-1, TRAJ42)
VNYGGSQGNLIF

SEQ ID NO: 188566 - protein, 12 aa, Homo sapiens
  CDR3 for beta chain variable domain of TCR clone 94283 (TRBV7-9, TRBJ2-7)
CASSLEGYERYF

SEQ ID NO: 188567 - protein, 17 aa, Homo sapiens
  CDR3 for alpha chain variable domain of TCR clone 94284 (TRAV38-2/DV8, TRAJ32)
CAYRKGNYGGATNKLIF

SEQ ID NO: 188568 - protein, 16 aa, Homo sapiens
  CDR3 for beta chain variable domain of TCR clone 94284 (TRBV20-1, TRBJ1-4)
CSAPGQGLLTNEKLFF

SEQ ID NO: 188569 - protein, 14 aa, Homo sapiens
  CDR3 for alpha chain variable domain of TCR clone 94285 (TRAV35, TRAJ48)
CVITVDLGNEKLTF

SEQ ID NO: 188570 - protein, 13 aa, Homo sapiens
  CDR3 for beta chain variable domain of TCR clone 94285 (TRBV10-3, TRBJ2-7)
CAISEGVGGEQYF

SEQ ID NO: 188571 - protein, 12 aa, Homo sapiens
  CDR3 for alpha chain variable domain of TCR clone 94286 (TRAV13-1, TRAJ49)
CAESPMGNQFYF

SEQ ID NO: 188572 - protein, 13 aa, Homo sapiens
  CDR3 for beta chain variable domain of TCR clone 94286 (TRBV20-1, TRBJ2-2)
CSASAAGTGELFF

SEQ ID NO: 188573 - protein, 18 aa, Homo sapiens
  CDR3 for alpha chain variable domain of TCR clone 94287 (TRAV9-2, TRAJ52)
CALSRHNAGGTSYGKLTF

SEQ ID NO: 188574 - protein, 14 aa, Homo sapiens
  CDR3 for beta chain variable domain of TCR clone 94287 (TRBV7-2, TRBJ2-7)
CASRSQGAAYEQYF

SEQ ID NO: 188575 - protein, 14 aa, Homo sapiens
  CDR3 for alpha chain variable domain of TCR clone 94288 (TRAV35, TRAJ42)
CAGGYGGSQGNLIF

SEQ ID NO: 188576 - protein, 15 aa, Homo sapiens
  CDR3 for beta chain variable domain of TCR clone 94288 (TRBV7-9, TRBJ2-1)
CASSLGWGRANEQFF

SEQ ID NO: 188577 - protein, 13 aa, Homo sapiens
  CDR3 for alpha chain variable domain of TCR clone 94289 (TRAV8-3, TRAJ43)
CAVVPYNNNDMRF

SEQ ID NO: 188578 - protein, 14 aa, Homo sapiens
  CDR3 for beta chain variable domain of TCR clone 94289 (TRBV19, TRBJ2-1)
CASPTFVLSGEQFF

SEQ ID NO: 188579 - protein, 14 aa, Homo sapiens
  CDR3 for alpha chain variable domain of TCR clone 94290 (TRAV38-1, TRAJ45)
CAYYSGGGADGLTF

SEQ ID NO: 188580 - protein, 16 aa, Homo sapiens
  CDR3 for beta chain variable domain of TCR clone 94290 (TRBV12-5, TRBJ2-5)
CASGPRTSGNQETQYF

SEQ ID NO: 188581 - protein, 13 aa, Homo sapiens
  CDR3 for alpha chain variable domain of TCR clone 94291 (TRAV30, TRAJ24)
CGTVTDSWGKLQF

SEQ ID NO: 188582 - protein, 15 aa, Homo sapiens
  CDR3 for beta chain variable domain of TCR clone 94291 (TRBV2, TRBJ2-7)
CASTLLGSGATEQYF

SEQ ID NO: 188583 - protein, 12 aa, Homo sapiens
  CDR3 for alpha chain variable domain of TCR clone 94292 (TRAV1-1, TRAJ9)
CAVDTGGFKTIF

SEQ ID NO: 188584 - protein, 14 aa, Homo sapiens
  CDR3 for beta chain variable domain of TCR clone 94292 (TRBV7-8, TRBJ2-5)
CASSATGGQGTQYF

SEQ ID NO: 188585 - protein, 22 aa, Homo sapiens
  CDR3 for alpha chain variable domain of TCR clone 94293 (TRAV34, TRAJ40)
PAQPCRHLPLWSGPSGTYKYIF

SEQ ID NO: 188586 - protein, 17 aa, Homo sapiens
  CDR3 for beta chain variable domain of TCR clone 94293 (TRBV20-1, TRBJ2-2)
CSASGSGQGGLTGELFF

SEQ ID NO: 188587 - protein, 15 aa, Homo sapiens
  CDR3 for alpha chain variable domain of TCR clone 94294 (TRAV9-2, TRAJ4)
SGVLPGRGGYNKLIF

SEQ ID NO: 188588 - protein, 17 aa, Homo sapiens
  CDR3 for beta chain variable domain of TCR clone 94294 (TRBV25-1, TRBJ2-1)
CASSAYGQGRGVYEQFF

SEQ ID NO: 188589 - protein, 13 aa, Homo sapiens
  CDR3 for alpha chain variable domain of TCR clone 94295 (TRAV12-1, TRAJ20)
CVGQRFNDNKLSF

SEQ ID NO: 188590 - protein, 14 aa, Homo sapiens
  CDR3 for beta chain variable domain of TCR clone 94295 (TRBV6-3, TRBJ1-5)
CASSYSRFAQPQHF

SEQ ID NO: 188591 - protein, 14 aa, Homo sapiens
  CDR3 for alpha chain variable domain of TCR clone 94296 (TRAV26-1, TRAJ45)
CIEVTGGGADGLTF

SEQ ID NO: 188592 - protein, 20 aa, Homo sapiens
  CDR3 for beta chain variable domain of TCR clone 94296 (TRBV7-8, TRBJ2-2)
CASSHLFPGPTIHITGELFF

SEQ ID NO: 188593 - protein, 10 aa, Homo sapiens
  CDR3 for alpha chain variable domain of TCR clone 94297 (TRAV16, TRAJ22)
SAMYLRQLTF

SEQ ID NO: 188594 - protein, 15 aa, Homo sapiens
  CDR3 for beta chain variable domain of TCR clone 94297 (TRBV7-9, TRBJ1-6)
CASSSPGSGNSPLHF

SEQ ID NO: 188595 - protein, 14 aa, Homo sapiens
  CDR3 for alpha chain variable domain of TCR clone 94298 (TRAV16, TRAJ33)
CALSAMDSNYQLIW

SEQ ID NO: 188596 - protein, 16 aa, Homo sapiens
  CDR3 for beta chain variable domain of TCR clone 94298 (TRBV12-4, TRBJ2-3)
CASSFPSNTNTDTQHF

SEQ ID NO: 188597 - protein, 13 aa, Homo sapiens
  CDR3 for alpha chain variable domain of TCR clone 94299 (TRAV12-3, TRAJ9)
CAMSADGGFKTIF

SEQ ID NO: 188598 - protein, 12 aa, Homo sapiens
  CDR3 for beta chain variable domain of TCR clone 94299 (TRBV11-2, TRBJ2-2)
CASSLGGGELFF

SEQ ID NO: 188599 - protein, 13 aa, Homo sapiens
  CDR3 for alpha chain variable domain of TCR clone 94300 (TRAV3, TRAJ8)
CAVRFTGFQKLLF

SEQ ID NO: 188600 - protein, 15 aa, Homo sapiens
  CDR3 for beta chain variable domain of TCR clone 94300 (TRBV20-1, TRBJ2-7)
CSARDRVSGMDEQYF

SEQ ID NO: 188601 - protein, 11 aa, Homo sapiens
  CDR3 for alpha chain variable domain of TCR clone 94301 (TRAV17, TRAJ43)
CATPRSNDMRF

SEQ ID NO: 188602 - protein, 15 aa, Homo sapiens
  CDR3 for beta chain variable domain of TCR clone 94301 (TRBV11-2, TRBJ2-1)
CASSLGTSGLMSSSS

SEQ ID NO: 188603 - protein, 17 aa, Homo sapiens
  CDR3 for alpha chain variable domain of TCR clone 94302 (TRAV1-2, TRAJ9)
CAVRGPNPDTGGFKTIF

SEQ ID NO: 188604 - protein, 13 aa, Homo sapiens
  CDR3 for beta chain variable domain of TCR clone 94302 (TRBV20-1, TRBJ1-1)
CSARGGGNTEAFF

SEQ ID NO: 188605 - protein, 12 aa, Homo sapiens
  CDR3 for alpha chain variable domain of TCR clone 94303 (TRAV3, TRAJ39)
CAVIEWSNMLTF

SEQ ID NO: 188606 - protein, 14 aa, Homo sapiens
  CDR3 for beta chain variable domain of TCR clone 94303 (TRBV7-8, TRBJ2-3)
CASSFPDGQDTHYF

SEQ ID NO: 188607 - protein, 13 aa, Homo sapiens
  CDR3 for alpha chain variable domain of TCR clone 94304 (TRAV21, TRAJ57)
CAVTQGGSEKLVF

SEQ ID NO: 188608 - protein, 17 aa, Homo sapiens
  CDR3 for beta chain variable domain of TCR clone 94304 (TRBV13, TRBJ2-3)
CASSLSRVAGGRNTQYF

SEQ ID NO: 188609 - protein, 14 aa, Homo sapiens
  CDR3 for alpha chain variable domain of TCR clone 94305 (TRAV9-2, TRAJ36)
CALPRRTGANNLFF

SEQ ID NO: 188610 - protein, 14 aa, Homo sapiens
  CDR3 for beta chain variable domain of TCR clone 94305 (TRBV2, TRBJ1-2)
CASSELQVNYGYTF

SEQ ID NO: 188611 - protein, 16 aa, Homo sapiens
  CDR3 for alpha chain variable domain of TCR clone 94306 (TRAV3, TRAJ37)
CAVRVRGSGNTGKLIF

SEQ ID NO: 188612 - protein, 15 aa, Homo sapiens
  CDR3 for beta chain variable domain of TCR clone 94306 (TRBV2, TRBJ2-2)
CASSGFGAGTGELSF

SEQ ID NO: 188613 - protein, 14 aa, Homo sapiens
  CDR3 for alpha chain variable domain of TCR clone 94307 (TRAV13-1, TRAJ44)
CAAKATGTASKLTF

SEQ ID NO: 188614 - protein, 19 aa, Homo sapiens
  CDR3 for beta chain variable domain of TCR clone 94307 (TRBV28, TRBJ2-7)
CASSYSGTSRLGWVYEQYF

SEQ ID NO: 188615 - protein, 10 aa, Homo sapiens
  CDR3 for alpha chain variable domain of TCR clone 94308 (TRAV12-2, TRAJ20)
CAVYLYKLSF

SEQ ID NO: 188616 - protein, 14 aa, Homo sapiens
  CDR3 for beta chain variable domain of TCR clone 94308 (TRBV7-2, TRBJ2-2)
CASRGQGAAGELFF

SEQ ID NO: 188617 - protein, 16 aa, Homo sapiens
  CDR3 for alpha chain variable domain of TCR clone 94309 (TRAV3, TRAJ13)
CAVRDFESWGYQKVTF

SEQ ID NO: 188618 - protein, 16 aa, Homo sapiens
  CDR3 for beta chain variable domain of TCR clone 94309 (TRBV27, TRBJ2-5)
CASSYGPGGQKETQYF

SEQ ID NO: 188619 - protein, 12 aa, Homo sapiens
  CDR3 for alpha chain variable domain of TCR clone 94310 (TRAV17, TRAJ20)
CATDSNDYKLSF

SEQ ID NO: 188620 - protein, 18 aa, Homo sapiens
  CDR3 for beta chain variable domain of TCR clone 94310 (TRBV24-1, TRBJ2-3)
CATSDLPRLAGGADTQYF

SEQ ID NO: 188621 - protein, 14 aa, Homo sapiens
  CDR3 for alpha chain variable domain of TCR clone 94311 (TRAV1-2, TRAJ16)
CAVNRFSDGQKLLF

SEQ ID NO: 188622 - protein, 15 aa, Homo sapiens
  CDR3 for beta chain variable domain of TCR clone 94311 (TRBV7-9, TRBJ1-6)
CASSCPGRGNSPLHF

SEQ ID NO: 188623 - protein, 12 aa, Homo sapiens
  CDR3 for alpha chain variable domain of TCR clone 94312 (TRAV12-2, TRAJ10)
WGVTGGGNKLTF

SEQ ID NO: 188624 - protein, 13 aa, Homo sapiens
  CDR3 for beta chain variable domain of TCR clone 94312 (TRBV7-3, TRBJ1-1)
CASSQDWGAEAFF

SEQ ID NO: 188625 - protein, 14 aa, Homo sapiens
  CDR3 for alpha chain variable domain of TCR clone 94313 (TRAV12-1, TRAJ17)
CVVNYKAAGNKLTF

SEQ ID NO: 188626 - protein, 15 aa, Homo sapiens
  CDR3 for beta chain variable domain of TCR clone 94313 (TRBV28, TRBJ2-7)
CASSLEAYPIYEQYF

SEQ ID NO: 188627 - protein, 11 aa, Homo sapiens
  CDR3 for alpha chain variable domain of TCR clone 94314 (TRAV12-3, TRAJ43)
CAMSVSNDMRF

SEQ ID NO: 188628 - protein, 15 aa, Homo sapiens
  CDR3 for beta chain variable domain of TCR clone 94314 (TRBV6-1, TRBJ2-7)
CASSEGGGVSYEQYF

SEQ ID NO: 188629 - protein, 13 aa, Homo sapiens
  CDR3 for alpha chain variable domain of TCR clone 94315 (TRAV2, TRAJ47)
CAVDREYGNKLVF

SEQ ID NO: 188630 - protein, 14 aa, Homo sapiens
  CDR3 for beta chain variable domain of TCR clone 94315 (TRBV5-1, TRBJ2-7)
CASSRGESLYEQYF

SEQ ID NO: 188631 - protein, 13 aa, Homo sapiens
  CDR3 for alpha chain variable domain of TCR clone 94316 (TRAV1-2, TRAJ9)
CAALNTGGFKTIF

SEQ ID NO: 188632 - protein, 10 aa, Homo sapiens
  CDR3 for beta chain variable domain of TCR clone 94316 (TRBV2, TRBJ2-5)
CASSAATQYF

SEQ ID NO: 188633 - protein, 14 aa, Homo sapiens
  CDR3 for alpha chain variable domain of TCR clone 94317 (TRAV12-2, TRAJ48)
CAVNAFFGTEKLTF

SEQ ID NO: 188634 - protein, 13 aa, Homo sapiens
  CDR3 for beta chain variable domain of TCR clone 94317 (TRBV28, TRBJ2-7)
CAGAQQGLDEQYF

SEQ ID NO: 188635 - protein, 12 aa, Homo sapiens
  CDR3 for alpha chain variable domain of TCR clone 94318 (TRAV23/DV6, TRAJ30)
CAASKGDDKLIF

SEQ ID NO: 188636 - protein, 13 aa, Homo sapiens
  CDR3 for beta chain variable domain of TCR clone 94318 (TRBV19, TRBJ1-2)
CASSVPGQDGYTF

SEQ ID NO: 188637 - protein, 18 aa, Homo sapiens
  CDR3 for alpha chain variable domain of TCR clone 94319 (TRAV12-2, )
CAVEDIQNPDPAVYQLRD

SEQ ID NO: 188638 - protein, 17 aa, Homo sapiens
  CDR3 for beta chain variable domain of TCR clone 94319 (TRBV13, TRBJ2-3)
CASSLSRVAGGRNTQYF

SEQ ID NO: 188639 - protein, 13 aa, Homo sapiens
  CDR3 for alpha chain variable domain of TCR clone 94320 (TRAV1-2, TRAJ9)
CAALNTGGFKTIF

SEQ ID NO: 188640 - protein, 14 aa, Homo sapiens
  CDR3 for beta chain variable domain of TCR clone 94320 (TRBV7-2, TRBJ1-1)
CASSFLTGTTEAFF

SEQ ID NO: 188641 - protein, 17 aa, Homo sapiens
  CDR3 for alpha chain variable domain of TCR clone 94321 (TRAV3, TRAJ6)
CAVRDGPRAGGSYIPTF

SEQ ID NO: 188642 - protein, 14 aa, Homo sapiens
  CDR3 for beta chain variable domain of TCR clone 94321 (TRBV5-5, TRBJ2-7)
CASSLGQGTYEQYF

SEQ ID NO: 188643 - protein, 17 aa, Homo sapiens
  CDR3 for alpha chain variable domain of TCR clone 94322 (TRAV3, TRAJ6)
CAMRDGPRAGGSYIPTF

SEQ ID NO: 188644 - protein, 14 aa, Homo sapiens
  CDR3 for beta chain variable domain of TCR clone 94322 (TRBV18, TRBJ2-5)
CASSPGVSQETQYF

SEQ ID NO: 188645 - protein, 16 aa, Homo sapiens
  CDR3 for alpha chain variable domain of TCR clone 94323 (TRAV30, TRAJ24)
CGTEIVDADSWGRFQF

SEQ ID NO: 188646 - protein, 14 aa, Homo sapiens
  CDR3 for beta chain variable domain of TCR clone 94323 (TRBV12-5, TRBJ2-5)
RASGSRTHQETQYF

SEQ ID NO: 188647 - protein, 22 aa, Homo sapiens
  CDR3 for alpha chain variable domain of TCR clone 94324 (TRAV30, TRAJ48)
TASQLSYSGTCFCGIGNEKLTF

SEQ ID NO: 188648 - protein, 14 aa, Homo sapiens
  CDR3 for beta chain variable domain of TCR clone 94324 (TRBV7-6, TRBJ2-3)
CASSVAGGTDTQYF

SEQ ID NO: 188649 - protein, 13 aa, Homo sapiens
  CDR3 for alpha chain variable domain of TCR clone 94325 (TRAV8-3, TRAJ43)
CAVCPDNNNDMRF

SEQ ID NO: 188650 - protein, 12 aa, Homo sapiens
  CDR3 for beta chain variable domain of TCR clone 94325 (TRBV7-2, TRBJ1-6)
CASSLSSSPLHF

SEQ ID NO: 188651 - protein, 10 aa, Homo sapiens
  CDR3 for alpha chain variable domain of TCR clone 94326 (TRAV20, TRAJ22)
CAAPAKQLTF

SEQ ID NO: 188652 - protein, 14 aa, Homo sapiens
  CDR3 for beta chain variable domain of TCR clone 94326 (TRBV19, TRBJ2-1)
CASSMGSGATEQFF

SEQ ID NO: 188653 - protein, 11 aa, Homo sapiens
  CDR3 for alpha chain variable domain of TCR clone 94327 (TRAV3, TRAJ32)
NYGGATNKLIF

SEQ ID NO: 188654 - protein, 13 aa, Homo sapiens
  CDR3 for beta chain variable domain of TCR clone 94327 (TRBV27, TRBJ2-3)
CASSLSQGDTQYF

SEQ ID NO: 188655 - protein, 12 aa, Homo sapiens
  CDR3 for alpha chain variable domain of TCR clone 94328 (TRAV30, TRAJ43)
CGTEERGNDMRF

SEQ ID NO: 188656 - protein, 13 aa, Homo sapiens
  CDR3 for beta chain variable domain of TCR clone 94328 (TRBV12-4, TRBJ2-7)
CASSFSQGYEQYF

SEQ ID NO: 188657 - protein, 18 aa, Homo sapiens
  CDR3 for alpha chain variable domain of TCR clone 94329 (TRAV16, TRAJ52)
CALSGVDAGGTSYGKLTF

SEQ ID NO: 188658 - protein, 14 aa, Homo sapiens
  CDR3 for beta chain variable domain of TCR clone 94329 (TRBV15, TRBJ2-3)
CATRSGTSTDTQYF

SEQ ID NO: 188659 - protein, 15 aa, Homo sapiens
  CDR3 for alpha chain variable domain of TCR clone 94330 (TRAV3, TRAJ9)
CAVRARNTGGFKTIF

SEQ ID NO: 188660 - protein, 15 aa, Homo sapiens
  CDR3 for beta chain variable domain of TCR clone 94330 (TRBV6-1, TRBJ2-5)
CASSEGWGIQETQYF

SEQ ID NO: 188661 - protein, 15 aa, Homo sapiens
  CDR3 for alpha chain variable domain of TCR clone 94331 (TRAV3, TRAJ42)
CAVRGGTGSQGNLIF

SEQ ID NO: 188662 - protein, 13 aa, Homo sapiens
  CDR3 for beta chain variable domain of TCR clone 94331 (TRBV5-5, TRBJ1-2)
CASSFWRGEDYTF

SEQ ID NO: 188663 - protein, 13 aa, Homo sapiens
  CDR3 for alpha chain variable domain of TCR clone 94332 (TRAV12-2, TRAJ9)
CAVIRGGGFKTIF

SEQ ID NO: 188664 - protein, 12 aa, Homo sapiens
  CDR3 for beta chain variable domain of TCR clone 94332 (TRBV7-9, TRBJ2-7)
CASSIKREEQYF

SEQ ID NO: 188665 - protein, 12 aa, Homo sapiens
  CDR3 for alpha chain variable domain of TCR clone 94333 (TRAV30, TRAJ43)
CGTEERGNDMRF

SEQ ID NO: 188666 - protein, 17 aa, Homo sapiens
  CDR3 for beta chain variable domain of TCR clone 94333 (TRBV11-2, TRBJ2-1)
CASSLYPPGVEYNEQLF

SEQ ID NO: 188667 - protein, 14 aa, Homo sapiens
  CDR3 for alpha chain variable domain of TCR clone 94334 (TRAV12-2, TRAJ13)
CAVKKTGGYQKVTF

SEQ ID NO: 188668 - protein, 16 aa, Homo sapiens
  CDR3 for beta chain variable domain of TCR clone 94334 (TRBV12-5, TRBJ2-5)
CASGPGTSGNQETQYF

SEQ ID NO: 188669 - protein, 12 aa, Homo sapiens
  CDR3 for alpha chain variable domain of TCR clone 94335 (TRAV30, TRAJ39)
CGRGNAGNMLTF

SEQ ID NO: 188670 - protein, 12 aa, Homo sapiens
  CDR3 for beta chain variable domain of TCR clone 94335 (TRBV10-3, TRBJ1-1)
CATMDRPTEAFF

SEQ ID NO: 188671 - protein, 15 aa, Homo sapiens
  CDR3 for alpha chain variable domain of TCR clone 94336 (TRAV20, TRAJ50)
CAVRQMKTSYDKVIF

SEQ ID NO: 188672 - protein, 16 aa, Homo sapiens
  CDR3 for beta chain variable domain of TCR clone 94336 (TRBV15, TRBJ1-2)
CATSRGPRTGGGGYSF

SEQ ID NO: 188673 - protein, 20 aa, Homo sapiens
  CDR3 for alpha chain variable domain of TCR clone 94337 (TRAV26-1, TRAJ42)
CCVLLHRQTFYGGSQGNLIF

SEQ ID NO: 188674 - protein, 16 aa, Homo sapiens
  CDR3 for beta chain variable domain of TCR clone 94337 (TRBV7-3, TRBJ2-2)
CASSLKRGTLSGELFF

SEQ ID NO: 188675 - protein, 14 aa, Homo sapiens
  CDR3 for alpha chain variable domain of TCR clone 94338 (TRAV1-2, TRAJ16)
CAVNRFSDGQKLLF

SEQ ID NO: 188676 - protein, 15 aa, Homo sapiens
  CDR3 for beta chain variable domain of TCR clone 94338 (TRBV7-8, TRBJ1-5)
CASSLERRGLEPQHF

SEQ ID NO: 188677 - protein, 23 aa, Homo sapiens
  CDR3 for alpha chain variable domain of TCR clone 94339 (TRAV12-2, TRAJ36)
SLLIRDSQPSDSATLERATNLFF

SEQ ID NO: 188678 - protein, 17 aa, Homo sapiens
  CDR3 for beta chain variable domain of TCR clone 94339 (TRBV3-1, TRBJ2-3)
CASSQLLDRGHTDTQYF

SEQ ID NO: 188679 - protein, 15 aa, Homo sapiens
  CDR3 for alpha chain variable domain of TCR clone 94340 (TRAV29/DV5, TRAJ42)
CAAKTDGGSQGNLIF

SEQ ID NO: 188680 - protein, 15 aa, Homo sapiens
  CDR3 for beta chain variable domain of TCR clone 94340 (TRBV5-1, TRBJ2-2)
CASGSQGGNTGELFF

SEQ ID NO: 188681 - protein, 17 aa, Homo sapiens
  CDR3 for alpha chain variable domain of TCR clone 94341 (TRAV20, TRAJ52)
CAVQANAGGTSYGKLTF

SEQ ID NO: 188682 - protein, 16 aa, Homo sapiens
  CDR3 for beta chain variable domain of TCR clone 94341 (TRBV12-5, TRBJ2-5)
CASGPRTSGNQETQYF

SEQ ID NO: 188683 - protein, 13 aa, Homo sapiens
  CDR3 for alpha chain variable domain of TCR clone 94342 (TRAV8-3, TRAJ15)
CAVGIQAGTALIF

SEQ ID NO: 188684 - protein, 17 aa, Homo sapiens
  CDR3 for beta chain variable domain of TCR clone 94342 (TRBV20-1, TRBJ2-1)
YSARDPLAGVSYNEQFF

SEQ ID NO: 188685 - protein, 14 aa, Homo sapiens
  CDR3 for alpha chain variable domain of TCR clone 94343 (TRAV3, TRAJ37)
CAVKESGNTGKLIF

SEQ ID NO: 188686 - protein, 15 aa, Homo sapiens
  CDR3 for beta chain variable domain of TCR clone 94343 (TRBV28, TRBJ2-5)
CASSQTSGSLETQYF

SEQ ID NO: 188687 - protein, 17 aa, Homo sapiens
  CDR3 for alpha chain variable domain of TCR clone 94344 (TRAV26-1, TRAJ10)
CIVSFRGLTGGGNNLTF

SEQ ID NO: 188688 - protein, 13 aa, Homo sapiens
  CDR3 for beta chain variable domain of TCR clone 94344 (TRBV20-1, TRBJ2-3)
CSASRQAADTQYF

SEQ ID NO: 188689 - protein, 12 aa, Homo sapiens
  CDR3 for alpha chain variable domain of TCR clone 94345 (TRAV8-3, TRAJ20)
CAVDFNDYKLSF

SEQ ID NO: 188690 - protein, 14 aa, Homo sapiens
  CDR3 for beta chain variable domain of TCR clone 94345 (TRBV7-9, TRBJ2-2)
CASSLVQDTGELFF

SEQ ID NO: 188691 - protein, 12 aa, Homo sapiens
  CDR3 for alpha chain variable domain of TCR clone 94346 (TRAV27, TRAJ36)
ASTPSGANNLFF

SEQ ID NO: 188692 - protein, 13 aa, Homo sapiens
  CDR3 for beta chain variable domain of TCR clone 94346 (TRBV7-9, TRBJ2-3)
CASSPGSTDTQYF

SEQ ID NO: 188693 - protein, 15 aa, Homo sapiens
  CDR3 for alpha chain variable domain of TCR clone 94347 (TRAV12-3, TRAJ49)
CAMAVTPNTGNQFYF

SEQ ID NO: 188694 - protein, 18 aa, Homo sapiens
  CDR3 for beta chain variable domain of TCR clone 94347 (TRBV4-1, TRBJ1-5)
CASSQDPRGQGSNQPQHF

SEQ ID NO: 188695 - protein, 14 aa, Homo sapiens
  CDR3 for alpha chain variable domain of TCR clone 94348 (TRAV12-3, TRAJ22)
CAMSLFGFARQLTF

SEQ ID NO: 188696 - protein, 11 aa, Homo sapiens
  CDR3 for beta chain variable domain of TCR clone 94348 (TRBV12-4, TRBJ2-2)
CASSSAGELFF

SEQ ID NO: 188697 - protein, 13 aa, Homo sapiens
  CDR3 for alpha chain variable domain of TCR clone 94349 (TRAV13-1, TRAJ10)
CAAAEGGGHKLTF

SEQ ID NO: 188698 - protein, 15 aa, Homo sapiens
  CDR3 for beta chain variable domain of TCR clone 94349 (TRBV7-8, TRBJ2-2)
CASSLDQGWTGELFF

SEQ ID NO: 188699 - protein, 12 aa, Homo sapiens
  CDR3 for alpha chain variable domain of TCR clone 94350 (TRAV27, TRAJ35)
CAGADFGNVLHC

SEQ ID NO: 188700 - protein, 17 aa, Homo sapiens
  CDR3 for beta chain variable domain of TCR clone 94350 (TRBV7-3, TRBJ2-3)
CASSLMKRMRGADTQYF

SEQ ID NO: 188701 - protein, 15 aa, Homo sapiens
  CDR3 for alpha chain variable domain of TCR clone 94351 (TRAV35, TRAJ20)
CAGQLVGSNDYKLSF

SEQ ID NO: 188702 - protein, 19 aa, Homo sapiens
  CDR3 for beta chain variable domain of TCR clone 94351 (TRBV5-1, TRBJ2-3)
CASSLWLAGGITTTDTQYF

SEQ ID NO: 188703 - protein, 15 aa, Homo sapiens
  CDR3 for alpha chain variable domain of TCR clone 94352 (TRAV12-3, TRAJ6)
CAMSATTGGSYIPTF

SEQ ID NO: 188704 - protein, 14 aa, Homo sapiens
  CDR3 for beta chain variable domain of TCR clone 94352 (TRBV7-2, TRBJ2-7)
RASSPKTSFYEQYF

SEQ ID NO: 188705 - protein, 14 aa, Homo sapiens
  CDR3 for alpha chain variable domain of TCR clone 94353 (TRAV3, TRAJ34)
CAVRDINNTDKLIF

SEQ ID NO: 188706 - protein, 16 aa, Homo sapiens
  CDR3 for beta chain variable domain of TCR clone 94353 (TRBV11-2, TRBJ1-1)
CASSLRQGGEHSKAFF

SEQ ID NO: 188707 - protein, 19 aa, Homo sapiens
  CDR3 for alpha chain variable domain of TCR clone 94354 (TRAV2, TRAJ20)
ILQVRVADAAVYRDCKLSF

SEQ ID NO: 188708 - protein, 18 aa, Homo sapiens
  CDR3 for beta chain variable domain of TCR clone 94354 (TRBV20-1, TRBJ2-3)
CSASGLAGGPGTTDTQYF

SEQ ID NO: 188709 - protein, 13 aa, Homo sapiens
  CDR3 for alpha chain variable domain of TCR clone 94355 (TRAV2, TRAJ40)
CAVATSGTYKYIF

SEQ ID NO: 188710 - protein, 15 aa, Homo sapiens
  CDR3 for beta chain variable domain of TCR clone 94355 (TRBV11-3, TRBJ2-3)
CASLKDGRKGDTQYF

SEQ ID NO: 188711 - protein, 16 aa, Homo sapiens
  CDR3 for alpha chain variable domain of TCR clone 94356 (TRAV8-3, TRAJ8)
CAVPRYGNTGFQKLVF

SEQ ID NO: 188712 - protein, 14 aa, Homo sapiens
  CDR3 for beta chain variable domain of TCR clone 94356 (TRBV28, TRBJ1-1)
CASSESGRGTEAFF

SEQ ID NO: 188713 - protein, 13 aa, Homo sapiens
  CDR3 for alpha chain variable domain of TCR clone 94357 (TRAV17, TRAJ13)
CATDSGGYQKVTF

SEQ ID NO: 188714 - protein, 14 aa, Homo sapiens
  CDR3 for beta chain variable domain of TCR clone 94357 (TRBV3-1, TRBJ2-7)
CASSPSSGTYEQYF

SEQ ID NO: 188715 - protein, 19 aa, Homo sapiens
  CDR3 for alpha chain variable domain of TCR clone 94358 (TRAV2, TRAJ20)
ILQVREADAAVYRDCKLSF

SEQ ID NO: 188716 - protein, 16 aa, Homo sapiens
  CDR3 for beta chain variable domain of TCR clone 94358 (TRBV20-1, TRBJ1-4)
CSAPGQGLLTNEKPFF

SEQ ID NO: 188717 - protein, 16 aa, Homo sapiens
  CDR3 for alpha chain variable domain of TCR clone 94359 (TRAV21, TRAJ37)
CAVRPRGSSNTGKLIL

SEQ ID NO: 188718 - protein, 13 aa, Homo sapiens
  CDR3 for beta chain variable domain of TCR clone 94359 (TRBV7-9, TRBJ2-5)
CASLSPGQETQYF

SEQ ID NO: 188719 - protein, 13 aa, Homo sapiens
  CDR3 for alpha chain variable domain of TCR clone 94360 (TRAV8-3, TRAJ28)
CAVGAVGSYQLTF

SEQ ID NO: 188720 - protein, 15 aa, Homo sapiens
  CDR3 for beta chain variable domain of TCR clone 94360 (TRBV7-9, TRBJ1-5)
CACSQGHQPNQPQHF

SEQ ID NO: 188721 - protein, 14 aa, Homo sapiens
  CDR3 for alpha chain variable domain of TCR clone 94361 (TRAV2, TRAJ29)
CAVESYSGNTPLVF

SEQ ID NO: 188722 - protein, 17 aa, Homo sapiens
  CDR3 for beta chain variable domain of TCR clone 94361 (TRBV13, TRBJ2-3)
CASSLSRVAGGRNTQYF

SEQ ID NO: 188723 - protein, 12 aa, Homo sapiens
  CDR3 for alpha chain variable domain of TCR clone 94362 (TRAV29/DV5, TRAJ34)
CAASGNTDKPIF

SEQ ID NO: 188724 - protein, 16 aa, Homo sapiens
  CDR3 for beta chain variable domain of TCR clone 94362 (TRBV12-4, TRBJ1-5)
CASRQPVEGSNQPQHF

SEQ ID NO: 188725 - protein, 13 aa, Homo sapiens
  CDR3 for alpha chain variable domain of TCR clone 94363 (TRAV13-2, TRAJ13)
CAERPGGYQKVTF

SEQ ID NO: 188726 - protein, 15 aa, Homo sapiens
  CDR3 for beta chain variable domain of TCR clone 94363 (TRBV18, TRBJ2-3)
CASSPLAGETDTQYF

SEQ ID NO: 188727 - protein, 14 aa, Homo sapiens
  CDR3 for alpha chain variable domain of TCR clone 94364 (TRAV12-2, TRAJ13)
CAVKKTGGYQNVTF

SEQ ID NO: 188728 - protein, 16 aa, Homo sapiens
  CDR3 for beta chain variable domain of TCR clone 94364 (TRBV9, TRBJ1-2)
CASSVEEKVSPYGYTF

SEQ ID NO: 188729 - protein, 17 aa, Homo sapiens
  CDR3 for alpha chain variable domain of TCR clone 94365 (TRAV26-1, TRAJ53)
CIVRVYDSGGSNYKLTF

SEQ ID NO: 188730 - protein, 15 aa, Homo sapiens
  CDR3 for beta chain variable domain of TCR clone 94365 (TRBV20-1, TRBJ2-7)
CSARVPAAYFYEQYF

SEQ ID NO: 188731 - protein, 16 aa, Homo sapiens
  CDR3 for alpha chain variable domain of TCR clone 94366 (TRAV8-3, TRAJ13)
GAVGAYPSGGYQKVTF

SEQ ID NO: 188732 - protein, 15 aa, Homo sapiens
  CDR3 for beta chain variable domain of TCR clone 94366 (TRBV19, TRBJ1-5)
CASSIVWADNQPQHF

SEQ ID NO: 188733 - protein, 11 aa, Homo sapiens
  CDR3 for alpha chain variable domain of TCR clone 94367 (TRAV21, TRAJ34)
CAHYNTDKLIF

SEQ ID NO: 188734 - protein, 14 aa, Homo sapiens
  CDR3 for beta chain variable domain of TCR clone 94367 (TRBV5-7, TRBJ1-1)
CASSLAGDWTEAFF

SEQ ID NO: 188735 - protein, 13 aa, Homo sapiens
  CDR3 for alpha chain variable domain of TCR clone 94368 (TRAV8-6, TRAJ49)
CAVITNTGNQFYF

SEQ ID NO: 188736 - protein, 14 aa, Homo sapiens
  CDR3 for beta chain variable domain of TCR clone 94368 (TRBV20-1, TRBJ2-1)
CTYRGPPPYNEQFF

SEQ ID NO: 188737 - protein, 13 aa, Homo sapiens
  CDR3 for alpha chain variable domain of TCR clone 94369 (TRAV16, TRAJ11)
SALTQSGYSTLTF

SEQ ID NO: 188738 - protein, 14 aa, Homo sapiens
  CDR3 for beta chain variable domain of TCR clone 94369 (TRBV19, TRBJ2-7)
CASSTTRSSYEQYF

SEQ ID NO: 188739 - protein, 14 aa, Homo sapiens
  CDR3 for alpha chain variable domain of TCR clone 94370 (TRAV8-6, TRAJ49)
CAVSVRYTGNQVYF

SEQ ID NO: 188740 - protein, 19 aa, Homo sapiens
  CDR3 for beta chain variable domain of TCR clone 94370 (TRBV28, TRBJ2-1)
CASSFSIRGSGRTRYEQFF

SEQ ID NO: 188741 - protein, 11 aa, Homo sapiens
  CDR3 for alpha chain variable domain of TCR clone 94371 (TRAV35, TRAJ30)
CAGERDDKIIF

SEQ ID NO: 188742 - protein, 14 aa, Homo sapiens
  CDR3 for beta chain variable domain of TCR clone 94371 (TRBV15, TRBJ2-5)
CATSGARGQETQYF

SEQ ID NO: 188743 - protein, 14 aa, Homo sapiens
  CDR3 for alpha chain variable domain of TCR clone 94372 (TRAV1-2, TRAJ16)
CAVNRFSDGHKLLF

SEQ ID NO: 188744 - protein, 15 aa, Homo sapiens
  CDR3 for beta chain variable domain of TCR clone 94372 (TRBV5-1, TRBJ2-2)
CASSSQGGNTGELFF

SEQ ID NO: 188745 - protein, 13 aa, Homo sapiens
  CDR3 for alpha chain variable domain of TCR clone 94373 (TRAV35, TRAJ48)
GRSRVFGNEKLTF

SEQ ID NO: 188746 - protein, 14 aa, Homo sapiens
  CDR3 for beta chain variable domain of TCR clone 94373 (TRBV4-1, TRBJ2-2)
CASSQAVNTGELFF

SEQ ID NO: 188747 - protein, 15 aa, Homo sapiens
  CDR3 for alpha chain variable domain of TCR clone 94374 (TRAV38-1, TRAJ37)
CAFIHGSGNTGKLIF

SEQ ID NO: 188748 - protein, 12 aa, Homo sapiens
  CDR3 for beta chain variable domain of TCR clone 94374 (TRBV7-9, TRBJ2-7)
CASSFGSYAQYF

SEQ ID NO: 188749 - protein, 13 aa, Homo sapiens
  CDR3 for alpha chain variable domain of TCR clone 94375 (TRAV2, TRAJ29)
CAAQTSGNTPLVF

SEQ ID NO: 188750 - protein, 14 aa, Homo sapiens
  CDR3 for beta chain variable domain of TCR clone 94375 (TRBV7-9, TRBJ2-4)
CASSLAMGGNIQYF

SEQ ID NO: 188751 - protein, 13 aa, Homo sapiens
  CDR3 for alpha chain variable domain of TCR clone 94376 (TRAV8-6, TRAJ40)
CAVSVTGTYKYLF

SEQ ID NO: 188752 - protein, 15 aa, Homo sapiens
  CDR3 for beta chain variable domain of TCR clone 94376 (TRBV4-1, TRBJ2-3)
CASGRGQGIPDTQYF

SEQ ID NO: 188753 - protein, 11 aa, Homo sapiens
  CDR3 for alpha chain variable domain of TCR clone 94377 (TRAV21, TRAJ48)
CSVDGNEKLTF

SEQ ID NO: 188754 - protein, 16 aa, Homo sapiens
  CDR3 for beta chain variable domain of TCR clone 94377 (TRBV12-4, TRBJ1-5)
CASSSGPRGSNQPQHF

SEQ ID NO: 188755 - protein, 14 aa, Homo sapiens
  CDR3 for alpha chain variable domain of TCR clone 94378 (TRAV30, TRAJ26)
CGTEFVSYGQNFVF

SEQ ID NO: 188756 - protein, 13 aa, Homo sapiens
  CDR3 for beta chain variable domain of TCR clone 94378 (TRBV19, TRBJ1-3)
CASRLSLGNTIYF

SEQ ID NO: 188757 - protein, 14 aa, Homo sapiens
  CDR3 for alpha chain variable domain of TCR clone 94379 (TRAV12-2, TRAJ17)
CAVNIKAAGNKITF

SEQ ID NO: 188758 - protein, 16 aa, Homo sapiens
  CDR3 for beta chain variable domain of TCR clone 94379 (TRBV20-1, TRBJ2-6)
CSASSQGYDGANVLTF

SEQ ID NO: 188759 - protein, 14 aa, Homo sapiens
  CDR3 for alpha chain variable domain of TCR clone 94380 (TRAV1-2, TRAJ16)
CAVNRFSDGQKLLF

SEQ ID NO: 188760 - protein, 16 aa, Homo sapiens
  CDR3 for beta chain variable domain of TCR clone 94380 (TRBV7-2, TRBJ2-7)
CASSLDWSGGAYEQYF

SEQ ID NO: 188761 - protein, 15 aa, Homo sapiens
  CDR3 for alpha chain variable domain of TCR clone 94381 (TRAV17, TRAJ37)
CATAHGSSNTGKLIF

SEQ ID NO: 188762 - protein, 14 aa, Homo sapiens
  CDR3 for beta chain variable domain of TCR clone 94381 (TRBV7-2, TRBJ2-3)
CASSRTSGADTQYF

SEQ ID NO: 188763 - protein, 12 aa, Homo sapiens
  CDR3 for alpha chain variable domain of TCR clone 94382 (TRAV3, TRAJ43)
CAVRDPNNDMRF

SEQ ID NO: 188764 - protein, 13 aa, Homo sapiens
  CDR3 for beta chain variable domain of TCR clone 94382 (TRBV19, TRBJ1-2)
FASSVPGQDGYTF

SEQ ID NO: 188765 - protein, 12 aa, Homo sapiens
  CDR3 for alpha chain variable domain of TCR clone 94383 (TRAV3, TRAJ31)
CAVRDGNARLMF

SEQ ID NO: 188766 - protein, 12 aa, Homo sapiens
  CDR3 for beta chain variable domain of TCR clone 94383 (TRBV11-2, TRBJ2-2)
CASSLPTGELFF

SEQ ID NO: 188767 - protein, 14 aa, Homo sapiens
  CDR3 for alpha chain variable domain of TCR clone 94384 (TRAV35, TRAJ24)
CAGPRRDSGGKLQF

SEQ ID NO: 188768 - protein, 12 aa, Homo sapiens
  CDR3 for beta chain variable domain of TCR clone 94384 (TRBV12-4, TRBJ2-3)
CASSLGQDTQYF

SEQ ID NO: 188769 - protein, 16 aa, Homo sapiens
  CDR3 for alpha chain variable domain of TCR clone 94385 (TRAV8-1, TRAJ33)
CAVNARGGDSNYQLIW

SEQ ID NO: 188770 - protein, 14 aa, Homo sapiens
  CDR3 for beta chain variable domain of TCR clone 94385 (TRBV18, TRBJ2-7)
CASSPRGGAYEQYF

SEQ ID NO: 188771 - protein, 18 aa, Homo sapiens
  CDR3 for alpha chain variable domain of TCR clone 94386 (TRAV21, TRAJ52)
CAVRPSPAGGTSYGKMTF

SEQ ID NO: 188772 - protein, 16 aa, Homo sapiens
  CDR3 for beta chain variable domain of TCR clone 94386 (TRBV19, TRBJ2-1)
CASSKAGPSSYNEQFF

SEQ ID NO: 188773 - protein, 16 aa, Homo sapiens
  CDR3 for alpha chain variable domain of TCR clone 94387 (TRAV30, TRAJ24)
CGTEIVDADSWGKFQF

SEQ ID NO: 188774 - protein, 13 aa, Homo sapiens
  CDR3 for beta chain variable domain of TCR clone 94387 (TRBV27, TRBJ2-7)
CASSLTTGYERYF

SEQ ID NO: 188775 - protein, 15 aa, Homo sapiens
  CDR3 for alpha chain variable domain of TCR clone 94388 (TRAV26-1, TRAJ29)
CIVRVEGSGNTPLVL

SEQ ID NO: 188776 - protein, 14 aa, Homo sapiens
  CDR3 for beta chain variable domain of TCR clone 94388 (TRBV18, TRBJ2-5)
CASSPGVSKETQYF

SEQ ID NO: 188777 - protein, 14 aa, Homo sapiens
  CDR3 for alpha chain variable domain of TCR clone 94389 (TRAV13-1, TRAJ48)
CAASRSFGNEKLTF

SEQ ID NO: 188778 - protein, 15 aa, Homo sapiens
  CDR3 for beta chain variable domain of TCR clone 94389 (TRBV28, TRBJ2-5)
CASSSGRVIQETQYF

SEQ ID NO: 188779 - protein, 14 aa, Homo sapiens
  CDR3 for alpha chain variable domain of TCR clone 94390 (TRAV8-4, TRAJ38)
CARLNAGNNRNLIW

SEQ ID NO: 188780 - protein, 12 aa, Homo sapiens
  CDR3 for beta chain variable domain of TCR clone 94390 (TRBV6-1, TRBJ2-7)
CASSEPLYEQYF

SEQ ID NO: 188781 - protein, 16 aa, Homo sapiens
  CDR3 for alpha chain variable domain of TCR clone 94391 (TRAV26-2, TRAJ57)
CILRDVGSGGTEKLVF

SEQ ID NO: 188782 - protein, 13 aa, Homo sapiens
  CDR3 for beta chain variable domain of TCR clone 94391 (TRBV18, TRBJ2-3)
CASSPGVTDTQYF

SEQ ID NO: 188783 - protein, 15 aa, Homo sapiens
  CDR3 for alpha chain variable domain of TCR clone 94392 (TRAV21, TRAJ40)
CAVRPQTSGTSKYIF

SEQ ID NO: 188784 - protein, 15 aa, Homo sapiens
  CDR3 for beta chain variable domain of TCR clone 94392 (TRBV5-1, TRBJ2-1)
CASSPPRAPYNEQFF

SEQ ID NO: 188785 - protein, 14 aa, Homo sapiens
  CDR3 for alpha chain variable domain of TCR clone 94393 (TRAV20, TRAJ10)
CAVRVEGGGNKLTF

SEQ ID NO: 188786 - protein, 15 aa, Homo sapiens
  CDR3 for beta chain variable domain of TCR clone 94393 (TRBV11-2, TRBJ1-1)
CASSLGKRGNTEAFF

SEQ ID NO: 188787 - protein, 15 aa, Homo sapiens
  CDR3 for alpha chain variable domain of TCR clone 94394 (TRAV26-1, TRAJ28)
CIVRVAGAGSYQLTF

SEQ ID NO: 188788 - protein, 11 aa, Homo sapiens
  CDR3 for beta chain variable domain of TCR clone 94394 (TRBV19, TRBJ1-1)
CASSIGSEAFF

SEQ ID NO: 188789 - protein, 14 aa, Homo sapiens
  CDR3 for alpha chain variable domain of TCR clone 94395 (TRAV2, TRAJ9)
CAVEDRSGGFKTIF

SEQ ID NO: 188790 - protein, 15 aa, Homo sapiens
  CDR3 for beta chain variable domain of TCR clone 94395 (TRBV18, TRBJ1-1)
CASSPSSWVNTEAFF

SEQ ID NO: 188791 - protein, 15 aa, Homo sapiens
  CDR3 for alpha chain variable domain of TCR clone 94396 (TRAV26-1, TRAJ40)
CIVRAVPSGTYKYIF

SEQ ID NO: 188792 - protein, 17 aa, Homo sapiens
  CDR3 for beta chain variable domain of TCR clone 94396 (TRBV13, TRBJ2-3)
CASSLSRVAGGRNTQYF

SEQ ID NO: 188793 - protein, 12 aa, Homo sapiens
  CDR3 for alpha chain variable domain of TCR clone 94397 (TRAV10, TRAJ34)
CVVSGKHRQAHL

SEQ ID NO: 188794 - protein, 14 aa, Homo sapiens
  CDR3 for beta chain variable domain of TCR clone 94397 (TRBV19, TRBJ2-1)
CASPAFVLSGEQFF

SEQ ID NO: 188795 - protein, 17 aa, Homo sapiens
  CDR3 for alpha chain variable domain of TCR clone 94398 (TRAV13-1, TRAJ31)
CAPRDRLMFGDGTQLVV

SEQ ID NO: 188796 - protein, 12 aa, Homo sapiens
  CDR3 for beta chain variable domain of TCR clone 94398 (TRBV7-9, TRBJ2-7)
CASSLEGYEQYS

SEQ ID NO: 188797 - protein, 15 aa, Homo sapiens
  CDR3 for alpha chain variable domain of TCR clone 94399 (TRAV25, TRAJ52)
CAGRPGGTSYGKLTF

SEQ ID NO: 188798 - protein, 15 aa, Homo sapiens
  CDR3 for beta chain variable domain of TCR clone 94399 (TRBV27, TRBJ2-5)
CASSLYPRGGETQYF

SEQ ID NO: 188799 - protein, 14 aa, Homo sapiens
  CDR3 for alpha chain variable domain of TCR clone 94400 (TRAV4, TRAJ30)
CLVGDVNRDDKIIF

SEQ ID NO: 188800 - protein, 16 aa, Homo sapiens
  CDR3 for beta chain variable domain of TCR clone 94400 (TRBV20-1, TRBJ1-4)
CSAPGQGLLTNEKLFF

SEQ ID NO: 188801 - protein, 10 aa, Homo sapiens
  CDR3 for alpha chain variable domain of TCR clone 94401 (TRAV13-1, TRAJ7)
LIGGNNRLAF

SEQ ID NO: 188802 - protein, 11 aa, Homo sapiens
  CDR3 for beta chain variable domain of TCR clone 94401 (TRBV7-8, TRBJ2-7)
CASSLSLEQYF

SEQ ID NO: 188803 - protein, 15 aa, Homo sapiens
  CDR3 for alpha chain variable domain of TCR clone 94402 (TRAV8-3, TRAJ35)
CAVGATIGFGNVLHC

SEQ ID NO: 188804 - protein, 15 aa, Homo sapiens
  CDR3 for beta chain variable domain of TCR clone 94402 (TRBV7-9, TRBJ1-5)
CASSQGHQPNQPQHF

SEQ ID NO: 188805 - protein, 14 aa, Homo sapiens
  CDR3 for alpha chain variable domain of TCR clone 94403 (TRAV1-2, TRAJ8)
CAVREDTGFQTLVF

SEQ ID NO: 188806 - protein, 16 aa, Homo sapiens
  CDR3 for beta chain variable domain of TCR clone 94403 (TRBV7-3, TRBJ2-2)
CASSLKRGTLSGELFF

SEQ ID NO: 188807 - protein, 15 aa, Homo sapiens
  CDR3 for alpha chain variable domain of TCR clone 94404 (TRAV21, TRAJ53)
CATLNSGGSNYKLTF

SEQ ID NO: 188808 - protein, 13 aa, Homo sapiens
  CDR3 for beta chain variable domain of TCR clone 94404 (TRBV19, TRBJ1-2)
CASSQGQVYGYTF

SEQ ID NO: 188809 - protein, 14 aa, Homo sapiens
  CDR3 for alpha chain variable domain of TCR clone 94405 (TRAV12-1, TRAJ27)
CGENIRTNAGKSTF

SEQ ID NO: 188810 - protein, 15 aa, Homo sapiens
  CDR3 for beta chain variable domain of TCR clone 94405 (TRBV19, TRBJ1-1)
CASTSGQIQNTEAFF

SEQ ID NO: 188811 - protein, 16 aa, Homo sapiens
  CDR3 for alpha chain variable domain of TCR clone 94406 (TRAV1-1, TRAJ29)
CAVRSTRNSGNTPPVF

SEQ ID NO: 188812 - protein, 16 aa, Homo sapiens
  CDR3 for beta chain variable domain of TCR clone 94406 (TRBV27, TRBJ1-1)
CASSSRGRTGYTEAFF

SEQ ID NO: 188813 - protein, 15 aa, Homo sapiens
  CDR3 for alpha chain variable domain of TCR clone 94407 (TRAV2, TRAJ37)
CAVGDGSSNTGKLVF

SEQ ID NO: 188814 - protein, 13 aa, Homo sapiens
  CDR3 for beta chain variable domain of TCR clone 94407 (TRBV20-1, TRBJ2-7)
CSAQTGLSYEQYF

SEQ ID NO: 188815 - protein, 14 aa, Homo sapiens
  CDR3 for alpha chain variable domain of TCR clone 94408 (TRAV9-2, TRAJ4)
CALRFSGGYNKLIF

SEQ ID NO: 188816 - protein, 14 aa, Homo sapiens
  CDR3 for beta chain variable domain of TCR clone 94408 (TRBV15, TRBJ2-5)
CATSMGGSGETQYF

SEQ ID NO: 188817 - protein, 11 aa, Homo sapiens
  CDR3 for alpha chain variable domain of TCR clone 94409 (TRAV2, TRAJ23)
CAVETRGKLIF

SEQ ID NO: 188818 - protein, 16 aa, Homo sapiens
  CDR3 for beta chain variable domain of TCR clone 94409 (TRBV7-9, TRBJ2-1)
CASSDVAGGSYNEQFF

SEQ ID NO: 188819 - protein, 13 aa, Homo sapiens
  CDR3 for alpha chain variable domain of TCR clone 94410 (TRAV36/DV7, TRAJ57)
CAVVLGGSEKLVF

SEQ ID NO: 188820 - protein, 15 aa, Homo sapiens
  CDR3 for beta chain variable domain of TCR clone 94410 (TRBV28, TRBJ2-1)
CASSIIAGGRSEQFF

SEQ ID NO: 188821 - protein, 12 aa, Homo sapiens
  CDR3 for alpha chain variable domain of TCR clone 94411 (TRAV16, TRAJ5)
CAQLTGRRALTF

SEQ ID NO: 188822 - protein, 14 aa, Homo sapiens
  CDR3 for beta chain variable domain of TCR clone 94411 (TRBV4-1, TRBJ2-2)
CASSQAVNTGELFF

SEQ ID NO: 188823 - protein, 21 aa, Homo sapiens
  CDR3 for alpha chain variable domain of TCR clone 94412 (TRAV16, TRAJ22)
HLKKPFAQDEDSAMYLRQLTF

SEQ ID NO: 188824 - protein, 15 aa, Homo sapiens
  CDR3 for beta chain variable domain of TCR clone 94412 (TRBV7-9, TRBJ1-6)
CASSSPGRGNSPLHF

SEQ ID NO: 188825 - protein, 18 aa, Homo sapiens
  CDR3 for alpha chain variable domain of TCR clone 94413 (TRAV21, TRAJ52)
CAVRPSPAGGTSYGKLTF

SEQ ID NO: 188826 - protein, 13 aa, Homo sapiens
  CDR3 for beta chain variable domain of TCR clone 94413 (TRBV27, TRBJ2-1)
CASRTLGVGEQFF

SEQ ID NO: 188827 - protein, 14 aa, Homo sapiens
  CDR3 for alpha chain variable domain of TCR clone 94414 (TRAV13-1, TRAJ44)
CAAKATGTASKLTF

SEQ ID NO: 188828 - protein, 15 aa, Homo sapiens
  CDR3 for beta chain variable domain of TCR clone 94414 (TRBV7-9, TRBJ1-5)
CASSLAGGGRQPQHF

SEQ ID NO: 188829 - protein, 14 aa, Homo sapiens
  CDR3 for alpha chain variable domain of TCR clone 94415 (TRAV12-2, TRAJ13)
CAVKKTGGYQKVTF

SEQ ID NO: 188830 - protein, 15 aa, Homo sapiens
  CDR3 for beta chain variable domain of TCR clone 94415 (TRBV18, TRBJ1-1)
CASSPRQGENTEAFF

SEQ ID NO: 188831 - protein, 13 aa, Homo sapiens
  CDR3 for alpha chain variable domain of TCR clone 94416 (TRAV13-1, TRAJ35)
CAASLGFGNVLHC

SEQ ID NO: 188832 - protein, 15 aa, Homo sapiens
  CDR3 for beta chain variable domain of TCR clone 94416 (TRBV20-1, TRBJ2-7)
CSARDRVSWMDEQYF

SEQ ID NO: 188833 - protein, 11 aa, Homo sapiens
  CDR3 for alpha chain variable domain of TCR clone 94417 (TRAV12-2, TRAJ29)
CAVTLRSPLVF

SEQ ID NO: 188834 - protein, 13 aa, Homo sapiens
  CDR3 for beta chain variable domain of TCR clone 94417 (TRBV3-1, TRBJ2-2)
CASLARGSGELFF

SEQ ID NO: 188835 - protein, 14 aa, Homo sapiens
  CDR3 for alpha chain variable domain of TCR clone 94418 (TRAV13-2, TRAJ32)
CAENYGGATNKLIF

SEQ ID NO: 188836 - protein, 17 aa, Homo sapiens
  CDR3 for beta chain variable domain of TCR clone 94418 (TRBV7-8, TRBJ2-6)
CASSAGTGGAGANALTF

SEQ ID NO: 188837 - protein, 15 aa, Homo sapiens
  CDR3 for alpha chain variable domain of TCR clone 94419 (TRAV26-2, TRAJ39)
CSLRGNNNAGNMLTF

SEQ ID NO: 188838 - protein, 14 aa, Homo sapiens
  CDR3 for beta chain variable domain of TCR clone 94419 (TRBV7-8, TRBJ2-3)
CASSLEAGTDTQYF

SEQ ID NO: 188839 - protein, 14 aa, Homo sapiens
  CDR3 for alpha chain variable domain of TCR clone 94420 (TRAV13-1, TRAJ10)
CAAKEPGGGNKHTF

SEQ ID NO: 188840 - protein, 14 aa, Homo sapiens
  CDR3 for beta chain variable domain of TCR clone 94420 (TRBV6-6, TRBJ2-7)
CASSDSGAGYEQYF

SEQ ID NO: 188841 - protein, 13 aa, Homo sapiens
  CDR3 for alpha chain variable domain of TCR clone 94421 (TRAV8-3, TRAJ30)
CAVGGWRDDKIIF

SEQ ID NO: 188842 - protein, 14 aa, Homo sapiens
  CDR3 for beta chain variable domain of TCR clone 94421 (TRBV20-1, TRBJ1-1)
CSAPPADVNTEAFF

SEQ ID NO: 188843 - protein, 13 aa, Homo sapiens
  CDR3 for alpha chain variable domain of TCR clone 94422 (TRAV13-1, TRAJ20)
CAARVSNDYKLSF

SEQ ID NO: 188844 - protein, 12 aa, Homo sapiens
  CDR3 for beta chain variable domain of TCR clone 94422 (TRBV11-2, TRBJ2-2)
CASSLGGGELFF

SEQ ID NO: 188845 - protein, 15 aa, Homo sapiens
  CDR3 for alpha chain variable domain of TCR clone 94423 (TRAV3, TRAJ5)
CAVRDLDTGRRALTF

SEQ ID NO: 188846 - protein, 13 aa, Homo sapiens
  CDR3 for beta chain variable domain of TCR clone 94423 (TRBV20-1, TRBJ1-1)
CSAGTVGNTEAFF

SEQ ID NO: 188847 - protein, 11 aa, Homo sapiens
  CDR3 for alpha chain variable domain of TCR clone 94424 (TRAV12-2, TRAJ49)
CAVHTGNQFYF

SEQ ID NO: 188848 - protein, 15 aa, Homo sapiens
  CDR3 for beta chain variable domain of TCR clone 94424 (TRBV4-2, TRBJ1-1)
CASSQQGAGDTVAFF

SEQ ID NO: 188849 - protein, 10 aa, Homo sapiens
  CDR3 for alpha chain variable domain of TCR clone 94425 (TRAV12-3, TRAJ49)
CAMNDDQFYF

SEQ ID NO: 188850 - protein, 15 aa, Homo sapiens
  CDR3 for beta chain variable domain of TCR clone 94425 (TRBV5-5, TRBJ1-5)
CASSLEGASNQPQHF

SEQ ID NO: 188851 - protein, 14 aa, Homo sapiens
  CDR3 for alpha chain variable domain of TCR clone 94426 (TRAV26-1, TRAJ38)
CIADNAGNNRKLIW

SEQ ID NO: 188852 - protein, 13 aa, Homo sapiens
  CDR3 for beta chain variable domain of TCR clone 94426 (TRBV12-4, TRBJ2-2)
CASSITGSGELFF

SEQ ID NO: 188853 - protein, 12 aa, Homo sapiens
  CDR3 for alpha chain variable domain of TCR clone 94427 (TRAV12-1, TRAJ40)
CVVYSGTYKYIF

SEQ ID NO: 188854 - protein, 15 aa, Homo sapiens
  CDR3 for beta chain variable domain of TCR clone 94427 (TRBV18, TRBJ1-1)
CASSGRTGEVTEAFF

SEQ ID NO: 188855 - protein, 18 aa, Homo sapiens
  CDR3 for alpha chain variable domain of TCR clone 94428 (TRAV13-1, TRAJ52)
CAASKRSAGGTSYGKLTF

SEQ ID NO: 188856 - protein, 16 aa, Homo sapiens
  CDR3 for beta chain variable domain of TCR clone 94428 (TRBV7-2, TRBJ2-7)
CASSSQGLAPTYEQYF

SEQ ID NO: 188857 - protein, 15 aa, Homo sapiens
  CDR3 for alpha chain variable domain of TCR clone 94429 (TRAV8-6, TRAJ20)
CAVTRPGSNDYKLSF

SEQ ID NO: 188858 - protein, 12 aa, Homo sapiens
  CDR3 for beta chain variable domain of TCR clone 94429 (TRBV11-2, TRBJ2-2)
CASSLGGGELFF

SEQ ID NO: 188859 - protein, 11 aa, Homo sapiens
  CDR3 for alpha chain variable domain of TCR clone 94430 (TRAV12-3, TRAJ27)
CAMANAGKSTF

SEQ ID NO: 188860 - protein, 14 aa, Homo sapiens
  CDR3 for beta chain variable domain of TCR clone 94430 (TRBV7-9, TRBJ2-5)
CASSLDTAQETQYF

SEQ ID NO: 188861 - protein, 14 aa, Homo sapiens
  CDR3 for alpha chain variable domain of TCR clone 94431 (TRAV13-1, TRAJ44)
CAAKATVTASKLTF

SEQ ID NO: 188862 - protein, 16 aa, Homo sapiens
  CDR3 for beta chain variable domain of TCR clone 94431 (TRBV7-9, TRBJ2-6)
CASSLKGPLRANVLTF

SEQ ID NO: 188863 - protein, 13 aa, Homo sapiens
  CDR3 for alpha chain variable domain of TCR clone 94432 (TRAV17, TRAJ29)
CATDAFRKHTSCL

SEQ ID NO: 188864 - protein, 13 aa, Homo sapiens
  CDR3 for beta chain variable domain of TCR clone 94432 (TRBV5-7, TRBJ2-6)
CASTSRGANVLTF

SEQ ID NO: 188865 - protein, 16 aa, Homo sapiens
  CDR3 for alpha chain variable domain of TCR clone 94433 (TRAV1-2, TRAJ10)
WAVRGVLTGGGNKLTF

SEQ ID NO: 188866 - protein, 15 aa, Homo sapiens
  CDR3 for beta chain variable domain of TCR clone 94433 (TRBV7-9, TRBJ1-6)
CASSSPGRGNSPLHF

SEQ ID NO: 188867 - protein, 14 aa, Homo sapiens
  CDR3 for alpha chain variable domain of TCR clone 94434 (TRAV12-2, TRAJ5)
CAVNGSTGRRALTF

SEQ ID NO: 188868 - protein, 12 aa, Homo sapiens
  CDR3 for beta chain variable domain of TCR clone 94434 (TRBV19, TRBJ1-5)
CASSIAQQPQHF

SEQ ID NO: 188869 - protein, 17 aa, Homo sapiens
  CDR3 for alpha chain variable domain of TCR clone 94435 (TRAV26-1, TRAJ28)
CIVRVPDSGAGSYQLTF

SEQ ID NO: 188870 - protein, 17 aa, Homo sapiens
  CDR3 for beta chain variable domain of TCR clone 94435 (TRBV28, TRBJ2-7)
CASSPLPAGGKSYEQYV

SEQ ID NO: 188871 - protein, 17 aa, Homo sapiens
  CDR3 for alpha chain variable domain of TCR clone 94436 (TRAV26-1, TRAJ11)
CIVRVGQSNSGYSTLTF

SEQ ID NO: 188872 - protein, 15 aa, Homo sapiens
  CDR3 for beta chain variable domain of TCR clone 94436 (TRBV27, TRBJ2-5)
CASSLIPAGGETQYF

SEQ ID NO: 188873 - protein, 14 aa, Homo sapiens
  CDR3 for alpha chain variable domain of TCR clone 94437 (TRAV35, TRAJ40)
CAGSTTSGTYKYIF

SEQ ID NO: 188874 - protein, 14 aa, Homo sapiens
  CDR3 for beta chain variable domain of TCR clone 94437 (TRBV7-2, TRBJ1-1)
CASSFLTGTTEAFF

SEQ ID NO: 188875 - protein, 13 aa, Homo sapiens
  CDR3 for alpha chain variable domain of TCR clone 94438 (TRAV3, TRAJ21)
CAVREPDFNKFYF

SEQ ID NO: 188876 - protein, 16 aa, Homo sapiens
  CDR3 for beta chain variable domain of TCR clone 94438 (TRBV5-1, TRBJ2-4)
AASRLAGEWTKNIQYF

SEQ ID NO: 188877 - protein, 13 aa, Homo sapiens
  CDR3 for alpha chain variable domain of TCR clone 94439 (TRAV2, TRAJ15)
CAVASQAGTALIF

SEQ ID NO: 188878 - protein, 16 aa, Homo sapiens
  CDR3 for beta chain variable domain of TCR clone 94439 (TRBV18, TRBJ1-5)
CASSPYRVEGSQPQHF

SEQ ID NO: 188879 - protein, 15 aa, Homo sapiens
  CDR3 for alpha chain variable domain of TCR clone 94440 (TRAV12-1, TRAJ22)
CVVRISSGSARQLTF

SEQ ID NO: 188880 - protein, 14 aa, Homo sapiens
  CDR3 for beta chain variable domain of TCR clone 94440 (TRBV5-1, TRBJ2-5)
CASSLAGKQETQYF

SEQ ID NO: 188881 - protein, 15 aa, Homo sapiens
  CDR3 for alpha chain variable domain of TCR clone 94441 (TRAV2, TRAJ28)
FAVPYSGAGSYQLTF

SEQ ID NO: 188882 - protein, 17 aa, Homo sapiens
  CDR3 for beta chain variable domain of TCR clone 94441 (TRBV20-1, TRBJ2-4)
CSARDWASGGRENIQYF

SEQ ID NO: 188883 - protein, 13 aa, Homo sapiens
  CDR3 for alpha chain variable domain of TCR clone 94442 (TRAV13-1, TRAJ20)
CAARVSNDYKLSF

SEQ ID NO: 188884 - protein, 12 aa, Homo sapiens
  CDR3 for beta chain variable domain of TCR clone 94442 (TRBV20-1, TRBJ2-1)
CSARPGTDEQFF

SEQ ID NO: 188885 - protein, 12 aa, Homo sapiens
  CDR3 for alpha chain variable domain of TCR clone 94443 (TRAV12-3, TRAJ17)
CAMTLTGNKLTF

SEQ ID NO: 188886 - protein, 14 aa, Homo sapiens
  CDR3 for beta chain variable domain of TCR clone 94443 (TRBV29-1, TRBJ2-5)
CSVETSGSGETQYF

SEQ ID NO: 188887 - protein, 12 aa, Homo sapiens
  CDR3 for alpha chain variable domain of TCR clone 94444 (TRAV16, TRAJ30)
CALGDRDDKIIF

SEQ ID NO: 188888 - protein, 13 aa, Homo sapiens
  CDR3 for beta chain variable domain of TCR clone 94444 (TRBV12-4, TRBJ2-7)
CASSPTETYEQYF

SEQ ID NO: 188889 - protein, 14 aa, Homo sapiens
  CDR3 for alpha chain variable domain of TCR clone 94445 (TRAV16, TRAJ33)
CALSAMDSNYQLIW

SEQ ID NO: 188890 - protein, 11 aa, Homo sapiens
  CDR3 for beta chain variable domain of TCR clone 94445 (TRBV28, TRBJ2-6)
CHPGWANVLTF

SEQ ID NO: 188891 - protein, 16 aa, Homo sapiens
  CDR3 for alpha chain variable domain of TCR clone 94446 (TRAV30, TRAJ24)
CGTEIVDADSWGKFQF

SEQ ID NO: 188892 - protein, 15 aa, Homo sapiens
  CDR3 for beta chain variable domain of TCR clone 94446 (TRBV10-1, TRBJ2-3)
CASSATSGGFDTQYF

SEQ ID NO: 188893 - protein, 15 aa, Homo sapiens
  CDR3 for alpha chain variable domain of TCR clone 94447 (TRAV2, TRAJ22)
CAVPSRGGSARQLTL

SEQ ID NO: 188894 - protein, 11 aa, Homo sapiens
  CDR3 for beta chain variable domain of TCR clone 94447 (TRBV27, TRBJ2-3)
CASSLGDTQYF

SEQ ID NO: 188895 - protein, 11 aa, Homo sapiens
  CDR3 for alpha chain variable domain of TCR clone 94448 (TRAV12-1, TRAJ43)
CVEYDNNDMRF

SEQ ID NO: 188896 - protein, 15 aa, Homo sapiens
  CDR3 for beta chain variable domain of TCR clone 94448 (TRBV18, TRBJ2-5)
CASSPRASEAETQYY

SEQ ID NO: 188897 - protein, 14 aa, Homo sapiens
  CDR3 for alpha chain variable domain of TCR clone 94449 (TRAV16, TRAJ48)
CALTPGFGNEKLTF

SEQ ID NO: 188898 - protein, 14 aa, Homo sapiens
  CDR3 for beta chain variable domain of TCR clone 94449 (TRBV11-2, TRBJ2-7)
CASSLGAGAYEQYF

SEQ ID NO: 188899 - protein, 14 aa, Homo sapiens
  CDR3 for alpha chain variable domain of TCR clone 94450 (TRAV12-2, TRAJ40)
CAVKIPSGTYKYIF

SEQ ID NO: 188900 - protein, 20 aa, Homo sapiens
  CDR3 for beta chain variable domain of TCR clone 94450 (TRBV28, TRBJ2-1)
CASTPIGRPPGLAGGNEQFF

SEQ ID NO: 188901 - protein, 12 aa, Homo sapiens
  CDR3 for alpha chain variable domain of TCR clone 94451 (TRAV2, TRAJ9)
CAVGAGGFKTIF

SEQ ID NO: 188902 - protein, 19 aa, Homo sapiens
  CDR3 for beta chain variable domain of TCR clone 94451 (TRBV7-2, TRBJ1-1)
CASSFWAKRAGNPNTEAFF

SEQ ID NO: 188903 - protein, 11 aa, Homo sapiens
  CDR3 for alpha chain variable domain of TCR clone 94452 (TRAV17, TRAJ43)
CATPRSTDMRF

SEQ ID NO: 188904 - protein, 15 aa, Homo sapiens
  CDR3 for beta chain variable domain of TCR clone 94452 (TRBV11-2, TRBJ2-1)
CASSLGTSGLNEQFF

SEQ ID NO: 188905 - protein, 10 aa, Homo sapiens
  CDR3 for alpha chain variable domain of TCR clone 94453 (TRAV12-1, TRAJ37)
ARGNTGKLIF

SEQ ID NO: 188906 - protein, 15 aa, Homo sapiens
  CDR3 for beta chain variable domain of TCR clone 94453 (TRBV7-2, TRBJ2-3)
CARSLEQGGTDTQYF

SEQ ID NO: 188907 - protein, 12 aa, Homo sapiens
  CDR3 for alpha chain variable domain of TCR clone 94454 (TRAV26-2, TRAJ21)
CILKRNFNKFYF

SEQ ID NO: 188908 - protein, 14 aa, Homo sapiens
  CDR3 for beta chain variable domain of TCR clone 94454 (TRBV7-9, TRBJ1-1)
CASTPLQSYTEAFF

SEQ ID NO: 188909 - protein, 18 aa, Homo sapiens
  CDR3 for alpha chain variable domain of TCR clone 94455 (TRAV21, TRAJ52)
CAVRPSPAGGTSYGKLTF

SEQ ID NO: 188910 - protein, 17 aa, Homo sapiens
  CDR3 for beta chain variable domain of TCR clone 94455 (TRBV13, TRBJ2-3)
CPSSLSRVAGGRNTQYF

SEQ ID NO: 188911 - protein, 18 aa, Homo sapiens
  CDR3 for alpha chain variable domain of TCR clone 94456 (TRAV13-1, TRAJ52)
CAASKRSAGGTSCGKLTF

SEQ ID NO: 188912 - protein, 13 aa, Homo sapiens
  CDR3 for beta chain variable domain of TCR clone 94456 (TRBV12-4, TRBJ1-2)
YASSLRQGKGYTF

SEQ ID NO: 188913 - protein, 14 aa, Homo sapiens
  CDR3 for alpha chain variable domain of TCR clone 94457 (TRAV12-2, TRAJ6)
CASKWGGGSYIPTF

SEQ ID NO: 188914 - protein, 15 aa, Homo sapiens
  CDR3 for beta chain variable domain of TCR clone 94457 (TRBV7-3, TRBJ2-2)
CASSETGQGTGELFF

SEQ ID NO: 188915 - protein, 11 aa, Homo sapiens
  CDR3 for alpha chain variable domain of TCR clone 94458 (TRAV39, TRAJ49)
CAVDISTQFYF

SEQ ID NO: 188916 - protein, 16 aa, Homo sapiens
  CDR3 for beta chain variable domain of TCR clone 94458 (TRBV19, TRBJ1-1)
CASRFGGPVTGTEAFF

SEQ ID NO: 188917 - protein, 14 aa, Homo sapiens
  CDR3 for alpha chain variable domain of TCR clone 94459 (TRAV29/DV5, TRAJ36)
CAARRKTGANNLFF

SEQ ID NO: 188918 - protein, 17 aa, Homo sapiens
  CDR3 for beta chain variable domain of TCR clone 94459 (TRBV7-3, TRBJ2-3)
CASSLMKRMRGADTQYF

SEQ ID NO: 188919 - protein, 15 aa, Homo sapiens
  CDR3 for alpha chain variable domain of TCR clone 94460 (TRAV17, TRAJ16)
CATALRFSDGQKLLF

SEQ ID NO: 188920 - protein, 13 aa, Homo sapiens
  CDR3 for beta chain variable domain of TCR clone 94460 (TRBV7-3, TRBJ1-2)
CASSLKRGYGYTF

SEQ ID NO: 188921 - protein, 14 aa, Homo sapiens
  CDR3 for alpha chain variable domain of TCR clone 94461 (TRAV29/DV5, TRAJ36)
CAARRKTGANNLFF

SEQ ID NO: 188922 - protein, 13 aa, Homo sapiens
  CDR3 for beta chain variable domain of TCR clone 94461 (TRBV20-1, TRBJ1-1)
CSARGGGNTEAFF

SEQ ID NO: 188923 - protein, 15 aa, Homo sapiens
  CDR3 for alpha chain variable domain of TCR clone 94462 (TRAV12-3, TRAJ6)
CAMSATTGGSYIPTF

SEQ ID NO: 188924 - protein, 14 aa, Homo sapiens
  CDR3 for beta chain variable domain of TCR clone 94462 (TRBV4-1, TRBJ2-7)
CASSPVAGGDEQYF

SEQ ID NO: 188925 - protein, 16 aa, Homo sapiens
  CDR3 for alpha chain variable domain of TCR clone 94463 (TRAV12-2, TRAJ18)
CAVTTDRGSTLGRLYF

SEQ ID NO: 188926 - protein, 15 aa, Homo sapiens
  CDR3 for beta chain variable domain of TCR clone 94463 (TRBV5-1, TRBJ2-7)
CASSLNGGPAREQYF

SEQ ID NO: 188927 - protein, 11 aa, Homo sapiens
  CDR3 for alpha chain variable domain of TCR clone 94464 (TRAV17, TRAJ9)
CGFTGGFKPIF

SEQ ID NO: 188928 - protein, 12 aa, Homo sapiens
  CDR3 for beta chain variable domain of TCR clone 94464 (TRBV29-1, TRBJ2-3)
CSVTGGADTQYF

SEQ ID NO: 188929 - protein, 18 aa, Homo sapiens
  CDR3 for alpha chain variable domain of TCR clone 94465 (TRAV13-1, TRAJ52)
CAAKNLNAGGTSYGKLTF

SEQ ID NO: 188930 - protein, 13 aa, Homo sapiens
  CDR3 for beta chain variable domain of TCR clone 94465 (TRBV27, TRBJ1-1)
CASSLSIGAEAFF

SEQ ID NO: 188931 - protein, 15 aa, Homo sapiens
  CDR3 for alpha chain variable domain of TCR clone 94466 (TRAV3, TRAJ20)
CAVRDIKLSDYNRSF

SEQ ID NO: 188932 - protein, 15 aa, Homo sapiens
  CDR3 for beta chain variable domain of TCR clone 94466 (TRBV7-9, TRBJ1-6)
CASSSPGRGNSPLHF

SEQ ID NO: 188933 - protein, 16 aa, Homo sapiens
  CDR3 for alpha chain variable domain of TCR clone 94467 (TRAV3, TRAJ10)
CAVRDMRAGGGNKLNF

SEQ ID NO: 188934 - protein, 12 aa, Homo sapiens
  CDR3 for beta chain variable domain of TCR clone 94467 (TRBV11-2, TRBJ2-2)
CASSLPTGELFF

SEQ ID NO: 188935 - protein, 14 aa, Homo sapiens
  CDR3 for alpha chain variable domain of TCR clone 94468 (TRAV16, TRAJ44)
CALSTTGTASKLTF

SEQ ID NO: 188936 - protein, 14 aa, Homo sapiens
  CDR3 for beta chain variable domain of TCR clone 94468 (TRBV20-1, TRBJ2-7)
CSAISRKASYEQYF

SEQ ID NO: 188937 - protein, 14 aa, Homo sapiens
  CDR3 for alpha chain variable domain of TCR clone 94469 (TRAV12-2, TRAJ13)
CAVKKTGGYQKVTF

SEQ ID NO: 188938 - protein, 14 aa, Homo sapiens
  CDR3 for beta chain variable domain of TCR clone 94469 (TRBV19, TRBJ2-2)
CASSGQGIAGELFF

SEQ ID NO: 188939 - protein, 11 aa, Homo sapiens
  CDR3 for alpha chain variable domain of TCR clone 94470 (TRAV1-2, TRAJ40)
CAVPGTYKYIF

SEQ ID NO: 188940 - protein, 11 aa, Homo sapiens
  CDR3 for beta chain variable domain of TCR clone 94470 (TRBV5-6, TRBJ2-5)
CASSLERTQYF

SEQ ID NO: 188941 - protein, 14 aa, Homo sapiens
  CDR3 for alpha chain variable domain of TCR clone 94471 (TRAV2, TRAJ37)
CAVDFTSNTGKLIF

SEQ ID NO: 188942 - protein, 14 aa, Homo sapiens
  CDR3 for beta chain variable domain of TCR clone 94471 (TRBV15, TRBJ2-5)
CATSGDRGQETQYF

SEQ ID NO: 188943 - protein, 15 aa, Homo sapiens
  CDR3 for alpha chain variable domain of TCR clone 94472 (TRAV21, TRAJ53)
CATLNSGGSNYKLTF

SEQ ID NO: 188944 - protein, 13 aa, Homo sapiens
  CDR3 for beta chain variable domain of TCR clone 94472 (TRBV12-4, TRBJ2-1)
CASSLSPSNEQFF

SEQ ID NO: 188945 - protein, 16 aa, Homo sapiens
  CDR3 for alpha chain variable domain of TCR clone 94473 (TRAV1-1, TRAJ29)
CAVRSTRNSGNTPLVF

SEQ ID NO: 188946 - protein, 16 aa, Homo sapiens
  CDR3 for beta chain variable domain of TCR clone 94473 (TRBV27, TRBJ1-1)
CASSYRGRTGYTEAFF

SEQ ID NO: 188947 - protein, 16 aa, Homo sapiens
  CDR3 for alpha chain variable domain of TCR clone 94474 (TRAV27, TRAJ13)
CAGAKSDSGGYQKVTF

SEQ ID NO: 188948 - protein, 15 aa, Homo sapiens
  CDR3 for beta chain variable domain of TCR clone 94474 (TRBV29-1, TRBJ2-1)
CSVRRHALFYNEQFF

SEQ ID NO: 188949 - protein, 13 aa, Homo sapiens
  CDR3 for alpha chain variable domain of TCR clone 94475 (TRAV2, TRAJ24)
CAVTTDSWGKWQF

SEQ ID NO: 188950 - protein, 14 aa, Homo sapiens
  CDR3 for beta chain variable domain of TCR clone 94475 (TRBV13, TRBJ2-5)
CASSLGRGQETQYF

SEQ ID NO: 188951 - protein, 14 aa, Homo sapiens
  CDR3 for alpha chain variable domain of TCR clone 94476 (TRAV1-2, TRAJ16)
CAVNRFSDGQKLLF

SEQ ID NO: 188952 - protein, 18 aa, Homo sapiens
  CDR3 for beta chain variable domain of TCR clone 94476 (TRBV27, TRBJ2-1)
CASGNRAVGVGSKNEQFF

SEQ ID NO: 188953 - protein, 16 aa, Homo sapiens
  CDR3 for alpha chain variable domain of TCR clone 94477 (TRAV3, TRAJ10)
CAVRDMRAGGGNKLTI

SEQ ID NO: 188954 - protein, 15 aa, Homo sapiens
  CDR3 for beta chain variable domain of TCR clone 94477 (TRBV20-1, TRBJ2-1)
CSASSAGSSYNEQFF

SEQ ID NO: 188955 - protein, 12 aa, Homo sapiens
  CDR3 for alpha chain variable domain of TCR clone 94478 (TRAV13-1, TRAJ21)
CAAKEGLNKFYF

SEQ ID NO: 188956 - protein, 15 aa, Homo sapiens
  CDR3 for beta chain variable domain of TCR clone 94478 (TRBV7-2, TRBJ2-7)
CASSLVSSGSYEQYF

SEQ ID NO: 188957 - protein, 18 aa, Homo sapiens
  CDR3 for alpha chain variable domain of TCR clone 94479 (TRAV21, TRAJ52)
CAVRPSPAGGTSYGKLTF

SEQ ID NO: 188958 - protein, 15 aa, Homo sapiens
  CDR3 for beta chain variable domain of TCR clone 94479 (TRBV7-2, TRBJ1-1)
CASSFAGDRDTEAFF

SEQ ID NO: 188959 - protein, 13 aa, Homo sapiens
  CDR3 for alpha chain variable domain of TCR clone 94480 (TRAV2, TRAJ40)
CAVVTPGTYKYIF

SEQ ID NO: 188960 - protein, 16 aa, Homo sapiens
  CDR3 for beta chain variable domain of TCR clone 94480 (TRBV19, TRBJ2-2)
CASRSPGTGATGELFF

SEQ ID NO: 188961 - protein, 16 aa, Homo sapiens
  CDR3 for alpha chain variable domain of TCR clone 94481 (TRAV14/DV4, TRAJ54)
CAMREGRIQGAQKLVF

SEQ ID NO: 188962 - protein, 14 aa, Homo sapiens
  CDR3 for beta chain variable domain of TCR clone 94481 (TRBV19, TRBJ2-1)
CASSPGLAPNEQFF

SEQ ID NO: 188963 - protein, 14 aa, Homo sapiens
  CDR3 for alpha chain variable domain of TCR clone 94482 (TRAV17, TRAJ4)
CATVPSGGYNKLIF

SEQ ID NO: 188964 - protein, 14 aa, Homo sapiens
  CDR3 for beta chain variable domain of TCR clone 94482 (TRBV7-8, TRBJ2-1)
CASSLGVADNEQFF

SEQ ID NO: 188965 - protein, 16 aa, Homo sapiens
  CDR3 for alpha chain variable domain of TCR clone 94483 (TRAV17, TRAJ35)
CATPEGGIGFGNVLHC

SEQ ID NO: 188966 - protein, 16 aa, Homo sapiens
  CDR3 for beta chain variable domain of TCR clone 94483 (TRBV6-5, TRBJ2-7)
CASSSDPTSGFYEQYF

SEQ ID NO: 188967 - protein, 14 aa, Homo sapiens
  CDR3 for alpha chain variable domain of TCR clone 94484 (TRAV17, TRAJ35)
CATWTIGFGNVLHC

SEQ ID NO: 188968 - protein, 15 aa, Homo sapiens
  CDR3 for beta chain variable domain of TCR clone 94484 (TRBV7-2, TRBJ2-5)
CASSPLGLGKETQYF

SEQ ID NO: 188969 - protein, 13 aa, Homo sapiens
  CDR3 for alpha chain variable domain of TCR clone 94485 (TRAV13-1, TRAJ11)
CAAVLAGYRTLTF

SEQ ID NO: 188970 - protein, 17 aa, Homo sapiens
  CDR3 for beta chain variable domain of TCR clone 94485 (TRBV25-1, TRBJ2-7)
CASSDARVVFSSYEQYF

SEQ ID NO: 188971 - protein, 11 aa, Homo sapiens
  CDR3 for alpha chain variable domain of TCR clone 94486 (TRAV12-1, TRAJ34)
CVVNKGRELIF

SEQ ID NO: 188972 - protein, 12 aa, Homo sapiens
  CDR3 for beta chain variable domain of TCR clone 94486 (TRBV2, TRBJ2-1)
CAYGPPGNEQFS

SEQ ID NO: 188973 - protein, 11 aa, Homo sapiens
  CDR3 for alpha chain variable domain of TCR clone 94487 (TRAV35, TRAJ30)
CAGERDDKIIF

SEQ ID NO: 188974 - protein, 14 aa, Homo sapiens
  CDR3 for beta chain variable domain of TCR clone 94487 (TRBV15, TRBJ2-5)
CATSGDRGQETQYF

SEQ ID NO: 188975 - protein, 14 aa, Homo sapiens
  CDR3 for alpha chain variable domain of TCR clone 94488 (TRAV26-1, TRAJ38)
CIADNAGNNRKLIW

SEQ ID NO: 188976 - protein, 13 aa, Homo sapiens
  CDR3 for beta chain variable domain of TCR clone 94488 (TRBV15, TRBJ1-6)
CATSGGINSPLHF

SEQ ID NO: 188977 - protein, 14 aa, Homo sapiens
  CDR3 for alpha chain variable domain of TCR clone 94489 (TRAV8-3, TRAJ4)
CAVGASGGYNKLFF

SEQ ID NO: 188978 - protein, 17 aa, Homo sapiens
  CDR3 for beta chain variable domain of TCR clone 94489 (TRBV11-2, TRBJ2-1)
CASSLYPPGVEYNEQFF

SEQ ID NO: 188979 - protein, 12 aa, Homo sapiens
  CDR3 for alpha chain variable domain of TCR clone 94490 (TRAV27, TRAJ13)
CAGAGGYQKVTF

SEQ ID NO: 188980 - protein, 14 aa, Homo sapiens
  CDR3 for beta chain variable domain of TCR clone 94490 (TRBV25-1, TRBJ1-1)
CASTHLGGNTEAFF

SEQ ID NO: 188981 - protein, 12 aa, Homo sapiens
  CDR3 for alpha chain variable domain of TCR clone 94491 (TRAV13-1, TRAJ48)
CAANFGNEKLTF

SEQ ID NO: 188982 - protein, 18 aa, Homo sapiens
  CDR3 for beta chain variable domain of TCR clone 94491 (TRBV11-2, TRBJ2-3)
CASSLGGASRGAPNTQYF

SEQ ID NO: 188983 - protein, 13 aa, Homo sapiens
  CDR3 for alpha chain variable domain of TCR clone 94492 (TRAV12-3, TRAJ33)
CAMSVNSNYQLIW

SEQ ID NO: 188984 - protein, 13 aa, Homo sapiens
  CDR3 for beta chain variable domain of TCR clone 94492 (TRBV4-1, TRBJ1-1)
CASSRKMNTEAFF

SEQ ID NO: 188985 - protein, 15 aa, Homo sapiens
  CDR3 for alpha chain variable domain of TCR clone 94493 (TRAV8-3, TRAJ11)
CAVDLLNSGYSTLTF

SEQ ID NO: 188986 - protein, 13 aa, Homo sapiens
  CDR3 for beta chain variable domain of TCR clone 94493 (TRBV4-2, TRBJ2-5)
CASSRAGGETQYF

SEQ ID NO: 188987 - protein, 16 aa, Homo sapiens
  CDR3 for alpha chain variable domain of TCR clone 94494 (TRAV3, TRAJ6)
CAVRDGMGRRKPHTYI

SEQ ID NO: 188988 - protein, 15 aa, Homo sapiens
  CDR3 for beta chain variable domain of TCR clone 94494 (TRBV9, TRBJ2-1)
CASSLAGSSYNEQFF

SEQ ID NO: 188989 - protein, 15 aa, Homo sapiens
  CDR3 for alpha chain variable domain of TCR clone 94495 (TRAV21, TRAJ53)
CATLNSGGSNYKLTF

SEQ ID NO: 188990 - protein, 16 aa, Homo sapiens
  CDR3 for beta chain variable domain of TCR clone 94495 (TRBV9, TRBJ2-1)
CASSVGGGGNYNEQFV

SEQ ID NO: 188991 - protein, 15 aa, Homo sapiens
  CDR3 for alpha chain variable domain of TCR clone 94496 (TRAV21, TRAJ42)
CAVTDYGGSQGNLIF

SEQ ID NO: 188992 - protein, 15 aa, Homo sapiens
  CDR3 for beta chain variable domain of TCR clone 94496 (TRBV7-2, TRBJ2-7)
CASSLKGALTYEQYF

SEQ ID NO: 188993 - protein, 14 aa, Homo sapiens
  CDR3 for alpha chain variable domain of TCR clone 94497 (TRAV3, TRAJ20)
CAVRPSVTTTSSAL

SEQ ID NO: 188994 - protein, 13 aa, Homo sapiens
  CDR3 for beta chain variable domain of TCR clone 94497 (TRBV12-4, TRBJ1-2)
CASSLRQGKGYTF

SEQ ID NO: 188995 - protein, 17 aa, Homo sapiens
  CDR3 for alpha chain variable domain of TCR clone 94498 (TRAV3, TRAJ12)
CAVRDGGRMDSSYKLIL

SEQ ID NO: 188996 - protein, 13 aa, Homo sapiens
  CDR3 for beta chain variable domain of TCR clone 94498 (TRBV20-1, TRBJ1-1)
CSAPLGGGTEAFF

SEQ ID NO: 188997 - protein, 12 aa, Homo sapiens
  CDR3 for alpha chain variable domain of TCR clone 94499 (TRAV8-4, TRAJ31)
CAVSDSNARLMF

SEQ ID NO: 188998 - protein, 15 aa, Homo sapiens
  CDR3 for beta chain variable domain of TCR clone 94499 (TRBV25-1, TRBJ2-7)
CASRFWGQGADEQYF

SEQ ID NO: 188999 - protein, 13 aa, Homo sapiens
  CDR3 for alpha chain variable domain of TCR clone 94500 (TRAV38-2/DV8, TRAJ34)
CAYRTWNTDKLIF

SEQ ID NO: 189000 - protein, 15 aa, Homo sapiens
  CDR3 for beta chain variable domain of TCR clone 94500 (TRBV18, TRBJ1-2)
CASSTRAGMGYGYTF

SEQ ID NO: 189001 - protein, 11 aa, Homo sapiens
  CDR3 for alpha chain variable domain of TCR clone 94501 (TRAV2, TRAJ13)
CASGGYQKVTF

SEQ ID NO: 189002 - protein, 13 aa, Homo sapiens
  CDR3 for beta chain variable domain of TCR clone 94501 (TRBV12-5, TRBJ2-3)
CASQNRGTDTQYF

SEQ ID NO: 189003 - protein, 17 aa, Homo sapiens
  CDR3 for alpha chain variable domain of TCR clone 94502 (TRAV3, TRAJ12)
CAVRDGGRRDSSYKLIF

SEQ ID NO: 189004 - protein, 16 aa, Homo sapiens
  CDR3 for beta chain variable domain of TCR clone 94502 (TRBV9, TRBJ2-2)
CASSAMGKGNTGELFF

SEQ ID NO: 189005 - protein, 15 aa, Homo sapiens
  CDR3 for alpha chain variable domain of TCR clone 94503 (TRAV26-1, TRAJ48)
CIVRVGDFGNEKLTF

SEQ ID NO: 189006 - protein, 16 aa, Homo sapiens
  CDR3 for beta chain variable domain of TCR clone 94503 (TRBV4-1, TRBJ2-3)
CASSRRAGGLTDTQYF

SEQ ID NO: 189007 - protein, 17 aa, Homo sapiens
  CDR3 for alpha chain variable domain of TCR clone 94504 (TRAV3, TRAJ6)
CAVRDGPRAGGSYISTF

SEQ ID NO: 189008 - protein, 12 aa, Homo sapiens
  CDR3 for beta chain variable domain of TCR clone 94504 (TRBV11-2, TRBJ2-2)
CASSLGGGELFF

SEQ ID NO: 189009 - protein, 15 aa, Homo sapiens
  CDR3 for alpha chain variable domain of TCR clone 94505 (TRAV4, TRAJ39)
CLVGPNNNAGNLLTF

SEQ ID NO: 189010 - protein, 12 aa, Homo sapiens
  CDR3 for beta chain variable domain of TCR clone 94505 (TRBV12-4, TRBJ2-7)
CASNPGGGEQYF

SEQ ID NO: 189011 - protein, 14 aa, Homo sapiens
  CDR3 for alpha chain variable domain of TCR clone 94506 (TRAV8-3, TRAJ10)
CAVGNAGGGNKLAF

SEQ ID NO: 189012 - protein, 17 aa, Homo sapiens
  CDR3 for beta chain variable domain of TCR clone 94506 (TRBV27, TRBJ2-7)
CASSTKRPGTGPYEQYF

SEQ ID NO: 189013 - protein, 12 aa, Homo sapiens
  CDR3 for alpha chain variable domain of TCR clone 94507 (TRAV17, TRAJ47)
TSVPTYGNKLVF

SEQ ID NO: 189014 - protein, 15 aa, Homo sapiens
  CDR3 for beta chain variable domain of TCR clone 94507 (TRBV27, TRBJ2-1)
CASSNGGGSSNEQFF

SEQ ID NO: 189015 - protein, 14 aa, Homo sapiens
  CDR3 for alpha chain variable domain of TCR clone 94508 (TRAV1-2, TRAJ16)
CAVNRFSDGQKLLF

SEQ ID NO: 189016 - protein, 15 aa, Homo sapiens
  CDR3 for beta chain variable domain of TCR clone 94508 (TRBV7-9, TRBJ1-6)
CASSSPGRGNSHLYF

SEQ ID NO: 189017 - protein, 12 aa, Homo sapiens
  CDR3 for alpha chain variable domain of TCR clone 94509 (TRAV16, TRAJ10)
CSRTGGGNKLTF

SEQ ID NO: 189018 - protein, 13 aa, Homo sapiens
  CDR3 for beta chain variable domain of TCR clone 94509 (TRBV7-3, TRBJ1-1)
CASSQGWGAEAFF

SEQ ID NO: 189019 - protein, 13 aa, Homo sapiens
  CDR3 for alpha chain variable domain of TCR clone 94510 (TRAV8-3, TRAJ28)
CAVGAVGSYQLTF

SEQ ID NO: 189020 - protein, 16 aa, Homo sapiens
  CDR3 for beta chain variable domain of TCR clone 94510 (TRBV20-1, TRBJ1-4)
CSAPGQGLLTNEKLFF

SEQ ID NO: 189021 - protein, 10 aa, Homo sapiens
  CDR3 for alpha chain variable domain of TCR clone 94511 (TRAV30, TRAJ34)
CGTNPDKLIF

SEQ ID NO: 189022 - protein, 12 aa, Homo sapiens
  CDR3 for beta chain variable domain of TCR clone 94511 (TRBV19, TRBJ1-1)
RASSLSDTEAFF

SEQ ID NO: 189023 - protein, 13 aa, Homo sapiens
  CDR3 for alpha chain variable domain of TCR clone 94512 (TRAV21, TRAJ15)
CAVANQAGTALIF

SEQ ID NO: 189024 - protein, 13 aa, Homo sapiens
  CDR3 for beta chain variable domain of TCR clone 94512 (TRBV7-9, TRBJ2-1)
CASSLDVGNEQFF

SEQ ID NO: 189025 - protein, 13 aa, Homo sapiens
  CDR3 for alpha chain variable domain of TCR clone 94513 (TRAV12-2, TRAJ48)
CAAPNFGNEKLTF

SEQ ID NO: 189026 - protein, 14 aa, Homo sapiens
  CDR3 for beta chain variable domain of TCR clone 94513 (TRBV19, TRBJ2-1)
CASPTFVLSGEQFF

SEQ ID NO: 189027 - protein, 14 aa, Homo sapiens
  CDR3 for alpha chain variable domain of TCR clone 94514 (TRAV17, TRAJ34)
CPTDSLEGTDKLIF

SEQ ID NO: 189028 - protein, 13 aa, Homo sapiens
  CDR3 for beta chain variable domain of TCR clone 94514 (TRBV11-2, TRBJ2-7)
CASSGTRPYEQYF

SEQ ID NO: 189029 - protein, 14 aa, Homo sapiens
  CDR3 for alpha chain variable domain of TCR clone 94515 (TRAV12-2, TRAJ13)
CAVKKTGGYQKVTF

SEQ ID NO: 189030 - protein, 16 aa, Homo sapiens
  CDR3 for beta chain variable domain of TCR clone 94515 (TRBV7-2, TRBJ2-3)
CASSESGPTGTDTQYF

SEQ ID NO: 189031 - protein, 16 aa, Homo sapiens
  CDR3 for alpha chain variable domain of TCR clone 94516 (TRAV3, TRAJ37)
CAVRGKGSGNTGKLIF

SEQ ID NO: 189032 - protein, 13 aa, Homo sapiens
  CDR3 for beta chain variable domain of TCR clone 94516 (TRBV14, TRBJ2-7)
CASSQDRRYEQYF

SEQ ID NO: 189033 - protein, 12 aa, Homo sapiens
  CDR3 for alpha chain variable domain of TCR clone 94517 (TRAV12-3, TRAJ20)
CAMVRGDYKLSF

SEQ ID NO: 189034 - protein, 14 aa, Homo sapiens
  CDR3 for beta chain variable domain of TCR clone 94517 (TRBV18, TRBJ2-7)
CASSPRGGAYEQYF

SEQ ID NO: 189035 - protein, 11 aa, Homo sapiens
  CDR3 for alpha chain variable domain of TCR clone 94518 (TRAV27, TRAJ20)
CAGADDYKLSF

SEQ ID NO: 189036 - protein, 15 aa, Homo sapiens
  CDR3 for beta chain variable domain of TCR clone 94518 (TRBV18, TRBJ2-1)
CASSPPSASYNEQFF

SEQ ID NO: 189037 - protein, 17 aa, Homo sapiens
  CDR3 for alpha chain variable domain of TCR clone 94519 (TRAV3, TRAJ6)
CAVRDGPRAGVSYIPTF

SEQ ID NO: 189038 - protein, 15 aa, Homo sapiens
  CDR3 for beta chain variable domain of TCR clone 94519 (TRBV7-6, TRBJ2-3)
CASSPIIYSTDTQYF

SEQ ID NO: 189039 - protein, 12 aa, Homo sapiens
  CDR3 for alpha chain variable domain of TCR clone 94520 (TRAV2, TRAJ31)
CAVEDNNARLMF

SEQ ID NO: 189040 - protein, 18 aa, Homo sapiens
  CDR3 for beta chain variable domain of TCR clone 94520 (TRBV12-4, TRBJ2-2)
CASSLVAGTRGRTGELFF

SEQ ID NO: 189041 - protein, 14 aa, Homo sapiens
  CDR3 for alpha chain variable domain of TCR clone 94521 (TRAV23/DV6, TRAJ57)
CAASNQGGSEKLVF

SEQ ID NO: 189042 - protein, 13 aa, Homo sapiens
  CDR3 for beta chain variable domain of TCR clone 94521 (TRBV6-1, TRBJ1-1)
CASSRQGNTEAFF

SEQ ID NO: 189043 - protein, 13 aa, Homo sapiens
  CDR3 for alpha chain variable domain of TCR clone 94522 (TRAV29/DV5, TRAJ31)
CAASRNNNARLMF

SEQ ID NO: 189044 - protein, 16 aa, Homo sapiens
  CDR3 for beta chain variable domain of TCR clone 94522 (TRBV4-2, TRBJ1-1)
CASRPLDGGGDTEAFF

SEQ ID NO: 189045 - protein, 14 aa, Homo sapiens
  CDR3 for alpha chain variable domain of TCR clone 94523 (TRAV12-2, TRAJ13)
CAVKKTGGYQKVTF

SEQ ID NO: 189046 - protein, 13 aa, Homo sapiens
  CDR3 for beta chain variable domain of TCR clone 94523 (TRBV7-8, TRBJ2-1)
CASSLERLGEQFF

SEQ ID NO: 189047 - protein, 14 aa, Homo sapiens
  CDR3 for alpha chain variable domain of TCR clone 94524 (TRAV26-2, TRAJ38)
CILYNAGNNRKLIW

SEQ ID NO: 189048 - protein, 12 aa, Homo sapiens
  CDR3 for beta chain variable domain of TCR clone 94524 (TRBV5-1, TRBJ1-2)
CASSQDTYGYTF

SEQ ID NO: 189049 - protein, 14 aa, Homo sapiens
  CDR3 for alpha chain variable domain of TCR clone 94525 (TRAV1-2, TRAJ16)
CAVNRSSDGQKLLF

SEQ ID NO: 189050 - protein, 19 aa, Homo sapiens
  CDR3 for beta chain variable domain of TCR clone 94525 (TRBV6-3, TRBJ1-2)
CASSYSKGRTGPPNYGYTF

SEQ ID NO: 189051 - protein, 13 aa, Homo sapiens
  CDR3 for alpha chain variable domain of TCR clone 94526 (TRAV26-1, TRAJ54)
CIVRVKGAQKLVF

SEQ ID NO: 189052 - protein, 14 aa, Homo sapiens
  CDR3 for beta chain variable domain of TCR clone 94526 (TRBV7-2, TRBJ2-7)
CASSFLGRVYERYF

SEQ ID NO: 189053 - protein, 14 aa, Homo sapiens
  CDR3 for alpha chain variable domain of TCR clone 94527 (TRAV1-2, TRAJ8)
CAVREDTGFQKLVF

SEQ ID NO: 189054 - protein, 13 aa, Homo sapiens
  CDR3 for beta chain variable domain of TCR clone 94527 (TRBV27, TRBJ2-7)
CASSFVSSYEQYF

SEQ ID NO: 189055 - protein, 11 aa, Homo sapiens
  CDR3 for alpha chain variable domain of TCR clone 94528 (TRAV2, TRAJ13)
CASGGYQKVTF

SEQ ID NO: 189056 - protein, 12 aa, Homo sapiens
  CDR3 for beta chain variable domain of TCR clone 94528 (TRBV5-5, TRBJ1-2)
CASSFGLYGYTF

SEQ ID NO: 189057 - protein, 12 aa, Homo sapiens
  CDR3 for alpha chain variable domain of TCR clone 94529 (TRAV13-2, TRAJ23)
CAERHRGGKLIF

SEQ ID NO: 189058 - protein, 17 aa, Homo sapiens
  CDR3 for beta chain variable domain of TCR clone 94529 (TRBV28, TRBJ2-5)
CASSTPEGDALQETQYF

SEQ ID NO: 189059 - protein, 15 aa, Homo sapiens
  CDR3 for alpha chain variable domain of TCR clone 94530 (TRAV17, TRAJ57)
CATGPSPGGSEKLVF

SEQ ID NO: 189060 - protein, 12 aa, Homo sapiens
  CDR3 for beta chain variable domain of TCR clone 94530 (TRBV12-4, TRBJ2-7)
CASSLGGYEQYF

SEQ ID NO: 189061 - protein, 12 aa, Homo sapiens
  CDR3 for alpha chain variable domain of TCR clone 94531 (TRAV2, TRAJ9)
CAVGAGGFKTIF

SEQ ID NO: 189062 - protein, 16 aa, Homo sapiens
  CDR3 for beta chain variable domain of TCR clone 94531 (TRBV7-3, TRBJ2-2)
CASSLKRGTLSGELFF

SEQ ID NO: 189063 - protein, 15 aa, Homo sapiens
  CDR3 for alpha chain variable domain of TCR clone 94532 (TRAV12-2, TRAJ5)
CAVNNEDTGRRALTF

SEQ ID NO: 189064 - protein, 15 aa, Homo sapiens
  CDR3 for beta chain variable domain of TCR clone 94532 (TRBV19, TRBJ1-2)
CASSVGQVLNYGYTF

SEQ ID NO: 189065 - protein, 11 aa, Homo sapiens
  CDR3 for alpha chain variable domain of TCR clone 94533 (TRAV2, TRAJ13)
CASGGCQKVTF

SEQ ID NO: 189066 - protein, 12 aa, Homo sapiens
  CDR3 for beta chain variable domain of TCR clone 94533 (TRBV7-8, TRBJ2-7)
CASSLGDREQYF

SEQ ID NO: 189067 - protein, 15 aa, Homo sapiens
  CDR3 for alpha chain variable domain of TCR clone 94534 (TRAV35, TRAJ58)
CAGRRQETSGSRLTF

SEQ ID NO: 189068 - protein, 14 aa, Homo sapiens
  CDR3 for beta chain variable domain of TCR clone 94534 (TRBV7-3, TRBJ1-1)
CASSLKGGNTEAFF

SEQ ID NO: 189069 - protein, 12 aa, Homo sapiens
  CDR3 for alpha chain variable domain of TCR clone 94535 (TRAV12-3, TRAJ17)
CAMTLTGNKLTF

SEQ ID NO: 189070 - protein, 15 aa, Homo sapiens
  CDR3 for beta chain variable domain of TCR clone 94535 (TRBV20-1, TRBJ2-7)
CSARDRVSGMGEQCF

SEQ ID NO: 189071 - protein, 12 aa, Homo sapiens
  CDR3 for alpha chain variable domain of TCR clone 94536 (TRAV30, TRAJ43)
CGTEERGNDMGF

SEQ ID NO: 189072 - protein, 13 aa, Homo sapiens
  CDR3 for beta chain variable domain of TCR clone 94536 (TRBV27, TRBJ2-7)
CASSFSQGYEQYF

SEQ ID NO: 189073 - protein, 12 aa, Homo sapiens
  CDR3 for alpha chain variable domain of TCR clone 94537 (TRAV36/DV7, TRAJ22)
CAVSGSARQLTF

SEQ ID NO: 189074 - protein, 18 aa, Homo sapiens
  CDR3 for beta chain variable domain of TCR clone 94537 (TRBV20-1, TRBJ2-6)
CSAETTPTHGSGANVLTF

SEQ ID NO: 189075 - protein, 17 aa, Homo sapiens
  CDR3 for alpha chain variable domain of TCR clone 94538 (TRAV3, TRAJ6)
CAVRDGPRAGGSYIPTF

SEQ ID NO: 189076 - protein, 20 aa, Homo sapiens
  CDR3 for beta chain variable domain of TCR clone 94538 (TRBV28, TRBJ2-1)
CASTPIGRSPGLAGGNEQFI

SEQ ID NO: 189077 - protein, 11 aa, Homo sapiens
  CDR3 for alpha chain variable domain of TCR clone 94539 (TRAV2, TRAJ20)
CAVADDYKLSF

SEQ ID NO: 189078 - protein, 17 aa, Homo sapiens
  CDR3 for beta chain variable domain of TCR clone 94539 (TRBV13, TRBJ2-3)
CASSLSRVAGGRNTQYF

SEQ ID NO: 189079 - protein, 15 aa, Homo sapiens
  CDR3 for alpha chain variable domain of TCR clone 94540 (TRAV3, TRAJ12)
CAGRDIRDSSYKLIF

SEQ ID NO: 189080 - protein, 15 aa, Homo sapiens
  CDR3 for beta chain variable domain of TCR clone 94540 (TRBV27, TRBJ2-7)
CASSLRNEQGYEQYF

SEQ ID NO: 189081 - protein, 11 aa, Homo sapiens
  CDR3 for alpha chain variable domain of TCR clone 94541 (TRAV1-2, TRAJ31)
CAVNNNARLMF

SEQ ID NO: 189082 - protein, 15 aa, Homo sapiens
  CDR3 for beta chain variable domain of TCR clone 94541 (TRBV28, TRBJ2-1)
CASSIIGGGRSEQFF

SEQ ID NO: 189083 - protein, 11 aa, Homo sapiens
  CDR3 for alpha chain variable domain of TCR clone 94542 (TRAV1-2, TRAJ20)
CAVANDYKLSF

SEQ ID NO: 189084 - protein, 18 aa, Homo sapiens
  CDR3 for beta chain variable domain of TCR clone 94542 (TRBV20-1, TRBJ2-6)
CSAETTPTHGSGVNVLTF

SEQ ID NO: 189085 - protein, 19 aa, Homo sapiens
  CDR3 for alpha chain variable domain of TCR clone 94543 (TRAV39, TRAJ43)
PCMTSLPPTSVPWANDMRF

SEQ ID NO: 189086 - protein, 14 aa, Homo sapiens
  CDR3 for beta chain variable domain of TCR clone 94543 (TRBV7-2, TRBJ2-7)
CASRSQGAAYEQYF

SEQ ID NO: 189087 - protein, 14 aa, Homo sapiens
  CDR3 for alpha chain variable domain of TCR clone 94544 (TRAV14/DV4, TRAJ32)
SNVLPLTPTNKLIF

SEQ ID NO: 189088 - protein, 13 aa, Homo sapiens
  CDR3 for beta chain variable domain of TCR clone 94544 (TRBV20-1, TRBJ2-1)
CSASTGTSNEQFF

SEQ ID NO: 189089 - protein, 16 aa, Homo sapiens
  CDR3 for alpha chain variable domain of TCR clone 94545 (TRAV16, TRAJ52)
CALIAAGGTSYGKLTF

SEQ ID NO: 189090 - protein, 12 aa, Homo sapiens
  CDR3 for beta chain variable domain of TCR clone 94545 (TRBV12-4, TRBJ1-3)
CASSFSGNTIYF

SEQ ID NO: 189091 - protein, 11 aa, Homo sapiens
  CDR3 for alpha chain variable domain of TCR clone 94546 (TRAV17, TRAJ9)
CGFTGGFKTIF

SEQ ID NO: 189092 - protein, 14 aa, Homo sapiens
  CDR3 for beta chain variable domain of TCR clone 94546 (TRBV7-9, TRBJ2-2)
CASSLVQDSGELFF

SEQ ID NO: 189093 - protein, 14 aa, Homo sapiens
  CDR3 for alpha chain variable domain of TCR clone 94547 (TRAV26-1, TRAJ38)
CIADNAGNNRKLIW

SEQ ID NO: 189094 - protein, 14 aa, Homo sapiens
  CDR3 for beta chain variable domain of TCR clone 94547 (TRBV7-9, TRBJ2-3)
CASSLEQGTNTQYF

SEQ ID NO: 189095 - protein, 16 aa, Homo sapiens
  CDR3 for alpha chain variable domain of TCR clone 94548 (TRAV8-3, TRAJ10)
CAVGPGVTGGGNKLTF

SEQ ID NO: 189096 - protein, 13 aa, Homo sapiens
  CDR3 for beta chain variable domain of TCR clone 94548 (TRBV18, TRBJ1-1)
CAGSPGPSGEAFF

SEQ ID NO: 189097 - protein, 14 aa, Homo sapiens
  CDR3 for alpha chain variable domain of TCR clone 94549 (TRAV38-1, TRAJ40)
CALRPTSGTYKYIF

SEQ ID NO: 189098 - protein, 12 aa, Homo sapiens
  CDR3 for beta chain variable domain of TCR clone 94549 (TRBV5-1, TRBJ2-5)
CASSLGLETQYF

SEQ ID NO: 189099 - protein, 13 aa, Homo sapiens
  CDR3 for alpha chain variable domain of TCR clone 94550 (TRAV13-1, TRAJ39)
CSKYSNAGNMLTF

SEQ ID NO: 189100 - protein, 14 aa, Homo sapiens
  CDR3 for beta chain variable domain of TCR clone 94550 (TRBV20-1, TRBJ1-1)
CSAQTRIGGTEAFF

SEQ ID NO: 189101 - protein, 14 aa, Homo sapiens
  CDR3 for alpha chain variable domain of TCR clone 94551 (TRAV21, TRAJ35)
CAVVPIGFGNVLHC

SEQ ID NO: 189102 - protein, 12 aa, Homo sapiens
  CDR3 for beta chain variable domain of TCR clone 94551 (TRBV7-9, TRBJ2-7)
CASSIKREEQYF

SEQ ID NO: 189103 - protein, 14 aa, Homo sapiens
  CDR3 for alpha chain variable domain of TCR clone 94552 (TRAV35, TRAJ50)
CAGHRKTSYDKVIV

SEQ ID NO: 189104 - protein, 13 aa, Homo sapiens
  CDR3 for beta chain variable domain of TCR clone 94552 (TRBV7-7, TRBJ2-3)
CASSLSRADTQDF

SEQ ID NO: 189105 - protein, 13 aa, Homo sapiens
  CDR3 for alpha chain variable domain of TCR clone 94553 (TRAV29/DV5, TRAJ47)
CAASAEYGNKLVF

SEQ ID NO: 189106 - protein, 15 aa, Homo sapiens
  CDR3 for beta chain variable domain of TCR clone 94553 (TRBV7-9, TRBJ1-4)
CASRARTGGNEKLFF

SEQ ID NO: 189107 - protein, 20 aa, Homo sapiens
  CDR3 for alpha chain variable domain of TCR clone 94554 (TRAV13-1, TRAJ10)
CAAKGHGRRKQTHLWDRHSA

SEQ ID NO: 189108 - protein, 13 aa, Homo sapiens
  CDR3 for beta chain variable domain of TCR clone 94554 (TRBV20-1, TRBJ1-1)
CSARGGGSTEAFF

SEQ ID NO: 189109 - protein, 16 aa, Homo sapiens
  CDR3 for alpha chain variable domain of TCR clone 94555 (TRAV12-3, TRAJ53)
CAMSPGSGGSNYKLTF

SEQ ID NO: 189110 - protein, 13 aa, Homo sapiens
  CDR3 for beta chain variable domain of TCR clone 94555 (TRBV7-3, TRBJ1-2)
CASSLKRGYGYTF

SEQ ID NO: 189111 - protein, 14 aa, Homo sapiens
  CDR3 for alpha chain variable domain of TCR clone 94556 (TRAV9-2, TRAJ39)
RALYIYNAGNMLTF

SEQ ID NO: 189112 - protein, 14 aa, Homo sapiens
  CDR3 for beta chain variable domain of TCR clone 94556 (TRBV20-1, TRBJ1-1)
CSAQTRIGGTEAFF

SEQ ID NO: 189113 - protein, 15 aa, Homo sapiens
  CDR3 for alpha chain variable domain of TCR clone 94557 (TRAV26-1, TRAJ44)
CIVRIGTGTASTLTF

SEQ ID NO: 189114 - protein, 15 aa, Homo sapiens
  CDR3 for beta chain variable domain of TCR clone 94557 (TRBV7-6, TRBJ2-1)
CASSSLAGEGNEQFF

SEQ ID NO: 189115 - protein, 15 aa, Homo sapiens
  CDR3 for alpha chain variable domain of TCR clone 94558 (TRAV3, TRAJ5)
CAVRDLDTGRRALTF

SEQ ID NO: 189116 - protein, 13 aa, Homo sapiens
  CDR3 for beta chain variable domain of TCR clone 94558 (TRBV12-4, TRBJ2-7)
CASSPTETYEPYF

SEQ ID NO: 189117 - protein, 17 aa, Homo sapiens
  CDR3 for alpha chain variable domain of TCR clone 94559 (TRAV3, TRAJ38)
CAVRDCLNAGNNRRLIW

SEQ ID NO: 189118 - protein, 13 aa, Homo sapiens
  CDR3 for beta chain variable domain of TCR clone 94559 (TRBV23-1, TRBJ1-4)
CASRGKFNEKLFF

SEQ ID NO: 189119 - protein, 12 aa, Homo sapiens
  CDR3 for alpha chain variable domain of TCR clone 94560 (TRAV21, TRAJ11)
CAATSGYSTLTF

SEQ ID NO: 189120 - protein, 16 aa, Homo sapiens
  CDR3 for beta chain variable domain of TCR clone 94560 (TRBV20-1, TRBJ1-4)
CSAPGQGLLTNEKLFF

SEQ ID NO: 189121 - protein, 11 aa, Homo sapiens
  CDR3 for alpha chain variable domain of TCR clone 94561 (TRAV3, TRAJ21)
CAVGNFNKFYF

SEQ ID NO: 189122 - protein, 15 aa, Homo sapiens
  CDR3 for beta chain variable domain of TCR clone 94561 (TRBV19, TRBJ2-7)
CASSIGRTFSYEQYF

SEQ ID NO: 189123 - protein, 12 aa, Homo sapiens
  CDR3 for alpha chain variable domain of TCR clone 94562 (TRAV13-1, TRAJ48)
CAANFGNEKLTF

SEQ ID NO: 189124 - protein, 19 aa, Homo sapiens
  CDR3 for beta chain variable domain of TCR clone 94562 (TRBV7-3, TRBJ2-7)
CASSLTGVAGGWPSYEQYF

SEQ ID NO: 189125 - protein, 15 aa, Homo sapiens
  CDR3 for alpha chain variable domain of TCR clone 94563 (TRAV13-1, TRAJ32)
CAACIYGGATNKLIF

SEQ ID NO: 189126 - protein, 12 aa, Homo sapiens
  CDR3 for beta chain variable domain of TCR clone 94563 (TRBV7-6, TRBJ2-3)
CASSTGTDTQYF

SEQ ID NO: 189127 - protein, 14 aa, Homo sapiens
  CDR3 for alpha chain variable domain of TCR clone 94564 (TRAV12-2, TRAJ40)
CAVKIPSGTYKYIF

SEQ ID NO: 189128 - protein, 14 aa, Homo sapiens
  CDR3 for beta chain variable domain of TCR clone 94564 (TRBV19, TRBJ2-7)
CASSMGQGAIEQYF

SEQ ID NO: 189129 - protein, 13 aa, Homo sapiens
  CDR3 for alpha chain variable domain of TCR clone 94565 (TRAV9-2, TRAJ53)
CALSGGSNYKLTF

SEQ ID NO: 189130 - protein, 17 aa, Homo sapiens
  CDR3 for beta chain variable domain of TCR clone 94565 (TRBV11-2, TRBJ2-1)
CASSLYPPGVEYNEQYF

SEQ ID NO: 189131 - protein, 12 aa, Homo sapiens
  CDR3 for alpha chain variable domain of TCR clone 94566 (TRAV12-3, TRAJ17)
CAMTLTGNKLTF

SEQ ID NO: 189132 - protein, 12 aa, Homo sapiens
  CDR3 for beta chain variable domain of TCR clone 94566 (TRBV2, TRBJ2-1)
CAHGPPGNEQFF

SEQ ID NO: 189133 - protein, 14 aa, Homo sapiens
  CDR3 for alpha chain variable domain of TCR clone 94567 (TRAV12-2, TRAJ5)
CAVNRSTGRRALTF

SEQ ID NO: 189134 - protein, 17 aa, Homo sapiens
  CDR3 for beta chain variable domain of TCR clone 94567 (TRBV7-8, TRBJ2-6)
CASSAGTGGAGANVLTF

SEQ ID NO: 189135 - protein, 15 aa, Homo sapiens
  CDR3 for alpha chain variable domain of TCR clone 94568 (TRAV3, TRAJ40)
CAMRDVTSGTYKYIF

SEQ ID NO: 189136 - protein, 13 aa, Homo sapiens
  CDR3 for beta chain variable domain of TCR clone 94568 (TRBV7-9, TRBJ1-2)
CASSLKQNYGYTF

SEQ ID NO: 189137 - protein, 12 aa, Homo sapiens
  CDR3 for alpha chain variable domain of TCR clone 94569 (TRAV12-1, TRAJ40)
CVVYSVTYKYIF

SEQ ID NO: 189138 - protein, 15 aa, Homo sapiens
  CDR3 for beta chain variable domain of TCR clone 94569 (TRBV7-9, TRBJ1-6)
CASSSPGRGNSPLHF

SEQ ID NO: 189139 - protein, 14 aa, Homo sapiens
  CDR3 for alpha chain variable domain of TCR clone 94570 (TRAV12-2, TRAJ17)
CAVLFKAAGNKPTF

SEQ ID NO: 189140 - protein, 14 aa, Homo sapiens
  CDR3 for beta chain variable domain of TCR clone 94570 (TRBV7-8, TRBJ2-5)
CASSATGGQETQYF

SEQ ID NO: 189141 - protein, 14 aa, Homo sapiens
  CDR3 for alpha chain variable domain of TCR clone 94571 (TRAV12-1, TRAJ23)
CVVIVYNQGRKLIF

SEQ ID NO: 189142 - protein, 13 aa, Homo sapiens
  CDR3 for beta chain variable domain of TCR clone 94571 (TRBV11-2, TRBJ2-5)
CASSFSSQETQYF

SEQ ID NO: 189143 - protein, 13 aa, Homo sapiens
  CDR3 for alpha chain variable domain of TCR clone 94572 (TRAV35, TRAJ21)
CAGQLSNFNKFYF

SEQ ID NO: 189144 - protein, 11 aa, Homo sapiens
  CDR3 for beta chain variable domain of TCR clone 94572 (TRBV7-6, TRBJ2-5)
CASSAQETQYF

SEQ ID NO: 189145 - protein, 14 aa, Homo sapiens
  CDR3 for alpha chain variable domain of TCR clone 94573 (TRAV13-1, TRAJ35)
CAASNGDFGNVLHC

SEQ ID NO: 189146 - protein, 13 aa, Homo sapiens
  CDR3 for beta chain variable domain of TCR clone 94573 (TRBV7-3, TRBJ1-1)
CASSQDWGAEAFF

SEQ ID NO: 189147 - protein, 15 aa, Homo sapiens
  CDR3 for alpha chain variable domain of TCR clone 94574 (TRAV12-2, TRAJ32)
CAVKHYGGATNKLIF

SEQ ID NO: 189148 - protein, 14 aa, Homo sapiens
  CDR3 for beta chain variable domain of TCR clone 94574 (TRBV27, TRBJ2-1)
CASSFGREANEQFF

SEQ ID NO: 189149 - protein, 14 aa, Homo sapiens
  CDR3 for alpha chain variable domain of TCR clone 94575 (TRAV12-1, TRAJ17)
CVVNYKAAGNKLTF

SEQ ID NO: 189150 - protein, 15 aa, Homo sapiens
  CDR3 for beta chain variable domain of TCR clone 94575 (TRBV20-1, TRBJ1-6)
CSARAASSYNSPLHF

SEQ ID NO: 189151 - protein, 14 aa, Homo sapiens
  CDR3 for alpha chain variable domain of TCR clone 94576 (TRAV21, TRAJ45)
CAVSSGGGADGLTF

SEQ ID NO: 189152 - protein, 15 aa, Homo sapiens
  CDR3 for beta chain variable domain of TCR clone 94576 (TRBV6-1, TRBJ2-4)
CASSEAVWTVNIQYF

SEQ ID NO: 189153 - protein, 14 aa, Homo sapiens
  CDR3 for alpha chain variable domain of TCR clone 94577 (TRAV8-1, TRAJ15)
CAVNGQQAGTALIF

SEQ ID NO: 189154 - protein, 11 aa, Homo sapiens
  CDR3 for beta chain variable domain of TCR clone 94577 (TRBV7-8, TRBJ2-7)
CASSLSLEQYF

SEQ ID NO: 189155 - protein, 13 aa, Homo sapiens
  CDR3 for alpha chain variable domain of TCR clone 94578 (TRAV12-1, TRAJ29)
CVVDTSGNTPLVF

SEQ ID NO: 189156 - protein, 15 aa, Homo sapiens
  CDR3 for beta chain variable domain of TCR clone 94578 (TRBV7-8, TRBJ2-1)
CASSLADSLYNEQFF

SEQ ID NO: 189157 - protein, 19 aa, Homo sapiens
  CDR3 for alpha chain variable domain of TCR clone 94579 (TRAV1-2, TRAJ26)
CLLPLCCERPDNYGQNFVF

SEQ ID NO: 189158 - protein, 16 aa, Homo sapiens
  CDR3 for beta chain variable domain of TCR clone 94579 (TRBV4-2, TRBJ2-1)
CASSPRAGQGANEQFF

SEQ ID NO: 189159 - protein, 11 aa, Homo sapiens
  CDR3 for alpha chain variable domain of TCR clone 94580 (TRAV12-3, TRAJ43)
CAMSVSNDMRF

SEQ ID NO: 189160 - protein, 18 aa, Homo sapiens
  CDR3 for beta chain variable domain of TCR clone 94580 (TRBV12-4, TRBJ2-2)
CASSLVAGTRGRTGELFF

SEQ ID NO: 189161 - protein, 13 aa, Homo sapiens
  CDR3 for alpha chain variable domain of TCR clone 94581 (TRAV27, TRAJ29)
CAGAHSGNTPIVF

SEQ ID NO: 189162 - protein, 14 aa, Homo sapiens
  CDR3 for beta chain variable domain of TCR clone 94581 (TRBV7-9, TRBJ2-7)
CASSIGQGAGEQYF

SEQ ID NO: 189163 - protein, 14 aa, Homo sapiens
  CDR3 for alpha chain variable domain of TCR clone 94582 (TRAV13-1, TRAJ44)
CAAKATGTASKLTF

SEQ ID NO: 189164 - protein, 15 aa, Homo sapiens
  CDR3 for beta chain variable domain of TCR clone 94582 (TRBV4-1, TRBJ1-4)
CASSDTGGTNEKLFF

SEQ ID NO: 189165 - protein, 13 aa, Homo sapiens
  CDR3 for alpha chain variable domain of TCR clone 94583 (TRAV27, TRAJ45)
CRSSGGGADGLTF

SEQ ID NO: 189166 - protein, 16 aa, Homo sapiens
  CDR3 for beta chain variable domain of TCR clone 94583 (TRBV11-2, TRBJ2-1)
CQQLIPPRGRVNEQFF

SEQ ID NO: 189167 - protein, 15 aa, Homo sapiens
  CDR3 for alpha chain variable domain of TCR clone 94584 (TRAV35, TRAJ23)
CAGPLGNNQGGKLIV

SEQ ID NO: 189168 - protein, 14 aa, Homo sapiens
  CDR3 for beta chain variable domain of TCR clone 94584 (TRBV7-9, TRBJ1-1)
CASTPLQSYTEAFF

SEQ ID NO: 189169 - protein, 16 aa, Homo sapiens
  CDR3 for alpha chain variable domain of TCR clone 94585 (TRAV3, TRAJ10)
CAVRDMRAGGGNKLTF

SEQ ID NO: 189170 - protein, 12 aa, Homo sapiens
  CDR3 for beta chain variable domain of TCR clone 94585 (TRBV12-5, TRBJ2-5)
CASGQGVETQYF

SEQ ID NO: 189171 - protein, 13 aa, Homo sapiens
  CDR3 for alpha chain variable domain of TCR clone 94586 (TRAV3, TRAJ21)
CAVREPDFNKFYF

SEQ ID NO: 189172 - protein, 15 aa, Homo sapiens
  CDR3 for beta chain variable domain of TCR clone 94586 (TRBV7-8, TRBJ1-1)
CASSLGDSRNTEAFV

SEQ ID NO: 189173 - protein, 16 aa, Homo sapiens
  CDR3 for alpha chain variable domain of TCR clone 94587 (TRAV20, TRAJ22)
CAVQASSSGSAKQLTF

SEQ ID NO: 189174 - protein, 13 aa, Homo sapiens
  CDR3 for beta chain variable domain of TCR clone 94587 (TRBV7-2, TRBJ2-5)
CASSQTSVETQYF

SEQ ID NO: 189175 - protein, 14 aa, Homo sapiens
  CDR3 for alpha chain variable domain of TCR clone 94588 (TRAV2, TRAJ9)
CAVDDRSGGFKTIF

SEQ ID NO: 189176 - protein, 18 aa, Homo sapiens
  CDR3 for beta chain variable domain of TCR clone 94588 (TRBV20-1, TRBJ2-5)
CSQTGDSGRLGGKETQYF

SEQ ID NO: 189177 - protein, 12 aa, Homo sapiens
  CDR3 for alpha chain variable domain of TCR clone 94589 (TRAV12-3, TRAJ17)
CAMTLTCNKLTF

SEQ ID NO: 189178 - protein, 15 aa, Homo sapiens
  CDR3 for beta chain variable domain of TCR clone 94589 (TRBV20-1, TRBJ2-7)
CSARDQVSGMDEQYF

SEQ ID NO: 189179 - protein, 17 aa, Homo sapiens
  CDR3 for alpha chain variable domain of TCR clone 94590 (TRAV26-2, TRAJ42)
CILRDVGYVGSQGNLIF

SEQ ID NO: 189180 - protein, 16 aa, Homo sapiens
  CDR3 for beta chain variable domain of TCR clone 94590 (TRBV12-4, TRBJ2-7)
CASSLIGGTGTYEQYF

SEQ ID NO: 189181 - protein, 22 aa, Homo sapiens
  CDR3 for alpha chain variable domain of TCR clone 94591 (TRAV10, TRAJ6)
CVVSTQEEATYLHLEEEPALLF

SEQ ID NO: 189182 - protein, 14 aa, Homo sapiens
  CDR3 for beta chain variable domain of TCR clone 94591 (TRBV6-1, TRBJ1-3)
CASVQGGGGNTIYF

SEQ ID NO: 189183 - protein, 17 aa, Homo sapiens
  CDR3 for alpha chain variable domain of TCR clone 94592 (TRAV4, TRAJ42)
CLVGVLNYVGSQGNLIF

SEQ ID NO: 189184 - protein, 12 aa, Homo sapiens
  CDR3 for beta chain variable domain of TCR clone 94592 (TRBV20-1, TRBJ2-1)
CSAQYTYNEQFF

SEQ ID NO: 189185 - protein, 17 aa, Homo sapiens
  CDR3 for alpha chain variable domain of TCR clone 94593 (TRAV3, TRAJ6)
CAVRDGPRAGGSYIPTF

SEQ ID NO: 189186 - protein, 16 aa, Homo sapiens
  CDR3 for beta chain variable domain of TCR clone 94593 (TRBV2, TRBJ2-5)
CASSETQGVGEETQYF

SEQ ID NO: 189187 - protein, 13 aa, Homo sapiens
  CDR3 for alpha chain variable domain of TCR clone 94594 (TRAV8-6, TRAJ8)
CAVSNTGFQKLVF

SEQ ID NO: 189188 - protein, 15 aa, Homo sapiens
  CDR3 for beta chain variable domain of TCR clone 94594 (TRBV28, TRBJ2-5)
CASSSGRAIQETQYF

SEQ ID NO: 189189 - protein, 13 aa, Homo sapiens
  CDR3 for alpha chain variable domain of TCR clone 94595 (TRAV21, TRAJ27)
CAALNTNAGKSTF

SEQ ID NO: 189190 - protein, 15 aa, Homo sapiens
  CDR3 for beta chain variable domain of TCR clone 94595 (TRBV20-1, TRBJ2-7)
CSARDRVSGMDEQYF

SEQ ID NO: 189191 - protein, 12 aa, Homo sapiens
  CDR3 for alpha chain variable domain of TCR clone 94596 (TRAV29/DV5, TRAJ34)
CAASGNTDKLIF

SEQ ID NO: 189192 - protein, 13 aa, Homo sapiens
  CDR3 for beta chain variable domain of TCR clone 94596 (TRBV7-2, TRBJ2-2)
CASSLAVTGELFF

SEQ ID NO: 189193 - protein, 14 aa, Homo sapiens
  CDR3 for alpha chain variable domain of TCR clone 94597 (TRAV12-3, TRAJ10)
SHLPLTGGGNKLTF

SEQ ID NO: 189194 - protein, 16 aa, Homo sapiens
  CDR3 for beta chain variable domain of TCR clone 94597 (TRBV3-1, TRBJ2-5)
CASSQDWASGQETQYF

SEQ ID NO: 189195 - protein, 14 aa, Homo sapiens
  CDR3 for alpha chain variable domain of TCR clone 94598 (TRAV23/DV6, TRAJ17)
CAASVQAAGNQLTF

SEQ ID NO: 189196 - protein, 18 aa, Homo sapiens
  CDR3 for beta chain variable domain of TCR clone 94598 (TRBV20-1, TRBJ2-7)
CSAGLPPRSGGSPYEQYF

SEQ ID NO: 189197 - protein, 17 aa, Homo sapiens
  CDR3 for alpha chain variable domain of TCR clone 94599 (TRAV3, TRAJ6)
CAVRDGPRAGGSYIPTF

SEQ ID NO: 189198 - protein, 14 aa, Homo sapiens
  CDR3 for beta chain variable domain of TCR clone 94599 (TRBV7-3, TRBJ2-1)
CASSTSGGRDEQFF

SEQ ID NO: 189199 - protein, 12 aa, Homo sapiens
  CDR3 for alpha chain variable domain of TCR clone 94600 (TRAV13-2, TRAJ23)
CAERHRGGKLIF

SEQ ID NO: 189200 - protein, 16 aa, Homo sapiens
  CDR3 for beta chain variable domain of TCR clone 94600 (TRBV20-1, TRBJ1-4)
CSSPGQGLLTNEKLFF

SEQ ID NO: 189201 - protein, 14 aa, Homo sapiens
  CDR3 for alpha chain variable domain of TCR clone 94601 (TRAV1-2, TRAJ8)
CAVREDTGFQKLVF

SEQ ID NO: 189202 - protein, 16 aa, Homo sapiens
  CDR3 for beta chain variable domain of TCR clone 94601 (TRBV19, TRBJ1-1)
CASRFGGPVTGTEAFF

SEQ ID NO: 189203 - protein, 15 aa, Homo sapiens
  CDR3 for alpha chain variable domain of TCR clone 94602 (TRAV12-1, TRAJ44)
CVVFVNTGTASKLTF

SEQ ID NO: 189204 - protein, 17 aa, Homo sapiens
  CDR3 for beta chain variable domain of TCR clone 94602 (TRBV7-8, TRBJ2-6)
CASSDGTGGAGANVLTF

SEQ ID NO: 189205 - protein, 13 aa, Homo sapiens
  CDR3 for alpha chain variable domain of TCR clone 94603 (TRAV27, TRAJ45)
CRSSGGGADGLTF

SEQ ID NO: 189206 - protein, 16 aa, Homo sapiens
  CDR3 for beta chain variable domain of TCR clone 94603 (TRBV11-2, TRBJ2-1)
CQQLIPPRVEYNEQFF

SEQ ID NO: 189207 - protein, 12 aa, Homo sapiens
  CDR3 for alpha chain variable domain of TCR clone 94604 (TRAV25, TRAJ38)
CAGTGNNRKLIW

SEQ ID NO: 189208 - protein, 14 aa, Homo sapiens
  CDR3 for beta chain variable domain of TCR clone 94604 (TRBV19, TRBJ1-5)
CASSKMTGPQPQHF

SEQ ID NO: 189209 - protein, 12 aa, Homo sapiens
  CDR3 for alpha chain variable domain of TCR clone 94605 (TRAV13-1, TRAJ21)
CAAKEGFNKFYF

SEQ ID NO: 189210 - protein, 15 aa, Homo sapiens
  CDR3 for beta chain variable domain of TCR clone 94605 (TRBV28, TRBJ1-5)
CASSRTGGYVQPQHF

SEQ ID NO: 189211 - protein, 13 aa, Homo sapiens
  CDR3 for alpha chain variable domain of TCR clone 94606 (TRAV12-3, TRAJ13)
CAMSSGGYQKATF

SEQ ID NO: 189212 - protein, 13 aa, Homo sapiens
  CDR3 for beta chain variable domain of TCR clone 94606 (TRBV20-1, TRBJ1-1)
CSAPPGGHTEAFF

SEQ ID NO: 189213 - protein, 14 aa, Homo sapiens
  CDR3 for alpha chain variable domain of TCR clone 94607 (TRAV27, TRAJ17)
CRSTIRAAGNKLTL

SEQ ID NO: 189214 - protein, 16 aa, Homo sapiens
  CDR3 for beta chain variable domain of TCR clone 94607 (TRBV5-7, TRBJ2-5)
CASTLAPAGGRETQYF

SEQ ID NO: 189215 - protein, 14 aa, Homo sapiens
  CDR3 for alpha chain variable domain of TCR clone 94608 (TRAV12-3, TRAJ10)
SHLPLTAGGNKLTF

SEQ ID NO: 189216 - protein, 14 aa, Homo sapiens
  CDR3 for beta chain variable domain of TCR clone 94608 (TRBV6-1, TRBJ1-3)
CASVQGGGGNTIYF

SEQ ID NO: 189217 - protein, 15 aa, Homo sapiens
  CDR3 for alpha chain variable domain of TCR clone 94609 (TRAV13-2, TRAJ40)
CAENRSRQGTYQYIF

SEQ ID NO: 189218 - protein, 15 aa, Homo sapiens
  CDR3 for beta chain variable domain of TCR clone 94609 (TRBV19, TRBJ2-1)
CASSMGWNSNNEQFF

SEQ ID NO: 189219 - protein, 10 aa, Homo sapiens
  CDR3 for alpha chain variable domain of TCR clone 94610 (TRAV12-1, TRAJ43)
CVVHNNGMRF

SEQ ID NO: 189220 - protein, 13 aa, Homo sapiens
  CDR3 for beta chain variable domain of TCR clone 94610 (TRBV12-4, TRBJ1-2)
CASSSGLTVISTF

SEQ ID NO: 189221 - protein, 12 aa, Homo sapiens
  CDR3 for alpha chain variable domain of TCR clone 94611 (TRAV17, TRAJ30)
CVPERRDDKIVF

SEQ ID NO: 189222 - protein, 14 aa, Homo sapiens
  CDR3 for beta chain variable domain of TCR clone 94611 (TRBV7-7, TRBJ2-2)
CASSRDRSTGELFF

SEQ ID NO: 189223 - protein, 11 aa, Homo sapiens
  CDR3 for alpha chain variable domain of TCR clone 94612 (TRAV12-2, TRAJ36)
CAVDGANNLSF

SEQ ID NO: 189224 - protein, 13 aa, Homo sapiens
  CDR3 for beta chain variable domain of TCR clone 94612 (TRBV7-2, TRBJ2-7)
CASSSPSGSEQYF

SEQ ID NO: 189225 - protein, 14 aa, Homo sapiens
  CDR3 for alpha chain variable domain of TCR clone 94613 (TRAV38-1, TRAJ40)
CALRPTSGTYKYIF

SEQ ID NO: 189226 - protein, 14 aa, Homo sapiens
  CDR3 for beta chain variable domain of TCR clone 94613 (TRBV7-9, TRBJ2-1)
CASSLASGSNEQFF

SEQ ID NO: 189227 - protein, 10 aa, Homo sapiens
  CDR3 for alpha chain variable domain of TCR clone 94614 (TRAV12-2, TRAJ52)
RSTSYGKLTF

SEQ ID NO: 189228 - protein, 16 aa, Homo sapiens
  CDR3 for beta chain variable domain of TCR clone 94614 (TRBV19, TRBJ2-1)
CASSKAGPSSYNEQFF

SEQ ID NO: 189229 - protein, 13 aa, Homo sapiens
  CDR3 for alpha chain variable domain of TCR clone 94615 (TRAV3, TRAJ20)
CAVRSLNDYKLSL

SEQ ID NO: 189230 - protein, 13 aa, Homo sapiens
  CDR3 for beta chain variable domain of TCR clone 94615 (TRBV6-1, TRBJ2-1)
CAGMDPTNNEQFF

SEQ ID NO: 189231 - protein, 17 aa, Homo sapiens
  CDR3 for alpha chain variable domain of TCR clone 94616 (TRAV9-2, TRAJ45)
CALSGYYSGGGADGLTF

SEQ ID NO: 189232 - protein, 13 aa, Homo sapiens
  CDR3 for beta chain variable domain of TCR clone 94616 (TRBV12-4, TRBJ1-2)
CASSLRQGKGYTF

SEQ ID NO: 189233 - protein, 10 aa, Homo sapiens
  CDR3 for alpha chain variable domain of TCR clone 94617 (TRAV21, TRAJ43)
CAVRIGDMRV

SEQ ID NO: 189234 - protein, 13 aa, Homo sapiens
  CDR3 for beta chain variable domain of TCR clone 94617 (TRBV20-1, TRBJ2-7)
CSAPGLADYEQYF

SEQ ID NO: 189235 - protein, 14 aa, Homo sapiens
  CDR3 for alpha chain variable domain of TCR clone 94618 (TRAV3, TRAJ22)
CAGRDYGSARQLTF

SEQ ID NO: 189236 - protein, 13 aa, Homo sapiens
  CDR3 for beta chain variable domain of TCR clone 94618 (TRBV11-2, TRBJ2-5)
CASGHGAKETQYF

SEQ ID NO: 189237 - protein, 14 aa, Homo sapiens
  CDR3 for alpha chain variable domain of TCR clone 94619 (TRAV12-3, TRAJ10)
SHLPLTGGGNKLTF

SEQ ID NO: 189238 - protein, 16 aa, Homo sapiens
  CDR3 for beta chain variable domain of TCR clone 94619 (TRBV20-1, TRBJ2-2)
CSARSAGGLGTGELFF

SEQ ID NO: 189239 - protein, 13 aa, Homo sapiens
  CDR3 for alpha chain variable domain of TCR clone 94620 (TRAV13-2, TRAJ13)
CAERPGGYQKVTF

SEQ ID NO: 189240 - protein, 14 aa, Homo sapiens
  CDR3 for beta chain variable domain of TCR clone 94620 (TRBV10-3, TRBJ2-5)
CATSRDRDRETQYF

SEQ ID NO: 189241 - protein, 12 aa, Homo sapiens
  CDR3 for alpha chain variable domain of TCR clone 94621 (TRAV3, TRAJ20)
CAVRDPDYELSF

SEQ ID NO: 189242 - protein, 13 aa, Homo sapiens
  CDR3 for beta chain variable domain of TCR clone 94621 (TRBV9, TRBJ2-1)
CASSVGQGGEQFF

SEQ ID NO: 189243 - protein, 11 aa, Homo sapiens
  CDR3 for alpha chain variable domain of TCR clone 94622 (TRAV16, TRAJ33)
CALHSNYQLIW

SEQ ID NO: 189244 - protein, 16 aa, Homo sapiens
  CDR3 for beta chain variable domain of TCR clone 94622 (TRBV7-9, TRBJ1-2)
CASSLGFSSGEDGYTF

SEQ ID NO: 189245 - protein, 15 aa, Homo sapiens
  CDR3 for alpha chain variable domain of TCR clone 94623 (TRAV17, TRAJ37)
CATDYGSSNTGKLIF

SEQ ID NO: 189246 - protein, 14 aa, Homo sapiens
  CDR3 for beta chain variable domain of TCR clone 94623 (TRBV7-2, TRBJ2-3)
CASSRTSGADTQYF

SEQ ID NO: 189247 - protein, 15 aa, Homo sapiens
  CDR3 for alpha chain variable domain of TCR clone 94624 (TRAV8-3, TRAJ40)
CAAPSLGAGTYKYIF

SEQ ID NO: 189248 - protein, 16 aa, Homo sapiens
  CDR3 for beta chain variable domain of TCR clone 94624 (TRBV7-3, TRBJ2-3)
CASSLSGYRPEDTQYF

SEQ ID NO: 189249 - protein, 16 aa, Homo sapiens
  CDR3 for alpha chain variable domain of TCR clone 94625 (TRAV30, TRAJ24)
CGTGIVDADSWGKFQF

SEQ ID NO: 189250 - protein, 13 aa, Homo sapiens
  CDR3 for beta chain variable domain of TCR clone 94625 (TRBV2, TRBJ2-7)
CASSVGGSGEQYF

SEQ ID NO: 189251 - protein, 10 aa, Homo sapiens
  CDR3 for alpha chain variable domain of TCR clone 94626 (TRAV23/DV6, TRAJ57)
CAASSTLSQG

SEQ ID NO: 189252 - protein, 17 aa, Homo sapiens
  CDR3 for beta chain variable domain of TCR clone 94626 (TRBV20-1, TRBJ2-2)
CSASGSGQGGLTGELFF

SEQ ID NO: 189253 - protein, 13 aa, Homo sapiens
  CDR3 for alpha chain variable domain of TCR clone 94627 (TRAV12-2, TRAJ20)
CAVYPSNDYKLSF

SEQ ID NO: 189254 - protein, 15 aa, Homo sapiens
  CDR3 for beta chain variable domain of TCR clone 94627 (TRBV27, TRBJ2-5)
CARSLYPRGGETQYF

SEQ ID NO: 189255 - protein, 13 aa, Homo sapiens
  CDR3 for alpha chain variable domain of TCR clone 94628 (TRAV2, TRAJ40)
CAVVTSGTYKYIF

SEQ ID NO: 189256 - protein, 13 aa, Homo sapiens
  CDR3 for beta chain variable domain of TCR clone 94628 (TRBV7-7, TRBJ2-2)
CASSLTSAGELFF

SEQ ID NO: 189257 - protein, 15 aa, Homo sapiens
  CDR3 for alpha chain variable domain of TCR clone 94629 (TRAV12-2, TRAJ43)
CAFDMRFGAGTRLTV

SEQ ID NO: 189258 - protein, 17 aa, Homo sapiens
  CDR3 for beta chain variable domain of TCR clone 94629 (TRBV13, TRBJ2-3)
CASSLSRVAEGRNTQYF

SEQ ID NO: 189259 - protein, 11 aa, Homo sapiens
  CDR3 for alpha chain variable domain of TCR clone 94630 (TRAV1-2, TRAJ31)
CAVKNNARLMF

SEQ ID NO: 189260 - protein, 13 aa, Homo sapiens
  CDR3 for beta chain variable domain of TCR clone 94630 (TRBV3-1, TRBJ1-5)
CASSQPGHQPQHF

SEQ ID NO: 189261 - protein, 13 aa, Homo sapiens
  CDR3 for alpha chain variable domain of TCR clone 94631 (TRAV12-2, TRAJ40)
CAVKRTGTYKYIF

SEQ ID NO: 189262 - protein, 14 aa, Homo sapiens
  CDR3 for beta chain variable domain of TCR clone 94631 (TRBV4-2, TRBJ2-1)
CASGLDRAYNEQFF

SEQ ID NO: 189263 - protein, 14 aa, Homo sapiens
  CDR3 for alpha chain variable domain of TCR clone 94632 (TRAV21, TRAJ35)
CAVIPIGFGNVLHC

SEQ ID NO: 189264 - protein, 12 aa, Homo sapiens
  CDR3 for beta chain variable domain of TCR clone 94632 (TRBV7-9, TRBJ2-7)
CASSIKREEQYF

SEQ ID NO: 189265 - protein, 12 aa, Homo sapiens
  CDR3 for alpha chain variable domain of TCR clone 94633 (TRAV2, TRAJ34)
CAVERNTDKLIF

SEQ ID NO: 189266 - protein, 16 aa, Homo sapiens
  CDR3 for beta chain variable domain of TCR clone 94633 (TRBV7-3, TRBJ2-2)
CASSLKRGTLSGELFF

SEQ ID NO: 189267 - protein, 14 aa, Homo sapiens
  CDR3 for alpha chain variable domain of TCR clone 94634 (TRAV8-3, TRAJ39)
CAVGANNAGNMLAF

SEQ ID NO: 189268 - protein, 15 aa, Homo sapiens
  CDR3 for beta chain variable domain of TCR clone 94634 (TRBV4-3, TRBJ1-1)
CASSQELGRGTEAFF

SEQ ID NO: 189269 - protein, 14 aa, Homo sapiens
  CDR3 for alpha chain variable domain of TCR clone 94635 (TRAV25, TRAJ35)
CARRMEGFGNVLPC

SEQ ID NO: 189270 - protein, 13 aa, Homo sapiens
  CDR3 for beta chain variable domain of TCR clone 94635 (TRBV7-2, TRBJ1-4)
CASSLAGLEKLFF

SEQ ID NO: 189271 - protein, 15 aa, Homo sapiens
  CDR3 for alpha chain variable domain of TCR clone 94636 (TRAV16, TRAJ48)
CALFISNFGNEKLTF

SEQ ID NO: 189272 - protein, 20 aa, Homo sapiens
  CDR3 for beta chain variable domain of TCR clone 94636 (TRBV28, TRBJ2-1)
CASTPIGRSPGLAGGNEQFF

SEQ ID NO: 189273 - protein, 17 aa, Homo sapiens
  CDR3 for alpha chain variable domain of TCR clone 94637 (TRAV8-6, TRAJ58)
CAVSSWVGETSGARLTF

SEQ ID NO: 189274 - protein, 14 aa, Homo sapiens
  CDR3 for beta chain variable domain of TCR clone 94637 (TRBV19, TRBJ2-1)
CASPTFVLSGEQFF

SEQ ID NO: 189275 - protein, 12 aa, Homo sapiens
  CDR3 for alpha chain variable domain of TCR clone 94638 (TRAV12-1, TRAJ34)
CVVAGATDKLIF

SEQ ID NO: 189276 - protein, 16 aa, Homo sapiens
  CDR3 for beta chain variable domain of TCR clone 94638 (TRBV7-2, TRBJ1-2)
CAGSSNQDRRGHGYTF

SEQ ID NO: 189277 - protein, 13 aa, Homo sapiens
  CDR3 for alpha chain variable domain of TCR clone 94639 (TRAV20, TRAJ37)
CAGCSSNTGKLIF

SEQ ID NO: 189278 - protein, 13 aa, Homo sapiens
  CDR3 for beta chain variable domain of TCR clone 94639 (TRBV3-1, TRBJ1-1)
CASSPGVITEAFF

SEQ ID NO: 189279 - protein, 11 aa, Homo sapiens
  CDR3 for alpha chain variable domain of TCR clone 94640 (TRAV1-2, TRAJ40)
CAVPGTYKYIF

SEQ ID NO: 189280 - protein, 16 aa, Homo sapiens
  CDR3 for beta chain variable domain of TCR clone 94640 (TRBV29-1, TRBJ2-7)
CSVEVVGTSGSYERYF

SEQ ID NO: 189281 - protein, 15 aa, Homo sapiens
  CDR3 for alpha chain variable domain of TCR clone 94641 (TRAV17, TRAJ57)
CATGPSQGGSEKLVF

SEQ ID NO: 189282 - protein, 15 aa, Homo sapiens
  CDR3 for beta chain variable domain of TCR clone 94641 (TRBV12-4, TRBJ1-5)
CASTQGTGPLQPQHF

SEQ ID NO: 189283 - protein, 16 aa, Homo sapiens
  CDR3 for alpha chain variable domain of TCR clone 94642 (TRAV20, TRAJ53)
CAVQGNSGGSNYKLTF

SEQ ID NO: 189284 - protein, 14 aa, Homo sapiens
  CDR3 for beta chain variable domain of TCR clone 94642 (TRBV6-5, TRBJ2-7)
CASSPHRGLRGQYF

SEQ ID NO: 189285 - protein, 14 aa, Homo sapiens
  CDR3 for alpha chain variable domain of TCR clone 94643 (TRAV23/DV6, TRAJ6)
CAASRSGGSYIPTF

SEQ ID NO: 189286 - protein, 17 aa, Homo sapiens
  CDR3 for beta chain variable domain of TCR clone 94643 (TRBV20-1, TRBJ2-1)
FSASASGLAGSYNEQFF

SEQ ID NO: 189287 - protein, 15 aa, Homo sapiens
  CDR3 for alpha chain variable domain of TCR clone 94644 (TRAV3, TRAJ3)
CAVRDRRSSASKIIF

SEQ ID NO: 189288 - protein, 15 aa, Homo sapiens
  CDR3 for beta chain variable domain of TCR clone 94644 (TRBV20-1, TRBJ2-7)
CSARVPAAYFYEQYF

SEQ ID NO: 189289 - protein, 14 aa, Homo sapiens
  CDR3 for alpha chain variable domain of TCR clone 94645 (TRAV16, TRAJ32)
CDLKSGGATNKLIF

SEQ ID NO: 189290 - protein, 13 aa, Homo sapiens
  CDR3 for beta chain variable domain of TCR clone 94645 (TRBV15, TRBJ1-6)
CATSGGLNSPLHF

SEQ ID NO: 189291 - protein, 13 aa, Homo sapiens
  CDR3 for alpha chain variable domain of TCR clone 94646 (TRAV12-1, TRAJ31)
RVVNMNNNARLMF

SEQ ID NO: 189292 - protein, 15 aa, Homo sapiens
  CDR3 for beta chain variable domain of TCR clone 94646 (TRBV4-1, TRBJ1-2)
CASSQGQGAAYGYTF

SEQ ID NO: 189293 - protein, 15 aa, Homo sapiens
  CDR3 for alpha chain variable domain of TCR clone 94647 (TRAV2, TRAJ15)
CAVQDRGQAGTALIF

SEQ ID NO: 189294 - protein, 13 aa, Homo sapiens
  CDR3 for beta chain variable domain of TCR clone 94647 (TRBV10-2, TRBJ2-7)
CASGASGGYEQYF

SEQ ID NO: 189295 - protein, 13 aa, Homo sapiens
  CDR3 for alpha chain variable domain of TCR clone 94648 (TRAV12-1, TRAJ11)
CVVNRTGYSTLTF

SEQ ID NO: 189296 - protein, 16 aa, Homo sapiens
  CDR3 for beta chain variable domain of TCR clone 94648 (TRBV27, TRBJ2-2)
CASSLRPGGAPGELFF

SEQ ID NO: 189297 - protein, 14 aa, Homo sapiens
  CDR3 for alpha chain variable domain of TCR clone 94649 (TRAV26-2, TRAJ38)
CILYNAGNNRKLSW

SEQ ID NO: 189298 - protein, 14 aa, Homo sapiens
  CDR3 for beta chain variable domain of TCR clone 94649 (TRBV19, TRBJ2-1)
CASPTFVLSGEQFF

SEQ ID NO: 189299 - protein, 13 aa, Homo sapiens
  CDR3 for alpha chain variable domain of TCR clone 94650 (TRAV3, TRAJ35)
CGMRKSFGNVLHY

SEQ ID NO: 189300 - protein, 14 aa, Homo sapiens
  CDR3 for beta chain variable domain of TCR clone 94650 (TRBV6-5, TRBJ1-4)
CASSYRAAEEKLFF

SEQ ID NO: 189301 - protein, 15 aa, Homo sapiens
  CDR3 for alpha chain variable domain of TCR clone 94651 (TRAV12-1, TRAJ9)
CVVSFGDTGGFQTIF

SEQ ID NO: 189302 - protein, 13 aa, Homo sapiens
  CDR3 for beta chain variable domain of TCR clone 94651 (TRBV2, TRBJ1-4)
CASSERAGEKLFF

SEQ ID NO: 189303 - protein, 16 aa, Homo sapiens
  CDR3 for alpha chain variable domain of TCR clone 94652 (TRAV12-3, TRAJ53)
CAMSPGSGGSNYKMTF

SEQ ID NO: 189304 - protein, 11 aa, Homo sapiens
  CDR3 for beta chain variable domain of TCR clone 94652 (TRBV29-1, TRBJ2-5)
CSEDRTGIQYF

SEQ ID NO: 189305 - protein, 17 aa, Homo sapiens
  CDR3 for alpha chain variable domain of TCR clone 94653 (TRAV14/DV4, TRAJ26)
CAMRGPSEFCLWSRNQI

SEQ ID NO: 189306 - protein, 14 aa, Homo sapiens
  CDR3 for beta chain variable domain of TCR clone 94653 (TRBV12-4, TRBJ1-3)
CASTLTGAGNTIYF

SEQ ID NO: 189307 - protein, 15 aa, Homo sapiens
  CDR3 for alpha chain variable domain of TCR clone 94654 (TRAV8-2, TRAJ44)
DAAEYFDGTASTLTF

SEQ ID NO: 189308 - protein, 14 aa, Homo sapiens
  CDR3 for beta chain variable domain of TCR clone 94654 (TRBV7-8, TRBJ2-3)
CASSLDRGTDTQYF

SEQ ID NO: 189309 - protein, 15 aa, Homo sapiens
  CDR3 for alpha chain variable domain of TCR clone 94655 (TRAV12-3, TRAJ6)
CAMSATTGGSYIPTF

SEQ ID NO: 189310 - protein, 17 aa, Homo sapiens
  CDR3 for beta chain variable domain of TCR clone 94655 (TRBV7-3, TRBJ2-3)
CASSLMKRMRGADTQYF

SEQ ID NO: 189311 - protein, 13 aa, Homo sapiens
  CDR3 for alpha chain variable domain of TCR clone 94656 (TRAV12-1, TRAJ34)
CVVTGDNTDKLIF

SEQ ID NO: 189312 - protein, 13 aa, Homo sapiens
  CDR3 for beta chain variable domain of TCR clone 94656 (TRBV28, TRBJ2-7)
CASKAGGVYEQYF

SEQ ID NO: 189313 - protein, 13 aa, Homo sapiens
  CDR3 for alpha chain variable domain of TCR clone 94657 (TRAV1-2, TRAJ12)
CAVSMDSSYKLIF

SEQ ID NO: 189314 - protein, 19 aa, Homo sapiens
  CDR3 for beta chain variable domain of TCR clone 94657 (TRBV11-2, TRBJ2-3)
CASSLTSGTRFRVTDTQYF

SEQ ID NO: 189315 - protein, 14 aa, Homo sapiens
  CDR3 for alpha chain variable domain of TCR clone 94658 (TRAV9-2, TRAJ39)
CALYIYNAGNMLTF

SEQ ID NO: 189316 - protein, 16 aa, Homo sapiens
  CDR3 for beta chain variable domain of TCR clone 94658 (TRBV11-3, TRBJ2-7)
CASSPHGAGGPYEQYF

SEQ ID NO: 189317 - protein, 15 aa, Homo sapiens
  CDR3 for alpha chain variable domain of TCR clone 94659 (TRAV4, TRAJ26)
CLVGDMNNYGQNFVF

SEQ ID NO: 189318 - protein, 16 aa, Homo sapiens
  CDR3 for beta chain variable domain of TCR clone 94659 (TRBV28, TRBJ1-4)
CDSSSRTGAANEKLFF

SEQ ID NO: 189319 - protein, 16 aa, Homo sapiens
  CDR3 for alpha chain variable domain of TCR clone 94660 (TRAV21, TRAJ37)
CAVRTAGSSNTGKLIF

SEQ ID NO: 189320 - protein, 14 aa, Homo sapiens
  CDR3 for beta chain variable domain of TCR clone 94660 (TRBV19, TRBJ2-1)
CASPTFVLSGEQFF

SEQ ID NO: 189321 - protein, 13 aa, Homo sapiens
  CDR3 for alpha chain variable domain of TCR clone 94661 (TRAV12-3, TRAJ7)
CAMSASENNRLAF

SEQ ID NO: 189322 - protein, 14 aa, Homo sapiens
  CDR3 for beta chain variable domain of TCR clone 94661 (TRBV13, TRBJ2-5)
CASSLGPRGETQYF

SEQ ID NO: 189323 - protein, 21 aa, Homo sapiens
  CDR3 for alpha chain variable domain of TCR clone 94662 (TRAV3, TRAJ17)
CAVRARRGGRSCRQQADFWRR

SEQ ID NO: 189324 - protein, 14 aa, Homo sapiens
  CDR3 for beta chain variable domain of TCR clone 94662 (TRBV4-1, TRBJ2-2)
CASSQAVNTGELFF

SEQ ID NO: 189325 - protein, 12 aa, Homo sapiens
  CDR3 for alpha chain variable domain of TCR clone 94663 (TRAV27, TRAJ13)
CAGAGGYQKVTF

SEQ ID NO: 189326 - protein, 15 aa, Homo sapiens
  CDR3 for beta chain variable domain of TCR clone 94663 (TRBV20-1, TRBJ2-6)
CSARDRGPGANVLTS

SEQ ID NO: 189327 - protein, 16 aa, Homo sapiens
  CDR3 for alpha chain variable domain of TCR clone 94664 (TRAV12-2, TRAJ52)
CRLANAGGTSYGKLTF

SEQ ID NO: 189328 - protein, 13 aa, Homo sapiens
  CDR3 for beta chain variable domain of TCR clone 94664 (TRBV7-9, TRBJ2-3)
CASSPGSTDTQYF

SEQ ID NO: 189329 - protein, 13 aa, Homo sapiens
  CDR3 for alpha chain variable domain of TCR clone 94665 (TRAV13-2, TRAJ48)
CAEMDFGNEKLTF

SEQ ID NO: 189330 - protein, 15 aa, Homo sapiens
  CDR3 for beta chain variable domain of TCR clone 94665 (TRBV12-4, TRBJ2-5)
CASSPPTGLQETQYF

SEQ ID NO: 189331 - protein, 10 aa, Homo sapiens
  CDR3 for alpha chain variable domain of TCR clone 94666 (TRAV23/DV6, TRAJ57)
CAASSTLSQG

SEQ ID NO: 189332 - protein, 14 aa, Homo sapiens
  CDR3 for beta chain variable domain of TCR clone 94666 (TRBV6-1, TRBJ1-1)
CASSGTGLNTEAFF

SEQ ID NO: 189333 - protein, 11 aa, Homo sapiens
  CDR3 for alpha chain variable domain of TCR clone 94667 (TRAV12-3, TRAJ27)
CAMANAGKSTF

SEQ ID NO: 189334 - protein, 14 aa, Homo sapiens
  CDR3 for beta chain variable domain of TCR clone 94667 (TRBV5-7, TRBJ1-2)
CASSLVRGDYGYTF

SEQ ID NO: 189335 - protein, 17 aa, Homo sapiens
  CDR3 for alpha chain variable domain of TCR clone 94668 (TRAV3, TRAJ6)
CAVRDGPRAGGSDIPTF

SEQ ID NO: 189336 - protein, 13 aa, Homo sapiens
  CDR3 for beta chain variable domain of TCR clone 94668 (TRBV20-1, TRBJ1-1)
CSARGGGNTEAFF

SEQ ID NO: 189337 - protein, 15 aa, Homo sapiens
  CDR3 for alpha chain variable domain of TCR clone 94669 (TRAV14/DV4, TRAJ54)
CAMREHFQGAQKLVF

SEQ ID NO: 189338 - protein, 14 aa, Homo sapiens
  CDR3 for beta chain variable domain of TCR clone 94669 (TRBV6-1, TRBJ1-3)
CASVQGGGGNTMYF

SEQ ID NO: 189339 - protein, 13 aa, Homo sapiens
  CDR3 for alpha chain variable domain of TCR clone 94670 (TRAV39, TRAJ58)
CAGEETSGSRLTF

SEQ ID NO: 189340 - protein, 13 aa, Homo sapiens
  CDR3 for beta chain variable domain of TCR clone 94670 (TRBV15, TRBJ2-7)
CATSTTGHYERYF

SEQ ID NO: 189341 - protein, 17 aa, Homo sapiens
  CDR3 for alpha chain variable domain of TCR clone 94671 (TRAV38-2/DV8, TRAJ23)
CALSRKLIFGQGTELSV

SEQ ID NO: 189342 - protein, 17 aa, Homo sapiens
  CDR3 for beta chain variable domain of TCR clone 94671 (TRBV5-4, TRBJ2-1)
CASSSAGGRGLYNEQFF

SEQ ID NO: 189343 - protein, 13 aa, Homo sapiens
  CDR3 for alpha chain variable domain of TCR clone 94672 (TRAV8-6, TRAJ49)
CAVITNTGNQFYF

SEQ ID NO: 189344 - protein, 15 aa, Homo sapiens
  CDR3 for beta chain variable domain of TCR clone 94672 (TRBV20-1, TRBJ2-7)
CSAESGTSGAYEQYF

SEQ ID NO: 189345 - protein, 14 aa, Homo sapiens
  CDR3 for alpha chain variable domain of TCR clone 94673 (TRAV25, TRAJ44)
CAVFPTGTASKLTF

SEQ ID NO: 189346 - protein, 14 aa, Homo sapiens
  CDR3 for beta chain variable domain of TCR clone 94673 (TRBV19, TRBJ1-1)
CASTGHRLDTEAFF

SEQ ID NO: 189347 - protein, 13 aa, Homo sapiens
  CDR3 for alpha chain variable domain of TCR clone 94674 (TRAV2, TRAJ40)
CAVVTSGTYKYIF

SEQ ID NO: 189348 - protein, 14 aa, Homo sapiens
  CDR3 for beta chain variable domain of TCR clone 94674 (TRBV19, TRBJ2-1)
CASPAFVLSGERFF

SEQ ID NO: 189349 - protein, 15 aa, Homo sapiens
  CDR3 for alpha chain variable domain of TCR clone 94675 (TRAV1-1, TRAJ20)
CAVRDNVANEYKLSF

SEQ ID NO: 189350 - protein, 13 aa, Homo sapiens
  CDR3 for beta chain variable domain of TCR clone 94675 (TRBV4-1, TRBJ2-2)
CASSQENTGELFF

SEQ ID NO: 189351 - protein, 14 aa, Homo sapiens
  CDR3 for alpha chain variable domain of TCR clone 94676 (TRAV8-4, TRAJ38)
CARLNASNNRKLIW

SEQ ID NO: 189352 - protein, 12 aa, Homo sapiens
  CDR3 for beta chain variable domain of TCR clone 94676 (TRBV6-1, TRBJ2-7)
CASSEPLYEQYF

SEQ ID NO: 189353 - protein, 15 aa, Homo sapiens
  CDR3 for alpha chain variable domain of TCR clone 94677 (TRAV12-3, TRAJ6)
CAMSAASGGSYIPTF

SEQ ID NO: 189354 - protein, 15 aa, Homo sapiens
  CDR3 for beta chain variable domain of TCR clone 94677 (TRBV7-8, TRBJ1-2)
CASSLVRDGGLGYTF

SEQ ID NO: 189355 - protein, 15 aa, Homo sapiens
  CDR3 for alpha chain variable domain of TCR clone 94678 (TRAV26-1, TRAJ29)
CIVRVTNSGNTPLVF

SEQ ID NO: 189356 - protein, 12 aa, Homo sapiens
  CDR3 for beta chain variable domain of TCR clone 94678 (TRBV19, TRBJ2-1)
CASSRQGAEQFF

SEQ ID NO: 189357 - protein, 16 aa, Homo sapiens
  CDR3 for alpha chain variable domain of TCR clone 94679 (TRAV2, TRAJ4)
CAVEDRFSGGYNKLIF

SEQ ID NO: 189358 - protein, 12 aa, Homo sapiens
  CDR3 for beta chain variable domain of TCR clone 94679 (TRBV7-8, TRBJ2-7)
CASSLGDREQYF

SEQ ID NO: 189359 - protein, 15 aa, Homo sapiens
  CDR3 for alpha chain variable domain of TCR clone 94680 (TRAV13-1, TRAJ44)
CAASRGGGTASKLTF

SEQ ID NO: 189360 - protein, 17 aa, Homo sapiens
  CDR3 for beta chain variable domain of TCR clone 94680 (TRBV7-3, TRBJ2-3)
CASSLMKWMRGADTQYF

SEQ ID NO: 189361 - protein, 18 aa, Homo sapiens
  CDR3 for alpha chain variable domain of TCR clone 94681 (TRAV12-3, TRAJ52)
CAMSVGGAGGTSYGQLTF

SEQ ID NO: 189362 - protein, 15 aa, Homo sapiens
  CDR3 for beta chain variable domain of TCR clone 94681 (TRBV27, TRBJ1-6)
CASSFDRGLGSPLHF

SEQ ID NO: 189363 - protein, 15 aa, Homo sapiens
  CDR3 for alpha chain variable domain of TCR clone 94682 (TRAV20, TRAJ6)
CAVQLQSGGSYIPTF

SEQ ID NO: 189364 - protein, 14 aa, Homo sapiens
  CDR3 for beta chain variable domain of TCR clone 94682 (TRBV12-4, TRBJ2-7)
CASSASGGWYEQYF

SEQ ID NO: 189365 - protein, 14 aa, Homo sapiens
  CDR3 for alpha chain variable domain of TCR clone 94683 (TRAV12-1, TRAJ9)
CVVTGYTGGFKTSF

SEQ ID NO: 189366 - protein, 13 aa, Homo sapiens
  CDR3 for beta chain variable domain of TCR clone 94683 (TRBV20-1, TRBJ1-1)
CSARAGGNTEAFF

SEQ ID NO: 189367 - protein, 16 aa, Homo sapiens
  CDR3 for alpha chain variable domain of TCR clone 94684 (TRAV8-2, TRAJ7)
CVVSEGPYYGNNRLAF

SEQ ID NO: 189368 - protein, 16 aa, Homo sapiens
  CDR3 for beta chain variable domain of TCR clone 94684 (TRBV12-4, TRBJ1-4)
CASSLKGIGHGERLFF

SEQ ID NO: 189369 - protein, 14 aa, Homo sapiens
  CDR3 for alpha chain variable domain of TCR clone 94685 (TRAV8-3, TRAJ27)
CAGGRNTNAGKSTF

SEQ ID NO: 189370 - protein, 15 aa, Homo sapiens
  CDR3 for beta chain variable domain of TCR clone 94685 (TRBV11-3, TRBJ2-5)
CASSVRGRVQETQYF

SEQ ID NO: 189371 - protein, 15 aa, Homo sapiens
  CDR3 for alpha chain variable domain of TCR clone 94686 (TRAV13-1, TRAJ57)
QVPPFSQGGSEKLVF

SEQ ID NO: 189372 - protein, 17 aa, Homo sapiens
  CDR3 for beta chain variable domain of TCR clone 94686 (TRBV7-3, TRBJ2-3)
CASSLMKRMRGADTQYF

SEQ ID NO: 189373 - protein, 13 aa, Homo sapiens
  CDR3 for alpha chain variable domain of TCR clone 94687 (TRAV13-2, TRAJ48)
CAEMDFGNEKLTF

SEQ ID NO: 189374 - protein, 14 aa, Homo sapiens
  CDR3 for beta chain variable domain of TCR clone 94687 (TRBV7-9, TRBJ2-3)
CASSLGTVTDTQYF

SEQ ID NO: 189375 - protein, 14 aa, Homo sapiens
  CDR3 for alpha chain variable domain of TCR clone 94688 (TRAV2, TRAJ9)
CAVEDRSGGLKTIF

SEQ ID NO: 189376 - protein, 15 aa, Homo sapiens
  CDR3 for beta chain variable domain of TCR clone 94688 (TRBV20-1, TRBJ2-7)
CSARDRVSGMDEQYF

SEQ ID NO: 189377 - protein, 14 aa, Homo sapiens
  CDR3 for alpha chain variable domain of TCR clone 94689 (TRAV4, TRAJ9)
CLVGSGTGGFKTIF

SEQ ID NO: 189378 - protein, 15 aa, Homo sapiens
  CDR3 for beta chain variable domain of TCR clone 94689 (TRBV7-2, TRBJ2-1)
CASSLAGGRVNEQFF

SEQ ID NO: 189379 - protein, 20 aa, Homo sapiens
  CDR3 for alpha chain variable domain of TCR clone 94690 (TRAV12-3, TRAJ41)
SLFIRDSQPSDSATPEALNF

SEQ ID NO: 189380 - protein, 15 aa, Homo sapiens
  CDR3 for beta chain variable domain of TCR clone 94690 (TRBV19, TRBJ2-7)
CASSPAGSGEALRYF

SEQ ID NO: 189381 - protein, 14 aa, Homo sapiens
  CDR3 for alpha chain variable domain of TCR clone 94691 (TRAV38-2/DV8, TRAJ54)
AAMYQIQGAKKLVF

SEQ ID NO: 189382 - protein, 17 aa, Homo sapiens
  CDR3 for beta chain variable domain of TCR clone 94691 (TRBV6-1, TRBJ2-3)
CASSEALRLISTDTQYF

SEQ ID NO: 189383 - protein, 12 aa, Homo sapiens
  CDR3 for alpha chain variable domain of TCR clone 94692 (TRAV17, TRAJ57)
CATDGGSEKLVF

SEQ ID NO: 189384 - protein, 14 aa, Homo sapiens
  CDR3 for beta chain variable domain of TCR clone 94692 (TRBV28, TRBJ2-7)
CASTFYERAHEQYF

SEQ ID NO: 189385 - protein, 14 aa, Homo sapiens
  CDR3 for alpha chain variable domain of TCR clone 94693 (TRAV27, TRAJ36)
CAGPPKRGANNLFF

SEQ ID NO: 189386 - protein, 15 aa, Homo sapiens
  CDR3 for beta chain variable domain of TCR clone 94693 (TRBV18, TRBJ2-7)
CSSSPASTPNYEQYF

SEQ ID NO: 189387 - protein, 15 aa, Homo sapiens
  CDR3 for alpha chain variable domain of TCR clone 94694 (TRAV13-1, TRAJ17)
CAARIERAAGNKLTF

SEQ ID NO: 189388 - protein, 12 aa, Homo sapiens
  CDR3 for beta chain variable domain of TCR clone 94694 (TRBV5-7, TRBJ1-1)
CASSLGRGKAFF

SEQ ID NO: 189389 - protein, 16 aa, Homo sapiens
  CDR3 for alpha chain variable domain of TCR clone 94695 (TRAV30, TRAJ24)
CGTEIVDADSWGKFQF

SEQ ID NO: 189390 - protein, 16 aa, Homo sapiens
  CDR3 for beta chain variable domain of TCR clone 94695 (TRBV11-3, TRBJ2-3)
CASSSRTSGGAGTQYF

SEQ ID NO: 189391 - protein, 11 aa, Homo sapiens
  CDR3 for alpha chain variable domain of TCR clone 94696 (TRAV2, TRAJ13)
CASGGYQKVTF

SEQ ID NO: 189392 - protein, 11 aa, Homo sapiens
  CDR3 for beta chain variable domain of TCR clone 94696 (TRBV6-3, TRBJ2-3)
CATGKADTQYF

SEQ ID NO: 189393 - protein, 14 aa, Homo sapiens
  CDR3 for alpha chain variable domain of TCR clone 94697 (TRAV1-2, TRAJ8)
CAVREDTGFQKLVF

SEQ ID NO: 189394 - protein, 11 aa, Homo sapiens
  CDR3 for beta chain variable domain of TCR clone 94697 (TRBV27, TRBJ2-3)
CASSVGDTQYF

SEQ ID NO: 189395 - protein, 14 aa, Homo sapiens
  CDR3 for alpha chain variable domain of TCR clone 94698 (TRAV12-2, TRAJ40)
CAVKIPSGTYKYIF

SEQ ID NO: 189396 - protein, 16 aa, Homo sapiens
  CDR3 for beta chain variable domain of TCR clone 94698 (TRBV4-1, TRBJ2-3)
CASSQSTSGAEDTQYF

SEQ ID NO: 189397 - protein, 16 aa, Homo sapiens
  CDR3 for alpha chain variable domain of TCR clone 94699 (TRAV35, TRAJ37)
CWAFLRGSSNTGTLIF

SEQ ID NO: 189398 - protein, 13 aa, Homo sapiens
  CDR3 for beta chain variable domain of TCR clone 94699 (TRBV2, TRBJ1-2)
CASSVRGNYGYTF

SEQ ID NO: 189399 - protein, 13 aa, Homo sapiens
  CDR3 for alpha chain variable domain of TCR clone 94700 (TRAV3, TRAJ20)
CAVRSLNDYKLSF

SEQ ID NO: 189400 - protein, 13 aa, Homo sapiens
  CDR3 for beta chain variable domain of TCR clone 94700 (TRBV7-3, TRBJ1-1)
CASSQDWGAGAFF

SEQ ID NO: 189401 - protein, 16 aa, Homo sapiens
  CDR3 for alpha chain variable domain of TCR clone 94701 (TRAV3, TRAJ10)
CAVRDRRAGGGNKLTF

SEQ ID NO: 189402 - protein, 19 aa, Homo sapiens
  CDR3 for beta chain variable domain of TCR clone 94701 (TRBV6-3, TRBJ1-2)
CASSYSKGRTGPPNYGYTF

SEQ ID NO: 189403 - protein, 16 aa, Homo sapiens
  CDR3 for alpha chain variable domain of TCR clone 94702 (TRAV1-2, TRAJ10)
CAVRGVLTGGGNKLTF

SEQ ID NO: 189404 - protein, 14 aa, Homo sapiens
  CDR3 for beta chain variable domain of TCR clone 94702 (TRBV19, TRBJ2-1)
CASSPGLAPNEQFF

SEQ ID NO: 189405 - protein, 14 aa, Homo sapiens
  CDR3 for alpha chain variable domain of TCR clone 94703 (TRAV12-2, TRAJ17)
CAVLFKAARNKLTF

SEQ ID NO: 189406 - protein, 14 aa, Homo sapiens
  CDR3 for beta chain variable domain of TCR clone 94703 (TRBV4-1, TRBJ2-2)
CASSQAVNTGELFF

SEQ ID NO: 189407 - protein, 16 aa, Homo sapiens
  CDR3 for alpha chain variable domain of TCR clone 94704 (TRAV3, TRAJ10)
YAVRDMRAGGGNKLTF

SEQ ID NO: 189408 - protein, 13 aa, Homo sapiens
  CDR3 for beta chain variable domain of TCR clone 94704 (TRBV12-4, TRBJ2-7)
CASSPTETYEQYF

SEQ ID NO: 189409 - protein, 13 aa, Homo sapiens
  CDR3 for alpha chain variable domain of TCR clone 94705 (TRAV8-3, TRAJ21)
CAVGAYNFNKFYF

SEQ ID NO: 189410 - protein, 16 aa, Homo sapiens
  CDR3 for beta chain variable domain of TCR clone 94705 (TRBV7-7, TRBJ2-1)
CASSLASGTSYNEQFF

SEQ ID NO: 189411 - protein, 13 aa, Homo sapiens
  CDR3 for alpha chain variable domain of TCR clone 94706 (TRAV36/DV7, TRAJ29)
CAVEPSGKTPLVF

SEQ ID NO: 189412 - protein, 11 aa, Homo sapiens
  CDR3 for beta chain variable domain of TCR clone 94706 (TRBV19, TRBJ2-7)
CASGNSYEQYF

SEQ ID NO: 189413 - protein, 15 aa, Homo sapiens
  CDR3 for alpha chain variable domain of TCR clone 94707 (TRAV17, TRAJ23)
CATDAEDNQGGKLIF

SEQ ID NO: 189414 - protein, 12 aa, Homo sapiens
  CDR3 for beta chain variable domain of TCR clone 94707 (TRBV2, TRBJ2-1)
CAKRKGYNEQFF

SEQ ID NO: 189415 - protein, 13 aa, Homo sapiens
  CDR3 for alpha chain variable domain of TCR clone 94708 (TRAV2, TRAJ11)
CAVEETGYSTLTF

SEQ ID NO: 189416 - protein, 17 aa, Homo sapiens
  CDR3 for beta chain variable domain of TCR clone 94708 (TRBV7-2, TRBJ2-1)
CASSRGTSGAVGWEQFF

SEQ ID NO: 189417 - protein, 14 aa, Homo sapiens
  CDR3 for alpha chain variable domain of TCR clone 94709 (TRAV12-2, TRAJ17)
CAVNIKAAGNKLTF

SEQ ID NO: 189418 - protein, 16 aa, Homo sapiens
  CDR3 for beta chain variable domain of TCR clone 94709 (TRBV20-1, TRBJ2-6)
RSASSQGYDGANVLTF

SEQ ID NO: 189419 - protein, 17 aa, Homo sapiens
  CDR3 for alpha chain variable domain of TCR clone 94710 (TRAV26-1, TRAJ47)
CIVPSLLYMEYGNKLVF

SEQ ID NO: 189420 - protein, 12 aa, Homo sapiens
  CDR3 for beta chain variable domain of TCR clone 94710 (TRBV11-2, TRBJ2-2)
CASSLPTGELFF

SEQ ID NO: 189421 - protein, 12 aa, Homo sapiens
  CDR3 for alpha chain variable domain of TCR clone 94711 (TRAV3, TRAJ43)
CAVRDPNNDMRF

SEQ ID NO: 189422 - protein, 15 aa, Homo sapiens
  CDR3 for beta chain variable domain of TCR clone 94711 (TRBV27, TRBJ1-5)
CASSLGTGFDQPQLF

SEQ ID NO: 189423 - protein, 15 aa, Homo sapiens
  CDR3 for alpha chain variable domain of TCR clone 94712 (TRAV16, TRAJ16)
CALQGGVSDGQKLLF

SEQ ID NO: 189424 - protein, 15 aa, Homo sapiens
  CDR3 for beta chain variable domain of TCR clone 94712 (TRBV20-1, TRBJ2-7)
CSARDRVSGMDEQYF

SEQ ID NO: 189425 - protein, 15 aa, Homo sapiens
  CDR3 for alpha chain variable domain of TCR clone 94713 (TRAV35, TRAJ50)
CAGQLRKTSNDKVIF

SEQ ID NO: 189426 - protein, 12 aa, Homo sapiens
  CDR3 for beta chain variable domain of TCR clone 94713 (TRBV5-1, TRBJ2-5)
CASSLGLETQYF

SEQ ID NO: 189427 - protein, 14 aa, Homo sapiens
  CDR3 for alpha chain variable domain of TCR clone 94714 (TRAV12-2, TRAJ13)
CAVRKTGGYQKVTF

SEQ ID NO: 189428 - protein, 14 aa, Homo sapiens
  CDR3 for beta chain variable domain of TCR clone 94714 (TRBV25-1, TRBJ1-1)
CASTHLGGNTEAFF

SEQ ID NO: 189429 - protein, 14 aa, Homo sapiens
  CDR3 for alpha chain variable domain of TCR clone 94715 (TRAV13-1, TRAJ35)
CAASKGGFGNVLHC

SEQ ID NO: 189430 - protein, 14 aa, Homo sapiens
  CDR3 for beta chain variable domain of TCR clone 94715 (TRBV7-3, TRBJ2-7)
CASSPKTSFYEQYF

SEQ ID NO: 189431 - protein, 12 aa, Homo sapiens
  CDR3 for alpha chain variable domain of TCR clone 94716 (TRAV21, TRAJ33)
CAKMDSNYQLIW

SEQ ID NO: 189432 - protein, 14 aa, Homo sapiens
  CDR3 for beta chain variable domain of TCR clone 94716 (TRBV2, TRBJ2-7)
CASSLTSGGHEQYL

SEQ ID NO: 189433 - protein, 16 aa, Homo sapiens
  CDR3 for alpha chain variable domain of TCR clone 94717 (TRAV30, TRAJ24)
CGTEIVDADSWGKFQF

SEQ ID NO: 189434 - protein, 13 aa, Homo sapiens
  CDR3 for beta chain variable domain of TCR clone 94717 (TRBV7-9, TRBJ2-2)
CASSLDPTGELFF

SEQ ID NO: 189435 - protein, 13 aa, Homo sapiens
  CDR3 for alpha chain variable domain of TCR clone 94718 (TRAV12-2, TRAJ42)
CAVKRGSQGNIIF

SEQ ID NO: 189436 - protein, 12 aa, Homo sapiens
  CDR3 for beta chain variable domain of TCR clone 94718 (TRBV5-7, TRBJ1-2)
CASSLVQNGYTF

SEQ ID NO: 189437 - protein, 14 aa, Homo sapiens
  CDR3 for alpha chain variable domain of TCR clone 94719 (TRAV8-4, TRAJ17)
WAVSDQAAGNKLTF

SEQ ID NO: 189438 - protein, 15 aa, Homo sapiens
  CDR3 for beta chain variable domain of TCR clone 94719 (TRBV7-2, TRBJ1-2)
CASSLAPDRGLGYTF

SEQ ID NO: 189439 - protein, 11 aa, Homo sapiens
  CDR3 for alpha chain variable domain of TCR clone 94720 (TRAV2, TRAJ13)
CASGGYQKVTF

SEQ ID NO: 189440 - protein, 14 aa, Homo sapiens
  CDR3 for beta chain variable domain of TCR clone 94720 (TRBV19, TRBJ2-3)
CASSIDLGGDTQYF

SEQ ID NO: 189441 - protein, 13 aa, Homo sapiens
  CDR3 for alpha chain variable domain of TCR clone 94721 (TRAV8-2, TRAJ49)
CVVTPNTGNPFYF

SEQ ID NO: 189442 - protein, 15 aa, Homo sapiens
  CDR3 for beta chain variable domain of TCR clone 94721 (TRBV11-2, TRBJ2-1)
CASSLTSGGYNEQFF

SEQ ID NO: 189443 - protein, 11 aa, Homo sapiens
  CDR3 for alpha chain variable domain of TCR clone 94722 (TRAV23/DV6, TRAJ58)
CAARLLRGETS

SEQ ID NO: 189444 - protein, 15 aa, Homo sapiens
  CDR3 for beta chain variable domain of TCR clone 94722 (TRBV19, TRBJ1-2)
CASSVGQVLNYGYTF

SEQ ID NO: 189445 - protein, 12 aa, Homo sapiens
  CDR3 for alpha chain variable domain of TCR clone 94723 (TRAV12-3, TRAJ17)
CAMTLTGNKLTF

SEQ ID NO: 189446 - protein, 20 aa, Homo sapiens
  CDR3 for beta chain variable domain of TCR clone 94723 (TRBV7-8, TRBJ2-2)
CAGSHLFPGPTIHITGELFF

SEQ ID NO: 189447 - protein, 12 aa, Homo sapiens
  CDR3 for alpha chain variable domain of TCR clone 94724 (TRAV25, TRAJ53)
CQSGGSNYELTF

SEQ ID NO: 189448 - protein, 15 aa, Homo sapiens
  CDR3 for beta chain variable domain of TCR clone 94724 (TRBV5-1, TRBJ2-2)
CASSWTSPNTGELFF

SEQ ID NO: 189449 - protein, 14 aa, Homo sapiens
  CDR3 for alpha chain variable domain of TCR clone 94725 (TRAV26-1, TRAJ38)
CIADNAGNNRKLIL

SEQ ID NO: 189450 - protein, 14 aa, Homo sapiens
  CDR3 for beta chain variable domain of TCR clone 94725 (TRBV6-1, TRBJ1-3)
CASVQGGGGNTIYF

SEQ ID NO: 189451 - protein, 14 aa, Homo sapiens
  CDR3 for alpha chain variable domain of TCR clone 94726 (TRAV38-1, TRAJ45)
CAYNSGGGADGLTF

SEQ ID NO: 189452 - protein, 17 aa, Homo sapiens
  CDR3 for beta chain variable domain of TCR clone 94726 (TRBV7-7, TRBJ2-2)
CASSSVPAGGEIGELFF

SEQ ID NO: 189453 - protein, 15 aa, Homo sapiens
  CDR3 for alpha chain variable domain of TCR clone 94727 (TRAV12-3, TRAJ11)
CAMSEENSGYSTLTF

SEQ ID NO: 189454 - protein, 13 aa, Homo sapiens
  CDR3 for beta chain variable domain of TCR clone 94727 (TRBV19, TRBJ1-2)
CASSVPGQDGYTF

SEQ ID NO: 189455 - protein, 11 aa, Homo sapiens
  CDR3 for alpha chain variable domain of TCR clone 94728 (TRAV20, TRAJ34)
CTRDNNDKLIF

SEQ ID NO: 189456 - protein, 15 aa, Homo sapiens
  CDR3 for beta chain variable domain of TCR clone 94728 (TRBV2, TRBJ2-1)
CASSVTSEGTDEQFF

SEQ ID NO: 189457 - protein, 15 aa, Homo sapiens
  CDR3 for alpha chain variable domain of TCR clone 94729 (TRAV17, TRAJ52)
CATEAGGTSYGKLTF

SEQ ID NO: 189458 - protein, 18 aa, Homo sapiens
  CDR3 for beta chain variable domain of TCR clone 94729 (TRBV11-2, TRBJ2-6)
CASSLNPFLGTGANVLTF

SEQ ID NO: 189459 - protein, 20 aa, Homo sapiens
  CDR3 for alpha chain variable domain of TCR clone 94730 (TRAV30, TRAJ54)
SAAQSRSETQVVQGAQKLVF

SEQ ID NO: 189460 - protein, 11 aa, Homo sapiens
  CDR3 for beta chain variable domain of TCR clone 94730 (TRBV25-1, TRBJ2-4)
CQSRDQNMQYF

SEQ ID NO: 189461 - protein, 10 aa, Homo sapiens
  CDR3 for alpha chain variable domain of TCR clone 94731 (TRAV36/DV7, TRAJ38)
CAANNRKLIW

SEQ ID NO: 189462 - protein, 17 aa, Homo sapiens
  CDR3 for beta chain variable domain of TCR clone 94731 (TRBV7-8, TRBJ2-6)
CASSAGTGGAGANVLTF

SEQ ID NO: 189463 - protein, 11 aa, Homo sapiens
  CDR3 for alpha chain variable domain of TCR clone 94732 (TRAV27, TRAJ47)
SIEEYGNKLVF

SEQ ID NO: 189464 - protein, 18 aa, Homo sapiens
  CDR3 for beta chain variable domain of TCR clone 94732 (TRBV2, TRBJ2-1)
CASRGLAGGPRTYNEQFF

SEQ ID NO: 189465 - protein, 15 aa, Homo sapiens
  CDR3 for alpha chain variable domain of TCR clone 94733 (TRAV3, TRAJ22)
CAVRDRGGSARQLTF

SEQ ID NO: 189466 - protein, 16 aa, Homo sapiens
  CDR3 for beta chain variable domain of TCR clone 94733 (TRBV4-2, TRBJ2-4)
CASSQELRRDKNIQYF

SEQ ID NO: 189467 - protein, 14 aa, Homo sapiens
  CDR3 for alpha chain variable domain of TCR clone 94734 (TRAV17, TRAJ40)
CATALTSGTYKYIF

SEQ ID NO: 189468 - protein, 14 aa, Homo sapiens
  CDR3 for beta chain variable domain of TCR clone 94734 (TRBV11-2, TRBJ2-7)
CASSLGAGAYEQYF

SEQ ID NO: 189469 - protein, 13 aa, Homo sapiens
  CDR3 for alpha chain variable domain of TCR clone 94735 (TRAV12-1, TRAJ39)
CVVPQRAGNMLTF

SEQ ID NO: 189470 - protein, 17 aa, Homo sapiens
  CDR3 for beta chain variable domain of TCR clone 94735 (TRBV4-1, TRBJ2-5)
CASSHDLTGGPIETQYF

SEQ ID NO: 189471 - protein, 13 aa, Homo sapiens
  CDR3 for alpha chain variable domain of TCR clone 94736 (TRAV25, TRAJ12)
CAGGMDSSYKLIF

SEQ ID NO: 189472 - protein, 14 aa, Homo sapiens
  CDR3 for beta chain variable domain of TCR clone 94736 (TRBV4-1, TRBJ2-3)
CASSQEGSTDTQYF

SEQ ID NO: 189473 - protein, 15 aa, Homo sapiens
  CDR3 for alpha chain variable domain of TCR clone 94737 (TRAV21, TRAJ53)
CATLNSGGSNYKLTF

SEQ ID NO: 189474 - protein, 13 aa, Homo sapiens
  CDR3 for beta chain variable domain of TCR clone 94737 (TRBV15, TRBJ2-7)
CATSTTGHYEQYF

SEQ ID NO: 189475 - protein, 12 aa, Homo sapiens
  CDR3 for alpha chain variable domain of TCR clone 94738 (TRAV27, TRAJ41)
CAGGNSGYALNF

SEQ ID NO: 189476 - protein, 15 aa, Homo sapiens
  CDR3 for beta chain variable domain of TCR clone 94738 (TRBV20-1, TRBJ1-5)
CSATSDRGLGQPQHF

SEQ ID NO: 189477 - protein, 14 aa, Homo sapiens
  CDR3 for alpha chain variable domain of TCR clone 94739 (TRAV23/DV6, TRAJ37)
CAASTSSNTGKLIF

SEQ ID NO: 189478 - protein, 13 aa, Homo sapiens
  CDR3 for beta chain variable domain of TCR clone 94739 (TRBV7-3, TRBJ1-1)
CASSQDWGAEAFF

SEQ ID NO: 189479 - protein, 16 aa, Homo sapiens
  CDR3 for alpha chain variable domain of TCR clone 94740 (TRAV12-3, TRAJ53)
CAMSPGSGGSNYKLTF

SEQ ID NO: 189480 - protein, 16 aa, Homo sapiens
  CDR3 for beta chain variable domain of TCR clone 94740 (TRBV4-2, TRBJ1-1)
CASSQVGFGMNTEAFF

SEQ ID NO: 189481 - protein, 14 aa, Homo sapiens
  CDR3 for alpha chain variable domain of TCR clone 94741 (TRAV12-1, TRAJ3)
CVVNPGSSASKIIF

SEQ ID NO: 189482 - protein, 18 aa, Homo sapiens
  CDR3 for beta chain variable domain of TCR clone 94741 (TRBV4-2, TRBJ1-2)
CASSQDKVGHTVNYGDTF

SEQ ID NO: 189483 - protein, 10 aa, Homo sapiens
  CDR3 for alpha chain variable domain of TCR clone 94742 (TRAV38-2/DV8, TRAJ40)
CASGTYKYIF

SEQ ID NO: 189484 - protein, 17 aa, Homo sapiens
  CDR3 for beta chain variable domain of TCR clone 94742 (TRBV13, TRBJ2-3)
CASSLSRVAGGRNTQYF

SEQ ID NO: 189485 - protein, 16 aa, Homo sapiens
  CDR3 for alpha chain variable domain of TCR clone 94743 (TRAV3, TRAJ10)
CALRDMRAGGGNKLTF

SEQ ID NO: 189486 - protein, 16 aa, Homo sapiens
  CDR3 for beta chain variable domain of TCR clone 94743 (TRBV12-4, TRBJ1-5)
CASSRPVGGSNQPQHF

SEQ ID NO: 189487 - protein, 15 aa, Homo sapiens
  CDR3 for alpha chain variable domain of TCR clone 94744 (TRAV2, TRAJ22)
CAVPSRGGSARQLTS

SEQ ID NO: 189488 - protein, 11 aa, Homo sapiens
  CDR3 for beta chain variable domain of TCR clone 94744 (TRBV27, TRBJ2-3)
CASSLGDTQYF

SEQ ID NO: 189489 - protein, 12 aa, Homo sapiens
  CDR3 for alpha chain variable domain of TCR clone 94745 (TRAV38-1, TRAJ32)
CAPLGATNKLIS

SEQ ID NO: 189490 - protein, 14 aa, Homo sapiens
  CDR3 for beta chain variable domain of TCR clone 94745 (TRBV29-1, TRBJ2-5)
CSVETSGSGETQYF

SEQ ID NO: 189491 - protein, 12 aa, Homo sapiens
  CDR3 for alpha chain variable domain of TCR clone 94746 (TRAV29/DV5, TRAJ43)
CSAPYNNNDMRF

SEQ ID NO: 189492 - protein, 17 aa, Homo sapiens
  CDR3 for beta chain variable domain of TCR clone 94746 (TRBV19, TRBJ2-6)
CASSTGQVFSGANVLTF

SEQ ID NO: 189493 - protein, 18 aa, Homo sapiens
  CDR3 for alpha chain variable domain of TCR clone 94747 (TRAV13-1, TRAJ52)
CAASKRSAGGTSYGKLTF

SEQ ID NO: 189494 - protein, 13 aa, Homo sapiens
  CDR3 for beta chain variable domain of TCR clone 94747 (TRBV12-4, TRBJ1-2)
CASSLPQGKGYTF

SEQ ID NO: 189495 - protein, 14 aa, Homo sapiens
  CDR3 for alpha chain variable domain of TCR clone 94748 (TRAV3, TRAJ37)
CAVKESGNTGKLIF

SEQ ID NO: 189496 - protein, 14 aa, Homo sapiens
  CDR3 for beta chain variable domain of TCR clone 94748 (TRBV2, TRBJ1-5)
CASSENRGGQAQHF

SEQ ID NO: 189497 - protein, 15 aa, Homo sapiens
  CDR3 for alpha chain variable domain of TCR clone 94749 (TRAV3, TRAJ15)
CAVRPANQAGPALIF

SEQ ID NO: 189498 - protein, 14 aa, Homo sapiens
  CDR3 for beta chain variable domain of TCR clone 94749 (TRBV4-1, TRBJ2-2)
CASSQAVNTGELFF

SEQ ID NO: 189499 - protein, 10 aa, Homo sapiens
  CDR3 for alpha chain variable domain of TCR clone 94750 (TRAV12-3, TRAJ18)
CAMSAEAQPW

SEQ ID NO: 189500 - protein, 13 aa, Homo sapiens
  CDR3 for beta chain variable domain of TCR clone 94750 (TRBV15, TRBJ1-6)
CDTSGGLNSPLHF

SEQ ID NO: 189501 - protein, 11 aa, Homo sapiens
  CDR3 for alpha chain variable domain of TCR clone 94751 (TRAV26-1, TRAJ37)
CIVRVGRKLIF

SEQ ID NO: 189502 - protein, 13 aa, Homo sapiens
  CDR3 for beta chain variable domain of TCR clone 94751 (TRBV14, TRBJ1-2)
CASSGDRRYGYTF

SEQ ID NO: 189503 - protein, 13 aa, Homo sapiens
  CDR3 for alpha chain variable domain of TCR clone 94752 (TRAV3, TRAJ20)
CAVRDTPRYKLSF

SEQ ID NO: 189504 - protein, 15 aa, Homo sapiens
  CDR3 for beta chain variable domain of TCR clone 94752 (TRBV7-2, TRBJ1-2)
CASSLVSGGDYSYTF

SEQ ID NO: 189505 - protein, 14 aa, Homo sapiens
  CDR3 for alpha chain variable domain of TCR clone 94753 (TRAV38-1, TRAJ28)
CAFTSGAGGYQLTF

SEQ ID NO: 189506 - protein, 18 aa, Homo sapiens
  CDR3 for beta chain variable domain of TCR clone 94753 (TRBV7-9, TRBJ1-1)
CASSKPWDTMGMNTEAFF

SEQ ID NO: 189507 - protein, 14 aa, Homo sapiens
  CDR3 for alpha chain variable domain of TCR clone 94754 (TRAV12-2, TRAJ13)
CAVQKTGGYQKVTF

SEQ ID NO: 189508 - protein, 14 aa, Homo sapiens
  CDR3 for beta chain variable domain of TCR clone 94754 (TRBV12-5, TRBJ2-5)
CASGSRTHQETQYF

SEQ ID NO: 189509 - protein, 14 aa, Homo sapiens
  CDR3 for alpha chain variable domain of TCR clone 94755 (TRAV8-3, TRAJ4)
CAVGAAGGYNKLIF

SEQ ID NO: 189510 - protein, 15 aa, Homo sapiens
  CDR3 for beta chain variable domain of TCR clone 94755 (TRBV7-9, TRBJ1-5)
CASSQGHQPNQPQHF

SEQ ID NO: 189511 - protein, 14 aa, Homo sapiens
  CDR3 for alpha chain variable domain of TCR clone 94756 (TRAV12-3, TRAJ10)
SHLPLTGGGNKLTF

SEQ ID NO: 189512 - protein, 13 aa, Homo sapiens
  CDR3 for beta chain variable domain of TCR clone 94756 (TRBV7-3, TRBJ2-1)
CASSLWPYNEQFF

SEQ ID NO: 189513 - protein, 14 aa, Homo sapiens
  CDR3 for alpha chain variable domain of TCR clone 94757 (TRAV1-1, TRAJ11)
WDRIMNSGYSTLTF

SEQ ID NO: 189514 - protein, 16 aa, Homo sapiens
  CDR3 for beta chain variable domain of TCR clone 94757 (TRBV6-5, TRBJ1-6)
CASSYSGESYNSPLHF

SEQ ID NO: 189515 - protein, 12 aa, Homo sapiens
  CDR3 for alpha chain variable domain of TCR clone 94758 (TRAV12-2, TRAJ36)
CAAPRGANNLFF

SEQ ID NO: 189516 - protein, 14 aa, Homo sapiens
  CDR3 for beta chain variable domain of TCR clone 94758 (TRBV7-2, TRBJ2-7)
CASRSQGAAYEQYF

SEQ ID NO: 189517 - protein, 21 aa, Homo sapiens
  CDR3 for alpha chain variable domain of TCR clone 94759 (TRAV4, TRAJ3)
CCVLLPRGCPPGYSSASKIIF

SEQ ID NO: 189518 - protein, 18 aa, Homo sapiens
  CDR3 for beta chain variable domain of TCR clone 94759 (TRBV7-9, TRBJ2-7)
CASSLTTSGSRTWYEQYF

SEQ ID NO: 189519 - protein, 14 aa, Homo sapiens
  CDR3 for alpha chain variable domain of TCR clone 94760 (TRAV1-2, TRAJ8)
CAVREDTGFPKLVF

SEQ ID NO: 189520 - protein, 16 aa, Homo sapiens
  CDR3 for beta chain variable domain of TCR clone 94760 (TRBV12-5, TRBJ2-5)
CASGPRTSGNQETQYF

SEQ ID NO: 189521 - protein, 12 aa, Homo sapiens
  CDR3 for alpha chain variable domain of TCR clone 94761 (TRAV12-3, TRAJ40)
CAMTSGTYKYIF

SEQ ID NO: 189522 - protein, 16 aa, Homo sapiens
  CDR3 for beta chain variable domain of TCR clone 94761 (TRBV7-3, TRBJ2-2)
CASSLKRGTLSGELFF

SEQ ID NO: 189523 - protein, 13 aa, Homo sapiens
  CDR3 for alpha chain variable domain of TCR clone 94762 (TRAV3, TRAJ31)
CAVREGNNARLMF

SEQ ID NO: 189524 - protein, 19 aa, Homo sapiens
  CDR3 for beta chain variable domain of TCR clone 94762 (TRBV28, TRBJ2-1)
CASSFSIRGSGRTRYEQFF

SEQ ID NO: 189525 - protein, 16 aa, Homo sapiens
  CDR3 for alpha chain variable domain of TCR clone 94763 (TRAV12-2, TRAJ10)
CAVNSVLTGGGNKLTF

SEQ ID NO: 189526 - protein, 12 aa, Homo sapiens
  CDR3 for beta chain variable domain of TCR clone 94763 (TRBV28, TRBJ2-7)
CASSFSSYEQYF

SEQ ID NO: 189527 - protein, 14 aa, Homo sapiens
  CDR3 for alpha chain variable domain of TCR clone 94764 (TRAV12-2, TRAJ11)
CAVEGGSGYSTLTF

SEQ ID NO: 189528 - protein, 14 aa, Homo sapiens
  CDR3 for beta chain variable domain of TCR clone 94764 (TRBV12-4, TRBJ1-1)
CASSLGTGGTEAFF

SEQ ID NO: 189529 - protein, 15 aa, Homo sapiens
  CDR3 for alpha chain variable domain of TCR clone 94765 (TRAV3, TRAJ3)
CAVRDMGSSASKIIF

SEQ ID NO: 189530 - protein, 14 aa, Homo sapiens
  CDR3 for beta chain variable domain of TCR clone 94765 (TRBV6-6, TRBJ2-7)
CASSIAGGVDEQYF

SEQ ID NO: 189531 - protein, 14 aa, Homo sapiens
  CDR3 for alpha chain variable domain of TCR clone 94766 (TRAV20, TRAJ42)
CAVQVGGSQGNLIF

SEQ ID NO: 189532 - protein, 14 aa, Homo sapiens
  CDR3 for beta chain variable domain of TCR clone 94766 (TRBV28, TRBJ1-2)
CASRIQGANYGYTF

SEQ ID NO: 189533 - protein, 16 aa, Homo sapiens
  CDR3 for alpha chain variable domain of TCR clone 94767 (TRAV8-3, TRAJ8)
CAVSRDGNTGFQKLVF

SEQ ID NO: 189534 - protein, 15 aa, Homo sapiens
  CDR3 for beta chain variable domain of TCR clone 94767 (TRBV6-1, TRBJ2-6)
CASSSRPSGANVLTF

SEQ ID NO: 189535 - protein, 10 aa, Homo sapiens
  CDR3 for alpha chain variable domain of TCR clone 94768 (TRAV12-3, TRAJ18)
CAMSAEAQPW

SEQ ID NO: 189536 - protein, 15 aa, Homo sapiens
  CDR3 for beta chain variable domain of TCR clone 94768 (TRBV7-9, TRBJ1-5)
CASSQGHQPNQPQHF

SEQ ID NO: 189537 - protein, 14 aa, Homo sapiens
  CDR3 for alpha chain variable domain of TCR clone 94769 (TRAV12-2, TRAJ45)
CALPERGGADGLTF

SEQ ID NO: 189538 - protein, 14 aa, Homo sapiens
  CDR3 for beta chain variable domain of TCR clone 94769 (TRBV18, TRBJ1-5)
CASSPGKSNQPQHF

SEQ ID NO: 189539 - protein, 14 aa, Homo sapiens
  CDR3 for alpha chain variable domain of TCR clone 94770 (TRAV20, TRAJ42)
CAVQAGGSQGNLIF

SEQ ID NO: 189540 - protein, 11 aa, Homo sapiens
  CDR3 for beta chain variable domain of TCR clone 94770 (TRBV28, TRBJ1-2)
CASRIQGRTMA

SEQ ID NO: 189541 - protein, 16 aa, Homo sapiens
  CDR3 for alpha chain variable domain of TCR clone 94771 (TRAV8-3, TRAJ13)
CAVGAYPSGGYQKVTV

SEQ ID NO: 189542 - protein, 15 aa, Homo sapiens
  CDR3 for beta chain variable domain of TCR clone 94771 (TRBV19, TRBJ1-5)
CASSIVWADNQPQHF

SEQ ID NO: 189543 - protein, 16 aa, Homo sapiens
  CDR3 for alpha chain variable domain of TCR clone 94772 (TRAV3, TRAJ10)
CAVRDMRAGGGNKLTF

SEQ ID NO: 189544 - protein, 15 aa, Homo sapiens
  CDR3 for beta chain variable domain of TCR clone 94772 (TRBV20-1, TRBJ2-1)
CSASSAGSSYNEQLF

SEQ ID NO: 189545 - protein, 15 aa, Homo sapiens
  CDR3 for alpha chain variable domain of TCR clone 94773 (TRAV13-1, TRAJ43)
CAATPELGGNNDMRF

SEQ ID NO: 189546 - protein, 15 aa, Homo sapiens
  CDR3 for beta chain variable domain of TCR clone 94773 (TRBV10-2, TRBJ2-6)
CASSEQGTGANGLTF

SEQ ID NO: 189547 - protein, 14 aa, Homo sapiens
  CDR3 for alpha chain variable domain of TCR clone 94774 (TRAV3, TRAJ9)
CAVRLNTGGFQTIF

SEQ ID NO: 189548 - protein, 15 aa, Homo sapiens
  CDR3 for beta chain variable domain of TCR clone 94774 (TRBV7-2, TRBJ2-1)
CASSLASGRVNEQFF

SEQ ID NO: 189549 - protein, 14 aa, Homo sapiens
  CDR3 for alpha chain variable domain of TCR clone 94775 (TRAV26-1, TRAJ38)
CIAGNAGNNRKLIW

SEQ ID NO: 189550 - protein, 17 aa, Homo sapiens
  CDR3 for beta chain variable domain of TCR clone 94775 (TRBV7-9, TRBJ2-3)
CASSPTVAGDLTDTQYF

SEQ ID NO: 189551 - protein, 11 aa, Homo sapiens
  CDR3 for alpha chain variable domain of TCR clone 94776 (TRAV12-2, TRAJ49)
CAVWAGNQFYF

SEQ ID NO: 189552 - protein, 14 aa, Homo sapiens
  CDR3 for beta chain variable domain of TCR clone 94776 (TRBV6-1, TRBJ1-3)
CASVQGGGGNTIYF

SEQ ID NO: 189553 - protein, 15 aa, Homo sapiens
  CDR3 for alpha chain variable domain of TCR clone 94777 (TRAV3, TRAJ29)
CAVRAPLSGNTPLVS

SEQ ID NO: 189554 - protein, 15 aa, Homo sapiens
  CDR3 for beta chain variable domain of TCR clone 94777 (TRBV28, TRBJ1-1)
CASRIKGGLNTEAFF

SEQ ID NO: 189555 - protein, 14 aa, Homo sapiens
  CDR3 for alpha chain variable domain of TCR clone 94778 (TRAV13-2, TRAJ15)
CAENPNQAVTALIF

SEQ ID NO: 189556 - protein, 16 aa, Homo sapiens
  CDR3 for beta chain variable domain of TCR clone 94778 (TRBV12-4, TRBJ1-2)
CASSPTATGKTRGYTF

SEQ ID NO: 189557 - protein, 13 aa, Homo sapiens
  CDR3 for alpha chain variable domain of TCR clone 94779 (TRAV23/DV6, TRAJ47)
CAASSQYGNKMVF

SEQ ID NO: 189558 - protein, 15 aa, Homo sapiens
  CDR3 for beta chain variable domain of TCR clone 94779 (TRBV7-3, TRBJ2-1)
CASSLDGNSYNEQFF

SEQ ID NO: 189559 - protein, 13 aa, Homo sapiens
  CDR3 for alpha chain variable domain of TCR clone 94780 (TRAV2, TRAJ15)
CAVASRAGTALIF

SEQ ID NO: 189560 - protein, 15 aa, Homo sapiens
  CDR3 for beta chain variable domain of TCR clone 94780 (TRBV7-3, TRBJ2-2)
CASSETGQGTGELFF

SEQ ID NO: 189561 - protein, 14 aa, Homo sapiens
  CDR3 for alpha chain variable domain of TCR clone 94781 (TRAV1-2, TRAJ8)
CAVREDTGFQKLVF

SEQ ID NO: 189562 - protein, 15 aa, Homo sapiens
  CDR3 for beta chain variable domain of TCR clone 94781 (TRBV7-9, TRBJ2-1)
CQQRCSGGSYNEQFF

SEQ ID NO: 189563 - protein, 13 aa, Homo sapiens
  CDR3 for alpha chain variable domain of TCR clone 94782 (TRAV26-1, )
CIVSHRVEGFWNQ

SEQ ID NO: 189564 - protein, 14 aa, Homo sapiens
  CDR3 for beta chain variable domain of TCR clone 94782 (TRBV20-1, TRBJ2-7)
CSACTALSSYEQYF

SEQ ID NO: 189565 - protein, 23 aa, Homo sapiens
  CDR3 for alpha chain variable domain of TCR clone 94783 (TRAV26-1, TRAJ38)
CIVRPLNAGNNHIQNPYPAVYQL

SEQ ID NO: 189566 - protein, 13 aa, Homo sapiens
  CDR3 for beta chain variable domain of TCR clone 94783 (TRBV18, TRBJ1-1)
CASSPNGDTEAFF

SEQ ID NO: 189567 - protein, 16 aa, Homo sapiens
  CDR3 for alpha chain variable domain of TCR clone 94784 (TRAV30, TRAJ48)
CGTEIKSNFGNEKLTF

SEQ ID NO: 189568 - protein, 17 aa, Homo sapiens
  CDR3 for beta chain variable domain of TCR clone 94784 (TRBV27, TRBJ2-1)
CASSSGRGGQSADEQFF

SEQ ID NO: 189569 - protein, 14 aa, Homo sapiens
  CDR3 for alpha chain variable domain of TCR clone 94785 (TRAV1-2, TRAJ8)
CAVREDTGFQKLVF

SEQ ID NO: 189570 - protein, 14 aa, Homo sapiens
  CDR3 for beta chain variable domain of TCR clone 94785 (TRBV7-3, TRBJ2-2)
CASSSGGYTGELFF

SEQ ID NO: 189571 - protein, 14 aa, Homo sapiens
  CDR3 for alpha chain variable domain of TCR clone 94786 (TRAV12-3, TRAJ41)
CAMSAGNSGDALNF

SEQ ID NO: 189572 - protein, 11 aa, Homo sapiens
  CDR3 for beta chain variable domain of TCR clone 94786 (TRBV7-2, TRBJ2-3)
CASSSSDTQYF

SEQ ID NO: 189573 - protein, 14 aa, Homo sapiens
  CDR3 for alpha chain variable domain of TCR clone 94787 (TRAV4, TRAJ6)
CLVGEAGGSYIPTF

SEQ ID NO: 189574 - protein, 16 aa, Homo sapiens
  CDR3 for beta chain variable domain of TCR clone 94787 (TRBV7-6, TRBJ2-1)
CASSLNEGPPYNEQFF

SEQ ID NO: 189575 - protein, 14 aa, Homo sapiens
  CDR3 for alpha chain variable domain of TCR clone 94788 (TRAV1-2, TRAJ16)
CAVNRFSDGQKLLF

SEQ ID NO: 189576 - protein, 15 aa, Homo sapiens
  CDR3 for beta chain variable domain of TCR clone 94788 (TRBV7-9, TRBJ2-1)
CASSLAGLAHNEQFF

SEQ ID NO: 189577 - protein, 14 aa, Homo sapiens
  CDR3 for alpha chain variable domain of TCR clone 94789 (TRAV9-2, TRAJ39)
CALYIYNAGNMLTF

SEQ ID NO: 189578 - protein, 14 aa, Homo sapiens
  CDR3 for beta chain variable domain of TCR clone 94789 (TRBV7-8, TRBJ1-2)
CASSPDSLSYGYTF

SEQ ID NO: 189579 - protein, 15 aa, Homo sapiens
  CDR3 for alpha chain variable domain of TCR clone 94790 (TRAV34, TRAJ38)
CGADFTPGNNRKLIW

SEQ ID NO: 189580 - protein, 16 aa, Homo sapiens
  CDR3 for beta chain variable domain of TCR clone 94790 (TRBV12-4, TRBJ2-5)
CASSWRPSGDLETQYF

SEQ ID NO: 189581 - protein, 11 aa, Homo sapiens
  CDR3 for alpha chain variable domain of TCR clone 94791 (TRAV23/DV6, TRAJ48)
CAPRWGEKLTF

SEQ ID NO: 189582 - protein, 14 aa, Homo sapiens
  CDR3 for beta chain variable domain of TCR clone 94791 (TRBV11-2, TRBJ2-7)
CASSLGAGAYEQYF

SEQ ID NO: 189583 - protein, 14 aa, Homo sapiens
  CDR3 for alpha chain variable domain of TCR clone 94792 (TRAV26-1, TRAJ22)
CIVRVYGSARQLTF

SEQ ID NO: 189584 - protein, 13 aa, Homo sapiens
  CDR3 for beta chain variable domain of TCR clone 94792 (TRBV6-5, TRBJ1-6)
CASSYERSTPLHF

SEQ ID NO: 189585 - protein, 15 aa, Homo sapiens
  CDR3 for alpha chain variable domain of TCR clone 94793 (TRAV2, TRAJ9)
CAVAALNTGGFKTIF

SEQ ID NO: 189586 - protein, 15 aa, Homo sapiens
  CDR3 for beta chain variable domain of TCR clone 94793 (TRBV7-2, TRBJ2-1)
CASSSGLAGGNEQFF

SEQ ID NO: 189587 - protein, 12 aa, Homo sapiens
  CDR3 for alpha chain variable domain of TCR clone 94794 (TRAV30, TRAJ43)
CGTEERGNDMRF

SEQ ID NO: 189588 - protein, 16 aa, Homo sapiens
  CDR3 for beta chain variable domain of TCR clone 94794 (TRBV19, TRBJ1-1)
CASSPTRFWPGTEAFF

SEQ ID NO: 189589 - protein, 12 aa, Homo sapiens
  CDR3 for alpha chain variable domain of TCR clone 94795 (TRAV8-3, TRAJ26)
CAGDNYGQNFVF

SEQ ID NO: 189590 - protein, 12 aa, Homo sapiens
  CDR3 for beta chain variable domain of TCR clone 94795 (TRBV12-4, TRBJ2-3)
CASSTLPDTQYF

SEQ ID NO: 189591 - protein, 19 aa, Homo sapiens
  CDR3 for alpha chain variable domain of TCR clone 94796 (TRAV26-1, TRAJ52)
CIVRVANNAGGTSYGKLTL

SEQ ID NO: 189592 - protein, 14 aa, Homo sapiens
  CDR3 for beta chain variable domain of TCR clone 94796 (TRBV19, TRBJ1-2)
CASSIGAGSYGYTF

SEQ ID NO: 189593 - protein, 14 aa, Homo sapiens
  CDR3 for alpha chain variable domain of TCR clone 94797 (TRAV1-2, TRAJ16)
CAVNRFSDGQKLLF

SEQ ID NO: 189594 - protein, 16 aa, Homo sapiens
  CDR3 for beta chain variable domain of TCR clone 94797 (TRBV2, TRBJ2-2)
CASSAFGDANTGELFF

SEQ ID NO: 189595 - protein, 15 aa, Homo sapiens
  CDR3 for alpha chain variable domain of TCR clone 94798 (TRAV17, TRAJ13)
CATDAGSGGYQKVTF

SEQ ID NO: 189596 - protein, 17 aa, Homo sapiens
  CDR3 for beta chain variable domain of TCR clone 94798 (TRBV11-2, TRBJ2-1)
CASSSYPPGVEYNEQFF

SEQ ID NO: 189597 - protein, 14 aa, Homo sapiens
  CDR3 for alpha chain variable domain of TCR clone 94799 (TRAV3, TRAJ6)
CAVRRTGGSYIPTF

SEQ ID NO: 189598 - protein, 16 aa, Homo sapiens
  CDR3 for beta chain variable domain of TCR clone 94799 (TRBV4-2, TRBJ1-1)
CASSPSPGRAAPEAFF

SEQ ID NO: 189599 - protein, 14 aa, Homo sapiens
  CDR3 for alpha chain variable domain of TCR clone 94800 (TRAV12-3, TRAJ10)
SHLPLTGGRNKLTF

SEQ ID NO: 189600 - protein, 13 aa, Homo sapiens
  CDR3 for beta chain variable domain of TCR clone 94800 (TRBV20-1, TRBJ2-5)
CSARGDYQETQYF

SEQ ID NO: 189601 - protein, 11 aa, Homo sapiens
  CDR3 for alpha chain variable domain of TCR clone 94801 (TRAV21, TRAJ48)
CAVDGKEKLTF

SEQ ID NO: 189602 - protein, 16 aa, Homo sapiens
  CDR3 for beta chain variable domain of TCR clone 94801 (TRBV19, TRBJ2-1)
CASSSKGTRSYNEQFF

SEQ ID NO: 189603 - protein, 14 aa, Homo sapiens
  CDR3 for alpha chain variable domain of TCR clone 94802 (TRAV4, TRAJ22)
CLARLSGSARQLTF

SEQ ID NO: 189604 - protein, 15 aa, Homo sapiens
  CDR3 for beta chain variable domain of TCR clone 94802 (TRBV7-2, TRBJ2-1)
CASTHGTGIYNEQFF

SEQ ID NO: 189605 - protein, 13 aa, Homo sapiens
  CDR3 for alpha chain variable domain of TCR clone 94803 (TRAV17, TRAJ5)
CALRGTGRRALTF

SEQ ID NO: 189606 - protein, 15 aa, Homo sapiens
  CDR3 for beta chain variable domain of TCR clone 94803 (TRBV6-1, TRBJ1-5)
CASSELREGNQHQHF

SEQ ID NO: 189607 - protein, 13 aa, Homo sapiens
  CDR3 for alpha chain variable domain of TCR clone 94804 (TRAV13-2, TRAJ48)
CAEMDFGNEKLTF

SEQ ID NO: 189608 - protein, 15 aa, Homo sapiens
  CDR3 for beta chain variable domain of TCR clone 94804 (TRBV7-9, TRBJ1-6)
CASSTPGRGNSPLHF

SEQ ID NO: 189609 - protein, 13 aa, Homo sapiens
  CDR3 for alpha chain variable domain of TCR clone 94805 (TRAV8-3, TRAJ44)
CAVVPGTASKLTF

SEQ ID NO: 189610 - protein, 14 aa, Homo sapiens
  CDR3 for beta chain variable domain of TCR clone 94805 (TRBV11-2, TRBJ2-3)
CASSRLAHTDTQYF

SEQ ID NO: 189611 - protein, 16 aa, Homo sapiens
  CDR3 for alpha chain variable domain of TCR clone 94806 (TRAV30, TRAJ24)
CGTEIVDADSWGKFQF

SEQ ID NO: 189612 - protein, 15 aa, Homo sapiens
  CDR3 for beta chain variable domain of TCR clone 94806 (TRBV20-1, TRBJ1-1)
CSARGGGTLKLSLDK

SEQ ID NO: 189613 - protein, 14 aa, Homo sapiens
  CDR3 for alpha chain variable domain of TCR clone 94807 (TRAV8-3, TRAJ39)
CAVGANDAGNMLTF

SEQ ID NO: 189614 - protein, 16 aa, Homo sapiens
  CDR3 for beta chain variable domain of TCR clone 94807 (TRBV6-1, TRBJ2-5)
CASSETLDRGAETQYF

SEQ ID NO: 189615 - protein, 12 aa, Homo sapiens
  CDR3 for alpha chain variable domain of TCR clone 94808 (TRAV12-3, TRAJ20)
CAMVRADYKLSF

SEQ ID NO: 189616 - protein, 14 aa, Homo sapiens
  CDR3 for beta chain variable domain of TCR clone 94808 (TRBV5-5, TRBJ1-5)
CASSGQGVDQPQHF

SEQ ID NO: 189617 - protein, 12 aa, Homo sapiens
  CDR3 for alpha chain variable domain of TCR clone 94809 (TRAV1-1, TRAJ20)
CAVREDDYNLSF

SEQ ID NO: 189618 - protein, 18 aa, Homo sapiens
  CDR3 for beta chain variable domain of TCR clone 94809 (TRBV20-1, TRBJ2-3)
CSASGLAGGPGTTDTQYF

SEQ ID NO: 189619 - protein, 14 aa, Homo sapiens
  CDR3 for alpha chain variable domain of TCR clone 94810 (TRAV26-1, TRAJ45)
CIEVTGGGADGLTF

SEQ ID NO: 189620 - protein, 13 aa, Homo sapiens
  CDR3 for beta chain variable domain of TCR clone 94810 (TRBV4-2, TRBJ1-1)
CASSQAGNTEAFF

SEQ ID NO: 189621 - protein, 16 aa, Homo sapiens
  CDR3 for alpha chain variable domain of TCR clone 94811 (TRAV21, TRAJ52)
CAVTNAVGTSYGKLTF

SEQ ID NO: 189622 - protein, 13 aa, Homo sapiens
  CDR3 for beta chain variable domain of TCR clone 94811 (TRBV20-1, TRBJ2-3)
CSARLAGTDTQYF

SEQ ID NO: 189623 - protein, 13 aa, Homo sapiens
  CDR3 for alpha chain variable domain of TCR clone 94812 (TRAV2, TRAJ29)
CAAQNSGNTPLVF

SEQ ID NO: 189624 - protein, 12 aa, Homo sapiens
  CDR3 for beta chain variable domain of TCR clone 94812 (TRBV7-8, TRBJ2-7)
CASSLGDREQYF

SEQ ID NO: 189625 - protein, 11 aa, Homo sapiens
  CDR3 for alpha chain variable domain of TCR clone 94813 (TRAV2, TRAJ33)
CAVESNYQLIW

SEQ ID NO: 189626 - protein, 14 aa, Homo sapiens
  CDR3 for beta chain variable domain of TCR clone 94813 (TRBV19, TRBJ2-7)
CASSMGQGAIEQYF

SEQ ID NO: 189627 - protein, 14 aa, Homo sapiens
  CDR3 for alpha chain variable domain of TCR clone 94814 (TRAV12-2, TRAJ53)
CAAKGGGSNYKLTF

SEQ ID NO: 189628 - protein, 15 aa, Homo sapiens
  CDR3 for beta chain variable domain of TCR clone 94814 (TRBV10-3, TRBJ2-3)
CAISLTSGGTDTQYF

SEQ ID NO: 189629 - protein, 18 aa, Homo sapiens
  CDR3 for alpha chain variable domain of TCR clone 94815 (TRAV12-3, TRAJ52)
CAMSVGGAGGTSYGKLTF

SEQ ID NO: 189630 - protein, 17 aa, Homo sapiens
  CDR3 for beta chain variable domain of TCR clone 94815 (TRBV27, TRBJ1-6)
CASSFDRGLGHPSTLGT

SEQ ID NO: 189631 - protein, 14 aa, Homo sapiens
  CDR3 for alpha chain variable domain of TCR clone 94816 (TRAV9-2, TRAJ39)
CALYIYNAGNMLTF

SEQ ID NO: 189632 - protein, 16 aa, Homo sapiens
  CDR3 for beta chain variable domain of TCR clone 94816 (TRBV7-3, TRBJ2-1)
CASSKPLAGGYNGQFF

SEQ ID NO: 189633 - protein, 11 aa, Homo sapiens
  CDR3 for alpha chain variable domain of TCR clone 94817 (TRAV2, TRAJ33)
CAVDSNYQLIW

SEQ ID NO: 189634 - protein, 15 aa, Homo sapiens
  CDR3 for beta chain variable domain of TCR clone 94817 (TRBV19, TRBJ1-2)
CASSVGKVLNYGYTF

SEQ ID NO: 189635 - protein, 18 aa, Homo sapiens
  CDR3 for alpha chain variable domain of TCR clone 94818 (TRAV21, TRAJ52)
CSVRPSPAGGTSYGKLTF

SEQ ID NO: 189636 - protein, 15 aa, Homo sapiens
  CDR3 for beta chain variable domain of TCR clone 94818 (TRBV7-9, TRBJ2-7)
CASSSSGLAVYEQYF

SEQ ID NO: 189637 - protein, 14 aa, Homo sapiens
  CDR3 for alpha chain variable domain of TCR clone 94819 (TRAV13-1, TRAJ44)
CVAKATGTASKLTF

SEQ ID NO: 189638 - protein, 12 aa, Homo sapiens
  CDR3 for beta chain variable domain of TCR clone 94819 (TRBV7-8, TRBJ2-7)
CASSLGDREQYF

SEQ ID NO: 189639 - protein, 14 aa, Homo sapiens
  CDR3 for alpha chain variable domain of TCR clone 94820 (TRAV1-1, TRAJ23)
CAVSIYNQGGKLIF

SEQ ID NO: 189640 - protein, 15 aa, Homo sapiens
  CDR3 for beta chain variable domain of TCR clone 94820 (TRBV5-8, TRBJ2-2)
CASSLDRGATVELFF

SEQ ID NO: 189641 - protein, 12 aa, Homo sapiens
  CDR3 for alpha chain variable domain of TCR clone 94821 (TRAV26-1, TRAJ36)
CIVRVRADNLFL

SEQ ID NO: 189642 - protein, 14 aa, Homo sapiens
  CDR3 for beta chain variable domain of TCR clone 94821 (TRBV14, TRBJ2-3)
CASSRKLAADTQYF

SEQ ID NO: 189643 - protein, 13 aa, Homo sapiens
  CDR3 for alpha chain variable domain of TCR clone 94822 (TRAV2, TRAJ15)
CAVASQAGTALIF

SEQ ID NO: 189644 - protein, 13 aa, Homo sapiens
  CDR3 for beta chain variable domain of TCR clone 94822 (TRBV7-7, TRBJ2-3)
CASSLSRADTQYF

SEQ ID NO: 189645 - protein, 18 aa, Homo sapiens
  CDR3 for alpha chain variable domain of TCR clone 94823 (TRAV21, TRAJ52)
CAVRPSPAGGNSYGKLTF

SEQ ID NO: 189646 - protein, 14 aa, Homo sapiens
  CDR3 for beta chain variable domain of TCR clone 94823 (TRBV4-1, TRBJ2-2)
CASSQAVNTGELFF

SEQ ID NO: 189647 - protein, 16 aa, Homo sapiens
  CDR3 for alpha chain variable domain of TCR clone 94824 (TRAV3, TRAJ10)
CAVRDMRAGGGNKLTF

SEQ ID NO: 189648 - protein, 14 aa, Homo sapiens
  CDR3 for beta chain variable domain of TCR clone 94824 (TRBV5-1, TRBJ2-2)
CASSLGGGSGELFF

SEQ ID NO: 189649 - protein, 10 aa, Homo sapiens
  CDR3 for alpha chain variable domain of TCR clone 94825 (TRAV8-4, TRAJ43)
CAVSADDMRF

SEQ ID NO: 189650 - protein, 15 aa, Homo sapiens
  CDR3 for beta chain variable domain of TCR clone 94825 (TRBV5-1, TRBJ2-3)
CASSVTSGSTGTQYF

SEQ ID NO: 189651 - protein, 15 aa, Homo sapiens
  CDR3 for alpha chain variable domain of TCR clone 94826 (TRAV12-1, TRAJ44)
CVADLPTGTASKLTF

SEQ ID NO: 189652 - protein, 15 aa, Homo sapiens
  CDR3 for beta chain variable domain of TCR clone 94826 (TRBV2, TRBJ2-1)
CASSELAGSYNEQFF

SEQ ID NO: 189653 - protein, 14 aa, Homo sapiens
  CDR3 for alpha chain variable domain of TCR clone 94827 (TRAV17, TRAJ37)
CATDCSSNTGKLIF

SEQ ID NO: 189654 - protein, 13 aa, Homo sapiens
  CDR3 for beta chain variable domain of TCR clone 94827 (TRBV11-2, TRBJ2-1)
CASSLDLVNEQFF

SEQ ID NO: 189655 - protein, 11 aa, Homo sapiens
  CDR3 for alpha chain variable domain of TCR clone 94828 (TRAV24, TRAJ43)
CAFSNNNDMRF

SEQ ID NO: 189656 - protein, 14 aa, Homo sapiens
  CDR3 for beta chain variable domain of TCR clone 94828 (TRBV7-8, TRBJ2-3)
CASSLEAGTDTQYF

SEQ ID NO: 189657 - protein, 14 aa, Homo sapiens
  CDR3 for alpha chain variable domain of TCR clone 94829 (TRAV3, TRAJ28)
CAVRRGAGSYQLTF

SEQ ID NO: 189658 - protein, 13 aa, Homo sapiens
  CDR3 for beta chain variable domain of TCR clone 94829 (TRBV2, TRBJ1-5)
CATAGPGNQPQHF

SEQ ID NO: 189659 - protein, 18 aa, Homo sapiens
  CDR3 for alpha chain variable domain of TCR clone 94830 (TRAV21, TRAJ52)
CAVRPSPAGGTSYGKLTF

SEQ ID NO: 189660 - protein, 14 aa, Homo sapiens
  CDR3 for beta chain variable domain of TCR clone 94830 (TRBV20-1, TRBJ2-2)
CSAPDTANTGELFF

SEQ ID NO: 189661 - protein, 13 aa, Homo sapiens
  CDR3 for alpha chain variable domain of TCR clone 94831 (TRAV16, TRAJ26)
CITELCLGQNFVF

SEQ ID NO: 189662 - protein, 12 aa, Homo sapiens
  CDR3 for beta chain variable domain of TCR clone 94831 (TRBV11-2, TRBJ2-1)
CASSPGNNEQFF

SEQ ID NO: 189663 - protein, 16 aa, Homo sapiens
  CDR3 for alpha chain variable domain of TCR clone 94832 (TRAV13-1, TRAJ45)
CAASWESGGGADGRTF

SEQ ID NO: 189664 - protein, 14 aa, Homo sapiens
  CDR3 for beta chain variable domain of TCR clone 94832 (TRBV12-4, TRBJ1-3)
CASGQTVSGNTIYF

SEQ ID NO: 189665 - protein, 14 aa, Homo sapiens
  CDR3 for alpha chain variable domain of TCR clone 94833 (TRAV12-1, TRAJ17)
CVVNYKAAGNKLTF

SEQ ID NO: 189666 - protein, 15 aa, Homo sapiens
  CDR3 for beta chain variable domain of TCR clone 94833 (TRBV7-2, TRBJ2-3)
CASSSTGLETDTQYF

SEQ ID NO: 189667 - protein, 15 aa, Homo sapiens
  CDR3 for alpha chain variable domain of TCR clone 94834 (TRAV25, TRAJ53)
CPTSNSGGSNYKLTF

SEQ ID NO: 189668 - protein, 14 aa, Homo sapiens
  CDR3 for beta chain variable domain of TCR clone 94834 (TRBV11-2, TRBJ2-3)
CASSRLARTDTLYF

SEQ ID NO: 189669 - protein, 13 aa, Homo sapiens
  CDR3 for alpha chain variable domain of TCR clone 94835 (TRAV3, TRAJ21)
CAVREPDFNKFYF

SEQ ID NO: 189670 - protein, 15 aa, Homo sapiens
  CDR3 for beta chain variable domain of TCR clone 94835 (TRBV2, TRBJ2-1)
CASSELAGWYNEQFF

SEQ ID NO: 189671 - protein, 14 aa, Homo sapiens
  CDR3 for alpha chain variable domain of TCR clone 94836 (TRAV8-3, TRAJ9)
CAVVYNTAGFKTIF

SEQ ID NO: 189672 - protein, 14 aa, Homo sapiens
  CDR3 for beta chain variable domain of TCR clone 94836 (TRBV7-3, TRBJ2-2)
CASSSGGYTGELFF

SEQ ID NO: 189673 - protein, 14 aa, Homo sapiens
  CDR3 for alpha chain variable domain of TCR clone 94837 (TRAV13-1, TRAJ3)
CAAEGYSSASKIIF

SEQ ID NO: 189674 - protein, 14 aa, Homo sapiens
  CDR3 for beta chain variable domain of TCR clone 94837 (TRBV19, TRBJ2-5)
CASSSSRIQETQYF

SEQ ID NO: 189675 - protein, 13 aa, Homo sapiens
  CDR3 for alpha chain variable domain of TCR clone 94838 (TRAV13-1, TRAJ20)
CAARVSNNYKLSF

SEQ ID NO: 189676 - protein, 16 aa, Homo sapiens
  CDR3 for beta chain variable domain of TCR clone 94838 (TRBV11-1, TRBJ1-1)
CATNPRDRAFNTEAFF

SEQ ID NO: 189677 - protein, 14 aa, Homo sapiens
  CDR3 for alpha chain variable domain of TCR clone 94839 (TRAV12-1, TRAJ17)
CVVNYKAAGNKLTF

SEQ ID NO: 189678 - protein, 16 aa, Homo sapiens
  CDR3 for beta chain variable domain of TCR clone 94839 (TRBV12-4, TRBJ1-5)
CASSRPVVGSNQPQHF

SEQ ID NO: 189679 - protein, 10 aa, Homo sapiens
  CDR3 for alpha chain variable domain of TCR clone 94840 (TRAV12-3, TRAJ49)
CAMNDDQFYF

SEQ ID NO: 189680 - protein, 16 aa, Homo sapiens
  CDR3 for beta chain variable domain of TCR clone 94840 (TRBV12-4, TRBJ1-1)
CTSVPAVQGTGFEAFF

SEQ ID NO: 189681 - protein, 11 aa, Homo sapiens
  CDR3 for alpha chain variable domain of TCR clone 94841 (TRAV21, TRAJ41)
CAVRSGYALNF

SEQ ID NO: 189682 - protein, 13 aa, Homo sapiens
  CDR3 for beta chain variable domain of TCR clone 94841 (TRBV7-2, TRBJ2-5)
CASRQTSVETQYF

SEQ ID NO: 189683 - protein, 13 aa, Homo sapiens
  CDR3 for alpha chain variable domain of TCR clone 94842 (TRAV5, TRAJ30)
CAEIANRDDKIIF

SEQ ID NO: 189684 - protein, 14 aa, Homo sapiens
  CDR3 for beta chain variable domain of TCR clone 94842 (TRBV4-1, TRBJ2-2)
YASSQAVNTGELFF

SEQ ID NO: 189685 - protein, 14 aa, Homo sapiens
  CDR3 for alpha chain variable domain of TCR clone 94843 (TRAV12-2, TRAJ3)
CAVKGYNSASKIIF

SEQ ID NO: 189686 - protein, 14 aa, Homo sapiens
  CDR3 for beta chain variable domain of TCR clone 94843 (TRBV4-2, TRBJ2-1)
CASGLDRAYNEQFF

SEQ ID NO: 189687 - protein, 14 aa, Homo sapiens
  CDR3 for alpha chain variable domain of TCR clone 94844 (TRAV1-2, TRAJ8)
CAVREDTGFQKLVF

SEQ ID NO: 189688 - protein, 13 aa, Homo sapiens
  CDR3 for beta chain variable domain of TCR clone 94844 (TRBV27, TRBJ2-3)
CATSRGGLYTQYF

SEQ ID NO: 189689 - protein, 15 aa, Homo sapiens
  CDR3 for alpha chain variable domain of TCR clone 94845 (TRAV8-4, TRAJ3)
CAVTGENLVQQCFQD

SEQ ID NO: 189690 - protein, 18 aa, Homo sapiens
  CDR3 for beta chain variable domain of TCR clone 94845 (TRBV7-6, TRBJ1-3)
CASSSPIGGDSSGNTIYF

SEQ ID NO: 189691 - protein, 14 aa, Homo sapiens
  CDR3 for alpha chain variable domain of TCR clone 94846 (TRAV12-2, TRAJ13)
CAVKKTGGYQKVTF

SEQ ID NO: 189692 - protein, 15 aa, Homo sapiens
  CDR3 for beta chain variable domain of TCR clone 94846 (TRBV19, TRBJ2-1)
CASSSPGVPLDEQFF

SEQ ID NO: 189693 - protein, 11 aa, Homo sapiens
  CDR3 for alpha chain variable domain of TCR clone 94847 (TRAV12-3, TRAJ43)
CAMSVSNDMRF

SEQ ID NO: 189694 - protein, 14 aa, Homo sapiens
  CDR3 for beta chain variable domain of TCR clone 94847 (TRBV12-5, TRBJ2-5)
CASGSRTHRETQYF

SEQ ID NO: 189695 - protein, 11 aa, Homo sapiens
  CDR3 for alpha chain variable domain of TCR clone 94848 (TRAV3, TRAJ13)
CAVTSHQKVTF

SEQ ID NO: 189696 - protein, 15 aa, Homo sapiens
  CDR3 for beta chain variable domain of TCR clone 94848 (TRBV7-9, TRBJ2-7)
CASSSSGLAVYEQYF

SEQ ID NO: 189697 - protein, 16 aa, Homo sapiens
  CDR3 for alpha chain variable domain of TCR clone 94849 (TRAV30, TRAJ49)
SAAQRVGPNTGNQFYF

SEQ ID NO: 189698 - protein, 15 aa, Homo sapiens
  CDR3 for beta chain variable domain of TCR clone 94849 (TRBV2, TRBJ2-1)
CASSERAGSYNEQFF

SEQ ID NO: 189699 - protein, 16 aa, Homo sapiens
  CDR3 for alpha chain variable domain of TCR clone 94850 (TRAV12-1, TRAJ22)
CVVNSISSGSARQLTF

SEQ ID NO: 189700 - protein, 17 aa, Homo sapiens
  CDR3 for beta chain variable domain of TCR clone 94850 (TRBV11-2, TRBJ2-1)
CASSLYPPGVEYNEQFF

SEQ ID NO: 189701 - protein, 14 aa, Homo sapiens
  CDR3 for alpha chain variable domain of TCR clone 94851 (TRAV30, TRAJ39)
CGTEKVNAGNMLTF

SEQ ID NO: 189702 - protein, 14 aa, Homo sapiens
  CDR3 for beta chain variable domain of TCR clone 94851 (TRBV7-2, TRBJ2-7)
CASSPKTSFYEQYF

SEQ ID NO: 189703 - protein, 12 aa, Homo sapiens
  CDR3 for alpha chain variable domain of TCR clone 94852 (TRAV8-3, TRAJ41)
CAVALSGYALNF

SEQ ID NO: 189704 - protein, 16 aa, Homo sapiens
  CDR3 for beta chain variable domain of TCR clone 94852 (TRBV27, TRBJ2-7)
CASSSERGDSAYEQYF

SEQ ID NO: 189705 - protein, 16 aa, Homo sapiens
  CDR3 for alpha chain variable domain of TCR clone 94853 (TRAV13-1, TRAJ10)
CAASSHFTGGGNKLTF

SEQ ID NO: 189706 - protein, 14 aa, Homo sapiens
  CDR3 for beta chain variable domain of TCR clone 94853 (TRBV19, TRBJ2-1)
CASPTFVLSGEQFF

SEQ ID NO: 189707 - protein, 13 aa, Homo sapiens
  CDR3 for alpha chain variable domain of TCR clone 94854 (TRAV3, TRAJ8)
CAVRFTGFQKLVF

SEQ ID NO: 189708 - protein, 14 aa, Homo sapiens
  CDR3 for beta chain variable domain of TCR clone 94854 (TRBV19, TRBJ2-5)
CASSMTGQQETQYF

SEQ ID NO: 189709 - protein, 13 aa, Homo sapiens
  CDR3 for alpha chain variable domain of TCR clone 94855 (TRAV35, TRAJ58)
CAGLETSGARLTF

SEQ ID NO: 189710 - protein, 15 aa, Homo sapiens
  CDR3 for beta chain variable domain of TCR clone 94855 (TRBV20-1, TRBJ2-1)
CSARFSAGGLNEQFF

SEQ ID NO: 189711 - protein, 15 aa, Homo sapiens
  CDR3 for alpha chain variable domain of TCR clone 94856 (TRAV8-4, TRAJ42)
CAVSDDRGSQGNPIF

SEQ ID NO: 189712 - protein, 17 aa, Homo sapiens
  CDR3 for beta chain variable domain of TCR clone 94856 (TRBV11-2, TRBJ2-1)
CASSLYPPGVEYNEQFF

SEQ ID NO: 189713 - protein, 14 aa, Homo sapiens
  CDR3 for alpha chain variable domain of TCR clone 94857 (TRAV30, TRAJ33)
CGTVAPRSNYQLIW

SEQ ID NO: 189714 - protein, 14 aa, Homo sapiens
  CDR3 for beta chain variable domain of TCR clone 94857 (TRBV12-5, TRBJ2-5)
CASGSRTHQETQYF

SEQ ID NO: 189715 - protein, 17 aa, Homo sapiens
  CDR3 for alpha chain variable domain of TCR clone 94858 (TRAV26-1, TRAJ53)
CIVRVDDSGGSNYRLTF

SEQ ID NO: 189716 - protein, 19 aa, Homo sapiens
  CDR3 for beta chain variable domain of TCR clone 94858 (TRBV25-1, TRBJ2-2)
CAILVYRVDRGRKTGELFF

SEQ ID NO: 189717 - protein, 11 aa, Homo sapiens
  CDR3 for alpha chain variable domain of TCR clone 94859 (TRAV12-1, TRAJ43)
CVEYDNNDMRF

SEQ ID NO: 189718 - protein, 18 aa, Homo sapiens
  CDR3 for beta chain variable domain of TCR clone 94859 (TRBV7-9, TRBJ2-7)
CASSLTTSGSRTWYEQYF

SEQ ID NO: 189719 - protein, 11 aa, Homo sapiens
  CDR3 for alpha chain variable domain of TCR clone 94860 (TRAV2, TRAJ23)
CAVETRGKLIF

SEQ ID NO: 189720 - protein, 17 aa, Homo sapiens
  CDR3 for beta chain variable domain of TCR clone 94860 (TRBV20-1, TRBJ2-1)
RSASSSGLAGSYNEQFF

SEQ ID NO: 189721 - protein, 12 aa, Homo sapiens
  CDR3 for alpha chain variable domain of TCR clone 94861 (TRAV12-3, TRAJ17)
WSMTLTGNKLTF

SEQ ID NO: 189722 - protein, 15 aa, Homo sapiens
  CDR3 for beta chain variable domain of TCR clone 94861 (TRBV20-1, TRBJ2-7)
CSARDRVSGMDEQYF

SEQ ID NO: 189723 - protein, 13 aa, Homo sapiens
  CDR3 for alpha chain variable domain of TCR clone 94862 (TRAV2, TRAJ47)
CAVDREYGNKLVF

SEQ ID NO: 189724 - protein, 17 aa, Homo sapiens
  CDR3 for beta chain variable domain of TCR clone 94862 (TRBV15, TRBJ1-5)
CAASRVKGIYSNQPQHF

SEQ ID NO: 189725 - protein, 15 aa, Homo sapiens
  CDR3 for alpha chain variable domain of TCR clone 94863 (TRAV12-2, TRAJ53)
CAVNGGGGSNYKLTF

SEQ ID NO: 189726 - protein, 17 aa, Homo sapiens
  CDR3 for beta chain variable domain of TCR clone 94863 (TRBV7-3, TRBJ2-3)
CASSVMKRMRGADTQYF

SEQ ID NO: 189727 - protein, 13 aa, Homo sapiens
  CDR3 for alpha chain variable domain of TCR clone 94864 (TRAV20, TRAJ48)
CAVQGVGNEKLTF

SEQ ID NO: 189728 - protein, 14 aa, Homo sapiens
  CDR3 for beta chain variable domain of TCR clone 94864 (TRBV27, TRBJ2-7)
CVSSFRDGPYEQYF

SEQ ID NO: 189729 - protein, 12 aa, Homo sapiens
  CDR3 for alpha chain variable domain of TCR clone 94865 (TRAV12-3, TRAJ4)
CAMTGAGTRLAV

SEQ ID NO: 189730 - protein, 14 aa, Homo sapiens
  CDR3 for beta chain variable domain of TCR clone 94865 (TRBV10-3, TRBJ1-1)
FAISDTDMGVEAFF

SEQ ID NO: 189731 - protein, 15 aa, Homo sapiens
  CDR3 for alpha chain variable domain of TCR clone 94866 (TRAV25, TRAJ52)
CAGRPGGTSYGKLTF

SEQ ID NO: 189732 - protein, 14 aa, Homo sapiens
  CDR3 for beta chain variable domain of TCR clone 94866 (TRBV5-1, TRBJ1-6)
CASRPGTSNSPLHF

SEQ ID NO: 189733 - protein, 16 aa, Homo sapiens
  CDR3 for alpha chain variable domain of TCR clone 94867 (TRAV3, TRAJ10)
CAVRDMRAGGGNKLTF

SEQ ID NO: 189734 - protein, 15 aa, Homo sapiens
  CDR3 for beta chain variable domain of TCR clone 94867 (TRBV20-1, TRBJ2-1)
CSASSAGSSYNEQVF

SEQ ID NO: 189735 - protein, 13 aa, Homo sapiens
  CDR3 for alpha chain variable domain of TCR clone 94868 (TRAV25, TRAJ30)
CAGRVDRDDKIIF

SEQ ID NO: 189736 - protein, 17 aa, Homo sapiens
  CDR3 for beta chain variable domain of TCR clone 94868 (TRBV7-9, TRBJ2-6)
CASSFGAGYAGANVLTF

SEQ ID NO: 189737 - protein, 20 aa, Homo sapiens
  CDR3 for alpha chain variable domain of TCR clone 94869 (TRAV30, TRAJ54)
SAAQSRSETQVVRGAQKLVF

SEQ ID NO: 189738 - protein, 11 aa, Homo sapiens
  CDR3 for beta chain variable domain of TCR clone 94869 (TRBV25-1, TRBJ2-4)
CQSRDQNIQYF

SEQ ID NO: 189739 - protein, 12 aa, Homo sapiens
  CDR3 for alpha chain variable domain of TCR clone 94870 (TRAV30, TRAJ43)
CGTEERGNDMRF

SEQ ID NO: 189740 - protein, 14 aa, Homo sapiens
  CDR3 for beta chain variable domain of TCR clone 94870 (TRBV7-3, TRBJ1-2)
CASSPVGGTYGYTF

SEQ ID NO: 189741 - protein, 14 aa, Homo sapiens
  CDR3 for alpha chain variable domain of TCR clone 94871 (TRAV13-1, TRAJ9)
CAASALTGGFKTIF

SEQ ID NO: 189742 - protein, 12 aa, Homo sapiens
  CDR3 for beta chain variable domain of TCR clone 94871 (TRBV11-2, TRBJ2-2)
CASSLGGGELFF

SEQ ID NO: 189743 - protein, 15 aa, Homo sapiens
  CDR3 for alpha chain variable domain of TCR clone 94872 (TRAV13-2, TRAJ28)
CAENNAGAGSYQLTF

SEQ ID NO: 189744 - protein, 12 aa, Homo sapiens
  CDR3 for beta chain variable domain of TCR clone 94872 (TRBV7-8, TRBJ2-7)
CASSLGDREQYF

SEQ ID NO: 189745 - protein, 13 aa, Homo sapiens
  CDR3 for alpha chain variable domain of TCR clone 94873 (TRAV35, TRAJ57)
CWSPQGGSEKLVF

SEQ ID NO: 189746 - protein, 15 aa, Homo sapiens
  CDR3 for beta chain variable domain of TCR clone 94873 (TRBV27, TRBJ2-2)
CASSLEGPNTGELFF

SEQ ID NO: 189747 - protein, 16 aa, Homo sapiens
  CDR3 for alpha chain variable domain of TCR clone 94874 (TRAV21, TRAJ52)
CAVTNAGGTSYGKLTS

SEQ ID NO: 189748 - protein, 13 aa, Homo sapiens
  CDR3 for beta chain variable domain of TCR clone 94874 (TRBV20-1, TRBJ2-3)
CSARLAGTDTQYF

SEQ ID NO: 189749 - protein, 16 aa, Homo sapiens
  CDR3 for alpha chain variable domain of TCR clone 94875 (TRAV30, TRAJ24)
CGTEIVDADSWGKFQF

SEQ ID NO: 189750 - protein, 15 aa, Homo sapiens
  CDR3 for beta chain variable domain of TCR clone 94875 (TRBV18, TRBJ2-1)
CASLPDRGRDNEQFL

SEQ ID NO: 189751 - protein, 12 aa, Homo sapiens
  CDR3 for alpha chain variable domain of TCR clone 94876 (TRAV13-2, TRAJ58)
CAERRVDSRLTF

SEQ ID NO: 189752 - protein, 15 aa, Homo sapiens
  CDR3 for beta chain variable domain of TCR clone 94876 (TRBV5-1, TRBJ2-5)
CASSSGREMVETQYL

SEQ ID NO: 189753 - protein, 13 aa, Homo sapiens
  CDR3 for alpha chain variable domain of TCR clone 94877 (TRAV35, TRAJ44)
CAGLSGTASKLTF

SEQ ID NO: 189754 - protein, 14 aa, Homo sapiens
  CDR3 for beta chain variable domain of TCR clone 94877 (TRBV7-2, TRBJ2-7)
CASSPKTSFYEQYF

SEQ ID NO: 189755 - protein, 13 aa, Homo sapiens
  CDR3 for alpha chain variable domain of TCR clone 94878 (TRAV17, TRAJ5)
CAPMDTGRRALTF

SEQ ID NO: 189756 - protein, 15 aa, Homo sapiens
  CDR3 for beta chain variable domain of TCR clone 94878 (TRBV6-6, TRBJ2-5)
CASSPGGGLEENQYF

SEQ ID NO: 189757 - protein, 14 aa, Homo sapiens
  CDR3 for alpha chain variable domain of TCR clone 94879 (TRAV8-4, TRAJ9)
CAVRINTGGFKTIF

SEQ ID NO: 189758 - protein, 15 aa, Homo sapiens
  CDR3 for beta chain variable domain of TCR clone 94879 (TRBV10-2, TRBJ2-6)
CASNEQGTGANVLTF

SEQ ID NO: 189759 - protein, 15 aa, Homo sapiens
  CDR3 for alpha chain variable domain of TCR clone 94880 (TRAV20, TRAJ40)
CAVQRGTSGAYKYIF

SEQ ID NO: 189760 - protein, 19 aa, Homo sapiens
  CDR3 for beta chain variable domain of TCR clone 94880 (TRBV28, TRBJ2-7)
CASSYSGTSRLGWVYEQYF

SEQ ID NO: 189761 - protein, 18 aa, Homo sapiens
  CDR3 for alpha chain variable domain of TCR clone 94881 (TRAV21, TRAJ52)
CAARPSPAGGTSYGKLTS

SEQ ID NO: 189762 - protein, 17 aa, Homo sapiens
  CDR3 for beta chain variable domain of TCR clone 94881 (TRBV13, TRBJ2-3)
CASSLSRVAGGRNTQYF

SEQ ID NO: 189763 - protein, 13 aa, Homo sapiens
  CDR3 for alpha chain variable domain of TCR clone 94882 (TRAV36/DV7, TRAJ21)
CAVEAYNFNKFYF

SEQ ID NO: 189764 - protein, 13 aa, Homo sapiens
  CDR3 for beta chain variable domain of TCR clone 94882 (TRBV7-3, TRBJ2-5)
CASSFRGGETQYF

SEQ ID NO: 189765 - protein, 14 aa, Homo sapiens
  CDR3 for alpha chain variable domain of TCR clone 94883 (TRAV12-1, TRAJ17)
CAVNYKAAGNKLTF

SEQ ID NO: 189766 - protein, 15 aa, Homo sapiens
  CDR3 for beta chain variable domain of TCR clone 94883 (TRBV18, TRBJ2-7)
CASSPTFMDSYEQYF

SEQ ID NO: 189767 - protein, 13 aa, Homo sapiens
  CDR3 for alpha chain variable domain of TCR clone 94884 (TRAV26-1, TRAJ34)
CIVRPWITDKLIF

SEQ ID NO: 189768 - protein, 15 aa, Homo sapiens
  CDR3 for beta chain variable domain of TCR clone 94884 (TRBV7-6, TRBJ2-1)
CASSSLAGEGNEQFF

SEQ ID NO: 189769 - protein, 17 aa, Homo sapiens
  CDR3 for alpha chain variable domain of TCR clone 94885 (TRAV13-1, TRAJ28)
CAASPPYSGAGSYQLTF

SEQ ID NO: 189770 - protein, 14 aa, Homo sapiens
  CDR3 for beta chain variable domain of TCR clone 94885 (TRBV12-4, TRBJ1-2)
CASTHGTSNYGYTF

SEQ ID NO: 189771 - protein, 13 aa, Homo sapiens
  CDR3 for alpha chain variable domain of TCR clone 94886 (TRAV27, TRAJ57)
CRSAQGGSEKLVF

SEQ ID NO: 189772 - protein, 11 aa, Homo sapiens
  CDR3 for beta chain variable domain of TCR clone 94886 (TRBV11-2, TRBJ1-1)
CACSINTEAFF

SEQ ID NO: 189773 - protein, 14 aa, Homo sapiens
  CDR3 for alpha chain variable domain of TCR clone 94887 (TRAV17, TRAJ39)
CATDPVRAGNMLTF

SEQ ID NO: 189774 - protein, 14 aa, Homo sapiens
  CDR3 for beta chain variable domain of TCR clone 94887 (TRBV7-2, TRBJ1-2)
CASSQTGSTYGYTF

SEQ ID NO: 189775 - protein, 13 aa, Homo sapiens
  CDR3 for alpha chain variable domain of TCR clone 94888 (TRAV21, TRAJ20)
CAVGVFADYKLSF

SEQ ID NO: 189776 - protein, 13 aa, Homo sapiens
  CDR3 for beta chain variable domain of TCR clone 94888 (TRBV15, TRBJ1-6)
CATSGGLNSPLHF

SEQ ID NO: 189777 - protein, 13 aa, Homo sapiens
  CDR3 for alpha chain variable domain of TCR clone 94889 (TRAV38-1, TRAJ42)
CARWGGSQGHLIF

SEQ ID NO: 189778 - protein, 10 aa, Homo sapiens
  CDR3 for beta chain variable domain of TCR clone 94889 (TRBV2, TRBJ2-5)
CASSAATQYF

SEQ ID NO: 189779 - protein, 16 aa, Homo sapiens
  CDR3 for alpha chain variable domain of TCR clone 94890 (TRAV21, TRAJ33)
CAVSPASMDSNYQVIW

SEQ ID NO: 189780 - protein, 17 aa, Homo sapiens
  CDR3 for beta chain variable domain of TCR clone 94890 (TRBV2, TRBJ1-4)
CASSKRELTQGEEKLFF

SEQ ID NO: 189781 - protein, 17 aa, Homo sapiens
  CDR3 for alpha chain variable domain of TCR clone 94891 (TRAV3, TRAJ6)
CAVRDGPRAGGSYIPTF

SEQ ID NO: 189782 - protein, 15 aa, Homo sapiens
  CDR3 for beta chain variable domain of TCR clone 94891 (TRBV5-8, TRBJ2-7)
CASSYTGTGPREQYF

SEQ ID NO: 189783 - protein, 15 aa, Homo sapiens
  CDR3 for alpha chain variable domain of TCR clone 94892 (TRAV26-1, TRAJ44)
CIVRANTGTASKLTF

SEQ ID NO: 189784 - protein, 16 aa, Homo sapiens
  CDR3 for beta chain variable domain of TCR clone 94892 (TRBV7-7, TRBJ2-1)
CPSSLASGTSYNEQFF

SEQ ID NO: 189785 - protein, 13 aa, Homo sapiens
  CDR3 for alpha chain variable domain of TCR clone 94893 (TRAV36/DV7, TRAJ29)
CAVEPSGTTPLVF

SEQ ID NO: 189786 - protein, 11 aa, Homo sapiens
  CDR3 for beta chain variable domain of TCR clone 94893 (TRBV19, TRBJ2-7)
CASGNSYEQYF

SEQ ID NO: 189787 - protein, 15 aa, Homo sapiens
  CDR3 for alpha chain variable domain of TCR clone 94894 (TRAV23/DV6, TRAJ18)
CAARYRGPTLGRLYF

SEQ ID NO: 189788 - protein, 16 aa, Homo sapiens
  CDR3 for beta chain variable domain of TCR clone 94894 (TRBV20-1, TRBJ1-2)
CSASMGQGVANYGYTF

SEQ ID NO: 189789 - protein, 13 aa, Homo sapiens
  CDR3 for alpha chain variable domain of TCR clone 94895 (TRAV13-2, TRAJ48)
CAEMDFGNEKLNF

SEQ ID NO: 189790 - protein, 13 aa, Homo sapiens
  CDR3 for beta chain variable domain of TCR clone 94895 (TRBV7-9, TRBJ1-2)
CASSLKQNYGYTF

SEQ ID NO: 189791 - protein, 18 aa, Homo sapiens
  CDR3 for alpha chain variable domain of TCR clone 94896 (TRAV12-3, TRAJ52)
CSMSRTNAGGTSYGKLTF

SEQ ID NO: 189792 - protein, 17 aa, Homo sapiens
  CDR3 for beta chain variable domain of TCR clone 94896 (TRBV7-3, TRBJ2-3)
CASSIMKRMRGADTQYF

SEQ ID NO: 189793 - protein, 14 aa, Homo sapiens
  CDR3 for alpha chain variable domain of TCR clone 94897 (TRAV12-2, TRAJ24)
CAVTPADSWGKLQF

SEQ ID NO: 189794 - protein, 12 aa, Homo sapiens
  CDR3 for beta chain variable domain of TCR clone 94897 (TRBV7-8, TRBJ2-7)
CASSLGDREQYF

SEQ ID NO: 189795 - protein, 14 aa, Homo sapiens
  CDR3 for alpha chain variable domain of TCR clone 94898 (TRAV38-1, TRAJ45)
CASHSGGGADGLTF

SEQ ID NO: 189796 - protein, 16 aa, Homo sapiens
  CDR3 for beta chain variable domain of TCR clone 94898 (TRBV29-1, TRBJ1-2)
CSVEANRDIANYGYTF

SEQ ID NO: 189797 - protein, 11 aa, Homo sapiens
  CDR3 for alpha chain variable domain of TCR clone 94899 (TRAV36/DV7, TRAJ53)
RRGGSNYKLTF

SEQ ID NO: 189798 - protein, 15 aa, Homo sapiens
  CDR3 for beta chain variable domain of TCR clone 94899 (TRBV28, TRBJ2-5)
CASSSGRTIQETQYF

SEQ ID NO: 189799 - protein, 15 aa, Homo sapiens
  CDR3 for alpha chain variable domain of TCR clone 94900 (TRAV2, TRAJ9)
CAVEDRGTGGFKTIF

SEQ ID NO: 189800 - protein, 16 aa, Homo sapiens
  CDR3 for beta chain variable domain of TCR clone 94900 (TRBV24-1, TRBJ2-3)
CATSDPGTWATDTQYF

SEQ ID NO: 189801 - protein, 15 aa, Homo sapiens
  CDR3 for alpha chain variable domain of TCR clone 94901 (TRAV8-2, TRAJ40)
CVVLGTTSGTSKSIF

SEQ ID NO: 189802 - protein, 16 aa, Homo sapiens
  CDR3 for beta chain variable domain of TCR clone 94901 (TRBV7-3, TRBJ2-1)
CASSLEGYRSYNEQFF

SEQ ID NO: 189803 - protein, 14 aa, Homo sapiens
  CDR3 for alpha chain variable domain of TCR clone 94902 (TRAV12-2, TRAJ13)
CAVKKTGGYQKVTF

SEQ ID NO: 189804 - protein, 14 aa, Homo sapiens
  CDR3 for beta chain variable domain of TCR clone 94902 (TRBV25-1, TRBJ1-1)
CASTQLGGNTEAFF

SEQ ID NO: 189805 - protein, 14 aa, Homo sapiens
  CDR3 for alpha chain variable domain of TCR clone 94903 (TRAV12-2, TRAJ17)
CAVLFKAAGNKLTF

SEQ ID NO: 189806 - protein, 17 aa, Homo sapiens
  CDR3 for beta chain variable domain of TCR clone 94903 (TRBV11-2, TRBJ2-1)
CASSLYPPGVEYNEQFL

SEQ ID NO: 189807 - protein, 16 aa, Homo sapiens
  CDR3 for alpha chain variable domain of TCR clone 94904 (TRAV14/DV4, TRAJ53)
CAMREGGGGSNYKLTF

SEQ ID NO: 189808 - protein, 14 aa, Homo sapiens
  CDR3 for beta chain variable domain of TCR clone 94904 (TRBV19, TRBJ2-2)
CASSTLHRSGELFF

SEQ ID NO: 189809 - protein, 12 aa, Homo sapiens
  CDR3 for alpha chain variable domain of TCR clone 94905 (TRAV12-1, TRAJ40)
CVVYSGTYKYIF

SEQ ID NO: 189810 - protein, 18 aa, Homo sapiens
  CDR3 for beta chain variable domain of TCR clone 94905 (TRBV7-6, TRBJ2-1)
GHVSLRQQLGGGADEQFF

SEQ ID NO: 189811 - protein, 15 aa, Homo sapiens
  CDR3 for alpha chain variable domain of TCR clone 94906 (TRAV3, TRAJ17)
CAVRDTGAAGNKLTF

SEQ ID NO: 189812 - protein, 14 aa, Homo sapiens
  CDR3 for beta chain variable domain of TCR clone 94906 (TRBV6-3, TRBJ1-1)
CASSNLLPGAEDFF

SEQ ID NO: 189813 - protein, 15 aa, Homo sapiens
  CDR3 for alpha chain variable domain of TCR clone 94907 (TRAV8-3, TRAJ11)
CAVGLLNSGYSTLTF

SEQ ID NO: 189814 - protein, 16 aa, Homo sapiens
  CDR3 for beta chain variable domain of TCR clone 94907 (TRBV7-9, TRBJ1-2)
CASSLGFTSGEDGYTF

SEQ ID NO: 189815 - protein, 13 aa, Homo sapiens
  CDR3 for alpha chain variable domain of TCR clone 94908 (TRAV14/DV4, TRAJ4)
CAMKAGGYNKLIF

SEQ ID NO: 189816 - protein, 13 aa, Homo sapiens
  CDR3 for beta chain variable domain of TCR clone 94908 (TRBV7-2, TRBJ1-1)
CASNLKGAKVAFF

SEQ ID NO: 189817 - protein, 12 aa, Homo sapiens
  CDR3 for alpha chain variable domain of TCR clone 94909 (TRAV13-1, TRAJ27)
CAAHTNAGKSTF

SEQ ID NO: 189818 - protein, 14 aa, Homo sapiens
  CDR3 for beta chain variable domain of TCR clone 94909 (TRBV19, TRBJ2-2)
CASSGQGITGELFF

SEQ ID NO: 189819 - protein, 17 aa, Homo sapiens
  CDR3 for alpha chain variable domain of TCR clone 94910 (TRAV8-1, TRAJ42)
CAVKWGNYGGSQGNPIF

SEQ ID NO: 189820 - protein, 15 aa, Homo sapiens
  CDR3 for beta chain variable domain of TCR clone 94910 (TRBV9, TRBJ1-6)
CASSVAGTGDSPLHF

SEQ ID NO: 189821 - protein, 13 aa, Homo sapiens
  CDR3 for alpha chain variable domain of TCR clone 94911 (TRAV3, TRAJ27)
CAVRPLGAGKSTF

SEQ ID NO: 189822 - protein, 12 aa, Homo sapiens
  CDR3 for beta chain variable domain of TCR clone 94911 (TRBV7-9, TRBJ2-7)
CATRTEAYEQYF

SEQ ID NO: 189823 - protein, 14 aa, Homo sapiens
  CDR3 for alpha chain variable domain of TCR clone 94912 (TRAV8-3, TRAJ4)
CAVGAPGGYNKLIF

SEQ ID NO: 189824 - protein, 13 aa, Homo sapiens
  CDR3 for beta chain variable domain of TCR clone 94912 (TRBV18, TRBJ2-5)
CASSLQGQETQYF

SEQ ID NO: 189825 - protein, 17 aa, Homo sapiens
  CDR3 for alpha chain variable domain of TCR clone 94913 (TRAV3, TRAJ12)
CAVRDGGRMDSSYKLIF

SEQ ID NO: 189826 - protein, 14 aa, Homo sapiens
  CDR3 for beta chain variable domain of TCR clone 94913 (TRBV7-9, TRBJ1-4)
CAITEGEANEKLFF

SEQ ID NO: 189827 - protein, 15 aa, Homo sapiens
  CDR3 for alpha chain variable domain of TCR clone 94914 (TRAV12-3, TRAJ6)
CAMSATTGGSYIPTF

SEQ ID NO: 189828 - protein, 12 aa, Homo sapiens
  CDR3 for beta chain variable domain of TCR clone 94914 (TRBV11-2, TRBJ2-2)
CASSRGGGELFF

SEQ ID NO: 189829 - protein, 12 aa, Homo sapiens
  CDR3 for alpha chain variable domain of TCR clone 94915 (TRAV1-2, TRAJ33)
CAALDSNYQLIW

SEQ ID NO: 189830 - protein, 13 aa, Homo sapiens
  CDR3 for beta chain variable domain of TCR clone 94915 (TRBV7-9, TRBJ2-7)
CASSFAGAYEQYF

SEQ ID NO: 189831 - protein, 15 aa, Homo sapiens
  CDR3 for alpha chain variable domain of TCR clone 94916 (TRAV29/DV5, TRAJ24)
CAASEATDSWGKFQV

SEQ ID NO: 189832 - protein, 12 aa, Homo sapiens
  CDR3 for beta chain variable domain of TCR clone 94916 (TRBV11-2, TRBJ2-2)
CASSLPTGELFF

SEQ ID NO: 189833 - protein, 14 aa, Homo sapiens
  CDR3 for alpha chain variable domain of TCR clone 94917 (TRAV12-1, TRAJ17)
CVVNYKAAGNKLTF

SEQ ID NO: 189834 - protein, 14 aa, Homo sapiens
  CDR3 for beta chain variable domain of TCR clone 94917 (TRBV7-2, TRBJ2-7)
CASSLRWEVNEQYF

SEQ ID NO: 189835 - protein, 14 aa, Homo sapiens
  CDR3 for alpha chain variable domain of TCR clone 94918 (TRAV8-1, TRAJ5)
CAVRTDKGRRALTF

SEQ ID NO: 189836 - protein, 14 aa, Homo sapiens
  CDR3 for beta chain variable domain of TCR clone 94918 (TRBV7-8, TRBJ2-3)
CASSFPDGQDTQYF

SEQ ID NO: 189837 - protein, 13 aa, Homo sapiens
  CDR3 for alpha chain variable domain of TCR clone 94919 (TRAV26-1, TRAJ34)
CIVRPWITGKLIL

SEQ ID NO: 189838 - protein, 13 aa, Homo sapiens
  CDR3 for beta chain variable domain of TCR clone 94919 (TRBV5-1, TRBJ2-1)
CASSLGSYNEQFF

SEQ ID NO: 189839 - protein, 14 aa, Homo sapiens
  CDR3 for alpha chain variable domain of TCR clone 94920 (TRAV35, TRAJ42)
CAGPKGGSQGNLIF

SEQ ID NO: 189840 - protein, 11 aa, Homo sapiens
  CDR3 for beta chain variable domain of TCR clone 94920 (TRBV12-4, TRBJ2-3)
CASTATDTQYF

SEQ ID NO: 189841 - protein, 11 aa, Homo sapiens
  CDR3 for alpha chain variable domain of TCR clone 94921 (TRAV12-2, TRAJ29)
CAVTLRSPLVF

SEQ ID NO: 189842 - protein, 16 aa, Homo sapiens
  CDR3 for beta chain variable domain of TCR clone 94921 (TRBV19, TRBJ1-5)
CASSIARGGPRQPQHF

SEQ ID NO: 189843 - protein, 12 aa, Homo sapiens
  CDR3 for alpha chain variable domain of TCR clone 94922 (TRAV12-3, TRAJ17)
CAMTLTGNKLTF

SEQ ID NO: 189844 - protein, 14 aa, Homo sapiens
  CDR3 for beta chain variable domain of TCR clone 94922 (TRBV15, TRBJ2-5)
CATSIGGLGETQYF

SEQ ID NO: 189845 - protein, 14 aa, Homo sapiens
  CDR3 for alpha chain variable domain of TCR clone 94923 (TRAV13-1, TRAJ40)
CAARSTSGTYKYIF

SEQ ID NO: 189846 - protein, 13 aa, Homo sapiens
  CDR3 for beta chain variable domain of TCR clone 94923 (TRBV7-9, TRBJ1-2)
CASSLKQNYGYTF

SEQ ID NO: 189847 - protein, 13 aa, Homo sapiens
  CDR3 for alpha chain variable domain of TCR clone 94924 (TRAV36/DV7, TRAJ57)
CAVVLGGSEKLVF

SEQ ID NO: 189848 - protein, 14 aa, Homo sapiens
  CDR3 for beta chain variable domain of TCR clone 94924 (TRBV4-1, TRBJ1-2)
CASSQEGQVRGYTF

SEQ ID NO: 189849 - protein, 11 aa, Homo sapiens
  CDR3 for alpha chain variable domain of TCR clone 94925 (TRAV17, TRAJ9)
CGFTGGFKTIF

SEQ ID NO: 189850 - protein, 15 aa, Homo sapiens
  CDR3 for beta chain variable domain of TCR clone 94925 (TRBV7-2, TRBJ2-2)
CASRRPGQNTGELFF

SEQ ID NO: 189851 - protein, 12 aa, Homo sapiens
  CDR3 for alpha chain variable domain of TCR clone 94926 (TRAV27, TRAJ13)
CAGVRCYQKVTF

SEQ ID NO: 189852 - protein, 16 aa, Homo sapiens
  CDR3 for beta chain variable domain of TCR clone 94926 (TRBV28, TRBJ2-1)
CASSSSYSGSLNEQFF

SEQ ID NO: 189853 - protein, 15 aa, Homo sapiens
  CDR3 for alpha chain variable domain of TCR clone 94927 (TRAV3, TRAJ11)
CAVRDRGSGYSTLTF

SEQ ID NO: 189854 - protein, 15 aa, Homo sapiens
  CDR3 for beta chain variable domain of TCR clone 94927 (TRBV10-2, TRBJ2-6)
CASSEQGTGANVLTF

SEQ ID NO: 189855 - protein, 18 aa, Homo sapiens
  CDR3 for alpha chain variable domain of TCR clone 94928 (TRAV13-1, TRAJ52)
CAASKRSAGGTSYGKLTF

SEQ ID NO: 189856 - protein, 13 aa, Homo sapiens
  CDR3 for beta chain variable domain of TCR clone 94928 (TRBV4-3, TRBJ2-3)
CASSQGYTDTQYF

SEQ ID NO: 189857 - protein, 15 aa, Homo sapiens
  CDR3 for alpha chain variable domain of TCR clone 94929 (TRAV8-1, TRAJ6)
CAVNAGAGGSYIPTF

SEQ ID NO: 189858 - protein, 14 aa, Homo sapiens
  CDR3 for beta chain variable domain of TCR clone 94929 (TRBV25-1, TRBJ1-6)
CASSLSADTSPLHF

SEQ ID NO: 189859 - protein, 14 aa, Homo sapiens
  CDR3 for alpha chain variable domain of TCR clone 94930 (TRAV1-1, TRAJ27)
CAVIYNTNAGKSTF

SEQ ID NO: 189860 - protein, 14 aa, Homo sapiens
  CDR3 for beta chain variable domain of TCR clone 94930 (TRBV25-1, TRBJ1-1)
CASTHLGGNIEAFF

SEQ ID NO: 189861 - protein, 14 aa, Homo sapiens
  CDR3 for alpha chain variable domain of TCR clone 94931 (TRAV1-2, TRAJ8)
CAVREDTGFQKLVF

SEQ ID NO: 189862 - protein, 16 aa, Homo sapiens
  CDR3 for beta chain variable domain of TCR clone 94931 (TRBV18, TRBJ1-5)
CASSPRTGGGNQPQHF

SEQ ID NO: 189863 - protein, 14 aa, Homo sapiens
  CDR3 for alpha chain variable domain of TCR clone 94932 (TRAV2, TRAJ16)
CAVERGPDGQKLLF

SEQ ID NO: 189864 - protein, 12 aa, Homo sapiens
  CDR3 for beta chain variable domain of TCR clone 94932 (TRBV6-5, TRBJ2-7)
CASYIYGYEQYF

SEQ ID NO: 189865 - protein, 13 aa, Homo sapiens
  CDR3 for alpha chain variable domain of TCR clone 94933 (TRAV13-1, TRAJ5)
CAAEHTGRRALTF

SEQ ID NO: 189866 - protein, 18 aa, Homo sapiens
  CDR3 for beta chain variable domain of TCR clone 94933 (TRBV7-9, TRBJ2-7)
CASSLTTSGSRTWYEQYF

SEQ ID NO: 189867 - protein, 12 aa, Homo sapiens
  CDR3 for alpha chain variable domain of TCR clone 94934 (TRAV29/DV5, TRAJ49)
CAATDTGNQFYF

SEQ ID NO: 189868 - protein, 12 aa, Homo sapiens
  CDR3 for beta chain variable domain of TCR clone 94934 (TRBV12-4, TRBJ2-7)
CASSLGGYEQYV

SEQ ID NO: 189869 - protein, 17 aa, Homo sapiens
  CDR3 for alpha chain variable domain of TCR clone 94935 (TRAV26-1, TRAJ53)
CIVRVDDSGGSNYKLTF

SEQ ID NO: 189870 - protein, 15 aa, Homo sapiens
  CDR3 for beta chain variable domain of TCR clone 94935 (TRBV20-1, TRBJ2-7)
CSARVPAAYYYEQYF

SEQ ID NO: 189871 - protein, 14 aa, Homo sapiens
  CDR3 for alpha chain variable domain of TCR clone 94936 (TRAV30, TRAJ43)
CGTDGRYNNNDMRF

SEQ ID NO: 189872 - protein, 14 aa, Homo sapiens
  CDR3 for beta chain variable domain of TCR clone 94936 (TRBV19, TRBJ1-5)
CASSKMTGPQPQHF

SEQ ID NO: 189873 - protein, 17 aa, Homo sapiens
  CDR3 for alpha chain variable domain of TCR clone 94937 (TRAV3, TRAJ6)
CAVRDGPRAGGSYIPTF

SEQ ID NO: 189874 - protein, 13 aa, Homo sapiens
  CDR3 for beta chain variable domain of TCR clone 94937 (TRBV7-3, TRBJ2-1)
CASSLDSYNEQFF

SEQ ID NO: 189875 - protein, 12 aa, Homo sapiens
  CDR3 for alpha chain variable domain of TCR clone 94938 (TRAV17, TRAJ20)
CATQANDYKLSL

SEQ ID NO: 189876 - protein, 12 aa, Homo sapiens
  CDR3 for beta chain variable domain of TCR clone 94938 (TRBV6-1, TRBJ1-1)
CASNSPTAEAFF

SEQ ID NO: 189877 - protein, 14 aa, Homo sapiens
  CDR3 for alpha chain variable domain of TCR clone 94939 (TRAV12-3, TRAJ9)
CAMSPNTGGFKTIF

SEQ ID NO: 189878 - protein, 15 aa, Homo sapiens
  CDR3 for beta chain variable domain of TCR clone 94939 (TRBV20-1, TRBJ1-1)
CSASRGVTGNTEAFF

SEQ ID NO: 189879 - protein, 14 aa, Homo sapiens
  CDR3 for alpha chain variable domain of TCR clone 94940 (TRAV12-1, TRAJ30)
CVVSIGGRDGKIIF

SEQ ID NO: 189880 - protein, 14 aa, Homo sapiens
  CDR3 for beta chain variable domain of TCR clone 94940 (TRBV7-6, TRBJ2-3)
CASSLGTVTDTQYF

SEQ ID NO: 189881 - protein, 15 aa, Homo sapiens
  CDR3 for alpha chain variable domain of TCR clone 94941 (TRAV3, TRAJ30)
CAVRDRVERGDKIIF

SEQ ID NO: 189882 - protein, 13 aa, Homo sapiens
  CDR3 for beta chain variable domain of TCR clone 94941 (TRBV29-1, TRBJ2-5)
CSACASRRETQYF

SEQ ID NO: 189883 - protein, 14 aa, Homo sapiens
  CDR3 for alpha chain variable domain of TCR clone 94942 (TRAV12-2, TRAJ40)
CAVKIPSGTYKYIF

SEQ ID NO: 189884 - protein, 15 aa, Homo sapiens
  CDR3 for beta chain variable domain of TCR clone 94942 (TRBV20-1, TRBJ1-4)
CSARREWGVNDKLFF

SEQ ID NO: 189885 - protein, 14 aa, Homo sapiens
  CDR3 for alpha chain variable domain of TCR clone 94943 (TRAV23/DV6, TRAJ27)
CAASRDTNAGKSTF

SEQ ID NO: 189886 - protein, 13 aa, Homo sapiens
  CDR3 for beta chain variable domain of TCR clone 94943 (TRBV20-1, TRBJ1-5)
CSASGRGNQHQHF

SEQ ID NO: 189887 - protein, 11 aa, Homo sapiens
  CDR3 for alpha chain variable domain of TCR clone 94944 (TRAV2, TRAJ13)
CASGGYQKVTF

SEQ ID NO: 189888 - protein, 18 aa, Homo sapiens
  CDR3 for beta chain variable domain of TCR clone 94944 (TRBV4-3, TRBJ2-6)
CASSQDIQGGPGANVLTF

SEQ ID NO: 189889 - protein, 13 aa, Homo sapiens
  CDR3 for alpha chain variable domain of TCR clone 94945 (TRAV21, TRAJ40)
CAVRPSRAYKYIF

SEQ ID NO: 189890 - protein, 11 aa, Homo sapiens
  CDR3 for beta chain variable domain of TCR clone 94945 (TRBV19, TRBJ1-1)
CASSIGSEAFF

SEQ ID NO: 189891 - protein, 17 aa, Homo sapiens
  CDR3 for alpha chain variable domain of TCR clone 94946 (TRAV3, TRAJ6)
CAVRDGPMAGGSYIPTL

SEQ ID NO: 189892 - protein, 14 aa, Homo sapiens
  CDR3 for beta chain variable domain of TCR clone 94946 (TRBV7-2, TRBJ2-7)
CASSPKTSFYEQYF

SEQ ID NO: 189893 - protein, 12 aa, Homo sapiens
  CDR3 for alpha chain variable domain of TCR clone 94947 (TRAV12-2, TRAJ36)
CAVPRGANNLFF

SEQ ID NO: 189894 - protein, 15 aa, Homo sapiens
  CDR3 for beta chain variable domain of TCR clone 94947 (TRBV11-2, TRBJ1-3)
CASSLDGTVGNTIYF

SEQ ID NO: 189895 - protein, 20 aa, Homo sapiens
  CDR3 for alpha chain variable domain of TCR clone 94948 (TRAV29/DV5, TRAJ48)
CSVLLCSTQNTLFGNEKLTF

SEQ ID NO: 189896 - protein, 15 aa, Homo sapiens
  CDR3 for beta chain variable domain of TCR clone 94948 (TRBV28, TRBJ2-7)
CASSPGGRGFYEQYF

SEQ ID NO: 189897 - protein, 17 aa, Homo sapiens
  CDR3 for alpha chain variable domain of TCR clone 94949 (TRAV3, TRAJ38)
CAVRDCLNAGNNRKLIW

SEQ ID NO: 189898 - protein, 14 aa, Homo sapiens
  CDR3 for beta chain variable domain of TCR clone 94949 (TRBV23-1, TRBJ2-5)
CASSFLRSQETQYF

SEQ ID NO: 189899 - protein, 14 aa, Homo sapiens
  CDR3 for alpha chain variable domain of TCR clone 94950 (TRAV38-1, TRAJ35)
CAFLTIGFGNVLHC

SEQ ID NO: 189900 - protein, 17 aa, Homo sapiens
  CDR3 for beta chain variable domain of TCR clone 94950 (TRBV28, TRBJ1-1)
CTSSGDLRTESNTEAFF

SEQ ID NO: 189901 - protein, 17 aa, Homo sapiens
  CDR3 for alpha chain variable domain of TCR clone 94951 (TRAV3, TRAJ38)
CAVRDCLNAGNNRKMIW

SEQ ID NO: 189902 - protein, 13 aa, Homo sapiens
  CDR3 for beta chain variable domain of TCR clone 94951 (TRBV23-1, TRBJ1-4)
CASRGKFNEKLFF

SEQ ID NO: 189903 - protein, 15 aa, Homo sapiens
  CDR3 for alpha chain variable domain of TCR clone 94952 (TRAV21, TRAJ52)
CAVRGGGTSYGKLTF

SEQ ID NO: 189904 - protein, 15 aa, Homo sapiens
  CDR3 for beta chain variable domain of TCR clone 94952 (TRBV18, TRBJ1-5)
CASSPSDRSSQPQHF

SEQ ID NO: 189905 - protein, 15 aa, Homo sapiens
  CDR3 for alpha chain variable domain of TCR clone 94953 (TRAV26-1, TRAJ44)
CIARVPFGPASKLTF

SEQ ID NO: 189906 - protein, 12 aa, Homo sapiens
  CDR3 for beta chain variable domain of TCR clone 94953 (TRBV11-2, TRBJ2-2)
CASSLGGGELFF

SEQ ID NO: 189907 - protein, 14 aa, Homo sapiens
  CDR3 for alpha chain variable domain of TCR clone 94954 (TRAV35, TRAJ13)
CAGSPSGGYQKGTF

SEQ ID NO: 189908 - protein, 13 aa, Homo sapiens
  CDR3 for beta chain variable domain of TCR clone 94954 (TRBV29-1, TRBJ1-1)
CSVGDSRNTEAFF

SEQ ID NO: 189909 - protein, 13 aa, Homo sapiens
  CDR3 for alpha chain variable domain of TCR clone 94955 (TRAV39, TRAJ48)
CAAVNSGNEKLTF

SEQ ID NO: 189910 - protein, 12 aa, Homo sapiens
  CDR3 for beta chain variable domain of TCR clone 94955 (TRBV5-5, TRBJ2-5)
CASSYFGETQYF

SEQ ID NO: 189911 - protein, 11 aa, Homo sapiens
  CDR3 for alpha chain variable domain of TCR clone 94956 (TRAV2, TRAJ13)
CASGGYPKVTF

SEQ ID NO: 189912 - protein, 16 aa, Homo sapiens
  CDR3 for beta chain variable domain of TCR clone 94956 (TRBV19, TRBJ2-1)
CASSMGGGSSYNEQFF

SEQ ID NO: 189913 - protein, 15 aa, Homo sapiens
  CDR3 for alpha chain variable domain of TCR clone 94957 (TRAV26-1, TRAJ44)
CIVRANTGTASKLTF

SEQ ID NO: 189914 - protein, 16 aa, Homo sapiens
  CDR3 for beta chain variable domain of TCR clone 94957 (TRBV7-7, TRBJ2-1)
CASSLASGTSYNESSS

SEQ ID NO: 189915 - protein, 17 aa, Homo sapiens
  CDR3 for alpha chain variable domain of TCR clone 94958 (TRAV3, TRAJ38)
CAVRDCLNAGNNRKLIW

SEQ ID NO: 189916 - protein, 16 aa, Homo sapiens
  CDR3 for beta chain variable domain of TCR clone 94958 (TRBV12-4, TRBJ2-5)
CASSWRPSGDLETQYF

SEQ ID NO: 189917 - protein, 13 aa, Homo sapiens
  CDR3 for alpha chain variable domain of TCR clone 94959 (TRAV25, TRAJ10)
CAGRTGGGNNLTF

SEQ ID NO: 189918 - protein, 15 aa, Homo sapiens
  CDR3 for beta chain variable domain of TCR clone 94959 (TRBV19, TRBJ2-1)
CASSSPGVPLDEQFF

SEQ ID NO: 189919 - protein, 11 aa, Homo sapiens
  CDR3 for alpha chain variable domain of TCR clone 94960 (TRAV12-1, TRAJ34)
RVVNKGRELIF

SEQ ID NO: 189920 - protein, 12 aa, Homo sapiens
  CDR3 for beta chain variable domain of TCR clone 94960 (TRBV2, TRBJ2-1)
CAYGPPGNEQFF

SEQ ID NO: 189921 - protein, 11 aa, Homo sapiens
  CDR3 for alpha chain variable domain of TCR clone 94961 (TRAV21, TRAJ31)
CAVRNNARLMF

SEQ ID NO: 189922 - protein, 16 aa, Homo sapiens
  CDR3 for beta chain variable domain of TCR clone 94961 (TRBV15, TRBJ1-2)
CATSRGPRTGGGGYTF

SEQ ID NO: 189923 - protein, 14 aa, Homo sapiens
  CDR3 for alpha chain variable domain of TCR clone 94962 (TRAV17, TRAJ31)
CATVPLSGNARLMF

SEQ ID NO: 189924 - protein, 15 aa, Homo sapiens
  CDR3 for beta chain variable domain of TCR clone 94962 (TRBV15, TRBJ2-2)
CATSGTGGRVGELFF

SEQ ID NO: 189925 - protein, 12 aa, Homo sapiens
  CDR3 for alpha chain variable domain of TCR clone 94963 (TRAV3, TRAJ20)
CAVRDGDYKLSF

SEQ ID NO: 189926 - protein, 15 aa, Homo sapiens
  CDR3 for beta chain variable domain of TCR clone 94963 (TRBV5-1, TRBJ1-6)
CAGSLESRYNSPLHF

SEQ ID NO: 189927 - protein, 15 aa, Homo sapiens
  CDR3 for alpha chain variable domain of TCR clone 94964 (TRAV8-6, TRAJ9)
CAVSNRDTGGFKTIF

SEQ ID NO: 189928 - protein, 16 aa, Homo sapiens
  CDR3 for beta chain variable domain of TCR clone 94964 (TRBV19, TRBJ2-3)
CASSPEWDRGTDTQYF

SEQ ID NO: 189929 - protein, 14 aa, Homo sapiens
  CDR3 for alpha chain variable domain of TCR clone 94965 (TRAV17, TRAJ45)
CATDARGGADELTF

SEQ ID NO: 189930 - protein, 11 aa, Homo sapiens
  CDR3 for beta chain variable domain of TCR clone 94965 (TRBV28, TRBJ2-5)
CATGNQETQYF

SEQ ID NO: 189931 - protein, 12 aa, Homo sapiens
  CDR3 for alpha chain variable domain of TCR clone 94966 (TRAV16, TRAJ10)
CSRTGGGNKLTV

SEQ ID NO: 189932 - protein, 13 aa, Homo sapiens
  CDR3 for beta chain variable domain of TCR clone 94966 (TRBV29-1, TRBJ1-1)
CSVGDSRNTEAFF

SEQ ID NO: 189933 - protein, 11 aa, Homo sapiens
  CDR3 for alpha chain variable domain of TCR clone 94967 (TRAV2, TRAJ33)
CAVDSNYQLIW

SEQ ID NO: 189934 - protein, 15 aa, Homo sapiens
  CDR3 for beta chain variable domain of TCR clone 94967 (TRBV11-2, TRBJ2-1)
CASSLGTSGLNEQFF

SEQ ID NO: 189935 - protein, 12 aa, Homo sapiens
  CDR3 for alpha chain variable domain of TCR clone 94968 (TRAV12-3, TRAJ17)
CAMTLTGNKPTF

SEQ ID NO: 189936 - protein, 15 aa, Homo sapiens
  CDR3 for beta chain variable domain of TCR clone 94968 (TRBV11-2, TRBJ2-2)
CASSSDRVNAGELFF

SEQ ID NO: 189937 - protein, 17 aa, Homo sapiens
  CDR3 for alpha chain variable domain of TCR clone 94969 (TRAV26-1, TRAJ22)
CIVRVPSHSGSARQLTF

SEQ ID NO: 189938 - protein, 16 aa, Homo sapiens
  CDR3 for beta chain variable domain of TCR clone 94969 (TRBV28, TRBJ2-1)
CASRRSGGVVGNEQFF

SEQ ID NO: 189939 - protein, 14 aa, Homo sapiens
  CDR3 for alpha chain variable domain of TCR clone 94970 (TRAV3, TRAJ21)
CAVRDAYNSNKFYF

SEQ ID NO: 189940 - protein, 17 aa, Homo sapiens
  CDR3 for beta chain variable domain of TCR clone 94970 (TRBV20-1, TRBJ1-6)
CSARGGYTFSYNSPLHF

SEQ ID NO: 189941 - protein, 12 aa, Homo sapiens
  CDR3 for alpha chain variable domain of TCR clone 94971 (TRAV9-2, TRAJ36)
CALKKGANNLFF

SEQ ID NO: 189942 - protein, 17 aa, Homo sapiens
  CDR3 for beta chain variable domain of TCR clone 94971 (TRBV20-1, TRBJ2-1)
CSARDPLAGVWDNEQFF

SEQ ID NO: 189943 - protein, 16 aa, Homo sapiens
  CDR3 for alpha chain variable domain of TCR clone 94972 (TRAV12-3, TRAJ53)
CAMSPGSGGSNYKLTF

SEQ ID NO: 189944 - protein, 11 aa, Homo sapiens
  CDR3 for beta chain variable domain of TCR clone 94972 (TRBV7-9, TRBJ2-3)
CASSYTDTQYF

SEQ ID NO: 189945 - protein, 12 aa, Homo sapiens
  CDR3 for alpha chain variable domain of TCR clone 94973 (TRAV13-2, TRAJ23)
CAERHRGGKLIF

SEQ ID NO: 189946 - protein, 16 aa, Homo sapiens
  CDR3 for beta chain variable domain of TCR clone 94973 (TRBV7-2, TRBJ2-6)
CAILSGVSSGANVLTC

SEQ ID NO: 189947 - protein, 13 aa, Homo sapiens
  CDR3 for alpha chain variable domain of TCR clone 94974 (TRAV1-2, TRAJ9)
CAALNTVGFKTIF

SEQ ID NO: 189948 - protein, 14 aa, Homo sapiens
  CDR3 for beta chain variable domain of TCR clone 94974 (TRBV19, TRBJ1-4)
CASSMGRHNEKLFF

SEQ ID NO: 189949 - protein, 13 aa, Homo sapiens
  CDR3 for alpha chain variable domain of TCR clone 94975 (TRAV13-1, TRAJ6)
CAASKGGSYVPTF

SEQ ID NO: 189950 - protein, 14 aa, Homo sapiens
  CDR3 for beta chain variable domain of TCR clone 94975 (TRBV7-2, TRBJ2-1)
CASSLGVGYNEQFF

SEQ ID NO: 189951 - protein, 14 aa, Homo sapiens
  CDR3 for alpha chain variable domain of TCR clone 94976 (TRAV9-2, TRAJ39)
CALYIYNAGNMLTF

SEQ ID NO: 189952 - protein, 16 aa, Homo sapiens
  CDR3 for beta chain variable domain of TCR clone 94976 (TRBV13, TRBJ2-2)
CASSPRTGEHTGELLF

SEQ ID NO: 189953 - protein, 15 aa, Homo sapiens
  CDR3 for alpha chain variable domain of TCR clone 94977 (TRAV25, TRAJ52)
CAGRPGGTSYGKLTF

SEQ ID NO: 189954 - protein, 15 aa, Homo sapiens
  CDR3 for beta chain variable domain of TCR clone 94977 (TRBV25-1, TRBJ1-4)
CASSPGDSTNEKLFF

SEQ ID NO: 189955 - protein, 10 aa, Homo sapiens
  CDR3 for alpha chain variable domain of TCR clone 94978 (TRAV21, TRAJ43)
CAVRIRDMRF

SEQ ID NO: 189956 - protein, 13 aa, Homo sapiens
  CDR3 for beta chain variable domain of TCR clone 94978 (TRBV20-1, TRBJ2-7)
CSAPGLADYEQYF

SEQ ID NO: 189957 - protein, 13 aa, Homo sapiens
  CDR3 for alpha chain variable domain of TCR clone 94979 (TRAV12-2, TRAJ20)
CAVYPSNDYKLSF

SEQ ID NO: 189958 - protein, 15 aa, Homo sapiens
  CDR3 for beta chain variable domain of TCR clone 94979 (TRBV4-1, TRBJ1-4)
CASSDTGGTNEKLFF

SEQ ID NO: 189959 - protein, 12 aa, Homo sapiens
  CDR3 for alpha chain variable domain of TCR clone 94980 (TRAV1-1, TRAJ8)
CAGGTGFQKLVF

SEQ ID NO: 189960 - protein, 15 aa, Homo sapiens
  CDR3 for beta chain variable domain of TCR clone 94980 (TRBV7-9, TRBJ1-4)
CASSRTGAFNEKLFF

SEQ ID NO: 189961 - protein, 14 aa, Homo sapiens
  CDR3 for alpha chain variable domain of TCR clone 94981 (TRAV4, TRAJ26)
CLVGPHNYGQNFVF

SEQ ID NO: 189962 - protein, 14 aa, Homo sapiens
  CDR3 for beta chain variable domain of TCR clone 94981 (TRBV7-9, TRBJ2-2)
CASSGLADTGELFF

SEQ ID NO: 189963 - protein, 12 aa, Homo sapiens
  CDR3 for alpha chain variable domain of TCR clone 94982 (TRAV26-1, TRAJ54)
CIGGWGDQKLVF

SEQ ID NO: 189964 - protein, 14 aa, Homo sapiens
  CDR3 for beta chain variable domain of TCR clone 94982 (TRBV11-2, TRBJ1-2)
CASSSGQAGDGYTF

SEQ ID NO: 189965 - protein, 23 aa, Homo sapiens
  CDR3 for alpha chain variable domain of TCR clone 94983 (TRAV12-2, TRAJ22)
CSSETPSPVIQPPGRSSARQLTF

SEQ ID NO: 189966 - protein, 15 aa, Homo sapiens
  CDR3 for beta chain variable domain of TCR clone 94983 (TRBV19, TRBJ1-5)
CASSILTGENQPQHL

SEQ ID NO: 189967 - protein, 13 aa, Homo sapiens
  CDR3 for alpha chain variable domain of TCR clone 94984 (TRAV12-2, TRAJ40)
CAVKRTGTHKYIF

SEQ ID NO: 189968 - protein, 15 aa, Homo sapiens
  CDR3 for beta chain variable domain of TCR clone 94984 (TRBV12-4, TRBJ1-2)
CASSPITGGGYGYTF

SEQ ID NO: 189969 - protein, 10 aa, Homo sapiens
  CDR3 for alpha chain variable domain of TCR clone 94985 (TRAV20, TRAJ22)
CAAPARQLTF

SEQ ID NO: 189970 - protein, 14 aa, Homo sapiens
  CDR3 for beta chain variable domain of TCR clone 94985 (TRBV19, TRBJ2-1)
CASSMGSGATEEFF

SEQ ID NO: 189971 - protein, 14 aa, Homo sapiens
  CDR3 for alpha chain variable domain of TCR clone 94986 (TRAV20, TRAJ56)
CAVQFGGANSKMTF

SEQ ID NO: 189972 - protein, 14 aa, Homo sapiens
  CDR3 for beta chain variable domain of TCR clone 94986 (TRBV20-1, TRBJ2-7)
CSAKRGRGSYEQYF

SEQ ID NO: 189973 - protein, 15 aa, Homo sapiens
  CDR3 for alpha chain variable domain of TCR clone 94987 (TRAV27, TRAJ38)
CAARRNAGNNRKLIW

SEQ ID NO: 189974 - protein, 13 aa, Homo sapiens
  CDR3 for beta chain variable domain of TCR clone 94987 (TRBV12-5, TRBJ2-3)
CASGERQSDTQYF

SEQ ID NO: 189975 - protein, 14 aa, Homo sapiens
  CDR3 for alpha chain variable domain of TCR clone 94988 (TRAV12-3, TRAJ56)
CAMSVTGANSKLTF

SEQ ID NO: 189976 - protein, 17 aa, Homo sapiens
  CDR3 for beta chain variable domain of TCR clone 94988 (TRBV20-1, TRBJ2-3)
CSASLLGRGGSADTPYF

SEQ ID NO: 189977 - protein, 14 aa, Homo sapiens
  CDR3 for alpha chain variable domain of TCR clone 94989 (TRAV30, TRAJ33)
CGTVAPRSNYQLIW

SEQ ID NO: 189978 - protein, 16 aa, Homo sapiens
  CDR3 for beta chain variable domain of TCR clone 94989 (TRBV3-1, TRBJ2-5)
CASSPGQVNGFGTQYF

SEQ ID NO: 189979 - protein, 15 aa, Homo sapiens
  CDR3 for alpha chain variable domain of TCR clone 94990 (TRAV13-2, TRAJ6)
CAEKVLAGGSYIPTF

SEQ ID NO: 189980 - protein, 13 aa, Homo sapiens
  CDR3 for beta chain variable domain of TCR clone 94990 (TRBV20-1, TRBJ1-1)
CSARGGGNTEAFF

SEQ ID NO: 189981 - protein, 13 aa, Homo sapiens
  CDR3 for alpha chain variable domain of TCR clone 94991 (TRAV13-1, TRAJ21)
CAARIYNFNKFYF

SEQ ID NO: 189982 - protein, 12 aa, Homo sapiens
  CDR3 for beta chain variable domain of TCR clone 94991 (TRBV11-2, TRBJ2-1)
CASSPGNNEQFF

SEQ ID NO: 189983 - protein, 14 aa, Homo sapiens
  CDR3 for alpha chain variable domain of TCR clone 94992 (TRAV13-1, TRAJ10)
CAAKDPGGGNKLTF

SEQ ID NO: 189984 - protein, 14 aa, Homo sapiens
  CDR3 for beta chain variable domain of TCR clone 94992 (TRBV20-1, TRBJ1-1)
CSAQTRIGGTEAFF

SEQ ID NO: 189985 - protein, 15 aa, Homo sapiens
  CDR3 for alpha chain variable domain of TCR clone 94993 (TRAV6, TRAJ4)
CALGGFSGCYNKLIF

SEQ ID NO: 189986 - protein, 13 aa, Homo sapiens
  CDR3 for beta chain variable domain of TCR clone 94993 (TRBV19, TRBJ1-2)
CASSVPGQDGYTF

SEQ ID NO: 189987 - protein, 12 aa, Homo sapiens
  CDR3 for alpha chain variable domain of TCR clone 94994 (TRAV2, TRAJ9)
CAVGAGGFKTIF

SEQ ID NO: 189988 - protein, 14 aa, Homo sapiens
  CDR3 for beta chain variable domain of TCR clone 94994 (TRBV5-4, TRBJ2-1)
CASSLDQGLNEQFF

SEQ ID NO: 189989 - protein, 16 aa, Homo sapiens
  CDR3 for alpha chain variable domain of TCR clone 94995 (TRAV26-1, TRAJ48)
IASSDLSNFGSEKLTF

SEQ ID NO: 189990 - protein, 15 aa, Homo sapiens
  CDR3 for beta chain variable domain of TCR clone 94995 (TRBV5-1, TRBJ2-1)
CASSPPRAPYNEQFF

SEQ ID NO: 189991 - protein, 11 aa, Homo sapiens
  CDR3 for alpha chain variable domain of TCR clone 94996 (TRAV2, TRAJ13)
SASGGYQKVTF

SEQ ID NO: 189992 - protein, 11 aa, Homo sapiens
  CDR3 for beta chain variable domain of TCR clone 94996 (TRBV29-1, TRBJ2-5)
CSEDRTGTQYF

SEQ ID NO: 189993 - protein, 12 aa, Homo sapiens
  CDR3 for alpha chain variable domain of TCR clone 94997 (TRAV26-1, TRAJ36)
CIVRVRADNLFF

SEQ ID NO: 189994 - protein, 13 aa, Homo sapiens
  CDR3 for beta chain variable domain of TCR clone 94997 (TRBV12-4, TRBJ1-2)
CASSLRQGKGYTF

SEQ ID NO: 189995 - protein, 13 aa, Homo sapiens
  CDR3 for alpha chain variable domain of TCR clone 94998 (TRAV13-1, TRAJ37)
CAAVSGNTGKLIF

SEQ ID NO: 189996 - protein, 17 aa, Homo sapiens
  CDR3 for beta chain variable domain of TCR clone 94998 (TRBV10-2, TRBJ1-6)
CASSENRGSSYNSPLHC

SEQ ID NO: 189997 - protein, 16 aa, Homo sapiens
  CDR3 for alpha chain variable domain of TCR clone 94999 (TRAV8-3, TRAJ52)
CAVQPAGGTRYGKLTF

SEQ ID NO: 189998 - protein, 15 aa, Homo sapiens
  CDR3 for beta chain variable domain of TCR clone 94999 (TRBV11-2, TRBJ2-7)
CASSLAGGVATEQYF

SEQ ID NO: 189999 - protein, 13 aa, Homo sapiens
  CDR3 for alpha chain variable domain of TCR clone 95000 (TRAV12-1, TRAJ26)
CVVRRNYGQNFVF

SEQ ID NO: 190000 - protein, 15 aa, Homo sapiens
  CDR3 for beta chain variable domain of TCR clone 95000 (TRBV28, TRBJ2-1)
CASSIIVGGRSEQFF

SEQ ID NO: 190001 - protein, 12 aa, Homo sapiens
  CDR3 for alpha chain variable domain of TCR clone 95001 (TRAV16, TRAJ13)
CITLRGYQKVTF

SEQ ID NO: 190002 - protein, 17 aa, Homo sapiens
  CDR3 for beta chain variable domain of TCR clone 95001 (TRBV28, TRBJ2-5)
CASSRQGGLVGAETQYF

SEQ ID NO: 190003 - protein, 14 aa, Homo sapiens
  CDR3 for alpha chain variable domain of TCR clone 95002 (TRAV1-2, TRAJ8)
CAVREDTGFQKLVF

SEQ ID NO: 190004 - protein, 15 aa, Homo sapiens
  CDR3 for beta chain variable domain of TCR clone 95002 (TRBV6-3, TRBJ2-7)
CASSSPGTVFYEQYF

SEQ ID NO: 190005 - protein, 17 aa, Homo sapiens
  CDR3 for alpha chain variable domain of TCR clone 95003 (TRAV3, TRAJ6)
CAVRDGPRAGGSYIPTF

SEQ ID NO: 190006 - protein, 15 aa, Homo sapiens
  CDR3 for beta chain variable domain of TCR clone 95003 (TRBV20-1, TRBJ1-1)
CSASWDRVLNTEAFF

SEQ ID NO: 190007 - protein, 14 aa, Homo sapiens
  CDR3 for alpha chain variable domain of TCR clone 95004 (TRAV3, TRAJ28)
CAVRRGAGSYQLTF

SEQ ID NO: 190008 - protein, 16 aa, Homo sapiens
  CDR3 for beta chain variable domain of TCR clone 95004 (TRBV4-1, TRBJ2-7)
CASSHEWTSGPLEQYF

SEQ ID NO: 190009 - protein, 15 aa, Homo sapiens
  CDR3 for alpha chain variable domain of TCR clone 95005 (TRAV26-2, TRAJ45)
CILRDRVDQEEVLTD

SEQ ID NO: 190010 - protein, 15 aa, Homo sapiens
  CDR3 for beta chain variable domain of TCR clone 95005 (TRBV7-6, TRBJ2-5)
CARSKPTGPQETQYF

SEQ ID NO: 190011 - protein, 12 aa, Homo sapiens
  CDR3 for alpha chain variable domain of TCR clone 95006 (TRAV12-3, TRAJ17)
CAMTLTGSKLTF

SEQ ID NO: 190012 - protein, 17 aa, Homo sapiens
  CDR3 for beta chain variable domain of TCR clone 95006 (TRBV11-2, TRBJ2-1)
CASSLYPPGVEYNEQFF

SEQ ID NO: 190013 - protein, 13 aa, Homo sapiens
  CDR3 for alpha chain variable domain of TCR clone 95007 (TRAV17, TRAJ5)
CALRGTGRRALTF

SEQ ID NO: 190014 - protein, 15 aa, Homo sapiens
  CDR3 for beta chain variable domain of TCR clone 95007 (TRBV19, TRBJ1-5)
CASSIVWADNQPQHF

SEQ ID NO: 190015 - protein, 13 aa, Homo sapiens
  CDR3 for alpha chain variable domain of TCR clone 95008 (TRAV17, TRAJ26)
CATVDNYGQNFVF

SEQ ID NO: 190016 - protein, 16 aa, Homo sapiens
  CDR3 for beta chain variable domain of TCR clone 95008 (TRBV2, TRBJ2-1)
CARSVGGSLSYNEQFF

SEQ ID NO: 190017 - protein, 14 aa, Homo sapiens
  CDR3 for alpha chain variable domain of TCR clone 95009 (TRAV26-1, TRAJ45)
CIEVTGGGADGLTF

SEQ ID NO: 190018 - protein, 13 aa, Homo sapiens
  CDR3 for beta chain variable domain of TCR clone 95009 (TRBV7-6, TRBJ1-2)
YASSLVADYGYTF

SEQ ID NO: 190019 - protein, 15 aa, Homo sapiens
  CDR3 for alpha chain variable domain of TCR clone 95010 (TRAV8-3, TRAJ27)
CAVGPSKTNAGKSTF

SEQ ID NO: 190020 - protein, 15 aa, Homo sapiens
  CDR3 for beta chain variable domain of TCR clone 95010 (TRBV11-2, TRBJ1-2)
CASSLEGVQRNGYTF

SEQ ID NO: 190021 - protein, 15 aa, Homo sapiens
  CDR3 for alpha chain variable domain of TCR clone 95011 (TRAV23/DV6, TRAJ49)
CAATPGQVWRSFQIS

SEQ ID NO: 190022 - protein, 14 aa, Homo sapiens
  CDR3 for beta chain variable domain of TCR clone 95011 (TRBV7-3, TRBJ1-1)
CASSLKGGNTEAFF

SEQ ID NO: 190023 - protein, 14 aa, Homo sapiens
  CDR3 for alpha chain variable domain of TCR clone 95012 (TRAV3, TRAJ22)
CAVRDYGSARQLIF

SEQ ID NO: 190024 - protein, 13 aa, Homo sapiens
  CDR3 for beta chain variable domain of TCR clone 95012 (TRBV11-2, TRBJ2-5)
CASGHGAKETQYF

SEQ ID NO: 190025 - protein, 18 aa, Homo sapiens
  CDR3 for alpha chain variable domain of TCR clone 95013 (TRAV26-2, TRAJ45)
CILRLWGYPGGGADGLTF

SEQ ID NO: 190026 - protein, 17 aa, Homo sapiens
  CDR3 for beta chain variable domain of TCR clone 95013 (TRBV28, TRBJ2-3)
CASSPTPAGGRVDTQYF

SEQ ID NO: 190027 - protein, 12 aa, Homo sapiens
  CDR3 for alpha chain variable domain of TCR clone 95014 (TRAV13-1, TRAJ48)
CAANFGNEQLTF

SEQ ID NO: 190028 - protein, 13 aa, Homo sapiens
  CDR3 for beta chain variable domain of TCR clone 95014 (TRBV7-3, TRBJ1-1)
CASSQDWGAEAFF

SEQ ID NO: 190029 - protein, 11 aa, Homo sapiens
  CDR3 for alpha chain variable domain of TCR clone 95015 (TRAV13-1, TRAJ39)
CASHAGNMLTF

SEQ ID NO: 190030 - protein, 14 aa, Homo sapiens
  CDR3 for beta chain variable domain of TCR clone 95015 (TRBV11-2, TRBJ1-5)
CASSLDRGRQPQHS

SEQ ID NO: 190031 - protein, 11 aa, Homo sapiens
  CDR3 for alpha chain variable domain of TCR clone 95016 (TRAV3, TRAJ17)
PRGAAGNKLTF

SEQ ID NO: 190032 - protein, 19 aa, Homo sapiens
  CDR3 for beta chain variable domain of TCR clone 95016 (TRBV25-1, TRBJ2-2)
CAILVYRVDRGRKTGELFF

SEQ ID NO: 190033 - protein, 14 aa, Homo sapiens
  CDR3 for alpha chain variable domain of TCR clone 95017 (TRAV12-2, TRAJ53)
CRERGGGSNYKLTF

SEQ ID NO: 190034 - protein, 14 aa, Homo sapiens
  CDR3 for beta chain variable domain of TCR clone 95017 (TRBV19, TRBJ2-2)
CASSTLHRSGEMFF

SEQ ID NO: 190035 - protein, 13 aa, Homo sapiens
  CDR3 for alpha chain variable domain of TCR clone 95018 (TRAV21, TRAJ45)
CAAPGGGADGLTF

SEQ ID NO: 190036 - protein, 12 aa, Homo sapiens
  CDR3 for beta chain variable domain of TCR clone 95018 (TRBV12-4, TRBJ2-7)
CASSLGGYEQYF

SEQ ID NO: 190037 - protein, 18 aa, Homo sapiens
  CDR3 for alpha chain variable domain of TCR clone 95019 (TRAV26-1, TRAJ23)
CIVRVGPEVWNQGGKLIF

SEQ ID NO: 190038 - protein, 16 aa, Homo sapiens
  CDR3 for beta chain variable domain of TCR clone 95019 (TRBV12-4, TRBJ2-5)
CASSFFVRGRQETQYF

SEQ ID NO: 190039 - protein, 16 aa, Homo sapiens
  CDR3 for alpha chain variable domain of TCR clone 95020 (TRAV3, TRAJ37)
CAVRPHGSGNTGKLIF

SEQ ID NO: 190040 - protein, 15 aa, Homo sapiens
  CDR3 for beta chain variable domain of TCR clone 95020 (TRBV5-5, TRBJ1-5)
CASSSTPGSNQPQHF

SEQ ID NO: 190041 - protein, 16 aa, Homo sapiens
  CDR3 for alpha chain variable domain of TCR clone 95021 (TRAV30, TRAJ24)
CGTEIVDADSWGKFQF

SEQ ID NO: 190042 - protein, 15 aa, Homo sapiens
  CDR3 for beta chain variable domain of TCR clone 95021 (TRBV6-3, TRBJ2-7)
CASSSRGTVFYEQYF

SEQ ID NO: 190043 - protein, 14 aa, Homo sapiens
  CDR3 for alpha chain variable domain of TCR clone 95022 (TRAV12-2, TRAJ53)
CRERGGGSNYKLKF

SEQ ID NO: 190044 - protein, 17 aa, Homo sapiens
  CDR3 for beta chain variable domain of TCR clone 95022 (TRBV7-3, TRBJ2-3)
CASSLMKRMRGADTQYF

SEQ ID NO: 190045 - protein, 16 aa, Homo sapiens
  CDR3 for alpha chain variable domain of TCR clone 95023 (TRAV30, TRAJ24)
CGTEIVDADSWGKFPF

SEQ ID NO: 190046 - protein, 14 aa, Homo sapiens
  CDR3 for beta chain variable domain of TCR clone 95023 (TRBV7-2, TRBJ1-2)
CASSQTGSTYGYTF

SEQ ID NO: 190047 - protein, 14 aa, Homo sapiens
  CDR3 for alpha chain variable domain of TCR clone 95024 (TRAV9-2, TRAJ39)
CALYIYNAGNMLTF

SEQ ID NO: 190048 - protein, 15 aa, Homo sapiens
  CDR3 for beta chain variable domain of TCR clone 95024 (TRBV7-2, TRBJ1-2)
CASSLVSGGDYGYTF

SEQ ID NO: 190049 - protein, 22 aa, Homo sapiens
  CDR3 for alpha chain variable domain of TCR clone 95025 (TRAV12-2, TRAJ13)
SPVIQPPTSPLPGGGGYQKVTF

SEQ ID NO: 190050 - protein, 14 aa, Homo sapiens
  CDR3 for beta chain variable domain of TCR clone 95025 (TRBV19, TRBJ2-1)
CASPTFVLSGEQFF

SEQ ID NO: 190051 - protein, 12 aa, Homo sapiens
  CDR3 for alpha chain variable domain of TCR clone 95026 (TRAV21, TRAJ33)
CAKMDSNYQVIW

SEQ ID NO: 190052 - protein, 14 aa, Homo sapiens
  CDR3 for beta chain variable domain of TCR clone 95026 (TRBV2, TRBJ2-7)
CASSLTAGGYEQYF

SEQ ID NO: 190053 - protein, 12 aa, Homo sapiens
  CDR3 for alpha chain variable domain of TCR clone 95027 (TRAV36/DV7, TRAJ40)
CAVGTGTYKYIF

SEQ ID NO: 190054 - protein, 15 aa, Homo sapiens
  CDR3 for beta chain variable domain of TCR clone 95027 (TRBV19, TRBJ1-2)
CASSVGQVLNYGYTF

SEQ ID NO: 190055 - protein, 13 aa, Homo sapiens
  CDR3 for alpha chain variable domain of TCR clone 95028 (TRAV30, TRAJ6)
CGFIEGVSYIPTF

SEQ ID NO: 190056 - protein, 13 aa, Homo sapiens
  CDR3 for beta chain variable domain of TCR clone 95028 (TRBV5-4, TRBJ2-5)
CASSPVSQETQYF

SEQ ID NO: 190057 - protein, 16 aa, Homo sapiens
  CDR3 for alpha chain variable domain of TCR clone 95029 (TRAV21, TRAJ37)
CAVRPRGSSNPGKLIF

SEQ ID NO: 190058 - protein, 13 aa, Homo sapiens
  CDR3 for beta chain variable domain of TCR clone 95029 (TRBV7-9, TRBJ2-5)
CASLSPGQETQYF

SEQ ID NO: 190059 - protein, 20 aa, Homo sapiens
  CDR3 for alpha chain variable domain of TCR clone 95030 (TRAV36/DV7, TRAJ38)
CVANAGNNHIQNPDPAVYQL

SEQ ID NO: 190060 - protein, 14 aa, Homo sapiens
  CDR3 for beta chain variable domain of TCR clone 95030 (TRBV7-2, TRBJ2-7)
CASSLRWEVNEQYF

SEQ ID NO: 190061 - protein, 13 aa, Homo sapiens
  CDR3 for alpha chain variable domain of TCR clone 95031 (TRAV12-3, TRAJ7)
CAMSAAGNNRLAF

SEQ ID NO: 190062 - protein, 14 aa, Homo sapiens
  CDR3 for beta chain variable domain of TCR clone 95031 (TRBV13, TRBJ2-5)
CASSLGPRGETQYF

SEQ ID NO: 190063 - protein, 10 aa, Homo sapiens
  CDR3 for alpha chain variable domain of TCR clone 95032 (TRAV9-2, TRAJ34)
CALSDDKLIF

SEQ ID NO: 190064 - protein, 14 aa, Homo sapiens
  CDR3 for beta chain variable domain of TCR clone 95032 (TRBV7-8, TRBJ2-7)
CASSVGQGAYKQYF

SEQ ID NO: 190065 - protein, 12 aa, Homo sapiens
  CDR3 for alpha chain variable domain of TCR clone 95033 (TRAV2, TRAJ9)
CAVGAGGCKTIF

SEQ ID NO: 190066 - protein, 14 aa, Homo sapiens
  CDR3 for beta chain variable domain of TCR clone 95033 (TRBV6-1, TRBJ1-3)
CASVQGGGGNTIYF

SEQ ID NO: 190067 - protein, 18 aa, Homo sapiens
  CDR3 for alpha chain variable domain of TCR clone 95034 (TRAV26-1, TRAJ23)
CIVRVGVEVWNQGGKLIF

SEQ ID NO: 190068 - protein, 16 aa, Homo sapiens
  CDR3 for beta chain variable domain of TCR clone 95034 (TRBV12-4, TRBJ2-5)
CASSFFVRGRQETQYF

SEQ ID NO: 190069 - protein, 13 aa, Homo sapiens
  CDR3 for alpha chain variable domain of TCR clone 95035 (TRAV17, TRAJ26)
CATVDNYGQNFVF

SEQ ID NO: 190070 - protein, 18 aa, Homo sapiens
  CDR3 for beta chain variable domain of TCR clone 95035 (TRBV12-4, TRBJ2-2)
CASSLVAGTRGRTGELFF

SEQ ID NO: 190071 - protein, 14 aa, Homo sapiens
  CDR3 for alpha chain variable domain of TCR clone 95036 (TRAV23/DV6, TRAJ57)
CAASNQGGSEKLVF

SEQ ID NO: 190072 - protein, 13 aa, Homo sapiens
  CDR3 for beta chain variable domain of TCR clone 95036 (TRBV11-2, TRBJ2-7)
CASSSYPAYEQYF

SEQ ID NO: 190073 - protein, 12 aa, Homo sapiens
  CDR3 for alpha chain variable domain of TCR clone 95037 (TRAV12-3, TRAJ41)
CAMSYSGYTLNF

SEQ ID NO: 190074 - protein, 13 aa, Homo sapiens
  CDR3 for beta chain variable domain of TCR clone 95037 (TRBV7-3, TRBJ2-1)
CASSLDSYNEQFF

SEQ ID NO: 190075 - protein, 15 aa, Homo sapiens
  CDR3 for alpha chain variable domain of TCR clone 95038 (TRAV25, TRAJ53)
CAATGGGGSNYKLTF

SEQ ID NO: 190076 - protein, 13 aa, Homo sapiens
  CDR3 for beta chain variable domain of TCR clone 95038 (TRBV10-3, TRBJ2-7)
CASKLAVNYEQYF

SEQ ID NO: 190077 - protein, 16 aa, Homo sapiens
  CDR3 for alpha chain variable domain of TCR clone 95039 (TRAV30, TRAJ24)
CGTEIVDADSGGKFQV

SEQ ID NO: 190078 - protein, 14 aa, Homo sapiens
  CDR3 for beta chain variable domain of TCR clone 95039 (TRBV12-5, TRBJ2-5)
CASGSRTHQETQYF

SEQ ID NO: 190079 - protein, 15 aa, Homo sapiens
  CDR3 for alpha chain variable domain of TCR clone 95040 (TRAV12-2, TRAJ53)
CAVNGGGGSNYKLTF

SEQ ID NO: 190080 - protein, 13 aa, Homo sapiens
  CDR3 for beta chain variable domain of TCR clone 95040 (TRBV6-5, TRBJ2-1)
CASSYELSNEQFF

SEQ ID NO: 190081 - protein, 15 aa, Homo sapiens
  CDR3 for alpha chain variable domain of TCR clone 95041 (TRAV8-6, TRAJ6)
CAVSGESGGSYIPTF

SEQ ID NO: 190082 - protein, 14 aa, Homo sapiens
  CDR3 for beta chain variable domain of TCR clone 95041 (TRBV7-9, TRBJ2-1)
CASSSMVGFDEQFF

SEQ ID NO: 190083 - protein, 11 aa, Homo sapiens
  CDR3 for alpha chain variable domain of TCR clone 95042 (TRAV3, TRAJ13)
CAVTSYQKVTF

SEQ ID NO: 190084 - protein, 14 aa, Homo sapiens
  CDR3 for beta chain variable domain of TCR clone 95042 (TRBV2, TRBJ2-1)
CASRPGSSYNEQFF

SEQ ID NO: 190085 - protein, 17 aa, Homo sapiens
  CDR3 for alpha chain variable domain of TCR clone 95043 (TRAV3, TRAJ38)
CAVRDCLNAGNNRKLIW

SEQ ID NO: 190086 - protein, 14 aa, Homo sapiens
  CDR3 for beta chain variable domain of TCR clone 95043 (TRBV19, TRBJ2-1)
CASNSPGLYNEQFF

SEQ ID NO: 190087 - protein, 12 aa, Homo sapiens
  CDR3 for alpha chain variable domain of TCR clone 95044 (TRAV16, TRAJ10)
CSRTGGGNKLAF

SEQ ID NO: 190088 - protein, 12 aa, Homo sapiens
  CDR3 for beta chain variable domain of TCR clone 95044 (TRBV7-8, TRBJ2-7)
CASSLGDREQYF

SEQ ID NO: 190089 - protein, 16 aa, Homo sapiens
  CDR3 for alpha chain variable domain of TCR clone 95045 (TRAV8-3, TRAJ10)
CAVGPGVTGGGNKRTF

SEQ ID NO: 190090 - protein, 13 aa, Homo sapiens
  CDR3 for beta chain variable domain of TCR clone 95045 (TRBV18, TRBJ1-1)
CASSPGPSGEAFF

SEQ ID NO: 190091 - protein, 11 aa, Homo sapiens
  CDR3 for alpha chain variable domain of TCR clone 95046 (TRAV12-2, TRAJ49)
CAVTGGNQFYF

SEQ ID NO: 190092 - protein, 12 aa, Homo sapiens
  CDR3 for beta chain variable domain of TCR clone 95046 (TRBV28, TRBJ2-1)
CASSRLVGEQFF

SEQ ID NO: 190093 - protein, 14 aa, Homo sapiens
  CDR3 for alpha chain variable domain of TCR clone 95047 (TRAV12-1, TRAJ43)
CVVNGRSNNNDMRF

SEQ ID NO: 190094 - protein, 13 aa, Homo sapiens
  CDR3 for beta chain variable domain of TCR clone 95047 (TRBV10-3, TRBJ2-7)
CASRLAVNYEQYF

SEQ ID NO: 190095 - protein, 17 aa, Homo sapiens
  CDR3 for alpha chain variable domain of TCR clone 95048 (TRAV3, TRAJ6)
CAVRDGPRAGGHYIPTF

SEQ ID NO: 190096 - protein, 14 aa, Homo sapiens
  CDR3 for beta chain variable domain of TCR clone 95048 (TRBV7-2, TRBJ2-7)
CASSPKTSFYEQYF

SEQ ID NO: 190097 - protein, 13 aa, Homo sapiens
  CDR3 for alpha chain variable domain of TCR clone 95049 (TRAV27, TRAJ41)
CAGEGNFGYALNF

SEQ ID NO: 190098 - protein, 14 aa, Homo sapiens
  CDR3 for beta chain variable domain of TCR clone 95049 (TRBV7-2, TRBJ1-1)
CASSFLTGTTEAFF

SEQ ID NO: 190099 - protein, 14 aa, Homo sapiens
  CDR3 for alpha chain variable domain of TCR clone 95050 (TRAV20, TRAJ44)
CAVQDTGTASKLTF

SEQ ID NO: 190100 - protein, 13 aa, Homo sapiens
  CDR3 for beta chain variable domain of TCR clone 95050 (TRBV29-1, TRBJ1-3)
CSAATGRGNTIYF

SEQ ID NO: 190101 - protein, 13 aa, Homo sapiens
  CDR3 for alpha chain variable domain of TCR clone 95051 (TRAV8-3, TRAJ47)
CAVSTEYGNKLVF

SEQ ID NO: 190102 - protein, 14 aa, Homo sapiens
  CDR3 for beta chain variable domain of TCR clone 95051 (TRBV2, TRBJ1-5)
CASSGTGFNQPQHF

SEQ ID NO: 190103 - protein, 13 aa, Homo sapiens
  CDR3 for alpha chain variable domain of TCR clone 95052 (TRAV12-2, TRAJ52)
CALSGTSYGKLTF

SEQ ID NO: 190104 - protein, 17 aa, Homo sapiens
  CDR3 for beta chain variable domain of TCR clone 95052 (TRBV11-2, TRBJ2-1)
CASSLYPPGVEYNEQFF

SEQ ID NO: 190105 - protein, 15 aa, Homo sapiens
  CDR3 for alpha chain variable domain of TCR clone 95053 (TRAV3, TRAJ47)
CAVRDIGEYGNKLVF

SEQ ID NO: 190106 - protein, 14 aa, Homo sapiens
  CDR3 for beta chain variable domain of TCR clone 95053 (TRBV13, TRBJ2-5)
CASSLERVGEAQYF

SEQ ID NO: 190107 - protein, 12 aa, Homo sapiens
  CDR3 for alpha chain variable domain of TCR clone 95054 (TRAV35, TRAJ30)
CAGLNRDDKIIF

SEQ ID NO: 190108 - protein, 14 aa, Homo sapiens
  CDR3 for beta chain variable domain of TCR clone 95054 (TRBV18, TRBJ2-3)
CASSRDRGTDTQYF

SEQ ID NO: 190109 - protein, 14 aa, Homo sapiens
  CDR3 for alpha chain variable domain of TCR clone 95055 (TRAV3, TRAJ22)
CAVRYYGSARQLTF

SEQ ID NO: 190110 - protein, 13 aa, Homo sapiens
  CDR3 for beta chain variable domain of TCR clone 95055 (TRBV11-2, TRBJ2-5)
CASGHGAKETQYF

SEQ ID NO: 190111 - protein, 13 aa, Homo sapiens
  CDR3 for alpha chain variable domain of TCR clone 95056 (TRAV27, TRAJ45)
CRSSGGGADGLTF

SEQ ID NO: 190112 - protein, 12 aa, Homo sapiens
  CDR3 for beta chain variable domain of TCR clone 95056 (TRBV5-4, TRBJ2-7)
CASSLEAYEQYF

SEQ ID NO: 190113 - protein, 11 aa, Homo sapiens
  CDR3 for alpha chain variable domain of TCR clone 95057 (TRAV20, TRAJ34)
CTRDNTDNLIF

SEQ ID NO: 190114 - protein, 15 aa, Homo sapiens
  CDR3 for beta chain variable domain of TCR clone 95057 (TRBV2, TRBJ2-1)
CASSVTSEGTDEQFF

SEQ ID NO: 190115 - protein, 14 aa, Homo sapiens
  CDR3 for alpha chain variable domain of TCR clone 95058 (TRAV1-2, TRAJ16)
CAVNRFSDGQKLLF

SEQ ID NO: 190116 - protein, 14 aa, Homo sapiens
  CDR3 for beta chain variable domain of TCR clone 95058 (TRBV18, TRBJ2-7)
CASSPAGGPGEQYF

SEQ ID NO: 190117 - protein, 17 aa, Homo sapiens
  CDR3 for alpha chain variable domain of TCR clone 95059 (TRAV3, TRAJ6)
CAVRDGPRAGGSYIPTF

SEQ ID NO: 190118 - protein, 19 aa, Homo sapiens
  CDR3 for beta chain variable domain of TCR clone 95059 (TRBV25-1, TRBJ2-2)
CAILVYRVDRGRKAGEPFF

SEQ ID NO: 190119 - protein, 16 aa, Homo sapiens
  CDR3 for alpha chain variable domain of TCR clone 95060 (TRAV1-2, TRAJ33)
CAVRAISMDSNYQLIW

SEQ ID NO: 190120 - protein, 18 aa, Homo sapiens
  CDR3 for beta chain variable domain of TCR clone 95060 (TRBV18, TRBJ2-3)
CASSYTSGAAGGTDTQYF

SEQ ID NO: 190121 - protein, 18 aa, Homo sapiens
  CDR3 for alpha chain variable domain of TCR clone 95061 (TRAV13-1, TRAJ45)
CAASIGVYSGGGADGLTF

SEQ ID NO: 190122 - protein, 13 aa, Homo sapiens
  CDR3 for beta chain variable domain of TCR clone 95061 (TRBV10-3, TRBJ2-7)
CASKLAVNYEQYF

SEQ ID NO: 190123 - protein, 13 aa, Homo sapiens
  CDR3 for alpha chain variable domain of TCR clone 95062 (TRAV8-3, TRAJ28)
WAVGAVGSYQLTF

SEQ ID NO: 190124 - protein, 15 aa, Homo sapiens
  CDR3 for beta chain variable domain of TCR clone 95062 (TRBV7-9, TRBJ1-5)
CASSQGHQPNQPQHF

SEQ ID NO: 190125 - protein, 11 aa, Homo sapiens
  CDR3 for alpha chain variable domain of TCR clone 95063 (TRAV12-3, TRAJ43)
CAMSVSNDIRF

SEQ ID NO: 190126 - protein, 19 aa, Homo sapiens
  CDR3 for beta chain variable domain of TCR clone 95063 (TRBV28, TRBJ2-7)
CASSYSGTSRLGWVYEQYF

SEQ ID NO: 190127 - protein, 15 aa, Homo sapiens
  CDR3 for alpha chain variable domain of TCR clone 95064 (TRAV38-1, TRAJ57)
CTFMDSQGGSEKLVF

SEQ ID NO: 190128 - protein, 16 aa, Homo sapiens
  CDR3 for beta chain variable domain of TCR clone 95064 (TRBV10-3, TRBJ2-1)
CAIRGGGRGDYNEQFF

SEQ ID NO: 190129 - protein, 14 aa, Homo sapiens
  CDR3 for alpha chain variable domain of TCR clone 95065 (TRAV3, TRAJ9)
CAVRLNTGGFKTIF

SEQ ID NO: 190130 - protein, 15 aa, Homo sapiens
  CDR3 for beta chain variable domain of TCR clone 95065 (TRBV12-4, TRBJ2-1)
CASSLSTGVSNEQFF

SEQ ID NO: 190131 - protein, 15 aa, Homo sapiens
  CDR3 for alpha chain variable domain of TCR clone 95066 (TRAV2, TRAJ15)
CAVEDRGQAGTALIF

SEQ ID NO: 190132 - protein, 20 aa, Homo sapiens
  CDR3 for beta chain variable domain of TCR clone 95066 (TRBV28, TRBJ2-1)
CASTPIGRSPGLAGGNEQFF

SEQ ID NO: 190133 - protein, 15 aa, Homo sapiens
  CDR3 for alpha chain variable domain of TCR clone 95067 (TRAV17, TRAJ16)
CATALRFSDGQKLLF

SEQ ID NO: 190134 - protein, 16 aa, Homo sapiens
  CDR3 for beta chain variable domain of TCR clone 95067 (TRBV7-3, TRBJ2-2)
CASSLKRGTLSGELFF

SEQ ID NO: 190135 - protein, 17 aa, Homo sapiens
  CDR3 for alpha chain variable domain of TCR clone 95068 (TRAV3, TRAJ6)
CAVRDGPRAGGSYIPTF

SEQ ID NO: 190136 - protein, 13 aa, Homo sapiens
  CDR3 for beta chain variable domain of TCR clone 95068 (TRBV4-1, TRBJ2-2)
CASSQGNTGELFF

SEQ ID NO: 190137 - protein, 18 aa, Homo sapiens
  CDR3 for alpha chain variable domain of TCR clone 95069 (TRAV26-1, TRAJ23)
CIVRVGLEVWNQGGKLIL

SEQ ID NO: 190138 - protein, 15 aa, Homo sapiens
  CDR3 for beta chain variable domain of TCR clone 95069 (TRBV10-3, TRBJ2-3)
CAISDWDRDTDTQYF

SEQ ID NO: 190139 - protein, 16 aa, Homo sapiens
  CDR3 for alpha chain variable domain of TCR clone 95070 (TRAV30, TRAJ24)
CGTEIVDADSWGKFQF

SEQ ID NO: 190140 - protein, 12 aa, Homo sapiens
  CDR3 for beta chain variable domain of TCR clone 95070 (TRBV11-2, TRBJ2-2)
CASSLPTGGLFF

SEQ ID NO: 190141 - protein, 15 aa, Homo sapiens
  CDR3 for alpha chain variable domain of TCR clone 95071 (TRAV25, TRAJ53)
CAAAGGGGSNYKLTF

SEQ ID NO: 190142 - protein, 19 aa, Homo sapiens
  CDR3 for beta chain variable domain of TCR clone 95071 (TRBV7-2, TRBJ2-3)
CASSFLSRNWGGGTDTQYF

SEQ ID NO: 190143 - protein, 13 aa, Homo sapiens
  CDR3 for alpha chain variable domain of TCR clone 95072 (TRAV8-3, TRAJ43)
CAVGIYNNNDMLF

SEQ ID NO: 190144 - protein, 16 aa, Homo sapiens
  CDR3 for beta chain variable domain of TCR clone 95072 (TRBV7-2, TRBJ2-5)
CASSLVLWTKQETQYF

SEQ ID NO: 190145 - protein, 12 aa, Homo sapiens
  CDR3 for alpha chain variable domain of TCR clone 95073 (TRAV1-2, TRAJ33)
CAALDSNYQLIW

SEQ ID NO: 190146 - protein, 16 aa, Homo sapiens
  CDR3 for beta chain variable domain of TCR clone 95073 (TRBV9, TRBJ2-3)
CASSGTSGKDTDTQYF

SEQ ID NO: 190147 - protein, 17 aa, Homo sapiens
  CDR3 for alpha chain variable domain of TCR clone 95074 (TRAV3, TRAJ6)
CAVRDGPRAGGSYIPTF

SEQ ID NO: 190148 - protein, 13 aa, Homo sapiens
  CDR3 for beta chain variable domain of TCR clone 95074 (TRBV19, TRBJ2-7)
CASSIGRTYEQYF

SEQ ID NO: 190149 - protein, 13 aa, Homo sapiens
  CDR3 for alpha chain variable domain of TCR clone 95075 (TRAV20, TRAJ31)
CAVQAIGGARLMF

SEQ ID NO: 190150 - protein, 15 aa, Homo sapiens
  CDR3 for beta chain variable domain of TCR clone 95075 (TRBV27, TRBJ2-7)
CASSPQREGQREQYF

SEQ ID NO: 190151 - protein, 15 aa, Homo sapiens
  CDR3 for alpha chain variable domain of TCR clone 95076 (TRAV12-2, TRAJ53)
CAVNWGGGSNYKLTF

SEQ ID NO: 190152 - protein, 12 aa, Homo sapiens
  CDR3 for beta chain variable domain of TCR clone 95076 (TRBV7-6, TRBJ2-5)
CASSLSQETQYF

SEQ ID NO: 190153 - protein, 14 aa, Homo sapiens
  CDR3 for alpha chain variable domain of TCR clone 95077 (TRAV26-1, TRAJ49)
FIVRPSNTGNQFYF

SEQ ID NO: 190154 - protein, 15 aa, Homo sapiens
  CDR3 for beta chain variable domain of TCR clone 95077 (TRBV19, TRBJ1-1)
CASMGFRDVNTEAFF

SEQ ID NO: 190155 - protein, 14 aa, Homo sapiens
  CDR3 for alpha chain variable domain of TCR clone 95078 (TRAV13-2, TRAJ11)
CAETGNSGYSTLTF

SEQ ID NO: 190156 - protein, 11 aa, Homo sapiens
  CDR3 for beta chain variable domain of TCR clone 95078 (TRBV10-3, TRBJ2-7)
CATSEGLEQYF

SEQ ID NO: 190157 - protein, 14 aa, Homo sapiens
  CDR3 for alpha chain variable domain of TCR clone 95079 (TRAV14/DV4, TRAJ49)
CAFNRYLTGNQFYF

SEQ ID NO: 190158 - protein, 14 aa, Homo sapiens
  CDR3 for beta chain variable domain of TCR clone 95079 (TRBV5-1, TRBJ1-5)
CASSLESGSRPQHF

SEQ ID NO: 190159 - protein, 15 aa, Homo sapiens
  CDR3 for alpha chain variable domain of TCR clone 95080 (TRAV3, TRAJ40)
CAVRDVTSGTHKYIF

SEQ ID NO: 190160 - protein, 13 aa, Homo sapiens
  CDR3 for beta chain variable domain of TCR clone 95080 (TRBV7-9, TRBJ1-2)
CASSLKQNYGYTF

SEQ ID NO: 190161 - protein, 10 aa, Homo sapiens
  CDR3 for alpha chain variable domain of TCR clone 95081 (TRAV23/DV6, TRAJ57)
CAASSPLSQG

SEQ ID NO: 190162 - protein, 14 aa, Homo sapiens
  CDR3 for beta chain variable domain of TCR clone 95081 (TRBV7-8, TRBJ2-5)
CASSATGGQETQYF

SEQ ID NO: 190163 - protein, 14 aa, Homo sapiens
  CDR3 for alpha chain variable domain of TCR clone 95082 (TRAV1-2, TRAJ15)
CAVRDRQAGTALIF

SEQ ID NO: 190164 - protein, 14 aa, Homo sapiens
  CDR3 for beta chain variable domain of TCR clone 95082 (TRBV4-1, TRBJ2-2)
CASSQEVNTGELFF

SEQ ID NO: 190165 - protein, 14 aa, Homo sapiens
  CDR3 for alpha chain variable domain of TCR clone 95083 (TRAV38-2/DV8, TRAJ23)
CAYRKPNQGGKLIF

SEQ ID NO: 190166 - protein, 15 aa, Homo sapiens
  CDR3 for beta chain variable domain of TCR clone 95083 (TRBV4-3, TRBJ2-1)
CASSQESAIYNEQFF

SEQ ID NO: 190167 - protein, 17 aa, Homo sapiens
  CDR3 for alpha chain variable domain of TCR clone 95084 (TRAV23/DV6, TRAJ57)
CAASSTLSQGGSEKLVF

SEQ ID NO: 190168 - protein, 16 aa, Homo sapiens
  CDR3 for beta chain variable domain of TCR clone 95084 (TRBV7-9, TRBJ2-3)
CASSPWREVGTDTQYF

SEQ ID NO: 190169 - protein, 16 aa, Homo sapiens
  CDR3 for alpha chain variable domain of TCR clone 95085 (TRAV30, TRAJ24)
CGTEIVDADSWGKLQF

SEQ ID NO: 190170 - protein, 15 aa, Homo sapiens
  CDR3 for beta chain variable domain of TCR clone 95085 (TRBV6-3, TRBJ2-7)
CASSSPGTVFYEQYF

SEQ ID NO: 190171 - protein, 15 aa, Homo sapiens
  CDR3 for alpha chain variable domain of TCR clone 95086 (TRAV17, TRAJ13)
CATDAGSGGYHKVTF

SEQ ID NO: 190172 - protein, 17 aa, Homo sapiens
  CDR3 for beta chain variable domain of TCR clone 95086 (TRBV11-2, TRBJ2-1)
CASSLYPPGVEYNEQFF

SEQ ID NO: 190173 - protein, 14 aa, Homo sapiens
  CDR3 for alpha chain variable domain of TCR clone 95087 (TRAV8-3, TRAJ12)
CAVGARDSSYKLIF

SEQ ID NO: 190174 - protein, 14 aa, Homo sapiens
  CDR3 for beta chain variable domain of TCR clone 95087 (TRBV19, TRBJ2-1)
CASPTFVLSGEQFF

SEQ ID NO: 190175 - protein, 15 aa, Homo sapiens
  CDR3 for alpha chain variable domain of TCR clone 95088 (TRAV4, TRAJ12)
CLVGDLMDSSYKLIF

SEQ ID NO: 190176 - protein, 14 aa, Homo sapiens
  CDR3 for beta chain variable domain of TCR clone 95088 (TRBV7-2, TRBJ1-1)
CASSHRQGRTEAVF

SEQ ID NO: 190177 - protein, 12 aa, Homo sapiens
  CDR3 for alpha chain variable domain of TCR clone 95089 (TRAV8-3, TRAJ5)
CAVGGGLRALTF

SEQ ID NO: 190178 - protein, 13 aa, Homo sapiens
  CDR3 for beta chain variable domain of TCR clone 95089 (TRBV7-6, TRBJ1-3)
CASSSQQGNTIYF

SEQ ID NO: 190179 - protein, 18 aa, Homo sapiens
  CDR3 for alpha chain variable domain of TCR clone 95090 (TRAV26-1, TRAJ52)
CIVRVEGAGVTSYGKLTF

SEQ ID NO: 190180 - protein, 13 aa, Homo sapiens
  CDR3 for beta chain variable domain of TCR clone 95090 (TRBV7-3, TRBJ1-2)
CASSLKRGYGYTF

SEQ ID NO: 190181 - protein, 14 aa, Homo sapiens
  CDR3 for alpha chain variable domain of TCR clone 95091 (TRAV12-1, TRAJ12)
CVVTRMDSSYKSIF

SEQ ID NO: 190182 - protein, 13 aa, Homo sapiens
  CDR3 for beta chain variable domain of TCR clone 95091 (TRBV20-1, TRBJ1-1)
CSARGGGNTEAFF

SEQ ID NO: 190183 - protein, 14 aa, Homo sapiens
  CDR3 for alpha chain variable domain of TCR clone 95092 (TRAV8-2, TRAJ37)
CVVSISGNTGKLLF

SEQ ID NO: 190184 - protein, 11 aa, Homo sapiens
  CDR3 for beta chain variable domain of TCR clone 95092 (TRBV18, TRBJ2-5)
CASSPRETQYF

SEQ ID NO: 190185 - protein, 14 aa, Homo sapiens
  CDR3 for alpha chain variable domain of TCR clone 95093 (TRAV12-2, TRAJ17)
CAVLFKAAGNTLTF

SEQ ID NO: 190186 - protein, 14 aa, Homo sapiens
  CDR3 for beta chain variable domain of TCR clone 95093 (TRBV12-5, TRBJ2-5)
CASGSRTHQETQYF

SEQ ID NO: 190187 - protein, 15 aa, Homo sapiens
  CDR3 for alpha chain variable domain of TCR clone 95094 (TRAV12-2, TRAJ53)
CAVNGGEGSNYKLTF

SEQ ID NO: 190188 - protein, 13 aa, Homo sapiens
  CDR3 for beta chain variable domain of TCR clone 95094 (TRBV3-1, TRBJ1-1)
CASSPGVITEALF

SEQ ID NO: 190189 - protein, 17 aa, Homo sapiens
  CDR3 for alpha chain variable domain of TCR clone 95095 (TRAV3, TRAJ6)
CAVRDGPRAGGSYIPTF

SEQ ID NO: 190190 - protein, 14 aa, Homo sapiens
  CDR3 for beta chain variable domain of TCR clone 95095 (TRBV7-2, TRBJ2-7)
WASSPKTSFYEQYF

SEQ ID NO: 190191 - protein, 13 aa, Homo sapiens
  CDR3 for alpha chain variable domain of TCR clone 95096 (TRAV22, TRAJ29)
CAVGGSGNTPLVF

SEQ ID NO: 190192 - protein, 15 aa, Homo sapiens
  CDR3 for beta chain variable domain of TCR clone 95096 (TRBV7-2, TRBJ2-1)
CASSSGLAGGNEQFF

SEQ ID NO: 190193 - protein, 14 aa, Homo sapiens
  CDR3 for alpha chain variable domain of TCR clone 95097 (TRAV12-3, TRAJ22)
CAMSLFGSARQLAF

SEQ ID NO: 190194 - protein, 11 aa, Homo sapiens
  CDR3 for beta chain variable domain of TCR clone 95097 (TRBV12-4, TRBJ2-2)
CASSSAGELFF

SEQ ID NO: 190195 - protein, 15 aa, Homo sapiens
  CDR3 for alpha chain variable domain of TCR clone 95098 (TRAV17, TRAJ57)
CATGPSQGGSEKLVF

SEQ ID NO: 190196 - protein, 15 aa, Homo sapiens
  CDR3 for beta chain variable domain of TCR clone 95098 (TRBV25-1, TRBJ1-4)
RASSPGDSTNEKLFF

SEQ ID NO: 190197 - protein, 20 aa, Homo sapiens
  CDR3 for alpha chain variable domain of TCR clone 95099 (TRAV8-3, TRAJ44)
LSTSVLWVRLYTGTASKLTF

SEQ ID NO: 190198 - protein, 14 aa, Homo sapiens
  CDR3 for beta chain variable domain of TCR clone 95099 (TRBV18, TRBJ2-7)
CASSPRGGSYEQYF

SEQ ID NO: 190199 - protein, 18 aa, Homo sapiens
  CDR3 for alpha chain variable domain of TCR clone 95100 (TRAV17, TRAJ28)
CATDPPRGSGAGSYQLTF

SEQ ID NO: 190200 - protein, 16 aa, Homo sapiens
  CDR3 for beta chain variable domain of TCR clone 95100 (TRBV4-2, TRBJ2-3)
CASSQELAGDTDTQYF

SEQ ID NO: 190201 - protein, 11 aa, Homo sapiens
  CDR3 for alpha chain variable domain of TCR clone 95101 (TRAV8-3, TRAJ49)
CAVKTGNQFYF

SEQ ID NO: 190202 - protein, 12 aa, Homo sapiens
  CDR3 for beta chain variable domain of TCR clone 95101 (TRBV11-2, TRBJ2-7)
CASSPPADEQYF

SEQ ID NO: 190203 - protein, 14 aa, Homo sapiens
  CDR3 for alpha chain variable domain of TCR clone 95102 (TRAV1-2, TRAJ16)
CAVNRFSDGQKLLF

SEQ ID NO: 190204 - protein, 13 aa, Homo sapiens
  CDR3 for beta chain variable domain of TCR clone 95102 (TRBV4-1, TRBJ2-1)
CASSQAWGDEQFF

SEQ ID NO: 190205 - protein, 14 aa, Homo sapiens
  CDR3 for alpha chain variable domain of TCR clone 95103 (TRAV21, TRAJ35)
CAVMPIGFGNVLHC

SEQ ID NO: 190206 - protein, 12 aa, Homo sapiens
  CDR3 for beta chain variable domain of TCR clone 95103 (TRBV7-9, TRBJ2-7)
CASSTKREEQYF

SEQ ID NO: 190207 - protein, 13 aa, Homo sapiens
  CDR3 for alpha chain variable domain of TCR clone 95104 (TRAV13-1, TRAJ12)
CAASPDSSYKLIL

SEQ ID NO: 190208 - protein, 16 aa, Homo sapiens
  CDR3 for beta chain variable domain of TCR clone 95104 (TRBV15, TRBJ2-1)
CATSRERLAGAYEQFF

SEQ ID NO: 190209 - protein, 12 aa, Homo sapiens
  CDR3 for alpha chain variable domain of TCR clone 95105 (TRAV12-3, TRAJ17)
CAMTLTGNKLTF

SEQ ID NO: 190210 - protein, 14 aa, Homo sapiens
  CDR3 for beta chain variable domain of TCR clone 95105 (TRBV7-9, TRBJ2-3)
CASSLEDGTDTQYF

SEQ ID NO: 190211 - protein, 13 aa, Homo sapiens
  CDR3 for alpha chain variable domain of TCR clone 95106 (TRAV17, TRAJ9)
CATDYTGGFKTIF

SEQ ID NO: 190212 - protein, 15 aa, Homo sapiens
  CDR3 for beta chain variable domain of TCR clone 95106 (TRBV28, TRBJ1-3)
CASSMGWASGNTIYF

SEQ ID NO: 190213 - protein, 14 aa, Homo sapiens
  CDR3 for alpha chain variable domain of TCR clone 95107 (TRAV17, TRAJ32)
CATDPGVATNKLIF

SEQ ID NO: 190214 - protein, 14 aa, Homo sapiens
  CDR3 for beta chain variable domain of TCR clone 95107 (TRBV2, TRBJ1-5)
CASSENRGGQPQHF

SEQ ID NO: 190215 - protein, 12 aa, Homo sapiens
  CDR3 for alpha chain variable domain of TCR clone 95108 (TRAV25, TRAJ11)
CAGASGYSTLTF

SEQ ID NO: 190216 - protein, 17 aa, Homo sapiens
  CDR3 for beta chain variable domain of TCR clone 95108 (TRBV7-3, TRBJ2-3)
CASSLMKRMRGADTQYF

SEQ ID NO: 190217 - protein, 13 aa, Homo sapiens
  CDR3 for alpha chain variable domain of TCR clone 95109 (TRAV17, TRAJ57)
RAPSQGGSEKLVF

SEQ ID NO: 190218 - protein, 16 aa, Homo sapiens
  CDR3 for beta chain variable domain of TCR clone 95109 (TRBV12-4, TRBJ1-5)
CASSRPVGGSNQPQHF

SEQ ID NO: 190219 - protein, 14 aa, Homo sapiens
  CDR3 for alpha chain variable domain of TCR clone 95110 (TRAV29/DV5, TRAJ36)
CAARRKTGANNLFF

SEQ ID NO: 190220 - protein, 14 aa, Homo sapiens
  CDR3 for beta chain variable domain of TCR clone 95110 (TRBV12-5, TRBJ2-5)
CGSGSRTHQETQYF

SEQ ID NO: 190221 - protein, 13 aa, Homo sapiens
  CDR3 for alpha chain variable domain of TCR clone 95111 (TRAV2, TRAJ29)
CAAQNSGDTPLVF

SEQ ID NO: 190222 - protein, 14 aa, Homo sapiens
  CDR3 for beta chain variable domain of TCR clone 95111 (TRBV7-9, TRBJ2-4)
CASSLAMGGNIQYF

SEQ ID NO: 190223 - protein, 12 aa, Homo sapiens
  CDR3 for alpha chain variable domain of TCR clone 95112 (TRAV12-3, TRAJ17)
CAMTLTGNKLPF

SEQ ID NO: 190224 - protein, 15 aa, Homo sapiens
  CDR3 for beta chain variable domain of TCR clone 95112 (TRBV20-1, TRBJ2-7)
CSARDRVSGMDEQCF

SEQ ID NO: 190225 - protein, 13 aa, Homo sapiens
  CDR3 for alpha chain variable domain of TCR clone 95113 (TRAV16, TRAJ34)
CALSPYNTDNLIF

SEQ ID NO: 190226 - protein, 17 aa, Homo sapiens
  CDR3 for beta chain variable domain of TCR clone 95113 (TRBV5-1, TRBJ2-1)
CASSTGTSGYSYNEQFF

SEQ ID NO: 190227 - protein, 15 aa, Homo sapiens
  CDR3 for alpha chain variable domain of TCR clone 95114 (TRAV3, TRAJ4)
CAVRDGIGGYNKLIF

SEQ ID NO: 190228 - protein, 13 aa, Homo sapiens
  CDR3 for beta chain variable domain of TCR clone 95114 (TRBV12-5, TRBJ1-2)
CASGVRTGNGYTF

SEQ ID NO: 190229 - protein, 14 aa, Homo sapiens
  CDR3 for alpha chain variable domain of TCR clone 95115 (TRAV12-2, TRAJ17)
CAVLFKAAGNKLTF

SEQ ID NO: 190230 - protein, 17 aa, Homo sapiens
  CDR3 for beta chain variable domain of TCR clone 95115 (TRBV20-1, TRBJ2-2)
CSASESGQGGLTGELFF

SEQ ID NO: 190231 - protein, 12 aa, Homo sapiens
  CDR3 for alpha chain variable domain of TCR clone 95116 (TRAV12-3, TRAJ17)
CAMTLTGNKLTF

SEQ ID NO: 190232 - protein, 14 aa, Homo sapiens
  CDR3 for beta chain variable domain of TCR clone 95116 (TRBV7-3, TRBJ2-1)
CASSALAGGPEQFF

SEQ ID NO: 190233 - protein, 12 aa, Homo sapiens
  CDR3 for alpha chain variable domain of TCR clone 95117 (TRAV12-3, TRAJ17)
CAMTLTGNKLTF

SEQ ID NO: 190234 - protein, 13 aa, Homo sapiens
  CDR3 for beta chain variable domain of TCR clone 95117 (TRBV19, TRBJ2-1)
CASSTGGSNEQFF

SEQ ID NO: 190235 - protein, 15 aa, Homo sapiens
  CDR3 for alpha chain variable domain of TCR clone 95118 (TRAV38-1, TRAJ37)
CAFIHGSGTTGKLIF

SEQ ID NO: 190236 - protein, 12 aa, Homo sapiens
  CDR3 for beta chain variable domain of TCR clone 95118 (TRBV7-9, TRBJ2-7)
CASSFGSYEQYF

SEQ ID NO: 190237 - protein, 14 aa, Homo sapiens
  CDR3 for alpha chain variable domain of TCR clone 95119 (TRAV12-2, TRAJ17)
CAVLFKAAGNKLTF

SEQ ID NO: 190238 - protein, 16 aa, Homo sapiens
  CDR3 for beta chain variable domain of TCR clone 95119 (TRBV6-1, TRBJ2-5)
CASSETLDRGAETQYF

SEQ ID NO: 190239 - protein, 14 aa, Homo sapiens
  CDR3 for alpha chain variable domain of TCR clone 95120 (TRAV2, TRAJ9)
CAVEDRSGGLKTIF

SEQ ID NO: 190240 - protein, 15 aa, Homo sapiens
  CDR3 for beta chain variable domain of TCR clone 95120 (TRBV5-7, TRBJ1-5)
CASSYGKLWDQPQHF

SEQ ID NO: 190241 - protein, 12 aa, Homo sapiens
  CDR3 for alpha chain variable domain of TCR clone 95121 (TRAV20, TRAJ56)
CAVTVANSKLTF

SEQ ID NO: 190242 - protein, 14 aa, Homo sapiens
  CDR3 for beta chain variable domain of TCR clone 95121 (TRBV20-1, TRBJ2-5)
CSALVPGYQETQYF

SEQ ID NO: 190243 - protein, 14 aa, Homo sapiens
  CDR3 for alpha chain variable domain of TCR clone 95122 (TRAV12-3, TRAJ10)
SHLPLPGGGNKLTF

SEQ ID NO: 190244 - protein, 14 aa, Homo sapiens
  CDR3 for beta chain variable domain of TCR clone 95122 (TRBV19, TRBJ2-7)
CASTVQGRPYEQYF

SEQ ID NO: 190245 - protein, 13 aa, Homo sapiens
  CDR3 for alpha chain variable domain of TCR clone 95123 (TRAV4, TRAJ42)
CLVGGGSQGNLIF

SEQ ID NO: 190246 - protein, 13 aa, Homo sapiens
  CDR3 for beta chain variable domain of TCR clone 95123 (TRBV12-4, TRBJ2-7)
CASSPTETYEQYF

SEQ ID NO: 190247 - protein, 11 aa, Homo sapiens
  CDR3 for alpha chain variable domain of TCR clone 95124 (TRAV4, TRAJ20)
CLVGDKVTTTS

SEQ ID NO: 190248 - protein, 15 aa, Homo sapiens
  CDR3 for beta chain variable domain of TCR clone 95124 (TRBV18, TRBJ2-7)
CASSPSSTGNYEQHF

SEQ ID NO: 190249 - protein, 12 aa, Homo sapiens
  CDR3 for alpha chain variable domain of TCR clone 95125 (TRAV13-2, TRAJ39)
CAENNAGNMLTF

SEQ ID NO: 190250 - protein, 12 aa, Homo sapiens
  CDR3 for beta chain variable domain of TCR clone 95125 (TRBV11-2, TRBJ2-2)
CASSLGGGELIF

SEQ ID NO: 190251 - protein, 13 aa, Homo sapiens
  CDR3 for alpha chain variable domain of TCR clone 95126 (TRAV38-2/DV8, TRAJ34)
CAYRTWNTDKLIF

SEQ ID NO: 190252 - protein, 19 aa, Homo sapiens
  CDR3 for beta chain variable domain of TCR clone 95126 (TRBV7-7, TRBJ2-7)
CASSPQDRDLPGGTYEQYF

SEQ ID NO: 190253 - protein, 14 aa, Homo sapiens
  CDR3 for alpha chain variable domain of TCR clone 95127 (TRAV35, TRAJ50)
CAGHRKTSYDKLIF

SEQ ID NO: 190254 - protein, 17 aa, Homo sapiens
  CDR3 for beta chain variable domain of TCR clone 95127 (TRBV7-8, TRBJ2-6)
CANSAGTGGAGANVLTF

SEQ ID NO: 190255 - protein, 14 aa, Homo sapiens
  CDR3 for alpha chain variable domain of TCR clone 95128 (TRAV12-2, TRAJ40)
CAVKIPSGTYKYNF

SEQ ID NO: 190256 - protein, 12 aa, Homo sapiens
  CDR3 for beta chain variable domain of TCR clone 95128 (TRBV11-2, TRBJ2-1)
CASSPGNNEQFF

SEQ ID NO: 190257 - protein, 13 aa, Homo sapiens
  CDR3 for alpha chain variable domain of TCR clone 95129 (TRAV12-2, TRAJ20)
CAVYPSNDYKLSF

SEQ ID NO: 190258 - protein, 15 aa, Homo sapiens
  CDR3 for beta chain variable domain of TCR clone 95129 (TRBV18, TRBJ1-2)
CASSPGNGLRYGYTF

SEQ ID NO: 190259 - protein, 15 aa, Homo sapiens
  CDR3 for alpha chain variable domain of TCR clone 95130 (TRAV8-4, TRAJ15)
CAVSDPVQAGTALIF

SEQ ID NO: 190260 - protein, 13 aa, Homo sapiens
  CDR3 for beta chain variable domain of TCR clone 95130 (TRBV19, TRBJ1-2)
CASSVPGQDGYTF

SEQ ID NO: 190261 - protein, 15 aa, Homo sapiens
  CDR3 for alpha chain variable domain of TCR clone 95131 (TRAV26-1, TRAJ29)
CIVRVEGSGNTPLVF

SEQ ID NO: 190262 - protein, 14 aa, Homo sapiens
  CDR3 for beta chain variable domain of TCR clone 95131 (TRBV7-8, TRBJ2-3)
CASSLEAGTDTQYF

SEQ ID NO: 190263 - protein, 15 aa, Homo sapiens
  CDR3 for alpha chain variable domain of TCR clone 95132 (TRAV12-2, TRAJ53)
CAVNGGGGRNYKLTF

SEQ ID NO: 190264 - protein, 14 aa, Homo sapiens
  CDR3 for beta chain variable domain of TCR clone 95132 (TRBV18, TRBJ2-7)
CASSPRGGAYEQYF

SEQ ID NO: 190265 - protein, 15 aa, Homo sapiens
  CDR3 for alpha chain variable domain of TCR clone 95133 (TRAV21, TRAJ24)
CAARSSTDSWGKLQF

SEQ ID NO: 190266 - protein, 15 aa, Homo sapiens
  CDR3 for beta chain variable domain of TCR clone 95133 (TRBV5-1, TRBJ2-7)
CASSLNGGPAREQYF

SEQ ID NO: 190267 - protein, 16 aa, Homo sapiens
  CDR3 for alpha chain variable domain of TCR clone 95134 (TRAV30, TRAJ24)
CGTEIVDADSWGKFQF

SEQ ID NO: 190268 - protein, 14 aa, Homo sapiens
  CDR3 for beta chain variable domain of TCR clone 95134 (TRBV5-7, TRBJ1-2)
CASSLVRGDYGYTF

SEQ ID NO: 190269 - protein, 14 aa, Homo sapiens
  CDR3 for alpha chain variable domain of TCR clone 95135 (TRAV13-1, TRAJ40)
CAASMTSGTYKYIF

SEQ ID NO: 190270 - protein, 16 aa, Homo sapiens
  CDR3 for beta chain variable domain of TCR clone 95135 (TRBV2, TRBJ2-3)
CASSTSVEGVTDTQYF

SEQ ID NO: 190271 - protein, 12 aa, Homo sapiens
  CDR3 for alpha chain variable domain of TCR clone 95136 (TRAV13-1, TRAJ21)
CAAKEGFNKFYF

SEQ ID NO: 190272 - protein, 14 aa, Homo sapiens
  CDR3 for beta chain variable domain of TCR clone 95136 (TRBV23-1, TRBJ2-5)
CASSFLRSQENQYF

SEQ ID NO: 190273 - protein, 16 aa, Homo sapiens
  CDR3 for alpha chain variable domain of TCR clone 95137 (TRAV3, TRAJ37)
CAVRPHGSGNPGKLIF

SEQ ID NO: 190274 - protein, 17 aa, Homo sapiens
  CDR3 for beta chain variable domain of TCR clone 95137 (TRBV5-1, TRBJ2-5)
CASSPVALGQNQETQYF

SEQ ID NO: 190275 - protein, 14 aa, Homo sapiens
  CDR3 for alpha chain variable domain of TCR clone 95138 (TRAV21, TRAJ58)
CAMRRGRSGSRLTF

SEQ ID NO: 190276 - protein, 13 aa, Homo sapiens
  CDR3 for beta chain variable domain of TCR clone 95138 (TRBV7-2, TRBJ1-6)
CASSLKFDSPLHF

SEQ ID NO: 190277 - protein, 14 aa, Homo sapiens
  CDR3 for alpha chain variable domain of TCR clone 95139 (TRAV1-2, TRAJ16)
CAVNRFSDGQKLLF

SEQ ID NO: 190278 - protein, 14 aa, Homo sapiens
  CDR3 for beta chain variable domain of TCR clone 95139 (TRBV19, TRBJ2-2)
CASSTLHRSEELFF

SEQ ID NO: 190279 - protein, 14 aa, Homo sapiens
  CDR3 for alpha chain variable domain of TCR clone 95140 (TRAV3, TRAJ37)
CAVKESGNTGKLIF

SEQ ID NO: 190280 - protein, 15 aa, Homo sapiens
  CDR3 for beta chain variable domain of TCR clone 95140 (TRBV7-9, TRBJ2-5)
CASSRRTGGGETQYF

SEQ ID NO: 190281 - protein, 17 aa, Homo sapiens
  CDR3 for alpha chain variable domain of TCR clone 95141 (TRAV3, TRAJ6)
CAARGGPRAGGSYIPTF

SEQ ID NO: 190282 - protein, 14 aa, Homo sapiens
  CDR3 for beta chain variable domain of TCR clone 95141 (TRBV7-2, TRBJ2-7)
CASSPKTSFYEQYF

SEQ ID NO: 190283 - protein, 14 aa, Homo sapiens
  CDR3 for alpha chain variable domain of TCR clone 95142 (TRAV1-2, TRAJ16)
CAVNRFSDGQNLLF

SEQ ID NO: 190284 - protein, 16 aa, Homo sapiens
  CDR3 for beta chain variable domain of TCR clone 95142 (TRBV12-5, TRBJ2-5)
CASGPRTSGNQETQYF

SEQ ID NO: 190285 - protein, 13 aa, Homo sapiens
  CDR3 for alpha chain variable domain of TCR clone 95143 (TRAV2, TRAJ40)
CAVFTSGTYKYIF

SEQ ID NO: 190286 - protein, 14 aa, Homo sapiens
  CDR3 for beta chain variable domain of TCR clone 95143 (TRBV7-9, TRBJ2-1)
CASSSMVGFGEQFF

SEQ ID NO: 190287 - protein, 13 aa, Homo sapiens
  CDR3 for alpha chain variable domain of TCR clone 95144 (TRAV12-2, TRAJ39)
CAVNNNAGNMLTF

SEQ ID NO: 190288 - protein, 13 aa, Homo sapiens
  CDR3 for beta chain variable domain of TCR clone 95144 (TRBV2, TRBJ1-5)
CATAGPGNQPQHV

SEQ ID NO: 190289 - protein, 14 aa, Homo sapiens
  CDR3 for alpha chain variable domain of TCR clone 95145 (TRAV16, TRAJ26)
CALSSANYGQNFVF

SEQ ID NO: 190290 - protein, 16 aa, Homo sapiens
  CDR3 for beta chain variable domain of TCR clone 95145 (TRBV20-1, TRBJ1-4)
CSATGQGLLTNEKLFF

SEQ ID NO: 190291 - protein, 11 aa, Homo sapiens
  CDR3 for alpha chain variable domain of TCR clone 95146 (TRAV12-2, TRAJ31)
CAVTRWARLMF

SEQ ID NO: 190292 - protein, 14 aa, Homo sapiens
  CDR3 for beta chain variable domain of TCR clone 95146 (TRBV5-4, TRBJ2-2)
CASRLDGGTGELFF

SEQ ID NO: 190293 - protein, 13 aa, Homo sapiens
  CDR3 for alpha chain variable domain of TCR clone 95147 (TRAV12-2, TRAJ34)
CAVRGYNPDKLIF

SEQ ID NO: 190294 - protein, 18 aa, Homo sapiens
  CDR3 for beta chain variable domain of TCR clone 95147 (TRBV11-2, TRBJ2-3)
CASSLGGASRGAPNTQYF

SEQ ID NO: 190295 - protein, 10 aa, Homo sapiens
  CDR3 for alpha chain variable domain of TCR clone 95148 (TRAV23/DV6, TRAJ57)
CAASSTLPQG

SEQ ID NO: 190296 - protein, 14 aa, Homo sapiens
  CDR3 for beta chain variable domain of TCR clone 95148 (TRBV18, TRBJ2-5)
CASSPGVSQETQYF

SEQ ID NO: 190297 - protein, 14 aa, Homo sapiens
  CDR3 for alpha chain variable domain of TCR clone 95149 (TRAV12-2, TRAJ33)
CAVKRARSNYQLTW

SEQ ID NO: 190298 - protein, 15 aa, Homo sapiens
  CDR3 for beta chain variable domain of TCR clone 95149 (TRBV20-1, TRBJ2-7)
CSARDRVSGMDGQYF

SEQ ID NO: 190299 - protein, 12 aa, Homo sapiens
  CDR3 for alpha chain variable domain of TCR clone 95150 (TRAV12-1, TRAJ34)
CVVAGATDKRIF

SEQ ID NO: 190300 - protein, 16 aa, Homo sapiens
  CDR3 for beta chain variable domain of TCR clone 95150 (TRBV7-2, TRBJ1-2)
CASSSNQDRRGHGYTF

SEQ ID NO: 190301 - protein, 14 aa, Homo sapiens
  CDR3 for alpha chain variable domain of TCR clone 95151 (TRAV12-3, TRAJ57)
CAMSAWGGSEKLVF

SEQ ID NO: 190302 - protein, 12 aa, Homo sapiens
  CDR3 for beta chain variable domain of TCR clone 95151 (TRBV29-1, TRBJ2-3)
CSVTGGADTQYF

SEQ ID NO: 190303 - protein, 12 aa, Homo sapiens
  CDR3 for alpha chain variable domain of TCR clone 95152 (TRAV3, TRAJ20)
CAVRDPDYKLSF

SEQ ID NO: 190304 - protein, 14 aa, Homo sapiens
  CDR3 for beta chain variable domain of TCR clone 95152 (TRBV18, TRBJ1-5)
CASSPGNSNQPQHF

SEQ ID NO: 190305 - protein, 15 aa, Homo sapiens
  CDR3 for alpha chain variable domain of TCR clone 95153 (TRAV3, TRAJ22)
CAVRDRGGSARQLTF

SEQ ID NO: 190306 - protein, 15 aa, Homo sapiens
  CDR3 for beta chain variable domain of TCR clone 95153 (TRBV7-6, TRBJ2-7)
CASSGRRDTFGEQYF

SEQ ID NO: 190307 - protein, 13 aa, Homo sapiens
  CDR3 for alpha chain variable domain of TCR clone 95154 (TRAV12-3, TRAJ9)
CATRNTGGFKTIF

SEQ ID NO: 190308 - protein, 14 aa, Homo sapiens
  CDR3 for beta chain variable domain of TCR clone 95154 (TRBV11-2, TRBJ2-7)
CASSSTGEGYEQYF

SEQ ID NO: 190309 - protein, 13 aa, Homo sapiens
  CDR3 for alpha chain variable domain of TCR clone 95155 (TRAV20, TRAJ20)
CAVRWVRDYKLSF

SEQ ID NO: 190310 - protein, 15 aa, Homo sapiens
  CDR3 for beta chain variable domain of TCR clone 95155 (TRBV10-2, TRBJ2-6)
CASSEQGTGANVLTF

SEQ ID NO: 190311 - protein, 18 aa, Homo sapiens
  CDR3 for alpha chain variable domain of TCR clone 95156 (TRAV13-1, TRAJ52)
CAASKRSAGGTSYGKLTF

SEQ ID NO: 190312 - protein, 15 aa, Homo sapiens
  CDR3 for beta chain variable domain of TCR clone 95156 (TRBV7-9, TRBJ2-7)
CASSLALAEAYEQYF

SEQ ID NO: 190313 - protein, 13 aa, Homo sapiens
  CDR3 for alpha chain variable domain of TCR clone 95157 (TRAV1-1, TRAJ9)
CAAKNTGGFKTIF

SEQ ID NO: 190314 - protein, 13 aa, Homo sapiens
  CDR3 for beta chain variable domain of TCR clone 95157 (TRBV7-9, TRBJ1-2)
CASSLRQNYGYTF

SEQ ID NO: 190315 - protein, 14 aa, Homo sapiens
  CDR3 for alpha chain variable domain of TCR clone 95158 (TRAV8-2, TRAJ4)
CVVSPSGGYNKLIF

SEQ ID NO: 190316 - protein, 14 aa, Homo sapiens
  CDR3 for beta chain variable domain of TCR clone 95158 (TRBV19, TRBJ2-5)
CASSSSGTQETQYF

SEQ ID NO: 190317 - protein, 16 aa, Homo sapiens
  CDR3 for alpha chain variable domain of TCR clone 95159 (TRAV30, TRAJ24)
CGTEVVDADSWGKFQF

SEQ ID NO: 190318 - protein, 14 aa, Homo sapiens
  CDR3 for beta chain variable domain of TCR clone 95159 (TRBV12-5, TRBJ2-5)
CASGSRTHQETHYF

SEQ ID NO: 190319 - protein, 17 aa, Homo sapiens
  CDR3 for alpha chain variable domain of TCR clone 95160 (TRAV26-1, TRAJ37)
CIVRVITVSSNTGKLIF

SEQ ID NO: 190320 - protein, 14 aa, Homo sapiens
  CDR3 for beta chain variable domain of TCR clone 95160 (TRBV7-9, TRBJ1-1)
CASTPLQSYTEAFF

SEQ ID NO: 190321 - protein, 17 aa, Homo sapiens
  CDR3 for alpha chain variable domain of TCR clone 95161 (TRAV3, TRAJ6)
CAVRDGPRAGGSYIPTF

SEQ ID NO: 190322 - protein, 15 aa, Homo sapiens
  CDR3 for beta chain variable domain of TCR clone 95161 (TRBV19, TRBJ2-3)
CAAGDTNAPNDTQYF

SEQ ID NO: 190323 - protein, 12 aa, Homo sapiens
  CDR3 for alpha chain variable domain of TCR clone 95162 (TRAV12-2, TRAJ21)
CAVRYNFNKFYF

SEQ ID NO: 190324 - protein, 20 aa, Homo sapiens
  CDR3 for beta chain variable domain of TCR clone 95162 (TRBV7-8, TRBJ2-2)
CASSHLFPGPTIHITGELFF

SEQ ID NO: 190325 - protein, 12 aa, Homo sapiens
  CDR3 for alpha chain variable domain of TCR clone 95163 (TRAV12-1, TRAJ34)
CVVAGATDKLIF

SEQ ID NO: 190326 - protein, 12 aa, Homo sapiens
  CDR3 for beta chain variable domain of TCR clone 95163 (TRBV7-9, TRBJ1-1)
CASSLVRGEAVF

SEQ ID NO: 190327 - protein, 13 aa, Homo sapiens
  CDR3 for alpha chain variable domain of TCR clone 95164 (TRAV17, TRAJ5)
CAPMDTGRRALTF

SEQ ID NO: 190328 - protein, 12 aa, Homo sapiens
  CDR3 for beta chain variable domain of TCR clone 95164 (TRBV12-4, TRBJ2-3)
CASSSTTDTQYF

SEQ ID NO: 190329 - protein, 14 aa, Homo sapiens
  CDR3 for alpha chain variable domain of TCR clone 95165 (TRAV2, TRAJ22)
CAVGRGGSARQLTF

SEQ ID NO: 190330 - protein, 12 aa, Homo sapiens
  CDR3 for beta chain variable domain of TCR clone 95165 (TRBV19, TRBJ2-1)
CASSMRDTEQFF

SEQ ID NO: 190331 - protein, 13 aa, Homo sapiens
  CDR3 for alpha chain variable domain of TCR clone 95166 (TRAV38-1, TRAJ42)
CARWGGSQGNLIF

SEQ ID NO: 190332 - protein, 14 aa, Homo sapiens
  CDR3 for beta chain variable domain of TCR clone 95166 (TRBV25-1, TRBJ1-4)
CASSGGGQPEKLFF

SEQ ID NO: 190333 - protein, 14 aa, Homo sapiens
  CDR3 for alpha chain variable domain of TCR clone 95167 (TRAV1-2, TRAJ6)
CAVSLSGGSCIPTF

SEQ ID NO: 190334 - protein, 11 aa, Homo sapiens
  CDR3 for beta chain variable domain of TCR clone 95167 (TRBV6-3, TRBJ2-3)
CATGQADTQYF

SEQ ID NO: 190335 - protein, 14 aa, Homo sapiens
  CDR3 for alpha chain variable domain of TCR clone 95168 (TRAV3, TRAJ17)
CAVRDAAAGNKLTF

SEQ ID NO: 190336 - protein, 16 aa, Homo sapiens
  CDR3 for beta chain variable domain of TCR clone 95168 (TRBV12-4, TRBJ1-5)
CASSRPVGGSNQPQHF

SEQ ID NO: 190337 - protein, 13 aa, Homo sapiens
  CDR3 for alpha chain variable domain of TCR clone 95169 (TRAV26-1, )
CIVSHRVEGFWNQ

SEQ ID NO: 190338 - protein, 14 aa, Homo sapiens
  CDR3 for beta chain variable domain of TCR clone 95169 (TRBV20-1, TRBJ2-7)
CSAWTALSSYEQHF

SEQ ID NO: 190339 - protein, 15 aa, Homo sapiens
  CDR3 for alpha chain variable domain of TCR clone 95170 (TRAV26-1, TRAJ23)
CIFRVAGYQGGKLIF

SEQ ID NO: 190340 - protein, 18 aa, Homo sapiens
  CDR3 for beta chain variable domain of TCR clone 95170 (TRBV28, TRBJ2-1)
CASSSTSGRANSYNEQFF

SEQ ID NO: 190341 - protein, 18 aa, Homo sapiens
  CDR3 for alpha chain variable domain of TCR clone 95171 (TRAV12-3, TRAJ52)
CAMSVGGAGGTSYGKLTF

SEQ ID NO: 190342 - protein, 13 aa, Homo sapiens
  CDR3 for beta chain variable domain of TCR clone 95171 (TRBV5-5, TRBJ1-2)
CASSFWRGEDYTF

SEQ ID NO: 190343 - protein, 16 aa, Homo sapiens
  CDR3 for alpha chain variable domain of TCR clone 95172 (TRAV12-2, TRAJ10)
CAVNRVLTGGGNKLTF

SEQ ID NO: 190344 - protein, 14 aa, Homo sapiens
  CDR3 for beta chain variable domain of TCR clone 95172 (TRBV12-5, TRBJ2-5)
CASGSRTHQETQYF

SEQ ID NO: 190345 - protein, 18 aa, Homo sapiens
  CDR3 for alpha chain variable domain of TCR clone 95173 (TRAV29/DV5, TRAJ52)
CAAGFRGDGGTSYGKLTF

SEQ ID NO: 190346 - protein, 16 aa, Homo sapiens
  CDR3 for beta chain variable domain of TCR clone 95173 (TRBV7-3, TRBJ2-2)
CASSLKRGTLSGELFF

SEQ ID NO: 190347 - protein, 13 aa, Homo sapiens
  CDR3 for alpha chain variable domain of TCR clone 95174 (TRAV21, TRAJ57)
CAVTQCGSEKLVF

SEQ ID NO: 190348 - protein, 17 aa, Homo sapiens
  CDR3 for beta chain variable domain of TCR clone 95174 (TRBV20-1, TRBJ2-2)
CSASGSGQGGLTGELFF

SEQ ID NO: 190349 - protein, 14 aa, Homo sapiens
  CDR3 for alpha chain variable domain of TCR clone 95175 (TRAV21, TRAJ15)
CAVSLNQAGAALIF

SEQ ID NO: 190350 - protein, 11 aa, Homo sapiens
  CDR3 for beta chain variable domain of TCR clone 95175 (TRBV20-1, TRBJ2-7)
CSARTSYEQYF

SEQ ID NO: 190351 - protein, 15 aa, Homo sapiens
  CDR3 for alpha chain variable domain of TCR clone 95176 (TRAV8-6, TRAJ6)
CAVSGESGGSYIPTF

SEQ ID NO: 190352 - protein, 14 aa, Homo sapiens
  CDR3 for beta chain variable domain of TCR clone 95176 (TRBV9, TRBJ2-4)
CASSPAGTSGFQYF

SEQ ID NO: 190353 - protein, 14 aa, Homo sapiens
  CDR3 for alpha chain variable domain of TCR clone 95177 (TRAV12-2, TRAJ48)
CAVYAFFGNEKLTF

SEQ ID NO: 190354 - protein, 13 aa, Homo sapiens
  CDR3 for beta chain variable domain of TCR clone 95177 (TRBV28, TRBJ2-7)
CAGAQQGLDEQYF

SEQ ID NO: 190355 - protein, 16 aa, Homo sapiens
  CDR3 for alpha chain variable domain of TCR clone 95178 (TRAV30, TRAJ24)
CGTEIVDADSWGKFQF

SEQ ID NO: 190356 - protein, 16 aa, Homo sapiens
  CDR3 for beta chain variable domain of TCR clone 95178 (TRBV4-1, TRBJ2-1)
CASSQEAGQGSDEQFF

SEQ ID NO: 190357 - protein, 14 aa, Homo sapiens
  CDR3 for alpha chain variable domain of TCR clone 95179 (TRAV13-2, TRAJ17)
CAENSKAAGNKLTF

SEQ ID NO: 190358 - protein, 12 aa, Homo sapiens
  CDR3 for beta chain variable domain of TCR clone 95179 (TRBV11-2, TRBJ2-1)
CASSPGNNEQFF

SEQ ID NO: 190359 - protein, 14 aa, Homo sapiens
  CDR3 for alpha chain variable domain of TCR clone 95180 (TRAV17, TRAJ57)
CATDPQGGSEELVF

SEQ ID NO: 190360 - protein, 13 aa, Homo sapiens
  CDR3 for beta chain variable domain of TCR clone 95180 (TRBV19, TRBJ2-7)
CASSPRQSYEQYF

SEQ ID NO: 190361 - protein, 15 aa, Homo sapiens
  CDR3 for alpha chain variable domain of TCR clone 95181 (TRAV38-1, TRAJ57)
CAFMDSQGGSEKLVF

SEQ ID NO: 190362 - protein, 13 aa, Homo sapiens
  CDR3 for beta chain variable domain of TCR clone 95181 (TRBV19, TRBJ1-2)
CASSQGQVYGYTF

SEQ ID NO: 190363 - protein, 16 aa, Homo sapiens
  CDR3 for alpha chain variable domain of TCR clone 95182 (TRAV12-3, TRAJ53)
CAMSPGSGGSNYKLTF

SEQ ID NO: 190364 - protein, 11 aa, Homo sapiens
  CDR3 for beta chain variable domain of TCR clone 95182 (TRBV27, TRBJ2-3)
CASSLGDTQYF

SEQ ID NO: 190365 - protein, 13 aa, Homo sapiens
  CDR3 for alpha chain variable domain of TCR clone 95183 (TRAV35, TRAJ33)
CAGQLYGVYQLIW

SEQ ID NO: 190366 - protein, 14 aa, Homo sapiens
  CDR3 for beta chain variable domain of TCR clone 95183 (TRBV7-2, TRBJ1-1)
CASSLGGAGTEAFL

SEQ ID NO: 190367 - protein, 13 aa, Homo sapiens
  CDR3 for alpha chain variable domain of TCR clone 95184 (TRAV8-4, TRAJ10)
CAAFTGEGNKLTF

SEQ ID NO: 190368 - protein, 15 aa, Homo sapiens
  CDR3 for beta chain variable domain of TCR clone 95184 (TRBV2, TRBJ2-3)
CASSDFEKATDTQYF

SEQ ID NO: 190369 - protein, 14 aa, Homo sapiens
  CDR3 for alpha chain variable domain of TCR clone 95185 (TRAV29/DV5, TRAJ36)
CAARRKTGANNLFF

SEQ ID NO: 190370 - protein, 15 aa, Homo sapiens
  CDR3 for beta chain variable domain of TCR clone 95185 (TRBV19, TRBJ2-7)
CASSPAGSGEALRYF

SEQ ID NO: 190371 - protein, 13 aa, Homo sapiens
  CDR3 for alpha chain variable domain of TCR clone 95186 (TRAV17, TRAJ17)
CATAKAAGNKLTF

SEQ ID NO: 190372 - protein, 15 aa, Homo sapiens
  CDR3 for beta chain variable domain of TCR clone 95186 (TRBV28, TRBJ2-7)
CASSLVAGGPYEQYF

SEQ ID NO: 190373 - protein, 14 aa, Homo sapiens
  CDR3 for alpha chain variable domain of TCR clone 95187 (TRAV23/DV6, TRAJ17)
CAASVQAAANKLTF

SEQ ID NO: 190374 - protein, 18 aa, Homo sapiens
  CDR3 for beta chain variable domain of TCR clone 95187 (TRBV20-1, TRBJ2-7)
CSAGLPPRSGGSPYEQYF

SEQ ID NO: 190375 - protein, 13 aa, Homo sapiens
  CDR3 for alpha chain variable domain of TCR clone 95188 (TRAV12-2, TRAJ34)
CAVIPYNTDKLIF

SEQ ID NO: 190376 - protein, 13 aa, Homo sapiens
  CDR3 for beta chain variable domain of TCR clone 95188 (TRBV10-3, TRBJ2-7)
CASKLAVNYEQYF

SEQ ID NO: 190377 - protein, 16 aa, Homo sapiens
  CDR3 for alpha chain variable domain of TCR clone 95189 (TRAV26-1, TRAJ32)
CIVRTNYGGATNKLIF

SEQ ID NO: 190378 - protein, 14 aa, Homo sapiens
  CDR3 for beta chain variable domain of TCR clone 95189 (TRBV27, TRBJ1-1)
CACSLLSGLSEAFF

SEQ ID NO: 190379 - protein, 13 aa, Homo sapiens
  CDR3 for alpha chain variable domain of TCR clone 95190 (TRAV12-1, TRAJ26)
CVVRRNYGQNFVF

SEQ ID NO: 190380 - protein, 14 aa, Homo sapiens
  CDR3 for beta chain variable domain of TCR clone 95190 (TRBV6-3, TRBJ1-1)
CASRYTEESTEAFF

SEQ ID NO: 190381 - protein, 13 aa, Homo sapiens
  CDR3 for alpha chain variable domain of TCR clone 95191 (TRAV8-3, TRAJ28)
CAVGAVGSYQLTF

SEQ ID NO: 190382 - protein, 14 aa, Homo sapiens
  CDR3 for beta chain variable domain of TCR clone 95191 (TRBV7-2, TRBJ2-7)
CASRSQGASYEQYF

SEQ ID NO: 190383 - protein, 15 aa, Homo sapiens
  CDR3 for alpha chain variable domain of TCR clone 95192 (TRAV23/DV6, TRAJ30)
CAASSKESRDDKIIF

SEQ ID NO: 190384 - protein, 17 aa, Homo sapiens
  CDR3 for beta chain variable domain of TCR clone 95192 (TRBV4-3, TRBJ2-1)
CASSQFSSGRASGEQFF

SEQ ID NO: 190385 - protein, 12 aa, Homo sapiens
  CDR3 for alpha chain variable domain of TCR clone 95193 (TRAV12-1, TRAJ40)
CVFYSGTYKYIF

SEQ ID NO: 190386 - protein, 14 aa, Homo sapiens
  CDR3 for beta chain variable domain of TCR clone 95193 (TRBV2, TRBJ2-1)
CASSEALIYNEQFF

SEQ ID NO: 190387 - protein, 15 aa, Homo sapiens
  CDR3 for alpha chain variable domain of TCR clone 95194 (TRAV12-2, TRAJ43)
CAFDMRFEAGTRLTV

SEQ ID NO: 190388 - protein, 18 aa, Homo sapiens
  CDR3 for beta chain variable domain of TCR clone 95194 (TRBV20-1, TRBJ2-3)
CSASGLAGGPGTTDTQYF

SEQ ID NO: 190389 - protein, 15 aa, Homo sapiens
  CDR3 for alpha chain variable domain of TCR clone 95195 (TRAV3, TRAJ3)
CAVRDGHSSASKIIF

SEQ ID NO: 190390 - protein, 14 aa, Homo sapiens
  CDR3 for beta chain variable domain of TCR clone 95195 (TRBV28, TRBJ1-4)
FASSFGTFDEKLFF

SEQ ID NO: 190391 - protein, 13 aa, Homo sapiens
  CDR3 for alpha chain variable domain of TCR clone 95196 (TRAV21, TRAJ20)
CAVGLRVDYKLSF

SEQ ID NO: 190392 - protein, 15 aa, Homo sapiens
  CDR3 for beta chain variable domain of TCR clone 95196 (TRBV7-8, TRBJ2-1)
CASSLAGGLYNEQFF

SEQ ID NO: 190393 - protein, 14 aa, Homo sapiens
  CDR3 for alpha chain variable domain of TCR clone 95197 (TRAV1-2, TRAJ6)
CAVSLSGGSYIPTF

SEQ ID NO: 190394 - protein, 15 aa, Homo sapiens
  CDR3 for beta chain variable domain of TCR clone 95197 (TRBV28, TRBJ2-7)
CANSPGGRGFYEQYF

SEQ ID NO: 190395 - protein, 15 aa, Homo sapiens
  CDR3 for alpha chain variable domain of TCR clone 95198 (TRAV21, TRAJ53)
CATLNSGGSNYKLTF

SEQ ID NO: 190396 - protein, 13 aa, Homo sapiens
  CDR3 for beta chain variable domain of TCR clone 95198 (TRBV2, TRBJ1-1)
CASTLGLNTEAFF

SEQ ID NO: 190397 - protein, 14 aa, Homo sapiens
  CDR3 for alpha chain variable domain of TCR clone 95199 (TRAV1-2, TRAJ8)
CAVREDTGFQKLVF

SEQ ID NO: 190398 - protein, 16 aa, Homo sapiens
  CDR3 for beta chain variable domain of TCR clone 95199 (TRBV20-1, TRBJ1-4)
RSAPGQGLLTNEKLFF

SEQ ID NO: 190399 - protein, 21 aa, Homo sapiens
  CDR3 for alpha chain variable domain of TCR clone 95200 (TRAV25, TRAJ47)
TATQTTDVGTYFWEYGNKLVF

SEQ ID NO: 190400 - protein, 12 aa, Homo sapiens
  CDR3 for beta chain variable domain of TCR clone 95200 (TRBV14, TRBJ1-1)
CASSQLKGLAFF

SEQ ID NO: 190401 - protein, 15 aa, Homo sapiens
  CDR3 for alpha chain variable domain of TCR clone 95201 (TRAV17, TRAJ23)
TSVLRIYNQGGKLIF

SEQ ID NO: 190402 - protein, 16 aa, Homo sapiens
  CDR3 for beta chain variable domain of TCR clone 95201 (TRBV2, TRBJ1-3)
CASSRTGGSTGNTIYF

SEQ ID NO: 190403 - protein, 10 aa, Homo sapiens
  CDR3 for alpha chain variable domain of TCR clone 95202 (TRAV1-2, TRAJ31)
CAFFDARLMF

SEQ ID NO: 190404 - protein, 16 aa, Homo sapiens
  CDR3 for beta chain variable domain of TCR clone 95202 (TRBV19, TRBJ2-1)
CASSKAGPSSYNEQFF

SEQ ID NO: 190405 - protein, 12 aa, Homo sapiens
  CDR3 for alpha chain variable domain of TCR clone 95203 (TRAV2, TRAJ9)
CAVGAGGFKTIF

SEQ ID NO: 190406 - protein, 15 aa, Homo sapiens
  CDR3 for beta chain variable domain of TCR clone 95203 (TRBV7-3, TRBJ2-2)
CASSETGQGTGELFF

SEQ ID NO: 190407 - protein, 14 aa, Homo sapiens
  CDR3 for alpha chain variable domain of TCR clone 95204 (TRAV26-1, TRAJ38)
CIADNAGNNRKLIW

SEQ ID NO: 190408 - protein, 13 aa, Homo sapiens
  CDR3 for beta chain variable domain of TCR clone 95204 (TRBV4-1, TRBJ2-7)
CASSQGQAYEQYF

SEQ ID NO: 190409 - protein, 14 aa, Homo sapiens
  CDR3 for alpha chain variable domain of TCR clone 95205 (TRAV13-1, TRAJ39)
CAASYNNAGNILTF

SEQ ID NO: 190410 - protein, 13 aa, Homo sapiens
  CDR3 for beta chain variable domain of TCR clone 95205 (TRBV24-1, TRBJ1-4)
CATNNGRSEKLFF

SEQ ID NO: 190411 - protein, 18 aa, Homo sapiens
  CDR3 for alpha chain variable domain of TCR clone 95206 (TRAV12-3, TRAJ52)
CAMSVGGAGGTSYGKLTF

SEQ ID NO: 190412 - protein, 16 aa, Homo sapiens
  CDR3 for beta chain variable domain of TCR clone 95206 (TRBV7-3, TRBJ2-1)
CASSSIRRAPTMSSSS

SEQ ID NO: 190413 - protein, 14 aa, Homo sapiens
  CDR3 for alpha chain variable domain of TCR clone 95207 (TRAV8-4, TRAJ38)
CARLTAGNNRKLIW

SEQ ID NO: 190414 - protein, 12 aa, Homo sapiens
  CDR3 for beta chain variable domain of TCR clone 95207 (TRBV6-1, TRBJ2-7)
CASSEPLYEQYF

SEQ ID NO: 190415 - protein, 15 aa, Homo sapiens
  CDR3 for alpha chain variable domain of TCR clone 95208 (TRAV3, TRAJ5)
CAVRDLDTGRRALTF

SEQ ID NO: 190416 - protein, 16 aa, Homo sapiens
  CDR3 for beta chain variable domain of TCR clone 95208 (TRBV20-1, TRBJ1-2)
CSASVGQGVANYGYTF

SEQ ID NO: 190417 - protein, 16 aa, Homo sapiens
  CDR3 for alpha chain variable domain of TCR clone 95209 (TRAV13-1, TRAJ37)
CAASSLGSSNTGKIIF

SEQ ID NO: 190418 - protein, 12 aa, Homo sapiens
  CDR3 for beta chain variable domain of TCR clone 95209 (TRBV6-1, TRBJ2-5)
CASSEGRETQYF

SEQ ID NO: 190419 - protein, 13 aa, Homo sapiens
  CDR3 for alpha chain variable domain of TCR clone 95210 (TRAV6, TRAJ33)
CALPMDSNYQLIW

SEQ ID NO: 190420 - protein, 14 aa, Homo sapiens
  CDR3 for beta chain variable domain of TCR clone 95210 (TRBV19, TRBJ2-1)
CASPTFVLSGEQFF

SEQ ID NO: 190421 - protein, 15 aa, Homo sapiens
  CDR3 for alpha chain variable domain of TCR clone 95211 (TRAV21, TRAJ53)
CATLNSGGSNYKLTF

SEQ ID NO: 190422 - protein, 17 aa, Homo sapiens
  CDR3 for beta chain variable domain of TCR clone 95211 (TRBV11-2, TRBJ2-1)
CASSLYPPGVEYNEQFL

SEQ ID NO: 190423 - protein, 13 aa, Homo sapiens
  CDR3 for alpha chain variable domain of TCR clone 95212 (TRAV13-1, TRAJ43)
CAASLSNNNEMRF

SEQ ID NO: 190424 - protein, 14 aa, Homo sapiens
  CDR3 for beta chain variable domain of TCR clone 95212 (TRBV5-1, TRBJ2-5)
CASSLAGKQETQYF

SEQ ID NO: 190425 - protein, 13 aa, Homo sapiens
  CDR3 for alpha chain variable domain of TCR clone 95213 (TRAV13-1, TRAJ9)
CAARITGGFKTIF

SEQ ID NO: 190426 - protein, 13 aa, Homo sapiens
  CDR3 for beta chain variable domain of TCR clone 95213 (TRBV7-9, TRBJ1-2)
CASSLKQNYGYTF

SEQ ID NO: 190427 - protein, 12 aa, Homo sapiens
  CDR3 for alpha chain variable domain of TCR clone 95214 (TRAV13-2, TRAJ23)
CAERHRGGKLIF

SEQ ID NO: 190428 - protein, 15 aa, Homo sapiens
  CDR3 for beta chain variable domain of TCR clone 95214 (TRBV7-9, TRBJ1-6)
CASSSPGRGHSPLHF

SEQ ID NO: 190429 - protein, 10 aa, Homo sapiens
  CDR3 for alpha chain variable domain of TCR clone 95215 (TRAV23/DV6, TRAJ4)
CAARDFWSRD

SEQ ID NO: 190430 - protein, 13 aa, Homo sapiens
  CDR3 for beta chain variable domain of TCR clone 95215 (TRBV7-2, TRBJ1-1)
CASSRNTNTEAVF

SEQ ID NO: 190431 - protein, 13 aa, Homo sapiens
  CDR3 for alpha chain variable domain of TCR clone 95216 (TRAV13-1, TRAJ10)
CAATAGGGNKLTF

SEQ ID NO: 190432 - protein, 12 aa, Homo sapiens
  CDR3 for beta chain variable domain of TCR clone 95216 (TRBV7-3, TRBJ2-1)
CASSFQSEPQFF

SEQ ID NO: 190433 - protein, 17 aa, Homo sapiens
  CDR3 for alpha chain variable domain of TCR clone 95217 (TRAV12-3, TRAJ18)
CAMIRADRGSTLGRLSF

SEQ ID NO: 190434 - protein, 14 aa, Homo sapiens
  CDR3 for beta chain variable domain of TCR clone 95217 (TRBV5-7, TRBJ1-6)
CASTPWPADSPLHF

SEQ ID NO: 190435 - protein, 14 aa, Homo sapiens
  CDR3 for alpha chain variable domain of TCR clone 95218 (TRAV12-2, TRAJ13)
CAVNPSGGYQKVTF

SEQ ID NO: 190436 - protein, 16 aa, Homo sapiens
  CDR3 for beta chain variable domain of TCR clone 95218 (TRBV6-1, TRBJ2-5)
CASSETLDRGAETQYF

SEQ ID NO: 190437 - protein, 11 aa, Homo sapiens
  CDR3 for alpha chain variable domain of TCR clone 95219 (TRAV27, TRAJ43)
CVRYNNNDMRF

SEQ ID NO: 190438 - protein, 16 aa, Homo sapiens
  CDR3 for beta chain variable domain of TCR clone 95219 (TRBV5-1, TRBJ2-3)
CASSLGLAVYTDTQYF

SEQ ID NO: 190439 - protein, 13 aa, Homo sapiens
  CDR3 for alpha chain variable domain of TCR clone 95220 (TRAV39, TRAJ58)
CAGEETSGPRLTF

SEQ ID NO: 190440 - protein, 15 aa, Homo sapiens
  CDR3 for beta chain variable domain of TCR clone 95220 (TRBV20-1, TRBJ2-7)
CSARDRVSGMDEQYF

SEQ ID NO: 190441 - protein, 13 aa, Homo sapiens
  CDR3 for alpha chain variable domain of TCR clone 95221 (TRAV23/DV6, TRAJ8)
CAASPSGFQKLVF

SEQ ID NO: 190442 - protein, 14 aa, Homo sapiens
  CDR3 for beta chain variable domain of TCR clone 95221 (TRBV15, TRBJ2-3)
CATRSGTSTDTQYF

SEQ ID NO: 190443 - protein, 15 aa, Homo sapiens
  CDR3 for alpha chain variable domain of TCR clone 95222 (TRAV3, TRAJ17)
CAVSPKAAAGNKLTF

SEQ ID NO: 190444 - protein, 12 aa, Homo sapiens
  CDR3 for beta chain variable domain of TCR clone 95222 (TRBV7-9, TRBJ1-6)
CASSLMTSPLHF

SEQ ID NO: 190445 - protein, 13 aa, Homo sapiens
  CDR3 for alpha chain variable domain of TCR clone 95223 (TRAV12-3, TRAJ33)
CAMSVNSNYQLIW

SEQ ID NO: 190446 - protein, 13 aa, Homo sapiens
  CDR3 for beta chain variable domain of TCR clone 95223 (TRBV7-2, TRBJ2-2)
CASSIAVTGELFF

SEQ ID NO: 190447 - protein, 15 aa, Homo sapiens
  CDR3 for alpha chain variable domain of TCR clone 95224 (TRAV26-1, TRAJ29)
LIVRVEGSGNTPLVF

SEQ ID NO: 190448 - protein, 15 aa, Homo sapiens
  CDR3 for beta chain variable domain of TCR clone 95224 (TRBV7-9, TRBJ1-5)
CASSQGHQPNQPQHF

SEQ ID NO: 190449 - protein, 12 aa, Homo sapiens
  CDR3 for alpha chain variable domain of TCR clone 95225 (TRAV29/DV5, TRAJ49)
CAATDTGNQFYF

SEQ ID NO: 190450 - protein, 19 aa, Homo sapiens
  CDR3 for beta chain variable domain of TCR clone 95225 (TRBV25-1, TRBJ2-2)
CAILVYRVDRGLKTGELFF

SEQ ID NO: 190451 - protein, 13 aa, Homo sapiens
  CDR3 for alpha chain variable domain of TCR clone 95226 (TRAV12-1, TRAJ21)
CVVTLYNFNKFYF

SEQ ID NO: 190452 - protein, 19 aa, Homo sapiens
  CDR3 for beta chain variable domain of TCR clone 95226 (TRBV19, TRBJ2-6)
CASTPTWGRAASGANVLTF

SEQ ID NO: 190453 - protein, 13 aa, Homo sapiens
  CDR3 for alpha chain variable domain of TCR clone 95227 (TRAV2, TRAJ40)
CAVVTSGAYKYIF

SEQ ID NO: 190454 - protein, 14 aa, Homo sapiens
  CDR3 for beta chain variable domain of TCR clone 95227 (TRBV19, TRBJ2-1)
CASPTVVLSGEQFF

SEQ ID NO: 190455 - protein, 15 aa, Homo sapiens
  CDR3 for alpha chain variable domain of TCR clone 95228 (TRAV12-3, TRAJ6)
CAMSATTGGSYIPTF

SEQ ID NO: 190456 - protein, 16 aa, Homo sapiens
  CDR3 for beta chain variable domain of TCR clone 95228 (TRBV20-1, TRBJ1-2)
CSALMGQGVANYGYTF

SEQ ID NO: 190457 - protein, 12 aa, Homo sapiens
  CDR3 for alpha chain variable domain of TCR clone 95229 (TRAV8-3, TRAJ15)
CAGNQAGTALIF

SEQ ID NO: 190458 - protein, 16 aa, Homo sapiens
  CDR3 for beta chain variable domain of TCR clone 95229 (TRBV11-2, TRBJ1-2)
CASSLDTGGADYGYTF

SEQ ID NO: 190459 - protein, 14 aa, Homo sapiens
  CDR3 for alpha chain variable domain of TCR clone 95230 (TRAV1-2, TRAJ8)
CAVREDPGFQKLVF

SEQ ID NO: 190460 - protein, 12 aa, Homo sapiens
  CDR3 for beta chain variable domain of TCR clone 95230 (TRBV11-2, TRBJ2-2)
CASSLGGGELFF

SEQ ID NO: 190461 - protein, 12 aa, Homo sapiens
  CDR3 for alpha chain variable domain of TCR clone 95231 (TRAV17, TRAJ20)
CATYSNDYKLSF

SEQ ID NO: 190462 - protein, 10 aa, Homo sapiens
  CDR3 for beta chain variable domain of TCR clone 95231 (TRBV4-1, TRBJ2-2)
RQRNTGELFF

SEQ ID NO: 190463 - protein, 12 aa, Homo sapiens
  CDR3 for alpha chain variable domain of TCR clone 95232 (TRAV38-1, TRAJ30)
CALENRDDKIIF

SEQ ID NO: 190464 - protein, 14 aa, Homo sapiens
  CDR3 for beta chain variable domain of TCR clone 95232 (TRBV12-4, TRBJ1-1)
CASSPIRRTGEAFL

SEQ ID NO: 190465 - protein, 15 aa, Homo sapiens
  CDR3 for alpha chain variable domain of TCR clone 95233 (TRAV21, TRAJ53)
CATLNSGGSNYKLTF

SEQ ID NO: 190466 - protein, 13 aa, Homo sapiens
  CDR3 for beta chain variable domain of TCR clone 95233 (TRBV11-2, TRBJ2-5)
WASSSTGEETQYF

SEQ ID NO: 190467 - protein, 15 aa, Homo sapiens
  CDR3 for alpha chain variable domain of TCR clone 95234 (TRAV8-4, TRAJ10)
CAVSDGPGGGSKLTF

SEQ ID NO: 190468 - protein, 13 aa, Homo sapiens
  CDR3 for beta chain variable domain of TCR clone 95234 (TRBV28, TRBJ1-3)
CASSFLGSGTIYF

SEQ ID NO: 190469 - protein, 11 aa, Homo sapiens
  CDR3 for alpha chain variable domain of TCR clone 95235 (TRAV8-3, TRAJ18)
CAVGGRQRLNP

SEQ ID NO: 190470 - protein, 12 aa, Homo sapiens
  CDR3 for beta chain variable domain of TCR clone 95235 (TRBV28, TRBJ2-6)
CASQAGANVLTF

SEQ ID NO: 190471 - protein, 14 aa, Homo sapiens
  CDR3 for alpha chain variable domain of TCR clone 95236 (TRAV2, TRAJ3)
CAVDRYSSASKIIF

SEQ ID NO: 190472 - protein, 14 aa, Homo sapiens
  CDR3 for beta chain variable domain of TCR clone 95236 (TRBV28, TRBJ2-1)
CASSRPGLRDEQFF

SEQ ID NO: 190473 - protein, 13 aa, Homo sapiens
  CDR3 for alpha chain variable domain of TCR clone 95237 (TRAV21, TRAJ27)
CAARPGNAGKSTF

SEQ ID NO: 190474 - protein, 15 aa, Homo sapiens
  CDR3 for beta chain variable domain of TCR clone 95237 (TRBV27, TRBJ1-5)
CASSLGTGFDQPQHF

SEQ ID NO: 190475 - protein, 14 aa, Homo sapiens
  CDR3 for alpha chain variable domain of TCR clone 95238 (TRAV12-2, TRAJ8)
CAVKENTGFQELVF

SEQ ID NO: 190476 - protein, 13 aa, Homo sapiens
  CDR3 for beta chain variable domain of TCR clone 95238 (TRBV18, TRBJ1-2)
CASSASATEGYTF

SEQ ID NO: 190477 - protein, 14 aa, Homo sapiens
  CDR3 for alpha chain variable domain of TCR clone 95239 (TRAV38-1, TRAJ45)
CAYYSEGGADGLTF

SEQ ID NO: 190478 - protein, 20 aa, Homo sapiens
  CDR3 for beta chain variable domain of TCR clone 95239 (TRBV28, TRBJ2-1)
CASTPIGRSPGLAGGNEQFF

SEQ ID NO: 190479 - protein, 12 aa, Homo sapiens
  CDR3 for alpha chain variable domain of TCR clone 95240 (TRAV12-2, TRAJ34)
CAVSYNTDKLIF

SEQ ID NO: 190480 - protein, 14 aa, Homo sapiens
  CDR3 for beta chain variable domain of TCR clone 95240 (TRBV11-2, TRBJ2-7)
CASSLGAGAYEQYF

SEQ ID NO: 190481 - protein, 14 aa, Homo sapiens
  CDR3 for alpha chain variable domain of TCR clone 95241 (TRAV12-3, TRAJ9)
CAMSPNTGGFRTIF

SEQ ID NO: 190482 - protein, 15 aa, Homo sapiens
  CDR3 for beta chain variable domain of TCR clone 95241 (TRBV15, TRBJ1-5)
CATSREQGGNQPQHF

SEQ ID NO: 190483 - protein, 13 aa, Homo sapiens
  CDR3 for alpha chain variable domain of TCR clone 95242 (TRAV36/DV7, TRAJ54)
CAVCTQGAQKLVF

SEQ ID NO: 190484 - protein, 13 aa, Homo sapiens
  CDR3 for beta chain variable domain of TCR clone 95242 (TRBV7-6, TRBJ2-7)
CASSLDHTHEQYL

SEQ ID NO: 190485 - protein, 13 aa, Homo sapiens
  CDR3 for alpha chain variable domain of TCR clone 95243 (TRAV17, TRAJ40)
CATAPGGTYKYIF

SEQ ID NO: 190486 - protein, 12 aa, Homo sapiens
  CDR3 for beta chain variable domain of TCR clone 95243 (TRBV2, TRBJ1-5)
CASSENRTAQHF

SEQ ID NO: 190487 - protein, 14 aa, Homo sapiens
  CDR3 for alpha chain variable domain of TCR clone 95244 (TRAV30, TRAJ33)
CGTVAPRSNYQLIW

SEQ ID NO: 190488 - protein, 14 aa, Homo sapiens
  CDR3 for beta chain variable domain of TCR clone 95244 (TRBV12-4, TRBJ1-1)
CASTWTGHDTEAFF

SEQ ID NO: 190489 - protein, 14 aa, Homo sapiens
  CDR3 for alpha chain variable domain of TCR clone 95245 (TRAV16, TRAJ15)
CALSSNQAGTALIF

SEQ ID NO: 190490 - protein, 14 aa, Homo sapiens
  CDR3 for beta chain variable domain of TCR clone 95245 (TRBV19, TRBJ2-2)
CATTGHANTGELFF

SEQ ID NO: 190491 - protein, 12 aa, Homo sapiens
  CDR3 for alpha chain variable domain of TCR clone 95246 (TRAV17, TRAJ12)
CATLRSSYKLIF

SEQ ID NO: 190492 - protein, 16 aa, Homo sapiens
  CDR3 for beta chain variable domain of TCR clone 95246 (TRBV28, TRBJ2-7)
CASSLFFETGGPEQYC

SEQ ID NO: 190493 - protein, 14 aa, Homo sapiens
  CDR3 for alpha chain variable domain of TCR clone 95247 (TRAV12-3, TRAJ6)
CAMSATGGSYIPTF

SEQ ID NO: 190494 - protein, 19 aa, Homo sapiens
  CDR3 for beta chain variable domain of TCR clone 95247 (TRBV25-1, TRBJ2-2)
CAILVYRVDRGRKTGELFF

SEQ ID NO: 190495 - protein, 13 aa, Homo sapiens
  CDR3 for alpha chain variable domain of TCR clone 95248 (TRAV38-1, TRAJ31)
CAFMNFNNARLMF

SEQ ID NO: 190496 - protein, 13 aa, Homo sapiens
  CDR3 for beta chain variable domain of TCR clone 95248 (TRBV24-1, TRBJ2-2)
CATSDWSTGELFF

SEQ ID NO: 190497 - protein, 11 aa, Homo sapiens
  CDR3 for alpha chain variable domain of TCR clone 95249 (TRAV12-1, TRAJ34)
CVVNKGRELIV

SEQ ID NO: 190498 - protein, 12 aa, Homo sapiens
  CDR3 for beta chain variable domain of TCR clone 95249 (TRBV2, TRBJ2-1)
CAYGPPGNEQFF

SEQ ID NO: 190499 - protein, 15 aa, Homo sapiens
  CDR3 for alpha chain variable domain of TCR clone 95250 (TRAV2, TRAJ24)
CAVVRLKNSWGKLQF

SEQ ID NO: 190500 - protein, 15 aa, Homo sapiens
  CDR3 for beta chain variable domain of TCR clone 95250 (TRBV7-2, TRBJ2-3)
CASSSTGLETDTQYF

SEQ ID NO: 190501 - protein, 14 aa, Homo sapiens
  CDR3 for alpha chain variable domain of TCR clone 95251 (TRAV12-2, TRAJ13)
CAVKKTGGYQKVTF

SEQ ID NO: 190502 - protein, 15 aa, Homo sapiens
  CDR3 for beta chain variable domain of TCR clone 95251 (TRBV12-4, TRBJ1-1)
CASSSSGTGNTEAFF

SEQ ID NO: 190503 - protein, 12 aa, Homo sapiens
  CDR3 for alpha chain variable domain of TCR clone 95252 (TRAV12-2, TRAJ44)
CADTGTASKLTF

SEQ ID NO: 190504 - protein, 17 aa, Homo sapiens
  CDR3 for beta chain variable domain of TCR clone 95252 (TRBV20-1, TRBJ1-1)
CSARGTGGSYGNTGALF

SEQ ID NO: 190505 - protein, 13 aa, Homo sapiens
  CDR3 for alpha chain variable domain of TCR clone 95253 (TRAV3, TRAJ41)
CAVSSNSGYALKF

SEQ ID NO: 190506 - protein, 14 aa, Homo sapiens
  CDR3 for beta chain variable domain of TCR clone 95253 (TRBV7-2, TRBJ2-7)
CASSPKTSFYEQYF

SEQ ID NO: 190507 - protein, 14 aa, Homo sapiens
  CDR3 for alpha chain variable domain of TCR clone 95254 (TRAV12-2, TRAJ15)
CAPHTGQAGTALIF

SEQ ID NO: 190508 - protein, 17 aa, Homo sapiens
  CDR3 for beta chain variable domain of TCR clone 95254 (TRBV5-5, TRBJ1-2)
CASSLGSVDGQSEGYTF

SEQ ID NO: 190509 - protein, 18 aa, Homo sapiens
  CDR3 for alpha chain variable domain of TCR clone 95255 (TRAV26-2, TRAJ54)
CILRDVEVGIQGAQKLVV

SEQ ID NO: 190510 - protein, 17 aa, Homo sapiens
  CDR3 for beta chain variable domain of TCR clone 95255 (TRBV20-1, TRBJ1-5)
CSASLSPGQGGNQPQHF

SEQ ID NO: 190511 - protein, 13 aa, Homo sapiens
  CDR3 for alpha chain variable domain of TCR clone 95256 (TRAV27, TRAJ41)
CAGGGNSGYALNF

SEQ ID NO: 190512 - protein, 14 aa, Homo sapiens
  CDR3 for beta chain variable domain of TCR clone 95256 (TRBV7-3, TRBJ1-1)
CASSLKGGNTEAFF

SEQ ID NO: 190513 - protein, 13 aa, Homo sapiens
  CDR3 for alpha chain variable domain of TCR clone 95257 (TRAV20, TRAJ40)
SAVPFSGTYKYIF

SEQ ID NO: 190514 - protein, 13 aa, Homo sapiens
  CDR3 for beta chain variable domain of TCR clone 95257 (TRBV15, TRBJ2-5)
CATSQIGEETQYF

SEQ ID NO: 190515 - protein, 14 aa, Homo sapiens
  CDR3 for alpha chain variable domain of TCR clone 95258 (TRAV12-2, TRAJ24)
CAVTPADSWGKLQF

SEQ ID NO: 190516 - protein, 13 aa, Homo sapiens
  CDR3 for beta chain variable domain of TCR clone 95258 (TRBV6-4, TRBJ1-5)
CASSAGLNQPQHF

SEQ ID NO: 190517 - protein, 11 aa, Homo sapiens
  CDR3 for alpha chain variable domain of TCR clone 95259 (TRAV13-1, TRAJ39)
CASHAGNMLTF

SEQ ID NO: 190518 - protein, 13 aa, Homo sapiens
  CDR3 for beta chain variable domain of TCR clone 95259 (TRBV19, TRBJ1-2)
CASSVPGQDGYTF

SEQ ID NO: 190519 - protein, 14 aa, Homo sapiens
  CDR3 for alpha chain variable domain of TCR clone 95260 (TRAV1-2, TRAJ16)
CVVNRFSDGQKLLF

SEQ ID NO: 190520 - protein, 14 aa, Homo sapiens
  CDR3 for beta chain variable domain of TCR clone 95260 (TRBV5-5, TRBJ1-2)
CASSLDPYNYGYTF

SEQ ID NO: 190521 - protein, 14 aa, Homo sapiens
  CDR3 for alpha chain variable domain of TCR clone 95261 (TRAV26-1, TRAJ22)
CIVRVYGSARQLTF

SEQ ID NO: 190522 - protein, 13 aa, Homo sapiens
  CDR3 for beta chain variable domain of TCR clone 95261 (TRBV19, TRBJ2-5)
CASSIHSQETQYF

SEQ ID NO: 190523 - protein, 15 aa, Homo sapiens
  CDR3 for alpha chain variable domain of TCR clone 95262 (TRAV3, TRAJ30)
CAVRDEYGRDDKIIF

SEQ ID NO: 190524 - protein, 16 aa, Homo sapiens
  CDR3 for beta chain variable domain of TCR clone 95262 (TRBV5-1, TRBJ2-5)
CASSLAKHRGRETQYF

SEQ ID NO: 190525 - protein, 14 aa, Homo sapiens
  CDR3 for alpha chain variable domain of TCR clone 95263 (TRAV23/DV6, TRAJ13)
CAASETGGYQKVTF

SEQ ID NO: 190526 - protein, 15 aa, Homo sapiens
  CDR3 for beta chain variable domain of TCR clone 95263 (TRBV4-1, TRBJ1-1)
CASSQEWGHYTEAFF

SEQ ID NO: 190527 - protein, 10 aa, Homo sapiens
  CDR3 for alpha chain variable domain of TCR clone 95264 (TRAV25, TRAJ21)
CLYNFNKFYF

SEQ ID NO: 190528 - protein, 15 aa, Homo sapiens
  CDR3 for beta chain variable domain of TCR clone 95264 (TRBV7-2, TRBJ2-1)
CASSSGLAGGNEQFF

SEQ ID NO: 190529 - protein, 13 aa, Homo sapiens
  CDR3 for alpha chain variable domain of TCR clone 95265 (TRAV12-2, TRAJ9)
CAVKWAGGFKTIF

SEQ ID NO: 190530 - protein, 13 aa, Homo sapiens
  CDR3 for beta chain variable domain of TCR clone 95265 (TRBV7-9, TRBJ1-2)
CASSLKQNYGYTF

SEQ ID NO: 190531 - protein, 13 aa, Homo sapiens
  CDR3 for alpha chain variable domain of TCR clone 95266 (TRAV20, TRAJ37)
CAGCSSNTGKLIF

SEQ ID NO: 190532 - protein, 15 aa, Homo sapiens
  CDR3 for beta chain variable domain of TCR clone 95266 (TRBV12-4, TRBJ2-5)
CASSPPTGLQETQYF

SEQ ID NO: 190533 - protein, 14 aa, Homo sapiens
  CDR3 for alpha chain variable domain of TCR clone 95267 (TRAV16, TRAJ37)
CALDISGNTGKLIF

SEQ ID NO: 190534 - protein, 14 aa, Homo sapiens
  CDR3 for beta chain variable domain of TCR clone 95267 (TRBV7-6, TRBJ2-7)
CASSFQQGADEQYF

SEQ ID NO: 190535 - protein, 16 aa, Homo sapiens
  CDR3 for alpha chain variable domain of TCR clone 95268 (TRAV14/DV4, TRAJ53)
CAMREGGGGSNYKLTF

SEQ ID NO: 190536 - protein, 14 aa, Homo sapiens
  CDR3 for beta chain variable domain of TCR clone 95268 (TRBV4-2, TRBJ2-1)
CASGLDRAYNEQFF

SEQ ID NO: 190537 - protein, 15 aa, Homo sapiens
  CDR3 for alpha chain variable domain of TCR clone 95269 (TRAV21, TRAJ38)
CAVRQDAGNNRKLIW

SEQ ID NO: 190538 - protein, 16 aa, Homo sapiens
  CDR3 for beta chain variable domain of TCR clone 95269 (TRBV4-2, TRBJ1-1)
CASRPLDGVGDTEAFF

SEQ ID NO: 190539 - protein, 14 aa, Homo sapiens
  CDR3 for alpha chain variable domain of TCR clone 95270 (TRAV26-1, TRAJ21)
CIVRPPYNFNKFYF

SEQ ID NO: 190540 - protein, 16 aa, Homo sapiens
  CDR3 for beta chain variable domain of TCR clone 95270 (TRBV7-7, TRBJ2-3)
CASSPGTSGSTDTQYF

SEQ ID NO: 190541 - protein, 17 aa, Homo sapiens
  CDR3 for alpha chain variable domain of TCR clone 95271 (TRAV13-1, TRAJ31)
CAPRDRLMSGDGTQLVV

SEQ ID NO: 190542 - protein, 12 aa, Homo sapiens
  CDR3 for beta chain variable domain of TCR clone 95271 (TRBV7-9, TRBJ2-7)
CASSLEGYEQYF

SEQ ID NO: 190543 - protein, 15 aa, Homo sapiens
  CDR3 for alpha chain variable domain of TCR clone 95272 (TRAV8-3, TRAJ27)
CAVGPSKTNAGKSTF

SEQ ID NO: 190544 - protein, 14 aa, Homo sapiens
  CDR3 for beta chain variable domain of TCR clone 95272 (TRBV12-4, TRBJ1-1)
CASSLRSSGTEAFF

SEQ ID NO: 190545 - protein, 16 aa, Homo sapiens
  CDR3 for alpha chain variable domain of TCR clone 95273 (TRAV3, TRAJ37)
CAVRGKGSGNTGKLIF

SEQ ID NO: 190546 - protein, 13 aa, Homo sapiens
  CDR3 for beta chain variable domain of TCR clone 95273 (TRBV4-2, TRBJ1-1)
CASSQAGNAEAFF

SEQ ID NO: 190547 - protein, 14 aa, Homo sapiens
  CDR3 for alpha chain variable domain of TCR clone 95274 (TRAV8-6, TRAJ49)
CAVSDPNTGNQFYF

SEQ ID NO: 190548 - protein, 15 aa, Homo sapiens
  CDR3 for beta chain variable domain of TCR clone 95274 (TRBV11-3, TRBJ2-1)
CASSLAGQTCNEQFF

SEQ ID NO: 190549 - protein, 13 aa, Homo sapiens
  CDR3 for alpha chain variable domain of TCR clone 95275 (TRAV12-3, TRAJ21)
CAPGPHNFNKFYF

SEQ ID NO: 190550 - protein, 15 aa, Homo sapiens
  CDR3 for beta chain variable domain of TCR clone 95275 (TRBV10-3, TRBJ2-3)
CAISLTGGGTDTQYF

SEQ ID NO: 190551 - protein, 13 aa, Homo sapiens
  CDR3 for alpha chain variable domain of TCR clone 95276 (TRAV13-2, TRAJ40)
CAEFTSGTYKYIF

SEQ ID NO: 190552 - protein, 14 aa, Homo sapiens
  CDR3 for beta chain variable domain of TCR clone 95276 (TRBV10-2, TRBJ1-5)
CTSSSTGRNQPQHF

SEQ ID NO: 190553 - protein, 15 aa, Homo sapiens
  CDR3 for alpha chain variable domain of TCR clone 95277 (TRAV21, TRAJ45)
CAVRYSGGGADGLTF

SEQ ID NO: 190554 - protein, 12 aa, Homo sapiens
  CDR3 for beta chain variable domain of TCR clone 95277 (TRBV11-2, TRBJ2-1)
CASSPGNNEQFF

SEQ ID NO: 190555 - protein, 11 aa, Homo sapiens
  CDR3 for alpha chain variable domain of TCR clone 95278 (TRAV23/DV6, TRAJ58)
CAARLLRGETS

SEQ ID NO: 190556 - protein, 13 aa, Homo sapiens
  CDR3 for beta chain variable domain of TCR clone 95278 (TRBV6-1, TRBJ1-1)
CASSRQGNTEAFF

SEQ ID NO: 190557 - protein, 13 aa, Homo sapiens
  CDR3 for alpha chain variable domain of TCR clone 95279 (TRAV17, TRAJ20)
CATDSSNDYKLSF

SEQ ID NO: 190558 - protein, 15 aa, Homo sapiens
  CDR3 for beta chain variable domain of TCR clone 95279 (TRBV7-9, TRBJ1-2)
CASSLDREPNYGYTF

SEQ ID NO: 190559 - protein, 11 aa, Homo sapiens
  CDR3 for alpha chain variable domain of TCR clone 95280 (TRAV1-1, TRAJ23)
CAVRQGGKLIF

SEQ ID NO: 190560 - protein, 15 aa, Homo sapiens
  CDR3 for beta chain variable domain of TCR clone 95280 (TRBV20-1, TRBJ1-1)
CSASRGVTGDTEAFF

SEQ ID NO: 190561 - protein, 13 aa, Homo sapiens
  CDR3 for alpha chain variable domain of TCR clone 95281 (TRAV2, TRAJ40)
CAVVTSGTYKYIF

SEQ ID NO: 190562 - protein, 16 aa, Homo sapiens
  CDR3 for beta chain variable domain of TCR clone 95281 (TRBV5-4, TRBJ2-3)
CASQRPGAGGADTQYF

SEQ ID NO: 190563 - protein, 16 aa, Homo sapiens
  CDR3 for alpha chain variable domain of TCR clone 95282 (TRAV23/DV6, TRAJ9)
CAASIGGNTGGFKTIF

SEQ ID NO: 190564 - protein, 14 aa, Homo sapiens
  CDR3 for beta chain variable domain of TCR clone 95282 (TRBV11-1, TRBJ2-7)
CASSFRQGSYEQYF

SEQ ID NO: 190565 - protein, 13 aa, Homo sapiens
  CDR3 for alpha chain variable domain of TCR clone 95283 (TRAV23/DV6, TRAJ22)
FAPYSGSARQLTF

SEQ ID NO: 190566 - protein, 15 aa, Homo sapiens
  CDR3 for beta chain variable domain of TCR clone 95283 (TRBV11-2, TRBJ1-6)
CASSLDPWAVSPLHF

SEQ ID NO: 190567 - protein, 14 aa, Homo sapiens
  CDR3 for alpha chain variable domain of TCR clone 95284 (TRAV8-4, TRAJ48)
CAVSETFGNEKLTF

SEQ ID NO: 190568 - protein, 13 aa, Homo sapiens
  CDR3 for beta chain variable domain of TCR clone 95284 (TRBV12-5, TRBJ2-3)
CASGDRQSDTQYF

SEQ ID NO: 190569 - protein, 14 aa, Homo sapiens
  CDR3 for alpha chain variable domain of TCR clone 95285 (TRAV16, TRAJ42)
CALLAGGSQGNLIF

SEQ ID NO: 190570 - protein, 13 aa, Homo sapiens
  CDR3 for beta chain variable domain of TCR clone 95285 (TRBV7-9, TRBJ1-2)
CASSLKQNYGYAF

SEQ ID NO: 190571 - protein, 15 aa, Homo sapiens
  CDR3 for alpha chain variable domain of TCR clone 95286 (TRAV35, TRAJ58)
CAGRRQETSGPRLTF

SEQ ID NO: 190572 - protein, 16 aa, Homo sapiens
  CDR3 for beta chain variable domain of TCR clone 95286 (TRBV2, TRBJ2-1)
CASSVGGSLSYNEQFF

SEQ ID NO: 190573 - protein, 17 aa, Homo sapiens
  CDR3 for alpha chain variable domain of TCR clone 95287 (TRAV26-1, TRAJ46)
IASSESEKKSSGDKLTF

SEQ ID NO: 190574 - protein, 13 aa, Homo sapiens
  CDR3 for beta chain variable domain of TCR clone 95287 (TRBV12-5, TRBJ2-3)
RASGDRQSDTQYF

SEQ ID NO: 190575 - protein, 14 aa, Homo sapiens
  CDR3 for alpha chain variable domain of TCR clone 95288 (TRAV16, TRAJ42)
CALLAGGSQVNLIF

SEQ ID NO: 190576 - protein, 13 aa, Homo sapiens
  CDR3 for beta chain variable domain of TCR clone 95288 (TRBV7-9, TRBJ1-2)
CASSLKQNYGYTF

SEQ ID NO: 190577 - protein, 18 aa, Homo sapiens
  CDR3 for alpha chain variable domain of TCR clone 95289 (TRAV26-1, TRAJ52)
CIVRVEGAGGTSFGKLTF

SEQ ID NO: 190578 - protein, 13 aa, Homo sapiens
  CDR3 for beta chain variable domain of TCR clone 95289 (TRBV7-3, TRBJ1-2)
CASSLKRGYGYTF

SEQ ID NO: 190579 - protein, 14 aa, Homo sapiens
  CDR3 for alpha chain variable domain of TCR clone 95290 (TRAV16, TRAJ15)
CALSGPQAGTALIF

SEQ ID NO: 190580 - protein, 12 aa, Homo sapiens
  CDR3 for beta chain variable domain of TCR clone 95290 (TRBV18, TRBJ2-5)
CASSPAKETQYF

SEQ ID NO: 190581 - protein, 13 aa, Homo sapiens
  CDR3 for alpha chain variable domain of TCR clone 95291 (TRAV29/DV5, TRAJ31)
CAASRNNNARLMF

SEQ ID NO: 190582 - protein, 13 aa, Homo sapiens
  CDR3 for beta chain variable domain of TCR clone 95291 (TRBV3-1, TRBJ2-2)
CASLARGSGELFF

SEQ ID NO: 190583 - protein, 16 aa, Homo sapiens
  CDR3 for alpha chain variable domain of TCR clone 95292 (TRAV1-2, TRAJ16)
CAPPGFQMARSCSLQG

SEQ ID NO: 190584 - protein, 15 aa, Homo sapiens
  CDR3 for beta chain variable domain of TCR clone 95292 (TRBV6-5, TRBJ2-7)
CASSASGRWSYEQYF

SEQ ID NO: 190585 - protein, 12 aa, Homo sapiens
  CDR3 for alpha chain variable domain of TCR clone 95293 (TRAV29/DV5, TRAJ41)
CAAISSGYALNF

SEQ ID NO: 190586 - protein, 17 aa, Homo sapiens
  CDR3 for beta chain variable domain of TCR clone 95293 (TRBV18, TRBJ2-1)
CASSKGLSGGTDNEQFF

SEQ ID NO: 190587 - protein, 15 aa, Homo sapiens
  CDR3 for alpha chain variable domain of TCR clone 95294 (TRAV2, TRAJ9)
CAVEDRGTGGFNTIF

SEQ ID NO: 190588 - protein, 19 aa, Homo sapiens
  CDR3 for beta chain variable domain of TCR clone 95294 (TRBV28, TRBJ2-7)
CASSYSGTSRLGWVYEQYF

SEQ ID NO: 190589 - protein, 18 aa, Homo sapiens
  CDR3 for alpha chain variable domain of TCR clone 95295 (TRAV12-3, TRAJ28)
CAMSARGYSGAGSYQLTF

SEQ ID NO: 190590 - protein, 16 aa, Homo sapiens
  CDR3 for beta chain variable domain of TCR clone 95295 (TRBV7-6, TRBJ2-3)
CASSRGLAGSTDTQYF

SEQ ID NO: 190591 - protein, 14 aa, Homo sapiens
  CDR3 for alpha chain variable domain of TCR clone 95296 (TRAV3, TRAJ21)
CAVRDAYNFNKFYF

SEQ ID NO: 190592 - protein, 17 aa, Homo sapiens
  CDR3 for beta chain variable domain of TCR clone 95296 (TRBV20-1, TRBJ1-6)
CSARGGYTFSYNSHLHF

SEQ ID NO: 190593 - protein, 11 aa, Homo sapiens
  CDR3 for alpha chain variable domain of TCR clone 95297 (TRAV1-1, TRAJ23)
CAVRQGGKLIF

SEQ ID NO: 190594 - protein, 15 aa, Homo sapiens
  CDR3 for beta chain variable domain of TCR clone 95297 (TRBV7-8, TRBJ1-5)
CASSRGGGADQPQHF

SEQ ID NO: 190595 - protein, 11 aa, Homo sapiens
  CDR3 for alpha chain variable domain of TCR clone 95298 (TRAV3, TRAJ21)
CAVGNFSEFYF

SEQ ID NO: 190596 - protein, 16 aa, Homo sapiens
  CDR3 for beta chain variable domain of TCR clone 95298 (TRBV19, TRBJ2-1)
CASSKAGPSSYNEQFF

SEQ ID NO: 190597 - protein, 14 aa, Homo sapiens
  CDR3 for alpha chain variable domain of TCR clone 95299 (TRAV12-3, TRAJ10)
SHLPLTGGGSKLTF

SEQ ID NO: 190598 - protein, 12 aa, Homo sapiens
  CDR3 for beta chain variable domain of TCR clone 95299 (TRBV7-3, TRBJ2-5)
CASSSPGGTQYF

SEQ ID NO: 190599 - protein, 19 aa, Homo sapiens
  CDR3 for alpha chain variable domain of TCR clone 95300 (TRAV26-1, TRAJ52)
CIVRAHRNAGGTSYGKLTF

SEQ ID NO: 190600 - protein, 15 aa, Homo sapiens
  CDR3 for beta chain variable domain of TCR clone 95300 (TRBV12-4, TRBJ2-5)
CASSRPTGLQETQYF

SEQ ID NO: 190601 - protein, 13 aa, Homo sapiens
  CDR3 for alpha chain variable domain of TCR clone 95301 (TRAV16, TRAJ37)
CALRGSNTGKLIF

SEQ ID NO: 190602 - protein, 14 aa, Homo sapiens
  CDR3 for beta chain variable domain of TCR clone 95301 (TRBV19, TRBJ2-1)
CASPTFVLSGEQFF

SEQ ID NO: 190603 - protein, 15 aa, Homo sapiens
  CDR3 for alpha chain variable domain of TCR clone 95302 (TRAV27, TRAJ38)
CAARRNAGNNRKLIW

SEQ ID NO: 190604 - protein, 14 aa, Homo sapiens
  CDR3 for beta chain variable domain of TCR clone 95302 (TRBV19, TRBJ2-1)
CASGKSTQYNEQFF

SEQ ID NO: 190605 - protein, 15 aa, Homo sapiens
  CDR3 for alpha chain variable domain of TCR clone 95303 (TRAV38-1, TRAJ57)
CAFMKLQGGSEKLVF

SEQ ID NO: 190606 - protein, 12 aa, Homo sapiens
  CDR3 for beta chain variable domain of TCR clone 95303 (TRBV11-2, TRBJ2-2)
CASSLGGGELFF

SEQ ID NO: 190607 - protein, 15 aa, Homo sapiens
  CDR3 for alpha chain variable domain of TCR clone 95304 (TRAV8-4, TRAJ47)
CAVSDPEEYGNKLVF

SEQ ID NO: 190608 - protein, 15 aa, Homo sapiens
  CDR3 for beta chain variable domain of TCR clone 95304 (TRBV11-2, TRBJ2-1)
CTSSLGPDSYNEQFF

SEQ ID NO: 190609 - protein, 17 aa, Homo sapiens
  CDR3 for alpha chain variable domain of TCR clone 95305 (TRAV12-3, TRAJ26)
CAMSGGRWDNYGKNFVF

SEQ ID NO: 190610 - protein, 12 aa, Homo sapiens
  CDR3 for beta chain variable domain of TCR clone 95305 (TRBV19, TRBJ1-1)
CASSTTGIEAFF

SEQ ID NO: 190611 - protein, 15 aa, Homo sapiens
  CDR3 for alpha chain variable domain of TCR clone 95306 (TRAV12-1, TRAJ44)
CVVGTPQGTASKLTF

SEQ ID NO: 190612 - protein, 13 aa, Homo sapiens
  CDR3 for beta chain variable domain of TCR clone 95306 (TRBV27, TRBJ2-1)
CASSSGSYNEQFF

SEQ ID NO: 190613 - protein, 13 aa, Homo sapiens
  CDR3 for alpha chain variable domain of TCR clone 95307 (TRAV12-2, TRAJ40)
CAVKRTGAYKYIF

SEQ ID NO: 190614 - protein, 15 aa, Homo sapiens
  CDR3 for beta chain variable domain of TCR clone 95307 (TRBV12-4, TRBJ1-2)
CASSPITGGGYGYTF

SEQ ID NO: 190615 - protein, 16 aa, Homo sapiens
  CDR3 for alpha chain variable domain of TCR clone 95308 (TRAV3, TRAJ5)
CAVRNLMDTGRRARTF

SEQ ID NO: 190616 - protein, 16 aa, Homo sapiens
  CDR3 for beta chain variable domain of TCR clone 95308 (TRBV4-2, TRBJ2-7)
CASSQEGLANSYEQYF

SEQ ID NO: 190617 - protein, 13 aa, Homo sapiens
  CDR3 for alpha chain variable domain of TCR clone 95309 (TRAV8-6, TRAJ50)
CAVIKNSYDKVIF

SEQ ID NO: 190618 - protein, 15 aa, Homo sapiens
  CDR3 for beta chain variable domain of TCR clone 95309 (TRBV7-2, TRBJ2-2)
CASRRPGQNTGELFF

SEQ ID NO: 190619 - protein, 11 aa, Homo sapiens
  CDR3 for alpha chain variable domain of TCR clone 95310 (TRAV13-2, TRAJ54)
RAVQGAQKLVF

SEQ ID NO: 190620 - protein, 16 aa, Homo sapiens
  CDR3 for beta chain variable domain of TCR clone 95310 (TRBV11-2, TRBJ1-2)
CASSLDTGGADYGYTF

SEQ ID NO: 190621 - protein, 12 aa, Homo sapiens
  CDR3 for alpha chain variable domain of TCR clone 95311 (TRAV13-2, TRAJ23)
CAERHRGGKLIF

SEQ ID NO: 190622 - protein, 14 aa, Homo sapiens
  CDR3 for beta chain variable domain of TCR clone 95311 (TRBV28, TRBJ2-7)
CASSGLAEPAEQYF

SEQ ID NO: 190623 - protein, 11 aa, Homo sapiens
  CDR3 for alpha chain variable domain of TCR clone 95312 (TRAV17, TRAJ43)
CATPRSNDMRF

SEQ ID NO: 190624 - protein, 17 aa, Homo sapiens
  CDR3 for beta chain variable domain of TCR clone 95312 (TRBV4-1, TRBJ1-4)
CASSQEGPRGVEEKLFF

SEQ ID NO: 190625 - protein, 15 aa, Homo sapiens
  CDR3 for alpha chain variable domain of TCR clone 95313 (TRAV17, TRAJ35)
CATAFVIGFGNVLHC

SEQ ID NO: 190626 - protein, 16 aa, Homo sapiens
  CDR3 for beta chain variable domain of TCR clone 95313 (TRBV5-7, TRBJ2-7)
PAANEGDGRGSYEQYF

SEQ ID NO: 190627 - protein, 15 aa, Homo sapiens
  CDR3 for alpha chain variable domain of TCR clone 95314 (TRAV17, TRAJ16)
CATPLRFSDGQKLLF

SEQ ID NO: 190628 - protein, 12 aa, Homo sapiens
  CDR3 for beta chain variable domain of TCR clone 95314 (TRBV2, TRBJ2-7)
CASSDPDYEQYF

SEQ ID NO: 190629 - protein, 14 aa, Homo sapiens
  CDR3 for alpha chain variable domain of TCR clone 95315 (TRAV1-2, TRAJ8)
CAVRKDTGFQKLVF

SEQ ID NO: 190630 - protein, 15 aa, Homo sapiens
  CDR3 for beta chain variable domain of TCR clone 95315 (TRBV29-1, TRBJ2-1)
CSVPTGLALYNEQFF

SEQ ID NO: 190631 - protein, 15 aa, Homo sapiens
  CDR3 for alpha chain variable domain of TCR clone 95316 (TRAV8-4, TRAJ37)
CAVSRGSGNTGQLIF

SEQ ID NO: 190632 - protein, 16 aa, Homo sapiens
  CDR3 for beta chain variable domain of TCR clone 95316 (TRBV7-3, TRBJ2-3)
CASSLSGYRPEDTQYF

SEQ ID NO: 190633 - protein, 11 aa, Homo sapiens
  CDR3 for alpha chain variable domain of TCR clone 95317 (TRAV22, TRAJ30)
CAGNRDDKIIF

SEQ ID NO: 190634 - protein, 15 aa, Homo sapiens
  CDR3 for beta chain variable domain of TCR clone 95317 (TRBV6-3, TRBJ2-7)
CASSSPGTVFYEQYF

SEQ ID NO: 190635 - protein, 11 aa, Homo sapiens
  CDR3 for alpha chain variable domain of TCR clone 95318 (TRAV16, TRAJ49)
CSLNTGNQFYF

SEQ ID NO: 190636 - protein, 13 aa, Homo sapiens
  CDR3 for beta chain variable domain of TCR clone 95318 (TRBV5-5, TRBJ1-2)
CASSFWRGEDYTF

SEQ ID NO: 190637 - protein, 16 aa, Homo sapiens
  CDR3 for alpha chain variable domain of TCR clone 95319 (TRAV30, TRAJ24)
CGTEIVDADSWGKFQF

SEQ ID NO: 190638 - protein, 15 aa, Homo sapiens
  CDR3 for beta chain variable domain of TCR clone 95319 (TRBV28, TRBJ2-5)
CASSSGRTIQETQYF

SEQ ID NO: 190639 - protein, 15 aa, Homo sapiens
  CDR3 for alpha chain variable domain of TCR clone 95320 (TRAV25, TRAJ52)
CAGRPGGTSYGKLTF

SEQ ID NO: 190640 - protein, 16 aa, Homo sapiens
  CDR3 for beta chain variable domain of TCR clone 95320 (TRBV12-4, TRBJ1-4)
CASRITGRSEKLFLAV

SEQ ID NO: 190641 - protein, 13 aa, Homo sapiens
  CDR3 for alpha chain variable domain of TCR clone 95321 (TRAV8-4, TRAJ47)
CAVTALYGNKLVF

SEQ ID NO: 190642 - protein, 14 aa, Homo sapiens
  CDR3 for beta chain variable domain of TCR clone 95321 (TRBV5-7, TRBJ1-1)
CASSLAGDWTEAFF

SEQ ID NO: 190643 - protein, 11 aa, Homo sapiens
  CDR3 for alpha chain variable domain of TCR clone 95322 (TRAV21, TRAJ34)
CAHYNTDKLIF

SEQ ID NO: 190644 - protein, 15 aa, Homo sapiens
  CDR3 for beta chain variable domain of TCR clone 95322 (TRBV7-3, TRBJ2-1)
CASSPTGGGEVEQFF

SEQ ID NO: 190645 - protein, 13 aa, Homo sapiens
  CDR3 for alpha chain variable domain of TCR clone 95323 (TRAV13-1, TRAJ12)
CAASLDSSYKLIF

SEQ ID NO: 190646 - protein, 16 aa, Homo sapiens
  CDR3 for beta chain variable domain of TCR clone 95323 (TRBV15, TRBJ2-1)
CATSRERLAGAYEQFF

SEQ ID NO: 190647 - protein, 15 aa, Homo sapiens
  CDR3 for alpha chain variable domain of TCR clone 95324 (TRAV21, TRAJ53)
CATLNSGGSNYKLTF

SEQ ID NO: 190648 - protein, 15 aa, Homo sapiens
  CDR3 for beta chain variable domain of TCR clone 95324 (TRBV2, TRBJ1-3)
CASSISPRSGNTIYF

SEQ ID NO: 190649 - protein, 16 aa, Homo sapiens
  CDR3 for alpha chain variable domain of TCR clone 95325 (TRAV12-2, TRAJ52)
CRLANAGGTSYGKLTL

SEQ ID NO: 190650 - protein, 14 aa, Homo sapiens
  CDR3 for beta chain variable domain of TCR clone 95325 (TRBV7-6, TRBJ2-3)
CASSLGTVTDTQYF

SEQ ID NO: 190651 - protein, 15 aa, Homo sapiens
  CDR3 for alpha chain variable domain of TCR clone 95326 (TRAV2, TRAJ9)
CAVEDRGTGGFKTIF

SEQ ID NO: 190652 - protein, 15 aa, Homo sapiens
  CDR3 for beta chain variable domain of TCR clone 95326 (TRBV28, TRBJ2-1)
CASSIIAGGRSEQFF

SEQ ID NO: 190653 - protein, 14 aa, Homo sapiens
  CDR3 for alpha chain variable domain of TCR clone 95327 (TRAV26-1, TRAJ38)
CIADNAGNNRKLIW

SEQ ID NO: 190654 - protein, 13 aa, Homo sapiens
  CDR3 for beta chain variable domain of TCR clone 95327 (TRBV7-9, TRBJ1-2)
CASSLKQNYGYAF

SEQ ID NO: 190655 - protein, 18 aa, Homo sapiens
  CDR3 for alpha chain variable domain of TCR clone 95328 (TRAV26-2, TRAJ54)
CILRDVEVGIQGAQKLVF

SEQ ID NO: 190656 - protein, 14 aa, Homo sapiens
  CDR3 for beta chain variable domain of TCR clone 95328 (TRBV7-3, TRBJ2-1)
CASSLAGGTNEQFF

SEQ ID NO: 190657 - protein, 15 aa, Homo sapiens
  CDR3 for alpha chain variable domain of TCR clone 95329 (TRAV8-3, TRAJ7)
CAVGSISYGNNRLAF

SEQ ID NO: 190658 - protein, 11 aa, Homo sapiens
  CDR3 for beta chain variable domain of TCR clone 95329 (TRBV29-1, TRBJ2-5)
CSEDRTGTQYF

SEQ ID NO: 190659 - protein, 18 aa, Homo sapiens
  CDR3 for alpha chain variable domain of TCR clone 95330 (TRAV26-1, TRAJ5)
CIVRVVPPWDTGRRALTF

SEQ ID NO: 190660 - protein, 15 aa, Homo sapiens
  CDR3 for beta chain variable domain of TCR clone 95330 (TRBV7-9, TRBJ2-7)
CASSLPMGQANEQYF

SEQ ID NO: 190661 - protein, 14 aa, Homo sapiens
  CDR3 for alpha chain variable domain of TCR clone 95331 (TRAV17, TRAJ56)
CATVPAGANSKLTF

SEQ ID NO: 190662 - protein, 14 aa, Homo sapiens
  CDR3 for beta chain variable domain of TCR clone 95331 (TRBV7-7, TRBJ2-2)
CATRQDSDTGELFF

SEQ ID NO: 190663 - protein, 11 aa, Homo sapiens
  CDR3 for alpha chain variable domain of TCR clone 95332 (TRAV3, TRAJ21)
CAVGNFNKFHF

SEQ ID NO: 190664 - protein, 15 aa, Homo sapiens
  CDR3 for beta chain variable domain of TCR clone 95332 (TRBV19, TRBJ1-2)
CASSVGQVLNYGYTF

SEQ ID NO: 190665 - protein, 18 aa, Homo sapiens
  CDR3 for alpha chain variable domain of TCR clone 95333 (TRAV1-1, TRAJ42)
CAVSPSAFYGGSQGNLIF

SEQ ID NO: 190666 - protein, 13 aa, Homo sapiens
  CDR3 for beta chain variable domain of TCR clone 95333 (TRBV19, TRBJ1-2)
CASSQGQVYGYTF

SEQ ID NO: 190667 - protein, 14 aa, Homo sapiens
  CDR3 for alpha chain variable domain of TCR clone 95334 (TRAV8-4, TRAJ5)
CAVSTDTGRRALTF

SEQ ID NO: 190668 - protein, 15 aa, Homo sapiens
  CDR3 for beta chain variable domain of TCR clone 95334 (TRBV7-9, TRBJ1-6)
CASSSPGRGNSPLHF

SEQ ID NO: 190669 - protein, 13 aa, Homo sapiens
  CDR3 for alpha chain variable domain of TCR clone 95335 (TRAV38-1, TRAJ42)
CARWGGSQGNLIF

SEQ ID NO: 190670 - protein, 15 aa, Homo sapiens
  CDR3 for beta chain variable domain of TCR clone 95335 (TRBV7-8, TRBJ2-1)
CASSLADSLYNEQFF

SEQ ID NO: 190671 - protein, 13 aa, Homo sapiens
  CDR3 for alpha chain variable domain of TCR clone 95336 (TRAV12-2, TRAJ20)
CAGYPSNDYKLSF

SEQ ID NO: 190672 - protein, 15 aa, Homo sapiens
  CDR3 for beta chain variable domain of TCR clone 95336 (TRBV18, TRBJ1-2)
CASSPGNGLGYGYTF

SEQ ID NO: 190673 - protein, 15 aa, Homo sapiens
  CDR3 for alpha chain variable domain of TCR clone 95337 (TRAV3, TRAJ23)
CAVRDRGNQGGKLIF

SEQ ID NO: 190674 - protein, 13 aa, Homo sapiens
  CDR3 for beta chain variable domain of TCR clone 95337 (TRBV7-2, TRBJ2-7)
CASSAPSGSEQYF

SEQ ID NO: 190675 - protein, 21 aa, Homo sapiens
  CDR3 for alpha chain variable domain of TCR clone 95338 (TRAV25, TRAJ7)
TATQTTDVGTYFCPGNNRLAF

SEQ ID NO: 190676 - protein, 14 aa, Homo sapiens
  CDR3 for beta chain variable domain of TCR clone 95338 (TRBV11-2, TRBJ2-2)
CASSLGLRVRDLFF

SEQ ID NO: 190677 - protein, 13 aa, Homo sapiens
  CDR3 for alpha chain variable domain of TCR clone 95339 (TRAV3, TRAJ30)
FAVRDRGDDKIIF

SEQ ID NO: 190678 - protein, 16 aa, Homo sapiens
  CDR3 for beta chain variable domain of TCR clone 95339 (TRBV7-3, TRBJ2-2)
CASSLKRGTLSGELFF

SEQ ID NO: 190679 - protein, 11 aa, Homo sapiens
  CDR3 for alpha chain variable domain of TCR clone 95340 (TRAV23/DV6, TRAJ49)
CAAETGNQVYF

SEQ ID NO: 190680 - protein, 14 aa, Homo sapiens
  CDR3 for beta chain variable domain of TCR clone 95340 (TRBV4-1, TRBJ2-7)
CASSRLSGSYEQYF

SEQ ID NO: 190681 - protein, 20 aa, Homo sapiens
  CDR3 for alpha chain variable domain of TCR clone 95341 (TRAV12-3, TRAJ41)
SLFIRDSQPIDSATPEALNF

SEQ ID NO: 190682 - protein, 15 aa, Homo sapiens
  CDR3 for beta chain variable domain of TCR clone 95341 (TRBV5-1, TRBJ2-7)
CASSLDLTSSYEQYF

SEQ ID NO: 190683 - protein, 14 aa, Homo sapiens
  CDR3 for alpha chain variable domain of TCR clone 95342 (TRAV38-1, TRAJ29)
CAFITPSGNTPLVF

SEQ ID NO: 190684 - protein, 17 aa, Homo sapiens
  CDR3 for beta chain variable domain of TCR clone 95342 (TRBV24-1, TRBJ2-7)
CATRKGLAGGHSYEQYF

SEQ ID NO: 190685 - protein, 15 aa, Homo sapiens
  CDR3 for alpha chain variable domain of TCR clone 95343 (TRAV8-3, TRAJ23)
CAVGDRYNKGGKLIF

SEQ ID NO: 190686 - protein, 17 aa, Homo sapiens
  CDR3 for beta chain variable domain of TCR clone 95343 (TRBV4-1, TRBJ1-4)
CASSQEGPRGVEEKLFF

SEQ ID NO: 190687 - protein, 10 aa, Homo sapiens
  CDR3 for alpha chain variable domain of TCR clone 95344 (TRAV30, TRAJ48)
CGIGNEKFTF

SEQ ID NO: 190688 - protein, 16 aa, Homo sapiens
  CDR3 for beta chain variable domain of TCR clone 95344 (TRBV27, TRBJ2-1)
SMNVEPGTSGDNEQFF

SEQ ID NO: 190689 - protein, 17 aa, Homo sapiens
  CDR3 for alpha chain variable domain of TCR clone 95345 (TRAV3, TRAJ38)
CAVRDCLNAGNNRKLIW

SEQ ID NO: 190690 - protein, 16 aa, Homo sapiens
  CDR3 for beta chain variable domain of TCR clone 95345 (TRBV29-1, TRBJ2-7)
CSVEDAEDGTAYEQYF

SEQ ID NO: 190691 - protein, 17 aa, Homo sapiens
  CDR3 for alpha chain variable domain of TCR clone 95346 (TRAV8-6, TRAJ8)
CAVKEGIENTGFQNLVF

SEQ ID NO: 190692 - protein, 12 aa, Homo sapiens
  CDR3 for beta chain variable domain of TCR clone 95346 (TRBV19, TRBJ1-4)
CASKDWPGGLFF

SEQ ID NO: 190693 - protein, 14 aa, Homo sapiens
  CDR3 for alpha chain variable domain of TCR clone 95347 (TRAV8-4, TRAJ13)
CAVTLSGGYQKITF

SEQ ID NO: 190694 - protein, 14 aa, Homo sapiens
  CDR3 for beta chain variable domain of TCR clone 95347 (TRBV7-2, TRBJ1-2)
CASSQTGSTYGYTF

SEQ ID NO: 190695 - protein, 11 aa, Homo sapiens
  CDR3 for alpha chain variable domain of TCR clone 95348 (TRAV1-1, TRAJ23)
CAVRQGGKFIF

SEQ ID NO: 190696 - protein, 14 aa, Homo sapiens
  CDR3 for beta chain variable domain of TCR clone 95348 (TRBV19, TRBJ2-1)
CASPTFVLSGEQFF

SEQ ID NO: 190697 - protein, 14 aa, Homo sapiens
  CDR3 for alpha chain variable domain of TCR clone 95349 (TRAV1-2, TRAJ16)
CAVNRFSDGQKLLF

SEQ ID NO: 190698 - protein, 15 aa, Homo sapiens
  CDR3 for beta chain variable domain of TCR clone 95349 (TRBV29-1, TRBJ2-7)
CSVESFDRGSYEQYF

SEQ ID NO: 190699 - protein, 13 aa, Homo sapiens
  CDR3 for alpha chain variable domain of TCR clone 95350 (TRAV8-3, TRAJ36)
CAVGATGENNLFF

SEQ ID NO: 190700 - protein, 15 aa, Homo sapiens
  CDR3 for beta chain variable domain of TCR clone 95350 (TRBV7-2, TRBJ1-2)
CASSPRAGWNYGYTF

SEQ ID NO: 190701 - protein, 13 aa, Homo sapiens
  CDR3 for alpha chain variable domain of TCR clone 95351 (TRAV8-3, TRAJ44)
CAVLPGTASKLTF

SEQ ID NO: 190702 - protein, 14 aa, Homo sapiens
  CDR3 for beta chain variable domain of TCR clone 95351 (TRBV11-2, TRBJ2-3)
CASSRLARTDTQHF

SEQ ID NO: 190703 - protein, 13 aa, Homo sapiens
  CDR3 for alpha chain variable domain of TCR clone 95352 (TRAV21, TRAJ20)
CAVGLRVDYKLSF

SEQ ID NO: 190704 - protein, 13 aa, Homo sapiens
  CDR3 for beta chain variable domain of TCR clone 95352 (TRBV6-1, TRBJ1-1)
CASSRQGNTESFF

SEQ ID NO: 190705 - protein, 14 aa, Homo sapiens
  CDR3 for alpha chain variable domain of TCR clone 95353 (TRAV2, TRAJ9)
CAVEDRGGGFKTIF

SEQ ID NO: 190706 - protein, 15 aa, Homo sapiens
  CDR3 for beta chain variable domain of TCR clone 95353 (TRBV10-3, TRBJ2-1)
CAIRNGTSGHNEQFF

SEQ ID NO: 190707 - protein, 16 aa, Homo sapiens
  CDR3 for alpha chain variable domain of TCR clone 95354 (TRAV3, TRAJ10)
CAVRDMRAGGGNKLTF

SEQ ID NO: 190708 - protein, 15 aa, Homo sapiens
  CDR3 for beta chain variable domain of TCR clone 95354 (TRBV5-1, TRBJ2-3)
CASSVTSGSTDTQYF

SEQ ID NO: 190709 - protein, 17 aa, Homo sapiens
  CDR3 for alpha chain variable domain of TCR clone 95355 (TRAV3, TRAJ6)
CAVRDGPRAGGSYIPTF

SEQ ID NO: 190710 - protein, 14 aa, Homo sapiens
  CDR3 for beta chain variable domain of TCR clone 95355 (TRBV7-2, TRBJ2-7)
CASSPKTSLYEQYV

SEQ ID NO: 190711 - protein, 18 aa, Homo sapiens
  CDR3 for alpha chain variable domain of TCR clone 95356 (TRAV26-1, TRAJ23)
CIVRVGLEVWNQGGKLIF

SEQ ID NO: 190712 - protein, 15 aa, Homo sapiens
  CDR3 for beta chain variable domain of TCR clone 95356 (TRBV7-2, TRBJ2-3)
CASSSTGLETDTQYF

SEQ ID NO: 190713 - protein, 13 aa, Homo sapiens
  CDR3 for alpha chain variable domain of TCR clone 95357 (TRAV27, TRAJ17)
CAGAATAGNKQTF

SEQ ID NO: 190714 - protein, 15 aa, Homo sapiens
  CDR3 for beta chain variable domain of TCR clone 95357 (TRBV5-1, TRBJ2-3)
CASRNQAGSTDTQYF

SEQ ID NO: 190715 - protein, 15 aa, Homo sapiens
  CDR3 for alpha chain variable domain of TCR clone 95358 (TRAV12-1, TRAJ42)
CVVTRDGGSQGNLIF

SEQ ID NO: 190716 - protein, 13 aa, Homo sapiens
  CDR3 for beta chain variable domain of TCR clone 95358 (TRBV19, TRBJ1-2)
CASSVPGQDGYTF

SEQ ID NO: 190717 - protein, 14 aa, Homo sapiens
  CDR3 for alpha chain variable domain of TCR clone 95359 (TRAV35, TRAJ50)
CAGHRKTSYDQVIF

SEQ ID NO: 190718 - protein, 13 aa, Homo sapiens
  CDR3 for beta chain variable domain of TCR clone 95359 (TRBV7-7, TRBJ2-3)
CASSLSRADTQYF

SEQ ID NO: 190719 - protein, 13 aa, Homo sapiens
  CDR3 for alpha chain variable domain of TCR clone 95360 (TRAV12-3, TRAJ47)
CARKKEYGNKLVF

SEQ ID NO: 190720 - protein, 16 aa, Homo sapiens
  CDR3 for beta chain variable domain of TCR clone 95360 (TRBV3-1, TRBJ2-6)
CASSLTWVSGANVLTF

SEQ ID NO: 190721 - protein, 12 aa, Homo sapiens
  CDR3 for alpha chain variable domain of TCR clone 95361 (TRAV2, TRAJ9)
CAVGAGGFKTIF

SEQ ID NO: 190722 - protein, 15 aa, Homo sapiens
  CDR3 for beta chain variable domain of TCR clone 95361 (TRBV20-1, TRBJ2-7)
CSAESGTSGAYEQYF

SEQ ID NO: 190723 - protein, 12 aa, Homo sapiens
  CDR3 for alpha chain variable domain of TCR clone 95362 (TRAV13-2, TRAJ23)
CAERHRGGKLIF

SEQ ID NO: 190724 - protein, 16 aa, Homo sapiens
  CDR3 for beta chain variable domain of TCR clone 95362 (TRBV7-9, TRBJ1-2)
CASSLGFSSGEDGDTF

SEQ ID NO: 190725 - protein, 15 aa, Homo sapiens
  CDR3 for alpha chain variable domain of TCR clone 95363 (TRAV17, TRAJ16)
CATALRFSDGQKLLF

SEQ ID NO: 190726 - protein, 12 aa, Homo sapiens
  CDR3 for beta chain variable domain of TCR clone 95363 (TRBV2, TRBJ2-7)
CASIDPDYEQYF

SEQ ID NO: 190727 - protein, 16 aa, Homo sapiens
  CDR3 for alpha chain variable domain of TCR clone 95364 (TRAV30, TRAJ24)
CGTEIVDADSWGKFQF

SEQ ID NO: 190728 - protein, 16 aa, Homo sapiens
  CDR3 for beta chain variable domain of TCR clone 95364 (TRBV11-2, TRBJ1-1)
CASSLRQGGEHSKAFF

SEQ ID NO: 190729 - protein, 12 aa, Homo sapiens
  CDR3 for alpha chain variable domain of TCR clone 95365 (TRAV25, TRAJ38)
CAGTGNNRKLIG

SEQ ID NO: 190730 - protein, 14 aa, Homo sapiens
  CDR3 for beta chain variable domain of TCR clone 95365 (TRBV19, TRBJ1-5)
CASSKMTGPQPQHF

SEQ ID NO: 190731 - protein, 14 aa, Homo sapiens
  CDR3 for alpha chain variable domain of TCR clone 95366 (TRAV12-2, TRAJ40)
CAVKIPSGTYKYIF

SEQ ID NO: 190732 - protein, 13 aa, Homo sapiens
  CDR3 for beta chain variable domain of TCR clone 95366 (TRBV6-3, TRBJ2-5)
CASSYRMTETQYF

SEQ ID NO: 190733 - protein, 16 aa, Homo sapiens
  CDR3 for alpha chain variable domain of TCR clone 95367 (TRAV8-3, TRAJ10)
CAAGPGVTGGGNKLTF

SEQ ID NO: 190734 - protein, 13 aa, Homo sapiens
  CDR3 for beta chain variable domain of TCR clone 95367 (TRBV18, TRBJ1-1)
CASSPGPSGEAFF

SEQ ID NO: 190735 - protein, 14 aa, Homo sapiens
  CDR3 for alpha chain variable domain of TCR clone 95368 (TRAV26-1, TRAJ38)
CIADNAGNNRKLLW

SEQ ID NO: 190736 - protein, 14 aa, Homo sapiens
  CDR3 for beta chain variable domain of TCR clone 95368 (TRBV4-1, TRBJ2-2)
CASSQAVNTGELFF

SEQ ID NO: 190737 - protein, 12 aa, Homo sapiens
  CDR3 for alpha chain variable domain of TCR clone 95369 (TRAV25, TRAJ38)
CAGTGNNHKLIW

SEQ ID NO: 190738 - protein, 14 aa, Homo sapiens
  CDR3 for beta chain variable domain of TCR clone 95369 (TRBV19, TRBJ1-5)
CASSKMTGPQPQHF

SEQ ID NO: 190739 - protein, 15 aa, Homo sapiens
  CDR3 for alpha chain variable domain of TCR clone 95370 (TRAV13-1, TRAJ44)
CAASRGGGTASKLTF

SEQ ID NO: 190740 - protein, 13 aa, Homo sapiens
  CDR3 for beta chain variable domain of TCR clone 95370 (TRBV4-1, TRBJ1-1)
CASSQLGTGEAFF

SEQ ID NO: 190741 - protein, 17 aa, Homo sapiens
  CDR3 for alpha chain variable domain of TCR clone 95371 (TRAV13-1, TRAJ28)
CAASPPYSGAGSYQLTF

SEQ ID NO: 190742 - protein, 13 aa, Homo sapiens
  CDR3 for beta chain variable domain of TCR clone 95371 (TRBV28, TRBJ2-5)
CASSFAGGETQYF

SEQ ID NO: 190743 - protein, 10 aa, Homo sapiens
  CDR3 for alpha chain variable domain of TCR clone 95372 (TRAV23/DV6, TRAJ22)
CVASSRGSRF

SEQ ID NO: 190744 - protein, 15 aa, Homo sapiens
  CDR3 for beta chain variable domain of TCR clone 95372 (TRBV10-3, TRBJ2-3)
CAIDTSGRRTDTQYF

SEQ ID NO: 190745 - protein, 15 aa, Homo sapiens
  CDR3 for alpha chain variable domain of TCR clone 95373 (TRAV26-2, TRAJ39)
CSLRGNNNAGTMLTF

SEQ ID NO: 190746 - protein, 15 aa, Homo sapiens
  CDR3 for beta chain variable domain of TCR clone 95373 (TRBV5-4, TRBJ1-1)
CASSSLGWANTEAFF

SEQ ID NO: 190747 - protein, 19 aa, Homo sapiens
  CDR3 for alpha chain variable domain of TCR clone 95374 (TRAV1-2, TRAJ26)
CLLPLCCERPDNYGQNFVF

SEQ ID NO: 190748 - protein, 17 aa, Homo sapiens
  CDR3 for beta chain variable domain of TCR clone 95374 (TRBV13, TRBJ2-3)
CASSLSRVAGGRNTRYF

SEQ ID NO: 190749 - protein, 14 aa, Homo sapiens
  CDR3 for alpha chain variable domain of TCR clone 95375 (TRAV23/DV6, TRAJ40)
CAASLTSGTYKHIF

SEQ ID NO: 190750 - protein, 14 aa, Homo sapiens
  CDR3 for beta chain variable domain of TCR clone 95375 (TRBV5-1, TRBJ2-3)
CASSRGQGGGTQYF

SEQ ID NO: 190751 - protein, 13 aa, Homo sapiens
  CDR3 for alpha chain variable domain of TCR clone 95376 (TRAV3, TRAJ20)
GAVRSLNDYKLSF

SEQ ID NO: 190752 - protein, 13 aa, Homo sapiens
  CDR3 for beta chain variable domain of TCR clone 95376 (TRBV6-1, TRBJ2-1)
CAGMDPTNNEQFF

SEQ ID NO: 190753 - protein, 14 aa, Homo sapiens
  CDR3 for alpha chain variable domain of TCR clone 95377 (TRAV26-1, TRAJ57)
CIRAGQGGSEKLVF

SEQ ID NO: 190754 - protein, 13 aa, Homo sapiens
  CDR3 for beta chain variable domain of TCR clone 95377 (TRBV19, TRBJ2-7)
CASSLTTSYEQYV

SEQ ID NO: 190755 - protein, 19 aa, Homo sapiens
  CDR3 for alpha chain variable domain of TCR clone 95378 (TRAV2, TRAJ20)
ILQVREADAAVYRDCKLSF

SEQ ID NO: 190756 - protein, 16 aa, Homo sapiens
  CDR3 for beta chain variable domain of TCR clone 95378 (TRBV13, TRBJ2-2)
CASSPRTGEHTGELFF

SEQ ID NO: 190757 - protein, 15 aa, Homo sapiens
  CDR3 for alpha chain variable domain of TCR clone 95379 (TRAV2, TRAJ9)
CAVEDRGTGGFKTIF

SEQ ID NO: 190758 - protein, 10 aa, Homo sapiens
  CDR3 for beta chain variable domain of TCR clone 95379 (TRBV2, TRBJ2-4)
CASRGSIQYF

SEQ ID NO: 190759 - protein, 11 aa, Homo sapiens
  CDR3 for alpha chain variable domain of TCR clone 95380 (TRAV3, TRAJ21)
CAVGNFNKFYF

SEQ ID NO: 190760 - protein, 15 aa, Homo sapiens
  CDR3 for beta chain variable domain of TCR clone 95380 (TRBV6-1, TRBJ2-4)
CASSEAVWTIDIQYF

SEQ ID NO: 190761 - protein, 13 aa, Homo sapiens
  CDR3 for alpha chain variable domain of TCR clone 95381 (TRAV13-1, TRAJ41)
CADAPNSGYALNF

SEQ ID NO: 190762 - protein, 13 aa, Homo sapiens
  CDR3 for beta chain variable domain of TCR clone 95381 (TRBV19, TRBJ2-7)
CASEGTATYEQYF

SEQ ID NO: 190763 - protein, 13 aa, Homo sapiens
  CDR3 for alpha chain variable domain of TCR clone 95382 (TRAV21, TRAJ57)
CAVTQGGSEKLVF

SEQ ID NO: 190764 - protein, 15 aa, Homo sapiens
  CDR3 for beta chain variable domain of TCR clone 95382 (TRBV28, TRBJ2-1)
CASSIIAGGRSEQFF

SEQ ID NO: 190765 - protein, 12 aa, Homo sapiens
  CDR3 for alpha chain variable domain of TCR clone 95383 (TRAV27, TRAJ9)
CAGESGGFKTNF

SEQ ID NO: 190766 - protein, 18 aa, Homo sapiens
  CDR3 for beta chain variable domain of TCR clone 95383 (TRBV10-2, TRBJ2-2)
CISAPAVHRQADAGELFF

SEQ ID NO: 190767 - protein, 11 aa, Homo sapiens
  CDR3 for alpha chain variable domain of TCR clone 95384 (TRAV27, TRAJ40)
SLTSETYKYIF

SEQ ID NO: 190768 - protein, 13 aa, Homo sapiens
  CDR3 for beta chain variable domain of TCR clone 95384 (TRBV2, TRBJ2-5)
CASGTPYQETQYF

SEQ ID NO: 190769 - protein, 16 aa, Homo sapiens
  CDR3 for alpha chain variable domain of TCR clone 95385 (TRAV8-3, TRAJ13)
CAVGAYPSGGYQKVTF

SEQ ID NO: 190770 - protein, 15 aa, Homo sapiens
  CDR3 for beta chain variable domain of TCR clone 95385 (TRBV2, TRBJ2-5)
CASTRDGGPQETQYF

SEQ ID NO: 190771 - protein, 19 aa, Homo sapiens
  CDR3 for alpha chain variable domain of TCR clone 95386 (TRAV38-1, TRAJ53)
CAFMKHGLESGGSNYKLTF

SEQ ID NO: 190772 - protein, 13 aa, Homo sapiens
  CDR3 for beta chain variable domain of TCR clone 95386 (TRBV19, TRBJ2-7)
CASSPRQSYEQYV

SEQ ID NO: 190773 - protein, 14 aa, Homo sapiens
  CDR3 for alpha chain variable domain of TCR clone 95387 (TRAV12-3, TRAJ29)
CAMILLSGSTPLVF

SEQ ID NO: 190774 - protein, 16 aa, Homo sapiens
  CDR3 for beta chain variable domain of TCR clone 95387 (TRBV28, TRBJ2-7)
CASSSGTSGRGYEQYF

SEQ ID NO: 190775 - protein, 12 aa, Homo sapiens
  CDR3 for alpha chain variable domain of TCR clone 95388 (TRAV6, TRAJ9)
CALHTGGFKTIF

SEQ ID NO: 190776 - protein, 12 aa, Homo sapiens
  CDR3 for beta chain variable domain of TCR clone 95388 (TRBV7-2, TRBJ1-6)
CASSLSSSPLHF

SEQ ID NO: 190777 - protein, 14 aa, Homo sapiens
  CDR3 for alpha chain variable domain of TCR clone 95389 (TRAV21, TRAJ35)
CAVMLIGFGNVLHC

SEQ ID NO: 190778 - protein, 12 aa, Homo sapiens
  CDR3 for beta chain variable domain of TCR clone 95389 (TRBV7-9, TRBJ2-7)
YASSIKREEQYF

SEQ ID NO: 190779 - protein, 14 aa, Homo sapiens
  CDR3 for alpha chain variable domain of TCR clone 95390 (TRAV17, TRAJ34)
CATDSLEGTDKLIF

SEQ ID NO: 190780 - protein, 13 aa, Homo sapiens
  CDR3 for beta chain variable domain of TCR clone 95390 (TRBV12-5, TRBJ2-3)
CASGDRQSDTQYF

SEQ ID NO: 190781 - protein, 14 aa, Homo sapiens
  CDR3 for alpha chain variable domain of TCR clone 95391 (TRAV8-3, TRAJ4)
CAVGAAGGYNKLIF

SEQ ID NO: 190782 - protein, 14 aa, Homo sapiens
  CDR3 for beta chain variable domain of TCR clone 95391 (TRBV20-1, TRBJ2-7)
CSAKRGRSSYEQYF

SEQ ID NO: 190783 - protein, 11 aa, Homo sapiens
  CDR3 for alpha chain variable domain of TCR clone 95392 (TRAV21, TRAJ39)
LLVNAGNMLTF

SEQ ID NO: 190784 - protein, 15 aa, Homo sapiens
  CDR3 for beta chain variable domain of TCR clone 95392 (TRBV29-1, TRBJ2-1)
CSGSDRKSSYNEQFF

SEQ ID NO: 190785 - protein, 12 aa, Homo sapiens
  CDR3 for alpha chain variable domain of TCR clone 95393 (TRAV1-2, TRAJ33)
CAALDSNYRLIW

SEQ ID NO: 190786 - protein, 13 aa, Homo sapiens
  CDR3 for beta chain variable domain of TCR clone 95393 (TRBV7-2, TRBJ2-7)
CASSFGQEKEQYL

SEQ ID NO: 190787 - protein, 12 aa, Homo sapiens
  CDR3 for alpha chain variable domain of TCR clone 95394 (TRAV16, TRAJ22)
CALEVSARQLPF

SEQ ID NO: 190788 - protein, 14 aa, Homo sapiens
  CDR3 for beta chain variable domain of TCR clone 95394 (TRBV11-2, TRBJ2-3)
CASSSIASTDTQYF

SEQ ID NO: 190789 - protein, 11 aa, Homo sapiens
  CDR3 for alpha chain variable domain of TCR clone 95395 (TRAV21, TRAJ34)
CAHYNTDKLIF

SEQ ID NO: 190790 - protein, 13 aa, Homo sapiens
  CDR3 for beta chain variable domain of TCR clone 95395 (TRBV10-3, TRBJ1-2)
CAISERDSYGYTF

SEQ ID NO: 190791 - protein, 15 aa, Homo sapiens
  CDR3 for alpha chain variable domain of TCR clone 95396 (TRAV1-2, TRAJ15)
CAVDVMGSAGTALIF

SEQ ID NO: 190792 - protein, 13 aa, Homo sapiens
  CDR3 for beta chain variable domain of TCR clone 95396 (TRBV20-1, TRBJ1-1)
CSAFDGENTEAFF

SEQ ID NO: 190793 - protein, 13 aa, Homo sapiens
  CDR3 for alpha chain variable domain of TCR clone 95397 (TRAV2, TRAJ20)
CAVEDPSEYKLSF

SEQ ID NO: 190794 - protein, 16 aa, Homo sapiens
  CDR3 for beta chain variable domain of TCR clone 95397 (TRBV25-1, TRBJ2-7)
CASSELTCGGIYEQYF

SEQ ID NO: 190795 - protein, 11 aa, Homo sapiens
  CDR3 for alpha chain variable domain of TCR clone 95398 (TRAV13-1, TRAJ39)
CAAHAGNMLTF

SEQ ID NO: 190796 - protein, 14 aa, Homo sapiens
  CDR3 for beta chain variable domain of TCR clone 95398 (TRBV11-2, TRBJ1-5)
CASSLDRGRQPQHF

SEQ ID NO: 190797 - protein, 13 aa, Homo sapiens
  CDR3 for alpha chain variable domain of TCR clone 95399 (TRAV13-1, TRAJ17)
CAADGAAGNKQTF

SEQ ID NO: 190798 - protein, 14 aa, Homo sapiens
  CDR3 for beta chain variable domain of TCR clone 95399 (TRBV11-2, TRBJ1-3)
CASSLTQGRNTIYF

SEQ ID NO: 190799 - protein, 16 aa, Homo sapiens
  CDR3 for alpha chain variable domain of TCR clone 95400 (TRAV13-1, TRAJ37)
RAASSLGSSNTGKLIF

SEQ ID NO: 190800 - protein, 12 aa, Homo sapiens
  CDR3 for beta chain variable domain of TCR clone 95400 (TRBV6-1, TRBJ2-5)
CASSEGRETQYF

SEQ ID NO: 190801 - protein, 15 aa, Homo sapiens
  CDR3 for alpha chain variable domain of TCR clone 95401 (TRAV26-1, TRAJ40)
CIVRAVPSGTYKYIF

SEQ ID NO: 190802 - protein, 14 aa, Homo sapiens
  CDR3 for beta chain variable domain of TCR clone 95401 (TRBV19, TRBJ2-1)
CASPTFVLSGEQFF

SEQ ID NO: 190803 - protein, 10 aa, Homo sapiens
  CDR3 for alpha chain variable domain of TCR clone 95402 (TRAV8-4, TRAJ39)
CAVSGNMLTF

SEQ ID NO: 190804 - protein, 14 aa, Homo sapiens
  CDR3 for beta chain variable domain of TCR clone 95402 (TRBV5-5, TRBJ2-7)
CASSLGQGTYEQYF

SEQ ID NO: 190805 - protein, 13 aa, Homo sapiens
  CDR3 for alpha chain variable domain of TCR clone 95403 (TRAV26-1, TRAJ36)
CIVVGTGANNLFF

SEQ ID NO: 190806 - protein, 13 aa, Homo sapiens
  CDR3 for beta chain variable domain of TCR clone 95403 (TRBV6-5, TRBJ2-6)
CASSTSGPLRLYF

SEQ ID NO: 190807 - protein, 14 aa, Homo sapiens
  CDR3 for alpha chain variable domain of TCR clone 95404 (TRAV25, TRAJ27)
CAGPGNTNAGKSTF

SEQ ID NO: 190808 - protein, 16 aa, Homo sapiens
  CDR3 for beta chain variable domain of TCR clone 95404 (TRBV4-1, TRBJ2-6)
CASSRDGGPGANVLTF

SEQ ID NO: 190809 - protein, 14 aa, Homo sapiens
  CDR3 for alpha chain variable domain of TCR clone 95405 (TRAV20, TRAJ20)
CAVRRGYNDYKLSF

SEQ ID NO: 190810 - protein, 13 aa, Homo sapiens
  CDR3 for beta chain variable domain of TCR clone 95405 (TRBV19, TRBJ2-5)
CASSETAPETQYS

SEQ ID NO: 190811 - protein, 10 aa, Homo sapiens
  CDR3 for alpha chain variable domain of TCR clone 95406 (TRAV17, TRAJ36)
CATVAGNLFF

SEQ ID NO: 190812 - protein, 14 aa, Homo sapiens
  CDR3 for beta chain variable domain of TCR clone 95406 (TRBV5-1, TRBJ1-5)
CASSLESGSRPQHF

SEQ ID NO: 190813 - protein, 15 aa, Homo sapiens
  CDR3 for alpha chain variable domain of TCR clone 95407 (TRAV17, TRAJ57)
CATGPSQGGSEKLVF

SEQ ID NO: 190814 - protein, 16 aa, Homo sapiens
  CDR3 for beta chain variable domain of TCR clone 95407 (TRBV10-3, TRBJ1-2)
CAISDKVSGPFYGYTF

SEQ ID NO: 190815 - protein, 17 aa, Homo sapiens
  CDR3 for alpha chain variable domain of TCR clone 95408 (TRAV23/DV6, TRAJ58)
CAARLLRGETSGPRLTF

SEQ ID NO: 190816 - protein, 15 aa, Homo sapiens
  CDR3 for beta chain variable domain of TCR clone 95408 (TRBV9, TRBJ1-6)
CASSVAGTGDSPLHF

SEQ ID NO: 190817 - protein, 13 aa, Homo sapiens
  CDR3 for alpha chain variable domain of TCR clone 95409 (TRAV17, TRAJ9)
CATAITGGFKTIF

SEQ ID NO: 190818 - protein, 15 aa, Homo sapiens
  CDR3 for beta chain variable domain of TCR clone 95409 (TRBV11-2, TRBJ1-3)
CASSLDGTVGNTIYF

SEQ ID NO: 190819 - protein, 15 aa, Homo sapiens
  CDR3 for alpha chain variable domain of TCR clone 95410 (TRAV21, TRAJ38)
CAVRQDAGNNRKLIW

SEQ ID NO: 190820 - protein, 16 aa, Homo sapiens
  CDR3 for beta chain variable domain of TCR clone 95410 (TRBV4-2, TRBJ1-1)
CASRPLDGGGDTEAFY

SEQ ID NO: 190821 - protein, 14 aa, Homo sapiens
  CDR3 for alpha chain variable domain of TCR clone 95411 (TRAV1-2, TRAJ8)
CAVRDDTGFQKLVF

SEQ ID NO: 190822 - protein, 16 aa, Homo sapiens
  CDR3 for beta chain variable domain of TCR clone 95411 (TRBV19, TRBJ2-1)
CASSKAGPSSYNEQFF

SEQ ID NO: 190823 - protein, 14 aa, Homo sapiens
  CDR3 for alpha chain variable domain of TCR clone 95412 (TRAV12-2, TRAJ5)
CAVNRSTGRRALTF

SEQ ID NO: 190824 - protein, 17 aa, Homo sapiens
  CDR3 for beta chain variable domain of TCR clone 95412 (TRBV4-1, TRBJ1-5)
CASSQQPPTVANQPQHF

SEQ ID NO: 190825 - protein, 13 aa, Homo sapiens
  CDR3 for alpha chain variable domain of TCR clone 95413 (TRAV2, TRAJ40)
CAVVTSGTYKYIF

SEQ ID NO: 190826 - protein, 14 aa, Homo sapiens
  CDR3 for beta chain variable domain of TCR clone 95413 (TRBV12-4, TRBJ1-1)
CASRPGQGRTEAFF

SEQ ID NO: 190827 - protein, 12 aa, Homo sapiens
  CDR3 for alpha chain variable domain of TCR clone 95414 (TRAV10, TRAJ31)
CVVRAHRARLMF

SEQ ID NO: 190828 - protein, 17 aa, Homo sapiens
  CDR3 for beta chain variable domain of TCR clone 95414 (TRBV13, TRBJ2-3)
CASSLSRVAGGRNTQYF

SEQ ID NO: 190829 - protein, 17 aa, Homo sapiens
  CDR3 for alpha chain variable domain of TCR clone 95415 (TRAV3, TRAJ42)
CAVRDRDYGGSQGNLIF

SEQ ID NO: 190830 - protein, 16 aa, Homo sapiens
  CDR3 for beta chain variable domain of TCR clone 95415 (TRBV12-4, TRBJ2-5)
CASSFFVRGRQETQYF

SEQ ID NO: 190831 - protein, 13 aa, Homo sapiens
  CDR3 for alpha chain variable domain of TCR clone 95416 (TRAV27, TRAJ29)
CAGAHSGNTPLVF

SEQ ID NO: 190832 - protein, 14 aa, Homo sapiens
  CDR3 for beta chain variable domain of TCR clone 95416 (TRBV7-9, TRBJ2-7)
CAISIGQGAGEQYF

SEQ ID NO: 190833 - protein, 14 aa, Homo sapiens
  CDR3 for alpha chain variable domain of TCR clone 95417 (TRAV25, TRAJ35)
CARRMEGFGDVLHC

SEQ ID NO: 190834 - protein, 13 aa, Homo sapiens
  CDR3 for beta chain variable domain of TCR clone 95417 (TRBV7-2, TRBJ1-4)
CASSLAGLEKLFF

SEQ ID NO: 190835 - protein, 14 aa, Homo sapiens
  CDR3 for alpha chain variable domain of TCR clone 95418 (TRAV12-2, TRAJ13)
CAVKKTGGYQKVTF

SEQ ID NO: 190836 - protein, 14 aa, Homo sapiens
  CDR3 for beta chain variable domain of TCR clone 95418 (TRBV2, TRBJ2-3)
CASSEGQNTDTQYF

SEQ ID NO: 190837 - protein, 15 aa, Homo sapiens
  CDR3 for alpha chain variable domain of TCR clone 95419 (TRAV27, TRAJ38)
CAGRFNAGNNRQLIW

SEQ ID NO: 190838 - protein, 13 aa, Homo sapiens
  CDR3 for beta chain variable domain of TCR clone 95419 (TRBV12-5, TRBJ2-3)
CASQNRGTDTQYF

SEQ ID NO: 190839 - protein, 12 aa, Homo sapiens
  CDR3 for alpha chain variable domain of TCR clone 95420 (TRAV3, TRAJ43)
CPVRDPNNDMRF

SEQ ID NO: 190840 - protein, 15 aa, Homo sapiens
  CDR3 for beta chain variable domain of TCR clone 95420 (TRBV27, TRBJ1-5)
CASSLGTGFDQPQHF

SEQ ID NO: 190841 - protein, 14 aa, Homo sapiens
  CDR3 for alpha chain variable domain of TCR clone 95421 (TRAV1-2, TRAJ8)
FAVREDTGFQKLVF

SEQ ID NO: 190842 - protein, 15 aa, Homo sapiens
  CDR3 for beta chain variable domain of TCR clone 95421 (TRBV7-3, TRBJ2-2)
CASSETGQGTGELFF

SEQ ID NO: 190843 - protein, 15 aa, Homo sapiens
  CDR3 for alpha chain variable domain of TCR clone 95422 (TRAV8-3, TRAJ27)
CAVGPSKSNAGKSTF

SEQ ID NO: 190844 - protein, 15 aa, Homo sapiens
  CDR3 for beta chain variable domain of TCR clone 95422 (TRBV7-2, TRBJ2-1)
CASSSGLAGGNEQFF

SEQ ID NO: 190845 - protein, 13 aa, Homo sapiens
  CDR3 for alpha chain variable domain of TCR clone 95423 (TRAV8-3, TRAJ44)
CAVVPGTASKLTF

SEQ ID NO: 190846 - protein, 16 aa, Homo sapiens
  CDR3 for beta chain variable domain of TCR clone 95423 (TRBV12-5, TRBJ2-5)
CASGPRTSGNQETQYF

SEQ ID NO: 190847 - protein, 14 aa, Homo sapiens
  CDR3 for alpha chain variable domain of TCR clone 95424 (TRAV1-2, TRAJ8)
CAVREDTGFQKLVF

SEQ ID NO: 190848 - protein, 12 aa, Homo sapiens
  CDR3 for beta chain variable domain of TCR clone 95424 (TRBV2, TRBJ2-1)
CAKREGYNEQFF

SEQ ID NO: 190849 - protein, 12 aa, Homo sapiens
  CDR3 for alpha chain variable domain of TCR clone 95425 (TRAV24, TRAJ26)
CAFFNYGQNFVF

SEQ ID NO: 190850 - protein, 17 aa, Homo sapiens
  CDR3 for beta chain variable domain of TCR clone 95425 (TRBV11-1, TRBJ2-7)
CASSLTGSFGLDYEQYF

SEQ ID NO: 190851 - protein, 16 aa, Homo sapiens
  CDR3 for alpha chain variable domain of TCR clone 95426 (TRAV3, TRAJ10)
CAVRDMRAGGGKKLTF

SEQ ID NO: 190852 - protein, 13 aa, Homo sapiens
  CDR3 for beta chain variable domain of TCR clone 95426 (TRBV7-9, TRBJ1-2)
CASSLKQNYGYTF

SEQ ID NO: 190853 - protein, 14 aa, Homo sapiens
  CDR3 for alpha chain variable domain of TCR clone 95427 (TRAV1-2, TRAJ16)
CAVNRFSDGQKLLF

SEQ ID NO: 190854 - protein, 12 aa, Homo sapiens
  CDR3 for beta chain variable domain of TCR clone 95427 (TRBV7-9, TRBJ1-6)
CASSLMTSPLHF

SEQ ID NO: 190855 - protein, 11 aa, Homo sapiens
  CDR3 for alpha chain variable domain of TCR clone 95428 (TRAV12-3, TRAJ49)
CATNTGNQFYF

SEQ ID NO: 190856 - protein, 15 aa, Homo sapiens
  CDR3 for beta chain variable domain of TCR clone 95428 (TRBV11-2, TRBJ2-1)
CASSLGTSGLNEQFF

SEQ ID NO: 190857 - protein, 15 aa, Homo sapiens
  CDR3 for alpha chain variable domain of TCR clone 95429 (TRAV3, TRAJ22)
GAVRDRGGSARQLTF

SEQ ID NO: 190858 - protein, 16 aa, Homo sapiens
  CDR3 for beta chain variable domain of TCR clone 95429 (TRBV5-4, TRBJ2-3)
CASQQPGAGGADTQYF

SEQ ID NO: 190859 - protein, 16 aa, Homo sapiens
  CDR3 for alpha chain variable domain of TCR clone 95430 (TRAV8-3, TRAJ42)
CAVGEGNGGIQGNLIF

SEQ ID NO: 190860 - protein, 14 aa, Homo sapiens
  CDR3 for beta chain variable domain of TCR clone 95430 (TRBV7-2, TRBJ2-1)
CASSRGGARNEQFF

SEQ ID NO: 190861 - protein, 17 aa, Homo sapiens
  CDR3 for alpha chain variable domain of TCR clone 95431 (TRAV26-1, TRAJ53)
CIARVDDSGGSNYKLTS

SEQ ID NO: 190862 - protein, 19 aa, Homo sapiens
  CDR3 for beta chain variable domain of TCR clone 95431 (TRBV25-1, TRBJ2-2)
CAILVYRVDRGRKTGELFF

SEQ ID NO: 190863 - protein, 15 aa, Homo sapiens
  CDR3 for alpha chain variable domain of TCR clone 95432 (TRAV12-3, TRAJ27)
CAMRAYNTNAGKSAF

SEQ ID NO: 190864 - protein, 13 aa, Homo sapiens
  CDR3 for beta chain variable domain of TCR clone 95432 (TRBV11-2, TRBJ2-5)
CASSRGPSETQYF

SEQ ID NO: 190865 - protein, 11 aa, Homo sapiens
  CDR3 for alpha chain variable domain of TCR clone 95433 (TRAV17, TRAJ9)
CATTGGFKTIF

SEQ ID NO: 190866 - protein, 16 aa, Homo sapiens
  CDR3 for beta chain variable domain of TCR clone 95433 (TRBV2, TRBJ2-3)
CASSTSVEGVTDTQYF

SEQ ID NO: 190867 - protein, 13 aa, Homo sapiens
  CDR3 for alpha chain variable domain of TCR clone 95434 (TRAV13-1, TRAJ50)
CAAMETSYDKVIF

SEQ ID NO: 190868 - protein, 17 aa, Homo sapiens
  CDR3 for beta chain variable domain of TCR clone 95434 (TRBV7-8, TRBJ2-6)
CASSAGTGGAGANVLTF

SEQ ID NO: 190869 - protein, 11 aa, Homo sapiens
  CDR3 for alpha chain variable domain of TCR clone 95435 (TRAV1-1, TRAJ23)
CAVRQGGKLIF

SEQ ID NO: 190870 - protein, 20 aa, Homo sapiens
  CDR3 for beta chain variable domain of TCR clone 95435 (TRBV11-2, TRBJ1-6)
CASSLVFATGGSVHPCTLGT

SEQ ID NO: 190871 - protein, 12 aa, Homo sapiens
  CDR3 for alpha chain variable domain of TCR clone 95436 (TRAV3, TRAJ20)
CAVRDGDYKLSF

SEQ ID NO: 190872 - protein, 17 aa, Homo sapiens
  CDR3 for beta chain variable domain of TCR clone 95436 (TRBV5-1, TRBJ2-1)
CASSMGLAGEGYNEQFF

SEQ ID NO: 190873 - protein, 11 aa, Homo sapiens
  CDR3 for alpha chain variable domain of TCR clone 95437 (TRAV1-2, TRAJ20)
CAVANDYKLSF

SEQ ID NO: 190874 - protein, 18 aa, Homo sapiens
  CDR3 for beta chain variable domain of TCR clone 95437 (TRBV20-1, TRBJ2-6)
CSAGTTPTRGSGANVLTF

SEQ ID NO: 190875 - protein, 16 aa, Homo sapiens
  CDR3 for alpha chain variable domain of TCR clone 95438 (TRAV3, TRAJ37)
CAVRVRGSGNTGKLIF

SEQ ID NO: 190876 - protein, 11 aa, Homo sapiens
  CDR3 for beta chain variable domain of TCR clone 95438 (TRBV11-2, TRBJ2-2)
CASGLPGELFF

SEQ ID NO: 190877 - protein, 14 aa, Homo sapiens
  CDR3 for alpha chain variable domain of TCR clone 95439 (TRAV4, TRAJ17)
CLVGDPLVGNKLTF

SEQ ID NO: 190878 - protein, 20 aa, Homo sapiens
  CDR3 for beta chain variable domain of TCR clone 95439 (TRBV20-1, TRBJ2-1)
CSARPYSVAGVPSYYNEQFF

SEQ ID NO: 190879 - protein, 10 aa, Homo sapiens
  CDR3 for alpha chain variable domain of TCR clone 95440 (TRAV27, TRAJ58)
SETSGSRLTF

SEQ ID NO: 190880 - protein, 14 aa, Homo sapiens
  CDR3 for beta chain variable domain of TCR clone 95440 (TRBV4-1, TRBJ2-2)
CASSQAVNTGELFF

SEQ ID NO: 190881 - protein, 14 aa, Homo sapiens
  CDR3 for alpha chain variable domain of TCR clone 95441 (TRAV35, TRAJ48)
CAGQRDFGNEKLTF

SEQ ID NO: 190882 - protein, 15 aa, Homo sapiens
  CDR3 for beta chain variable domain of TCR clone 95441 (TRBV5-1, TRBJ2-7)
CASSWATGSSYEQYF

SEQ ID NO: 190883 - protein, 15 aa, Homo sapiens
  CDR3 for alpha chain variable domain of TCR clone 95442 (TRAV12-3, TRAJ27)
CAMRAYNTNAGKSTF

SEQ ID NO: 190884 - protein, 16 aa, Homo sapiens
  CDR3 for beta chain variable domain of TCR clone 95442 (TRBV12-5, TRBJ2-5)
CASGPRTSGNQETQYF

SEQ ID NO: 190885 - protein, 13 aa, Homo sapiens
  CDR3 for alpha chain variable domain of TCR clone 95443 (TRAV27, TRAJ41)
CAGEGNSGYALNF

SEQ ID NO: 190886 - protein, 15 aa, Homo sapiens
  CDR3 for beta chain variable domain of TCR clone 95443 (TRBV7-9, TRBJ1-6)
CASSSPGRGNSPLHF

SEQ ID NO: 190887 - protein, 13 aa, Homo sapiens
  CDR3 for alpha chain variable domain of TCR clone 95444 (TRAV3, TRAJ27)
CAVRPLGAGKSTF

SEQ ID NO: 190888 - protein, 16 aa, Homo sapiens
  CDR3 for beta chain variable domain of TCR clone 95444 (TRBV2, TRBJ2-1)
CASSVGGSLSYNEQFF

SEQ ID NO: 190889 - protein, 15 aa, Homo sapiens
  CDR3 for alpha chain variable domain of TCR clone 95445 (TRAV23/DV6, TRAJ13)
CAAWPGGGGYQKVTF

SEQ ID NO: 190890 - protein, 16 aa, Homo sapiens
  CDR3 for beta chain variable domain of TCR clone 95445 (TRBV7-3, TRBJ2-2)
CASSLKRGTLSGELFF

SEQ ID NO: 190891 - protein, 14 aa, Homo sapiens
  CDR3 for alpha chain variable domain of TCR clone 95446 (TRAV13-1, TRAJ44)
CAAKATGTASKLTF

SEQ ID NO: 190892 - protein, 13 aa, Homo sapiens
  CDR3 for beta chain variable domain of TCR clone 95446 (TRBV7-9, TRBJ2-7)
CASSLGLVGEQYF

SEQ ID NO: 190893 - protein, 14 aa, Homo sapiens
  CDR3 for alpha chain variable domain of TCR clone 95447 (TRAV12-1, TRAJ27)
CGEHIRTNAGKSTF

SEQ ID NO: 190894 - protein, 15 aa, Homo sapiens
  CDR3 for beta chain variable domain of TCR clone 95447 (TRBV19, TRBJ1-1)
CASTSGQIQNTEAVF

SEQ ID NO: 190895 - protein, 17 aa, Homo sapiens
  CDR3 for alpha chain variable domain of TCR clone 95448 (TRAV8-3, TRAJ42)
CAVGNPEERRSQGNLIF

SEQ ID NO: 190896 - protein, 14 aa, Homo sapiens
  CDR3 for beta chain variable domain of TCR clone 95448 (TRBV18, TRBJ2-7)
CASSPRGGAYEQYF

SEQ ID NO: 190897 - protein, 11 aa, Homo sapiens
  CDR3 for alpha chain variable domain of TCR clone 95449 (TRAV3, TRAJ21)
CAVGNFNKFYF

SEQ ID NO: 190898 - protein, 14 aa, Homo sapiens
  CDR3 for beta chain variable domain of TCR clone 95449 (TRBV27, TRBJ2-2)
CASRPGVNTGELFF

SEQ ID NO: 190899 - protein, 14 aa, Homo sapiens
  CDR3 for alpha chain variable domain of TCR clone 95450 (TRAV27, TRAJ22)
CAGLPSGSARQLTF

SEQ ID NO: 190900 - protein, 15 aa, Homo sapiens
  CDR3 for beta chain variable domain of TCR clone 95450 (TRBV28, TRBJ2-1)
CASSIIAGGRSEQFF

SEQ ID NO: 190901 - protein, 14 aa, Homo sapiens
  CDR3 for alpha chain variable domain of TCR clone 95451 (TRAV12-1, TRAJ46)
CVVTAKSSGDKLTF

SEQ ID NO: 190902 - protein, 17 aa, Homo sapiens
  CDR3 for beta chain variable domain of TCR clone 95451 (TRBV4-1, TRBJ2-3)
CASSQGPAGGPLDTQYF

SEQ ID NO: 190903 - protein, 14 aa, Homo sapiens
  CDR3 for alpha chain variable domain of TCR clone 95452 (TRAV4, TRAJ17)
CLVGDMAAGNKLTF

SEQ ID NO: 190904 - protein, 15 aa, Homo sapiens
  CDR3 for beta chain variable domain of TCR clone 95452 (TRBV9, TRBJ1-6)
CASSVAGTGDSPLHF

SEQ ID NO: 190905 - protein, 15 aa, Homo sapiens
  CDR3 for alpha chain variable domain of TCR clone 95453 (TRAV13-2, TRAJ10)
CAENRDTGGGNKLTF

SEQ ID NO: 190906 - protein, 13 aa, Homo sapiens
  CDR3 for beta chain variable domain of TCR clone 95453 (TRBV7-9, TRBJ1-2)
CASSLKQNYGYTF

SEQ ID NO: 190907 - protein, 18 aa, Homo sapiens
  CDR3 for alpha chain variable domain of TCR clone 95454 (TRAV21, TRAJ52)
CAVRPSPAGGTSYGNLTF

SEQ ID NO: 190908 - protein, 17 aa, Homo sapiens
  CDR3 for beta chain variable domain of TCR clone 95454 (TRBV20-1, TRBJ2-2)
CSASGSGQGGLTGELFF

SEQ ID NO: 190909 - protein, 14 aa, Homo sapiens
  CDR3 for alpha chain variable domain of TCR clone 95455 (TRAV12-3, TRAJ10)
SRLPLTGGGNKLTF

SEQ ID NO: 190910 - protein, 15 aa, Homo sapiens
  CDR3 for beta chain variable domain of TCR clone 95455 (TRBV28, TRBJ2-5)
CASSSGRTIQETQYF

SEQ ID NO: 190911 - protein, 16 aa, Homo sapiens
  CDR3 for alpha chain variable domain of TCR clone 95456 (TRAV30, TRAJ24)
CGTEIVDADSWGKFQF

SEQ ID NO: 190912 - protein, 16 aa, Homo sapiens
  CDR3 for beta chain variable domain of TCR clone 95456 (TRBV2, TRBJ1-3)
CVSSGGAGRSGNTIYF

SEQ ID NO: 190913 - protein, 18 aa, Homo sapiens
  CDR3 for alpha chain variable domain of TCR clone 95457 (TRAV26-1, TRAJ22)
CIVRVSFWFCKATDLLIW

SEQ ID NO: 190914 - protein, 20 aa, Homo sapiens
  CDR3 for beta chain variable domain of TCR clone 95457 (TRBV28, TRBJ2-1)
CASTPIGRSPGLAGGNEQFF

SEQ ID NO: 190915 - protein, 14 aa, Homo sapiens
  CDR3 for alpha chain variable domain of TCR clone 95458 (TRAV16, TRAJ22)
CALRGQGSARQLTF

SEQ ID NO: 190916 - protein, 15 aa, Homo sapiens
  CDR3 for beta chain variable domain of TCR clone 95458 (TRBV2, TRBJ2-1)
CASSEARSAYNEQFF

SEQ ID NO: 190917 - protein, 17 aa, Homo sapiens
  CDR3 for alpha chain variable domain of TCR clone 95459 (TRAV36/DV7, TRAJ52)
CAVAQRAGGTSYGKLTF

SEQ ID NO: 190918 - protein, 19 aa, Homo sapiens
  CDR3 for beta chain variable domain of TCR clone 95459 (TRBV7-2, TRBJ2-3)
CASSFLSRNWGGGTDTQYF

SEQ ID NO: 190919 - protein, 14 aa, Homo sapiens
  CDR3 for alpha chain variable domain of TCR clone 95460 (TRAV1-2, TRAJ16)
CAVNRFSDGQKLLF

SEQ ID NO: 190920 - protein, 15 aa, Homo sapiens
  CDR3 for beta chain variable domain of TCR clone 95460 (TRBV4-3, TRBJ1-2)
CASSRGQGRNYGYTF

SEQ ID NO: 190921 - protein, 15 aa, Homo sapiens
  CDR3 for alpha chain variable domain of TCR clone 95461 (TRAV36/DV7, TRAJ53)
CAVEGSGGSNYKLTF

SEQ ID NO: 190922 - protein, 14 aa, Homo sapiens
  CDR3 for beta chain variable domain of TCR clone 95461 (TRBV24-1, TRBJ2-1)
CATADRGEYNEQFF

SEQ ID NO: 190923 - protein, 15 aa, Homo sapiens
  CDR3 for alpha chain variable domain of TCR clone 95462 (TRAV21, TRAJ24)
CAARSSTDSWGKLQF

SEQ ID NO: 190924 - protein, 14 aa, Homo sapiens
  CDR3 for beta chain variable domain of TCR clone 95462 (TRBV7-3, TRBJ1-1)
CASSLKGGNTEAFF

SEQ ID NO: 190925 - protein, 13 aa, Homo sapiens
  CDR3 for alpha chain variable domain of TCR clone 95463 (TRAV13-1, TRAJ11)
CAASIRGYSTLTF

SEQ ID NO: 190926 - protein, 14 aa, Homo sapiens
  CDR3 for beta chain variable domain of TCR clone 95463 (TRBV19, TRBJ2-1)
CASPTFVLSGEQFF

SEQ ID NO: 190927 - protein, 11 aa, Homo sapiens
  CDR3 for alpha chain variable domain of TCR clone 95464 (TRAV9-2, TRAJ43)
CALNNNNDMRF

SEQ ID NO: 190928 - protein, 14 aa, Homo sapiens
  CDR3 for beta chain variable domain of TCR clone 95464 (TRBV7-3, TRBJ2-3)
CASSLTGGTDTQYF

SEQ ID NO: 190929 - protein, 11 aa, Homo sapiens
  CDR3 for alpha chain variable domain of TCR clone 95465 (TRAV2, TRAJ33)
CAVDSNSQLIW

SEQ ID NO: 190930 - protein, 15 aa, Homo sapiens
  CDR3 for beta chain variable domain of TCR clone 95465 (TRBV19, TRBJ1-2)
CASSVGQVLNYGYTF

SEQ ID NO: 190931 - protein, 13 aa, Homo sapiens
  CDR3 for alpha chain variable domain of TCR clone 95466 (TRAV1-1, TRAJ9)
CAAKNTGGFKTIF

SEQ ID NO: 190932 - protein, 16 aa, Homo sapiens
  CDR3 for beta chain variable domain of TCR clone 95466 (TRBV12-5, TRBJ2-5)
FASGPRASGNQETQYF

SEQ ID NO: 190933 - protein, 15 aa, Homo sapiens
  CDR3 for alpha chain variable domain of TCR clone 95467 (TRAV13-1, TRAJ44)
CAASRGGGTASKLTF

SEQ ID NO: 190934 - protein, 14 aa, Homo sapiens
  CDR3 for beta chain variable domain of TCR clone 95467 (TRBV7-2, TRBJ2-5)
CASSPGGSSETQYF

SEQ ID NO: 190935 - protein, 14 aa, Homo sapiens
  CDR3 for alpha chain variable domain of TCR clone 95468 (TRAV12-1, TRAJ9)
CVVNGRTGGFKTIF

SEQ ID NO: 190936 - protein, 13 aa, Homo sapiens
  CDR3 for beta chain variable domain of TCR clone 95468 (TRBV5-7, TRBJ2-1)
CASSLVESVEQFF

SEQ ID NO: 190937 - protein, 11 aa, Homo sapiens
  CDR3 for alpha chain variable domain of TCR clone 95469 (TRAV2, TRAJ13)
CASGGYQKVTF

SEQ ID NO: 190938 - protein, 17 aa, Homo sapiens
  CDR3 for beta chain variable domain of TCR clone 95469 (TRBV4-2, TRBJ1-1)
CASSQVATGGMNTEAFF

SEQ ID NO: 190939 - protein, 12 aa, Homo sapiens
  CDR3 for alpha chain variable domain of TCR clone 95470 (TRAV12-2, TRAJ8)
CAVNTGFQKLVF

SEQ ID NO: 190940 - protein, 14 aa, Homo sapiens
  CDR3 for beta chain variable domain of TCR clone 95470 (TRBV7-3, TRBJ1-1)
CASSLGTGYTEAFF

SEQ ID NO: 190941 - protein, 12 aa, Homo sapiens
  CDR3 for alpha chain variable domain of TCR clone 95471 (TRAV22, TRAJ22)
FAPGGSARQLTF

SEQ ID NO: 190942 - protein, 15 aa, Homo sapiens
  CDR3 for beta chain variable domain of TCR clone 95471 (TRBV20-1, TRBJ1-4)
CSARFITGEDEKLFF

SEQ ID NO: 190943 - protein, 16 aa, Homo sapiens
  CDR3 for alpha chain variable domain of TCR clone 95472 (TRAV26-2, TRAJ52)
CIRGPAGGISYGKLTF

SEQ ID NO: 190944 - protein, 15 aa, Homo sapiens
  CDR3 for beta chain variable domain of TCR clone 95472 (TRBV20-1, TRBJ1-1)
CSASRGVTGNTEAFF

SEQ ID NO: 190945 - protein, 13 aa, Homo sapiens
  CDR3 for alpha chain variable domain of TCR clone 95473 (TRAV35, TRAJ44)
CAGLSGTASKLTF

SEQ ID NO: 190946 - protein, 15 aa, Homo sapiens
  CDR3 for beta chain variable domain of TCR clone 95473 (TRBV28, TRBJ2-1)
CASSIIAGGRSEQFF

SEQ ID NO: 190947 - protein, 15 aa, Homo sapiens
  CDR3 for alpha chain variable domain of TCR clone 95474 (TRAV26-1, TRAJ29)
CIVRVEGSGNTPPVF

SEQ ID NO: 190948 - protein, 15 aa, Homo sapiens
  CDR3 for beta chain variable domain of TCR clone 95474 (TRBV20-1, TRBJ2-7)
CSARDRVSGMDEQYF

SEQ ID NO: 190949 - protein, 12 aa, Homo sapiens
  CDR3 for alpha chain variable domain of TCR clone 95475 (TRAV27, TRAJ9)
CAGESVGFKTIF

SEQ ID NO: 190950 - protein, 18 aa, Homo sapiens
  CDR3 for beta chain variable domain of TCR clone 95475 (TRBV10-2, TRBJ2-2)
CISAPAVHRQADAGELFF

SEQ ID NO: 190951 - protein, 14 aa, Homo sapiens
  CDR3 for alpha chain variable domain of TCR clone 95476 (TRAV13-1, TRAJ20)
CAARPGSNDYKLSF

SEQ ID NO: 190952 - protein, 12 aa, Homo sapiens
  CDR3 for beta chain variable domain of TCR clone 95476 (TRBV20-1, TRBJ1-1)
QCSSGGHTEAFF

SEQ ID NO: 190953 - protein, 11 aa, Homo sapiens
  CDR3 for alpha chain variable domain of TCR clone 95477 (TRAV21, TRAJ11)
CAVNGYSTLTF

SEQ ID NO: 190954 - protein, 11 aa, Homo sapiens
  CDR3 for beta chain variable domain of TCR clone 95477 (TRBV29-1, TRBJ2-5)
CSEDRTGTQYF

SEQ ID NO: 190955 - protein, 13 aa, Homo sapiens
  CDR3 for alpha chain variable domain of TCR clone 95478 (TRAV12-2, TRAJ42)
CAVKRGSQRNLIF

SEQ ID NO: 190956 - protein, 12 aa, Homo sapiens
  CDR3 for beta chain variable domain of TCR clone 95478 (TRBV5-7, TRBJ1-2)
CASSLVQNGYTF

SEQ ID NO: 190957 - protein, 12 aa, Homo sapiens
  CDR3 for alpha chain variable domain of TCR clone 95479 (TRAV21, TRAJ39)
CAADNAGNMLTF

SEQ ID NO: 190958 - protein, 12 aa, Homo sapiens
  CDR3 for beta chain variable domain of TCR clone 95479 (TRBV14, TRBJ1-1)
CASSQLKGLAFF

SEQ ID NO: 190959 - protein, 13 aa, Homo sapiens
  CDR3 for alpha chain variable domain of TCR clone 95480 (TRAV16, TRAJ31)
CALSAHNNARLMF

SEQ ID NO: 190960 - protein, 15 aa, Homo sapiens
  CDR3 for beta chain variable domain of TCR clone 95480 (TRBV7-9, TRBJ1-4)
CASSARTGGNEKLFF

SEQ ID NO: 190961 - protein, 11 aa, Homo sapiens
  CDR3 for alpha chain variable domain of TCR clone 95481 (TRAV12-3, TRAJ43)
WAMSVSNDMRF

SEQ ID NO: 190962 - protein, 13 aa, Homo sapiens
  CDR3 for beta chain variable domain of TCR clone 95481 (TRBV20-1, TRBJ1-1)
CSAPLGGGTEAFF

SEQ ID NO: 190963 - protein, 17 aa, Homo sapiens
  CDR3 for alpha chain variable domain of TCR clone 95482 (TRAV8-3, TRAJ50)
CAVGAVDTETSYDKGIF

SEQ ID NO: 190964 - protein, 13 aa, Homo sapiens
  CDR3 for beta chain variable domain of TCR clone 95482 (TRBV7-9, TRBJ2-2)
CASSSAGTGELFF

SEQ ID NO: 190965 - protein, 12 aa, Homo sapiens
  CDR3 for alpha chain variable domain of TCR clone 95483 (TRAV3, TRAJ31)
CAAQRANARLMF

SEQ ID NO: 190966 - protein, 16 aa, Homo sapiens
  CDR3 for beta chain variable domain of TCR clone 95483 (TRBV4-2, TRBJ1-1)
CASSPTPGRAAPEAFF

SEQ ID NO: 190967 - protein, 11 aa, Homo sapiens
  CDR3 for alpha chain variable domain of TCR clone 95484 (TRAV3, TRAJ49)
CAPITGYQFYF

SEQ ID NO: 190968 - protein, 16 aa, Homo sapiens
  CDR3 for beta chain variable domain of TCR clone 95484 (TRBV5-1, TRBJ2-3)
CASSVFPMSSTDTQYF

SEQ ID NO: 190969 - protein, 14 aa, Homo sapiens
  CDR3 for alpha chain variable domain of TCR clone 95485 (TRAV16, TRAJ3)
CALSQYSSASKIIF

SEQ ID NO: 190970 - protein, 14 aa, Homo sapiens
  CDR3 for beta chain variable domain of TCR clone 95485 (TRBV7-2, TRBJ2-7)
CASSPKTSFYEQYF

SEQ ID NO: 190971 - protein, 12 aa, Homo sapiens
  CDR3 for alpha chain variable domain of TCR clone 95486 (TRAV12-3, TRAJ17)
CAMTLTGNKLTF

SEQ ID NO: 190972 - protein, 17 aa, Homo sapiens
  CDR3 for beta chain variable domain of TCR clone 95486 (TRBV7-3, TRBJ2-3)
CASSRGLAGEVPDTQYF

SEQ ID NO: 190973 - protein, 17 aa, Homo sapiens
  CDR3 for alpha chain variable domain of TCR clone 95487 (TRAV3, TRAJ6)
CAMRDGPRAGGSYIPTF

SEQ ID NO: 190974 - protein, 20 aa, Homo sapiens
  CDR3 for beta chain variable domain of TCR clone 95487 (TRBV28, TRBJ2-1)
CASTPIGRSPGLAGGNEQFF

SEQ ID NO: 190975 - protein, 12 aa, Homo sapiens
  CDR3 for alpha chain variable domain of TCR clone 95488 (TRAV12-3, TRAJ4)
CAMTGAGTRLAV

SEQ ID NO: 190976 - protein, 17 aa, Homo sapiens
  CDR3 for beta chain variable domain of TCR clone 95488 (TRBV10-3, TRBJ1-1)
CTSVPSVIPTGGVEAFF

SEQ ID NO: 190977 - protein, 15 aa, Homo sapiens
  CDR3 for alpha chain variable domain of TCR clone 95489 (TRAV12-3, TRAJ6)
CAMSATSGGSYMPTF

SEQ ID NO: 190978 - protein, 11 aa, Homo sapiens
  CDR3 for beta chain variable domain of TCR clone 95489 (TRBV20-1, TRBJ1-5)
CSAQGDQPQHF

SEQ ID NO: 190979 - protein, 12 aa, Homo sapiens
  CDR3 for alpha chain variable domain of TCR clone 95490 (TRAV12-3, TRAJ17)
CAMTLTGNKLTF

SEQ ID NO: 190980 - protein, 15 aa, Homo sapiens
  CDR3 for beta chain variable domain of TCR clone 95490 (TRBV29-1, TRBJ2-1)
CSVGRHALFYNEQFF

SEQ ID NO: 190981 - protein, 13 aa, Homo sapiens
  CDR3 for alpha chain variable domain of TCR clone 95491 (TRAV36/DV7, TRAJ30)
CAVEPVRDDKIIF

SEQ ID NO: 190982 - protein, 13 aa, Homo sapiens
  CDR3 for beta chain variable domain of TCR clone 95491 (TRBV19, TRBJ1-2)
CASSVPGQDGYTF

SEQ ID NO: 190983 - protein, 14 aa, Homo sapiens
  CDR3 for alpha chain variable domain of TCR clone 95492 (TRAV8-4, TRAJ16)
CAVSPVGRWPEAAL

SEQ ID NO: 190984 - protein, 13 aa, Homo sapiens
  CDR3 for beta chain variable domain of TCR clone 95492 (TRBV25-1, TRBJ2-2)
CASRKANTGELFF

SEQ ID NO: 190985 - protein, 18 aa, Homo sapiens
  CDR3 for alpha chain variable domain of TCR clone 95493 (TRAV23/DV6, TRAJ10)
CAASRLLYSREEETNSPL

SEQ ID NO: 190986 - protein, 15 aa, Homo sapiens
  CDR3 for beta chain variable domain of TCR clone 95493 (TRBV20-1, TRBJ2-1)
CSAEGGLLAGDEQFF

SEQ ID NO: 190987 - protein, 13 aa, Homo sapiens
  CDR3 for alpha chain variable domain of TCR clone 95494 (TRAV13-1, TRAJ5)
CAASDTGTRALTF

SEQ ID NO: 190988 - protein, 12 aa, Homo sapiens
  CDR3 for beta chain variable domain of TCR clone 95494 (TRBV28, TRBJ2-3)
CASSLYRDTQYF

SEQ ID NO: 190989 - protein, 14 aa, Homo sapiens
  CDR3 for alpha chain variable domain of TCR clone 95495 (TRAV26-1, TRAJ38)
CIADNAGNNHKLIW

SEQ ID NO: 190990 - protein, 15 aa, Homo sapiens
  CDR3 for beta chain variable domain of TCR clone 95495 (TRBV4-1, TRBJ1-1)
CASSQEWGHYTEAFF

SEQ ID NO: 190991 - protein, 17 aa, Homo sapiens
  CDR3 for alpha chain variable domain of TCR clone 95496 (TRAV3, TRAJ38)
CAVRDCLNAGNNRKLIW

SEQ ID NO: 190992 - protein, 17 aa, Homo sapiens
  CDR3 for beta chain variable domain of TCR clone 95496 (TRBV5-1, TRBJ2-2)
CASSPRTGGMNTGELFF

SEQ ID NO: 190993 - protein, 14 aa, Homo sapiens
  CDR3 for alpha chain variable domain of TCR clone 95497 (TRAV2, TRAJ9)
CAVEDRSGGFKTIF

SEQ ID NO: 190994 - protein, 13 aa, Homo sapiens
  CDR3 for beta chain variable domain of TCR clone 95497 (TRBV12-4, TRBJ1-5)
CASSPDRAQTQHF

SEQ ID NO: 190995 - protein, 11 aa, Homo sapiens
  CDR3 for alpha chain variable domain of TCR clone 95498 (TRAV1-2, TRAJ31)
CAVNNNARLMF

SEQ ID NO: 190996 - protein, 15 aa, Homo sapiens
  CDR3 for beta chain variable domain of TCR clone 95498 (TRBV4-1, TRBJ1-4)
CASSDTGGTNEKLFF

SEQ ID NO: 190997 - protein, 15 aa, Homo sapiens
  CDR3 for alpha chain variable domain of TCR clone 95499 (TRAV3, TRAJ47)
CAVRDIGEYGNKLVF

SEQ ID NO: 190998 - protein, 12 aa, Homo sapiens
  CDR3 for beta chain variable domain of TCR clone 95499 (TRBV11-2, TRBJ2-2)
CASSLGGGELFF

SEQ ID NO: 190999 - protein, 15 aa, Homo sapiens
  CDR3 for alpha chain variable domain of TCR clone 95500 (TRAV8-3, TRAJ45)
CASSYSGGGADGRTF

SEQ ID NO: 191000 - protein, 16 aa, Homo sapiens
  CDR3 for beta chain variable domain of TCR clone 95500 (TRBV7-9, TRBJ2-2)
CASSGFGGANTGELFF

SEQ ID NO: 191001 - protein, 15 aa, Homo sapiens
  CDR3 for alpha chain variable domain of TCR clone 95501 (TRAV13-1, TRAJ10)
CAATILTGGGNKLTF

SEQ ID NO: 191002 - protein, 14 aa, Homo sapiens
  CDR3 for beta chain variable domain of TCR clone 95501 (TRBV5-5, TRBJ1-5)
CASSGQGVDQPQHF

SEQ ID NO: 191003 - protein, 15 aa, Homo sapiens
  CDR3 for alpha chain variable domain of TCR clone 95502 (TRAV26-2, TRAJ28)
CILVESGAGSYQLTF

SEQ ID NO: 191004 - protein, 13 aa, Homo sapiens
  CDR3 for beta chain variable domain of TCR clone 95502 (TRBV6-5, TRBJ2-5)
CASSPQGGETQYF

SEQ ID NO: 191005 - protein, 14 aa, Homo sapiens
  CDR3 for alpha chain variable domain of TCR clone 95503 (TRAV8-2, TRAJ4)
YVVSPSGGYNKLIF

SEQ ID NO: 191006 - protein, 15 aa, Homo sapiens
  CDR3 for beta chain variable domain of TCR clone 95503 (TRBV4-1, TRBJ1-4)
CASSDTGGTNEKLFF

SEQ ID NO: 191007 - protein, 16 aa, Homo sapiens
  CDR3 for alpha chain variable domain of TCR clone 95504 (TRAV3, TRAJ37)
CAVRGKGSGNTGKLIF

SEQ ID NO: 191008 - protein, 13 aa, Homo sapiens
  CDR3 for beta chain variable domain of TCR clone 95504 (TRBV20-1, TRBJ1-1)
CSAGTVGNTEAFF

SEQ ID NO: 191009 - protein, 16 aa, Homo sapiens
  CDR3 for alpha chain variable domain of TCR clone 95505 (TRAV13-1, TRAJ45)
CAARGSRKGGADGLTF

SEQ ID NO: 191010 - protein, 13 aa, Homo sapiens
  CDR3 for beta chain variable domain of TCR clone 95505 (TRBV12-4, TRBJ2-5)
CASRKRGKETQYL

SEQ ID NO: 191011 - protein, 16 aa, Homo sapiens
  CDR3 for alpha chain variable domain of TCR clone 95506 (TRAV4, TRAJ22)
CLVGDLYSGSARQLTF

SEQ ID NO: 191012 - protein, 14 aa, Homo sapiens
  CDR3 for beta chain variable domain of TCR clone 95506 (TRBV2, TRBJ2-1)
CASSEALIYNEQFF

SEQ ID NO: 191013 - protein, 19 aa, Homo sapiens
  CDR3 for alpha chain variable domain of TCR clone 95507 (TRAV2, TRAJ20)
ILQVREADAAVYRDCKLSF

SEQ ID NO: 191014 - protein, 12 aa, Homo sapiens
  CDR3 for beta chain variable domain of TCR clone 95507 (TRBV20-1, TRBJ2-1)
CSAQYTYNEQFF

SEQ ID NO: 191015 - protein, 15 aa, Homo sapiens
  CDR3 for alpha chain variable domain of TCR clone 95508 (TRAV27, TRAJ38)
CAARRNAGNNRKLIW

SEQ ID NO: 191016 - protein, 13 aa, Homo sapiens
  CDR3 for beta chain variable domain of TCR clone 95508 (TRBV12-5, TRBJ2-3)
CASGDRQSDTQDF

SEQ ID NO: 191017 - protein, 14 aa, Homo sapiens
  CDR3 for alpha chain variable domain of TCR clone 95509 (TRAV12-2, TRAJ11)
CAVEGGSGYSTLTF

SEQ ID NO: 191018 - protein, 16 aa, Homo sapiens
  CDR3 for beta chain variable domain of TCR clone 95509 (TRBV6-1, TRBJ1-2)
CASGGAWQGRSHGYTF

SEQ ID NO: 191019 - protein, 14 aa, Homo sapiens
  CDR3 for alpha chain variable domain of TCR clone 95510 (TRAV8-2, TRAJ4)
GVVSPSGGYNKLIF

SEQ ID NO: 191020 - protein, 15 aa, Homo sapiens
  CDR3 for beta chain variable domain of TCR clone 95510 (TRBV4-1, TRBJ1-4)
CASSDTGGTNEKLFF

SEQ ID NO: 191021 - protein, 14 aa, Homo sapiens
  CDR3 for alpha chain variable domain of TCR clone 95511 (TRAV16, TRAJ37)
CALDTSGNTGKLIF

SEQ ID NO: 191022 - protein, 14 aa, Homo sapiens
  CDR3 for beta chain variable domain of TCR clone 95511 (TRBV7-6, TRBJ2-7)
CASSFRQGADEQYF

SEQ ID NO: 191023 - protein, 16 aa, Homo sapiens
  CDR3 for alpha chain variable domain of TCR clone 95512 (TRAV12-1, TRAJ8)
CVVNGRGNTGFQKLVF

SEQ ID NO: 191024 - protein, 14 aa, Homo sapiens
  CDR3 for beta chain variable domain of TCR clone 95512 (TRBV4-1, TRBJ2-2)
CASSQAVNTGELFF

SEQ ID NO: 191025 - protein, 16 aa, Homo sapiens
  CDR3 for alpha chain variable domain of TCR clone 95513 (TRAV27, TRAJ48)
TAAQPGDTGLYLPPTF

SEQ ID NO: 191026 - protein, 13 aa, Homo sapiens
  CDR3 for beta chain variable domain of TCR clone 95513 (TRBV7-2, TRBJ2-5)
CASSQTSVETQYF

SEQ ID NO: 191027 - protein, 12 aa, Homo sapiens
  CDR3 for alpha chain variable domain of TCR clone 95514 (TRAV3, TRAJ20)
CAVRDGDYKLSF

SEQ ID NO: 191028 - protein, 17 aa, Homo sapiens
  CDR3 for beta chain variable domain of TCR clone 95514 (TRBV5-1, TRBJ2-2)
CASSLAGLSGGTGELFF

SEQ ID NO: 191029 - protein, 15 aa, Homo sapiens
  CDR3 for alpha chain variable domain of TCR clone 95515 (TRAV8-3, TRAJ23)
CAVGDRYNQGGKLIF

SEQ ID NO: 191030 - protein, 17 aa, Homo sapiens
  CDR3 for beta chain variable domain of TCR clone 95515 (TRBV20-1, TRBJ2-2)
CSASGSGQGGLTGELFF

SEQ ID NO: 191031 - protein, 16 aa, Homo sapiens
  CDR3 for alpha chain variable domain of TCR clone 95516 (TRAV30, TRAJ24)
CGTEIVDADSWGKFQF

SEQ ID NO: 191032 - protein, 19 aa, Homo sapiens
  CDR3 for beta chain variable domain of TCR clone 95516 (TRBV7-3, TRBJ2-2)
CVSSLRAGGSGPNTGELFF

SEQ ID NO: 191033 - protein, 14 aa, Homo sapiens
  CDR3 for alpha chain variable domain of TCR clone 95517 (TRAV1-2, TRAJ8)
CAVREDTGFQKLVF

SEQ ID NO: 191034 - protein, 16 aa, Homo sapiens
  CDR3 for beta chain variable domain of TCR clone 95517 (TRBV20-1, TRBJ1-4)
CSAPGQGLLTNDKLFF

SEQ ID NO: 191035 - protein, 16 aa, Homo sapiens
  CDR3 for alpha chain variable domain of TCR clone 95518 (TRAV26-1, TRAJ37)
CIVRGDGSGNTGKLIF

SEQ ID NO: 191036 - protein, 17 aa, Homo sapiens
  CDR3 for beta chain variable domain of TCR clone 95518 (TRBV4-1, TRBJ2-7)
CARSRDPLGVRGGEQYF

SEQ ID NO: 191037 - protein, 14 aa, Homo sapiens
  CDR3 for alpha chain variable domain of TCR clone 95519 (TRAV16, TRAJ33)
CALSAMDSNYQLIW

SEQ ID NO: 191038 - protein, 15 aa, Homo sapiens
  CDR3 for beta chain variable domain of TCR clone 95519 (TRBV20-1, TRBJ2-1)
CSASSAGSSYNEQFF

SEQ ID NO: 191039 - protein, 16 aa, Homo sapiens
  CDR3 for alpha chain variable domain of TCR clone 95520 (TRAV38-1, TRAJ37)
CAFKGDGSSNTDKLIF

SEQ ID NO: 191040 - protein, 13 aa, Homo sapiens
  CDR3 for beta chain variable domain of TCR clone 95520 (TRBV12-4, TRBJ2-5)
CASSLFRRETQYF

SEQ ID NO: 191041 - protein, 14 aa, Homo sapiens
  CDR3 for alpha chain variable domain of TCR clone 95521 (TRAV13-1, TRAJ44)
CAAKATGTASKLTF

SEQ ID NO: 191042 - protein, 13 aa, Homo sapiens
  CDR3 for beta chain variable domain of TCR clone 95521 (TRBV15, TRBJ1-1)
CATSRGIQARAFF

SEQ ID NO: 191043 - protein, 15 aa, Homo sapiens
  CDR3 for alpha chain variable domain of TCR clone 95522 (TRAV26-2, TRAJ39)
CSLKGNNNAGNMLTF

SEQ ID NO: 191044 - protein, 15 aa, Homo sapiens
  CDR3 for beta chain variable domain of TCR clone 95522 (TRBV5-4, TRBJ1-1)
CASSSLGWANTEAFF

SEQ ID NO: 191045 - protein, 22 aa, Homo sapiens
  CDR3 for alpha chain variable domain of TCR clone 95523 (TRAV27, )
CAARRNAGNDHIQNPDPAVYQL

SEQ ID NO: 191046 - protein, 13 aa, Homo sapiens
  CDR3 for beta chain variable domain of TCR clone 95523 (TRBV12-5, TRBJ2-3)
CASGDRQSDTQYF

SEQ ID NO: 191047 - protein, 13 aa, Homo sapiens
  CDR3 for alpha chain variable domain of TCR clone 95524 (TRAV8-3, TRAJ36)
CAVGATGANNLFF

SEQ ID NO: 191048 - protein, 15 aa, Homo sapiens
  CDR3 for beta chain variable domain of TCR clone 95524 (TRBV11-3, TRBJ2-3)
CASLKDGREGDTQYF

SEQ ID NO: 191049 - protein, 13 aa, Homo sapiens
  CDR3 for alpha chain variable domain of TCR clone 95525 (TRAV21, TRAJ27)
CAAHPGNAGKSTF

SEQ ID NO: 191050 - protein, 12 aa, Homo sapiens
  CDR3 for beta chain variable domain of TCR clone 95525 (TRBV7-8, TRBJ2-7)
CASSLGDRGQYF

SEQ ID NO: 191051 - protein, 16 aa, Homo sapiens
  CDR3 for alpha chain variable domain of TCR clone 95526 (TRAV3, TRAJ37)
CAVRPHGSGNTDKLIF

SEQ ID NO: 191052 - protein, 14 aa, Homo sapiens
  CDR3 for beta chain variable domain of TCR clone 95526 (TRBV25-1, TRBJ1-1)
CASTHLGGNTEAFF

SEQ ID NO: 191053 - protein, 15 aa, Homo sapiens
  CDR3 for alpha chain variable domain of TCR clone 95527 (TRAV21, TRAJ53)
CATLNSGGSNYKLTF

SEQ ID NO: 191054 - protein, 15 aa, Homo sapiens
  CDR3 for beta chain variable domain of TCR clone 95527 (TRBV7-9, TRBJ1-4)
CASSRTGGFNEKLFF

SEQ ID NO: 191055 - protein, 13 aa, Homo sapiens
  CDR3 for alpha chain variable domain of TCR clone 95528 (TRAV2, TRAJ15)
CAVASQAGTALIF

SEQ ID NO: 191056 - protein, 14 aa, Homo sapiens
  CDR3 for beta chain variable domain of TCR clone 95528 (TRBV15, TRBJ1-3)
CATSRLGGGNTIYF

SEQ ID NO: 191057 - protein, 14 aa, Homo sapiens
  CDR3 for alpha chain variable domain of TCR clone 95529 (TRAV23/DV6, TRAJ4)
CAANLSGGYNKLIF

SEQ ID NO: 191058 - protein, 11 aa, Homo sapiens
  CDR3 for beta chain variable domain of TCR clone 95529 (TRBV7-9, TRBJ2-3)
CASSPTDTRYF

SEQ ID NO: 191059 - protein, 15 aa, Homo sapiens
  CDR3 for alpha chain variable domain of TCR clone 95530 (TRAV3, TRAJ13)
CAVRVYSGGYHKVTF

SEQ ID NO: 191060 - protein, 15 aa, Homo sapiens
  CDR3 for beta chain variable domain of TCR clone 95530 (TRBV7-2, TRBJ2-1)
CASSSGLAGGNEQFF

SEQ ID NO: 191061 - protein, 12 aa, Homo sapiens
  CDR3 for alpha chain variable domain of TCR clone 95531 (TRAV12-3, TRAJ17)
CAMTLTGNKLTF

SEQ ID NO: 191062 - protein, 15 aa, Homo sapiens
  CDR3 for beta chain variable domain of TCR clone 95531 (TRBV20-1, TRBJ2-7)
CSARDRVSGMDEQYL

SEQ ID NO: 191063 - protein, 16 aa, Homo sapiens
  CDR3 for alpha chain variable domain of TCR clone 95532 (TRAV38-1, TRAJ56)
RAFMKRQTGANSKLTF

SEQ ID NO: 191064 - protein, 14 aa, Homo sapiens
  CDR3 for beta chain variable domain of TCR clone 95532 (TRBV4-1, TRBJ2-2)
CASSQAVNTGELFF

SEQ ID NO: 191065 - protein, 12 aa, Homo sapiens
  CDR3 for alpha chain variable domain of TCR clone 95533 (TRAV16, TRAJ8)
FAPLGGFQKLVF

SEQ ID NO: 191066 - protein, 15 aa, Homo sapiens
  CDR3 for beta chain variable domain of TCR clone 95533 (TRBV6-1, TRBJ1-5)
CASIPDRLGNQPQHF

SEQ ID NO: 191067 - protein, 15 aa, Homo sapiens
  CDR3 for alpha chain variable domain of TCR clone 95534 (TRAV3, TRAJ3)
CAVRDRRGSASKIIF

SEQ ID NO: 191068 - protein, 17 aa, Homo sapiens
  CDR3 for beta chain variable domain of TCR clone 95534 (TRBV5-7, TRBJ2-5)
CQQHARFGQLYQETQYF

SEQ ID NO: 191069 - protein, 15 aa, Homo sapiens
  CDR3 for alpha chain variable domain of TCR clone 95535 (TRAV35, TRAJ58)
CAGLRQETSGSRLTF

SEQ ID NO: 191070 - protein, 16 aa, Homo sapiens
  CDR3 for beta chain variable domain of TCR clone 95535 (TRBV2, TRBJ2-1)
CASSVGGSLSYNEQFF

SEQ ID NO: 191071 - protein, 14 aa, Homo sapiens
  CDR3 for alpha chain variable domain of TCR clone 95536 (TRAV14/DV4, TRAJ54)
CAMREAPGAQKLVF

SEQ ID NO: 191072 - protein, 15 aa, Homo sapiens
  CDR3 for beta chain variable domain of TCR clone 95536 (TRBV5-1, TRBJ2-7)
CASSLNGGPEREQYF

SEQ ID NO: 191073 - protein, 14 aa, Homo sapiens
  CDR3 for alpha chain variable domain of TCR clone 95537 (TRAV16, TRAJ33)
CALSAMDSNYQLIW

SEQ ID NO: 191074 - protein, 13 aa, Homo sapiens
  CDR3 for beta chain variable domain of TCR clone 95537 (TRBV7-9, TRBJ2-7)
CASSFAGAYEQYF

SEQ ID NO: 191075 - protein, 12 aa, Homo sapiens
  CDR3 for alpha chain variable domain of TCR clone 95538 (TRAV12-3, TRAJ21)
CAMFNNFNKFYF

SEQ ID NO: 191076 - protein, 16 aa, Homo sapiens
  CDR3 for beta chain variable domain of TCR clone 95538 (TRBV7-9, TRBJ1-2)
CASSLAPLRAAYGYAF

SEQ ID NO: 191077 - protein, 15 aa, Homo sapiens
  CDR3 for alpha chain variable domain of TCR clone 95539 (TRAV27, TRAJ38)
CAARRNAGNNRKLTW

SEQ ID NO: 191078 - protein, 15 aa, Homo sapiens
  CDR3 for beta chain variable domain of TCR clone 95539 (TRBV5-1, TRBJ2-1)
CASSPPRAPYNEQFS

SEQ ID NO: 191079 - protein, 13 aa, Homo sapiens
  CDR3 for alpha chain variable domain of TCR clone 95540 (TRAV8-3, TRAJ48)
CAVVRFGNEKLTF

SEQ ID NO: 191080 - protein, 15 aa, Homo sapiens
  CDR3 for beta chain variable domain of TCR clone 95540 (TRBV11-2, TRBJ2-1)
CASSSPSTRYNEQFF

SEQ ID NO: 191081 - protein, 12 aa, Homo sapiens
  CDR3 for alpha chain variable domain of TCR clone 95541 (TRAV27, TRAJ41)
CAGRNSGYALNF

SEQ ID NO: 191082 - protein, 13 aa, Homo sapiens
  CDR3 for beta chain variable domain of TCR clone 95541 (TRBV12-4, TRBJ1-1)
CASSPGTGFDAFF

SEQ ID NO: 191083 - protein, 16 aa, Homo sapiens
  CDR3 for alpha chain variable domain of TCR clone 95542 (TRAV3, TRAJ37)
CAVRPHGSGDTGKLIF

SEQ ID NO: 191084 - protein, 17 aa, Homo sapiens
  CDR3 for beta chain variable domain of TCR clone 95542 (TRBV20-1, TRBJ2-1)
CSASSSGLAGSYNEQFF

SEQ ID NO: 191085 - protein, 11 aa, Homo sapiens
  CDR3 for alpha chain variable domain of TCR clone 95543 (TRAV12-2, TRAJ33)
CAVGSNYQLIW

SEQ ID NO: 191086 - protein, 14 aa, Homo sapiens
  CDR3 for beta chain variable domain of TCR clone 95543 (TRBV6-1, TRBJ2-2)
CASVEHIESGVLFF

SEQ ID NO: 191087 - protein, 14 aa, Homo sapiens
  CDR3 for alpha chain variable domain of TCR clone 95544 (TRAV1-2, TRAJ6)
CAVSLSGGSYIPTF

SEQ ID NO: 191088 - protein, 15 aa, Homo sapiens
  CDR3 for beta chain variable domain of TCR clone 95544 (TRBV28, TRBJ2-7)
CASSPGGRGVYEQYF

SEQ ID NO: 191089 - protein, 11 aa, Homo sapiens
  CDR3 for alpha chain variable domain of TCR clone 95545 (TRAV12-1, TRAJ33)
CVVNMNYQLIW

SEQ ID NO: 191090 - protein, 14 aa, Homo sapiens
  CDR3 for beta chain variable domain of TCR clone 95545 (TRBV20-1, TRBJ2-5)
CSALVPGYQETQYF

SEQ ID NO: 191091 - protein, 14 aa, Homo sapiens
  CDR3 for alpha chain variable domain of TCR clone 95546 (TRAV1-2, TRAJ16)
CAVNRFSDGQKLLF

SEQ ID NO: 191092 - protein, 14 aa, Homo sapiens
  CDR3 for beta chain variable domain of TCR clone 95546 (TRBV25-1, TRBJ1-1)
CASTHLGGSTEAFF

SEQ ID NO: 191093 - protein, 16 aa, Homo sapiens
  CDR3 for alpha chain variable domain of TCR clone 95547 (TRAV30, TRAJ24)
CGEEIVDADSWGKFQF

SEQ ID NO: 191094 - protein, 14 aa, Homo sapiens
  CDR3 for beta chain variable domain of TCR clone 95547 (TRBV12-5, TRBJ2-5)
CASGSRTHQETQYF

SEQ ID NO: 191095 - protein, 11 aa, Homo sapiens
  CDR3 for alpha chain variable domain of TCR clone 95548 (TRAV3, TRAJ13)
CAVTSYQKVTF

SEQ ID NO: 191096 - protein, 14 aa, Homo sapiens
  CDR3 for beta chain variable domain of TCR clone 95548 (TRBV7-9, TRBJ2-7)
CASSSGLAVYEQYF

SEQ ID NO: 191097 - protein, 14 aa, Homo sapiens
  CDR3 for alpha chain variable domain of TCR clone 95549 (TRAV1-2, TRAJ16)
CAVNRFSDGQKLIF

SEQ ID NO: 191098 - protein, 16 aa, Homo sapiens
  CDR3 for beta chain variable domain of TCR clone 95549 (TRBV7-3, TRBJ2-2)
CASSLKRGTLSGELFF

SEQ ID NO: 191099 - protein, 13 aa, Homo sapiens
  CDR3 for alpha chain variable domain of TCR clone 95550 (TRAV12-2, TRAJ20)
CAVYPSNDYKLSF

SEQ ID NO: 191100 - protein, 15 aa, Homo sapiens
  CDR3 for beta chain variable domain of TCR clone 95550 (TRBV27, TRBJ2-5)
CASSLYSRGGETQYF

SEQ ID NO: 191101 - protein, 14 aa, Homo sapiens
  CDR3 for alpha chain variable domain of TCR clone 95551 (TRAV8-6, TRAJ30)
CAVRPVNRDDKIIF

SEQ ID NO: 191102 - protein, 12 aa, Homo sapiens
  CDR3 for beta chain variable domain of TCR clone 95551 (TRBV7-9, TRBJ1-1)
ARSWGGGTEAFF

SEQ ID NO: 191103 - protein, 12 aa, Homo sapiens
  CDR3 for alpha chain variable domain of TCR clone 95552 (TRAV12-1, TRAJ40)
CVVYSGTYKYIF

SEQ ID NO: 191104 - protein, 19 aa, Homo sapiens
  CDR3 for beta chain variable domain of TCR clone 95552 (TRBV25-1, TRBJ2-2)
CAILVYRVDRGRKTGELFF

SEQ ID NO: 191105 - protein, 13 aa, Homo sapiens
  CDR3 for alpha chain variable domain of TCR clone 95553 (TRAV16, TRAJ52)
CALRGTSYGKLTF

SEQ ID NO: 191106 - protein, 15 aa, Homo sapiens
  CDR3 for beta chain variable domain of TCR clone 95553 (TRBV11-3, TRBJ2-7)
CASSLLSGSSYEQYF

SEQ ID NO: 191107 - protein, 14 aa, Homo sapiens
  CDR3 for alpha chain variable domain of TCR clone 95554 (TRAV1-2, TRAJ16)
CAVNRFSDGQKLLF

SEQ ID NO: 191108 - protein, 15 aa, Homo sapiens
  CDR3 for beta chain variable domain of TCR clone 95554 (TRBV7-3, TRBJ2-2)
CASSETGQGTGELFL

SEQ ID NO: 191109 - protein, 16 aa, Homo sapiens
  CDR3 for alpha chain variable domain of TCR clone 95555 (TRAV23/DV6, TRAJ9)
CAASIGGNTGGFKTIF

SEQ ID NO: 191110 - protein, 15 aa, Homo sapiens
  CDR3 for beta chain variable domain of TCR clone 95555 (TRBV7-2, TRBJ2-1)
CASSSGLAGGNEQFF

SEQ ID NO: 191111 - protein, 11 aa, Homo sapiens
  CDR3 for alpha chain variable domain of TCR clone 95556 (TRAV1-1, TRAJ23)
CAVRQGGKLIF

SEQ ID NO: 191112 - protein, 14 aa, Homo sapiens
  CDR3 for beta chain variable domain of TCR clone 95556 (TRBV19, TRBJ2-1)
CASPTFVLRGEQFF

SEQ ID NO: 191113 - protein, 14 aa, Homo sapiens
  CDR3 for alpha chain variable domain of TCR clone 95557 (TRAV12-2, TRAJ11)
CAVNRDSGYSTLTF

SEQ ID NO: 191114 - protein, 10 aa, Homo sapiens
  CDR3 for beta chain variable domain of TCR clone 95557 (TRBV20-1, TRBJ2-5)
CSARFETQYF

SEQ ID NO: 191115 - protein, 15 aa, Homo sapiens
  CDR3 for alpha chain variable domain of TCR clone 95558 (TRAV21, TRAJ52)
CAVRGGGTSFGKLTF

SEQ ID NO: 191116 - protein, 15 aa, Homo sapiens
  CDR3 for beta chain variable domain of TCR clone 95558 (TRBV18, TRBJ1-5)
CASSPSDRSNQPQHF

SEQ ID NO: 191117 - protein, 14 aa, Homo sapiens
  CDR3 for alpha chain variable domain of TCR clone 95559 (TRAV26-1, TRAJ48)
CIVRVPFGNEKLTF

SEQ ID NO: 191118 - protein, 16 aa, Homo sapiens
  CDR3 for beta chain variable domain of TCR clone 95559 (TRBV18, TRBJ2-1)
CASPPYLSIRGDEQFF

SEQ ID NO: 191119 - protein, 11 aa, Homo sapiens
  CDR3 for alpha chain variable domain of TCR clone 95560 (TRAV3, TRAJ40)
PRGAAGNKLTF

SEQ ID NO: 191120 - protein, 12 aa, Homo sapiens
  CDR3 for beta chain variable domain of TCR clone 95560 (TRBV11-2, TRBJ2-2)
CASSLGGGELFF

SEQ ID NO: 191121 - protein, 14 aa, Homo sapiens
  CDR3 for alpha chain variable domain of TCR clone 95561 (TRAV1-2, TRAJ16)
CAVNRLSDGQKLLF

SEQ ID NO: 191122 - protein, 20 aa, Homo sapiens
  CDR3 for beta chain variable domain of TCR clone 95561 (TRBV28, TRBJ2-1)
CASTPIGRSPGLAGGNEQFF

SEQ ID NO: 191123 - protein, 14 aa, Homo sapiens
  CDR3 for alpha chain variable domain of TCR clone 95562 (TRAV12-2, TRAJ45)
CAVNIGGGADGLTF

SEQ ID NO: 191124 - protein, 17 aa, Homo sapiens
  CDR3 for beta chain variable domain of TCR clone 95562 (TRBV7-8, TRBJ2-6)
CASSAGTGGAGANVLTV

SEQ ID NO: 191125 - protein, 23 aa, Homo sapiens
  CDR3 for alpha chain variable domain of TCR clone 95563 (TRAV21, TRAJ39)
AASQPGDSTTYPLLVNAGNMLTF

SEQ ID NO: 191126 - protein, 16 aa, Homo sapiens
  CDR3 for beta chain variable domain of TCR clone 95563 (TRBV9, TRBJ2-7)
CASSVGLGGGTYEQYF

SEQ ID NO: 191127 - protein, 13 aa, Homo sapiens
  CDR3 for alpha chain variable domain of TCR clone 95564 (TRAV21, TRAJ57)
CAVTQGGSEKLFL

SEQ ID NO: 191128 - protein, 16 aa, Homo sapiens
  CDR3 for beta chain variable domain of TCR clone 95564 (TRBV29-1, TRBJ2-7)
CSVEDAEDGTAYEQYF

SEQ ID NO: 191129 - protein, 14 aa, Homo sapiens
  CDR3 for alpha chain variable domain of TCR clone 95565 (TRAV25, TRAJ35)
CARRMEGFGNVLHC

SEQ ID NO: 191130 - protein, 15 aa, Homo sapiens
  CDR3 for beta chain variable domain of TCR clone 95565 (TRBV7-2, TRBJ1-4)
CASSLAGLEKLFLAV

SEQ ID NO: 191131 - protein, 14 aa, Homo sapiens
  CDR3 for alpha chain variable domain of TCR clone 95566 (TRAV26-1, TRAJ38)
CIAANAGNNRKLIW

SEQ ID NO: 191132 - protein, 15 aa, Homo sapiens
  CDR3 for beta chain variable domain of TCR clone 95566 (TRBV20-1, TRBJ2-7)
CSARDRVSGMDEQYF

SEQ ID NO: 191133 - protein, 14 aa, Homo sapiens
  CDR3 for alpha chain variable domain of TCR clone 95567 (TRAV3, TRAJ34)
CAVRAPGNIDKLIF

SEQ ID NO: 191134 - protein, 17 aa, Homo sapiens
  CDR3 for beta chain variable domain of TCR clone 95567 (TRBV20-1, TRBJ2-7)
CSAAPGLARGISYEQYF

SEQ ID NO: 191135 - protein, 15 aa, Homo sapiens
  CDR3 for alpha chain variable domain of TCR clone 95568 (TRAV8-3, TRAJ11)
SAVGLLNSGYSTLTF

SEQ ID NO: 191136 - protein, 16 aa, Homo sapiens
  CDR3 for beta chain variable domain of TCR clone 95568 (TRBV7-9, TRBJ1-2)
CASSLGFSSGEDGYTF

SEQ ID NO: 191137 - protein, 16 aa, Homo sapiens
  CDR3 for alpha chain variable domain of TCR clone 95569 (TRAV23/DV6, TRAJ48)
CAASGVGNFGNEKLTF

SEQ ID NO: 191138 - protein, 15 aa, Homo sapiens
  CDR3 for beta chain variable domain of TCR clone 95569 (TRBV7-9, TRBJ2-1)
CASSLGWGRANEQFF

SEQ ID NO: 191139 - protein, 13 aa, Homo sapiens
  CDR3 for alpha chain variable domain of TCR clone 95570 (TRAV29/DV5, TRAJ31)
CAPSRNNNARLMF

SEQ ID NO: 191140 - protein, 12 aa, Homo sapiens
  CDR3 for beta chain variable domain of TCR clone 95570 (TRBV14, TRBJ2-5)
CASSQLKETQYF

SEQ ID NO: 191141 - protein, 14 aa, Homo sapiens
  CDR3 for alpha chain variable domain of TCR clone 95571 (TRAV38-1, TRAJ45)
CASHSGGGADGLTF

SEQ ID NO: 191142 - protein, 13 aa, Homo sapiens
  CDR3 for beta chain variable domain of TCR clone 95571 (TRBV7-9, TRBJ1-2)
CASSLKQNYGYTF

SEQ ID NO: 191143 - protein, 14 aa, Homo sapiens
  CDR3 for alpha chain variable domain of TCR clone 95572 (TRAV26-1, TRAJ38)
CIADNAGINRKLIW

SEQ ID NO: 191144 - protein, 13 aa, Homo sapiens
  CDR3 for beta chain variable domain of TCR clone 95572 (TRBV20-1, TRBJ1-1)
CSARGGGNTEAFF

SEQ ID NO: 191145 - protein, 10 aa, Homo sapiens
  CDR3 for alpha chain variable domain of TCR clone 95573 (TRAV13-2, TRAJ54)
AVQGAQKLVF

SEQ ID NO: 191146 - protein, 15 aa, Homo sapiens
  CDR3 for beta chain variable domain of TCR clone 95573 (TRBV20-1, TRBJ2-7)
CSAESGTSGAYEQYF

SEQ ID NO: 191147 - protein, 16 aa, Homo sapiens
  CDR3 for alpha chain variable domain of TCR clone 95574 (TRAV3, TRAJ37)
CAVGVRGSGNTGKLIF

SEQ ID NO: 191148 - protein, 12 aa, Homo sapiens
  CDR3 for beta chain variable domain of TCR clone 95574 (TRBV11-2, TRBJ2-2)
CASSLGGGELFF

SEQ ID NO: 191149 - protein, 17 aa, Homo sapiens
  CDR3 for alpha chain variable domain of TCR clone 95575 (TRAV17, TRAJ52)
CATERPSGGTSYGKLTF

SEQ ID NO: 191150 - protein, 13 aa, Homo sapiens
  CDR3 for beta chain variable domain of TCR clone 95575 (TRBV7-9, TRBJ1-2)
CASSLKQNYGYAF

SEQ ID NO: 191151 - protein, 11 aa, Homo sapiens
  CDR3 for alpha chain variable domain of TCR clone 95576 (TRAV12-2, TRAJ29)
CAVTLRSPLVF

SEQ ID NO: 191152 - protein, 15 aa, Homo sapiens
  CDR3 for beta chain variable domain of TCR clone 95576 (TRBV12-4, TRBJ2-5)
CASSPPTGLQETQYF

SEQ ID NO: 191153 - protein, 18 aa, Homo sapiens
  CDR3 for alpha chain variable domain of TCR clone 95577 (TRAV23/DV6, TRAJ21)
CAASSGGGTTSTNFTLDL

SEQ ID NO: 191154 - protein, 11 aa, Homo sapiens
  CDR3 for beta chain variable domain of TCR clone 95577 (TRBV7-8, TRBJ2-7)
CASSLSLEQYS

SEQ ID NO: 191155 - protein, 14 aa, Homo sapiens
  CDR3 for alpha chain variable domain of TCR clone 95578 (TRAV12-2, TRAJ45)
CAVNIGGGADGLTF

SEQ ID NO: 191156 - protein, 14 aa, Homo sapiens
  CDR3 for beta chain variable domain of TCR clone 95578 (TRBV7-2, TRBJ2-7)
CASSPKTSFYEQYF

SEQ ID NO: 191157 - protein, 13 aa, Homo sapiens
  CDR3 for alpha chain variable domain of TCR clone 95579 (TRAV35, TRAJ22)
CAGLSGSARQLTF

SEQ ID NO: 191158 - protein, 16 aa, Homo sapiens
  CDR3 for beta chain variable domain of TCR clone 95579 (TRBV7-3, TRBJ2-1)
CASSLEGYRSYNEQFF

SEQ ID NO: 191159 - protein, 12 aa, Homo sapiens
  CDR3 for alpha chain variable domain of TCR clone 95580 (TRAV12-1, TRAJ34)
CEVTFNTDKLIF

SEQ ID NO: 191160 - protein, 14 aa, Homo sapiens
  CDR3 for beta chain variable domain of TCR clone 95580 (TRBV19, TRBJ1-1)
CASLRTGLNTEAFF

SEQ ID NO: 191161 - protein, 14 aa, Homo sapiens
  CDR3 for alpha chain variable domain of TCR clone 95581 (TRAV1-2, TRAJ16)
CAVNRFSDGQKLLF

SEQ ID NO: 191162 - protein, 12 aa, Homo sapiens
  CDR3 for beta chain variable domain of TCR clone 95581 (TRBV20-1, TRBJ1-5)
CSAAGWDQTQHF

SEQ ID NO: 191163 - protein, 16 aa, Homo sapiens
  CDR3 for alpha chain variable domain of TCR clone 95582 (TRAV3, TRAJ37)
CAVRGKGSGNTGKLIF

SEQ ID NO: 191164 - protein, 16 aa, Homo sapiens
  CDR3 for beta chain variable domain of TCR clone 95582 (TRBV29-1, TRBJ2-7)
RSVEDAEDGTAYEQYF

SEQ ID NO: 191165 - protein, 13 aa, Homo sapiens
  CDR3 for alpha chain variable domain of TCR clone 95583 (TRAV17, TRAJ26)
CATVDNYGQNIVF

SEQ ID NO: 191166 - protein, 16 aa, Homo sapiens
  CDR3 for beta chain variable domain of TCR clone 95583 (TRBV2, TRBJ2-1)
CASSVGGSLSYNEQFF

SEQ ID NO: 191167 - protein, 13 aa, Homo sapiens
  CDR3 for alpha chain variable domain of TCR clone 95584 (TRAV21, TRAJ27)
CAARPGNAGKSTF

SEQ ID NO: 191168 - protein, 14 aa, Homo sapiens
  CDR3 for beta chain variable domain of TCR clone 95584 (TRBV7-6, TRBJ1-2)
CASSPDSLSYGYTF

SEQ ID NO: 191169 - protein, 12 aa, Homo sapiens
  CDR3 for alpha chain variable domain of TCR clone 95585 (TRAV25, TRAJ11)
CAGASGYSTLTF

SEQ ID NO: 191170 - protein, 16 aa, Homo sapiens
  CDR3 for beta chain variable domain of TCR clone 95585 (TRBV12-4, TRBJ1-5)
CASSRPVGGSNQPQHF

SEQ ID NO: 191171 - protein, 14 aa, Homo sapiens
  CDR3 for alpha chain variable domain of TCR clone 95586 (TRAV17, TRAJ32)
CATDPGGATNKLIF

SEQ ID NO: 191172 - protein, 17 aa, Homo sapiens
  CDR3 for beta chain variable domain of TCR clone 95586 (TRBV4-2, TRBJ1-1)
CASTQFGGGSGNTEAFF

SEQ ID NO: 191173 - protein, 15 aa, Homo sapiens
  CDR3 for alpha chain variable domain of TCR clone 95587 (TRAV4, TRAJ39)
CLVGPTNNAGNMLTF

SEQ ID NO: 191174 - protein, 14 aa, Homo sapiens
  CDR3 for beta chain variable domain of TCR clone 95587 (TRBV19, TRBJ2-1)
CASPTFVLSGEQFF

SEQ ID NO: 191175 - protein, 18 aa, Homo sapiens
  CDR3 for alpha chain variable domain of TCR clone 95588 (TRAV26-1, TRAJ52)
CVVRVAGAGGTSYGKLTF

SEQ ID NO: 191176 - protein, 13 aa, Homo sapiens
  CDR3 for beta chain variable domain of TCR clone 95588 (TRBV7-8, TRBJ1-2)
CASSAQSYYGYTF

SEQ ID NO: 191177 - protein, 13 aa, Homo sapiens
  CDR3 for alpha chain variable domain of TCR clone 95589 (TRAV6, TRAJ9)
CALDRTGGFKTIF

SEQ ID NO: 191178 - protein, 15 aa, Homo sapiens
  CDR3 for beta chain variable domain of TCR clone 95589 (TRBV27, TRBJ2-1)
CASSNGGGSSNEQFF

SEQ ID NO: 191179 - protein, 16 aa, Homo sapiens
  CDR3 for alpha chain variable domain of TCR clone 95590 (TRAV30, TRAJ24)
CGTEIVDADSWGKFQF

SEQ ID NO: 191180 - protein, 15 aa, Homo sapiens
  CDR3 for beta chain variable domain of TCR clone 95590 (TRBV4-1, TRBJ1-1)
CASSQAPGLNTEAFF

SEQ ID NO: 191181 - protein, 12 aa, Homo sapiens
  CDR3 for alpha chain variable domain of TCR clone 95591 (TRAV13-1, TRAJ20)
CAASMGYYKLSF

SEQ ID NO: 191182 - protein, 15 aa, Homo sapiens
  CDR3 for beta chain variable domain of TCR clone 95591 (TRBV11-3, TRBJ2-3)
CASNGGLDSTDTQYF

SEQ ID NO: 191183 - protein, 14 aa, Homo sapiens
  CDR3 for alpha chain variable domain of TCR clone 95592 (TRAV8-2, TRAJ23)
CVVSDDNQGGKLIF

SEQ ID NO: 191184 - protein, 16 aa, Homo sapiens
  CDR3 for beta chain variable domain of TCR clone 95592 (TRBV19, TRBJ2-1)
CASSKAGPSSYNEQFF

SEQ ID NO: 191185 - protein, 18 aa, Homo sapiens
  CDR3 for alpha chain variable domain of TCR clone 95593 (TRAV21, TRAJ52)
CAVRPSPAGGTSYGKLSF

SEQ ID NO: 191186 - protein, 16 aa, Homo sapiens
  CDR3 for beta chain variable domain of TCR clone 95593 (TRBV7-3, TRBJ2-1)
CASSLEGYRSYNEQFF

SEQ ID NO: 191187 - protein, 16 aa, Homo sapiens
  CDR3 for alpha chain variable domain of TCR clone 95594 (TRAV30, TRAJ24)
CGTEIVDADSWGKFQF

SEQ ID NO: 191188 - protein, 13 aa, Homo sapiens
  CDR3 for beta chain variable domain of TCR clone 95594 (TRBV18, TRBJ1-2)
RASSASATEGYTF

SEQ ID NO: 191189 - protein, 12 aa, Homo sapiens
  CDR3 for alpha chain variable domain of TCR clone 95595 (TRAV27, TRAJ35)
CAGADFGNVLHC

SEQ ID NO: 191190 - protein, 13 aa, Homo sapiens
  CDR3 for beta chain variable domain of TCR clone 95595 (TRBV7-9, TRBJ1-2)
CASSLKQNYGYTF

SEQ ID NO: 191191 - protein, 12 aa, Homo sapiens
  CDR3 for alpha chain variable domain of TCR clone 95596 (TRAV17, TRAJ53)
CAFGDSNYKLTF

SEQ ID NO: 191192 - protein, 16 aa, Homo sapiens
  CDR3 for beta chain variable domain of TCR clone 95596 (TRBV11-2, TRBJ2-4)
CASSQEGRGGLDIQYF

SEQ ID NO: 191193 - protein, 13 aa, Homo sapiens
  CDR3 for alpha chain variable domain of TCR clone 95597 (TRAV30, TRAJ24)
CGTVTDSWGKLQF

SEQ ID NO: 191194 - protein, 15 aa, Homo sapiens
  CDR3 for beta chain variable domain of TCR clone 95597 (TRBV25-1, TRBJ1-4)
CASSPGDSTNEKLVF

SEQ ID NO: 191195 - protein, 14 aa, Homo sapiens
  CDR3 for alpha chain variable domain of TCR clone 95598 (TRAV27, TRAJ13)
CRSSNSGGYQKVTF

SEQ ID NO: 191196 - protein, 14 aa, Homo sapiens
  CDR3 for beta chain variable domain of TCR clone 95598 (TRBV7-6, TRBJ2-1)
CASSVGGGADEQFF

SEQ ID NO: 191197 - protein, 15 aa, Homo sapiens
  CDR3 for alpha chain variable domain of TCR clone 95599 (TRAV23/DV6, TRAJ18)
CAARYRGSTLGRLYF

SEQ ID NO: 191198 - protein, 13 aa, Homo sapiens
  CDR3 for beta chain variable domain of TCR clone 95599 (TRBV7-2, TRBJ2-7)
CASSSPSGSKQYF

SEQ ID NO: 191199 - protein, 16 aa, Homo sapiens
  CDR3 for alpha chain variable domain of TCR clone 95600 (TRAV26-1, TRAJ53)
CIVRVAMGGSNYKLTF

SEQ ID NO: 191200 - protein, 13 aa, Homo sapiens
  CDR3 for beta chain variable domain of TCR clone 95600 (TRBV10-3, TRBJ2-7)
CASKLAVNYEQYF

SEQ ID NO: 191201 - protein, 16 aa, Homo sapiens
  CDR3 for alpha chain variable domain of TCR clone 95601 (TRAV9-2, TRAJ52)
CALQGAGGTSYGKLTF

SEQ ID NO: 191202 - protein, 15 aa, Homo sapiens
  CDR3 for beta chain variable domain of TCR clone 95601 (TRBV18, TRBJ1-5)
CASSPSDKSNQPQHF

SEQ ID NO: 191203 - protein, 13 aa, Homo sapiens
  CDR3 for alpha chain variable domain of TCR clone 95602 (TRAV1-1, TRAJ9)
CAAKNTAGFKTIF

SEQ ID NO: 191204 - protein, 14 aa, Homo sapiens
  CDR3 for beta chain variable domain of TCR clone 95602 (TRBV20-1, TRBJ2-1)
CSAQIGGSANEQFF

SEQ ID NO: 191205 - protein, 12 aa, Homo sapiens
  CDR3 for alpha chain variable domain of TCR clone 95603 (TRAV8-3, TRAJ20)
CAVGANDYKLSF

SEQ ID NO: 191206 - protein, 15 aa, Homo sapiens
  CDR3 for beta chain variable domain of TCR clone 95603 (TRBV19, TRBJ2-2)
CQPISGTGATGELFF

SEQ ID NO: 191207 - protein, 16 aa, Homo sapiens
  CDR3 for alpha chain variable domain of TCR clone 95604 (TRAV3, TRAJ37)
CAVRVRGSGKTGKLIF

SEQ ID NO: 191208 - protein, 11 aa, Homo sapiens
  CDR3 for beta chain variable domain of TCR clone 95604 (TRBV11-2, TRBJ2-2)
CASSLPGELFF

SEQ ID NO: 191209 - protein, 14 aa, Homo sapiens
  CDR3 for alpha chain variable domain of TCR clone 95605 (TRAV12-2, TRAJ13)
CAVKKTGGYQKVTF

SEQ ID NO: 191210 - protein, 14 aa, Homo sapiens
  CDR3 for beta chain variable domain of TCR clone 95605 (TRBV5-4, TRBJ2-2)
CASSLFGVPGELFF

SEQ ID NO: 191211 - protein, 14 aa, Homo sapiens
  CDR3 for alpha chain variable domain of TCR clone 95606 (TRAV35, TRAJ42)
CAGRYGGSQGNLIF

SEQ ID NO: 191212 - protein, 15 aa, Homo sapiens
  CDR3 for beta chain variable domain of TCR clone 95606 (TRBV7-9, TRBJ2-1)
CASSLGWGRANAQFF

SEQ ID NO: 191213 - protein, 12 aa, Homo sapiens
  CDR3 for alpha chain variable domain of TCR clone 95607 (TRAV23/DV6, TRAJ43)
CAASYIKGDMRF

SEQ ID NO: 191214 - protein, 11 aa, Homo sapiens
  CDR3 for beta chain variable domain of TCR clone 95607 (TRBV12-4, TRBJ2-3)
CASTATDTQYF

SEQ ID NO: 191215 - protein, 18 aa, Homo sapiens
  CDR3 for alpha chain variable domain of TCR clone 95608 (TRAV13-1, TRAJ52)
CAAKNPNAGGTSYGKLTF

SEQ ID NO: 191216 - protein, 14 aa, Homo sapiens
  CDR3 for beta chain variable domain of TCR clone 95608 (TRBV4-1, TRBJ1-4)
CASSSTRAREKLFF

SEQ ID NO: 191217 - protein, 16 aa, Homo sapiens
  CDR3 for alpha chain variable domain of TCR clone 95609 (TRAV3, TRAJ37)
CAVRPHGSGNTGKLIF

SEQ ID NO: 191218 - protein, 11 aa, Homo sapiens
  CDR3 for beta chain variable domain of TCR clone 95609 (TRBV10-3, TRBJ2-7)
CAISEGLEQYV

SEQ ID NO: 191219 - protein, 17 aa, Homo sapiens
  CDR3 for alpha chain variable domain of TCR clone 95610 (TRAV4, TRAJ18)
CLVGERSVGSTRGRLYF

SEQ ID NO: 191220 - protein, 16 aa, Homo sapiens
  CDR3 for beta chain variable domain of TCR clone 95610 (TRBV19, TRBJ2-1)
CASSKAGPSSYNEQFF

SEQ ID NO: 191221 - protein, 10 aa, Homo sapiens
  CDR3 for alpha chain variable domain of TCR clone 95611 (TRAV1-2, TRAJ34)
CAVNTDKLIF

SEQ ID NO: 191222 - protein, 17 aa, Homo sapiens
  CDR3 for beta chain variable domain of TCR clone 95611 (TRBV7-8, TRBJ2-6)
CASSAGTGGAGANVLTF

SEQ ID NO: 191223 - protein, 17 aa, Homo sapiens
  CDR3 for alpha chain variable domain of TCR clone 95612 (TRAV3, TRAJ6)
CAVRDGPRAGGRYIPTF

SEQ ID NO: 191224 - protein, 14 aa, Homo sapiens
  CDR3 for beta chain variable domain of TCR clone 95612 (TRBV7-2, TRBJ2-7)
CASSPKTSVYEQYF

SEQ ID NO: 191225 - protein, 15 aa, Homo sapiens
  CDR3 for alpha chain variable domain of TCR clone 95613 (TRAV21, TRAJ53)
CATLNSGGSNYKLTF

SEQ ID NO: 191226 - protein, 13 aa, Homo sapiens
  CDR3 for beta chain variable domain of TCR clone 95613 (TRBV29-1, TRBJ1-1)
CSVGDSRNTEAFF

SEQ ID NO: 191227 - protein, 14 aa, Homo sapiens
  CDR3 for alpha chain variable domain of TCR clone 95614 (TRAV13-1, TRAJ8)
FAASEDTGFQKLVF

SEQ ID NO: 191228 - protein, 13 aa, Homo sapiens
  CDR3 for beta chain variable domain of TCR clone 95614 (TRBV19, TRBJ1-5)
CASSTRRDQPQHF

SEQ ID NO: 191229 - protein, 11 aa, Homo sapiens
  CDR3 for alpha chain variable domain of TCR clone 95615 (TRAV35, TRAJ30)
CAPGGDDKIIL

SEQ ID NO: 191230 - protein, 15 aa, Homo sapiens
  CDR3 for beta chain variable domain of TCR clone 95615 (TRBV9, TRBJ1-6)
CASSVAGTGDSPLHF

SEQ ID NO: 191231 - protein, 16 aa, Homo sapiens
  CDR3 for alpha chain variable domain of TCR clone 95616 (TRAV20, TRAJ10)
CAVLRGLTGGGNKLTF

SEQ ID NO: 191232 - protein, 14 aa, Homo sapiens
  CDR3 for beta chain variable domain of TCR clone 95616 (TRBV19, TRBJ1-5)
CASRAPDSSLSQHF

SEQ ID NO: 191233 - protein, 18 aa, Homo sapiens
  CDR3 for alpha chain variable domain of TCR clone 95617 (TRAV13-1, TRAJ52)
CAAKNPNAGGTSYGKLTF

SEQ ID NO: 191234 - protein, 15 aa, Homo sapiens
  CDR3 for beta chain variable domain of TCR clone 95617 (TRBV6-1, TRBJ2-3)
CASSERGGITDTQNF

SEQ ID NO: 191235 - protein, 18 aa, Homo sapiens
  CDR3 for alpha chain variable domain of TCR clone 95618 (TRAV21, TRAJ52)
CAVRPSPAGGTSYGKLTF

SEQ ID NO: 191236 - protein, 17 aa, Homo sapiens
  CDR3 for beta chain variable domain of TCR clone 95618 (TRBV25-1, TRBJ2-1)
CASSAYGQGRGVYEQFS

SEQ ID NO: 191237 - protein, 14 aa, Homo sapiens
  CDR3 for alpha chain variable domain of TCR clone 95619 (TRAV12-2, TRAJ17)
CAVLFKAAGNELTF

SEQ ID NO: 191238 - protein, 14 aa, Homo sapiens
  CDR3 for beta chain variable domain of TCR clone 95619 (TRBV7-8, TRBJ2-5)
CASSATGGQETQYF

SEQ ID NO: 191239 - protein, 16 aa, Homo sapiens
  CDR3 for alpha chain variable domain of TCR clone 95620 (TRAV12-3, TRAJ53)
CAMSVGSGGSNYKLTF

SEQ ID NO: 191240 - protein, 14 aa, Homo sapiens
  CDR3 for beta chain variable domain of TCR clone 95620 (TRBV25-1, TRBJ1-1)
CASTHLGGNTGAFF

SEQ ID NO: 191241 - protein, 13 aa, Homo sapiens
  CDR3 for alpha chain variable domain of TCR clone 95621 (TRAV3, TRAJ21)
CAVREPDFNKFYF

SEQ ID NO: 191242 - protein, 15 aa, Homo sapiens
  CDR3 for beta chain variable domain of TCR clone 95621 (TRBV11-2, TRBJ2-2)
CASSSDRVNAGELFF

SEQ ID NO: 191243 - protein, 14 aa, Homo sapiens
  CDR3 for alpha chain variable domain of TCR clone 95622 (TRAV8-1, TRAJ23)
CAVGTYNQGGKLIF

SEQ ID NO: 191244 - protein, 17 aa, Homo sapiens
  CDR3 for beta chain variable domain of TCR clone 95622 (TRBV7-8, TRBJ2-6)
CASSAGTGGAGANVLTF

SEQ ID NO: 191245 - protein, 14 aa, Homo sapiens
  CDR3 for alpha chain variable domain of TCR clone 95623 (TRAV12-3, TRAJ9)
CAMIPNTGGFKTIF

SEQ ID NO: 191246 - protein, 12 aa, Homo sapiens
  CDR3 for beta chain variable domain of TCR clone 95623 (TRBV19, TRBJ1-5)
CASSIAQQPQHF

SEQ ID NO: 191247 - protein, 14 aa, Homo sapiens
  CDR3 for alpha chain variable domain of TCR clone 95624 (TRAV23/DV6, TRAJ4)
CAANLSGGYNKLIF

SEQ ID NO: 191248 - protein, 17 aa, Homo sapiens
  CDR3 for beta chain variable domain of TCR clone 95624 (TRBV4-1, TRBJ1-3)
CASSPQRGIQFGNTIYF

SEQ ID NO: 191249 - protein, 14 aa, Homo sapiens
  CDR3 for alpha chain variable domain of TCR clone 95625 (TRAV8-4, TRAJ13)
CAVTLSGGYQKVTF

SEQ ID NO: 191250 - protein, 19 aa, Homo sapiens
  CDR3 for beta chain variable domain of TCR clone 95625 (TRBV7-9, TRBJ2-2)
CASRYKLAGGPSDTGELFF

SEQ ID NO: 191251 - protein, 13 aa, Homo sapiens
  CDR3 for alpha chain variable domain of TCR clone 95626 (TRAV1-2, TRAJ9)
CAALNTGGFKTIF

SEQ ID NO: 191252 - protein, 16 aa, Homo sapiens
  CDR3 for beta chain variable domain of TCR clone 95626 (TRBV24-1, TRBJ2-3)
CATSDPGTGATDTQYF

SEQ ID NO: 191253 - protein, 14 aa, Homo sapiens
  CDR3 for alpha chain variable domain of TCR clone 95627 (TRAV29/DV5, TRAJ36)
CAARRKTGANNLFF

SEQ ID NO: 191254 - protein, 16 aa, Homo sapiens
  CDR3 for beta chain variable domain of TCR clone 95627 (TRBV19, TRBJ2-2)
CASRSPGTGATGELFF

SEQ ID NO: 191255 - protein, 16 aa, Homo sapiens
  CDR3 for alpha chain variable domain of TCR clone 95628 (TRAV1-2, TRAJ10)
CAVRGVLTGGVNKLTF

SEQ ID NO: 191256 - protein, 12 aa, Homo sapiens
  CDR3 for beta chain variable domain of TCR clone 95628 (TRBV7-8, TRBJ2-7)
CASSPGDREQYF

SEQ ID NO: 191257 - protein, 14 aa, Homo sapiens
  CDR3 for alpha chain variable domain of TCR clone 95629 (TRAV14/DV4, TRAJ15)
CAMRRDQAGTALIF

SEQ ID NO: 191258 - protein, 12 aa, Homo sapiens
  CDR3 for beta chain variable domain of TCR clone 95629 (TRBV7-9, TRBJ2-7)
CASSFGSYEQYF

SEQ ID NO: 191259 - protein, 17 aa, Homo sapiens
  CDR3 for alpha chain variable domain of TCR clone 95630 (TRAV3, TRAJ6)
CAVRDGPRAGGSYIPTF

SEQ ID NO: 191260 - protein, 14 aa, Homo sapiens
  CDR3 for beta chain variable domain of TCR clone 95630 (TRBV7-9, TRBJ2-7)
CASSLDRPTDEQYF

SEQ ID NO: 191261 - protein, 13 aa, Homo sapiens
  CDR3 for alpha chain variable domain of TCR clone 95631 (TRAV3, TRAJ27)
CAVRPLGAGKSTF

SEQ ID NO: 191262 - protein, 12 aa, Homo sapiens
  CDR3 for beta chain variable domain of TCR clone 95631 (TRBV7-9, TRBJ2-7)
CATRTDAYEQYV

SEQ ID NO: 191263 - protein, 15 aa, Homo sapiens
  CDR3 for alpha chain variable domain of TCR clone 95632 (TRAV8-6, TRAJ23)
CAVRLIYNQGGKLIF

SEQ ID NO: 191264 - protein, 14 aa, Homo sapiens
  CDR3 for beta chain variable domain of TCR clone 95632 (TRBV12-5, TRBJ2-5)
CASGSRTHQETQYF

SEQ ID NO: 191265 - protein, 12 aa, Homo sapiens
  CDR3 for alpha chain variable domain of TCR clone 95633 (TRAV12-3, TRAJ17)
CAMTLTGNKLTF

SEQ ID NO: 191266 - protein, 14 aa, Homo sapiens
  CDR3 for beta chain variable domain of TCR clone 95633 (TRBV19, TRBJ2-1)
CASSMGSGATEQFF

SEQ ID NO: 191267 - protein, 15 aa, Homo sapiens
  CDR3 for alpha chain variable domain of TCR clone 95634 (TRAV34, TRAJ38)
CGADFTPGNDRKLIW

SEQ ID NO: 191268 - protein, 16 aa, Homo sapiens
  CDR3 for beta chain variable domain of TCR clone 95634 (TRBV12-5, TRBJ2-5)
CASGPRTSGNQETQYF

SEQ ID NO: 191269 - protein, 12 aa, Homo sapiens
  CDR3 for alpha chain variable domain of TCR clone 95635 (TRAV13-2, TRAJ8)
CAPWLGFQKLVF

SEQ ID NO: 191270 - protein, 13 aa, Homo sapiens
  CDR3 for beta chain variable domain of TCR clone 95635 (TRBV6-5, TRBJ2-5)
CASSPQGGETQYF

SEQ ID NO: 191271 - protein, 13 aa, Homo sapiens
  CDR3 for alpha chain variable domain of TCR clone 95636 (TRAV30, TRAJ24)
CGTVTDSWGKLQF

SEQ ID NO: 191272 - protein, 14 aa, Homo sapiens
  CDR3 for beta chain variable domain of TCR clone 95636 (TRBV6-3, TRBJ2-2)
CASTYTPDTGELFL

SEQ ID NO: 191273 - protein, 10 aa, Homo sapiens
  CDR3 for alpha chain variable domain of TCR clone 95637 (TRAV30, TRAJ48)
CGTGNEKLTF

SEQ ID NO: 191274 - protein, 14 aa, Homo sapiens
  CDR3 for beta chain variable domain of TCR clone 95637 (TRBV7-6, TRBJ2-3)
CASSVAGGTDTQYF

SEQ ID NO: 191275 - protein, 13 aa, Homo sapiens
  CDR3 for alpha chain variable domain of TCR clone 95638 (TRAV38-1, TRAJ42)
CARWGGSQGNLIF

SEQ ID NO: 191276 - protein, 14 aa, Homo sapiens
  CDR3 for beta chain variable domain of TCR clone 95638 (TRBV7-2, TRBJ2-7)
CASSPKTSFYEQYF

SEQ ID NO: 191277 - protein, 15 aa, Homo sapiens
  CDR3 for alpha chain variable domain of TCR clone 95639 (TRAV12-1, TRAJ44)
CVVFVNTGTASKLTF

SEQ ID NO: 191278 - protein, 16 aa, Homo sapiens
  CDR3 for beta chain variable domain of TCR clone 95639 (TRBV20-1, TRBJ2-5)
CSTGGTSGGYMETQYF

SEQ ID NO: 191279 - protein, 14 aa, Homo sapiens
  CDR3 for alpha chain variable domain of TCR clone 95640 (TRAV1-1, TRAJ27)
CAVIYNTNAGKSTF

SEQ ID NO: 191280 - protein, 12 aa, Homo sapiens
  CDR3 for beta chain variable domain of TCR clone 95640 (TRBV12-4, TRBJ1-2)
CQQLRQGKGYTF

SEQ ID NO: 191281 - protein, 12 aa, Homo sapiens
  CDR3 for alpha chain variable domain of TCR clone 95641 (TRAV23/DV6, TRAJ30)
CAASKGDDKIIF

SEQ ID NO: 191282 - protein, 17 aa, Homo sapiens
  CDR3 for beta chain variable domain of TCR clone 95641 (TRBV13, TRBJ2-3)
CASSLSSVAGGRNTQYF

SEQ ID NO: 191283 - protein, 14 aa, Homo sapiens
  CDR3 for alpha chain variable domain of TCR clone 95642 (TRAV12-2, TRAJ17)
CAVLFKAAGNKLTF

SEQ ID NO: 191284 - protein, 14 aa, Homo sapiens
  CDR3 for beta chain variable domain of TCR clone 95642 (TRBV6-5, TRBJ2-7)
CASSPHRGLREQYF

SEQ ID NO: 191285 - protein, 15 aa, Homo sapiens
  CDR3 for alpha chain variable domain of TCR clone 95643 (TRAV13-1, TRAJ16)
CAARYQMARSCSLQG

SEQ ID NO: 191286 - protein, 13 aa, Homo sapiens
  CDR3 for beta chain variable domain of TCR clone 95643 (TRBV7-9, TRBJ2-7)
CASSSDRIYEQYF

SEQ ID NO: 191287 - protein, 14 aa, Homo sapiens
  CDR3 for alpha chain variable domain of TCR clone 95644 (TRAV12-2, TRAJ13)
CAVKKTGGYQNVTF

SEQ ID NO: 191288 - protein, 13 aa, Homo sapiens
  CDR3 for beta chain variable domain of TCR clone 95644 (TRBV20-1, TRBJ1-1)
CSARLGQGTEAFF

SEQ ID NO: 191289 - protein, 14 aa, Homo sapiens
  CDR3 for alpha chain variable domain of TCR clone 95645 (TRAV12-3, TRAJ22)
CAMSLSGSARQLTF

SEQ ID NO: 191290 - protein, 11 aa, Homo sapiens
  CDR3 for beta chain variable domain of TCR clone 95645 (TRBV12-4, TRBJ2-2)
CASSSAGELFF

SEQ ID NO: 191291 - protein, 11 aa, Homo sapiens
  CDR3 for alpha chain variable domain of TCR clone 95646 (TRAV1-2, TRAJ20)
CAVSNDYKLSF

SEQ ID NO: 191292 - protein, 13 aa, Homo sapiens
  CDR3 for beta chain variable domain of TCR clone 95646 (TRBV4-2, TRBJ1-1)
CASSQAGNTEAFF

SEQ ID NO: 191293 - protein, 14 aa, Homo sapiens
  CDR3 for alpha chain variable domain of TCR clone 95647 (TRAV38-2/DV8, TRAJ23)
CAYRSQNQGGKIIF

SEQ ID NO: 191294 - protein, 13 aa, Homo sapiens
  CDR3 for beta chain variable domain of TCR clone 95647 (TRBV24-1, TRBJ2-1)
CATSAGPYNEQFF

SEQ ID NO: 191295 - protein, 17 aa, Homo sapiens
  CDR3 for alpha chain variable domain of TCR clone 95648 (TRAV23/DV6, TRAJ57)
CAASSTLSQGGSEKLVF

SEQ ID NO: 191296 - protein, 20 aa, Homo sapiens
  CDR3 for beta chain variable domain of TCR clone 95648 (TRBV11-1, TRBJ2-6)
CASSAEFQPGMSSGANVLTF

SEQ ID NO: 191297 - protein, 13 aa, Homo sapiens
  CDR3 for alpha chain variable domain of TCR clone 95649 (TRAV8-3, TRAJ16)
CAVALSDSQKLLF

SEQ ID NO: 191298 - protein, 13 aa, Homo sapiens
  CDR3 for beta chain variable domain of TCR clone 95649 (TRBV20-1, TRBJ1-1)
CSARGGGNTEAFF

SEQ ID NO: 191299 - protein, 10 aa, Homo sapiens
  CDR3 for alpha chain variable domain of TCR clone 95650 (TRAV5, TRAJ34)
CAEDTDKLIF

SEQ ID NO: 191300 - protein, 13 aa, Homo sapiens
  CDR3 for beta chain variable domain of TCR clone 95650 (TRBV7-9, TRBJ1-2)
CASSLKQNYGYTF

SEQ ID NO: 191301 - protein, 16 aa, Homo sapiens
  CDR3 for alpha chain variable domain of TCR clone 95651 (TRAV3, TRAJ37)
CAVRGKGSGNTGKIIF

SEQ ID NO: 191302 - protein, 14 aa, Homo sapiens
  CDR3 for beta chain variable domain of TCR clone 95651 (TRBV7-2, TRBJ2-7)
CASSPKTSFYEQYS

SEQ ID NO: 191303 - protein, 15 aa, Homo sapiens
  CDR3 for alpha chain variable domain of TCR clone 95652 (TRAV17, TRAJ54)
CATTRSEQGAQKLVF

SEQ ID NO: 191304 - protein, 16 aa, Homo sapiens
  CDR3 for beta chain variable domain of TCR clone 95652 (TRBV12-4, TRBJ2-3)
CASNLRLAETTDTQYF

SEQ ID NO: 191305 - protein, 13 aa, Homo sapiens
  CDR3 for alpha chain variable domain of TCR clone 95653 (TRAV1-2, TRAJ12)
CAVSMDSSYKLIF

SEQ ID NO: 191306 - protein, 13 aa, Homo sapiens
  CDR3 for beta chain variable domain of TCR clone 95653 (TRBV11-3, TRBJ1-2)
CASSQRTSRGYTF

SEQ ID NO: 191307 - protein, 17 aa, Homo sapiens
  CDR3 for alpha chain variable domain of TCR clone 95654 (TRAV1-2, TRAJ8)
CAVRDPDENTGFQKLVF

SEQ ID NO: 191308 - protein, 16 aa, Homo sapiens
  CDR3 for beta chain variable domain of TCR clone 95654 (TRBV7-9, TRBJ2-2)
CASSGFEGANTGELFF

SEQ ID NO: 191309 - protein, 14 aa, Homo sapiens
  CDR3 for alpha chain variable domain of TCR clone 95655 (TRAV13-1, TRAJ44)
CAAKATGTASKLTF

SEQ ID NO: 191310 - protein, 13 aa, Homo sapiens
  CDR3 for beta chain variable domain of TCR clone 95655 (TRBV11-2, TRBJ2-1)
CASSLDPVNEQFF

SEQ ID NO: 191311 - protein, 12 aa, Homo sapiens
  CDR3 for alpha chain variable domain of TCR clone 95656 (TRAV16, TRAJ22)
CALEVSAGQLTF

SEQ ID NO: 191312 - protein, 14 aa, Homo sapiens
  CDR3 for beta chain variable domain of TCR clone 95656 (TRBV11-2, TRBJ2-3)
CASSSIASTDTQYF

SEQ ID NO: 191313 - protein, 12 aa, Homo sapiens
  CDR3 for alpha chain variable domain of TCR clone 95657 (TRAV17, TRAJ30)
CATDARADKIIF

SEQ ID NO: 191314 - protein, 15 aa, Homo sapiens
  CDR3 for beta chain variable domain of TCR clone 95657 (TRBV4-1, TRBJ2-1)
CASSQGGELYNEQFF

SEQ ID NO: 191315 - protein, 16 aa, Homo sapiens
  CDR3 for alpha chain variable domain of TCR clone 95658 (TRAV23/DV6, TRAJ48)
CAAGGVVNFGNEKLTF

SEQ ID NO: 191316 - protein, 15 aa, Homo sapiens
  CDR3 for beta chain variable domain of TCR clone 95658 (TRBV20-1, TRBJ2-5)
CSAGLAGVSQETQYF

SEQ ID NO: 191317 - protein, 14 aa, Homo sapiens
  CDR3 for alpha chain variable domain of TCR clone 95659 (TRAV1-2, TRAJ8)
CAVREDTGFQKLVF

SEQ ID NO: 191318 - protein, 15 aa, Homo sapiens
  CDR3 for beta chain variable domain of TCR clone 95659 (TRBV6-3, TRBJ2-7)
CASGSPGTVFYEQYL

SEQ ID NO: 191319 - protein, 14 aa, Homo sapiens
  CDR3 for alpha chain variable domain of TCR clone 95660 (TRAV27, TRAJ36)
CAGPPKRGANNLFF

SEQ ID NO: 191320 - protein, 15 aa, Homo sapiens
  CDR3 for beta chain variable domain of TCR clone 95660 (TRBV18, TRBJ2-7)
CASSSASTPNYEQYF

SEQ ID NO: 191321 - protein, 13 aa, Homo sapiens
  CDR3 for alpha chain variable domain of TCR clone 95661 (TRAV1-2, TRAJ9)
CAVLNTGGFKNIF

SEQ ID NO: 191322 - protein, 14 aa, Homo sapiens
  CDR3 for beta chain variable domain of TCR clone 95661 (TRBV20-1, TRBJ2-3)
CSARGGTSTDTQYF

SEQ ID NO: 191323 - protein, 12 aa, Homo sapiens
  CDR3 for alpha chain variable domain of TCR clone 95662 (TRAV4, TRAJ26)
CLVGDYGQNFVF

SEQ ID NO: 191324 - protein, 14 aa, Homo sapiens
  CDR3 for beta chain variable domain of TCR clone 95662 (TRBV7-8, TRBJ2-3)
CASSLEAGTDTQYF

SEQ ID NO: 191325 - protein, 14 aa, Homo sapiens
  CDR3 for alpha chain variable domain of TCR clone 95663 (TRAV12-2, TRAJ9)
CAVNMEDGGFKTIF

SEQ ID NO: 191326 - protein, 14 aa, Homo sapiens
  CDR3 for beta chain variable domain of TCR clone 95663 (TRBV2, TRBJ2-5)
CASSEVLAQETQYF

SEQ ID NO: 191327 - protein, 13 aa, Homo sapiens
  CDR3 for alpha chain variable domain of TCR clone 95664 (TRAV8-3, TRAJ43)
CAVGPDNNNDMRF

SEQ ID NO: 191328 - protein, 15 aa, Homo sapiens
  CDR3 for beta chain variable domain of TCR clone 95664 (TRBV6-6, TRBJ2-7)
CASSYSYGGSYEQYF

SEQ ID NO: 191329 - protein, 14 aa, Homo sapiens
  CDR3 for alpha chain variable domain of TCR clone 95665 (TRAV8-4, TRAJ16)
CAVSPVGRWPEAAL

SEQ ID NO: 191330 - protein, 15 aa, Homo sapiens
  CDR3 for beta chain variable domain of TCR clone 95665 (TRBV11-3, TRBJ2-7)
RASSPGPASSYEQYF

SEQ ID NO: 191331 - protein, 14 aa, Homo sapiens
  CDR3 for alpha chain variable domain of TCR clone 95666 (TRAV1-2, TRAJ29)
CAVRELTSATPLVF

SEQ ID NO: 191332 - protein, 14 aa, Homo sapiens
  CDR3 for beta chain variable domain of TCR clone 95666 (TRBV3-1, TRBJ2-5)
CASIQGPDQETQYF

SEQ ID NO: 191333 - protein, 20 aa, Homo sapiens
  CDR3 for alpha chain variable domain of TCR clone 95667 (TRAV12-3, TRAJ41)
SLFIRDSQPSDSATPEALNF

SEQ ID NO: 191334 - protein, 18 aa, Homo sapiens
  CDR3 for beta chain variable domain of TCR clone 95667 (TRBV12-4, TRBJ2-2)
CASSLVAGTRGRTGELFF

SEQ ID NO: 191335 - protein, 16 aa, Homo sapiens
  CDR3 for alpha chain variable domain of TCR clone 95668 (TRAV26-1, TRAJ53)
CIVRVAMGGSNYKLTF

SEQ ID NO: 191336 - protein, 12 aa, Homo sapiens
  CDR3 for beta chain variable domain of TCR clone 95668 (TRBV7-9, TRBJ1-5)
CGSSPQGQPQHF

SEQ ID NO: 191337 - protein, 16 aa, Homo sapiens
  CDR3 for alpha chain variable domain of TCR clone 95669 (TRAV38-2/DV8, TRAJ45)
CAYTTTSGGGSDGLTF

SEQ ID NO: 191338 - protein, 14 aa, Homo sapiens
  CDR3 for beta chain variable domain of TCR clone 95669 (TRBV7-9, TRBJ2-2)
CASSLGHRTGELFF

SEQ ID NO: 191339 - protein, 12 aa, Homo sapiens
  CDR3 for alpha chain variable domain of TCR clone 95670 (TRAV13-1, TRAJ21)
CAAKEGFNKFYF

SEQ ID NO: 191340 - protein, 16 aa, Homo sapiens
  CDR3 for beta chain variable domain of TCR clone 95670 (TRBV7-8, TRBJ2-4)
CASSAERTLAKNMQYF

SEQ ID NO: 191341 - protein, 19 aa, Homo sapiens
  CDR3 for alpha chain variable domain of TCR clone 95671 (TRAV3, TRAJ37)
CAVRDIVGGYPSNTAKLIF

SEQ ID NO: 191342 - protein, 14 aa, Homo sapiens
  CDR3 for beta chain variable domain of TCR clone 95671 (TRBV7-8, TRBJ2-3)
CASSLEAGTDTQYF

SEQ ID NO: 191343 - protein, 11 aa, Homo sapiens
  CDR3 for alpha chain variable domain of TCR clone 95672 (TRAV3, TRAJ21)
CAVGNFNKFYF

SEQ ID NO: 191344 - protein, 16 aa, Homo sapiens
  CDR3 for beta chain variable domain of TCR clone 95672 (TRBV19, TRBJ2-1)
CASSKAGPGSNNEQFF

SEQ ID NO: 191345 - protein, 16 aa, Homo sapiens
  CDR3 for alpha chain variable domain of TCR clone 95673 (TRAV1-2, TRAJ10)
CAVRGVLTGGGNKLTF

SEQ ID NO: 191346 - protein, 14 aa, Homo sapiens
  CDR3 for beta chain variable domain of TCR clone 95673 (TRBV7-8, TRBJ2-7)
CASSLGDRSSTSGR

SEQ ID NO: 191347 - protein, 12 aa, Homo sapiens
  CDR3 for alpha chain variable domain of TCR clone 95674 (TRAV21, TRAJ11)
CAATSGYSTLTF

SEQ ID NO: 191348 - protein, 13 aa, Homo sapiens
  CDR3 for beta chain variable domain of TCR clone 95674 (TRBV20-1, TRBJ2-7)
QCPELAGVGGQYF

SEQ ID NO: 191349 - protein, 15 aa, Homo sapiens
  CDR3 for alpha chain variable domain of TCR clone 95675 (TRAV13-1, TRAJ17)
CATSIERAAGNKLTF

SEQ ID NO: 191350 - protein, 13 aa, Homo sapiens
  CDR3 for beta chain variable domain of TCR clone 95675 (TRBV7-9, TRBJ2-1)
CASSWESYNEQFF

SEQ ID NO: 191351 - protein, 13 aa, Homo sapiens
  CDR3 for alpha chain variable domain of TCR clone 95676 (TRAV3, TRAJ21)
CAVREPDFNKFYI

SEQ ID NO: 191352 - protein, 13 aa, Homo sapiens
  CDR3 for beta chain variable domain of TCR clone 95676 (TRBV9, TRBJ2-1)
CASSPSGGNEQFF

SEQ ID NO: 191353 - protein, 14 aa, Homo sapiens
  CDR3 for alpha chain variable domain of TCR clone 95677 (TRAV12-3, TRAJ10)
SHLPLTGGRNKLTF

SEQ ID NO: 191354 - protein, 14 aa, Homo sapiens
  CDR3 for beta chain variable domain of TCR clone 95677 (TRBV6-1, TRBJ1-3)
CASVQGGGGNTIYF

SEQ ID NO: 191355 - protein, 15 aa, Homo sapiens
  CDR3 for alpha chain variable domain of TCR clone 95678 (TRAV3, TRAJ22)
CAVRDRGGCARQLTF

SEQ ID NO: 191356 - protein, 16 aa, Homo sapiens
  CDR3 for beta chain variable domain of TCR clone 95678 (TRBV5-4, TRBJ2-3)
CASQQPGAGGADTQYF

SEQ ID NO: 191357 - protein, 14 aa, Homo sapiens
  CDR3 for alpha chain variable domain of TCR clone 95679 (TRAV1-2, TRAJ8)
CAVREDTGFQKLVF

SEQ ID NO: 191358 - protein, 18 aa, Homo sapiens
  CDR3 for beta chain variable domain of TCR clone 95679 (TRBV7-3, TRBJ2-3)
CASSSTGTYPGSTDTQYF

SEQ ID NO: 191359 - protein, 14 aa, Homo sapiens
  CDR3 for alpha chain variable domain of TCR clone 95680 (TRAV8-1, TRAJ5)
CAVRTETGRRALTF

SEQ ID NO: 191360 - protein, 14 aa, Homo sapiens
  CDR3 for beta chain variable domain of TCR clone 95680 (TRBV7-8, TRBJ2-3)
CASSFPDGQDTQYF

SEQ ID NO: 191361 - protein, 13 aa, Homo sapiens
  CDR3 for alpha chain variable domain of TCR clone 95681 (TRAV12-2, TRAJ47)
CAVFMEYGTKLVF

SEQ ID NO: 191362 - protein, 14 aa, Homo sapiens
  CDR3 for beta chain variable domain of TCR clone 95681 (TRBV4-1, TRBJ1-5)
CASSQGPTNQPQHF

SEQ ID NO: 191363 - protein, 16 aa, Homo sapiens
  CDR3 for alpha chain variable domain of TCR clone 95682 (TRAV12-3, TRAJ45)
CAMGWGSGGGADGLTF

SEQ ID NO: 191364 - protein, 18 aa, Homo sapiens
  CDR3 for beta chain variable domain of TCR clone 95682 (TRBV12-4, TRBJ2-2)
CSSSLVAGTRGRTGELFF

SEQ ID NO: 191365 - protein, 13 aa, Homo sapiens
  CDR3 for alpha chain variable domain of TCR clone 95683 (TRAV20, TRAJ37)
CAGCSSNTGKLIF

SEQ ID NO: 191366 - protein, 13 aa, Homo sapiens
  CDR3 for beta chain variable domain of TCR clone 95683 (TRBV4-2, TRBJ2-3)
CISVPAAPDTQYF

SEQ ID NO: 191367 - protein, 11 aa, Homo sapiens
  CDR3 for alpha chain variable domain of TCR clone 95684 (TRAV23/DV6, TRAJ48)
CAPRWGEKLTF

SEQ ID NO: 191368 - protein, 13 aa, Homo sapiens
  CDR3 for beta chain variable domain of TCR clone 95684 (TRBV12-4, TRBJ2-5)
CASSPGKEETQYF

SEQ ID NO: 191369 - protein, 13 aa, Homo sapiens
  CDR3 for alpha chain variable domain of TCR clone 95685 (TRAV13-1, TRAJ6)
CAASKGGSYIPTF

SEQ ID NO: 191370 - protein, 13 aa, Homo sapiens
  CDR3 for beta chain variable domain of TCR clone 95685 (TRBV7-9, TRBJ2-5)
CTSLPSGRETQYF

SEQ ID NO: 191371 - protein, 11 aa, Homo sapiens
  CDR3 for alpha chain variable domain of TCR clone 95686 (TRAV13-1, TRAJ47)
CAAAPRNKLVF

SEQ ID NO: 191372 - protein, 15 aa, Homo sapiens
  CDR3 for beta chain variable domain of TCR clone 95686 (TRBV4-1, TRBJ1-4)
CASSDTGGTNEKLFF

SEQ ID NO: 191373 - protein, 19 aa, Homo sapiens
  CDR3 for alpha chain variable domain of TCR clone 95687 (TRAV3, TRAJ6)
CAVRDGPRAGEATYLHLEE

SEQ ID NO: 191374 - protein, 14 aa, Homo sapiens
  CDR3 for beta chain variable domain of TCR clone 95687 (TRBV7-2, TRBJ2-7)
CASSPKTSFYEQYF

SEQ ID NO: 191375 - protein, 12 aa, Homo sapiens
  CDR3 for alpha chain variable domain of TCR clone 95688 (TRAV20, TRAJ23)
CAVQAPGGKHIF

SEQ ID NO: 191376 - protein, 14 aa, Homo sapiens
  CDR3 for beta chain variable domain of TCR clone 95688 (TRBV5-4, TRBJ2-1)
CASSLSGSYNEQFF

SEQ ID NO: 191377 - protein, 14 aa, Homo sapiens
  CDR3 for alpha chain variable domain of TCR clone 95689 (TRAV12-2, TRAJ13)
CAVKKTGGYQKVTF

SEQ ID NO: 191378 - protein, 17 aa, Homo sapiens
  CDR3 for beta chain variable domain of TCR clone 95689 (TRBV19, TRBJ2-7)
CASSISFYDSYPYEQYF

SEQ ID NO: 191379 - protein, 14 aa, Homo sapiens
  CDR3 for alpha chain variable domain of TCR clone 95690 (TRAV12-1, TRAJ17)
CVVNYKAAGNKLTF

SEQ ID NO: 191380 - protein, 14 aa, Homo sapiens
  CDR3 for beta chain variable domain of TCR clone 95690 (TRBV19, TRBJ2-7)
CASNFRDTFTGMYF

SEQ ID NO: 191381 - protein, 15 aa, Homo sapiens
  CDR3 for alpha chain variable domain of TCR clone 95691 (TRAV3, TRAJ5)
CAVRDLDTGRRALTF

SEQ ID NO: 191382 - protein, 15 aa, Homo sapiens
  CDR3 for beta chain variable domain of TCR clone 95691 (TRBV6-5, TRBJ2-1)
CASSYDAGAGNEQFF

SEQ ID NO: 191383 - protein, 13 aa, Homo sapiens
  CDR3 for alpha chain variable domain of TCR clone 95692 (TRAV38-2/DV8, TRAJ34)
CAYRNHNTDKLIF

SEQ ID NO: 191384 - protein, 15 aa, Homo sapiens
  CDR3 for beta chain variable domain of TCR clone 95692 (TRBV20-1, TRBJ2-5)
CSAEGTGGLQETQYF

SEQ ID NO: 191385 - protein, 13 aa, Homo sapiens
  CDR3 for alpha chain variable domain of TCR clone 95693 (TRAV1-2, TRAJ11)
CAVRDSGYSTLTF

SEQ ID NO: 191386 - protein, 14 aa, Homo sapiens
  CDR3 for beta chain variable domain of TCR clone 95693 (TRBV12-5, TRBJ2-5)
CASGSRTHQETQYF

SEQ ID NO: 191387 - protein, 12 aa, Homo sapiens
  CDR3 for alpha chain variable domain of TCR clone 95694 (TRAV29/DV5, TRAJ15)
CAPNQAGTALIF

SEQ ID NO: 191388 - protein, 15 aa, Homo sapiens
  CDR3 for beta chain variable domain of TCR clone 95694 (TRBV11-2, TRBJ2-2)
CASSSDRVNAGELFF

SEQ ID NO: 191389 - protein, 12 aa, Homo sapiens
  CDR3 for alpha chain variable domain of TCR clone 95695 (TRAV29/DV5, TRAJ34)
CAASGNTDKLIF

SEQ ID NO: 191390 - protein, 16 aa, Homo sapiens
  CDR3 for beta chain variable domain of TCR clone 95695 (TRBV7-3, TRBJ2-2)
CASSFLPSGYTGELFF

SEQ ID NO: 191391 - protein, 14 aa, Homo sapiens
  CDR3 for alpha chain variable domain of TCR clone 95696 (TRAV20, TRAJ29)
CAVQAWVGNTPLVF

SEQ ID NO: 191392 - protein, 15 aa, Homo sapiens
  CDR3 for beta chain variable domain of TCR clone 95696 (TRBV29-1, TRBJ2-7)
CGVEFFDRGSYEQYF

SEQ ID NO: 191393 - protein, 11 aa, Homo sapiens
  CDR3 for alpha chain variable domain of TCR clone 95697 (TRAV21, TRAJ34)
CANYNTDKLIF

SEQ ID NO: 191394 - protein, 13 aa, Homo sapiens
  CDR3 for beta chain variable domain of TCR clone 95697 (TRBV7-6, TRBJ1-2)
CASSLVADYGYTF

SEQ ID NO: 191395 - protein, 13 aa, Homo sapiens
  CDR3 for alpha chain variable domain of TCR clone 95698 (TRAV3, TRAJ21)
CAVREPDFNKFYF

SEQ ID NO: 191396 - protein, 17 aa, Homo sapiens
  CDR3 for beta chain variable domain of TCR clone 95698 (TRBV20-1, TRBJ2-1)
CSARDPLAGVWDNEQFF

SEQ ID NO: 191397 - protein, 14 aa, Homo sapiens
  CDR3 for alpha chain variable domain of TCR clone 95699 (TRAV12-2, TRAJ40)
CAVKIPSGTYKYIF

SEQ ID NO: 191398 - protein, 17 aa, Homo sapiens
  CDR3 for beta chain variable domain of TCR clone 95699 (TRBV11-2, TRBJ2-1)
RASSLYPPGVEYNEQFF

SEQ ID NO: 191399 - protein, 16 aa, Homo sapiens
  CDR3 for alpha chain variable domain of TCR clone 95700 (TRAV12-3, TRAJ53)
CAMSPGSGGSNYKLTF

SEQ ID NO: 191400 - protein, 14 aa, Homo sapiens
  CDR3 for beta chain variable domain of TCR clone 95700 (TRBV5-7, TRBJ2-7)
CASSGGLSSYEQYF

SEQ ID NO: 191401 - protein, 14 aa, Homo sapiens
  CDR3 for alpha chain variable domain of TCR clone 95701 (TRAV25, TRAJ27)
CAGPGNTNAGKSTF

SEQ ID NO: 191402 - protein, 16 aa, Homo sapiens
  CDR3 for beta chain variable domain of TCR clone 95701 (TRBV4-1, TRBJ2-6)
CASSQDGGPRANVLTF

SEQ ID NO: 191403 - protein, 18 aa, Homo sapiens
  CDR3 for alpha chain variable domain of TCR clone 95702 (TRAV21, TRAJ52)
CAVRPSPAGGTSYGKLTF

SEQ ID NO: 191404 - protein, 17 aa, Homo sapiens
  CDR3 for beta chain variable domain of TCR clone 95702 (TRBV13, TRBJ2-3)
CASSLSRVAGGRTTQYF

SEQ ID NO: 191405 - protein, 14 aa, Homo sapiens
  CDR3 for alpha chain variable domain of TCR clone 95703 (TRAV2, TRAJ22)
CAVGRSGSARQLTF

SEQ ID NO: 191406 - protein, 12 aa, Homo sapiens
  CDR3 for beta chain variable domain of TCR clone 95703 (TRBV19, TRBJ2-1)
CASSMQDTEQFF

SEQ ID NO: 191407 - protein, 14 aa, Homo sapiens
  CDR3 for alpha chain variable domain of TCR clone 95704 (TRAV4, TRAJ17)
CLVGDMAARNKLTF

SEQ ID NO: 191408 - protein, 14 aa, Homo sapiens
  CDR3 for beta chain variable domain of TCR clone 95704 (TRBV4-1, TRBJ2-7)
CASSPVAGGDEQYF

SEQ ID NO: 191409 - protein, 11 aa, Homo sapiens
  CDR3 for alpha chain variable domain of TCR clone 95705 (TRAV1-1, TRAJ23)
CAVRQGGKLIF

SEQ ID NO: 191410 - protein, 15 aa, Homo sapiens
  CDR3 for beta chain variable domain of TCR clone 95705 (TRBV20-1, TRBJ1-1)
CSASRGVTGNPEAFF

SEQ ID NO: 191411 - protein, 15 aa, Homo sapiens
  CDR3 for alpha chain variable domain of TCR clone 95706 (TRAV35, TRAJ58)
CAGRRQETSGSRLTF

SEQ ID NO: 191412 - protein, 11 aa, Homo sapiens
  CDR3 for beta chain variable domain of TCR clone 95706 (TRBV11-2, TRBJ1-1)
CASSINNEAFF

SEQ ID NO: 191413 - protein, 14 aa, Homo sapiens
  CDR3 for alpha chain variable domain of TCR clone 95707 (TRAV1-2, TRAJ8)
CAVREDTGFQKLVF

SEQ ID NO: 191414 - protein, 15 aa, Homo sapiens
  CDR3 for beta chain variable domain of TCR clone 95707 (TRBV15, TRBJ2-3)
CATSRDPRGTDTQYF

SEQ ID NO: 191415 - protein, 14 aa, Homo sapiens
  CDR3 for alpha chain variable domain of TCR clone 95708 (TRAV13-1, TRAJ44)
CAAKATGTASKITF

SEQ ID NO: 191416 - protein, 14 aa, Homo sapiens
  CDR3 for beta chain variable domain of TCR clone 95708 (TRBV19, TRBJ2-2)
CASSTLHRSGELFF

SEQ ID NO: 191417 - protein, 13 aa, Homo sapiens
  CDR3 for alpha chain variable domain of TCR clone 95709 (TRAV22, TRAJ30)
CAVGGGRDDKIIF

SEQ ID NO: 191418 - protein, 15 aa, Homo sapiens
  CDR3 for beta chain variable domain of TCR clone 95709 (TRBV4-1, TRBJ1-4)
CASSDTGGTNEKLFF

SEQ ID NO: 191419 - protein, 15 aa, Homo sapiens
  CDR3 for alpha chain variable domain of TCR clone 95710 (TRAV3, TRAJ5)
CAVRDLDTGRRALTF

SEQ ID NO: 191420 - protein, 17 aa, Homo sapiens
  CDR3 for beta chain variable domain of TCR clone 95710 (TRBV28, TRBJ2-5)
CASSTPEGDALQETQYF

SEQ ID NO: 191421 - protein, 12 aa, Homo sapiens
  CDR3 for alpha chain variable domain of TCR clone 95711 (TRAV17, TRAJ12)
CATLRSSYKLIF

SEQ ID NO: 191422 - protein, 16 aa, Homo sapiens
  CDR3 for beta chain variable domain of TCR clone 95711 (TRBV28, TRBJ2-7)
CASSLFFETGGPEQFF

SEQ ID NO: 191423 - protein, 17 aa, Homo sapiens
  CDR3 for alpha chain variable domain of TCR clone 95712 (TRAV8-6, TRAJ58)
CAVSSWVGETSGSRLTF

SEQ ID NO: 191424 - protein, 14 aa, Homo sapiens
  CDR3 for beta chain variable domain of TCR clone 95712 (TRBV2, TRBJ2-7)
CASRPPGGHYEQYS

SEQ ID NO: 191425 - protein, 14 aa, Homo sapiens
  CDR3 for alpha chain variable domain of TCR clone 95713 (TRAV30, TRAJ33)
CGTARRFSNYQLIW

SEQ ID NO: 191426 - protein, 16 aa, Homo sapiens
  CDR3 for beta chain variable domain of TCR clone 95713 (TRBV7-3, TRBJ2-2)
CASSLKRGTLSGELFF

SEQ ID NO: 191427 - protein, 13 aa, Homo sapiens
  CDR3 for alpha chain variable domain of TCR clone 95714 (TRAV20, TRAJ48)
CAVQGVGNEKLSF

SEQ ID NO: 191428 - protein, 14 aa, Homo sapiens
  CDR3 for beta chain variable domain of TCR clone 95714 (TRBV27, TRBJ2-7)
CASSFRDGPYEQYF

SEQ ID NO: 191429 - protein, 18 aa, Homo sapiens
  CDR3 for alpha chain variable domain of TCR clone 95715 (TRAV21, TRAJ52)
CAVRPSPSGGTSYGKLTF

SEQ ID NO: 191430 - protein, 15 aa, Homo sapiens
  CDR3 for beta chain variable domain of TCR clone 95715 (TRBV7-9, TRBJ2-7)
CASSSSGLAVYEQYF

SEQ ID NO: 191431 - protein, 13 aa, Homo sapiens
  CDR3 for alpha chain variable domain of TCR clone 95716 (TRAV3, TRAJ20)
CCEAFCNDYKLSF

SEQ ID NO: 191432 - protein, 18 aa, Homo sapiens
  CDR3 for beta chain variable domain of TCR clone 95716 (TRBV15, TRBJ2-3)
CATSRDGARSWDTDTQYF

SEQ ID NO: 191433 - protein, 15 aa, Homo sapiens
  CDR3 for alpha chain variable domain of TCR clone 95717 (TRAV3, TRAJ22)
CAVRDRGGSARQLTF

SEQ ID NO: 191434 - protein, 16 aa, Homo sapiens
  CDR3 for beta chain variable domain of TCR clone 95717 (TRBV11-2, TRBJ2-7)
CASSPTTGGVSYEQYF

SEQ ID NO: 191435 - protein, 18 aa, Homo sapiens
  CDR3 for alpha chain variable domain of TCR clone 95718 (TRAV26-1, TRAJ52)
CIVRVEGAGGTSYRKLTF

SEQ ID NO: 191436 - protein, 13 aa, Homo sapiens
  CDR3 for beta chain variable domain of TCR clone 95718 (TRBV7-3, TRBJ1-2)
CASSLKRGYGYTF

SEQ ID NO: 191437 - protein, 18 aa, Homo sapiens
  CDR3 for alpha chain variable domain of TCR clone 95719 (TRAV13-1, TRAJ52)
CAASKRSAGGTSYGKITF

SEQ ID NO: 191438 - protein, 13 aa, Homo sapiens
  CDR3 for beta chain variable domain of TCR clone 95719 (TRBV12-4, TRBJ1-2)
CASSLRQGKGYTF

SEQ ID NO: 191439 - protein, 21 aa, Homo sapiens
  CDR3 for alpha chain variable domain of TCR clone 95720 (TRAV27, TRAJ38)
CAARRNAGNNHIQNPDPAVYQ

SEQ ID NO: 191440 - protein, 14 aa, Homo sapiens
  CDR3 for beta chain variable domain of TCR clone 95720 (TRBV28, TRBJ1-4)
CASSFGTFDEKLFF

SEQ ID NO: 191441 - protein, 14 aa, Homo sapiens
  CDR3 for alpha chain variable domain of TCR clone 95721 (TRAV29/DV5, TRAJ28)
CAATEGAGSYQLTF

SEQ ID NO: 191442 - protein, 16 aa, Homo sapiens
  CDR3 for beta chain variable domain of TCR clone 95721 (TRBV4-2, TRBJ2-1)
CASSQGEGSIHNEQFF

SEQ ID NO: 191443 - protein, 14 aa, Homo sapiens
  CDR3 for alpha chain variable domain of TCR clone 95722 (TRAV12-2, TRAJ13)
CAVNPSGGYQQVTF

SEQ ID NO: 191444 - protein, 13 aa, Homo sapiens
  CDR3 for beta chain variable domain of TCR clone 95722 (TRBV20-1, TRBJ1-6)
CSAKLGGTSPLHF

SEQ ID NO: 191445 - protein, 17 aa, Homo sapiens
  CDR3 for alpha chain variable domain of TCR clone 95723 (TRAV3, TRAJ42)
CAVRDRDYGGSQGNLIF

SEQ ID NO: 191446 - protein, 15 aa, Homo sapiens
  CDR3 for beta chain variable domain of TCR clone 95723 (TRBV7-2, TRBJ2-2)
CASRRPGQNTGELFF

SEQ ID NO: 191447 - protein, 14 aa, Homo sapiens
  CDR3 for alpha chain variable domain of TCR clone 95724 (TRAV25, TRAJ35)
CARRMEGFGNVLHC

SEQ ID NO: 191448 - protein, 13 aa, Homo sapiens
  CDR3 for beta chain variable domain of TCR clone 95724 (TRBV19, TRBJ1-2)
CASIVPGQDGYTF

SEQ ID NO: 191449 - protein, 16 aa, Homo sapiens
  CDR3 for alpha chain variable domain of TCR clone 95725 (TRAV30, TRAJ24)
CGTEIVDANSWGKFQF

SEQ ID NO: 191450 - protein, 16 aa, Homo sapiens
  CDR3 for beta chain variable domain of TCR clone 95725 (TRBV7-3, TRBJ2-2)
CASSLKRGTLSGELFF

SEQ ID NO: 191451 - protein, 14 aa, Homo sapiens
  CDR3 for alpha chain variable domain of TCR clone 95726 (TRAV12-1, TRAJ17)
CVVNYKAAGNKLTF

SEQ ID NO: 191452 - protein, 16 aa, Homo sapiens
  CDR3 for beta chain variable domain of TCR clone 95726 (TRBV4-1, TRBJ2-7)
CASSQEWTSGPLEQYF

SEQ ID NO: 191453 - protein, 13 aa, Homo sapiens
  CDR3 for alpha chain variable domain of TCR clone 95727 (TRAV21, TRAJ10)
CAVPTGGGNKLTF

SEQ ID NO: 191454 - protein, 22 aa, Homo sapiens
  CDR3 for beta chain variable domain of TCR clone 95727 (TRBV19, TRBJ2-1)
CDSSVRDRVTGTSGRIYNEQFF

SEQ ID NO: 191455 - protein, 14 aa, Homo sapiens
  CDR3 for alpha chain variable domain of TCR clone 95728 (TRAV1-2, TRAJ16)
RAVNRFSDGQKLLF

SEQ ID NO: 191456 - protein, 13 aa, Homo sapiens
  CDR3 for beta chain variable domain of TCR clone 95728 (TRBV19, TRBJ1-2)
CASSVPGQDGYTF

SEQ ID NO: 191457 - protein, 15 aa, Homo sapiens
  CDR3 for alpha chain variable domain of TCR clone 95729 (TRAV27, TRAJ38)
CAARRNAGTNRKLIW

SEQ ID NO: 191458 - protein, 13 aa, Homo sapiens
  CDR3 for beta chain variable domain of TCR clone 95729 (TRBV20-1, TRBJ1-1)
CSARAGGNTEAFF

SEQ ID NO: 191459 - protein, 16 aa, Homo sapiens
  CDR3 for alpha chain variable domain of TCR clone 95730 (TRAV23/DV6, TRAJ58)
CSKITKGETSGSRLTF

SEQ ID NO: 191460 - protein, 13 aa, Homo sapiens
  CDR3 for beta chain variable domain of TCR clone 95730 (TRBV6-4, TRBJ1-5)
CASSADLNQPQHF

SEQ ID NO: 191461 - protein, 16 aa, Homo sapiens
  CDR3 for alpha chain variable domain of TCR clone 95731 (TRAV8-2, TRAJ7)
CVVSEGPYYGNNRLAF

SEQ ID NO: 191462 - protein, 17 aa, Homo sapiens
  CDR3 for beta chain variable domain of TCR clone 95731 (TRBV11-2, TRBJ2-1)
CASSLYPPGVEYNEQFF

SEQ ID NO: 191463 - protein, 15 aa, Homo sapiens
  CDR3 for alpha chain variable domain of TCR clone 95732 (TRAV12-1, TRAJ44)
CVVFVNTGTASKLTF

SEQ ID NO: 191464 - protein, 15 aa, Homo sapiens
  CDR3 for beta chain variable domain of TCR clone 95732 (TRBV20-1, TRBJ2-5)
QPWGTSGGYMETQYF

SEQ ID NO: 191465 - protein, 14 aa, Homo sapiens
  CDR3 for alpha chain variable domain of TCR clone 95733 (TRAV12-2, TRAJ32)
CAHPESGATNKIIF

SEQ ID NO: 191466 - protein, 14 aa, Homo sapiens
  CDR3 for beta chain variable domain of TCR clone 95733 (TRBV4-2, TRBJ2-3)
CASRETRAPGMQYF

SEQ ID NO: 191467 - protein, 15 aa, Homo sapiens
  CDR3 for alpha chain variable domain of TCR clone 95734 (TRAV3, TRAJ22)
CAVRDRGGSARQLNF

SEQ ID NO: 191468 - protein, 13 aa, Homo sapiens
  CDR3 for beta chain variable domain of TCR clone 95734 (TRBV20-1, TRBJ1-1)
CSARVGGNTEAFF

SEQ ID NO: 191469 - protein, 11 aa, Homo sapiens
  CDR3 for alpha chain variable domain of TCR clone 95735 (TRAV16, TRAJ49)
CSLNTGNQFCF

SEQ ID NO: 191470 - protein, 12 aa, Homo sapiens
  CDR3 for beta chain variable domain of TCR clone 95735 (TRBV7-9, TRBJ1-4)
CASSTDREKLFF

SEQ ID NO: 191471 - protein, 18 aa, Homo sapiens
  CDR3 for alpha chain variable domain of TCR clone 95736 (TRAV26-2, TRAJ45)
CILRWWGYSGGGADGLTF

SEQ ID NO: 191472 - protein, 17 aa, Homo sapiens
  CDR3 for beta chain variable domain of TCR clone 95736 (TRBV28, TRBJ2-3)
CASSPTPAGGRVDTQYF

SEQ ID NO: 191473 - protein, 10 aa, Homo sapiens
  CDR3 for alpha chain variable domain of TCR clone 95737 (TRAV38-1, TRAJ34)
CAFMYDKLIF

SEQ ID NO: 191474 - protein, 14 aa, Homo sapiens
  CDR3 for beta chain variable domain of TCR clone 95737 (TRBV7-2, TRBJ2-2)
CASSLNSNTGELFF

SEQ ID NO: 191475 - protein, 20 aa, Homo sapiens
  CDR3 for alpha chain variable domain of TCR clone 95738 (TRAV12-2, TRAJ52)
SPVIQPPTSFRSTSYGKLTF

SEQ ID NO: 191476 - protein, 11 aa, Homo sapiens
  CDR3 for beta chain variable domain of TCR clone 95738 (TRBV11-2, TRBJ2-2)
CASSLPGELFF

SEQ ID NO: 191477 - protein, 14 aa, Homo sapiens
  CDR3 for alpha chain variable domain of TCR clone 95739 (TRAV12-2, TRAJ45)
CAVNIGGGADGLTF

SEQ ID NO: 191478 - protein, 14 aa, Homo sapiens
  CDR3 for beta chain variable domain of TCR clone 95739 (TRBV25-1, TRBJ1-1)
CASTHLGGNTEAFF

SEQ ID NO: 191479 - protein, 14 aa, Homo sapiens
  CDR3 for alpha chain variable domain of TCR clone 95740 (TRAV12-3, TRAJ6)
CAMSSTGGSYIPTF

SEQ ID NO: 191480 - protein, 16 aa, Homo sapiens
  CDR3 for beta chain variable domain of TCR clone 95740 (TRBV4-2, TRBJ2-1)
CASSPRAGQGANEQFF

SEQ ID NO: 191481 - protein, 14 aa, Homo sapiens
  CDR3 for alpha chain variable domain of TCR clone 95741 (TRAV21, TRAJ23)
CAIMIYNQGGKLIF

SEQ ID NO: 191482 - protein, 18 aa, Homo sapiens
  CDR3 for beta chain variable domain of TCR clone 95741 (TRBV20-1, TRBJ2-6)
CSAETTPTHGSGANGLTF

SEQ ID NO: 191483 - protein, 14 aa, Homo sapiens
  CDR3 for alpha chain variable domain of TCR clone 95742 (TRAV12-2, TRAJ32)
CAHPESGATNKLIF

SEQ ID NO: 191484 - protein, 13 aa, Homo sapiens
  CDR3 for beta chain variable domain of TCR clone 95742 (TRBV20-1, TRBJ1-6)
CSAPLGVGSPLHF

SEQ ID NO: 191485 - protein, 13 aa, Homo sapiens
  CDR3 for alpha chain variable domain of TCR clone 95743 (TRAV2, TRAJ40)
CAVVTSGTYKYIF

SEQ ID NO: 191486 - protein, 17 aa, Homo sapiens
  CDR3 for beta chain variable domain of TCR clone 95743 (TRBV7-9, TRBJ2-1)
CASSLVASYPSYNEQFF

SEQ ID NO: 191487 - protein, 13 aa, Homo sapiens
  CDR3 for alpha chain variable domain of TCR clone 95744 (TRAV21, TRAJ20)
CAVGLRVDYKLSF

SEQ ID NO: 191488 - protein, 15 aa, Homo sapiens
  CDR3 for beta chain variable domain of TCR clone 95744 (TRBV28, TRBJ2-4)
CAAGSGTLLMGIQYF

SEQ ID NO: 191489 - protein, 14 aa, Homo sapiens
  CDR3 for alpha chain variable domain of TCR clone 95745 (TRAV1-2, TRAJ8)
CAVREDTGFQKLVF

SEQ ID NO: 191490 - protein, 14 aa, Homo sapiens
  CDR3 for beta chain variable domain of TCR clone 95745 (TRBV5-5, TRBJ1-2)
CASSLDPYNYGYTF

SEQ ID NO: 191491 - protein, 11 aa, Homo sapiens
  CDR3 for alpha chain variable domain of TCR clone 95746 (TRAV2, TRAJ33)
CAVDSNYQLIW

SEQ ID NO: 191492 - protein, 13 aa, Homo sapiens
  CDR3 for beta chain variable domain of TCR clone 95746 (TRBV11-2, TRBJ2-5)
CASSRGPSETQYF

SEQ ID NO: 191493 - protein, 15 aa, Homo sapiens
  CDR3 for alpha chain variable domain of TCR clone 95747 (TRAV34, TRAJ38)
CGADFTPGNNRKLIW

SEQ ID NO: 191494 - protein, 15 aa, Homo sapiens
  CDR3 for beta chain variable domain of TCR clone 95747 (TRBV7-2, TRBJ2-7)
CASSLSSGRTYEQYF

SEQ ID NO: 191495 - protein, 14 aa, Homo sapiens
  CDR3 for alpha chain variable domain of TCR clone 95748 (TRAV13-1, TRAJ44)
CAAKATGTASKLTF

SEQ ID NO: 191496 - protein, 16 aa, Homo sapiens
  CDR3 for beta chain variable domain of TCR clone 95748 (TRBV7-9, TRBJ2-6)
CASSLKGTLRANVLTF

SEQ ID NO: 191497 - protein, 16 aa, Homo sapiens
  CDR3 for alpha chain variable domain of TCR clone 95749 (TRAV14/DV4, TRAJ21)
CAMREGPENNFNKFYF

SEQ ID NO: 191498 - protein, 20 aa, Homo sapiens
  CDR3 for beta chain variable domain of TCR clone 95749 (TRBV28, TRBJ2-1)
CASTPIGRSPGLAGGNEQFF

SEQ ID NO: 191499 - protein, 10 aa, Homo sapiens
  CDR3 for alpha chain variable domain of TCR clone 95750 (TRAV29/DV5, TRAJ54)
LIQGAQKLVF

SEQ ID NO: 191500 - protein, 14 aa, Homo sapiens
  CDR3 for beta chain variable domain of TCR clone 95750 (TRBV7-9, TRBJ1-1)
CASSLGGLKTEAFF

SEQ ID NO: 191501 - protein, 14 aa, Homo sapiens
  CDR3 for alpha chain variable domain of TCR clone 95751 (TRAV1-2, TRAJ16)
CAVNRFSDGQKLLF

SEQ ID NO: 191502 - protein, 13 aa, Homo sapiens
  CDR3 for beta chain variable domain of TCR clone 95751 (TRBV13, TRBJ2-5)
CQQLRPGQETQYF

SEQ ID NO: 191503 - protein, 13 aa, Homo sapiens
  CDR3 for alpha chain variable domain of TCR clone 95752 (TRAV3, TRAJ8)
CAVRFTGFQKLVF

SEQ ID NO: 191504 - protein, 15 aa, Homo sapiens
  CDR3 for beta chain variable domain of TCR clone 95752 (TRBV20-1, TRBJ2-7)
CSARDRVAGMDEQYF

SEQ ID NO: 191505 - protein, 14 aa, Homo sapiens
  CDR3 for alpha chain variable domain of TCR clone 95753 (TRAV8-3, TRAJ39)
CAVGANNACNMLTF

SEQ ID NO: 191506 - protein, 16 aa, Homo sapiens
  CDR3 for beta chain variable domain of TCR clone 95753 (TRBV6-1, TRBJ2-5)
CASSETLDRGAETQYF

SEQ ID NO: 191507 - protein, 13 aa, Homo sapiens
  CDR3 for alpha chain variable domain of TCR clone 95754 (TRAV27, TRAJ45)
CRSSGGGADGLTF

SEQ ID NO: 191508 - protein, 16 aa, Homo sapiens
  CDR3 for beta chain variable domain of TCR clone 95754 (TRBV20-1, TRBJ1-2)
CSASMGQGVANYGYTF

SEQ ID NO: 191509 - protein, 14 aa, Homo sapiens
  CDR3 for alpha chain variable domain of TCR clone 95755 (TRAV8-3, TRAJ36)
CAVGLITGANNLFF

SEQ ID NO: 191510 - protein, 15 aa, Homo sapiens
  CDR3 for beta chain variable domain of TCR clone 95755 (TRBV4-1, TRBJ2-1)
CASSHDPGNYNEQFF

SEQ ID NO: 191511 - protein, 13 aa, Homo sapiens
  CDR3 for alpha chain variable domain of TCR clone 95756 (TRAV30, TRAJ49)
RGTEPNTGNQFYF

SEQ ID NO: 191512 - protein, 14 aa, Homo sapiens
  CDR3 for beta chain variable domain of TCR clone 95756 (TRBV29-1, TRBJ2-1)
CSVEFRGIPFEQFF

SEQ ID NO: 191513 - protein, 11 aa, Homo sapiens
  CDR3 for alpha chain variable domain of TCR clone 95757 (TRAV12-2, TRAJ31)
CAILNNARLMF

SEQ ID NO: 191514 - protein, 16 aa, Homo sapiens
  CDR3 for beta chain variable domain of TCR clone 95757 (TRBV13, TRBJ2-2)
CANSPRTGEHTGELFF

SEQ ID NO: 191515 - protein, 12 aa, Homo sapiens
  CDR3 for alpha chain variable domain of TCR clone 95758 (TRAV13-1, TRAJ48)
CAANFGNEKLTF

SEQ ID NO: 191516 - protein, 13 aa, Homo sapiens
  CDR3 for beta chain variable domain of TCR clone 95758 (TRBV7-3, TRBJ1-1)
RASSQDWGAEAFF

SEQ ID NO: 191517 - protein, 12 aa, Homo sapiens
  CDR3 for alpha chain variable domain of TCR clone 95759 (TRAV12-3, TRAJ17)
CAMTLTGNKLTF

SEQ ID NO: 191518 - protein, 13 aa, Homo sapiens
  CDR3 for beta chain variable domain of TCR clone 95759 (TRBV7-8, TRBJ2-7)
CASSLTGGREQYF

SEQ ID NO: 191519 - protein, 16 aa, Homo sapiens
  CDR3 for alpha chain variable domain of TCR clone 95760 (TRAV14/DV4, TRAJ15)
CAMREGPAQAGTALIF

SEQ ID NO: 191520 - protein, 12 aa, Homo sapiens
  CDR3 for beta chain variable domain of TCR clone 95760 (TRBV11-2, TRBJ2-2)
CASSLGGGELFF

SEQ ID NO: 191521 - protein, 13 aa, Homo sapiens
  CDR3 for alpha chain variable domain of TCR clone 95761 (TRAV29/DV5, TRAJ31)
CAASRNNNARLMF

SEQ ID NO: 191522 - protein, 13 aa, Homo sapiens
  CDR3 for beta chain variable domain of TCR clone 95761 (TRBV7-2, TRBJ2-5)
CASSQTSVETQYF

SEQ ID NO: 191523 - protein, 16 aa, Homo sapiens
  CDR3 for alpha chain variable domain of TCR clone 95762 (TRAV30, TRAJ24)
CGTEIVDADSWGKFKF

SEQ ID NO: 191524 - protein, 13 aa, Homo sapiens
  CDR3 for beta chain variable domain of TCR clone 95762 (TRBV7-3, TRBJ1-1)
CASSQDWGAEAFF

SEQ ID NO: 191525 - protein, 15 aa, Homo sapiens
  CDR3 for alpha chain variable domain of TCR clone 95763 (TRAV16, TRAJ57)
CALSGGQGGSEKLVF

SEQ ID NO: 191526 - protein, 13 aa, Homo sapiens
  CDR3 for beta chain variable domain of TCR clone 95763 (TRBV27, TRBJ2-7)
CASSLTTGYEQYF

SEQ ID NO: 191527 - protein, 15 aa, Homo sapiens
  CDR3 for alpha chain variable domain of TCR clone 95764 (TRAV14/DV4, TRAJ26)
CAMREGQNYGQNFVC

SEQ ID NO: 191528 - protein, 13 aa, Homo sapiens
  CDR3 for beta chain variable domain of TCR clone 95764 (TRBV24-1, TRBJ2-2)
CATSDWSTGELFF

SEQ ID NO: 191529 - protein, 17 aa, Homo sapiens
  CDR3 for alpha chain variable domain of TCR clone 95765 (TRAV26-2, TRAJ37)
CILRELVGSSNTGKLIF

SEQ ID NO: 191530 - protein, 17 aa, Homo sapiens
  CDR3 for beta chain variable domain of TCR clone 95765 (TRBV4-1, TRBJ2-7)
CASSRDPLGVRGGEQYF

SEQ ID NO: 191531 - protein, 14 aa, Homo sapiens
  CDR3 for alpha chain variable domain of TCR clone 95766 (TRAV17, TRAJ6)
CATDASGGSYIPTF

SEQ ID NO: 191532 - protein, 19 aa, Homo sapiens
  CDR3 for beta chain variable domain of TCR clone 95766 (TRBV4-3, TRBJ2-7)
CASSQEFTGWQVTPYEQYF

SEQ ID NO: 191533 - protein, 14 aa, Homo sapiens
  CDR3 for alpha chain variable domain of TCR clone 95767 (TRAV26-1, TRAJ45)
CIEVTGGGADGLTF

SEQ ID NO: 191534 - protein, 16 aa, Homo sapiens
  CDR3 for beta chain variable domain of TCR clone 95767 (TRBV19, TRBJ2-1)
CASSMGGGSSYNEQFF

SEQ ID NO: 191535 - protein, 15 aa, Homo sapiens
  CDR3 for alpha chain variable domain of TCR clone 95768 (TRAV3, TRAJ45)
CAVRTPLGGADGLTF

SEQ ID NO: 191536 - protein, 16 aa, Homo sapiens
  CDR3 for beta chain variable domain of TCR clone 95768 (TRBV6-1, TRBJ2-2)
CASSFGQGANTGELFF

SEQ ID NO: 191537 - protein, 14 aa, Homo sapiens
  CDR3 for alpha chain variable domain of TCR clone 95769 (TRAV14/DV4, TRAJ26)
CAMREGTYGQNFVF

SEQ ID NO: 191538 - protein, 15 aa, Homo sapiens
  CDR3 for beta chain variable domain of TCR clone 95769 (TRBV7-8, TRBJ2-1)
CASSLAGGLYNEQFF

SEQ ID NO: 191539 - protein, 12 aa, Homo sapiens
  CDR3 for alpha chain variable domain of TCR clone 95770 (TRAV12-3, TRAJ17)
CAMTLTGNKLTF

SEQ ID NO: 191540 - protein, 13 aa, Homo sapiens
  CDR3 for beta chain variable domain of TCR clone 95770 (TRBV10-3, TRBJ2-7)
RASKLAVNYEQYF

SEQ ID NO: 191541 - protein, 14 aa, Homo sapiens
  CDR3 for alpha chain variable domain of TCR clone 95771 (TRAV8-4, TRAJ34)
CAVSDPGDTDKLIF

SEQ ID NO: 191542 - protein, 15 aa, Homo sapiens
  CDR3 for beta chain variable domain of TCR clone 95771 (TRBV7-3, TRBJ2-2)
CASSETGQGTGELFF

SEQ ID NO: 191543 - protein, 12 aa, Homo sapiens
  CDR3 for alpha chain variable domain of TCR clone 95772 (TRAV17, TRAJ20)
CATDRYDYELSF

SEQ ID NO: 191544 - protein, 14 aa, Homo sapiens
  CDR3 for beta chain variable domain of TCR clone 95772 (TRBV19, TRBJ2-1)
CASPTFVLSGEQFF

SEQ ID NO: 191545 - protein, 14 aa, Homo sapiens
  CDR3 for alpha chain variable domain of TCR clone 95773 (TRAV2, TRAJ37)
CAVDFTSNTGKLIF

SEQ ID NO: 191546 - protein, 13 aa, Homo sapiens
  CDR3 for beta chain variable domain of TCR clone 95773 (TRBV20-1, TRBJ1-1)
CSAPLGGRTEAFF

SEQ ID NO: 191547 - protein, 15 aa, Homo sapiens
  CDR3 for alpha chain variable domain of TCR clone 95774 (TRAV12-1, TRAJ9)
FVVSFGDTGGFKTIF

SEQ ID NO: 191548 - protein, 13 aa, Homo sapiens
  CDR3 for beta chain variable domain of TCR clone 95774 (TRBV2, TRBJ1-4)
CASSERAGEKLFF

SEQ ID NO: 191549 - protein, 14 aa, Homo sapiens
  CDR3 for alpha chain variable domain of TCR clone 95775 (TRAV12-3, TRAJ10)
SHLPLTGGGNKLTF

SEQ ID NO: 191550 - protein, 12 aa, Homo sapiens
  CDR3 for beta chain variable domain of TCR clone 95775 (TRBV7-8, TRBJ1-1)
CASSSLGGEAFF

SEQ ID NO: 191551 - protein, 15 aa, Homo sapiens
  CDR3 for alpha chain variable domain of TCR clone 95776 (TRAV26-1, TRAJ22)
CIVRVSFWFCKATDL

SEQ ID NO: 191552 - protein, 15 aa, Homo sapiens
  CDR3 for beta chain variable domain of TCR clone 95776 (TRBV7-8, TRBJ2-7)
CASSLERAGSYEQYF

SEQ ID NO: 191553 - protein, 14 aa, Homo sapiens
  CDR3 for alpha chain variable domain of TCR clone 95777 (TRAV1-2, TRAJ8)
CAVREDTGFQKLVF

SEQ ID NO: 191554 - protein, 10 aa, Homo sapiens
  CDR3 for beta chain variable domain of TCR clone 95777 (TRBV20-1, TRBJ1-4)
PQGANEKLFF

SEQ ID NO: 191555 - protein, 16 aa, Homo sapiens
  CDR3 for alpha chain variable domain of TCR clone 95778 (TRAV8-6, TRAJ58)
CAVSDHTETSGSRLTF

SEQ ID NO: 191556 - protein, 22 aa, Homo sapiens
  CDR3 for beta chain variable domain of TCR clone 95778 (TRBV7-2, TRBJ1-5)
RRTRPCISVPAARGGGPQPQHF

SEQ ID NO: 191557 - protein, 12 aa, Homo sapiens
  CDR3 for alpha chain variable domain of TCR clone 95779 (TRAV21, TRAJ13)
PGPSGGYQKVTF

SEQ ID NO: 191558 - protein, 12 aa, Homo sapiens
  CDR3 for beta chain variable domain of TCR clone 95779 (TRBV6-3, TRBJ2-7)
CASSLTPYEQYF

SEQ ID NO: 191559 - protein, 15 aa, Homo sapiens
  CDR3 for alpha chain variable domain of TCR clone 95780 (TRAV8-3, TRAJ7)
CAVGSISYVNNRLAF

SEQ ID NO: 191560 - protein, 15 aa, Homo sapiens
  CDR3 for beta chain variable domain of TCR clone 95780 (TRBV4-2, TRBJ1-1)
CASSQEDLPRTEAFF

SEQ ID NO: 191561 - protein, 14 aa, Homo sapiens
  CDR3 for alpha chain variable domain of TCR clone 95781 (TRAV26-1, TRAJ45)
CIVRVVGGADGLTF

SEQ ID NO: 191562 - protein, 16 aa, Homo sapiens
  CDR3 for beta chain variable domain of TCR clone 95781 (TRBV7-9, TRBJ1-1)
CASSLTQVRSNTESFF

SEQ ID NO: 191563 - protein, 15 aa, Homo sapiens
  CDR3 for alpha chain variable domain of TCR clone 95782 (TRAV21, TRAJ40)
CAVRPQTSGTYKYIF

SEQ ID NO: 191564 - protein, 12 aa, Homo sapiens
  CDR3 for beta chain variable domain of TCR clone 95782 (TRBV7-9, TRBJ2-7)
CASSLEGYEQYF

SEQ ID NO: 191565 - protein, 13 aa, Homo sapiens
  CDR3 for alpha chain variable domain of TCR clone 95783 (TRAV13-1, TRAJ39)
CSKYSNAGNMITF

SEQ ID NO: 191566 - protein, 16 aa, Homo sapiens
  CDR3 for beta chain variable domain of TCR clone 95783 (TRBV20-1, TRBJ1-4)
CSAPGQGLLTNEKLFF

SEQ ID NO: 191567 - protein, 18 aa, Homo sapiens
  CDR3 for alpha chain variable domain of TCR clone 95784 (TRAV8-4, TRAJ52)
CAVTRANAGGTSYGKLTF

SEQ ID NO: 191568 - protein, 20 aa, Homo sapiens
  CDR3 for beta chain variable domain of TCR clone 95784 (TRBV19, TRBJ2-1)
CASSISRTVTSTRLNNEQFY

SEQ ID NO: 191569 - protein, 12 aa, Homo sapiens
  CDR3 for alpha chain variable domain of TCR clone 95785 (TRAV12-3, TRAJ20)
CAMERGDYKLSF

SEQ ID NO: 191570 - protein, 14 aa, Homo sapiens
  CDR3 for beta chain variable domain of TCR clone 95785 (TRBV5-5, TRBJ1-5)
CASSGQGVDQPQHF

SEQ ID NO: 191571 - protein, 11 aa, Homo sapiens
  CDR3 for alpha chain variable domain of TCR clone 95786 (TRAV1-1, TRAJ11)
CAVRGYSTLTF

SEQ ID NO: 191572 - protein, 18 aa, Homo sapiens
  CDR3 for beta chain variable domain of TCR clone 95786 (TRBV20-1, TRBJ2-6)
CSAETTPTHGSGANVLTF

SEQ ID NO: 191573 - protein, 14 aa, Homo sapiens
  CDR3 for alpha chain variable domain of TCR clone 95787 (TRAV12-2, TRAJ13)
CAVKKTGGYQKVTF

SEQ ID NO: 191574 - protein, 12 aa, Homo sapiens
  CDR3 for beta chain variable domain of TCR clone 95787 (TRBV5-7, TRBJ2-7)
CASSVGRYEQYF

SEQ ID NO: 191575 - protein, 13 aa, Homo sapiens
  CDR3 for alpha chain variable domain of TCR clone 95788 (TRAV1-2, TRAJ9)
CAVLNTGGFKTNF

SEQ ID NO: 191576 - protein, 14 aa, Homo sapiens
  CDR3 for beta chain variable domain of TCR clone 95788 (TRBV20-1, TRBJ2-3)
CSARGGTSTDTQYF

SEQ ID NO: 191577 - protein, 14 aa, Homo sapiens
  CDR3 for alpha chain variable domain of TCR clone 95789 (TRAV13-1, TRAJ44)
CAAKATGTASKLTF

SEQ ID NO: 191578 - protein, 22 aa, Homo sapiens
  CDR3 for beta chain variable domain of TCR clone 95789 (TRBV19, TRBJ2-1)
CSSSVRDRVTGTSGRIYNEQFF

SEQ ID NO: 191579 - protein, 15 aa, Homo sapiens
  CDR3 for alpha chain variable domain of TCR clone 95790 (TRAV13-2, TRAJ40)
CAENRSRQGTYKYIF

SEQ ID NO: 191580 - protein, 15 aa, Homo sapiens
  CDR3 for beta chain variable domain of TCR clone 95790 (TRBV28, TRBJ1-3)
CASSMGWASGNTIYF

SEQ ID NO: 191581 - protein, 13 aa, Homo sapiens
  CDR3 for alpha chain variable domain of TCR clone 95791 (TRAV26-1, TRAJ30)
CIVRVESNDKIIF

SEQ ID NO: 191582 - protein, 14 aa, Homo sapiens
  CDR3 for beta chain variable domain of TCR clone 95791 (TRBV11-2, TRBJ2-5)
CASRPLAGRETQYF

SEQ ID NO: 191583 - protein, 14 aa, Homo sapiens
  CDR3 for alpha chain variable domain of TCR clone 95792 (TRAV1-2, TRAJ8)
CAVREDTGFQKLVF

SEQ ID NO: 191584 - protein, 15 aa, Homo sapiens
  CDR3 for beta chain variable domain of TCR clone 95792 (TRBV6-1, TRBJ2-1)
CASSELRGQYNEQFF

SEQ ID NO: 191585 - protein, 16 aa, Homo sapiens
  CDR3 for alpha chain variable domain of TCR clone 95793 (TRAV13-2, TRAJ28)
CAEKSYSGDGSYQLTF

SEQ ID NO: 191586 - protein, 16 aa, Homo sapiens
  CDR3 for beta chain variable domain of TCR clone 95793 (TRBV19, TRBJ2-1)
CASSKAGPSSYNEQFF

SEQ ID NO: 191587 - protein, 12 aa, Homo sapiens
  CDR3 for alpha chain variable domain of TCR clone 95794 (TRAV3, TRAJ31)
CAVRYGNARLMF

SEQ ID NO: 191588 - protein, 18 aa, Homo sapiens
  CDR3 for beta chain variable domain of TCR clone 95794 (TRBV7-2, TRBJ2-3)
CASSLKREGSGITDTQYF

SEQ ID NO: 191589 - protein, 14 aa, Homo sapiens
  CDR3 for alpha chain variable domain of TCR clone 95795 (TRAV12-1, TRAJ9)
CVVTGYNGGFKTIF

SEQ ID NO: 191590 - protein, 13 aa, Homo sapiens
  CDR3 for beta chain variable domain of TCR clone 95795 (TRBV20-1, TRBJ1-1)
CSARAGGNTEAFF

SEQ ID NO: 191591 - protein, 19 aa, Homo sapiens
  CDR3 for alpha chain variable domain of TCR clone 95796 (TRAV1-2, TRAJ16)
LSYNVLDGLEEKDGQKLIF

SEQ ID NO: 191592 - protein, 16 aa, Homo sapiens
  CDR3 for beta chain variable domain of TCR clone 95796 (TRBV2, TRBJ2-1)
CASRSPAGGKYNEQFF

SEQ ID NO: 191593 - protein, 14 aa, Homo sapiens
  CDR3 for alpha chain variable domain of TCR clone 95797 (TRAV17, TRAJ54)
CATDANQGAQKLVF

SEQ ID NO: 191594 - protein, 12 aa, Homo sapiens
  CDR3 for beta chain variable domain of TCR clone 95797 (TRBV6-3, TRBJ2-1)
CASGGSYNEQFF

SEQ ID NO: 191595 - protein, 14 aa, Homo sapiens
  CDR3 for alpha chain variable domain of TCR clone 95798 (TRAV1-2, TRAJ16)
CAVNRFSDGQKLLF

SEQ ID NO: 191596 - protein, 14 aa, Homo sapiens
  CDR3 for beta chain variable domain of TCR clone 95798 (TRBV25-1, TRBJ2-3)
CASSVHRERDTQYF

SEQ ID NO: 191597 - protein, 10 aa, Homo sapiens
  CDR3 for alpha chain variable domain of TCR clone 95799 (TRAV8-4, TRAJ43)
CAVSADDMRF

SEQ ID NO: 191598 - protein, 15 aa, Homo sapiens
  CDR3 for beta chain variable domain of TCR clone 95799 (TRBV5-1, TRBJ2-3)
CASTVTSGSTDTQYF

SEQ ID NO: 191599 - protein, 15 aa, Homo sapiens
  CDR3 for alpha chain variable domain of TCR clone 95800 (TRAV34, TRAJ38)
CGADFTPGNNRKLIW

SEQ ID NO: 191600 - protein, 17 aa, Homo sapiens
  CDR3 for beta chain variable domain of TCR clone 95800 (TRBV20-1, TRBJ2-1)
CSASSSGLAGSYNEQFF

SEQ ID NO: 191601 - protein, 11 aa, Homo sapiens
  CDR3 for alpha chain variable domain of TCR clone 95801 (TRAV8-4, TRAJ20)
CAVTNVLTTTS

SEQ ID NO: 191602 - protein, 13 aa, Homo sapiens
  CDR3 for beta chain variable domain of TCR clone 95801 (TRBV19, TRBJ2-3)
CATWGKITDTQYF

SEQ ID NO: 191603 - protein, 11 aa, Homo sapiens
  CDR3 for alpha chain variable domain of TCR clone 95802 (TRAV2, TRAJ13)
CASGGYQKVTF

SEQ ID NO: 191604 - protein, 16 aa, Homo sapiens
  CDR3 for beta chain variable domain of TCR clone 95802 (TRBV6-1, TRBJ2-5)
CASIETLDRGAETQYF

SEQ ID NO: 191605 - protein, 12 aa, Homo sapiens
  CDR3 for alpha chain variable domain of TCR clone 95803 (TRAV26-2, TRAJ21)
CILKGNFNNFYF

SEQ ID NO: 191606 - protein, 14 aa, Homo sapiens
  CDR3 for beta chain variable domain of TCR clone 95803 (TRBV7-9, TRBJ1-1)
CASTPLQSYTEAVF

SEQ ID NO: 191607 - protein, 11 aa, Homo sapiens
  CDR3 for alpha chain variable domain of TCR clone 95804 (TRAV27, TRAJ45)
CAGAQEELLTD

SEQ ID NO: 191608 - protein, 17 aa, Homo sapiens
  CDR3 for beta chain variable domain of TCR clone 95804 (TRBV11-2, TRBJ2-1)
CASSLYPPGVEYNEQFF

SEQ ID NO: 191609 - protein, 13 aa, Homo sapiens
  CDR3 for alpha chain variable domain of TCR clone 95805 (TRAV2, TRAJ15)
CAVASQAGTALIF

SEQ ID NO: 191610 - protein, 16 aa, Homo sapiens
  CDR3 for beta chain variable domain of TCR clone 95805 (TRBV25-1, TRBJ2-5)
CASSDGGTDPRETQYF

SEQ ID NO: 191611 - protein, 15 aa, Homo sapiens
  CDR3 for alpha chain variable domain of TCR clone 95806 (TRAV8-3, TRAJ27)
CAVGPSKTNAGKSTF

SEQ ID NO: 191612 - protein, 15 aa, Homo sapiens
  CDR3 for beta chain variable domain of TCR clone 95806 (TRBV6-5, TRBJ1-2)
CASSYSQAFNYGYTF

SEQ ID NO: 191613 - protein, 14 aa, Homo sapiens
  CDR3 for alpha chain variable domain of TCR clone 95807 (TRAV36/DV7, TRAJ48)
CAQRRDFGNEKLTF

SEQ ID NO: 191614 - protein, 14 aa, Homo sapiens
  CDR3 for beta chain variable domain of TCR clone 95807 (TRBV28, TRBJ2-4)
CASTQVTGVNIRYF

SEQ ID NO: 191615 - protein, 14 aa, Homo sapiens
  CDR3 for alpha chain variable domain of TCR clone 95808 (TRAV38-1, TRAJ45)
CAYYSGGGADGLTF

SEQ ID NO: 191616 - protein, 16 aa, Homo sapiens
  CDR3 for beta chain variable domain of TCR clone 95808 (TRBV4-3, TRBJ2-2)
CASSHLQGSGTGELFF

SEQ ID NO: 191617 - protein, 14 aa, Homo sapiens
  CDR3 for alpha chain variable domain of TCR clone 95809 (TRAV12-2, TRAJ13)
CAVKKTGGYQKVTF

SEQ ID NO: 191618 - protein, 15 aa, Homo sapiens
  CDR3 for beta chain variable domain of TCR clone 95809 (TRBV7-9, TRBJ2-7)
CASSLALAEAYEQYF

SEQ ID NO: 191619 - protein, 16 aa, Homo sapiens
  CDR3 for alpha chain variable domain of TCR clone 95810 (TRAV3, TRAJ10)
CAVRDMRAGGGNKLTF

SEQ ID NO: 191620 - protein, 14 aa, Homo sapiens
  CDR3 for beta chain variable domain of TCR clone 95810 (TRBV7-2, TRBJ1-1)
CASGFLTGTTEAFF

SEQ ID NO: 191621 - protein, 12 aa, Homo sapiens
  CDR3 for alpha chain variable domain of TCR clone 95811 (TRAV16, TRAJ57)
CALEGGSEKLGF

SEQ ID NO: 191622 - protein, 12 aa, Homo sapiens
  CDR3 for beta chain variable domain of TCR clone 95811 (TRBV28, TRBJ2-7)
CASSGRPYEQYF

SEQ ID NO: 191623 - protein, 17 aa, Homo sapiens
  CDR3 for alpha chain variable domain of TCR clone 95812 (TRAV3, TRAJ6)
CAVRDGPRAGGSYIPTF

SEQ ID NO: 191624 - protein, 14 aa, Homo sapiens
  CDR3 for beta chain variable domain of TCR clone 95812 (TRBV5-1, TRBJ2-7)
CASSRGESLYEQYF

SEQ ID NO: 191625 - protein, 13 aa, Homo sapiens
  CDR3 for alpha chain variable domain of TCR clone 95813 (TRAV17, TRAJ5)
CALRGTGRRALTF

SEQ ID NO: 191626 - protein, 14 aa, Homo sapiens
  CDR3 for beta chain variable domain of TCR clone 95813 (TRBV7-6, TRBJ2-3)
CASSLGTVTDTQYF

SEQ ID NO: 191627 - protein, 14 aa, Homo sapiens
  CDR3 for alpha chain variable domain of TCR clone 95814 (TRAV6, TRAJ45)
PLAFSGGGADGLTF

SEQ ID NO: 191628 - protein, 16 aa, Homo sapiens
  CDR3 for beta chain variable domain of TCR clone 95814 (TRBV19, TRBJ2-2)
CASRSPGTGATGELFF

SEQ ID NO: 191629 - protein, 12 aa, Homo sapiens
  CDR3 for alpha chain variable domain of TCR clone 95815 (TRAV8-3, TRAJ26)
CAGDNYGQNFVF

SEQ ID NO: 191630 - protein, 11 aa, Homo sapiens
  CDR3 for beta chain variable domain of TCR clone 95815 (TRBV11-2, TRBJ1-1)
CASSINTEAFF

SEQ ID NO: 191631 - protein, 15 aa, Homo sapiens
  CDR3 for alpha chain variable domain of TCR clone 95816 (TRAV12-2, TRAJ53)
CAVNGGGGSNYKLTF

SEQ ID NO: 191632 - protein, 15 aa, Homo sapiens
  CDR3 for beta chain variable domain of TCR clone 95816 (TRBV18, TRBJ2-6)
CASSPSYAGANVLTF

SEQ ID NO: 191633 - protein, 12 aa, Homo sapiens
  CDR3 for alpha chain variable domain of TCR clone 95817 (TRAV12-3, TRAJ17)
CAMTLTGNKLTF

SEQ ID NO: 191634 - protein, 15 aa, Homo sapiens
  CDR3 for beta chain variable domain of TCR clone 95817 (TRBV6-1, TRBJ2-2)
CASSAGQGYTGELFF

SEQ ID NO: 191635 - protein, 16 aa, Homo sapiens
  CDR3 for alpha chain variable domain of TCR clone 95818 (TRAV12-2, TRAJ6)
CAAPLAGPGGSYIPTF

SEQ ID NO: 191636 - protein, 10 aa, Homo sapiens
  CDR3 for beta chain variable domain of TCR clone 95818 (TRBV28, TRBJ1-2)
CASSSDRAVF

SEQ ID NO: 191637 - protein, 17 aa, Homo sapiens
  CDR3 for alpha chain variable domain of TCR clone 95819 (TRAV3, TRAJ12)
CAVRDGGRMDSSYKLIF

SEQ ID NO: 191638 - protein, 14 aa, Homo sapiens
  CDR3 for beta chain variable domain of TCR clone 95819 (TRBV7-9, TRBJ1-2)
CASSLQGANYGYTF

SEQ ID NO: 191639 - protein, 14 aa, Homo sapiens
  CDR3 for alpha chain variable domain of TCR clone 95820 (TRAV8-2, TRAJ37)
CVVSISGNTGKLIS

SEQ ID NO: 191640 - protein, 11 aa, Homo sapiens
  CDR3 for beta chain variable domain of TCR clone 95820 (TRBV18, TRBJ2-5)
CASSPRETQYF

SEQ ID NO: 191641 - protein, 11 aa, Homo sapiens
  CDR3 for alpha chain variable domain of TCR clone 95821 (TRAV3, TRAJ21)
CAVVNFNKFYF

SEQ ID NO: 191642 - protein, 16 aa, Homo sapiens
  CDR3 for beta chain variable domain of TCR clone 95821 (TRBV19, TRBJ2-1)
CASSKAGPSSYNEQFL

SEQ ID NO: 191643 - protein, 19 aa, Homo sapiens
  CDR3 for alpha chain variable domain of TCR clone 95822 (TRAV2, TRAJ20)
ILLVREADAAVYRDCKLSF

SEQ ID NO: 191644 - protein, 15 aa, Homo sapiens
  CDR3 for beta chain variable domain of TCR clone 95822 (TRBV20-1, TRBJ2-5)
CSAEGTGGLQETQYF

SEQ ID NO: 191645 - protein, 11 aa, Homo sapiens
  CDR3 for alpha chain variable domain of TCR clone 95823 (TRAV1-1, TRAJ23)
CAVRQGGKLIF

SEQ ID NO: 191646 - protein, 20 aa, Homo sapiens
  CDR3 for beta chain variable domain of TCR clone 95823 (TRBV7-8, TRBJ2-2)
CASSHLFPGPTVHITGELFL

SEQ ID NO: 191647 - protein, 12 aa, Homo sapiens
  CDR3 for alpha chain variable domain of TCR clone 95824 (TRAV8-3, TRAJ40)
CAVTSGTYKYNF

SEQ ID NO: 191648 - protein, 14 aa, Homo sapiens
  CDR3 for beta chain variable domain of TCR clone 95824 (TRBV12-4, TRBJ2-3)
CASSGQGSTDTQYF

SEQ ID NO: 191649 - protein, 13 aa, Homo sapiens
  CDR3 for alpha chain variable domain of TCR clone 95825 (TRAV35, TRAJ42)
CAGVPGSQGNLIF

SEQ ID NO: 191650 - protein, 14 aa, Homo sapiens
  CDR3 for beta chain variable domain of TCR clone 95825 (TRBV19, TRBJ2-1)
CASPTFVLSGEQFF

SEQ ID NO: 191651 - protein, 13 aa, Homo sapiens
  CDR3 for alpha chain variable domain of TCR clone 95826 (TRAV21, TRAJ27)
CAARPGNAGKSTF

SEQ ID NO: 191652 - protein, 13 aa, Homo sapiens
  CDR3 for beta chain variable domain of TCR clone 95826 (TRBV13, TRBJ2-1)
YASILGGRGEQFF

SEQ ID NO: 191653 - protein, 13 aa, Homo sapiens
  CDR3 for alpha chain variable domain of TCR clone 95827 (TRAV29/DV5, TRAJ44)
CAASTGTASKLTF

SEQ ID NO: 191654 - protein, 15 aa, Homo sapiens
  CDR3 for beta chain variable domain of TCR clone 95827 (TRBV7-9, TRBJ1-6)
CASSSPGRGNSPLHF

SEQ ID NO: 191655 - protein, 18 aa, Homo sapiens
  CDR3 for alpha chain variable domain of TCR clone 95828 (TRAV16, TRAJ26)
CALRLWSEFCLWSRNQIV

SEQ ID NO: 191656 - protein, 14 aa, Homo sapiens
  CDR3 for beta chain variable domain of TCR clone 95828 (TRBV7-2, TRBJ2-7)
CASRSQGAAYEQYF

SEQ ID NO: 191657 - protein, 14 aa, Homo sapiens
  CDR3 for alpha chain variable domain of TCR clone 95829 (TRAV38-1, TRAJ45)
CAYYSGGGADGLTF

SEQ ID NO: 191658 - protein, 20 aa, Homo sapiens
  CDR3 for beta chain variable domain of TCR clone 95829 (TRBV28, TRBJ2-1)
CASTPIGRSPGIAGGNEQFF

SEQ ID NO: 191659 - protein, 17 aa, Homo sapiens
  CDR3 for alpha chain variable domain of TCR clone 95830 (TRAV3, TRAJ6)
CAVRDGPRAGGSYIPTF

SEQ ID NO: 191660 - protein, 13 aa, Homo sapiens
  CDR3 for beta chain variable domain of TCR clone 95830 (TRBV3-1, TRBJ1-1)
CASSPGVITEAFF

SEQ ID NO: 191661 - protein, 13 aa, Homo sapiens
  CDR3 for alpha chain variable domain of TCR clone 95831 (TRAV1-1, TRAJ9)
CAAKNTGGFKTIF

SEQ ID NO: 191662 - protein, 14 aa, Homo sapiens
  CDR3 for beta chain variable domain of TCR clone 95831 (TRBV7-9, TRBJ1-2)
CASSRQGANYGYTF

SEQ ID NO: 191663 - protein, 14 aa, Homo sapiens
  CDR3 for alpha chain variable domain of TCR clone 95832 (TRAV1-2, TRAJ8)
CAVREGTGFQKLVF

SEQ ID NO: 191664 - protein, 15 aa, Homo sapiens
  CDR3 for beta chain variable domain of TCR clone 95832 (TRBV27, TRBJ2-1)
CASSNGGGSSNEQFF

SEQ ID NO: 191665 - protein, 14 aa, Homo sapiens
  CDR3 for alpha chain variable domain of TCR clone 95833 (TRAV3, TRAJ6)
CAVRDPWGSYIPTF

SEQ ID NO: 191666 - protein, 12 aa, Homo sapiens
  CDR3 for beta chain variable domain of TCR clone 95833 (TRBV18, TRBJ2-1)
CASSPGTSEGFF

SEQ ID NO: 191667 - protein, 11 aa, Homo sapiens
  CDR3 for alpha chain variable domain of TCR clone 95834 (TRAV23/DV6, TRAJ58)
CAARLLRGETS

SEQ ID NO: 191668 - protein, 15 aa, Homo sapiens
  CDR3 for beta chain variable domain of TCR clone 95834 (TRBV4-3, TRBJ2-7)
CASSQGGRGIYEQYF

SEQ ID NO: 191669 - protein, 14 aa, Homo sapiens
  CDR3 for alpha chain variable domain of TCR clone 95835 (TRAV12-3, TRAJ10)
SHLPLTGGGNKLTF

SEQ ID NO: 191670 - protein, 14 aa, Homo sapiens
  CDR3 for beta chain variable domain of TCR clone 95835 (TRBV6-1, TRBJ1-3)
CASVQGGVGNTIYF

SEQ ID NO: 191671 - protein, 13 aa, Homo sapiens
  CDR3 for alpha chain variable domain of TCR clone 95836 (TRAV20, TRAJ3)
CARRYSSDSKIIF

SEQ ID NO: 191672 - protein, 12 aa, Homo sapiens
  CDR3 for beta chain variable domain of TCR clone 95836 (TRBV28, TRBJ2-1)
CASSFRGNEQFF

SEQ ID NO: 191673 - protein, 14 aa, Homo sapiens
  CDR3 for alpha chain variable domain of TCR clone 95837 (TRAV12-1, TRAJ8)
CVVNSNTGFQKLAF

SEQ ID NO: 191674 - protein, 17 aa, Homo sapiens
  CDR3 for beta chain variable domain of TCR clone 95837 (TRBV7-8, TRBJ2-6)
RASSAGTGGAGANVLTF

SEQ ID NO: 191675 - protein, 11 aa, Homo sapiens
  CDR3 for alpha chain variable domain of TCR clone 95838 (TRAV2, TRAJ20)
CAVLNDYKLSF

SEQ ID NO: 191676 - protein, 16 aa, Homo sapiens
  CDR3 for beta chain variable domain of TCR clone 95838 (TRBV5-4, TRBJ2-3)
CASQQPGAGGADTQYF

SEQ ID NO: 191677 - protein, 15 aa, Homo sapiens
  CDR3 for alpha chain variable domain of TCR clone 95839 (TRAV9-2, TRAJ44)
CALNDGPGTASKLTF

SEQ ID NO: 191678 - protein, 16 aa, Homo sapiens
  CDR3 for beta chain variable domain of TCR clone 95839 (TRBV20-1, TRBJ1-4)
CSAPGQGLLTNEKLFF

SEQ ID NO: 191679 - protein, 17 aa, Homo sapiens
  CDR3 for alpha chain variable domain of TCR clone 95840 (TRAV16, TRAJ58)
CITVLSNGETSGTRLTF

SEQ ID NO: 191680 - protein, 17 aa, Homo sapiens
  CDR3 for beta chain variable domain of TCR clone 95840 (TRBV18, TRBJ2-1)
CASSKGLSGGADNEQFF

SEQ ID NO: 191681 - protein, 16 aa, Homo sapiens
  CDR3 for alpha chain variable domain of TCR clone 95841 (TRAV3, TRAJ37)
CAVRPHGSRNTGKLIF

SEQ ID NO: 191682 - protein, 16 aa, Homo sapiens
  CDR3 for beta chain variable domain of TCR clone 95841 (TRBV9, TRBJ1-2)
CASSVEEKVSPYGYTF

SEQ ID NO: 191683 - protein, 14 aa, Homo sapiens
  CDR3 for alpha chain variable domain of TCR clone 95842 (TRAV12-3, TRAJ9)
CAMSVETGGFKTIF

SEQ ID NO: 191684 - protein, 14 aa, Homo sapiens
  CDR3 for beta chain variable domain of TCR clone 95842 (TRBV7-2, TRBJ2-7)
CASRTQGAAYEQYF

SEQ ID NO: 191685 - protein, 16 aa, Homo sapiens
  CDR3 for alpha chain variable domain of TCR clone 95843 (TRAV16, TRAJ4)
CALSRMFSGGYNKLIF

SEQ ID NO: 191686 - protein, 16 aa, Homo sapiens
  CDR3 for beta chain variable domain of TCR clone 95843 (TRBV24-1, TRBJ2-3)
CATSDPGTGATDTLYF

SEQ ID NO: 191687 - protein, 16 aa, Homo sapiens
  CDR3 for alpha chain variable domain of TCR clone 95844 (TRAV26-1, TRAJ53)
CIVRVAMGGSNYKLTF

SEQ ID NO: 191688 - protein, 12 aa, Homo sapiens
  CDR3 for beta chain variable domain of TCR clone 95844 (TRBV7-9, TRBJ1-5)
SASSPQGQPQHF

SEQ ID NO: 191689 - protein, 15 aa, Homo sapiens
  CDR3 for alpha chain variable domain of TCR clone 95845 (TRAV27, TRAJ38)
CAARRNAGNNRKLIW

SEQ ID NO: 191690 - protein, 13 aa, Homo sapiens
  CDR3 for beta chain variable domain of TCR clone 95845 (TRBV19, TRBJ2-7)
CASRKAGGSEQYF

SEQ ID NO: 191691 - protein, 17 aa, Homo sapiens
  CDR3 for alpha chain variable domain of TCR clone 95846 (TRAV8-6, TRAJ52)
CAVTRNAGGTSYGKLTF

SEQ ID NO: 191692 - protein, 13 aa, Homo sapiens
  CDR3 for beta chain variable domain of TCR clone 95846 (TRBV7-9, TRBJ1-2)
CASSLKQNYGYTV

SEQ ID NO: 191693 - protein, 18 aa, Homo sapiens
  CDR3 for alpha chain variable domain of TCR clone 95847 (TRAV4, TRAJ28)
CLVGDRALGLGVTNSLSG

SEQ ID NO: 191694 - protein, 14 aa, Homo sapiens
  CDR3 for beta chain variable domain of TCR clone 95847 (TRBV4-1, TRBJ2-7)
CASSPVAGGDEQYF

SEQ ID NO: 191695 - protein, 12 aa, Homo sapiens
  CDR3 for alpha chain variable domain of TCR clone 95848 (TRAV4, TRAJ26)
CLVGDYGQNFVF

SEQ ID NO: 191696 - protein, 16 aa, Homo sapiens
  CDR3 for beta chain variable domain of TCR clone 95848 (TRBV19, TRBJ2-2)
CASRSPGTGATGELFF

SEQ ID NO: 191697 - protein, 18 aa, Homo sapiens
  CDR3 for alpha chain variable domain of TCR clone 95849 (TRAV3, TRAJ28)
CAVRDTSYSGAGSYQLTF

SEQ ID NO: 191698 - protein, 17 aa, Homo sapiens
  CDR3 for beta chain variable domain of TCR clone 95849 (TRBV4-1, TRBJ1-4)
CASSQEGPRGVEEKLFF

SEQ ID NO: 191699 - protein, 12 aa, Homo sapiens
  CDR3 for alpha chain variable domain of TCR clone 95850 (TRAV12-3, TRAJ17)
CAITLTGNKLTF

SEQ ID NO: 191700 - protein, 15 aa, Homo sapiens
  CDR3 for beta chain variable domain of TCR clone 95850 (TRBV20-1, TRBJ2-7)
CSARDRVAGMDEQYF

SEQ ID NO: 191701 - protein, 15 aa, Homo sapiens
  CDR3 for alpha chain variable domain of TCR clone 95851 (TRAV3, TRAJ4)
CAVRDGTGGYNKLIF

SEQ ID NO: 191702 - protein, 14 aa, Homo sapiens
  CDR3 for beta chain variable domain of TCR clone 95851 (TRBV7-2, TRBJ1-1)
CASSFLTGTTEAFF

SEQ ID NO: 191703 - protein, 15 aa, Homo sapiens
  CDR3 for alpha chain variable domain of TCR clone 95852 (TRAV23/DV6, TRAJ13)
CAAWPGGGGYQKVTF

SEQ ID NO: 191704 - protein, 16 aa, Homo sapiens
  CDR3 for beta chain variable domain of TCR clone 95852 (TRBV19, TRBJ1-5)
CASSTWTGGGNQPQHF

SEQ ID NO: 191705 - protein, 10 aa, Homo sapiens
  CDR3 for alpha chain variable domain of TCR clone 95853 (TRAV36/DV7, TRAJ48)
CAVGNEKLTF

SEQ ID NO: 191706 - protein, 14 aa, Homo sapiens
  CDR3 for beta chain variable domain of TCR clone 95853 (TRBV7-2, TRBJ2-7)
CASSPKTIFYEQYF

SEQ ID NO: 191707 - protein, 15 aa, Homo sapiens
  CDR3 for alpha chain variable domain of TCR clone 95854 (TRAV12-1, TRAJ44)
CVVFVNTGTASKLTF

SEQ ID NO: 191708 - protein, 17 aa, Homo sapiens
  CDR3 for beta chain variable domain of TCR clone 95854 (TRBV12-4, TRBJ2-1)
CASSPGLAGGRINEQFF

SEQ ID NO: 191709 - protein, 14 aa, Homo sapiens
  CDR3 for alpha chain variable domain of TCR clone 95855 (TRAV8-4, TRAJ8)
CAVSLNTGFQKLVF

SEQ ID NO: 191710 - protein, 13 aa, Homo sapiens
  CDR3 for beta chain variable domain of TCR clone 95855 (TRBV7-9, TRBJ2-3)
CASSPGSTATQYF

SEQ ID NO: 191711 - protein, 15 aa, Homo sapiens
  CDR3 for alpha chain variable domain of TCR clone 95856 (TRAV12-3, TRAJ6)
CAMSATTGGCYIPTF

SEQ ID NO: 191712 - protein, 16 aa, Homo sapiens
  CDR3 for beta chain variable domain of TCR clone 95856 (TRBV20-1, TRBJ1-2)
CSASMGQGVANYGYTF

SEQ ID NO: 191713 - protein, 16 aa, Homo sapiens
  CDR3 for alpha chain variable domain of TCR clone 95857 (TRAV30, TRAJ24)
CGTEIVDADSWGKFQF

SEQ ID NO: 191714 - protein, 14 aa, Homo sapiens
  CDR3 for beta chain variable domain of TCR clone 95857 (TRBV12-5, TRBJ2-5)
CGSGSRTHQEAQYF

SEQ ID NO: 191715 - protein, 15 aa, Homo sapiens
  CDR3 for alpha chain variable domain of TCR clone 95858 (TRAV12-3, TRAJ6)
CAMSATSGGSYIPTF

SEQ ID NO: 191716 - protein, 15 aa, Homo sapiens
  CDR3 for beta chain variable domain of TCR clone 95858 (TRBV19, TRBJ2-6)
CASSIGPSGANVLTF

SEQ ID NO: 191717 - protein, 12 aa, Homo sapiens
  CDR3 for alpha chain variable domain of TCR clone 95859 (TRAV13-1, TRAJ49)
CAASPMGNQFYF

SEQ ID NO: 191718 - protein, 17 aa, Homo sapiens
  CDR3 for beta chain variable domain of TCR clone 95859 (TRBV11-2, TRBJ2-1)
CASSLYPPGVEYNEQSF

SEQ ID NO: 191719 - protein, 14 aa, Homo sapiens
  CDR3 for alpha chain variable domain of TCR clone 95860 (TRAV12-2, TRAJ45)
CAVYSGGGADGLTF

SEQ ID NO: 191720 - protein, 13 aa, Homo sapiens
  CDR3 for beta chain variable domain of TCR clone 95860 (TRBV27, TRBJ2-7)
CASSFVSSYEQYF

SEQ ID NO: 191721 - protein, 17 aa, Homo sapiens
  CDR3 for alpha chain variable domain of TCR clone 95861 (TRAV23/DV6, TRAJ10)
CSKPPFILTGGGDKLTF

SEQ ID NO: 191722 - protein, 15 aa, Homo sapiens
  CDR3 for beta chain variable domain of TCR clone 95861 (TRBV20-1, TRBJ2-1)
CSAEGGLLAGDEQFF

SEQ ID NO: 191723 - protein, 14 aa, Homo sapiens
  CDR3 for alpha chain variable domain of TCR clone 95862 (TRAV35, TRAJ33)
CAGSSQDSNYLLIW

SEQ ID NO: 191724 - protein, 15 aa, Homo sapiens
  CDR3 for beta chain variable domain of TCR clone 95862 (TRBV20-1, TRBJ2-7)
CSAESGTSGAYEQYF

SEQ ID NO: 191725 - protein, 11 aa, Homo sapiens
  CDR3 for alpha chain variable domain of TCR clone 95863 (TRAV1-2, TRAJ20)
CAVSNDYKLSF

SEQ ID NO: 191726 - protein, 14 aa, Homo sapiens
  CDR3 for beta chain variable domain of TCR clone 95863 (TRBV19, TRBJ2-1)
CASPTFVLSGEQFF

SEQ ID NO: 191727 - protein, 14 aa, Homo sapiens
  CDR3 for alpha chain variable domain of TCR clone 95864 (TRAV12-1, TRAJ17)
CVVNYKAAGNKLTF

SEQ ID NO: 191728 - protein, 15 aa, Homo sapiens
  CDR3 for beta chain variable domain of TCR clone 95864 (TRBV12-4, TRBJ2-5)
CASSPPTGLQETQYF

SEQ ID NO: 191729 - protein, 13 aa, Homo sapiens
  CDR3 for alpha chain variable domain of TCR clone 95865 (TRAV3, TRAJ21)
CAVREPDFNKFYF

SEQ ID NO: 191730 - protein, 18 aa, Homo sapiens
  CDR3 for beta chain variable domain of TCR clone 95865 (TRBV11-2, TRBJ2-3)
CACSLGGASRGAPNTQYF

SEQ ID NO: 191731 - protein, 11 aa, Homo sapiens
  CDR3 for alpha chain variable domain of TCR clone 95866 (TRAV16, TRAJ49)
CSLNTGNQFYF

SEQ ID NO: 191732 - protein, 14 aa, Homo sapiens
  CDR3 for beta chain variable domain of TCR clone 95866 (TRBV4-2, TRBJ2-1)
CASGLDRAYNEQFF

SEQ ID NO: 191733 - protein, 14 aa, Homo sapiens
  CDR3 for alpha chain variable domain of TCR clone 95867 (TRAV9-2, TRAJ39)
CALYIYNAGNMLTF

SEQ ID NO: 191734 - protein, 15 aa, Homo sapiens
  CDR3 for beta chain variable domain of TCR clone 95867 (TRBV5-1, TRBJ2-7)
CASSLMTSGSNEQYF

SEQ ID NO: 191735 - protein, 13 aa, Homo sapiens
  CDR3 for alpha chain variable domain of TCR clone 95868 (TRAV17, TRAJ9)
CATDYTGGFKTIF

SEQ ID NO: 191736 - protein, 17 aa, Homo sapiens
  CDR3 for beta chain variable domain of TCR clone 95868 (TRBV4-1, TRBJ2-7)
CASSRDPLGVRGGEQYF

SEQ ID NO: 191737 - protein, 15 aa, Homo sapiens
  CDR3 for alpha chain variable domain of TCR clone 95869 (TRAV26-1, TRAJ21)
CIVRVPNYNFNKFYL

SEQ ID NO: 191738 - protein, 16 aa, Homo sapiens
  CDR3 for beta chain variable domain of TCR clone 95869 (TRBV7-9, TRBJ2-3)
CASSLQGNPGTDTQYF

SEQ ID NO: 191739 - protein, 14 aa, Homo sapiens
  CDR3 for alpha chain variable domain of TCR clone 95870 (TRAV8-1, TRAJ15)
CAVNGQQAGTALIF

SEQ ID NO: 191740 - protein, 14 aa, Homo sapiens
  CDR3 for beta chain variable domain of TCR clone 95870 (TRBV12-5, TRBJ2-5)
CAGGSRTHQETQYF

SEQ ID NO: 191741 - protein, 15 aa, Homo sapiens
  CDR3 for alpha chain variable domain of TCR clone 95871 (TRAV21, TRAJ53)
CATLNGGGSNYKLTF

SEQ ID NO: 191742 - protein, 13 aa, Homo sapiens
  CDR3 for beta chain variable domain of TCR clone 95871 (TRBV27, TRBJ1-1)
CASSVSANTEAFF

SEQ ID NO: 191743 - protein, 23 aa, Homo sapiens
  CDR3 for alpha chain variable domain of TCR clone 95872 (TRAV12-2, TRAJ22)
CAVSLRVHPGPPIVSGSARQLTF

SEQ ID NO: 191744 - protein, 13 aa, Homo sapiens
  CDR3 for beta chain variable domain of TCR clone 95872 (TRBV12-4, TRBJ1-2)
CASSLDSNYGYTF

SEQ ID NO: 191745 - protein, 14 aa, Homo sapiens
  CDR3 for alpha chain variable domain of TCR clone 95873 (TRAV13-1, TRAJ44)
CAAKATGTASKLTF

SEQ ID NO: 191746 - protein, 15 aa, Homo sapiens
  CDR3 for beta chain variable domain of TCR clone 95873 (TRBV7-2, TRBJ2-1)
CASTHGTGIYNEQFF

SEQ ID NO: 191747 - protein, 13 aa, Homo sapiens
  CDR3 for alpha chain variable domain of TCR clone 95874 (TRAV13-1, TRAJ40)
CAAISPGTYKYIF

SEQ ID NO: 191748 - protein, 12 aa, Homo sapiens
  CDR3 for beta chain variable domain of TCR clone 95874 (TRBV11-2, TRBJ2-2)
CASSLGGGELFF

SEQ ID NO: 191749 - protein, 17 aa, Homo sapiens
  CDR3 for alpha chain variable domain of TCR clone 95875 (TRAV13-1, TRAJ28)
CAASPPYSGAGSYQPTF

SEQ ID NO: 191750 - protein, 15 aa, Homo sapiens
  CDR3 for beta chain variable domain of TCR clone 95875 (TRBV6-3, TRBJ2-2)
CASSFLATLTGELFF

SEQ ID NO: 191751 - protein, 17 aa, Homo sapiens
  CDR3 for alpha chain variable domain of TCR clone 95876 (TRAV12-3, TRAJ6)
CAMSARGGAGGSYIPTF

SEQ ID NO: 191752 - protein, 16 aa, Homo sapiens
  CDR3 for beta chain variable domain of TCR clone 95876 (TRBV7-3, TRBJ2-2)
CASSLKRGTLSGELFF

SEQ ID NO: 191753 - protein, 14 aa, Homo sapiens
  CDR3 for alpha chain variable domain of TCR clone 95877 (TRAV1-2, TRAJ8)
CAVRDDTGFQKLVF

SEQ ID NO: 191754 - protein, 15 aa, Homo sapiens
  CDR3 for beta chain variable domain of TCR clone 95877 (TRBV7-9, TRBJ1-4)
CASSARTGGNEKLFF

SEQ ID NO: 191755 - protein, 17 aa, Homo sapiens
  CDR3 for alpha chain variable domain of TCR clone 95878 (TRAV3, TRAJ6)
CAVRDGPRAGGSYIPTF

SEQ ID NO: 191756 - protein, 22 aa, Homo sapiens
  CDR3 for beta chain variable domain of TCR clone 95878 (TRBV7-2, TRBJ2-7)
RRTRPCISVPAAPKTSFYEQYL

SEQ ID NO: 191757 - protein, 19 aa, Homo sapiens
  CDR3 for alpha chain variable domain of TCR clone 95879 (TRAV29/DV5, TRAJ49)
CSVLLFSKLTVDTGNQFYF

SEQ ID NO: 191758 - protein, 15 aa, Homo sapiens
  CDR3 for beta chain variable domain of TCR clone 95879 (TRBV4-3, TRBJ2-2)
CASSQGGTPTGELFF

SEQ ID NO: 191759 - protein, 14 aa, Homo sapiens
  CDR3 for alpha chain variable domain of TCR clone 95880 (TRAV12-3, TRAJ10)
SHLPLTGGGNKLTF

SEQ ID NO: 191760 - protein, 14 aa, Homo sapiens
  CDR3 for beta chain variable domain of TCR clone 95880 (TRBV6-1, TRBJ1-3)
CASLQGGGGNTIYF

SEQ ID NO: 191761 - protein, 15 aa, Homo sapiens
  CDR3 for alpha chain variable domain of TCR clone 95881 (TRAV17, TRAJ57)
CATGPSQGGSEKLSL

SEQ ID NO: 191762 - protein, 16 aa, Homo sapiens
  CDR3 for beta chain variable domain of TCR clone 95881 (TRBV12-4, TRBJ1-5)
CASSRPVGGSNQPQHF

SEQ ID NO: 191763 - protein, 12 aa, Homo sapiens
  CDR3 for alpha chain variable domain of TCR clone 95882 (TRAV2, TRAJ10)
CASTGGGNKLTL

SEQ ID NO: 191764 - protein, 13 aa, Homo sapiens
  CDR3 for beta chain variable domain of TCR clone 95882 (TRBV19, TRBJ1-5)
CASSMRGYQPQHF

SEQ ID NO: 191765 - protein, 15 aa, Homo sapiens
  CDR3 for alpha chain variable domain of TCR clone 95883 (TRAV16, TRAJ20)
CALKGGLRADYKLSL

SEQ ID NO: 191766 - protein, 16 aa, Homo sapiens
  CDR3 for beta chain variable domain of TCR clone 95883 (TRBV11-3, TRBJ2-2)
CASSSRTSPGTGELFF

SEQ ID NO: 191767 - protein, 15 aa, Homo sapiens
  CDR3 for alpha chain variable domain of TCR clone 95884 (TRAV26-1, TRAJ23)
CIVRVAGYQGGKLIF

SEQ ID NO: 191768 - protein, 13 aa, Homo sapiens
  CDR3 for beta chain variable domain of TCR clone 95884 (TRBV7-3, TRBJ1-1)
CASSQDWGAEAFF

SEQ ID NO: 191769 - protein, 13 aa, Homo sapiens
  CDR3 for alpha chain variable domain of TCR clone 95885 (TRAV8-3, TRAJ48)
CAVVHFGNEKLTF

SEQ ID NO: 191770 - protein, 14 aa, Homo sapiens
  CDR3 for beta chain variable domain of TCR clone 95885 (TRBV18, TRBJ2-7)
CASSPRGGAYEQYF

SEQ ID NO: 191771 - protein, 11 aa, Homo sapiens
  CDR3 for alpha chain variable domain of TCR clone 95886 (TRAV12-2, TRAJ29)
CAVTLRSPLVF

SEQ ID NO: 191772 - protein, 14 aa, Homo sapiens
  CDR3 for beta chain variable domain of TCR clone 95886 (TRBV19, TRBJ2-1)
CASPTFVLSGEQFF

SEQ ID NO: 191773 - protein, 13 aa, Homo sapiens
  CDR3 for alpha chain variable domain of TCR clone 95887 (TRAV36/DV7, TRAJ50)
CAVSKTSYDKLIF

SEQ ID NO: 191774 - protein, 13 aa, Homo sapiens
  CDR3 for beta chain variable domain of TCR clone 95887 (TRBV18, TRBJ2-7)
CASSPGRNYEQYF

SEQ ID NO: 191775 - protein, 14 aa, Homo sapiens
  CDR3 for alpha chain variable domain of TCR clone 95888 (TRAV23/DV6, TRAJ4)
CAAPSSGGYNKLIF

SEQ ID NO: 191776 - protein, 14 aa, Homo sapiens
  CDR3 for beta chain variable domain of TCR clone 95888 (TRBV12-5, TRBJ2-5)
CASGSRTHQETQYF

SEQ ID NO: 191777 - protein, 10 aa, Homo sapiens
  CDR3 for alpha chain variable domain of TCR clone 95889 (TRAV1-1, TRAJ30)
CAVRDDKIIF

SEQ ID NO: 191778 - protein, 15 aa, Homo sapiens
  CDR3 for beta chain variable domain of TCR clone 95889 (TRBV5-1, TRBJ1-1)
CASSLAAGTETEAFL

SEQ ID NO: 191779 - protein, 13 aa, Homo sapiens
  CDR3 for alpha chain variable domain of TCR clone 95890 (TRAV13-2, TRAJ48)
CAEVDFGNEKLNF

SEQ ID NO: 191780 - protein, 15 aa, Homo sapiens
  CDR3 for beta chain variable domain of TCR clone 95890 (TRBV7-9, TRBJ1-6)
CASSSPGRGNSPLHF

SEQ ID NO: 191781 - protein, 13 aa, Homo sapiens
  CDR3 for alpha chain variable domain of TCR clone 95891 (TRAV16, TRAJ34)
CALTGYNTDKLIF

SEQ ID NO: 191782 - protein, 16 aa, Homo sapiens
  CDR3 for beta chain variable domain of TCR clone 95891 (TRBV19, TRBJ2-2)
CASSFPGQGLAGELFF

SEQ ID NO: 191783 - protein, 12 aa, Homo sapiens
  CDR3 for alpha chain variable domain of TCR clone 95892 (TRAV21, TRAJ31)
CAVWGNNARLMF

SEQ ID NO: 191784 - protein, 20 aa, Homo sapiens
  CDR3 for beta chain variable domain of TCR clone 95892 (TRBV7-8, TRBJ2-2)
CASSHLFPGPTIHITGELFF

SEQ ID NO: 191785 - protein, 15 aa, Homo sapiens
  CDR3 for alpha chain variable domain of TCR clone 95893 (TRAV21, TRAJ45)
CGVSYSGGGADGLTF

SEQ ID NO: 191786 - protein, 13 aa, Homo sapiens
  CDR3 for beta chain variable domain of TCR clone 95893 (TRBV20-1, TRBJ2-5)
CSAATELQETQYF

SEQ ID NO: 191787 - protein, 10 aa, Homo sapiens
  CDR3 for alpha chain variable domain of TCR clone 95894 (TRAV30, TRAJ48)
CGIGNEKLTF

SEQ ID NO: 191788 - protein, 16 aa, Homo sapiens
  CDR3 for beta chain variable domain of TCR clone 95894 (TRBV7-9, TRBJ1-2)
CASSLGFSSGEDGYTF

SEQ ID NO: 191789 - protein, 13 aa, Homo sapiens
  CDR3 for alpha chain variable domain of TCR clone 95895 (TRAV17, TRAJ5)
CALRGTGRRALTF

SEQ ID NO: 191790 - protein, 15 aa, Homo sapiens
  CDR3 for beta chain variable domain of TCR clone 95895 (TRBV6-1, TRBJ1-5)
CASSELREGNQAQHF

SEQ ID NO: 191791 - protein, 15 aa, Homo sapiens
  CDR3 for alpha chain variable domain of TCR clone 95896 (TRAV29/DV5, TRAJ24)
CEASGATDSWGKFQF

SEQ ID NO: 191792 - protein, 12 aa, Homo sapiens
  CDR3 for beta chain variable domain of TCR clone 95896 (TRBV11-2, TRBJ2-2)
CASSLPTGELFF

SEQ ID NO: 191793 - protein, 15 aa, Homo sapiens
  CDR3 for alpha chain variable domain of TCR clone 95897 (TRAV26-1, TRAJ29)
CIVRVEGSGNTPLVF

SEQ ID NO: 191794 - protein, 14 aa, Homo sapiens
  CDR3 for beta chain variable domain of TCR clone 95897 (TRBV7-2, TRBJ1-1)
CASSFLTGTTEAFF

SEQ ID NO: 191795 - protein, 14 aa, Homo sapiens
  CDR3 for alpha chain variable domain of TCR clone 95898 (TRAV8-3, TRAJ36)
CAVGTITGANNLFF

SEQ ID NO: 191796 - protein, 15 aa, Homo sapiens
  CDR3 for beta chain variable domain of TCR clone 95898 (TRBV4-1, TRBJ2-1)
CASSQDPGNYNEQFF

SEQ ID NO: 191797 - protein, 14 aa, Homo sapiens
  CDR3 for alpha chain variable domain of TCR clone 95899 (TRAV8-3, TRAJ35)
CAVVPQGFGNVLHC

SEQ ID NO: 191798 - protein, 14 aa, Homo sapiens
  CDR3 for beta chain variable domain of TCR clone 95899 (TRBV12-5, TRBJ2-5)
CASGSRTHQETQYF

SEQ ID NO: 191799 - protein, 11 aa, Homo sapiens
  CDR3 for alpha chain variable domain of TCR clone 95900 (TRAV1-1, TRAJ23)
CAVREGGKLIF

SEQ ID NO: 191800 - protein, 20 aa, Homo sapiens
  CDR3 for beta chain variable domain of TCR clone 95900 (TRBV7-8, TRBJ2-2)
CASSHLFPGPTIHITGELFF

SEQ ID NO: 191801 - protein, 18 aa, Homo sapiens
  CDR3 for alpha chain variable domain of TCR clone 95901 (TRAV26-1, TRAJ23)
CIVRVGLEVWNQGGKLIF

SEQ ID NO: 191802 - protein, 16 aa, Homo sapiens
  CDR3 for beta chain variable domain of TCR clone 95901 (TRBV12-4, TRBJ2-5)
CASSFFVSGRQETQYF

SEQ ID NO: 191803 - protein, 15 aa, Homo sapiens
  CDR3 for alpha chain variable domain of TCR clone 95902 (TRAV3, TRAJ5)
CAVRDRKTGRRALTF

SEQ ID NO: 191804 - protein, 15 aa, Homo sapiens
  CDR3 for beta chain variable domain of TCR clone 95902 (TRBV2, TRBJ2-1)
CASSELAGSYNEQFF

SEQ ID NO: 191805 - protein, 14 aa, Homo sapiens
  CDR3 for alpha chain variable domain of TCR clone 95903 (TRAV16, TRAJ33)
CALPAMDSNYQLIW

SEQ ID NO: 191806 - protein, 12 aa, Homo sapiens
  CDR3 for beta chain variable domain of TCR clone 95903 (TRBV28, TRBJ2-6)
CAIQAGANVLTF

SEQ ID NO: 191807 - protein, 14 aa, Homo sapiens
  CDR3 for alpha chain variable domain of TCR clone 95904 (TRAV17, TRAJ16)
CATADFSDGQKLLF

SEQ ID NO: 191808 - protein, 17 aa, Homo sapiens
  CDR3 for beta chain variable domain of TCR clone 95904 (TRBV24-1, TRBJ2-1)
CATSDVSTSGTYNEQFF

SEQ ID NO: 191809 - protein, 14 aa, Homo sapiens
  CDR3 for alpha chain variable domain of TCR clone 95905 (TRAV26-1, TRAJ21)
CIVRPPYNFNEFYF

SEQ ID NO: 191810 - protein, 14 aa, Homo sapiens
  CDR3 for beta chain variable domain of TCR clone 95905 (TRBV11-3, TRBJ2-1)
CASSATTSGSIQFF

SEQ ID NO: 191811 - protein, 12 aa, Homo sapiens
  CDR3 for alpha chain variable domain of TCR clone 95906 (TRAV21, TRAJ29)
CAVTSGNTPLVF

SEQ ID NO: 191812 - protein, 17 aa, Homo sapiens
  CDR3 for beta chain variable domain of TCR clone 95906 (TRBV13, TRBJ2-3)
CASSLSRVAGGRNTQYF

SEQ ID NO: 191813 - protein, 20 aa, Homo sapiens
  CDR3 for alpha chain variable domain of TCR clone 95907 (TRAV1-1, TRAJ4)
CLLLLRCEGFLSGGYNKLIF

SEQ ID NO: 191814 - protein, 12 aa, Homo sapiens
  CDR3 for beta chain variable domain of TCR clone 95907 (TRBV11-2, TRBJ2-2)
CASSLPTGELFF

SEQ ID NO: 191815 - protein, 15 aa, Homo sapiens
  CDR3 for alpha chain variable domain of TCR clone 95908 (TRAV26-1, TRAJ42)
CIVRPIMEEAKEISS

SEQ ID NO: 191816 - protein, 16 aa, Homo sapiens
  CDR3 for beta chain variable domain of TCR clone 95908 (TRBV7-3, TRBJ2-2)
CASSLKRGTLSGELFF

SEQ ID NO: 191817 - protein, 22 aa, Homo sapiens
  CDR3 for alpha chain variable domain of TCR clone 95909 (TRAV13-2, )
CAEILSIPGIQNPDPAVYQLRD

SEQ ID NO: 191818 - protein, 11 aa, Homo sapiens
  CDR3 for beta chain variable domain of TCR clone 95909 (TRBV20-1, TRBJ2-7)
CSARLSYEQYF

SEQ ID NO: 191819 - protein, 15 aa, Homo sapiens
  CDR3 for alpha chain variable domain of TCR clone 95910 (TRAV4, TRAJ39)
CLVGPNNNAGNMLTF

SEQ ID NO: 191820 - protein, 14 aa, Homo sapiens
  CDR3 for beta chain variable domain of TCR clone 95910 (TRBV19, TRBJ2-7)
CASSFRDTFTGMYF

SEQ ID NO: 191821 - protein, 12 aa, Homo sapiens
  CDR3 for alpha chain variable domain of TCR clone 95911 (TRAV1-2, TRAJ26)
CAVRYYGQNFVF

SEQ ID NO: 191822 - protein, 14 aa, Homo sapiens
  CDR3 for beta chain variable domain of TCR clone 95911 (TRBV7-8, TRBJ2-3)
CASSFKSSTDTQYF

SEQ ID NO: 191823 - protein, 14 aa, Homo sapiens
  CDR3 for alpha chain variable domain of TCR clone 95912 (TRAV12-2, TRAJ40)
CAVKIPSGTYKYIF

SEQ ID NO: 191824 - protein, 14 aa, Homo sapiens
  CDR3 for beta chain variable domain of TCR clone 95912 (TRBV7-9, TRBJ2-2)
CASSLVQDTGELFF

SEQ ID NO: 191825 - protein, 18 aa, Homo sapiens
  CDR3 for alpha chain variable domain of TCR clone 95913 (TRAV26-2, TRAJ54)
CILRDVEVGIQVAQKLVF

SEQ ID NO: 191826 - protein, 16 aa, Homo sapiens
  CDR3 for beta chain variable domain of TCR clone 95913 (TRBV6-1, TRBJ2-5)
CASSETLDRGAETQYF

SEQ ID NO: 191827 - protein, 13 aa, Homo sapiens
  CDR3 for alpha chain variable domain of TCR clone 95914 (TRAV21, TRAJ11)
CSVPNSGYSTLTF

SEQ ID NO: 191828 - protein, 13 aa, Homo sapiens
  CDR3 for beta chain variable domain of TCR clone 95914 (TRBV3-1, TRBJ2-7)
CASSLRDGYEQYF

SEQ ID NO: 191829 - protein, 16 aa, Homo sapiens
  CDR3 for alpha chain variable domain of TCR clone 95915 (TRAV2, TRAJ4)
CAVEDRFSGGDNKLIF

SEQ ID NO: 191830 - protein, 13 aa, Homo sapiens
  CDR3 for beta chain variable domain of TCR clone 95915 (TRBV7-7, TRBJ2-5)
CASSRSGQETQYF

SEQ ID NO: 191831 - protein, 11 aa, Homo sapiens
  CDR3 for alpha chain variable domain of TCR clone 95916 (TRAV21, TRAJ11)
CAVNGYSTFTF

SEQ ID NO: 191832 - protein, 13 aa, Homo sapiens
  CDR3 for beta chain variable domain of TCR clone 95916 (TRBV19, TRBJ2-7)
CASSIDRTYEQYF

SEQ ID NO: 191833 - protein, 13 aa, Homo sapiens
  CDR3 for alpha chain variable domain of TCR clone 95917 (TRAV26-1, TRAJ48)
CIVRVVGDDKLTF

SEQ ID NO: 191834 - protein, 17 aa, Homo sapiens
  CDR3 for beta chain variable domain of TCR clone 95917 (TRBV7-3, TRBJ2-2)
CASSLSGTSGGTGELFF

SEQ ID NO: 191835 - protein, 13 aa, Homo sapiens
  CDR3 for alpha chain variable domain of TCR clone 95918 (TRAV13-2, TRAJ16)
CADARTDGQKLLF

SEQ ID NO: 191836 - protein, 19 aa, Homo sapiens
  CDR3 for beta chain variable domain of TCR clone 95918 (TRBV5-5, TRBJ2-5)
CASGIGGGWGDPVLRARHA

SEQ ID NO: 191837 - protein, 12 aa, Homo sapiens
  CDR3 for alpha chain variable domain of TCR clone 95919 (TRAV29/DV5, TRAJ34)
CAARHNTDKLIL

SEQ ID NO: 191838 - protein, 15 aa, Homo sapiens
  CDR3 for beta chain variable domain of TCR clone 95919 (TRBV19, TRBJ2-7)
CASSPAGSGEALRYF

SEQ ID NO: 191839 - protein, 14 aa, Homo sapiens
  CDR3 for alpha chain variable domain of TCR clone 95920 (TRAV1-2, TRAJ16)
CAVNRFSDGHKLLF

SEQ ID NO: 191840 - protein, 14 aa, Homo sapiens
  CDR3 for beta chain variable domain of TCR clone 95920 (TRBV12-4, TRBJ1-1)
CASSLGTGGTEAFF

SEQ ID NO: 191841 - protein, 11 aa, Homo sapiens
  CDR3 for alpha chain variable domain of TCR clone 95921 (TRAV20, TRAJ34)
CARDNTDKLIF

SEQ ID NO: 191842 - protein, 15 aa, Homo sapiens
  CDR3 for beta chain variable domain of TCR clone 95921 (TRBV2, TRBJ2-1)
CASSVTSEGTDEQFF

SEQ ID NO: 191843 - protein, 15 aa, Homo sapiens
  CDR3 for alpha chain variable domain of TCR clone 95922 (TRAV12-1, TRAJ44)
CVVFVNTGTASKLTF

SEQ ID NO: 191844 - protein, 11 aa, Homo sapiens
  CDR3 for beta chain variable domain of TCR clone 95922 (TRBV19, TRBJ1-1)
CASSIGSEAFF

SEQ ID NO: 191845 - protein, 14 aa, Homo sapiens
  CDR3 for alpha chain variable domain of TCR clone 95923 (TRAV12-3, TRAJ10)
SHLPLTGGGNKLTF

SEQ ID NO: 191846 - protein, 15 aa, Homo sapiens
  CDR3 for beta chain variable domain of TCR clone 95923 (TRBV7-2, TRBJ2-7)
CASSLLGTGSYEQYF

SEQ ID NO: 191847 - protein, 14 aa, Homo sapiens
  CDR3 for alpha chain variable domain of TCR clone 95924 (TRAV13-1, TRAJ35)
CAASKGGFGSVLHC

SEQ ID NO: 191848 - protein, 13 aa, Homo sapiens
  CDR3 for beta chain variable domain of TCR clone 95924 (TRBV7-3, TRBJ1-1)
CASSQDWGAEALF

SEQ ID NO: 191849 - protein, 14 aa, Homo sapiens
  CDR3 for alpha chain variable domain of TCR clone 95925 (TRAV13-1, TRAJ39)
CAASYNNAGNMLTF

SEQ ID NO: 191850 - protein, 15 aa, Homo sapiens
  CDR3 for beta chain variable domain of TCR clone 95925 (TRBV7-9, TRBJ2-7)
CASSPGGGLTYEQYF

SEQ ID NO: 191851 - protein, 15 aa, Homo sapiens
  CDR3 for alpha chain variable domain of TCR clone 95926 (TRAV3, TRAJ22)
CAVRDRGGSARQLTF

SEQ ID NO: 191852 - protein, 17 aa, Homo sapiens
  CDR3 for beta chain variable domain of TCR clone 95926 (TRBV4-1, TRBJ1-4)
CASSQEGPRGVEEKLFF

SEQ ID NO: 191853 - protein, 14 aa, Homo sapiens
  CDR3 for alpha chain variable domain of TCR clone 95927 (TRAV29/DV5, TRAJ28)
CAATEGAGSYQLTF

SEQ ID NO: 191854 - protein, 15 aa, Homo sapiens
  CDR3 for beta chain variable domain of TCR clone 95927 (TRBV7-8, TRBJ2-1)
CASSLHGGPYNGQFF

SEQ ID NO: 191855 - protein, 14 aa, Homo sapiens
  CDR3 for alpha chain variable domain of TCR clone 95928 (TRAV9-2, TRAJ39)
CALYIYNAGNMLTF

SEQ ID NO: 191856 - protein, 15 aa, Homo sapiens
  CDR3 for beta chain variable domain of TCR clone 95928 (TRBV28, TRBJ1-3)
CASSMGWASGSTIYF

SEQ ID NO: 191857 - protein, 14 aa, Homo sapiens
  CDR3 for alpha chain variable domain of TCR clone 95929 (TRAV1-2, TRAJ16)
CAVNRFSDGQKLLF

SEQ ID NO: 191858 - protein, 17 aa, Homo sapiens
  CDR3 for beta chain variable domain of TCR clone 95929 (TRBV13, TRBJ2-3)
CASSLPRVAGGRNTQYF

SEQ ID NO: 191859 - protein, 13 aa, Homo sapiens
  CDR3 for alpha chain variable domain of TCR clone 95930 (TRAV8-3, TRAJ48)
CAVVAFGNEKLTF

SEQ ID NO: 191860 - protein, 15 aa, Homo sapiens
  CDR3 for beta chain variable domain of TCR clone 95930 (TRBV11-2, TRBJ2-1)
CASSSPSTRYNEQFF

SEQ ID NO: 191861 - protein, 18 aa, Homo sapiens
  CDR3 for alpha chain variable domain of TCR clone 95931 (TRAV21, TRAJ52)
CAVRPSPAGGTSYGKLTF

SEQ ID NO: 191862 - protein, 15 aa, Homo sapiens
  CDR3 for beta chain variable domain of TCR clone 95931 (TRBV7-9, TRBJ2-7)
CAGSSSGLAVYEQYF

SEQ ID NO: 191863 - protein, 15 aa, Homo sapiens
  CDR3 for alpha chain variable domain of TCR clone 95932 (TRAV12-3, TRAJ49)
CAMAVTPNTGNQFYF

SEQ ID NO: 191864 - protein, 14 aa, Homo sapiens
  CDR3 for beta chain variable domain of TCR clone 95932 (TRBV7-2, TRBJ1-1)
CASSFLTGTAEAFF

SEQ ID NO: 191865 - protein, 13 aa, Homo sapiens
  CDR3 for alpha chain variable domain of TCR clone 95933 (TRAV1-2, TRAJ9)
CAALNTGGFKTIF

SEQ ID NO: 191866 - protein, 13 aa, Homo sapiens
  CDR3 for beta chain variable domain of TCR clone 95933 (TRBV7-9, TRBJ1-2)
CASSLKQNYGYAF

SEQ ID NO: 191867 - protein, 14 aa, Homo sapiens
  CDR3 for alpha chain variable domain of TCR clone 95934 (TRAV12-3, TRAJ42)
CAMNYGGSQGNLIF

SEQ ID NO: 191868 - protein, 15 aa, Homo sapiens
  CDR3 for beta chain variable domain of TCR clone 95934 (TRBV5-7, TRBJ1-5)
CASSYGKWWDQPQHF

SEQ ID NO: 191869 - protein, 11 aa, Homo sapiens
  CDR3 for alpha chain variable domain of TCR clone 95935 (TRAV21, TRAJ4)
HVSGVYNKLIF

SEQ ID NO: 191870 - protein, 13 aa, Homo sapiens
  CDR3 for beta chain variable domain of TCR clone 95935 (TRBV7-3, TRBJ2-5)
CASSLTAGETQYF

SEQ ID NO: 191871 - protein, 13 aa, Homo sapiens
  CDR3 for alpha chain variable domain of TCR clone 95936 (TRAV27, TRAJ6)
CAGGTRGSYIPTF

SEQ ID NO: 191872 - protein, 15 aa, Homo sapiens
  CDR3 for beta chain variable domain of TCR clone 95936 (TRBV5-5, TRBJ2-7)
CASSLAAPLSYEQYF

SEQ ID NO: 191873 - protein, 16 aa, Homo sapiens
  CDR3 for alpha chain variable domain of TCR clone 95937 (TRAV4, TRAJ22)
CLVGDLYSGSARQLTF

SEQ ID NO: 191874 - protein, 16 aa, Homo sapiens
  CDR3 for beta chain variable domain of TCR clone 95937 (TRBV7-9, TRBJ2-1)
CASSDVAGGSYNELFF

SEQ ID NO: 191875 - protein, 14 aa, Homo sapiens
  CDR3 for alpha chain variable domain of TCR clone 95938 (TRAV1-1, TRAJ27)
CAVIYNTNAGKSTL

SEQ ID NO: 191876 - protein, 13 aa, Homo sapiens
  CDR3 for beta chain variable domain of TCR clone 95938 (TRBV7-9, TRBJ1-2)
CASSLKQNYGYTF

SEQ ID NO: 191877 - protein, 14 aa, Homo sapiens
  CDR3 for alpha chain variable domain of TCR clone 95939 (TRAV8-1, TRAJ5)
CAVRTDTGRRAITF

SEQ ID NO: 191878 - protein, 14 aa, Homo sapiens
  CDR3 for beta chain variable domain of TCR clone 95939 (TRBV5-5, TRBJ1-2)
CASSLDPYNYGYTF

SEQ ID NO: 191879 - protein, 12 aa, Homo sapiens
  CDR3 for alpha chain variable domain of TCR clone 95940 (TRAV17, TRAJ12)
CATLRSSYKLIF

SEQ ID NO: 191880 - protein, 15 aa, Homo sapiens
  CDR3 for beta chain variable domain of TCR clone 95940 (TRBV19, TRBJ2-7)
CASSTGLAGTYEQYF

SEQ ID NO: 191881 - protein, 10 aa, Homo sapiens
  CDR3 for alpha chain variable domain of TCR clone 95941 (TRAV36/DV7, TRAJ49)
CAFTGNQFYF

SEQ ID NO: 191882 - protein, 13 aa, Homo sapiens
  CDR3 for beta chain variable domain of TCR clone 95941 (TRBV4-1, TRBJ2-7)
CASSQGQAYEQYF

SEQ ID NO: 191883 - protein, 11 aa, Homo sapiens
  CDR3 for alpha chain variable domain of TCR clone 95942 (TRAV21, TRAJ34)
CAHYNTDKLIF

SEQ ID NO: 191884 - protein, 11 aa, Homo sapiens
  CDR3 for beta chain variable domain of TCR clone 95942 (TRBV29-1, TRBJ2-5)
CSEDRTGTQSF

SEQ ID NO: 191885 - protein, 13 aa, Homo sapiens
  CDR3 for alpha chain variable domain of TCR clone 95943 (TRAV27, TRAJ29)
CAGAHSGNTPLVF

SEQ ID NO: 191886 - protein, 14 aa, Homo sapiens
  CDR3 for beta chain variable domain of TCR clone 95943 (TRBV7-9, TRBJ2-7)
CASSIGQGAGEHYF

SEQ ID NO: 191887 - protein, 13 aa, Homo sapiens
  CDR3 for alpha chain variable domain of TCR clone 95944 (TRAV13-2, TRAJ13)
CAERPGGYQKVTF

SEQ ID NO: 191888 - protein, 16 aa, Homo sapiens
  CDR3 for beta chain variable domain of TCR clone 95944 (TRBV7-7, TRBJ2-1)
CASSLASGTSYNEQFF

SEQ ID NO: 191889 - protein, 14 aa, Homo sapiens
  CDR3 for alpha chain variable domain of TCR clone 95945 (TRAV23/DV6, TRAJ24)
CAASLSDSWGKLQF

SEQ ID NO: 191890 - protein, 16 aa, Homo sapiens
  CDR3 for beta chain variable domain of TCR clone 95945 (TRBV7-9, TRBJ2-6)
CASSLKGPLRANGLTF

SEQ ID NO: 191891 - protein, 12 aa, Homo sapiens
  CDR3 for alpha chain variable domain of TCR clone 95946 (TRAV21, TRAJ13)
PGPSGGYQKVTF

SEQ ID NO: 191892 - protein, 16 aa, Homo sapiens
  CDR3 for beta chain variable domain of TCR clone 95946 (TRBV7-3, TRBJ2-2)
CASSLKRGTLSGELFF

SEQ ID NO: 191893 - protein, 14 aa, Homo sapiens
  CDR3 for alpha chain variable domain of TCR clone 95947 (TRAV12-2, TRAJ13)
CAVKKTGGYQKVTF

SEQ ID NO: 191894 - protein, 15 aa, Homo sapiens
  CDR3 for beta chain variable domain of TCR clone 95947 (TRBV19, TRBJ2-7)
CASRPTPGLSIEQYF

SEQ ID NO: 191895 - protein, 15 aa, Homo sapiens
  CDR3 for alpha chain variable domain of TCR clone 95948 (TRAV4, TRAJ12)
CLVGDLMDSSYKLIF

SEQ ID NO: 191896 - protein, 14 aa, Homo sapiens
  CDR3 for beta chain variable domain of TCR clone 95948 (TRBV7-2, TRBJ1-1)
CARSHRQGRTEAFF

SEQ ID NO: 191897 - protein, 15 aa, Homo sapiens
  CDR3 for alpha chain variable domain of TCR clone 95949 (TRAV2, TRAJ9)
CAVEDRDTGGFKTIF

SEQ ID NO: 191898 - protein, 16 aa, Homo sapiens
  CDR3 for beta chain variable domain of TCR clone 95949 (TRBV24-1, TRBJ2-3)
CATSDPGTGATDTQYF

SEQ ID NO: 191899 - protein, 15 aa, Homo sapiens
  CDR3 for alpha chain variable domain of TCR clone 95950 (TRAV21, TRAJ17)
CAVDEQKAAGNKLTF

SEQ ID NO: 191900 - protein, 19 aa, Homo sapiens
  CDR3 for beta chain variable domain of TCR clone 95950 (TRBV25-1, TRBJ2-2)
CAILVYRVDRGRKTGELFF

SEQ ID NO: 191901 - protein, 14 aa, Homo sapiens
  CDR3 for alpha chain variable domain of TCR clone 95951 (TRAV38-1, TRAJ43)
CAFMKHNNNNDMRF

SEQ ID NO: 191902 - protein, 17 aa, Homo sapiens
  CDR3 for beta chain variable domain of TCR clone 95951 (TRBV7-7, TRBJ1-4)
CASSLVGHGASNEKLFF

SEQ ID NO: 191903 - protein, 15 aa, Homo sapiens
  CDR3 for alpha chain variable domain of TCR clone 95952 (TRAV21, TRAJ53)
CATLNSGGSNYKLTF

SEQ ID NO: 191904 - protein, 14 aa, Homo sapiens
  CDR3 for beta chain variable domain of TCR clone 95952 (TRBV7-2, TRBJ2-7)
CASRSHGAAYEQYF

SEQ ID NO: 191905 - protein, 16 aa, Homo sapiens
  CDR3 for alpha chain variable domain of TCR clone 95953 (TRAV3, TRAJ3)
CAVRDRAKSSASKIIF

SEQ ID NO: 191906 - protein, 13 aa, Homo sapiens
  CDR3 for beta chain variable domain of TCR clone 95953 (TRBV10-3, TRBJ2-7)
CASELAVNYEQYF

SEQ ID NO: 191907 - protein, 14 aa, Homo sapiens
  CDR3 for alpha chain variable domain of TCR clone 95954 (TRAV12-3, TRAJ10)
SHLPLTGGGNKLTF

SEQ ID NO: 191908 - protein, 15 aa, Homo sapiens
  CDR3 for beta chain variable domain of TCR clone 95954 (TRBV25-1, TRBJ2-4)
CASSETESAKNSQYF

SEQ ID NO: 191909 - protein, 12 aa, Homo sapiens
  CDR3 for alpha chain variable domain of TCR clone 95955 (TRAV8-3, TRAJ41)
CAVALSGYALTF

SEQ ID NO: 191910 - protein, 17 aa, Homo sapiens
  CDR3 for beta chain variable domain of TCR clone 95955 (TRBV7-3, TRBJ2-2)
CASSLSGTSGGTGELFF

SEQ ID NO: 191911 - protein, 13 aa, Homo sapiens
  CDR3 for alpha chain variable domain of TCR clone 95956 (TRAV21, TRAJ27)
CAARPGNAGKSTF

SEQ ID NO: 191912 - protein, 15 aa, Homo sapiens
  CDR3 for beta chain variable domain of TCR clone 95956 (TRBV11-3, TRBJ2-7)
CASSPGLASSYEQYF

SEQ ID NO: 191913 - protein, 13 aa, Homo sapiens
  CDR3 for alpha chain variable domain of TCR clone 95957 (TRAV20, TRAJ21)
CAVEGYNFNKFYF

SEQ ID NO: 191914 - protein, 14 aa, Homo sapiens
  CDR3 for beta chain variable domain of TCR clone 95957 (TRBV3-1, TRBJ2-5)
CTSSQGPDQETQYF

SEQ ID NO: 191915 - protein, 14 aa, Homo sapiens
  CDR3 for alpha chain variable domain of TCR clone 95958 (TRAV26-1, TRAJ38)
CIADNAGNNRKLIG

SEQ ID NO: 191916 - protein, 15 aa, Homo sapiens
  CDR3 for beta chain variable domain of TCR clone 95958 (TRBV27, TRBJ2-1)
CASSNGGGSSNEQFF

SEQ ID NO: 191917 - protein, 11 aa, Homo sapiens
  CDR3 for alpha chain variable domain of TCR clone 95959 (TRAV21, TRAJ34)
CAHYNTDKLIF

SEQ ID NO: 191918 - protein, 16 aa, Homo sapiens
  CDR3 for beta chain variable domain of TCR clone 95959 (TRBV13, TRBJ2-2)
CASSPRTGEHTGELFF

SEQ ID NO: 191919 - protein, 16 aa, Homo sapiens
  CDR3 for alpha chain variable domain of TCR clone 95960 (TRAV4, TRAJ22)
CLVGDLYSGSARQLTF

SEQ ID NO: 191920 - protein, 14 aa, Homo sapiens
  CDR3 for beta chain variable domain of TCR clone 95960 (TRBV12-5, TRBJ2-5)
CASGSRTHQETQYF

SEQ ID NO: 191921 - protein, 12 aa, Homo sapiens
  CDR3 for alpha chain variable domain of TCR clone 95961 (TRAV27, TRAJ36)
CAGMTGANNLFF

SEQ ID NO: 191922 - protein, 14 aa, Homo sapiens
  CDR3 for beta chain variable domain of TCR clone 95961 (TRBV12-4, TRBJ2-3)
CASSLVPSIDTQYF

SEQ ID NO: 191923 - protein, 14 aa, Homo sapiens
  CDR3 for alpha chain variable domain of TCR clone 95962 (TRAV8-4, TRAJ48)
CAVSETFGNEKLTF

SEQ ID NO: 191924 - protein, 14 aa, Homo sapiens
  CDR3 for beta chain variable domain of TCR clone 95962 (TRBV13, TRBJ2-7)
CASSLKGSSYEQYF

SEQ ID NO: 191925 - protein, 14 aa, Homo sapiens
  CDR3 for alpha chain variable domain of TCR clone 95963 (TRAV12-3, TRAJ13)
CAMKNSGGYQKVTF

SEQ ID NO: 191926 - protein, 15 aa, Homo sapiens
  CDR3 for beta chain variable domain of TCR clone 95963 (TRBV6-3, TRBJ2-7)
CASSSPGTVFYEQYF

SEQ ID NO: 191927 - protein, 21 aa, Homo sapiens
  CDR3 for alpha chain variable domain of TCR clone 95964 (TRAV8-3, TRAJ10)
CAVGHTHGRRKQTHVWDRHSA

SEQ ID NO: 191928 - protein, 10 aa, Homo sapiens
  CDR3 for beta chain variable domain of TCR clone 95964 (TRBV20-1, TRBJ2-5)
CSARFETQYF

SEQ ID NO: 191929 - protein, 15 aa, Homo sapiens
  CDR3 for alpha chain variable domain of TCR clone 95965 (TRAV2, TRAJ29)
CAVDLARSGNTPLVF

SEQ ID NO: 191930 - protein, 15 aa, Homo sapiens
  CDR3 for beta chain variable domain of TCR clone 95965 (TRBV28, TRBJ2-7)
CASSPGGRGFYEQYF

SEQ ID NO: 191931 - protein, 15 aa, Homo sapiens
  CDR3 for alpha chain variable domain of TCR clone 95966 (TRAV38-1, TRAJ37)
CVFIFGSGNTGKLIF

SEQ ID NO: 191932 - protein, 12 aa, Homo sapiens
  CDR3 for beta chain variable domain of TCR clone 95966 (TRBV7-9, TRBJ2-7)
CASSLEGYEQYF

SEQ ID NO: 191933 - protein, 14 aa, Homo sapiens
  CDR3 for alpha chain variable domain of TCR clone 95967 (TRAV13-1, TRAJ9)
CAASALTGGFKTIF

SEQ ID NO: 191934 - protein, 14 aa, Homo sapiens
  CDR3 for beta chain variable domain of TCR clone 95967 (TRBV25-1, TRBJ1-1)
CASTHLGGNTEAFF

SEQ ID NO: 191935 - protein, 17 aa, Homo sapiens
  CDR3 for alpha chain variable domain of TCR clone 95968 (TRAV26-1, TRAJ53)
CIVRVDDSRGSNYKLTF

SEQ ID NO: 191936 - protein, 15 aa, Homo sapiens
  CDR3 for beta chain variable domain of TCR clone 95968 (TRBV20-1, TRBJ2-7)
CSARVPAAYFYEQYF

SEQ ID NO: 191937 - protein, 11 aa, Homo sapiens
  CDR3 for alpha chain variable domain of TCR clone 95969 (TRAV2, TRAJ13)
CASVGYQKVTF

SEQ ID NO: 191938 - protein, 15 aa, Homo sapiens
  CDR3 for beta chain variable domain of TCR clone 95969 (TRBV7-9, TRBJ1-6)
CASSSPGRGNSPLHF

SEQ ID NO: 191939 - protein, 16 aa, Homo sapiens
  CDR3 for alpha chain variable domain of TCR clone 95970 (TRAV26-1, TRAJ33)
CIVPFWGEDSNYQLIW

SEQ ID NO: 191940 - protein, 14 aa, Homo sapiens
  CDR3 for beta chain variable domain of TCR clone 95970 (TRBV6-3, TRBJ1-1)
CASSYHSKNTEAFF

SEQ ID NO: 191941 - protein, 12 aa, Homo sapiens
  CDR3 for alpha chain variable domain of TCR clone 95971 (TRAV27, TRAJ35)
CAGADFGNVLHC

SEQ ID NO: 191942 - protein, 16 aa, Homo sapiens
  CDR3 for beta chain variable domain of TCR clone 95971 (TRBV6-1, TRBJ2-1)
CASILRQGSSYNDQFF

SEQ ID NO: 191943 - protein, 14 aa, Homo sapiens
  CDR3 for alpha chain variable domain of TCR clone 95972 (TRAV1-1, TRAJ30)
CAVRSLNRDDKIIF

SEQ ID NO: 191944 - protein, 15 aa, Homo sapiens
  CDR3 for beta chain variable domain of TCR clone 95972 (TRBV6-5, TRBJ2-1)
CASSYDAGAGNEQFF

SEQ ID NO: 191945 - protein, 14 aa, Homo sapiens
  CDR3 for alpha chain variable domain of TCR clone 95973 (TRAV12-2, TRAJ24)
CAVTPADSWGKLQF

SEQ ID NO: 191946 - protein, 12 aa, Homo sapiens
  CDR3 for beta chain variable domain of TCR clone 95973 (TRBV2, TRBJ2-1)
CAYGPPGNEQFF

SEQ ID NO: 191947 - protein, 14 aa, Homo sapiens
  CDR3 for alpha chain variable domain of TCR clone 95974 (TRAV12-3, TRAJ23)
CAMKMGNQGGKLIL

SEQ ID NO: 191948 - protein, 16 aa, Homo sapiens
  CDR3 for beta chain variable domain of TCR clone 95974 (TRBV2, TRBJ1-1)
CASSPPNRGMNTEAFF

SEQ ID NO: 191949 - protein, 14 aa, Homo sapiens
  CDR3 for alpha chain variable domain of TCR clone 95975 (TRAV1-2, TRAJ8)
CAVREDTGFQKLVF

SEQ ID NO: 191950 - protein, 14 aa, Homo sapiens
  CDR3 for beta chain variable domain of TCR clone 95975 (TRBV7-8, TRBJ1-3)
CASSSDRVRNTIYF

SEQ ID NO: 191951 - protein, 14 aa, Homo sapiens
  CDR3 for alpha chain variable domain of TCR clone 95976 (TRAV26-1, TRAJ54)
CIVRRTQGAQKLVF

SEQ ID NO: 191952 - protein, 19 aa, Homo sapiens
  CDR3 for beta chain variable domain of TCR clone 95976 (TRBV2, TRBJ2-7)
CASSDDETSGRANDYEQYF

SEQ ID NO: 191953 - protein, 13 aa, Homo sapiens
  CDR3 for alpha chain variable domain of TCR clone 95977 (TRAV35, TRAJ42)
CAGFPGSQGNLIF

SEQ ID NO: 191954 - protein, 12 aa, Homo sapiens
  CDR3 for beta chain variable domain of TCR clone 95977 (TRBV7-8, TRBJ2-7)
CAGSLGDREQYF

SEQ ID NO: 191955 - protein, 12 aa, Homo sapiens
  CDR3 for alpha chain variable domain of TCR clone 95978 (TRAV12-1, TRAJ31)
CVVNRNNARLMF

SEQ ID NO: 191956 - protein, 15 aa, Homo sapiens
  CDR3 for beta chain variable domain of TCR clone 95978 (TRBV11-3, TRBJ2-3)
CASLKDGREGDTQYF

SEQ ID NO: 191957 - protein, 17 aa, Homo sapiens
  CDR3 for alpha chain variable domain of TCR clone 95979 (TRAV3, TRAJ38)
CAVRDCLNDGNNRKLIW

SEQ ID NO: 191958 - protein, 13 aa, Homo sapiens
  CDR3 for beta chain variable domain of TCR clone 95979 (TRBV23-1, TRBJ1-4)
CASRGKFNEKLFF

SEQ ID NO: 191959 - protein, 13 aa, Homo sapiens
  CDR3 for alpha chain variable domain of TCR clone 95980 (TRAV13-2, TRAJ48)
CAEMDFGNEKLTF

SEQ ID NO: 191960 - protein, 14 aa, Homo sapiens
  CDR3 for beta chain variable domain of TCR clone 95980 (TRBV19, TRBJ2-7)
CASSRGQGAIEQYF

SEQ ID NO: 191961 - protein, 12 aa, Homo sapiens
  CDR3 for alpha chain variable domain of TCR clone 95981 (TRAV12-2, TRAJ10)
WGVTGGGNKLTF

SEQ ID NO: 191962 - protein, 16 aa, Homo sapiens
  CDR3 for beta chain variable domain of TCR clone 95981 (TRBV6-4, TRBJ1-2)
CASSEAVGDPNYGYTC

SEQ ID NO: 191963 - protein, 14 aa, Homo sapiens
  CDR3 for alpha chain variable domain of TCR clone 95982 (TRAV26-1, TRAJ21)
CIVRPPYNFNKFYF

SEQ ID NO: 191964 - protein, 16 aa, Homo sapiens
  CDR3 for beta chain variable domain of TCR clone 95982 (TRBV7-3, TRBJ2-2)
CASSLKRGTLSGELFF

SEQ ID NO: 191965 - protein, 13 aa, Homo sapiens
  CDR3 for alpha chain variable domain of TCR clone 95983 (TRAV21, TRAJ27)
CAARPGNAGKSTF

SEQ ID NO: 191966 - protein, 17 aa, Homo sapiens
  CDR3 for beta chain variable domain of TCR clone 95983 (TRBV19, TRBJ2-6)
CASSTGQVFSGANVLTF

SEQ ID NO: 191967 - protein, 11 aa, Homo sapiens
  CDR3 for alpha chain variable domain of TCR clone 95984 (TRAV2, TRAJ13)
CASGGYQKVTF

SEQ ID NO: 191968 - protein, 15 aa, Homo sapiens
  CDR3 for beta chain variable domain of TCR clone 95984 (TRBV5-4, TRBJ1-1)
CASSSLGWANTEAFF

SEQ ID NO: 191969 - protein, 14 aa, Homo sapiens
  CDR3 for alpha chain variable domain of TCR clone 95985 (TRAV12-1, TRAJ30)
CVVNRGGRDDKIIF

SEQ ID NO: 191970 - protein, 13 aa, Homo sapiens
  CDR3 for beta chain variable domain of TCR clone 95985 (TRBV12-5, TRBJ2-1)
CASGLGRGNEQFF

SEQ ID NO: 191971 - protein, 14 aa, Homo sapiens
  CDR3 for alpha chain variable domain of TCR clone 95986 (TRAV26-1, TRAJ17)
CIVRVEAAGNKLTF

SEQ ID NO: 191972 - protein, 19 aa, Homo sapiens
  CDR3 for beta chain variable domain of TCR clone 95986 (TRBV25-1, TRBJ2-2)
CAILVYRVDRGRKTGELFF

SEQ ID NO: 191973 - protein, 14 aa, Homo sapiens
  CDR3 for alpha chain variable domain of TCR clone 95987 (TRAV17, TRAJ12)
CATDEKDSSYTLIF

SEQ ID NO: 191974 - protein, 16 aa, Homo sapiens
  CDR3 for beta chain variable domain of TCR clone 95987 (TRBV11-2, TRBJ2-1)
CASSPRLAGVYNEQFF

SEQ ID NO: 191975 - protein, 15 aa, Homo sapiens
  CDR3 for alpha chain variable domain of TCR clone 95988 (TRAV20, TRAJ28)
CAVQYSWAGSYQLTF

SEQ ID NO: 191976 - protein, 11 aa, Homo sapiens
  CDR3 for beta chain variable domain of TCR clone 95988 (TRBV7-8, TRBJ2-7)
CASSLSLEQYF

SEQ ID NO: 191977 - protein, 13 aa, Homo sapiens
  CDR3 for alpha chain variable domain of TCR clone 95989 (TRAV23/DV6, TRAJ12)
CAPRVDRSYKLIF

SEQ ID NO: 191978 - protein, 12 aa, Homo sapiens
  CDR3 for beta chain variable domain of TCR clone 95989 (TRBV7-6, TRBJ2-5)
CASSLSQETQYF

SEQ ID NO: 191979 - protein, 14 aa, Homo sapiens
  CDR3 for alpha chain variable domain of TCR clone 95990 (TRAV1-1, TRAJ28)
CAAPSGAGSYQLTF

SEQ ID NO: 191980 - protein, 13 aa, Homo sapiens
  CDR3 for beta chain variable domain of TCR clone 95990 (TRBV7-3, TRBJ1-1)
CASSQDWGAEAFF

SEQ ID NO: 191981 - protein, 16 aa, Homo sapiens
  CDR3 for alpha chain variable domain of TCR clone 95991 (TRAV3, TRAJ10)
CAVRGMNAGGGNKLTF

SEQ ID NO: 191982 - protein, 16 aa, Homo sapiens
  CDR3 for beta chain variable domain of TCR clone 95991 (TRBV6-3, TRBJ1-2)
CASSYSRRASNYGYTF

SEQ ID NO: 191983 - protein, 15 aa, Homo sapiens
  CDR3 for alpha chain variable domain of TCR clone 95992 (TRAV3, TRAJ30)
CAVRDEYGRDDKIVF

SEQ ID NO: 191984 - protein, 16 aa, Homo sapiens
  CDR3 for beta chain variable domain of TCR clone 95992 (TRBV5-1, TRBJ2-5)
CASSLANHRGRETQYF

SEQ ID NO: 191985 - protein, 13 aa, Homo sapiens
  CDR3 for alpha chain variable domain of TCR clone 95993 (TRAV38-2/DV8, TRAJ34)
CAYRTWNTDKLIF

SEQ ID NO: 191986 - protein, 14 aa, Homo sapiens
  CDR3 for beta chain variable domain of TCR clone 95993 (TRBV7-6, TRBJ2-3)
CASSLGTVTDTQYF

SEQ ID NO: 191987 - protein, 14 aa, Homo sapiens
  CDR3 for alpha chain variable domain of TCR clone 95994 (TRAV8-3, TRAJ36)
CAVGPITGANNLFF

SEQ ID NO: 191988 - protein, 14 aa, Homo sapiens
  CDR3 for beta chain variable domain of TCR clone 95994 (TRBV7-2, TRBJ1-5)
CASSTQGAGQPQHF

SEQ ID NO: 191989 - protein, 13 aa, Homo sapiens
  CDR3 for alpha chain variable domain of TCR clone 95995 (TRAV13-1, TRAJ11)
CAASIRGYSTLTF

SEQ ID NO: 191990 - protein, 14 aa, Homo sapiens
  CDR3 for beta chain variable domain of TCR clone 95995 (TRBV11-2, TRBJ2-5)
CASRPLAGRETQYF

SEQ ID NO: 191991 - protein, 11 aa, Homo sapiens
  CDR3 for alpha chain variable domain of TCR clone 95996 (TRAV3, TRAJ21)
CAVGNFNKFYF

SEQ ID NO: 191992 - protein, 14 aa, Homo sapiens
  CDR3 for beta chain variable domain of TCR clone 95996 (TRBV20-1, TRBJ2-7)
CSAKRGRSSYEQYF

SEQ ID NO: 191993 - protein, 16 aa, Homo sapiens
  CDR3 for alpha chain variable domain of TCR clone 95997 (TRAV12-1, TRAJ45)
CVVIRYSGGGADGLTF

SEQ ID NO: 191994 - protein, 15 aa, Homo sapiens
  CDR3 for beta chain variable domain of TCR clone 95997 (TRBV11-3, TRBJ2-3)
CASLKDGREGDTQYF

SEQ ID NO: 191995 - protein, 13 aa, Homo sapiens
  CDR3 for alpha chain variable domain of TCR clone 95998 (TRAV23/DV6, TRAJ29)
CAARNSGNTPLVF

SEQ ID NO: 191996 - protein, 15 aa, Homo sapiens
  CDR3 for beta chain variable domain of TCR clone 95998 (TRBV5-1, TRBJ1-1)
CASSSRAGRNTEAFF

SEQ ID NO: 191997 - protein, 12 aa, Homo sapiens
  CDR3 for alpha chain variable domain of TCR clone 95999 (TRAV13-1, TRAJ15)
CAASQAGTALIF

SEQ ID NO: 191998 - protein, 19 aa, Homo sapiens
  CDR3 for beta chain variable domain of TCR clone 95999 (TRBV7-2, TRBJ2-3)
CASSFLSRNWGGGTDTQYF

SEQ ID NO: 191999 - protein, 11 aa, Homo sapiens
  CDR3 for alpha chain variable domain of TCR clone 96000 (TRAV27, TRAJ49)
CAGVPPNQFYF

SEQ ID NO: 192000 - protein, 17 aa, Homo sapiens
  CDR3 for beta chain variable domain of TCR clone 96000 (TRBV7-3, TRBJ2-3)
CASSPRGQGYGTDTQYF

SEQ ID NO: 192001 - protein, 11 aa, Homo sapiens
  CDR3 for alpha chain variable domain of TCR clone 96001 (TRAV1-1, TRAJ23)
CAVRQGGKLIF

SEQ ID NO: 192002 - protein, 13 aa, Homo sapiens
  CDR3 for beta chain variable domain of TCR clone 96001 (TRBV7-3, TRBJ2-1)
CASSLDSYNEQFF

SEQ ID NO: 192003 - protein, 14 aa, Homo sapiens
  CDR3 for alpha chain variable domain of TCR clone 96002 (TRAV12-1, TRAJ10)
CVVNSAGGGNKLTF

SEQ ID NO: 192004 - protein, 14 aa, Homo sapiens
  CDR3 for beta chain variable domain of TCR clone 96002 (TRBV12-4, TRBJ1-1)
RASSLGTGGTEAFF

SEQ ID NO: 192005 - protein, 14 aa, Homo sapiens
  CDR3 for alpha chain variable domain of TCR clone 96003 (TRAV23/DV6, TRAJ37)
CAASTSSNKGKLIF

SEQ ID NO: 192006 - protein, 13 aa, Homo sapiens
  CDR3 for beta chain variable domain of TCR clone 96003 (TRBV7-7, TRBJ1-1)
CASSLGANTEAFF

SEQ ID NO: 192007 - protein, 18 aa, Homo sapiens
  CDR3 for alpha chain variable domain of TCR clone 96004 (TRAV8-3, TRAJ6)
CAVGAEHQEEATYLPLEE

SEQ ID NO: 192008 - protein, 14 aa, Homo sapiens
  CDR3 for beta chain variable domain of TCR clone 96004 (TRBV6-6, TRBJ2-7)
CASSDSGAGYEQYF

SEQ ID NO: 192009 - protein, 13 aa, Homo sapiens
  CDR3 for alpha chain variable domain of TCR clone 96005 (TRAV8-1, TRAJ23)
YAVTGGQGGRLIF

SEQ ID NO: 192010 - protein, 15 aa, Homo sapiens
  CDR3 for beta chain variable domain of TCR clone 96005 (TRBV20-1, TRBJ2-2)
CSAIPGHSNTGELFF

SEQ ID NO: 192011 - protein, 12 aa, Homo sapiens
  CDR3 for alpha chain variable domain of TCR clone 96006 (TRAV12-1, TRAJ40)
CVVNGETYKYIF

SEQ ID NO: 192012 - protein, 14 aa, Homo sapiens
  CDR3 for beta chain variable domain of TCR clone 96006 (TRBV7-9, TRBJ1-1)
CASSSTKGNTEAVF

SEQ ID NO: 192013 - protein, 11 aa, Homo sapiens
  CDR3 for alpha chain variable domain of TCR clone 96007 (TRAV12-1, TRAJ15)
CVVNAGTALIF

SEQ ID NO: 192014 - protein, 16 aa, Homo sapiens
  CDR3 for beta chain variable domain of TCR clone 96007 (TRBV28, TRBJ2-1)
CASSSRVRDSHNEQFF

SEQ ID NO: 192015 - protein, 15 aa, Homo sapiens
  CDR3 for alpha chain variable domain of TCR clone 96008 (TRAV13-1, TRAJ32)
CAANIYGGATNKLIF

SEQ ID NO: 192016 - protein, 15 aa, Homo sapiens
  CDR3 for beta chain variable domain of TCR clone 96008 (TRBV7-2, TRBJ2-7)
CASSTPGLTRGEQYF

SEQ ID NO: 192017 - protein, 13 aa, Homo sapiens
  CDR3 for alpha chain variable domain of TCR clone 96009 (TRAV13-1, TRAJ11)
CAAVLAGNSTLTF

SEQ ID NO: 192018 - protein, 17 aa, Homo sapiens
  CDR3 for beta chain variable domain of TCR clone 96009 (TRBV25-1, TRBJ2-7)
CASSDARVVFSSYEQYF

SEQ ID NO: 192019 - protein, 12 aa, Homo sapiens
  CDR3 for alpha chain variable domain of TCR clone 96010 (TRAV12-1, TRAJ40)
CVVYSGTYKYIF

SEQ ID NO: 192020 - protein, 17 aa, Homo sapiens
  CDR3 for beta chain variable domain of TCR clone 96010 (TRBV11-3, TRBJ1-5)
CASSPWTGLRGNQPQHF

SEQ ID NO: 192021 - protein, 14 aa, Homo sapiens
  CDR3 for alpha chain variable domain of TCR clone 96011 (TRAV12-3, TRAJ10)
SHLPLTGGGNKLTF

SEQ ID NO: 192022 - protein, 13 aa, Homo sapiens
  CDR3 for beta chain variable domain of TCR clone 96011 (TRBV6-6, TRBJ2-1)
CASSLHQGDEQFF

SEQ ID NO: 192023 - protein, 17 aa, Homo sapiens
  CDR3 for alpha chain variable domain of TCR clone 96012 (TRAV3, TRAJ6)
CAVRDGPRAGGSSIPNF

SEQ ID NO: 192024 - protein, 14 aa, Homo sapiens
  CDR3 for beta chain variable domain of TCR clone 96012 (TRBV7-2, TRBJ2-7)
CASSPKTSFYEQYF

SEQ ID NO: 192025 - protein, 14 aa, Homo sapiens
  CDR3 for alpha chain variable domain of TCR clone 96013 (TRAV34, TRAJ44)
CGADGTGTASKLTF

SEQ ID NO: 192026 - protein, 15 aa, Homo sapiens
  CDR3 for beta chain variable domain of TCR clone 96013 (TRBV12-4, TRBJ2-5)
CASSPPTGLQETQYF

SEQ ID NO: 192027 - protein, 19 aa, Homo sapiens
  CDR3 for alpha chain variable domain of TCR clone 96014 (TRAV1-2, TRAJ26)
CLLPLCCERPDNYGQNFVF

SEQ ID NO: 192028 - protein, 13 aa, Homo sapiens
  CDR3 for beta chain variable domain of TCR clone 96014 (TRBV5-1, TRBJ1-1)
CATSTRDGTEAFF

SEQ ID NO: 192029 - protein, 13 aa, Homo sapiens
  CDR3 for alpha chain variable domain of TCR clone 96015 (TRAV35, TRAJ36)
CAGPRIGANNLFF

SEQ ID NO: 192030 - protein, 15 aa, Homo sapiens
  CDR3 for beta chain variable domain of TCR clone 96015 (TRBV28, TRBJ2-5)
CASSTPWSYQETQYF

SEQ ID NO: 192031 - protein, 12 aa, Homo sapiens
  CDR3 for alpha chain variable domain of TCR clone 96016 (TRAV21, TRAJ29)
CAVTSGNTHLVF

SEQ ID NO: 192032 - protein, 15 aa, Homo sapiens
  CDR3 for beta chain variable domain of TCR clone 96016 (TRBV12-4, TRBJ1-2)
CASRLGVAGNYGYTF

SEQ ID NO: 192033 - protein, 11 aa, Homo sapiens
  CDR3 for alpha chain variable domain of TCR clone 96017 (TRAV13-1, TRAJ15)
CAATPGTALIF

SEQ ID NO: 192034 - protein, 15 aa, Homo sapiens
  CDR3 for beta chain variable domain of TCR clone 96017 (TRBV19, TRBJ2-1)
CASSIQATSYNEQFF

SEQ ID NO: 192035 - protein, 12 aa, Homo sapiens
  CDR3 for alpha chain variable domain of TCR clone 96018 (TRAV36/DV7, TRAJ54)
CAVVRGAQKLVF

SEQ ID NO: 192036 - protein, 17 aa, Homo sapiens
  CDR3 for beta chain variable domain of TCR clone 96018 (TRBV7-8, TRBJ1-2)
CASSLRPLQGHLYGYTF

SEQ ID NO: 192037 - protein, 15 aa, Homo sapiens
  CDR3 for alpha chain variable domain of TCR clone 96019 (TRAV38-1, TRAJ45)
CAFMKGGGGAEGLTF

SEQ ID NO: 192038 - protein, 13 aa, Homo sapiens
  CDR3 for beta chain variable domain of TCR clone 96019 (TRBV7-9, TRBJ1-2)
CASSLKQNYGYTF

SEQ ID NO: 192039 - protein, 13 aa, Homo sapiens
  CDR3 for alpha chain variable domain of TCR clone 96020 (TRAV12-1, TRAJ11)
CVVNRAGYSPLTF

SEQ ID NO: 192040 - protein, 15 aa, Homo sapiens
  CDR3 for beta chain variable domain of TCR clone 96020 (TRBV7-3, TRBJ2-2)
CASSETGQGTGELFF

SEQ ID NO: 192041 - protein, 15 aa, Homo sapiens
  CDR3 for alpha chain variable domain of TCR clone 96021 (TRAV8-1, TRAJ6)
CAVNTPPGGSYISTF

SEQ ID NO: 192042 - protein, 14 aa, Homo sapiens
  CDR3 for beta chain variable domain of TCR clone 96021 (TRBV12-4, TRBJ2-1)
CASSLGQGASEQFF

SEQ ID NO: 192043 - protein, 12 aa, Homo sapiens
  CDR3 for alpha chain variable domain of TCR clone 96022 (TRAV12-3, TRAJ17)
CAMTLTGNKITF

SEQ ID NO: 192044 - protein, 14 aa, Homo sapiens
  CDR3 for beta chain variable domain of TCR clone 96022 (TRBV7-3, TRBJ2-1)
CASSLAGGTNEQFF

SEQ ID NO: 192045 - protein, 13 aa, Homo sapiens
  CDR3 for alpha chain variable domain of TCR clone 96023 (TRAV17, TRAJ8)
CATGPVGFQKLVF

SEQ ID NO: 192046 - protein, 15 aa, Homo sapiens
  CDR3 for beta chain variable domain of TCR clone 96023 (TRBV20-1, TRBJ2-5)
CSAGRLPSGQETQYC

SEQ ID NO: 192047 - protein, 15 aa, Homo sapiens
  CDR3 for alpha chain variable domain of TCR clone 96024 (TRAV38-1, TRAJ37)
CAFIFGSGNTGKLIF

SEQ ID NO: 192048 - protein, 15 aa, Homo sapiens
  CDR3 for beta chain variable domain of TCR clone 96024 (TRBV19, TRBJ1-2)
CASSVGQVLNYGYTF

SEQ ID NO: 192049 - protein, 16 aa, Homo sapiens
  CDR3 for alpha chain variable domain of TCR clone 96025 (TRAV12-3, TRAJ53)
CAMSPGSGGSNYKLTF

SEQ ID NO: 192050 - protein, 12 aa, Homo sapiens
  CDR3 for beta chain variable domain of TCR clone 96025 (TRBV12-4, TRBJ2-1)
CASSPGRSEQFF

SEQ ID NO: 192051 - protein, 12 aa, Homo sapiens
  CDR3 for alpha chain variable domain of TCR clone 96026 (TRAV1-1, TRAJ39)
CAVPVVGNMLTF

SEQ ID NO: 192052 - protein, 14 aa, Homo sapiens
  CDR3 for beta chain variable domain of TCR clone 96026 (TRBV7-9, TRBJ2-3)
CASSLEDGTDTQYF

SEQ ID NO: 192053 - protein, 10 aa, Homo sapiens
  CDR3 for alpha chain variable domain of TCR clone 96027 (TRAV1-2, TRAJ34)
CAVNTDKLIF

SEQ ID NO: 192054 - protein, 13 aa, Homo sapiens
  CDR3 for beta chain variable domain of TCR clone 96027 (TRBV12-4, TRBJ1-2)
CASSLRQGKGYTF

SEQ ID NO: 192055 - protein, 15 aa, Homo sapiens
  CDR3 for alpha chain variable domain of TCR clone 96028 (TRAV12-3, TRAJ6)
CAMSATTVGSYIPTF

SEQ ID NO: 192056 - protein, 14 aa, Homo sapiens
  CDR3 for beta chain variable domain of TCR clone 96028 (TRBV20-1, TRBJ2-5)
CSALVPGYQETQYF

SEQ ID NO: 192057 - protein, 15 aa, Homo sapiens
  CDR3 for alpha chain variable domain of TCR clone 96029 (TRAV29/DV5, TRAJ40)
CAASAQGSGTYKYIV

SEQ ID NO: 192058 - protein, 15 aa, Homo sapiens
  CDR3 for beta chain variable domain of TCR clone 96029 (TRBV7-2, TRBJ2-3)
CASSLAGAFIDTQYF

SEQ ID NO: 192059 - protein, 13 aa, Homo sapiens
  CDR3 for alpha chain variable domain of TCR clone 96030 (TRAV12-1, TRAJ33)
CGDAPDSNYQLIW

SEQ ID NO: 192060 - protein, 16 aa, Homo sapiens
  CDR3 for beta chain variable domain of TCR clone 96030 (TRBV20-1, TRBJ1-2)
CSASMGQGVANYGYTF

SEQ ID NO: 192061 - protein, 13 aa, Homo sapiens
  CDR3 for alpha chain variable domain of TCR clone 96031 (TRAV13-1, TRAJ43)
CAASKNNNNDMRF

SEQ ID NO: 192062 - protein, 14 aa, Homo sapiens
  CDR3 for beta chain variable domain of TCR clone 96031 (TRBV25-1, TRBJ1-1)
CASTHLGGNTEAFF

SEQ ID NO: 192063 - protein, 13 aa, Homo sapiens
  CDR3 for alpha chain variable domain of TCR clone 96032 (TRAV20, TRAJ34)
CAVSSYNTDKLIF

SEQ ID NO: 192064 - protein, 13 aa, Homo sapiens
  CDR3 for beta chain variable domain of TCR clone 96032 (TRBV7-9, TRBJ1-2)
CASSLKQNYGYTV

SEQ ID NO: 192065 - protein, 15 aa, Homo sapiens
  CDR3 for alpha chain variable domain of TCR clone 96033 (TRAV16, TRAJ48)
CALFISNFGNEKLTF

SEQ ID NO: 192066 - protein, 17 aa, Homo sapiens
  CDR3 for beta chain variable domain of TCR clone 96033 (TRBV13, TRBJ2-3)
CASSLSRVAGGRNTQYF

SEQ ID NO: 192067 - protein, 14 aa, Homo sapiens
  CDR3 for alpha chain variable domain of TCR clone 96034 (TRAV1-2, TRAJ16)
CAVNRFSDGQKLLF

SEQ ID NO: 192068 - protein, 13 aa, Homo sapiens
  CDR3 for beta chain variable domain of TCR clone 96034 (TRBV19, TRBJ1-2)
CASSVPGQDGYTV

SEQ ID NO: 192069 - protein, 12 aa, Homo sapiens
  CDR3 for alpha chain variable domain of TCR clone 96035 (TRAV1-2, TRAJ29)
CAVPSGNTPLVF

SEQ ID NO: 192070 - protein, 16 aa, Homo sapiens
  CDR3 for beta chain variable domain of TCR clone 96035 (TRBV19, TRBJ1-1)
CASRFGGPVTGTEAFF

SEQ ID NO: 192071 - protein, 14 aa, Homo sapiens
  CDR3 for alpha chain variable domain of TCR clone 96036 (TRAV12-2, TRAJ3)
CAVSLYSSASKIIF

SEQ ID NO: 192072 - protein, 14 aa, Homo sapiens
  CDR3 for beta chain variable domain of TCR clone 96036 (TRBV27, TRBJ2-1)
CASSIAETYNEQFF

SEQ ID NO: 192073 - protein, 16 aa, Homo sapiens
  CDR3 for alpha chain variable domain of TCR clone 96037 (TRAV20, TRAJ28)
CAVRDPSGAGSYQLTF

SEQ ID NO: 192074 - protein, 14 aa, Homo sapiens
  CDR3 for beta chain variable domain of TCR clone 96037 (TRBV7-9, TRBJ2-1)
CASSPRDSLYEQFF

SEQ ID NO: 192075 - protein, 12 aa, Homo sapiens
  CDR3 for alpha chain variable domain of TCR clone 96038 (TRAV13-1, TRAJ49)
CAASPMGNQFYF

SEQ ID NO: 192076 - protein, 17 aa, Homo sapiens
  CDR3 for beta chain variable domain of TCR clone 96038 (TRBV11-2, TRBJ2-1)
CAGSLYPPGVEYNEQFF

SEQ ID NO: 192077 - protein, 17 aa, Homo sapiens
  CDR3 for alpha chain variable domain of TCR clone 96039 (TRAV12-3, TRAJ6)
CAMSARGGAGGSYILTF

SEQ ID NO: 192078 - protein, 12 aa, Homo sapiens
  CDR3 for beta chain variable domain of TCR clone 96039 (TRBV12-4, TRBJ2-3)
CASSTLPDTQYF

SEQ ID NO: 192079 - protein, 14 aa, Homo sapiens
  CDR3 for alpha chain variable domain of TCR clone 96040 (TRAV12-2, TRAJ13)
CAVKKTGGYQKVTF

SEQ ID NO: 192080 - protein, 11 aa, Homo sapiens
  CDR3 for beta chain variable domain of TCR clone 96040 (TRBV12-4, TRBJ2-2)
CASSSAGELFF

SEQ ID NO: 192081 - protein, 14 aa, Homo sapiens
  CDR3 for alpha chain variable domain of TCR clone 96041 (TRAV12-2, TRAJ40)
CAVKIPSGTYNYIF

SEQ ID NO: 192082 - protein, 20 aa, Homo sapiens
  CDR3 for beta chain variable domain of TCR clone 96041 (TRBV28, TRBJ2-1)
CASTPIGRSPGLAGGNEQFF

SEQ ID NO: 192083 - protein, 14 aa, Homo sapiens
  CDR3 for alpha chain variable domain of TCR clone 96042 (TRAV12-1, TRAJ42)
CVVIYGGSQGNLIS

SEQ ID NO: 192084 - protein, 13 aa, Homo sapiens
  CDR3 for beta chain variable domain of TCR clone 96042 (TRBV18, TRBJ2-5)
CASSPPGKETQYF

SEQ ID NO: 192085 - protein, 20 aa, Homo sapiens
  CDR3 for alpha chain variable domain of TCR clone 96043 (TRAV27, TRAJ10)
ASTSVPSRGILTGGGNKLTF

SEQ ID NO: 192086 - protein, 18 aa, Homo sapiens
  CDR3 for beta chain variable domain of TCR clone 96043 (TRBV20-1, TRBJ2-2)
CSARVQTARPSGTGELFF

SEQ ID NO: 192087 - protein, 15 aa, Homo sapiens
  CDR3 for alpha chain variable domain of TCR clone 96044 (TRAV14/DV4, TRAJ12)
CAMREERDSSYKLIF

SEQ ID NO: 192088 - protein, 16 aa, Homo sapiens
  CDR3 for beta chain variable domain of TCR clone 96044 (TRBV11-2, TRBJ1-2)
CASSLDRGGNNYGYAF

SEQ ID NO: 192089 - protein, 14 aa, Homo sapiens
  CDR3 for alpha chain variable domain of TCR clone 96045 (TRAV12-3, TRAJ10)
SHLPLTGGGNKLTF

SEQ ID NO: 192090 - protein, 13 aa, Homo sapiens
  CDR3 for beta chain variable domain of TCR clone 96045 (TRBV19, TRBJ2-7)
CASSRDRSYEQYF

SEQ ID NO: 192091 - protein, 14 aa, Homo sapiens
  CDR3 for alpha chain variable domain of TCR clone 96046 (TRAV20, TRAJ29)
CALQAWVGNTPLVF

SEQ ID NO: 192092 - protein, 15 aa, Homo sapiens
  CDR3 for beta chain variable domain of TCR clone 96046 (TRBV29-1, TRBJ2-7)
CSVEFFDRGSYEQYF

SEQ ID NO: 192093 - protein, 18 aa, Homo sapiens
  CDR3 for alpha chain variable domain of TCR clone 96047 (TRAV26-1, TRAJ39)
CCVLLHRQGLEGRNMLTF

SEQ ID NO: 192094 - protein, 15 aa, Homo sapiens
  CDR3 for beta chain variable domain of TCR clone 96047 (TRBV7-9, TRBJ1-5)
CASSQGHQPNQPQHF

SEQ ID NO: 192095 - protein, 19 aa, Homo sapiens
  CDR3 for alpha chain variable domain of TCR clone 96048 (TRAV21, TRAJ20)
SLVTQPPTSVLPNDYKLSF

SEQ ID NO: 192096 - protein, 14 aa, Homo sapiens
  CDR3 for beta chain variable domain of TCR clone 96048 (TRBV7-2, TRBJ1-3)
CASSRLRSGNTIYC

SEQ ID NO: 192097 - protein, 13 aa, Homo sapiens
  CDR3 for alpha chain variable domain of TCR clone 96049 (TRAV12-1, TRAJ6)
CVLASGGSYIPTF

SEQ ID NO: 192098 - protein, 14 aa, Homo sapiens
  CDR3 for beta chain variable domain of TCR clone 96049 (TRBV20-1, TRBJ2-5)
CSARDGRAGETQYF

SEQ ID NO: 192099 - protein, 14 aa, Homo sapiens
  CDR3 for alpha chain variable domain of TCR clone 96050 (TRAV8-3, TRAJ31)
CAVGRGLNNARLMF

SEQ ID NO: 192100 - protein, 15 aa, Homo sapiens
  CDR3 for beta chain variable domain of TCR clone 96050 (TRBV7-2, TRBJ2-2)
CASSLAEGLTGELFF

SEQ ID NO: 192101 - protein, 15 aa, Homo sapiens
  CDR3 for alpha chain variable domain of TCR clone 96051 (TRAV35, TRAJ40)
CAGQLGTSGTYKYIF

SEQ ID NO: 192102 - protein, 14 aa, Homo sapiens
  CDR3 for beta chain variable domain of TCR clone 96051 (TRBV7-3, TRBJ2-1)
CASSLAGGTIEQFF

SEQ ID NO: 192103 - protein, 14 aa, Homo sapiens
  CDR3 for alpha chain variable domain of TCR clone 96052 (TRAV26-1, TRAJ38)
CIADNAGNNRKLIW

SEQ ID NO: 192104 - protein, 17 aa, Homo sapiens
  CDR3 for beta chain variable domain of TCR clone 96052 (TRBV7-9, TRBJ2-3)
CDSSPTVAGDLTDTQYF

SEQ ID NO: 192105 - protein, 14 aa, Homo sapiens
  CDR3 for alpha chain variable domain of TCR clone 96053 (TRAV26-1, TRAJ49)
CIVRLPYTGNQFYF

SEQ ID NO: 192106 - protein, 14 aa, Homo sapiens
  CDR3 for beta chain variable domain of TCR clone 96053 (TRBV7-6, TRBJ2-3)
CASSLGTVTDTQYF

SEQ ID NO: 192107 - protein, 12 aa, Homo sapiens
  CDR3 for alpha chain variable domain of TCR clone 96054 (TRAV8-4, TRAJ37)
CAKSSNTGKLIF

SEQ ID NO: 192108 - protein, 15 aa, Homo sapiens
  CDR3 for beta chain variable domain of TCR clone 96054 (TRBV7-9, TRBJ2-7)
CASSSSGLAVYEQYL

SEQ ID NO: 192109 - protein, 14 aa, Homo sapiens
  CDR3 for alpha chain variable domain of TCR clone 96055 (TRAV12-3, TRAJ9)
CAMSPNTGGFKTIF

SEQ ID NO: 192110 - protein, 15 aa, Homo sapiens
  CDR3 for beta chain variable domain of TCR clone 96055 (TRBV6-1, TRBJ2-4)
CASSEAVWTINIQYF

SEQ ID NO: 192111 - protein, 13 aa, Homo sapiens
  CDR3 for alpha chain variable domain of TCR clone 96056 (TRAV1-2, TRAJ11)
CAVRDSGYSTLTF

SEQ ID NO: 192112 - protein, 16 aa, Homo sapiens
  CDR3 for beta chain variable domain of TCR clone 96056 (TRBV28, TRBJ2-7)
CASSSPQGRDVYEQYF

SEQ ID NO: 192113 - protein, 11 aa, Homo sapiens
  CDR3 for alpha chain variable domain of TCR clone 96057 (TRAV2, TRAJ13)
CASVGYQKVTF

SEQ ID NO: 192114 - protein, 14 aa, Homo sapiens
  CDR3 for beta chain variable domain of TCR clone 96057 (TRBV6-1, TRBJ1-3)
CASVQGGGGNTIYF

SEQ ID NO: 192115 - protein, 14 aa, Homo sapiens
  CDR3 for alpha chain variable domain of TCR clone 96058 (TRAV8-4, TRAJ13)
CAVTLSGGYQKVTF

SEQ ID NO: 192116 - protein, 16 aa, Homo sapiens
  CDR3 for beta chain variable domain of TCR clone 96058 (TRBV12-4, TRBJ1-5)
CASSRPVGGSNQPQHF

SEQ ID NO: 192117 - protein, 12 aa, Homo sapiens
  CDR3 for alpha chain variable domain of TCR clone 96059 (TRAV16, TRAJ10)
CSRTGGGNKLTF

SEQ ID NO: 192118 - protein, 15 aa, Homo sapiens
  CDR3 for beta chain variable domain of TCR clone 96059 (TRBV6-3, TRBJ2-7)
CASSSPGTVFYEQDF

SEQ ID NO: 192119 - protein, 13 aa, Homo sapiens
  CDR3 for alpha chain variable domain of TCR clone 96060 (TRAV12-1, TRAJ40)
CVVTTSGTYKYIF

SEQ ID NO: 192120 - protein, 13 aa, Homo sapiens
  CDR3 for beta chain variable domain of TCR clone 96060 (TRBV4-2, TRBJ1-1)
CASSQAGNTEAFF

SEQ ID NO: 192121 - protein, 13 aa, Homo sapiens
  CDR3 for alpha chain variable domain of TCR clone 96061 (TRAV27, TRAJ41)
CAGEGNSGYALNF

SEQ ID NO: 192122 - protein, 13 aa, Homo sapiens
  CDR3 for beta chain variable domain of TCR clone 96061 (TRBV20-1, TRBJ1-1)
CSARVGGNTEAFF

SEQ ID NO: 192123 - protein, 17 aa, Homo sapiens
  CDR3 for alpha chain variable domain of TCR clone 96062 (TRAV3, TRAJ6)
CAVRDGPRAGGSYIPTF

SEQ ID NO: 192124 - protein, 18 aa, Homo sapiens
  CDR3 for beta chain variable domain of TCR clone 96062 (TRBV4-1, TRBJ1-4)
CASSPRTGGAWTNEKLFF

SEQ ID NO: 192125 - protein, 13 aa, Homo sapiens
  CDR3 for alpha chain variable domain of TCR clone 96063 (TRAV23/DV6, TRAJ12)
FAPRVDSSYKLIF

SEQ ID NO: 192126 - protein, 12 aa, Homo sapiens
  CDR3 for beta chain variable domain of TCR clone 96063 (TRBV7-6, TRBJ2-5)
CASSLSQETQYF

SEQ ID NO: 192127 - protein, 13 aa, Homo sapiens
  CDR3 for alpha chain variable domain of TCR clone 96064 (TRAV26-2, TRAJ54)
CIPRVGGAQKLVF

SEQ ID NO: 192128 - protein, 16 aa, Homo sapiens
  CDR3 for beta chain variable domain of TCR clone 96064 (TRBV4-1, TRBJ1-1)
CASSSTSERPNTEAFF

SEQ ID NO: 192129 - protein, 16 aa, Homo sapiens
  CDR3 for alpha chain variable domain of TCR clone 96065 (TRAV1-2, TRAJ10)
CAVRGVLTGGGNKLTF

SEQ ID NO: 192130 - protein, 12 aa, Homo sapiens
  CDR3 for beta chain variable domain of TCR clone 96065 (TRBV12-4, TRBJ2-7)
CASNLGGYEQYF

SEQ ID NO: 192131 - protein, 13 aa, Homo sapiens
  CDR3 for alpha chain variable domain of TCR clone 96066 (TRAV29/DV5, TRAJ31)
CAASRNNNARLMF

SEQ ID NO: 192132 - protein, 16 aa, Homo sapiens
  CDR3 for beta chain variable domain of TCR clone 96066 (TRBV7-3, TRBJ2-2)
CASSLKRGTLSGELSF

SEQ ID NO: 192133 - protein, 11 aa, Homo sapiens
  CDR3 for alpha chain variable domain of TCR clone 96067 (TRAV13-1, TRAJ30)
CAASRDYKIIF

SEQ ID NO: 192134 - protein, 15 aa, Homo sapiens
  CDR3 for beta chain variable domain of TCR clone 96067 (TRBV18, TRBJ1-1)
CASSPSSWVNTEAFF

SEQ ID NO: 192135 - protein, 12 aa, Homo sapiens
  CDR3 for alpha chain variable domain of TCR clone 96068 (TRAV1-2, TRAJ33)
CAALDSNYQLIW

SEQ ID NO: 192136 - protein, 14 aa, Homo sapiens
  CDR3 for beta chain variable domain of TCR clone 96068 (TRBV4-1, TRBJ2-2)
CASSQAVNTGELFF

SEQ ID NO: 192137 - protein, 18 aa, Homo sapiens
  CDR3 for alpha chain variable domain of TCR clone 96069 (TRAV26-1, TRAJ37)
CIVRVDMHGSSNTGKLIF

SEQ ID NO: 192138 - protein, 16 aa, Homo sapiens
  CDR3 for beta chain variable domain of TCR clone 96069 (TRBV19, TRBJ2-2)
CASRSPGTGATGELFF

SEQ ID NO: 192139 - protein, 13 aa, Homo sapiens
  CDR3 for alpha chain variable domain of TCR clone 96070 (TRAV20, TRAJ37)
CAGCSSNTGKLIF

SEQ ID NO: 192140 - protein, 10 aa, Homo sapiens
  CDR3 for beta chain variable domain of TCR clone 96070 (TRBV4-2, TRBJ2-3)
CASSTRYAVF

SEQ ID NO: 192141 - protein, 13 aa, Homo sapiens
  CDR3 for alpha chain variable domain of TCR clone 96071 (TRAV20, TRAJ54)
RAVQAGGAQKLVF

SEQ ID NO: 192142 - protein, 14 aa, Homo sapiens
  CDR3 for beta chain variable domain of TCR clone 96071 (TRBV20-1, TRBJ2-7)
CSAKTGTGGYEQYF

SEQ ID NO: 192143 - protein, 14 aa, Homo sapiens
  CDR3 for alpha chain variable domain of TCR clone 96072 (TRAV8-1, TRAJ5)
CAVSMDTGRRALTF

SEQ ID NO: 192144 - protein, 15 aa, Homo sapiens
  CDR3 for beta chain variable domain of TCR clone 96072 (TRBV11-2, TRBJ2-1)
CASSLGTSGLNEQFF

SEQ ID NO: 192145 - protein, 14 aa, Homo sapiens
  CDR3 for alpha chain variable domain of TCR clone 96073 (TRAV8-3, TRAJ48)
CCGGGQFGNEKLTF

SEQ ID NO: 192146 - protein, 15 aa, Homo sapiens
  CDR3 for beta chain variable domain of TCR clone 96073 (TRBV28, TRBJ2-4)
CAAGSGTLLMGIQYF

SEQ ID NO: 192147 - protein, 13 aa, Homo sapiens
  CDR3 for alpha chain variable domain of TCR clone 96074 (TRAV12-3, TRAJ54)
CAVNRRGAQKLVF

SEQ ID NO: 192148 - protein, 18 aa, Homo sapiens
  CDR3 for beta chain variable domain of TCR clone 96074 (TRBV7-3, TRBJ2-5)
CASSLGGAAQGRWETQYF

SEQ ID NO: 192149 - protein, 16 aa, Homo sapiens
  CDR3 for alpha chain variable domain of TCR clone 96075 (TRAV30, TRAJ24)
CGTKIVDADSWGKFQF

SEQ ID NO: 192150 - protein, 13 aa, Homo sapiens
  CDR3 for beta chain variable domain of TCR clone 96075 (TRBV7-6, TRBJ2-3)
CASSLRSDNTQYF

SEQ ID NO: 192151 - protein, 15 aa, Homo sapiens
  CDR3 for alpha chain variable domain of TCR clone 96076 (TRAV3, TRAJ20)
CAARDIKLSDYKLSF

SEQ ID NO: 192152 - protein, 16 aa, Homo sapiens
  CDR3 for beta chain variable domain of TCR clone 96076 (TRBV12-4, TRBJ2-1)
CASSAVGQGNGDEQFF

SEQ ID NO: 192153 - protein, 14 aa, Homo sapiens
  CDR3 for alpha chain variable domain of TCR clone 96077 (TRAV36/DV7, TRAJ53)
CAVVDGGSNYKLTF

SEQ ID NO: 192154 - protein, 13 aa, Homo sapiens
  CDR3 for beta chain variable domain of TCR clone 96077 (TRBV12-4, TRBJ1-1)
CASSPGTGFEAFF

SEQ ID NO: 192155 - protein, 14 aa, Homo sapiens
  CDR3 for alpha chain variable domain of TCR clone 96078 (TRAV1-2, TRAJ16)
CAVNRFSDGKKLLF

SEQ ID NO: 192156 - protein, 14 aa, Homo sapiens
  CDR3 for beta chain variable domain of TCR clone 96078 (TRBV7-3, TRBJ1-1)
CASSLKGGNTEAFF

SEQ ID NO: 192157 - protein, 14 aa, Homo sapiens
  CDR3 for alpha chain variable domain of TCR clone 96079 (TRAV26-1, TRAJ21)
CIVRPPYNFNKFYF

SEQ ID NO: 192158 - protein, 14 aa, Homo sapiens
  CDR3 for beta chain variable domain of TCR clone 96079 (TRBV11-3, TRBJ2-1)
FASSATTSGSIQFF

SEQ ID NO: 192159 - protein, 15 aa, Homo sapiens
  CDR3 for alpha chain variable domain of TCR clone 96080 (TRAV12-3, TRAJ11)
CAMSEENSGYSTITF

SEQ ID NO: 192160 - protein, 16 aa, Homo sapiens
  CDR3 for beta chain variable domain of TCR clone 96080 (TRBV5-1, TRBJ2-7)
CASSLEGLAGLYEQYF

SEQ ID NO: 192161 - protein, 23 aa, Homo sapiens
  CDR3 for alpha chain variable domain of TCR clone 96081 (TRAV2, TRAJ32)
CAFTMVVLQTSSSMELALCLLSS

SEQ ID NO: 192162 - protein, 16 aa, Homo sapiens
  CDR3 for beta chain variable domain of TCR clone 96081 (TRBV7-9, TRBJ2-7)
CASSYPDREGGYEQYF

SEQ ID NO: 192163 - protein, 11 aa, Homo sapiens
  CDR3 for alpha chain variable domain of TCR clone 96082 (TRAV4, TRAJ23)
CLVAPGGKLIF

SEQ ID NO: 192164 - protein, 16 aa, Homo sapiens
  CDR3 for beta chain variable domain of TCR clone 96082 (TRBV15, TRBJ1-2)
CATSRGPRTGGGGYTF

SEQ ID NO: 192165 - protein, 13 aa, Homo sapiens
  CDR3 for alpha chain variable domain of TCR clone 96083 (TRAV26-1, TRAJ29)
CIVRRSGNTPLVF

SEQ ID NO: 192166 - protein, 14 aa, Homo sapiens
  CDR3 for beta chain variable domain of TCR clone 96083 (TRBV20-1, TRBJ2-7)
CSAKRGRSSYEQYF

SEQ ID NO: 192167 - protein, 10 aa, Homo sapiens
  CDR3 for alpha chain variable domain of TCR clone 96084 (TRAV26-1, TRAJ22)
CIVSLNFFWF

SEQ ID NO: 192168 - protein, 15 aa, Homo sapiens
  CDR3 for beta chain variable domain of TCR clone 96084 (TRBV3-1, TRBJ2-7)
CASSQVRQGAYEQYF

SEQ ID NO: 192169 - protein, 14 aa, Homo sapiens
  CDR3 for alpha chain variable domain of TCR clone 96085 (TRAV17, TRAJ16)
CATADFSDGQKLLF

SEQ ID NO: 192170 - protein, 15 aa, Homo sapiens
  CDR3 for beta chain variable domain of TCR clone 96085 (TRBV18, TRBJ2-1)
CASSPPCASYNEQFF

SEQ ID NO: 192171 - protein, 18 aa, Homo sapiens
  CDR3 for alpha chain variable domain of TCR clone 96086 (TRAV21, TRAJ52)
CAVRPSPAGGTSYGKLTF

SEQ ID NO: 192172 - protein, 17 aa, Homo sapiens
  CDR3 for beta chain variable domain of TCR clone 96086 (TRBV28, TRBJ2-3)
CASSPTPAGGRVDTQYF

SEQ ID NO: 192173 - protein, 14 aa, Homo sapiens
  CDR3 for alpha chain variable domain of TCR clone 96087 (TRAV12-2, TRAJ11)
CAVEGGSGYSTLTF

SEQ ID NO: 192174 - protein, 13 aa, Homo sapiens
  CDR3 for beta chain variable domain of TCR clone 96087 (TRBV20-1, TRBJ2-3)
CSATSGSRDTQYF

SEQ ID NO: 192175 - protein, 18 aa, Homo sapiens
  CDR3 for alpha chain variable domain of TCR clone 96088 (TRAV21, TRAJ52)
CAVRPSPAGGTSYGKLTF

SEQ ID NO: 192176 - protein, 15 aa, Homo sapiens
  CDR3 for beta chain variable domain of TCR clone 96088 (TRBV20-1, TRBJ2-1)
CSARGSSGGAAEQFF

SEQ ID NO: 192177 - protein, 17 aa, Homo sapiens
  CDR3 for alpha chain variable domain of TCR clone 96089 (TRAV4, TRAJ13)
CLVGVQGSFGGYQKVTF

SEQ ID NO: 192178 - protein, 18 aa, Homo sapiens
  CDR3 for beta chain variable domain of TCR clone 96089 (TRBV15, TRBJ2-3)
CATSRDGARSWDTDTQYF

SEQ ID NO: 192179 - protein, 15 aa, Homo sapiens
  CDR3 for alpha chain variable domain of TCR clone 96090 (TRAV21, TRAJ32)
CAVNSYGGATNKLIF

SEQ ID NO: 192180 - protein, 18 aa, Homo sapiens
  CDR3 for beta chain variable domain of TCR clone 96090 (TRBV11-2, TRBJ2-3)
CASSLGGASRGAPNTQYF

SEQ ID NO: 192181 - protein, 13 aa, Homo sapiens
  CDR3 for alpha chain variable domain of TCR clone 96091 (TRAV3, TRAJ27)
CSVRPLCAGKSTF

SEQ ID NO: 192182 - protein, 13 aa, Homo sapiens
  CDR3 for beta chain variable domain of TCR clone 96091 (TRBV7-9, TRBJ2-3)
CASSPGSTDTQYF

SEQ ID NO: 192183 - protein, 10 aa, Homo sapiens
  CDR3 for alpha chain variable domain of TCR clone 96092 (TRAV23/DV6, TRAJ45)
TGGGADGLTF

SEQ ID NO: 192184 - protein, 13 aa, Homo sapiens
  CDR3 for beta chain variable domain of TCR clone 96092 (TRBV19, TRBJ1-2)
CASSVPGQDGYTF

SEQ ID NO: 192185 - protein, 13 aa, Homo sapiens
  CDR3 for alpha chain variable domain of TCR clone 96093 (TRAV12-1, TRAJ26)
CVVRRNYGQNFVF

SEQ ID NO: 192186 - protein, 15 aa, Homo sapiens
  CDR3 for beta chain variable domain of TCR clone 96093 (TRBV28, TRBJ2-1)
CASSIIAGGRSEQFL

SEQ ID NO: 192187 - protein, 14 aa, Homo sapiens
  CDR3 for alpha chain variable domain of TCR clone 96094 (TRAV1-2, TRAJ8)
CAVREDTGFQKLVF

SEQ ID NO: 192188 - protein, 16 aa, Homo sapiens
  CDR3 for beta chain variable domain of TCR clone 96094 (TRBV20-1, TRBJ2-6)
CSASSQGYDGANVLTF

SEQ ID NO: 192189 - protein, 14 aa, Homo sapiens
  CDR3 for alpha chain variable domain of TCR clone 96095 (TRAV8-4, TRAJ48)
CAVSETFGNEKLTF

SEQ ID NO: 192190 - protein, 13 aa, Homo sapiens
  CDR3 for beta chain variable domain of TCR clone 96095 (TRBV7-9, TRBJ1-5)
CASSLRNDQPQHF

SEQ ID NO: 192191 - protein, 16 aa, Homo sapiens
  CDR3 for alpha chain variable domain of TCR clone 96096 (TRAV29/DV5, TRAJ39)
CAASLLFNNAGNMLTF

SEQ ID NO: 192192 - protein, 16 aa, Homo sapiens
  CDR3 for beta chain variable domain of TCR clone 96096 (TRBV19, TRBJ2-6)
CASSMSGLSGANILTL

SEQ ID NO: 192193 - protein, 17 aa, Homo sapiens
  CDR3 for alpha chain variable domain of TCR clone 96097 (TRAV3, TRAJ6)
CAVRDCPRAGGSYIPTF

SEQ ID NO: 192194 - protein, 14 aa, Homo sapiens
  CDR3 for beta chain variable domain of TCR clone 96097 (TRBV7-2, TRBJ2-7)
CASSTKTSFYEQYF

SEQ ID NO: 192195 - protein, 19 aa, Homo sapiens
  CDR3 for alpha chain variable domain of TCR clone 96098 (TRAV26-1, TRAJ52)
CVVRAHRNAGGTSYGKLTF

SEQ ID NO: 192196 - protein, 15 aa, Homo sapiens
  CDR3 for beta chain variable domain of TCR clone 96098 (TRBV29-1, TRBJ2-1)
CSGRDRKSSYNEQFF

SEQ ID NO: 192197 - protein, 14 aa, Homo sapiens
  CDR3 for alpha chain variable domain of TCR clone 96099 (TRAV16, TRAJ33)
CALSAMDSNYQLIW

SEQ ID NO: 192198 - protein, 12 aa, Homo sapiens
  CDR3 for beta chain variable domain of TCR clone 96099 (TRBV11-2, TRBJ2-2)
CASSLPTGELFF

SEQ ID NO: 192199 - protein, 15 aa, Homo sapiens
  CDR3 for alpha chain variable domain of TCR clone 96100 (TRAV36/DV7, TRAJ44)
CAVCRNTGTASKLTF

SEQ ID NO: 192200 - protein, 11 aa, Homo sapiens
  CDR3 for beta chain variable domain of TCR clone 96100 (TRBV11-2, TRBJ1-1)
CASSINTEAFF

SEQ ID NO: 192201 - protein, 10 aa, Homo sapiens
  CDR3 for alpha chain variable domain of TCR clone 96101 (TRAV30, TRAJ48)
CGIGNETLTF

SEQ ID NO: 192202 - protein, 14 aa, Homo sapiens
  CDR3 for beta chain variable domain of TCR clone 96101 (TRBV7-6, TRBJ2-3)
CASSLGTVTDTQYF

SEQ ID NO: 192203 - protein, 13 aa, Homo sapiens
  CDR3 for alpha chain variable domain of TCR clone 96102 (TRAV35, TRAJ42)
CAGFPGSQGNLIF

SEQ ID NO: 192204 - protein, 13 aa, Homo sapiens
  CDR3 for beta chain variable domain of TCR clone 96102 (TRBV10-3, TRBJ1-2)
CAISERDSYGYTF

SEQ ID NO: 192205 - protein, 13 aa, Homo sapiens
  CDR3 for alpha chain variable domain of TCR clone 96103 (TRAV27, TRAJ45)
CRSSGGGADGLTF

SEQ ID NO: 192206 - protein, 16 aa, Homo sapiens
  CDR3 for beta chain variable domain of TCR clone 96103 (TRBV13, TRBJ2-2)
CASSPRTGEHTGELFF

SEQ ID NO: 192207 - protein, 14 aa, Homo sapiens
  CDR3 for alpha chain variable domain of TCR clone 96104 (TRAV1-2, TRAJ16)
CAVNRFSDGHKLLF

SEQ ID NO: 192208 - protein, 16 aa, Homo sapiens
  CDR3 for beta chain variable domain of TCR clone 96104 (TRBV7-3, TRBJ2-3)
CASSLSGYRPEDTQYF

SEQ ID NO: 192209 - protein, 14 aa, Homo sapiens
  CDR3 for alpha chain variable domain of TCR clone 96105 (TRAV12-2, TRAJ44)
CAVNPAGTASKLTF

SEQ ID NO: 192210 - protein, 15 aa, Homo sapiens
  CDR3 for beta chain variable domain of TCR clone 96105 (TRBV28, TRBJ2-7)
CASRVRQVSSYEQYF

SEQ ID NO: 192211 - protein, 14 aa, Homo sapiens
  CDR3 for alpha chain variable domain of TCR clone 96106 (TRAV12-3, TRAJ42)
CAMNYGGSQGNLIF

SEQ ID NO: 192212 - protein, 20 aa, Homo sapiens
  CDR3 for beta chain variable domain of TCR clone 96106 (TRBV7-8, TRBJ2-2)
CASSHLFPGPTIHITGELFF

SEQ ID NO: 192213 - protein, 15 aa, Homo sapiens
  CDR3 for alpha chain variable domain of TCR clone 96107 (TRAV27, TRAJ38)
CAARRNAGNNRKLIW

SEQ ID NO: 192214 - protein, 13 aa, Homo sapiens
  CDR3 for beta chain variable domain of TCR clone 96107 (TRBV2, TRBJ1-5)
CATAGPGNQPQHF

SEQ ID NO: 192215 - protein, 12 aa, Homo sapiens
  CDR3 for alpha chain variable domain of TCR clone 96108 (TRAV12-1, TRAJ9)
CVVPWAGFKTIF

SEQ ID NO: 192216 - protein, 15 aa, Homo sapiens
  CDR3 for beta chain variable domain of TCR clone 96108 (TRBV12-4, TRBJ2-5)
CASSPPTGLQETQYF

SEQ ID NO: 192217 - protein, 14 aa, Homo sapiens
  CDR3 for alpha chain variable domain of TCR clone 96109 (TRAV29/DV5, TRAJ36)
CAARRKTGANNLFF

SEQ ID NO: 192218 - protein, 12 aa, Homo sapiens
  CDR3 for beta chain variable domain of TCR clone 96109 (TRBV7-9, TRBJ2-7)
CASSLEGYEQYF

SEQ ID NO: 192219 - protein, 14 aa, Homo sapiens
  CDR3 for alpha chain variable domain of TCR clone 96110 (TRAV26-1, TRAJ45)
CIEVTGGGADGLTF

SEQ ID NO: 192220 - protein, 16 aa, Homo sapiens
  CDR3 for beta chain variable domain of TCR clone 96110 (TRBV7-6, TRBJ1-2)
CATSRGPRTGGGGYTF

SEQ ID NO: 192221 - protein, 12 aa, Homo sapiens
  CDR3 for alpha chain variable domain of TCR clone 96111 (TRAV21, TRAJ31)
CAVWGNNARLLF

SEQ ID NO: 192222 - protein, 16 aa, Homo sapiens
  CDR3 for beta chain variable domain of TCR clone 96111 (TRBV27, TRBJ2-5)
CASSYGPGGQKETQYF

SEQ ID NO: 192223 - protein, 15 aa, Homo sapiens
  CDR3 for alpha chain variable domain of TCR clone 96112 (TRAV12-1, TRAJ44)
CVVFVNTCTASKLTF

SEQ ID NO: 192224 - protein, 17 aa, Homo sapiens
  CDR3 for beta chain variable domain of TCR clone 96112 (TRBV7-8, TRBJ2-6)
CASSAGTGGAGANVLTF

SEQ ID NO: 192225 - protein, 13 aa, Homo sapiens
  CDR3 for alpha chain variable domain of TCR clone 96113 (TRAV35, TRAJ42)
CAGFPGSQGNLIF

SEQ ID NO: 192226 - protein, 16 aa, Homo sapiens
  CDR3 for beta chain variable domain of TCR clone 96113 (TRBV19, TRBJ2-2)
CASRSPGTGATGELFF

SEQ ID NO: 192227 - protein, 14 aa, Homo sapiens
  CDR3 for alpha chain variable domain of TCR clone 96114 (TRAV29/DV5, TRAJ36)
CAARRKTGANNLFF

SEQ ID NO: 192228 - protein, 14 aa, Homo sapiens
  CDR3 for beta chain variable domain of TCR clone 96114 (TRBV7-9, TRBJ2-1)
CASSPRDSLYEQFF

SEQ ID NO: 192229 - protein, 12 aa, Homo sapiens
  CDR3 for alpha chain variable domain of TCR clone 96115 (TRAV12-3, TRAJ40)
CAMSSGTYKSIF

SEQ ID NO: 192230 - protein, 15 aa, Homo sapiens
  CDR3 for beta chain variable domain of TCR clone 96115 (TRBV7-3, TRBJ2-2)
CASSETGQGTGELFF

SEQ ID NO: 192231 - protein, 15 aa, Homo sapiens
  CDR3 for alpha chain variable domain of TCR clone 96116 (TRAV12-3, TRAJ6)
CAMSPASGGSYIPTF

SEQ ID NO: 192232 - protein, 18 aa, Homo sapiens
  CDR3 for beta chain variable domain of TCR clone 96116 (TRBV24-1, TRBJ2-2)
CATSDSGQGTANTGELFF

SEQ ID NO: 192233 - protein, 18 aa, Homo sapiens
  CDR3 for alpha chain variable domain of TCR clone 96117 (TRAV21, TRAJ52)
RAVRPSPAGGTSYGKLTF

SEQ ID NO: 192234 - protein, 14 aa, Homo sapiens
  CDR3 for beta chain variable domain of TCR clone 96117 (TRBV4-1, TRBJ2-2)
CASSQAVNTGELFF

SEQ ID NO: 192235 - protein, 14 aa, Homo sapiens
  CDR3 for alpha chain variable domain of TCR clone 96118 (TRAV21, TRAJ45)
CAVSSGGGADGLTF

SEQ ID NO: 192236 - protein, 17 aa, Homo sapiens
  CDR3 for beta chain variable domain of TCR clone 96118 (TRBV20-1, TRBJ2-2)
CSASGSGQGGLTGELFF

SEQ ID NO: 192237 - protein, 14 aa, Homo sapiens
  CDR3 for alpha chain variable domain of TCR clone 96119 (TRAV12-2, TRAJ40)
CAVKIPSGTYKYIF

SEQ ID NO: 192238 - protein, 13 aa, Homo sapiens
  CDR3 for beta chain variable domain of TCR clone 96119 (TRBV10-3, TRBJ1-2)
CAISERDSYGYTF

SEQ ID NO: 192239 - protein, 11 aa, Homo sapiens
  CDR3 for alpha chain variable domain of TCR clone 96120 (TRAV3, TRAJ32)
CAVREGIMVVI

SEQ ID NO: 192240 - protein, 13 aa, Homo sapiens
  CDR3 for beta chain variable domain of TCR clone 96120 (TRBV2, TRBJ1-1)
CASSEGGNTEAFF

SEQ ID NO: 192241 - protein, 13 aa, Homo sapiens
  CDR3 for alpha chain variable domain of TCR clone 96121 (TRAV12-3, TRAJ33)
CAMSVNSNYQLIW

SEQ ID NO: 192242 - protein, 12 aa, Homo sapiens
  CDR3 for beta chain variable domain of TCR clone 96121 (TRBV11-2, TRBJ2-2)
CASSRGGGELFF

SEQ ID NO: 192243 - protein, 14 aa, Homo sapiens
  CDR3 for alpha chain variable domain of TCR clone 96122 (TRAV12-1, TRAJ12)
CVVTRMDSSFKLIF

SEQ ID NO: 192244 - protein, 13 aa, Homo sapiens
  CDR3 for beta chain variable domain of TCR clone 96122 (TRBV20-1, TRBJ1-1)
CSARGGGNTEAFF

SEQ ID NO: 192245 - protein, 18 aa, Homo sapiens
  CDR3 for alpha chain variable domain of TCR clone 96123 (TRAV21, TRAJ52)
CAVRPSPAGGTSYGKLTF

SEQ ID NO: 192246 - protein, 16 aa, Homo sapiens
  CDR3 for beta chain variable domain of TCR clone 96123 (TRBV4-1, TRBJ1-2)
CASSQDAGQVLYGYTF

SEQ ID NO: 192247 - protein, 14 aa, Homo sapiens
  CDR3 for alpha chain variable domain of TCR clone 96124 (TRAV21, TRAJ35)
CAVMPIGFGNVLHC

SEQ ID NO: 192248 - protein, 15 aa, Homo sapiens
  CDR3 for beta chain variable domain of TCR clone 96124 (TRBV10-3, TRBJ2-7)
CAISERGGTSSTSGR

SEQ ID NO: 192249 - protein, 15 aa, Homo sapiens
  CDR3 for alpha chain variable domain of TCR clone 96125 (TRAV13-1, TRAJ44)
CAASRGGGTASKLTF

SEQ ID NO: 192250 - protein, 15 aa, Homo sapiens
  CDR3 for beta chain variable domain of TCR clone 96125 (TRBV7-2, TRBJ2-7)
CASSTPGLTRGEQYF

SEQ ID NO: 192251 - protein, 11 aa, Homo sapiens
  CDR3 for alpha chain variable domain of TCR clone 96126 (TRAV17, TRAJ43)
CATPRSNDLRF

SEQ ID NO: 192252 - protein, 15 aa, Homo sapiens
  CDR3 for beta chain variable domain of TCR clone 96126 (TRBV11-2, TRBJ2-1)
CASSLGTSGLNEQFF

SEQ ID NO: 192253 - protein, 16 aa, Homo sapiens
  CDR3 for alpha chain variable domain of TCR clone 96127 (TRAV8-6, TRAJ28)
CAVTSKPGAGSYQLTS

SEQ ID NO: 192254 - protein, 16 aa, Homo sapiens
  CDR3 for beta chain variable domain of TCR clone 96127 (TRBV12-4, TRBJ2-5)
CASSWRPSGDLETQYF

SEQ ID NO: 192255 - protein, 13 aa, Homo sapiens
  CDR3 for alpha chain variable domain of TCR clone 96128 (TRAV20, TRAJ31)
RAVQAIGGARLMF

SEQ ID NO: 192256 - protein, 14 aa, Homo sapiens
  CDR3 for beta chain variable domain of TCR clone 96128 (TRBV2, TRBJ1-5)
CASSGTVSNQPQHF

SEQ ID NO: 192257 - protein, 12 aa, Homo sapiens
  CDR3 for alpha chain variable domain of TCR clone 96129 (TRAV12-3, TRAJ17)
CAMTLTGTKLTF

SEQ ID NO: 192258 - protein, 13 aa, Homo sapiens
  CDR3 for beta chain variable domain of TCR clone 96129 (TRBV27, TRBJ2-1)
CASRTLGVGEQFF

SEQ ID NO: 192259 - protein, 19 aa, Homo sapiens
  CDR3 for alpha chain variable domain of TCR clone 96130 (TRAV38-1, TRAJ53)
CAFMKHGLESGGSNYKLTF

SEQ ID NO: 192260 - protein, 14 aa, Homo sapiens
  CDR3 for beta chain variable domain of TCR clone 96130 (TRBV19, TRBJ2-1)
CASPTFVLSGEQFF

SEQ ID NO: 192261 - protein, 16 aa, Homo sapiens
  CDR3 for alpha chain variable domain of TCR clone 96131 (TRAV3, TRAJ37)
CAVRVSGSGNTGKLIF

SEQ ID NO: 192262 - protein, 13 aa, Homo sapiens
  CDR3 for beta chain variable domain of TCR clone 96131 (TRBV14, TRBJ2-1)
CASSQDRRNEQFF

SEQ ID NO: 192263 - protein, 15 aa, Homo sapiens
  CDR3 for alpha chain variable domain of TCR clone 96132 (TRAV2, TRAJ13)
CCLLLCFRGYQKVTF

SEQ ID NO: 192264 - protein, 14 aa, Homo sapiens
  CDR3 for beta chain variable domain of TCR clone 96132 (TRBV12-4, TRBJ1-4)
CASRMTGRSEKLFF

SEQ ID NO: 192265 - protein, 13 aa, Homo sapiens
  CDR3 for alpha chain variable domain of TCR clone 96133 (TRAV8-6, TRAJ8)
CAVSNTGFQKLVF

SEQ ID NO: 192266 - protein, 15 aa, Homo sapiens
  CDR3 for beta chain variable domain of TCR clone 96133 (TRBV28, TRBJ2-5)
CTSSSGRTIQETQYF

SEQ ID NO: 192267 - protein, 17 aa, Homo sapiens
  CDR3 for alpha chain variable domain of TCR clone 96134 (TRAV3, TRAJ6)
CAVRDGPRAGGSYIPTF

SEQ ID NO: 192268 - protein, 12 aa, Homo sapiens
  CDR3 for beta chain variable domain of TCR clone 96134 (TRBV7-9, TRBJ2-7)
CASSLEGYEQYF

SEQ ID NO: 192269 - protein, 14 aa, Homo sapiens
  CDR3 for alpha chain variable domain of TCR clone 96135 (TRAV12-3, TRAJ10)
SHLPLTGGGNKLTF

SEQ ID NO: 192270 - protein, 12 aa, Homo sapiens
  CDR3 for beta chain variable domain of TCR clone 96135 (TRBV11-2, TRBJ2-2)
CASSPGGGELFF

SEQ ID NO: 192271 - protein, 14 aa, Homo sapiens
  CDR3 for alpha chain variable domain of TCR clone 96136 (TRAV1-2, TRAJ16)
CAVNRFSDGQKLLF

SEQ ID NO: 192272 - protein, 20 aa, Homo sapiens
  CDR3 for beta chain variable domain of TCR clone 96136 (TRBV28, TRBJ2-1)
CASTPIGQSPGLAGGNEQFF

SEQ ID NO: 192273 - protein, 14 aa, Homo sapiens
  CDR3 for alpha chain variable domain of TCR clone 96137 (TRAV12-2, TRAJ11)
CAVNRESGYSTLTF

SEQ ID NO: 192274 - protein, 13 aa, Homo sapiens
  CDR3 for beta chain variable domain of TCR clone 96137 (TRBV11-2, TRBJ2-5)
CASSFSSQETLYF

SEQ ID NO: 192275 - protein, 11 aa, Homo sapiens
  CDR3 for alpha chain variable domain of TCR clone 96138 (TRAV1-2, TRAJ40)
CAVPGTYKYIF

SEQ ID NO: 192276 - protein, 15 aa, Homo sapiens
  CDR3 for beta chain variable domain of TCR clone 96138 (TRBV7-3, TRBJ2-2)
CQQLKAGDLVRGAVF

SEQ ID NO: 192277 - protein, 18 aa, Homo sapiens
  CDR3 for alpha chain variable domain of TCR clone 96139 (TRAV21, TRAJ52)
CAVRPSPAGGTSYGKLTF

SEQ ID NO: 192278 - protein, 14 aa, Homo sapiens
  CDR3 for beta chain variable domain of TCR clone 96139 (TRBV5-7, TRBJ1-1)
CASSLAGDWTEAFF

SEQ ID NO: 192279 - protein, 13 aa, Homo sapiens
  CDR3 for alpha chain variable domain of TCR clone 96140 (TRAV12-3, TRAJ13)
CAMTSGGYQKVNF

SEQ ID NO: 192280 - protein, 13 aa, Homo sapiens
  CDR3 for beta chain variable domain of TCR clone 96140 (TRBV20-1, TRBJ2-2)
CSALSGGAGELFF

SEQ ID NO: 192281 - protein, 14 aa, Homo sapiens
  CDR3 for alpha chain variable domain of TCR clone 96141 (TRAV12-2, TRAJ45)
CAVYSGGGADGLTF

SEQ ID NO: 192282 - protein, 16 aa, Homo sapiens
  CDR3 for beta chain variable domain of TCR clone 96141 (TRBV4-3, TRBJ2-1)
CASSPALDRGVNEQFF

SEQ ID NO: 192283 - protein, 15 aa, Homo sapiens
  CDR3 for alpha chain variable domain of TCR clone 96142 (TRAV3, TRAJ20)
CAVRDIKLSDYKLSF

SEQ ID NO: 192284 - protein, 16 aa, Homo sapiens
  CDR3 for beta chain variable domain of TCR clone 96142 (TRBV20-1, TRBJ1-4)
CSAQGQGLLTNEKLFF

SEQ ID NO: 192285 - protein, 16 aa, Homo sapiens
  CDR3 for alpha chain variable domain of TCR clone 96143 (TRAV12-2, TRAJ40)
CAVIRVGTSGTYKYIF

SEQ ID NO: 192286 - protein, 16 aa, Homo sapiens
  CDR3 for beta chain variable domain of TCR clone 96143 (TRBV7-9, TRBJ2-1)
CASSDVAGGSYNEQFF

SEQ ID NO: 192287 - protein, 15 aa, Homo sapiens
  CDR3 for alpha chain variable domain of TCR clone 96144 (TRAV8-3, TRAJ27)
CAVGPSKTNAGKSTF

SEQ ID NO: 192288 - protein, 14 aa, Homo sapiens
  CDR3 for beta chain variable domain of TCR clone 96144 (TRBV4-1, TRBJ2-2)
CASSQAVNTGELFF

SEQ ID NO: 192289 - protein, 13 aa, Homo sapiens
  CDR3 for alpha chain variable domain of TCR clone 96145 (TRAV8-3, TRAJ28)
CAVGAVGSYQLTF

SEQ ID NO: 192290 - protein, 16 aa, Homo sapiens
  CDR3 for beta chain variable domain of TCR clone 96145 (TRBV12-4, TRBJ1-5)
CASSRPVGGSNQPQHF

SEQ ID NO: 192291 - protein, 14 aa, Homo sapiens
  CDR3 for alpha chain variable domain of TCR clone 96146 (TRAV16, TRAJ42)
CALLAGGSQGNLIF

SEQ ID NO: 192292 - protein, 13 aa, Homo sapiens
  CDR3 for beta chain variable domain of TCR clone 96146 (TRBV10-3, TRBJ2-7)
CASKLAVNYEQYF

SEQ ID NO: 192293 - protein, 14 aa, Homo sapiens
  CDR3 for alpha chain variable domain of TCR clone 96147 (TRAV17, TRAJ57)
CATDPQGGSEKLVF

SEQ ID NO: 192294 - protein, 16 aa, Homo sapiens
  CDR3 for beta chain variable domain of TCR clone 96147 (TRBV20-1, TRBJ1-4)
CSAPGQGVLTNEKLFF

SEQ ID NO: 192295 - protein, 17 aa, Homo sapiens
  CDR3 for alpha chain variable domain of TCR clone 96148 (TRAV13-1, TRAJ28)
CAASPSYSGAGSYQLTF

SEQ ID NO: 192296 - protein, 15 aa, Homo sapiens
  CDR3 for beta chain variable domain of TCR clone 96148 (TRBV6-3, TRBJ2-2)
CASSFLATLTGELFF

SEQ ID NO: 192297 - protein, 14 aa, Homo sapiens
  CDR3 for alpha chain variable domain of TCR clone 96149 (TRAV12-2, TRAJ13)
CAVKKTGGYQKVTF

SEQ ID NO: 192298 - protein, 17 aa, Homo sapiens
  CDR3 for beta chain variable domain of TCR clone 96149 (TRBV18, TRBJ2-2)
CASSQRSSGQGPGELFF

SEQ ID NO: 192299 - protein, 18 aa, Homo sapiens
  CDR3 for alpha chain variable domain of TCR clone 96150 (TRAV3, TRAJ32)
CAVRDIRGYGGATNKLIF

SEQ ID NO: 192300 - protein, 15 aa, Homo sapiens
  CDR3 for beta chain variable domain of TCR clone 96150 (TRBV7-9, TRBJ1-6)
CASSSPGRGNSPLHF

SEQ ID NO: 192301 - protein, 15 aa, Homo sapiens
  CDR3 for alpha chain variable domain of TCR clone 96151 (TRAV29/DV5, TRAJ42)
CAAKTDGGSQGNLIF

SEQ ID NO: 192302 - protein, 17 aa, Homo sapiens
  CDR3 for beta chain variable domain of TCR clone 96151 (TRBV5-4, TRBJ2-1)
CASSSAGGRGPYNEQFF

SEQ ID NO: 192303 - protein, 12 aa, Homo sapiens
  CDR3 for alpha chain variable domain of TCR clone 96152 (TRAV9-2, TRAJ26)
CALRGYGQNFVF

SEQ ID NO: 192304 - protein, 13 aa, Homo sapiens
  CDR3 for beta chain variable domain of TCR clone 96152 (TRBV7-9, TRBJ1-2)
CASSLKQNYGYTF

SEQ ID NO: 192305 - protein, 11 aa, Homo sapiens
  CDR3 for alpha chain variable domain of TCR clone 96153 (TRAV3, TRAJ49)
CAPITGNQFYF

SEQ ID NO: 192306 - protein, 16 aa, Homo sapiens
  CDR3 for beta chain variable domain of TCR clone 96153 (TRBV5-1, TRBJ2-3)
CASSIFPMSSTDTQYF

SEQ ID NO: 192307 - protein, 13 aa, Homo sapiens
  CDR3 for alpha chain variable domain of TCR clone 96154 (TRAV8-3, TRAJ28)
CAVGAVGSYQLTF

SEQ ID NO: 192308 - protein, 12 aa, Homo sapiens
  CDR3 for beta chain variable domain of TCR clone 96154 (TRBV5-4, TRBJ2-5)
CASSSTRETQYF

SEQ ID NO: 192309 - protein, 14 aa, Homo sapiens
  CDR3 for alpha chain variable domain of TCR clone 96155 (TRAV23/DV6, TRAJ37)
CAASTSSNTGKLIF

SEQ ID NO: 192310 - protein, 13 aa, Homo sapiens
  CDR3 for beta chain variable domain of TCR clone 96155 (TRBV19, TRBJ1-3)
CASRLSLGNTIYF

SEQ ID NO: 192311 - protein, 11 aa, Homo sapiens
  CDR3 for alpha chain variable domain of TCR clone 96156 (TRAV21, TRAJ48)
CAVDGNEKLTF

SEQ ID NO: 192312 - protein, 16 aa, Homo sapiens
  CDR3 for beta chain variable domain of TCR clone 96156 (TRBV19, TRBJ2-1)
CTSSSKGTRSYNEQFF

SEQ ID NO: 192313 - protein, 14 aa, Homo sapiens
  CDR3 for alpha chain variable domain of TCR clone 96157 (TRAV8-1, TRAJ9)
CAVNAWTGGFKTIF

SEQ ID NO: 192314 - protein, 17 aa, Homo sapiens
  CDR3 for beta chain variable domain of TCR clone 96157 (TRBV11-2, TRBJ2-1)
CASSLYPPGVEYNEQFF

SEQ ID NO: 192315 - protein, 14 aa, Homo sapiens
  CDR3 for alpha chain variable domain of TCR clone 96158 (TRAV13-1, TRAJ35)
CAASKGGFGNVLHF

SEQ ID NO: 192316 - protein, 16 aa, Homo sapiens
  CDR3 for beta chain variable domain of TCR clone 96158 (TRBV2, TRBJ2-3)
CQHRGAPRRWTDTQYF

SEQ ID NO: 192317 - protein, 14 aa, Homo sapiens
  CDR3 for alpha chain variable domain of TCR clone 96159 (TRAV16, TRAJ57)
CALPTQGGSEKLVF

SEQ ID NO: 192318 - protein, 23 aa, Homo sapiens
  CDR3 for beta chain variable domain of TCR clone 96159 (TRBV28, TRBJ1-3)
CASWGGASLWKHHIFWRGKLAHR

SEQ ID NO: 192319 - protein, 18 aa, Homo sapiens
  CDR3 for alpha chain variable domain of TCR clone 96160 (TRAV13-1, TRAJ52)
CAAKNPNAGGTSYGKLTF

SEQ ID NO: 192320 - protein, 14 aa, Homo sapiens
  CDR3 for beta chain variable domain of TCR clone 96160 (TRBV7-2, TRBJ1-1)
CASSFLTGTTEAFF

SEQ ID NO: 192321 - protein, 14 aa, Homo sapiens
  CDR3 for alpha chain variable domain of TCR clone 96161 (TRAV8-2, TRAJ11)
CVVSEKSGYSTLTF

SEQ ID NO: 192322 - protein, 16 aa, Homo sapiens
  CDR3 for beta chain variable domain of TCR clone 96161 (TRBV28, TRBJ2-1)
YASSSPEYPRDNEQFF

SEQ ID NO: 192323 - protein, 14 aa, Homo sapiens
  CDR3 for alpha chain variable domain of TCR clone 96162 (TRAV21, TRAJ35)
YAVMPIGFGNVLHC

SEQ ID NO: 192324 - protein, 12 aa, Homo sapiens
  CDR3 for beta chain variable domain of TCR clone 96162 (TRBV7-9, TRBJ2-7)
CASSIKREEQYF

SEQ ID NO: 192325 - protein, 16 aa, Homo sapiens
  CDR3 for alpha chain variable domain of TCR clone 96163 (TRAV8-6, TRAJ37)
CAVSGLGSSNPGKLIF

SEQ ID NO: 192326 - protein, 15 aa, Homo sapiens
  CDR3 for beta chain variable domain of TCR clone 96163 (TRBV20-1, TRBJ1-5)
CSARSGPSMNQPQHF

SEQ ID NO: 192327 - protein, 15 aa, Homo sapiens
  CDR3 for alpha chain variable domain of TCR clone 96164 (TRAV26-1, TRAJ17)
CIVRVVKAAGKKLTF

SEQ ID NO: 192328 - protein, 16 aa, Homo sapiens
  CDR3 for beta chain variable domain of TCR clone 96164 (TRBV7-9, TRBJ2-1)
CASSLVSGPSYNEQFF

SEQ ID NO: 192329 - protein, 12 aa, Homo sapiens
  CDR3 for alpha chain variable domain of TCR clone 96165 (TRAV21, TRAJ11)
CAVRGGNSTHTF

SEQ ID NO: 192330 - protein, 15 aa, Homo sapiens
  CDR3 for beta chain variable domain of TCR clone 96165 (TRBV6-1, TRBJ2-7)
CASSEPIAATTEQYF

SEQ ID NO: 192331 - protein, 13 aa, Homo sapiens
  CDR3 for alpha chain variable domain of TCR clone 96166 (TRAV2, TRAJ26)
CAVEENYGQNFVF

SEQ ID NO: 192332 - protein, 16 aa, Homo sapiens
  CDR3 for beta chain variable domain of TCR clone 96166 (TRBV7-9, TRBJ1-2)
CASSPGGGAINYGYTF

SEQ ID NO: 192333 - protein, 13 aa, Homo sapiens
  CDR3 for alpha chain variable domain of TCR clone 96167 (TRAV26-2, TRAJ54)
CIPRVGGAQKLEF

SEQ ID NO: 192334 - protein, 16 aa, Homo sapiens
  CDR3 for beta chain variable domain of TCR clone 96167 (TRBV4-1, TRBJ1-1)
CASSSMSERPNTEAFF

SEQ ID NO: 192335 - protein, 11 aa, Homo sapiens
  CDR3 for alpha chain variable domain of TCR clone 96168 (TRAV17, TRAJ9)
CGFTGGFKTIF

SEQ ID NO: 192336 - protein, 13 aa, Homo sapiens
  CDR3 for beta chain variable domain of TCR clone 96168 (TRBV3-1, TRBJ1-1)
CASSPGVITEAFF

SEQ ID NO: 192337 - protein, 17 aa, Homo sapiens
  CDR3 for alpha chain variable domain of TCR clone 96169 (TRAV27, TRAJ18)
CAGLHRGRGSTLGRPYF

SEQ ID NO: 192338 - protein, 14 aa, Homo sapiens
  CDR3 for beta chain variable domain of TCR clone 96169 (TRBV20-1, TRBJ1-5)
CSARGRGSNQPQHF

SEQ ID NO: 192339 - protein, 11 aa, Homo sapiens
  CDR3 for alpha chain variable domain of TCR clone 96170 (TRAV13-1, TRAJ6)
CATLGSYIPTF

SEQ ID NO: 192340 - protein, 12 aa, Homo sapiens
  CDR3 for beta chain variable domain of TCR clone 96170 (TRBV11-2, TRBJ2-1)
CAISPGNNEQFF

SEQ ID NO: 192341 - protein, 18 aa, Homo sapiens
  CDR3 for alpha chain variable domain of TCR clone 96171 (TRAV9-2, TRAJ52)
CALSRHNAGGTSYGKLTF

SEQ ID NO: 192342 - protein, 16 aa, Homo sapiens
  CDR3 for beta chain variable domain of TCR clone 96171 (TRBV7-3, TRBJ2-2)
CASSLKRGTLSGELFF

SEQ ID NO: 192343 - protein, 14 aa, Homo sapiens
  CDR3 for alpha chain variable domain of TCR clone 96172 (TRAV12-2, TRAJ5)
CAVNRSTGRRALTF

SEQ ID NO: 192344 - protein, 12 aa, Homo sapiens
  CDR3 for beta chain variable domain of TCR clone 96172 (TRBV19, TRBJ1-5)
CASSIAQQTKHF

SEQ ID NO: 192345 - protein, 11 aa, Homo sapiens
  CDR3 for alpha chain variable domain of TCR clone 96173 (TRAV12-3, TRAJ41)
CAMNAREALNF

SEQ ID NO: 192346 - protein, 16 aa, Homo sapiens
  CDR3 for beta chain variable domain of TCR clone 96173 (TRBV7-8, TRBJ2-3)
CTSSTEGQRETDTQYF

SEQ ID NO: 192347 - protein, 14 aa, Homo sapiens
  CDR3 for alpha chain variable domain of TCR clone 96174 (TRAV12-2, TRAJ15)
CAPHTGQAGTALLF

SEQ ID NO: 192348 - protein, 17 aa, Homo sapiens
  CDR3 for beta chain variable domain of TCR clone 96174 (TRBV5-5, TRBJ1-2)
CASSLGSLDGQSEGYTF

SEQ ID NO: 192349 - protein, 15 aa, Homo sapiens
  CDR3 for alpha chain variable domain of TCR clone 96175 (TRAV13-1, TRAJ11)
CAASNRNSGYSTLTF

SEQ ID NO: 192350 - protein, 12 aa, Homo sapiens
  CDR3 for beta chain variable domain of TCR clone 96175 (TRBV11-2, TRBJ2-1)
CASSPGNNEQFF

SEQ ID NO: 192351 - protein, 17 aa, Homo sapiens
  CDR3 for alpha chain variable domain of TCR clone 96176 (TRAV29/DV5, TRAJ52)
CAASANAGGTSYGKLTF

SEQ ID NO: 192352 - protein, 15 aa, Homo sapiens
  CDR3 for beta chain variable domain of TCR clone 96176 (TRBV5-1, TRBJ2-7)
CASSSNGGPAREQYF

SEQ ID NO: 192353 - protein, 14 aa, Homo sapiens
  CDR3 for alpha chain variable domain of TCR clone 96177 (TRAV2, TRAJ9)
CAVEDRSGGFKTIF

SEQ ID NO: 192354 - protein, 15 aa, Homo sapiens
  CDR3 for beta chain variable domain of TCR clone 96177 (TRBV19, TRBJ2-1)
CANSSPGVPLDEQFF

SEQ ID NO: 192355 - protein, 14 aa, Homo sapiens
  CDR3 for alpha chain variable domain of TCR clone 96178 (TRAV12-3, TRAJ10)
SHLPLTGGGNKLTF

SEQ ID NO: 192356 - protein, 13 aa, Homo sapiens
  CDR3 for beta chain variable domain of TCR clone 96178 (TRBV24-1, TRBJ1-2)
CATSGTALDGYTF

SEQ ID NO: 192357 - protein, 14 aa, Homo sapiens
  CDR3 for alpha chain variable domain of TCR clone 96179 (TRAV12-2, TRAJ17)
CAVLFKAAGNKLTF

SEQ ID NO: 192358 - protein, 13 aa, Homo sapiens
  CDR3 for beta chain variable domain of TCR clone 96179 (TRBV7-3, TRBJ2-1)
CASSLDSYNEQFF

SEQ ID NO: 192359 - protein, 14 aa, Homo sapiens
  CDR3 for alpha chain variable domain of TCR clone 96180 (TRAV12-2, TRAJ15)
CAPHTGQAGTALIF

SEQ ID NO: 192360 - protein, 15 aa, Homo sapiens
  CDR3 for beta chain variable domain of TCR clone 96180 (TRBV11-3, TRBJ2-3)
CASLKDGREGDTQYF

SEQ ID NO: 192361 - protein, 12 aa, Homo sapiens
  CDR3 for alpha chain variable domain of TCR clone 96181 (TRAV27, TRAJ37)
CADSGSPGKLIF

SEQ ID NO: 192362 - protein, 18 aa, Homo sapiens
  CDR3 for beta chain variable domain of TCR clone 96181 (TRBV7-9, TRBJ1-1)
CASSKPWDTMGMNTEAFF

SEQ ID NO: 192363 - protein, 13 aa, Homo sapiens
  CDR3 for alpha chain variable domain of TCR clone 96182 (TRAV12-3, TRAJ33)
RAMSVNSNYQLIW

SEQ ID NO: 192364 - protein, 12 aa, Homo sapiens
  CDR3 for beta chain variable domain of TCR clone 96182 (TRBV12-4, TRBJ1-2)
CASSFIWLHLRF

SEQ ID NO: 192365 - protein, 13 aa, Homo sapiens
  CDR3 for alpha chain variable domain of TCR clone 96183 (TRAV8-3, TRAJ36)
CAVGATGANNLFF

SEQ ID NO: 192366 - protein, 13 aa, Homo sapiens
  CDR3 for beta chain variable domain of TCR clone 96183 (TRBV6-1, TRBJ1-1)
CASSRQGNTEAVF

SEQ ID NO: 192367 - protein, 15 aa, Homo sapiens
  CDR3 for alpha chain variable domain of TCR clone 96184 (TRAV4, TRAJ12)
CLVGDLMDSSYKSIF

SEQ ID NO: 192368 - protein, 14 aa, Homo sapiens
  CDR3 for beta chain variable domain of TCR clone 96184 (TRBV7-2, TRBJ1-1)
CASSHRQGRTEAFF

SEQ ID NO: 192369 - protein, 14 aa, Homo sapiens
  CDR3 for alpha chain variable domain of TCR clone 96185 (TRAV8-3, TRAJ9)
CAVVYNTGGFKTIF

SEQ ID NO: 192370 - protein, 15 aa, Homo sapiens
  CDR3 for beta chain variable domain of TCR clone 96185 (TRBV20-1, TRBJ2-7)
CSARDRVSGMDEQYF

SEQ ID NO: 192371 - protein, 10 aa, Homo sapiens
  CDR3 for alpha chain variable domain of TCR clone 96186 (TRAV12-1, TRAJ23)
CVVSGGKLIF

SEQ ID NO: 192372 - protein, 13 aa, Homo sapiens
  CDR3 for beta chain variable domain of TCR clone 96186 (TRBV20-1, TRBJ1-1)
CSAPLGGGTEAFF

SEQ ID NO: 192373 - protein, 11 aa, Homo sapiens
  CDR3 for alpha chain variable domain of TCR clone 96187 (TRAV2, TRAJ13)
CASGGYQKVTF

SEQ ID NO: 192374 - protein, 16 aa, Homo sapiens
  CDR3 for beta chain variable domain of TCR clone 96187 (TRBV7-3, TRBJ2-3)
CASSLSGYRPEDTQYF

SEQ ID NO: 192375 - protein, 12 aa, Homo sapiens
  CDR3 for alpha chain variable domain of TCR clone 96188 (TRAV8-3, TRAJ26)
CAGDNYSQNFVF

SEQ ID NO: 192376 - protein, 16 aa, Homo sapiens
  CDR3 for beta chain variable domain of TCR clone 96188 (TRBV7-3, TRBJ2-1)
CASSLEGYRSYNEQFF

SEQ ID NO: 192377 - protein, 14 aa, Homo sapiens
  CDR3 for alpha chain variable domain of TCR clone 96189 (TRAV12-2, TRAJ40)
CAVKIPSGTYKYIF

SEQ ID NO: 192378 - protein, 15 aa, Homo sapiens
  CDR3 for beta chain variable domain of TCR clone 96189 (TRBV6-1, TRBJ2-6)
CASSSRPSGANVLTF

SEQ ID NO: 192379 - protein, 12 aa, Homo sapiens
  CDR3 for alpha chain variable domain of TCR clone 96190 (TRAV8-3, TRAJ41)
CAVALSGYALNF

SEQ ID NO: 192380 - protein, 14 aa, Homo sapiens
  CDR3 for beta chain variable domain of TCR clone 96190 (TRBV5-1, TRBJ2-7)
GASSRGESLYEQYF

SEQ ID NO: 192381 - protein, 11 aa, Homo sapiens
  CDR3 for alpha chain variable domain of TCR clone 96191 (TRAV2, TRAJ33)
CAVDSNYQLIW

SEQ ID NO: 192382 - protein, 15 aa, Homo sapiens
  CDR3 for beta chain variable domain of TCR clone 96191 (TRBV19, TRBJ1-1)
CASTSGQIQDTEAFF

SEQ ID NO: 192383 - protein, 15 aa, Homo sapiens
  CDR3 for alpha chain variable domain of TCR clone 96192 (TRAV26-2, TRAJ13)
CILRDLSGGYQKVTF

SEQ ID NO: 192384 - protein, 16 aa, Homo sapiens
  CDR3 for beta chain variable domain of TCR clone 96192 (TRBV7-3, TRBJ2-1)
RASSLLVGELVDEQFF

SEQ ID NO: 192385 - protein, 14 aa, Homo sapiens
  CDR3 for alpha chain variable domain of TCR clone 96193 (TRAV13-2, TRAJ43)
CAEIPTYNNNDMRF

SEQ ID NO: 192386 - protein, 16 aa, Homo sapiens
  CDR3 for beta chain variable domain of TCR clone 96193 (TRBV7-9, TRBJ2-1)
CASSDVAGGSYNEQFF

SEQ ID NO: 192387 - protein, 14 aa, Homo sapiens
  CDR3 for alpha chain variable domain of TCR clone 96194 (TRAV1-2, TRAJ16)
CAVNRFSDGQKLLF

SEQ ID NO: 192388 - protein, 13 aa, Homo sapiens
  CDR3 for beta chain variable domain of TCR clone 96194 (TRBV20-1, TRBJ1-1)
CSARGVGNTEAFF

SEQ ID NO: 192389 - protein, 13 aa, Homo sapiens
  CDR3 for alpha chain variable domain of TCR clone 96195 (TRAV12-1, TRAJ7)
CVVNMRGNNRLAF

SEQ ID NO: 192390 - protein, 14 aa, Homo sapiens
  CDR3 for beta chain variable domain of TCR clone 96195 (TRBV18, TRBJ2-7)
CASSPRGGAYEQYF

SEQ ID NO: 192391 - protein, 14 aa, Homo sapiens
  CDR3 for alpha chain variable domain of TCR clone 96196 (TRAV1-2, TRAJ8)
CAVREDTGFQKLVF

SEQ ID NO: 192392 - protein, 14 aa, Homo sapiens
  CDR3 for beta chain variable domain of TCR clone 96196 (TRBV7-9, TRBJ1-1)
CASSVGGANTEAFF

SEQ ID NO: 192393 - protein, 14 aa, Homo sapiens
  CDR3 for alpha chain variable domain of TCR clone 96197 (TRAV34, TRAJ44)
CGADGTGTASKLTF

SEQ ID NO: 192394 - protein, 16 aa, Homo sapiens
  CDR3 for beta chain variable domain of TCR clone 96197 (TRBV18, TRBJ1-1)
CASSPGVGGRGGEAFF

SEQ ID NO: 192395 - protein, 14 aa, Homo sapiens
  CDR3 for alpha chain variable domain of TCR clone 96198 (TRAV12-3, TRAJ10)
SHLPLTGGGNKLTF

SEQ ID NO: 192396 - protein, 15 aa, Homo sapiens
  CDR3 for beta chain variable domain of TCR clone 96198 (TRBV11-3, TRBJ2-3)
CASLKDGRGGDTQYF

SEQ ID NO: 192397 - protein, 14 aa, Homo sapiens
  CDR3 for alpha chain variable domain of TCR clone 96199 (TRAV12-1, TRAJ27)
CGEHIRTNAGKSTF

SEQ ID NO: 192398 - protein, 15 aa, Homo sapiens
  CDR3 for beta chain variable domain of TCR clone 96199 (TRBV19, TRBJ1-1)
CASTSGQIQNTEAFL

SEQ ID NO: 192399 - protein, 11 aa, Homo sapiens
  CDR3 for alpha chain variable domain of TCR clone 96200 (TRAV17, TRAJ43)
CATPRSNDMRF

SEQ ID NO: 192400 - protein, 15 aa, Homo sapiens
  CDR3 for beta chain variable domain of TCR clone 96200 (TRBV4-1, TRBJ1-4)
CASSDTGGTNEKLFF

SEQ ID NO: 192401 - protein, 15 aa, Homo sapiens
  CDR3 for alpha chain variable domain of TCR clone 96201 (TRAV8-3, TRAJ20)
CAVEAEGSNDYKLSF

SEQ ID NO: 192402 - protein, 15 aa, Homo sapiens
  CDR3 for beta chain variable domain of TCR clone 96201 (TRBV11-3, TRBJ2-1)
CASSLAGQTYNEQFF

SEQ ID NO: 192403 - protein, 16 aa, Homo sapiens
  CDR3 for alpha chain variable domain of TCR clone 96202 (TRAV22, TRAJ45)
CAVERGKRGGADVLTF

SEQ ID NO: 192404 - protein, 13 aa, Homo sapiens
  CDR3 for beta chain variable domain of TCR clone 96202 (TRBV27, TRBJ1-1)
CASSLSIGAEAFF

SEQ ID NO: 192405 - protein, 18 aa, Homo sapiens
  CDR3 for alpha chain variable domain of TCR clone 96203 (TRAV29/DV5, TRAJ52)
CAAGFRGAGGTSYGKLTF

SEQ ID NO: 192406 - protein, 15 aa, Homo sapiens
  CDR3 for beta chain variable domain of TCR clone 96203 (TRBV20-1, TRBJ2-7)
CSARGPLAGGREQYF

SEQ ID NO: 192407 - protein, 14 aa, Homo sapiens
  CDR3 for alpha chain variable domain of TCR clone 96204 (TRAV9-2, TRAJ39)
CALYIYNAGNMLTF

SEQ ID NO: 192408 - protein, 14 aa, Homo sapiens
  CDR3 for beta chain variable domain of TCR clone 96204 (TRBV9, TRBJ2-1)
CASSVDPRGKEQSF

SEQ ID NO: 192409 - protein, 15 aa, Homo sapiens
  CDR3 for alpha chain variable domain of TCR clone 96205 (TRAV14/DV4, TRAJ46)
CAMREKKSSGDKLTF

SEQ ID NO: 192410 - protein, 17 aa, Homo sapiens
  CDR3 for beta chain variable domain of TCR clone 96205 (TRBV6-5, TRBJ2-7)
CASSPSGAVYGWGEQYF

SEQ ID NO: 192411 - protein, 14 aa, Homo sapiens
  CDR3 for alpha chain variable domain of TCR clone 96206 (TRAV12-3, TRAJ10)
SHLPLTGGGNKLTF

SEQ ID NO: 192412 - protein, 16 aa, Homo sapiens
  CDR3 for beta chain variable domain of TCR clone 96206 (TRBV7-9, TRBJ2-6)
CASSLKGPLRANVLTF

SEQ ID NO: 192413 - protein, 14 aa, Homo sapiens
  CDR3 for alpha chain variable domain of TCR clone 96207 (TRAV3, TRAJ9)
CAVRGNTRGFKTIF

SEQ ID NO: 192414 - protein, 14 aa, Homo sapiens
  CDR3 for beta chain variable domain of TCR clone 96207 (TRBV15, TRBJ2-1)
CATSGVEDYNEQFF

SEQ ID NO: 192415 - protein, 14 aa, Homo sapiens
  CDR3 for alpha chain variable domain of TCR clone 96208 (TRAV8-1, TRAJ5)
CAVSMDTGRRSLTF

SEQ ID NO: 192416 - protein, 15 aa, Homo sapiens
  CDR3 for beta chain variable domain of TCR clone 96208 (TRBV19, TRBJ2-4)
CASRGPRRGENIQYF

SEQ ID NO: 192417 - protein, 15 aa, Homo sapiens
  CDR3 for alpha chain variable domain of TCR clone 96209 (TRAV26-1, TRAJ22)
CIVRVSFWFCKATDL

SEQ ID NO: 192418 - protein, 12 aa, Homo sapiens
  CDR3 for beta chain variable domain of TCR clone 96209 (TRBV19, TRBJ1-5)
CASSIAQQPQHF

SEQ ID NO: 192419 - protein, 10 aa, Homo sapiens
  CDR3 for alpha chain variable domain of TCR clone 96210 (TRAV8-1, TRAJ21)
CAVNGTKFYF

SEQ ID NO: 192420 - protein, 15 aa, Homo sapiens
  CDR3 for beta chain variable domain of TCR clone 96210 (TRBV5-1, TRBJ2-3)
CASSVTSGSTDTQYF

SEQ ID NO: 192421 - protein, 15 aa, Homo sapiens
  CDR3 for alpha chain variable domain of TCR clone 96211 (TRAV3, TRAJ17)
CAVRDTGAAGNKLTF

SEQ ID NO: 192422 - protein, 11 aa, Homo sapiens
  CDR3 for beta chain variable domain of TCR clone 96211 (TRBV11-2, TRBJ2-2)
CASSLPGELFF

SEQ ID NO: 192423 - protein, 14 aa, Homo sapiens
  CDR3 for alpha chain variable domain of TCR clone 96212 (TRAV17, TRAJ58)
CATDGETSGSRLPF

SEQ ID NO: 192424 - protein, 15 aa, Homo sapiens
  CDR3 for beta chain variable domain of TCR clone 96212 (TRBV6-3, TRBJ2-7)
CASSSPGTVFYEQYF

SEQ ID NO: 192425 - protein, 14 aa, Homo sapiens
  CDR3 for alpha chain variable domain of TCR clone 96213 (TRAV1-2, TRAJ16)
CAVNRFSDGQKLLF

SEQ ID NO: 192426 - protein, 15 aa, Homo sapiens
  CDR3 for beta chain variable domain of TCR clone 96213 (TRBV7-9, TRBJ1-4)
CASSARTGGNERLFF

SEQ ID NO: 192427 - protein, 14 aa, Homo sapiens
  CDR3 for alpha chain variable domain of TCR clone 96214 (TRAV12-1, TRAJ17)
CVVNYKAAGNKLTF

SEQ ID NO: 192428 - protein, 17 aa, Homo sapiens
  CDR3 for beta chain variable domain of TCR clone 96214 (TRBV11-2, TRBJ2-1)
CASSLCPPGVEYNEQFF

SEQ ID NO: 192429 - protein, 13 aa, Homo sapiens
  CDR3 for alpha chain variable domain of TCR clone 96215 (TRAV20, TRAJ20)
CAVQALNDYKLSF

SEQ ID NO: 192430 - protein, 13 aa, Homo sapiens
  CDR3 for beta chain variable domain of TCR clone 96215 (TRBV7-9, TRBJ1-4)
CASSVPGIEKLFF

SEQ ID NO: 192431 - protein, 14 aa, Homo sapiens
  CDR3 for alpha chain variable domain of TCR clone 96216 (TRAV1-2, TRAJ16)
CAVNRFSDGQKLLF

SEQ ID NO: 192432 - protein, 12 aa, Homo sapiens
  CDR3 for beta chain variable domain of TCR clone 96216 (TRBV19, TRBJ2-5)
CASSISEETQYF

SEQ ID NO: 192433 - protein, 13 aa, Homo sapiens
  CDR3 for alpha chain variable domain of TCR clone 96217 (TRAV4, TRAJ42)
CLVGGGSQGNLIF

SEQ ID NO: 192434 - protein, 17 aa, Homo sapiens
  CDR3 for beta chain variable domain of TCR clone 96217 (TRBV24-1, TRBJ2-1)
CATSDVSTSGTYNEQFF

SEQ ID NO: 192435 - protein, 14 aa, Homo sapiens
  CDR3 for alpha chain variable domain of TCR clone 96218 (TRAV1-2, TRAJ8)
CAVREDTGFQQLVF

SEQ ID NO: 192436 - protein, 14 aa, Homo sapiens
  CDR3 for beta chain variable domain of TCR clone 96218 (TRBV29-1, TRBJ2-5)
CSVETSGSGETQYF

SEQ ID NO: 192437 - protein, 16 aa, Homo sapiens
  CDR3 for alpha chain variable domain of TCR clone 96219 (TRAV30, TRAJ24)
CGTEIVDADSWGKFQL

SEQ ID NO: 192438 - protein, 13 aa, Homo sapiens
  CDR3 for beta chain variable domain of TCR clone 96219 (TRBV19, TRBJ1-2)
CASSVPGQDGYTF

SEQ ID NO: 192439 - protein, 16 aa, Homo sapiens
  CDR3 for alpha chain variable domain of TCR clone 96220 (TRAV30, TRAJ24)
CGTEIVGADSWGKFQF

SEQ ID NO: 192440 - protein, 15 aa, Homo sapiens
  CDR3 for beta chain variable domain of TCR clone 96220 (TRBV7-9, TRBJ1-4)
CASSARIGGNEKLFF

SEQ ID NO: 192441 - protein, 14 aa, Homo sapiens
  CDR3 for alpha chain variable domain of TCR clone 96221 (TRAV25, TRAJ6)
CAGRESGGSYIPTF

SEQ ID NO: 192442 - protein, 13 aa, Homo sapiens
  CDR3 for beta chain variable domain of TCR clone 96221 (TRBV7-3, TRBJ1-1)
CASSQDWGAEAFF

SEQ ID NO: 192443 - protein, 14 aa, Homo sapiens
  CDR3 for alpha chain variable domain of TCR clone 96222 (TRAV1-2, TRAJ8)
CAVREDTGFQKLVF

SEQ ID NO: 192444 - protein, 16 aa, Homo sapiens
  CDR3 for beta chain variable domain of TCR clone 96222 (TRBV7-2, TRBJ2-6)
CASSLAGRSGANVLTF

SEQ ID NO: 192445 - protein, 14 aa, Homo sapiens
  CDR3 for alpha chain variable domain of TCR clone 96223 (TRAV3, TRAJ9)
CAVRLNTGGFKTIF

SEQ ID NO: 192446 - protein, 12 aa, Homo sapiens
  CDR3 for beta chain variable domain of TCR clone 96223 (TRBV3-1, TRBJ2-1)
CASSQGSSGQFF

SEQ ID NO: 192447 - protein, 14 aa, Homo sapiens
  CDR3 for alpha chain variable domain of TCR clone 96224 (TRAV21, TRAJ28)
CAVGSGAGSYQLTF

SEQ ID NO: 192448 - protein, 14 aa, Homo sapiens
  CDR3 for beta chain variable domain of TCR clone 96224 (TRBV18, TRBJ1-4)
CASLPGPNGEKLFF

SEQ ID NO: 192449 - protein, 15 aa, Homo sapiens
  CDR3 for alpha chain variable domain of TCR clone 96225 (TRAV12-2, TRAJ43)
CAFDMRFVAGTRLTV

SEQ ID NO: 192450 - protein, 13 aa, Homo sapiens
  CDR3 for beta chain variable domain of TCR clone 96225 (TRBV4-2, TRBJ1-1)
CASSQAGNTEAFF

SEQ ID NO: 192451 - protein, 12 aa, Homo sapiens
  CDR3 for alpha chain variable domain of TCR clone 96226 (TRAV17, TRAJ6)
CATGGGSYIPTF

SEQ ID NO: 192452 - protein, 15 aa, Homo sapiens
  CDR3 for beta chain variable domain of TCR clone 96226 (TRBV4-1, TRBJ1-4)
CASSDTGGTNEKLFF

SEQ ID NO: 192453 - protein, 11 aa, Homo sapiens
  CDR3 for alpha chain variable domain of TCR clone 96227 (TRAV12-2, TRAJ31)
CAILNNARLMF

SEQ ID NO: 192454 - protein, 13 aa, Homo sapiens
  CDR3 for beta chain variable domain of TCR clone 96227 (TRBV20-1, TRBJ1-1)
CSARLGQGTEAFV

SEQ ID NO: 192455 - protein, 15 aa, Homo sapiens
  CDR3 for alpha chain variable domain of TCR clone 96228 (TRAV3, TRAJ13)
CAVRVYSGGYQKVTF

SEQ ID NO: 192456 - protein, 13 aa, Homo sapiens
  CDR3 for beta chain variable domain of TCR clone 96228 (TRBV5-4, TRBJ1-1)
CASSSAGNTEAFF

SEQ ID NO: 192457 - protein, 17 aa, Homo sapiens
  CDR3 for alpha chain variable domain of TCR clone 96229 (TRAV26-1, TRAJ11)
CIVRVGQSNSVYSTLTF

SEQ ID NO: 192458 - protein, 15 aa, Homo sapiens
  CDR3 for beta chain variable domain of TCR clone 96229 (TRBV27, TRBJ2-5)
CASSLIPSGGETQYF

SEQ ID NO: 192459 - protein, 13 aa, Homo sapiens
  CDR3 for alpha chain variable domain of TCR clone 96230 (TRAV17, TRAJ29)
CATDAFRKHTSCL

SEQ ID NO: 192460 - protein, 13 aa, Homo sapiens
  CDR3 for beta chain variable domain of TCR clone 96230 (TRBV5-7, TRBJ2-6)
CASTSSGSNVLTF

SEQ ID NO: 192461 - protein, 13 aa, Homo sapiens
  CDR3 for alpha chain variable domain of TCR clone 96231 (TRAV12-2, TRAJ18)
CAVRGSTLGRLYF

SEQ ID NO: 192462 - protein, 13 aa, Homo sapiens
  CDR3 for beta chain variable domain of TCR clone 96231 (TRBV15, TRBJ1-6)
CATSGGLNSPLHF

SEQ ID NO: 192463 - protein, 14 aa, Homo sapiens
  CDR3 for alpha chain variable domain of TCR clone 96232 (TRAV8-4, TRAJ13)
CAVTLSGGYQKVTF

SEQ ID NO: 192464 - protein, 16 aa, Homo sapiens
  CDR3 for beta chain variable domain of TCR clone 96232 (TRBV5-6, TRBJ1-4)
CASSPSGGLKTEKLLS

SEQ ID NO: 192465 - protein, 14 aa, Homo sapiens
  CDR3 for alpha chain variable domain of TCR clone 96233 (TRAV17, TRAJ32)
CATDPGGATNKLIF

SEQ ID NO: 192466 - protein, 14 aa, Homo sapiens
  CDR3 for beta chain variable domain of TCR clone 96233 (TRBV2, TRBJ1-5)
CASSENRGCQPQHF

SEQ ID NO: 192467 - protein, 13 aa, Homo sapiens
  CDR3 for alpha chain variable domain of TCR clone 96234 (TRAV23/DV6, TRAJ12)
CAPRVDSSYNLIF

SEQ ID NO: 192468 - protein, 12 aa, Homo sapiens
  CDR3 for beta chain variable domain of TCR clone 96234 (TRBV7-6, TRBJ2-5)
CASSLSQETQYF

SEQ ID NO: 192469 - protein, 10 aa, Homo sapiens
  CDR3 for alpha chain variable domain of TCR clone 96235 (TRAV12-3, TRAJ23)
CAPGGGKLIF

SEQ ID NO: 192470 - protein, 13 aa, Homo sapiens
  CDR3 for beta chain variable domain of TCR clone 96235 (TRBV20-1, TRBJ1-1)
CSARGGGNTEAFF

SEQ ID NO: 192471 - protein, 14 aa, Homo sapiens
  CDR3 for alpha chain variable domain of TCR clone 96236 (TRAV12-2, TRAJ5)
CAVNRSTGRRALTF

SEQ ID NO: 192472 - protein, 12 aa, Homo sapiens
  CDR3 for beta chain variable domain of TCR clone 96236 (TRBV19, TRBJ2-7)
CASTDRGYEQYF

SEQ ID NO: 192473 - protein, 11 aa, Homo sapiens
  CDR3 for alpha chain variable domain of TCR clone 96237 (TRAV35, TRAJ23)
CAVRQGGKLIF

SEQ ID NO: 192474 - protein, 20 aa, Homo sapiens
  CDR3 for beta chain variable domain of TCR clone 96237 (TRBV7-8, TRBJ2-2)
CASSHLFPGPTIHITGELFF

SEQ ID NO: 192475 - protein, 15 aa, Homo sapiens
  CDR3 for alpha chain variable domain of TCR clone 96238 (TRAV26-1, TRAJ52)
CIVSDLGTSYGKLTF

SEQ ID NO: 192476 - protein, 14 aa, Homo sapiens
  CDR3 for beta chain variable domain of TCR clone 96238 (TRBV25-1, TRBJ1-1)
CASTHLGGNTEAFF

SEQ ID NO: 192477 - protein, 23 aa, Homo sapiens
  CDR3 for alpha chain variable domain of TCR clone 96239 (TRAV13-2, TRAJ20)
QLLNLETQLSTFVQGYNDYKLSF

SEQ ID NO: 192478 - protein, 16 aa, Homo sapiens
  CDR3 for beta chain variable domain of TCR clone 96239 (TRBV4-3, TRBJ2-3)
CASSLGLAGEGDTQYF

SEQ ID NO: 192479 - protein, 14 aa, Homo sapiens
  CDR3 for alpha chain variable domain of TCR clone 96240 (TRAV8-3, TRAJ4)
CAVGASGGYNKLIF

SEQ ID NO: 192480 - protein, 15 aa, Homo sapiens
  CDR3 for beta chain variable domain of TCR clone 96240 (TRBV28, TRBJ2-1)
CASSIIAGGRSEQFF

SEQ ID NO: 192481 - protein, 16 aa, Homo sapiens
  CDR3 for alpha chain variable domain of TCR clone 96241 (TRAV3, TRAJ10)
CAVRDMRAGGGNKLTL

SEQ ID NO: 192482 - protein, 13 aa, Homo sapiens
  CDR3 for beta chain variable domain of TCR clone 96241 (TRBV20-1, TRBJ2-7)
CSARWGYNYEQYF

SEQ ID NO: 192483 - protein, 12 aa, Homo sapiens
  CDR3 for alpha chain variable domain of TCR clone 96242 (TRAV8-3, TRAJ34)
CAVLPNTDKLIF

SEQ ID NO: 192484 - protein, 15 aa, Homo sapiens
  CDR3 for beta chain variable domain of TCR clone 96242 (TRBV7-2, TRBJ2-7)
CASSLGIGNDYEQYF

SEQ ID NO: 192485 - protein, 14 aa, Homo sapiens
  CDR3 for alpha chain variable domain of TCR clone 96243 (TRAV12-3, TRAJ10)
SHLPLTGGGNKLTF

SEQ ID NO: 192486 - protein, 12 aa, Homo sapiens
  CDR3 for beta chain variable domain of TCR clone 96243 (TRBV7-9, TRBJ2-7)
CATRTDANEQYF

SEQ ID NO: 192487 - protein, 16 aa, Homo sapiens
  CDR3 for alpha chain variable domain of TCR clone 96244 (TRAV4, TRAJ22)
CLVGDLYSGSARQLTF

SEQ ID NO: 192488 - protein, 16 aa, Homo sapiens
  CDR3 for beta chain variable domain of TCR clone 96244 (TRBV7-9, TRBJ2-1)
CASSDVAGSSYNEQFF

SEQ ID NO: 192489 - protein, 14 aa, Homo sapiens
  CDR3 for alpha chain variable domain of TCR clone 96245 (TRAV12-2, TRAJ52)
CAVPGGTSYGKLKF

SEQ ID NO: 192490 - protein, 12 aa, Homo sapiens
  CDR3 for beta chain variable domain of TCR clone 96245 (TRBV18, TRBJ2-1)
CASSPGTSEGFF

SEQ ID NO: 192491 - protein, 13 aa, Homo sapiens
  CDR3 for alpha chain variable domain of TCR clone 96246 (TRAV2, TRAJ15)
CAVASQAGTALIF

SEQ ID NO: 192492 - protein, 13 aa, Homo sapiens
  CDR3 for beta chain variable domain of TCR clone 96246 (TRBV7-6, TRBJ1-2)
CASSLVADYGYTF

SEQ ID NO: 192493 - protein, 16 aa, Homo sapiens
  CDR3 for alpha chain variable domain of TCR clone 96247 (TRAV12-3, TRAJ53)
CAMSPGSGGSNYKLTF

SEQ ID NO: 192494 - protein, 14 aa, Homo sapiens
  CDR3 for beta chain variable domain of TCR clone 96247 (TRBV2, TRBJ2-7)
CASSLASGGYEQYF

SEQ ID NO: 192495 - protein, 13 aa, Homo sapiens
  CDR3 for alpha chain variable domain of TCR clone 96248 (TRAV13-1, TRAJ37)
CAAVSGNTGKLIF

SEQ ID NO: 192496 - protein, 17 aa, Homo sapiens
  CDR3 for beta chain variable domain of TCR clone 96248 (TRBV10-2, TRBJ1-6)
CASSENRGSSYNPPLHF

SEQ ID NO: 192497 - protein, 16 aa, Homo sapiens
  CDR3 for alpha chain variable domain of TCR clone 96249 (TRAV38-1, TRAJ32)
CAFMKGGGGATNKLIF

SEQ ID NO: 192498 - protein, 13 aa, Homo sapiens
  CDR3 for beta chain variable domain of TCR clone 96249 (TRBV20-1, TRBJ2-5)
CSAREACQETQYF

SEQ ID NO: 192499 - protein, 16 aa, Homo sapiens
  CDR3 for alpha chain variable domain of TCR clone 96250 (TRAV3, TRAJ3)
CAVKDRAKSSASKIIF

SEQ ID NO: 192500 - protein, 13 aa, Homo sapiens
  CDR3 for beta chain variable domain of TCR clone 96250 (TRBV10-3, TRBJ2-7)
CASKLAVNYEQYF

SEQ ID NO: 192501 - protein, 14 aa, Homo sapiens
  CDR3 for alpha chain variable domain of TCR clone 96251 (TRAV3, TRAJ33)
CAVRDMSSNYQLIW

SEQ ID NO: 192502 - protein, 17 aa, Homo sapiens
  CDR3 for beta chain variable domain of TCR clone 96251 (TRBV19, TRBJ2-1)
CASSIWSAQPTHNEQFF

SEQ ID NO: 192503 - protein, 12 aa, Homo sapiens
  CDR3 for alpha chain variable domain of TCR clone 96252 (TRAV21, TRAJ31)
CAVWGNTARLMF

SEQ ID NO: 192504 - protein, 16 aa, Homo sapiens
  CDR3 for beta chain variable domain of TCR clone 96252 (TRBV27, TRBJ2-5)
CASSYDPGGQKETQYF

SEQ ID NO: 192505 - protein, 14 aa, Homo sapiens
  CDR3 for alpha chain variable domain of TCR clone 96253 (TRAV1-2, TRAJ8)
CAVREDTGFQKLVF

SEQ ID NO: 192506 - protein, 22 aa, Homo sapiens
  CDR3 for beta chain variable domain of TCR clone 96253 (TRBV11-2, TRBJ1-4)
CASSLDITRRGIPRKDNEKLFF

SEQ ID NO: 192507 - protein, 14 aa, Homo sapiens
  CDR3 for alpha chain variable domain of TCR clone 96254 (TRAV1-2, TRAJ8)
CAVREDTGSQKLVF

SEQ ID NO: 192508 - protein, 13 aa, Homo sapiens
  CDR3 for beta chain variable domain of TCR clone 96254 (TRBV12-4, TRBJ1-2)
CASSLRQGKGYTF

SEQ ID NO: 192509 - protein, 15 aa, Homo sapiens
  CDR3 for alpha chain variable domain of TCR clone 96255 (TRAV1-2, TRAJ26)
CAVRDLITMVRILSL

SEQ ID NO: 192510 - protein, 13 aa, Homo sapiens
  CDR3 for beta chain variable domain of TCR clone 96255 (TRBV19, TRBJ1-2)
CASSQGQVYGYTF

SEQ ID NO: 192511 - protein, 10 aa, Homo sapiens
  CDR3 for alpha chain variable domain of TCR clone 96256 (TRAV13-1, TRAJ5)
CAASGRALTF

SEQ ID NO: 192512 - protein, 16 aa, Homo sapiens
  CDR3 for beta chain variable domain of TCR clone 96256 (TRBV4-3, TRBJ2-3)
CASSQGGLAGTDTQYF

SEQ ID NO: 192513 - protein, 22 aa, Homo sapiens
  CDR3 for alpha chain variable domain of TCR clone 96257 (TRAV12-2, TRAJ53)
SPVIQPPTSVPPILGSNYKLTF

SEQ ID NO: 192514 - protein, 13 aa, Homo sapiens
  CDR3 for beta chain variable domain of TCR clone 96257 (TRBV7-7, TRBJ2-3)
CASSLSRADTQYF

SEQ ID NO: 192515 - protein, 13 aa, Homo sapiens
  CDR3 for alpha chain variable domain of TCR clone 96258 (TRAV20, TRAJ49)
CAVQARTGKQFYF

SEQ ID NO: 192516 - protein, 14 aa, Homo sapiens
  CDR3 for beta chain variable domain of TCR clone 96258 (TRBV7-2, TRBJ2-7)
CASSPKTSFYEQYF

SEQ ID NO: 192517 - protein, 10 aa, Homo sapiens
  CDR3 for alpha chain variable domain of TCR clone 96259 (TRAV13-1, TRAJ27)
CAPLAMQINL

SEQ ID NO: 192518 - protein, 13 aa, Homo sapiens
  CDR3 for beta chain variable domain of TCR clone 96259 (TRBV7-3, TRBJ1-1)
CASSQDWGAEAFF

SEQ ID NO: 192519 - protein, 11 aa, Homo sapiens
  CDR3 for alpha chain variable domain of TCR clone 96260 (TRAV3, TRAJ13)
CAVTSYHKVTF

SEQ ID NO: 192520 - protein, 15 aa, Homo sapiens
  CDR3 for beta chain variable domain of TCR clone 96260 (TRBV7-9, TRBJ2-7)
CASSSSGLAVYEQYF

SEQ ID NO: 192521 - protein, 20 aa, Homo sapiens
  CDR3 for alpha chain variable domain of TCR clone 96261 (TRAV30, TRAJ54)
SAAQSRFETQVVQGAQKLVF

SEQ ID NO: 192522 - protein, 11 aa, Homo sapiens
  CDR3 for beta chain variable domain of TCR clone 96261 (TRBV25-1, TRBJ2-4)
CQSRDQNIQYF

SEQ ID NO: 192523 - protein, 23 aa, Homo sapiens
  CDR3 for alpha chain variable domain of TCR clone 96262 (TRAV26-1, )
CIADNACNNHIQNPDPAVYQLRD

SEQ ID NO: 192524 - protein, 12 aa, Homo sapiens
  CDR3 for beta chain variable domain of TCR clone 96262 (TRBV11-2, TRBJ2-2)
CASSLGGGELFF

SEQ ID NO: 192525 - protein, 15 aa, Homo sapiens
  CDR3 for alpha chain variable domain of TCR clone 96263 (TRAV12-3, TRAJ13)
CAMSYDSGGYQKVTF

SEQ ID NO: 192526 - protein, 13 aa, Homo sapiens
  CDR3 for beta chain variable domain of TCR clone 96263 (TRBV13, TRBJ2-1)
CASILGGRGEQFF

SEQ ID NO: 192527 - protein, 16 aa, Homo sapiens
  CDR3 for alpha chain variable domain of TCR clone 96264 (TRAV17, TRAJ9)
CATGGWGGTGGFKTIF

SEQ ID NO: 192528 - protein, 15 aa, Homo sapiens
  CDR3 for beta chain variable domain of TCR clone 96264 (TRBV20-1, TRBJ1-2)
CSARDSRGRNYGYTF

SEQ ID NO: 192529 - protein, 12 aa, Homo sapiens
  CDR3 for alpha chain variable domain of TCR clone 96265 (TRAV8-3, TRAJ26)
CAGDNYGQNFVF

SEQ ID NO: 192530 - protein, 13 aa, Homo sapiens
  CDR3 for beta chain variable domain of TCR clone 96265 (TRBV5-5, TRBJ1-2)
CASSFWRGEDYTF

SEQ ID NO: 192531 - protein, 12 aa, Homo sapiens
  CDR3 for alpha chain variable domain of TCR clone 96266 (TRAV2, TRAJ9)
CAVGAGGFKTIF

SEQ ID NO: 192532 - protein, 14 aa, Homo sapiens
  CDR3 for beta chain variable domain of TCR clone 96266 (TRBV18, TRBJ2-5)
CASSPGVSQETQYF

SEQ ID NO: 192533 - protein, 13 aa, Homo sapiens
  CDR3 for alpha chain variable domain of TCR clone 96267 (TRAV1-2, TRAJ9)
CAALNIGGLKTIF

SEQ ID NO: 192534 - protein, 13 aa, Homo sapiens
  CDR3 for beta chain variable domain of TCR clone 96267 (TRBV19, TRBJ1-2)
CASSVPGQDGYTF

SEQ ID NO: 192535 - protein, 12 aa, Homo sapiens
  CDR3 for alpha chain variable domain of TCR clone 96268 (TRAV27, TRAJ35)
CAGADFGNVLHC

SEQ ID NO: 192536 - protein, 16 aa, Homo sapiens
  CDR3 for beta chain variable domain of TCR clone 96268 (TRBV6-1, TRBJ2-1)
CASILRQGSSYSEQFF

SEQ ID NO: 192537 - protein, 13 aa, Homo sapiens
  CDR3 for alpha chain variable domain of TCR clone 96269 (TRAV2, TRAJ40)
CAVVTSGTYNYIF

SEQ ID NO: 192538 - protein, 14 aa, Homo sapiens
  CDR3 for beta chain variable domain of TCR clone 96269 (TRBV19, TRBJ2-1)
CASPAFVLSGEQFF

SEQ ID NO: 192539 - protein, 13 aa, Homo sapiens
  CDR3 for alpha chain variable domain of TCR clone 96270 (TRAV2, TRAJ24)
CAVTTDSWGKLQF

SEQ ID NO: 192540 - protein, 17 aa, Homo sapiens
  CDR3 for beta chain variable domain of TCR clone 96270 (TRBV18, TRBJ2-6)
CASSPRQGAVGANVLTF

SEQ ID NO: 192541 - protein, 11 aa, Homo sapiens
  CDR3 for alpha chain variable domain of TCR clone 96271 (TRAV1-2, TRAJ20)
CAVANDYKLSF

SEQ ID NO: 192542 - protein, 15 aa, Homo sapiens
  CDR3 for beta chain variable domain of TCR clone 96271 (TRBV6-5, TRBJ2-1)
CASSYDAGAGNEQFF

SEQ ID NO: 192543 - protein, 17 aa, Homo sapiens
  CDR3 for alpha chain variable domain of TCR clone 96272 (TRAV8-2, TRAJ17)
CVVSDRRFKAAGNKLTC

SEQ ID NO: 192544 - protein, 18 aa, Homo sapiens
  CDR3 for beta chain variable domain of TCR clone 96272 (TRBV7-9, TRBJ2-7)
CASSLTTSGSRTWYEQYF

SEQ ID NO: 192545 - protein, 14 aa, Homo sapiens
  CDR3 for alpha chain variable domain of TCR clone 96273 (TRAV12-2, TRAJ17)
CAVLFKAAGNKLNF

SEQ ID NO: 192546 - protein, 13 aa, Homo sapiens
  CDR3 for beta chain variable domain of TCR clone 96273 (TRBV19, TRBJ1-2)
CASSQGQVYGYTF

SEQ ID NO: 192547 - protein, 15 aa, Homo sapiens
  CDR3 for alpha chain variable domain of TCR clone 96274 (TRAV17, TRAJ56)
CAAEPFTGANSKLTF

SEQ ID NO: 192548 - protein, 15 aa, Homo sapiens
  CDR3 for beta chain variable domain of TCR clone 96274 (TRBV28, TRBJ1-5)
CASSRTGGYVQPQHF

SEQ ID NO: 192549 - protein, 14 aa, Homo sapiens
  CDR3 for alpha chain variable domain of TCR clone 96275 (TRAV1-2, TRAJ16)
CAVNRFSDGQKLLF

SEQ ID NO: 192550 - protein, 11 aa, Homo sapiens
  CDR3 for beta chain variable domain of TCR clone 96275 (TRBV29-1, TRBJ2-5)
YSEDRTGTQYF

SEQ ID NO: 192551 - protein, 14 aa, Homo sapiens
  CDR3 for alpha chain variable domain of TCR clone 96276 (TRAV9-2, TRAJ39)
CALYIYNAGNMLTF

SEQ ID NO: 192552 - protein, 13 aa, Homo sapiens
  CDR3 for beta chain variable domain of TCR clone 96276 (TRBV20-1, TRBJ2-7)
CSARPSTNYEQYF

SEQ ID NO: 192553 - protein, 16 aa, Homo sapiens
  CDR3 for alpha chain variable domain of TCR clone 96277 (TRAV21, TRAJ37)
CAVRPRGSSRTGKLIF

SEQ ID NO: 192554 - protein, 13 aa, Homo sapiens
  CDR3 for beta chain variable domain of TCR clone 96277 (TRBV7-9, TRBJ2-5)
CASLSPGQETQYF

SEQ ID NO: 192555 - protein, 14 aa, Homo sapiens
  CDR3 for alpha chain variable domain of TCR clone 96278 (TRAV1-1, TRAJ23)
CAVSIYNQGGKLIF

SEQ ID NO: 192556 - protein, 13 aa, Homo sapiens
  CDR3 for beta chain variable domain of TCR clone 96278 (TRBV9, TRBJ2-1)
CASSVGQGGEQFF

SEQ ID NO: 192557 - protein, 15 aa, Homo sapiens
  CDR3 for alpha chain variable domain of TCR clone 96279 (TRAV4, TRAJ39)
CLVGPNNNAGNMLTF

SEQ ID NO: 192558 - protein, 16 aa, Homo sapiens
  CDR3 for beta chain variable domain of TCR clone 96279 (TRBV13, TRBJ2-2)
CASSPRIGEHTGELFF

SEQ ID NO: 192559 - protein, 14 aa, Homo sapiens
  CDR3 for alpha chain variable domain of TCR clone 96280 (TRAV13-1, TRAJ35)
CAASKGGFGNVLHC

SEQ ID NO: 192560 - protein, 16 aa, Homo sapiens
  CDR3 for beta chain variable domain of TCR clone 96280 (TRBV6-1, TRBJ2-5)
CASSETLDRGAETQYF

SEQ ID NO: 192561 - protein, 13 aa, Homo sapiens
  CDR3 for alpha chain variable domain of TCR clone 96281 (TRAV17, TRAJ5)
CATGDTGRRALTF

SEQ ID NO: 192562 - protein, 13 aa, Homo sapiens
  CDR3 for beta chain variable domain of TCR clone 96281 (TRBV19, TRBJ1-5)
CASSIEPVQAQHF

SEQ ID NO: 192563 - protein, 14 aa, Homo sapiens
  CDR3 for alpha chain variable domain of TCR clone 96282 (TRAV12-2, TRAJ40)
CAVKIPSGTYRYIF

SEQ ID NO: 192564 - protein, 17 aa, Homo sapiens
  CDR3 for beta chain variable domain of TCR clone 96282 (TRBV7-8, TRBJ2-6)
CASSAGTGGAGANVLTF

SEQ ID NO: 192565 - protein, 12 aa, Homo sapiens
  CDR3 for alpha chain variable domain of TCR clone 96283 (TRAV2, TRAJ34)
CAVERNTDNLIF

SEQ ID NO: 192566 - protein, 14 aa, Homo sapiens
  CDR3 for beta chain variable domain of TCR clone 96283 (TRBV7-9, TRBJ2-1)
CASSDNSGYNEQFF

SEQ ID NO: 192567 - protein, 12 aa, Homo sapiens
  CDR3 for alpha chain variable domain of TCR clone 96284 (TRAV13-1, TRAJ21)
CAAKEGFNKFYF

SEQ ID NO: 192568 - protein, 18 aa, Homo sapiens
  CDR3 for beta chain variable domain of TCR clone 96284 (TRBV7-2, TRBJ2-5)
CASSLSGGGDPVLRARHA

SEQ ID NO: 192569 - protein, 14 aa, Homo sapiens
  CDR3 for alpha chain variable domain of TCR clone 96285 (TRAV12-3, TRAJ10)
SHLPLTGGGNKLTF

SEQ ID NO: 192570 - protein, 14 aa, Homo sapiens
  CDR3 for beta chain variable domain of TCR clone 96285 (TRBV19, TRBJ2-1)
CASPTVVLSGEQFF

SEQ ID NO: 192571 - protein, 13 aa, Homo sapiens
  CDR3 for alpha chain variable domain of TCR clone 96286 (TRAV8-3, TRAJ37)
RAVGSGNTGKLIF

SEQ ID NO: 192572 - protein, 11 aa, Homo sapiens
  CDR3 for beta chain variable domain of TCR clone 96286 (TRBV29-1, TRBJ1-1)
CSLQQNTEAFF

SEQ ID NO: 192573 - protein, 12 aa, Homo sapiens
  CDR3 for alpha chain variable domain of TCR clone 96287 (TRAV13-1, TRAJ49)
CAASPMGNQIYF

SEQ ID NO: 192574 - protein, 17 aa, Homo sapiens
  CDR3 for beta chain variable domain of TCR clone 96287 (TRBV11-2, TRBJ2-1)
CASSLYPPGVEYNEQFF

SEQ ID NO: 192575 - protein, 13 aa, Homo sapiens
  CDR3 for alpha chain variable domain of TCR clone 96288 (TRAV36/DV7, TRAJ53)
CALRGGSNYKLTF

SEQ ID NO: 192576 - protein, 13 aa, Homo sapiens
  CDR3 for beta chain variable domain of TCR clone 96288 (TRBV28, TRBJ2-7)
CASSLPSRYEQYF

SEQ ID NO: 192577 - protein, 13 aa, Homo sapiens
  CDR3 for alpha chain variable domain of TCR clone 96289 (TRAV3, TRAJ21)
CAVRKPDFNKFYF

SEQ ID NO: 192578 - protein, 13 aa, Homo sapiens
  CDR3 for beta chain variable domain of TCR clone 96289 (TRBV9, TRBJ2-1)
CASSPSGGNEQFF

SEQ ID NO: 192579 - protein, 22 aa, Homo sapiens
  CDR3 for alpha chain variable domain of TCR clone 96290 (TRAV8-2, TRAJ45)
HLTKPSAHMSEAAEYSADGLTF

SEQ ID NO: 192580 - protein, 13 aa, Homo sapiens
  CDR3 for beta chain variable domain of TCR clone 96290 (TRBV7-3, TRBJ2-1)
CASSPVAYNEQFF

SEQ ID NO: 192581 - protein, 15 aa, Homo sapiens
  CDR3 for alpha chain variable domain of TCR clone 96291 (TRAV12-3, TRAJ11)
CAMSEENSGYSTLTF

SEQ ID NO: 192582 - protein, 15 aa, Homo sapiens
  CDR3 for beta chain variable domain of TCR clone 96291 (TRBV28, TRBJ2-3)
CASSPDRQGANTQYF

SEQ ID NO: 192583 - protein, 13 aa, Homo sapiens
  CDR3 for alpha chain variable domain of TCR clone 96292 (TRAV29/DV5, TRAJ47)
CAASAEYGNKLVF

SEQ ID NO: 192584 - protein, 14 aa, Homo sapiens
  CDR3 for beta chain variable domain of TCR clone 96292 (TRBV12-5, TRBJ2-5)
CASGSRTHQETQYF

SEQ ID NO: 192585 - protein, 16 aa, Homo sapiens
  CDR3 for alpha chain variable domain of TCR clone 96293 (TRAV1-2, TRAJ10)
CAVGGVLTGGGNKLTV

SEQ ID NO: 192586 - protein, 12 aa, Homo sapiens
  CDR3 for beta chain variable domain of TCR clone 96293 (TRBV7-8, TRBJ2-7)
CASSLGDREQYF

SEQ ID NO: 192587 - protein, 13 aa, Homo sapiens
  CDR3 for alpha chain variable domain of TCR clone 96294 (TRAV27, TRAJ6)
CAGGTRGSYIPTF

SEQ ID NO: 192588 - protein, 13 aa, Homo sapiens
  CDR3 for beta chain variable domain of TCR clone 96294 (TRBV4-1, TRBJ2-1)
CASSQEVQYEQFF

SEQ ID NO: 192589 - protein, 12 aa, Homo sapiens
  CDR3 for alpha chain variable domain of TCR clone 96295 (TRAV23/DV6, TRAJ30)
CAASKGDDKIIL

SEQ ID NO: 192590 - protein, 17 aa, Homo sapiens
  CDR3 for beta chain variable domain of TCR clone 96295 (TRBV13, TRBJ2-3)
CASSLSRVAGGRNTQYF

SEQ ID NO: 192591 - protein, 14 aa, Homo sapiens
  CDR3 for alpha chain variable domain of TCR clone 96296 (TRAV12-2, TRAJ6)
CASKWGGGSYLPTF

SEQ ID NO: 192592 - protein, 13 aa, Homo sapiens
  CDR3 for beta chain variable domain of TCR clone 96296 (TRBV2, TRBJ1-1)
CASSEGGNTEAFF

SEQ ID NO: 192593 - protein, 17 aa, Homo sapiens
  CDR3 for alpha chain variable domain of TCR clone 96297 (TRAV3, TRAJ12)
CALRDGGRMDSSYKLIF

SEQ ID NO: 192594 - protein, 14 aa, Homo sapiens
  CDR3 for beta chain variable domain of TCR clone 96297 (TRBV7-9, TRBJ1-2)
CASSRQGANYGYTF

SEQ ID NO: 192595 - protein, 18 aa, Homo sapiens
  CDR3 for alpha chain variable domain of TCR clone 96298 (TRAV8-3, TRAJ6)
CAVGAEHQEESTYLHLEE

SEQ ID NO: 192596 - protein, 14 aa, Homo sapiens
  CDR3 for beta chain variable domain of TCR clone 96298 (TRBV6-6, TRBJ2-7)
CASSDSGAGYEQYF

SEQ ID NO: 192597 - protein, 13 aa, Homo sapiens
  CDR3 for alpha chain variable domain of TCR clone 96299 (TRAV4, TRAJ34)
CLVGDYNTDKLIF

SEQ ID NO: 192598 - protein, 14 aa, Homo sapiens
  CDR3 for beta chain variable domain of TCR clone 96299 (TRBV19, TRBJ2-1)
CASPTFVLSGEQFF

SEQ ID NO: 192599 - protein, 12 aa, Homo sapiens
  CDR3 for alpha chain variable domain of TCR clone 96300 (TRAV3, TRAJ20)
CAVRDGDYKLSF

SEQ ID NO: 192600 - protein, 13 aa, Homo sapiens
  CDR3 for beta chain variable domain of TCR clone 96300 (TRBV6-1, TRBJ1-1)
CASSWTVDTEAFF

SEQ ID NO: 192601 - protein, 16 aa, Homo sapiens
  CDR3 for alpha chain variable domain of TCR clone 96301 (TRAV35, TRAJ28)
CAGYLYSGAGSYQLTF

SEQ ID NO: 192602 - protein, 16 aa, Homo sapiens
  CDR3 for beta chain variable domain of TCR clone 96301 (TRBV5-1, TRBJ2-1)
GASSHGLAGPQNEQFF

SEQ ID NO: 192603 - protein, 12 aa, Homo sapiens
  CDR3 for alpha chain variable domain of TCR clone 96302 (TRAV26-1, TRAJ43)
CIVRPRGDDMRF

SEQ ID NO: 192604 - protein, 16 aa, Homo sapiens
  CDR3 for beta chain variable domain of TCR clone 96302 (TRBV3-1, TRBJ2-1)
CASSQGGGRSFDEQFF

SEQ ID NO: 192605 - protein, 12 aa, Homo sapiens
  CDR3 for alpha chain variable domain of TCR clone 96303 (TRAV12-2, TRAJ21)
CAVRSNFNKFYF

SEQ ID NO: 192606 - protein, 14 aa, Homo sapiens
  CDR3 for beta chain variable domain of TCR clone 96303 (TRBV28, TRBJ2-1)
CASSYYTAYNEQFF

SEQ ID NO: 192607 - protein, 15 aa, Homo sapiens
  CDR3 for alpha chain variable domain of TCR clone 96304 (TRAV27, TRAJ38)
CAARRNAGNNRKLLW

SEQ ID NO: 192608 - protein, 13 aa, Homo sapiens
  CDR3 for beta chain variable domain of TCR clone 96304 (TRBV7-3, TRBJ2-1)
CASSLDSYNEQFF

SEQ ID NO: 192609 - protein, 12 aa, Homo sapiens
  CDR3 for alpha chain variable domain of TCR clone 96305 (TRAV8-3, TRAJ20)
CAVGANDYKLSF

SEQ ID NO: 192610 - protein, 16 aa, Homo sapiens
  CDR3 for beta chain variable domain of TCR clone 96305 (TRBV19, TRBJ2-2)
CASRSLGTGATGELFF

SEQ ID NO: 192611 - protein, 15 aa, Homo sapiens
  CDR3 for alpha chain variable domain of TCR clone 96306 (TRAV12-2, TRAJ53)
CAVNGGGGSNYKLTF

SEQ ID NO: 192612 - protein, 16 aa, Homo sapiens
  CDR3 for beta chain variable domain of TCR clone 96306 (TRBV7-3, TRBJ2-3)
CASSVSGYRPEDTQYF

SEQ ID NO: 192613 - protein, 14 aa, Homo sapiens
  CDR3 for alpha chain variable domain of TCR clone 96307 (TRAV17, TRAJ56)
CATVPAGANSKLTF

SEQ ID NO: 192614 - protein, 19 aa, Homo sapiens
  CDR3 for beta chain variable domain of TCR clone 96307 (TRBV5-1, TRBJ2-3)
CASSLWLAGGITTTDTQYF

SEQ ID NO: 192615 - protein, 14 aa, Homo sapiens
  CDR3 for alpha chain variable domain of TCR clone 96308 (TRAV17, TRAJ6)
CATDASGGSYTPTF

SEQ ID NO: 192616 - protein, 19 aa, Homo sapiens
  CDR3 for beta chain variable domain of TCR clone 96308 (TRBV4-3, TRBJ2-7)
CASSQEFIGWQVTPYEQYF

SEQ ID NO: 192617 - protein, 13 aa, Homo sapiens
  CDR3 for alpha chain variable domain of TCR clone 96309 (TRAV17, TRAJ9)
CATDYTGGFKTIF

SEQ ID NO: 192618 - protein, 14 aa, Homo sapiens
  CDR3 for beta chain variable domain of TCR clone 96309 (TRBV5-1, TRBJ1-1)
CASSLQGASTEAFF

SEQ ID NO: 192619 - protein, 18 aa, Homo sapiens
  CDR3 for alpha chain variable domain of TCR clone 96310 (TRAV26-1, TRAJ23)
CIVRVGLEVWNQGGKLIF

SEQ ID NO: 192620 - protein, 16 aa, Homo sapiens
  CDR3 for beta chain variable domain of TCR clone 96310 (TRBV12-4, TRBJ2-5)
CASSFFDRGRQETQYF

SEQ ID NO: 192621 - protein, 13 aa, Homo sapiens
  CDR3 for alpha chain variable domain of TCR clone 96311 (TRAV27, TRAJ27)
RAGGITNAGKSTF

SEQ ID NO: 192622 - protein, 13 aa, Homo sapiens
  CDR3 for beta chain variable domain of TCR clone 96311 (TRBV20-1, TRBJ1-2)
CSASLGVGYGYTF

SEQ ID NO: 192623 - protein, 16 aa, Homo sapiens
  CDR3 for alpha chain variable domain of TCR clone 96312 (TRAV12-3, TRAJ53)
CAISPGRGGSNYKLTF

SEQ ID NO: 192624 - protein, 11 aa, Homo sapiens
  CDR3 for beta chain variable domain of TCR clone 96312 (TRBV29-1, TRBJ2-5)
CSEDRTGTQYF

SEQ ID NO: 192625 - protein, 13 aa, Homo sapiens
  CDR3 for alpha chain variable domain of TCR clone 96313 (TRAV8-3, TRAJ6)
RAARRGGSYIPTF

SEQ ID NO: 192626 - protein, 15 aa, Homo sapiens
  CDR3 for beta chain variable domain of TCR clone 96313 (TRBV4-1, TRBJ2-3)
CASSNLAGGRDTQYF

SEQ ID NO: 192627 - protein, 14 aa, Homo sapiens
  CDR3 for alpha chain variable domain of TCR clone 96314 (TRAV12-3, TRAJ42)
CAMNYGGSQGNLIF

SEQ ID NO: 192628 - protein, 16 aa, Homo sapiens
  CDR3 for beta chain variable domain of TCR clone 96314 (TRBV20-1, TRBJ1-4)
CSAPGQGLLTNEKLFF

SEQ ID NO: 192629 - protein, 20 aa, Homo sapiens
  CDR3 for alpha chain variable domain of TCR clone 96315 (TRAV14/DV4, TRAJ22)
CAMRECPFSISSGSARQLTF

SEQ ID NO: 192630 - protein, 13 aa, Homo sapiens
  CDR3 for beta chain variable domain of TCR clone 96315 (TRBV4-2, TRBJ2-3)
CASSQDWQHTQYF

SEQ ID NO: 192631 - protein, 11 aa, Homo sapiens
  CDR3 for alpha chain variable domain of TCR clone 96316 (TRAV21, TRAJ23)
CAPQRRGKLIF

SEQ ID NO: 192632 - protein, 14 aa, Homo sapiens
  CDR3 for beta chain variable domain of TCR clone 96316 (TRBV12-4, TRBJ1-1)
CVSTWTGHDTEAFF

SEQ ID NO: 192633 - protein, 13 aa, Homo sapiens
  CDR3 for alpha chain variable domain of TCR clone 96317 (TRAV29/DV5, TRAJ47)
CAASAEYGNKLVF

SEQ ID NO: 192634 - protein, 15 aa, Homo sapiens
  CDR3 for beta chain variable domain of TCR clone 96317 (TRBV7-9, TRBJ1-4)
CASSARTGGNEELFF

SEQ ID NO: 192635 - protein, 14 aa, Homo sapiens
  CDR3 for alpha chain variable domain of TCR clone 96318 (TRAV12-3, TRAJ10)
SHLPLTGGGNKLTF

SEQ ID NO: 192636 - protein, 13 aa, Homo sapiens
  CDR3 for beta chain variable domain of TCR clone 96318 (TRBV2, TRBJ1-1)
CASNLLRNTEAFF

SEQ ID NO: 192637 - protein, 11 aa, Homo sapiens
  CDR3 for alpha chain variable domain of TCR clone 96319 (TRAV2, TRAJ33)
CAVDSNYQLIW

SEQ ID NO: 192638 - protein, 14 aa, Homo sapiens
  CDR3 for beta chain variable domain of TCR clone 96319 (TRBV12-4, TRBJ1-1)
CASSLGTGGTEAFF

SEQ ID NO: 192639 - protein, 14 aa, Homo sapiens
  CDR3 for alpha chain variable domain of TCR clone 96320 (TRAV16, TRAJ39)
CALSKNNAGNMLTF

SEQ ID NO: 192640 - protein, 16 aa, Homo sapiens
  CDR3 for beta chain variable domain of TCR clone 96320 (TRBV6-6, TRBJ2-1)
CASSYSFSWSYNEQFF

SEQ ID NO: 192641 - protein, 13 aa, Homo sapiens
  CDR3 for alpha chain variable domain of TCR clone 96321 (TRAV17, TRAJ54)
CAAGIQGAQKLVF

SEQ ID NO: 192642 - protein, 16 aa, Homo sapiens
  CDR3 for beta chain variable domain of TCR clone 96321 (TRBV19, TRBJ2-2)
CASRSPGTGATGELFF

SEQ ID NO: 192643 - protein, 15 aa, Homo sapiens
  CDR3 for alpha chain variable domain of TCR clone 96322 (TRAV3, TRAJ5)
CAVRDLDTGRGALTF

SEQ ID NO: 192644 - protein, 14 aa, Homo sapiens
  CDR3 for beta chain variable domain of TCR clone 96322 (TRBV25-1, TRBJ1-4)
CASSGGGQPEKLFF

SEQ ID NO: 192645 - protein, 16 aa, Homo sapiens
  CDR3 for alpha chain variable domain of TCR clone 96323 (TRAV30, TRAJ24)
CGTEIVDSDSWGKFQF

SEQ ID NO: 192646 - protein, 12 aa, Homo sapiens
  CDR3 for beta chain variable domain of TCR clone 96323 (TRBV11-2, TRBJ2-2)
CASSLGGGELFF

SEQ ID NO: 192647 - protein, 14 aa, Homo sapiens
  CDR3 for alpha chain variable domain of TCR clone 96324 (TRAV1-2, TRAJ8)
CSVREDTGFQKLVF

SEQ ID NO: 192648 - protein, 12 aa, Homo sapiens
  CDR3 for beta chain variable domain of TCR clone 96324 (TRBV29-1, TRBJ2-3)
CSVTGGADTQYF

SEQ ID NO: 192649 - protein, 14 aa, Homo sapiens
  CDR3 for alpha chain variable domain of TCR clone 96325 (TRAV3, TRAJ37)
CAVKESGNTGKLIF

SEQ ID NO: 192650 - protein, 15 aa, Homo sapiens
  CDR3 for beta chain variable domain of TCR clone 96325 (TRBV7-6, TRBJ2-7)
CASSGRRDTFGEQYF

SEQ ID NO: 192651 - protein, 13 aa, Homo sapiens
  CDR3 for alpha chain variable domain of TCR clone 96326 (TRAV1-1, TRAJ9)
CAAKNTGGFKTIF

SEQ ID NO: 192652 - protein, 13 aa, Homo sapiens
  CDR3 for beta chain variable domain of TCR clone 96326 (TRBV3-1, TRBJ1-1)
CASSPGVITEAFF

SEQ ID NO: 192653 - protein, 15 aa, Homo sapiens
  CDR3 for alpha chain variable domain of TCR clone 96327 (TRAV8-3, TRAJ45)
CASSYSGGGADGLTF

SEQ ID NO: 192654 - protein, 13 aa, Homo sapiens
  CDR3 for beta chain variable domain of TCR clone 96327 (TRBV7-9, TRBJ2-7)
CASSLAGAYEQYF

SEQ ID NO: 192655 - protein, 12 aa, Homo sapiens
  CDR3 for alpha chain variable domain of TCR clone 96328 (TRAV17, TRAJ20)
CATYSNDYKLSF

SEQ ID NO: 192656 - protein, 15 aa, Homo sapiens
  CDR3 for beta chain variable domain of TCR clone 96328 (TRBV29-1, TRBJ2-1)
CSVEAPRGSPNEQFF

SEQ ID NO: 192657 - protein, 14 aa, Homo sapiens
  CDR3 for alpha chain variable domain of TCR clone 96329 (TRAV38-1, TRAJ48)
CAFMANFGNEKLTF

SEQ ID NO: 192658 - protein, 17 aa, Homo sapiens
  CDR3 for beta chain variable domain of TCR clone 96329 (TRBV24-1, TRBJ2-1)
CATSDVSTSGTYNEQFF

SEQ ID NO: 192659 - protein, 14 aa, Homo sapiens
  CDR3 for alpha chain variable domain of TCR clone 96330 (TRAV13-1, TRAJ24)
CAASRTDGWGKLQF

SEQ ID NO: 192660 - protein, 15 aa, Homo sapiens
  CDR3 for beta chain variable domain of TCR clone 96330 (TRBV7-9, TRBJ1-5)
CASSQGHQPNQPQHF

SEQ ID NO: 192661 - protein, 14 aa, Homo sapiens
  CDR3 for alpha chain variable domain of TCR clone 96331 (TRAV13-1, TRAJ13)
CAASRVGGYQKVTF

SEQ ID NO: 192662 - protein, 16 aa, Homo sapiens
  CDR3 for beta chain variable domain of TCR clone 96331 (TRBV2, TRBJ2-1)
CASSVGGSLSYNEQFF

SEQ ID NO: 192663 - protein, 13 aa, Homo sapiens
  CDR3 for alpha chain variable domain of TCR clone 96332 (TRAV12-2, TRAJ52)
CAVSGTSYGKLTF

SEQ ID NO: 192664 - protein, 12 aa, Homo sapiens
  CDR3 for beta chain variable domain of TCR clone 96332 (TRBV28, TRBJ2-6)
CAIQAGANVLTF

SEQ ID NO: 192665 - protein, 15 aa, Homo sapiens
  CDR3 for alpha chain variable domain of TCR clone 96333 (TRAV2, TRAJ24)
CAVVRLKNSWGNCSL

SEQ ID NO: 192666 - protein, 16 aa, Homo sapiens
  CDR3 for beta chain variable domain of TCR clone 96333 (TRBV7-7, TRBJ2-3)
CASSPGTSGSTDTQYF

SEQ ID NO: 192667 - protein, 14 aa, Homo sapiens
  CDR3 for alpha chain variable domain of TCR clone 96334 (TRAV12-1, TRAJ23)
CVVIVYNQGGKLSF

SEQ ID NO: 192668 - protein, 15 aa, Homo sapiens
  CDR3 for beta chain variable domain of TCR clone 96334 (TRBV20-1, TRBJ1-5)
CSAKPPGQGPQPQHF

SEQ ID NO: 192669 - protein, 14 aa, Homo sapiens
  CDR3 for alpha chain variable domain of TCR clone 96335 (TRAV12-2, TRAJ13)
CAVKKTGGYKKVTF

SEQ ID NO: 192670 - protein, 14 aa, Homo sapiens
  CDR3 for beta chain variable domain of TCR clone 96335 (TRBV10-3, TRBJ2-1)
CAISSDLAYNEQFF

SEQ ID NO: 192671 - protein, 11 aa, Homo sapiens
  CDR3 for alpha chain variable domain of TCR clone 96336 (TRAV13-1, TRAJ44)
PQTGTASKLTF

SEQ ID NO: 192672 - protein, 13 aa, Homo sapiens
  CDR3 for beta chain variable domain of TCR clone 96336 (TRBV7-2, TRBJ2-2)
CASSLAVTGELFF

SEQ ID NO: 192673 - protein, 17 aa, Homo sapiens
  CDR3 for alpha chain variable domain of TCR clone 96337 (TRAV3, TRAJ6)
CAVRDGPRAGGSYIPTF

SEQ ID NO: 192674 - protein, 15 aa, Homo sapiens
  CDR3 for beta chain variable domain of TCR clone 96337 (TRBV6-5, TRBJ2-1)
CASSYDARAGNEQFF

SEQ ID NO: 192675 - protein, 14 aa, Homo sapiens
  CDR3 for alpha chain variable domain of TCR clone 96338 (TRAV12-2, TRAJ15)
CAPHTGQAGTALIF

SEQ ID NO: 192676 - protein, 16 aa, Homo sapiens
  CDR3 for beta chain variable domain of TCR clone 96338 (TRBV4-3, TRBJ2-1)
CASSEGIRDYYNEQFF

SEQ ID NO: 192677 - protein, 16 aa, Homo sapiens
  CDR3 for alpha chain variable domain of TCR clone 96339 (TRAV16, TRAJ52)
CALSTAGGTSYGKLTF

SEQ ID NO: 192678 - protein, 12 aa, Homo sapiens
  CDR3 for beta chain variable domain of TCR clone 96339 (TRBV12-4, TRBJ1-3)
CASSFSGNTIYF

SEQ ID NO: 192679 - protein, 12 aa, Homo sapiens
  CDR3 for alpha chain variable domain of TCR clone 96340 (TRAV13-1, TRAJ21)
CAAKEGFNKLYF

SEQ ID NO: 192680 - protein, 14 aa, Homo sapiens
  CDR3 for beta chain variable domain of TCR clone 96340 (TRBV4-1, TRBJ1-1)
CASSRSGQSFEAFF

SEQ ID NO: 192681 - protein, 16 aa, Homo sapiens
  CDR3 for alpha chain variable domain of TCR clone 96341 (TRAV30, TRAJ24)
CGTEIVDADSWGEFQF

SEQ ID NO: 192682 - protein, 16 aa, Homo sapiens
  CDR3 for beta chain variable domain of TCR clone 96341 (TRBV4-1, TRBJ2-7)
CASSQEGTASSYEQYF

SEQ ID NO: 192683 - protein, 15 aa, Homo sapiens
  CDR3 for alpha chain variable domain of TCR clone 96342 (TRAV8-3, TRAJ11)
CAVGLLNSGYSTLTF

SEQ ID NO: 192684 - protein, 13 aa, Homo sapiens
  CDR3 for beta chain variable domain of TCR clone 96342 (TRBV29-1, TRBJ2-1)
CSVEGGRVNEQFF

SEQ ID NO: 192685 - protein, 18 aa, Homo sapiens
  CDR3 for alpha chain variable domain of TCR clone 96343 (TRAV2, TRAJ20)
LQVREADAAVYRDCKLSF

SEQ ID NO: 192686 - protein, 17 aa, Homo sapiens
  CDR3 for beta chain variable domain of TCR clone 96343 (TRBV20-1, TRBJ2-2)
CSASGSGQGGLTGELFF

SEQ ID NO: 192687 - protein, 11 aa, Homo sapiens
  CDR3 for alpha chain variable domain of TCR clone 96344 (TRAV13-1, TRAJ39)
CASHAGNMLTF

SEQ ID NO: 192688 - protein, 13 aa, Homo sapiens
  CDR3 for beta chain variable domain of TCR clone 96344 (TRBV24-1, TRBJ2-2)
CATSDWSTGELFF

SEQ ID NO: 192689 - protein, 14 aa, Homo sapiens
  CDR3 for alpha chain variable domain of TCR clone 96345 (TRAV12-3, TRAJ22)
CAMSLFGSARQLTF

SEQ ID NO: 192690 - protein, 15 aa, Homo sapiens
  CDR3 for beta chain variable domain of TCR clone 96345 (TRBV24-1, TRBJ1-4)
CATSDPQGADEKLFF

SEQ ID NO: 192691 - protein, 15 aa, Homo sapiens
  CDR3 for alpha chain variable domain of TCR clone 96346 (TRAV8-3, TRAJ40)
CAAPSLGSGTYKYIF

SEQ ID NO: 192692 - protein, 16 aa, Homo sapiens
  CDR3 for beta chain variable domain of TCR clone 96346 (TRBV7-3, TRBJ2-3)
YASSLSGYRPEDTQYF

SEQ ID NO: 192693 - protein, 14 aa, Homo sapiens
  CDR3 for alpha chain variable domain of TCR clone 96347 (TRAV13-1, TRAJ20)
CAARPGSNDYKLSF

SEQ ID NO: 192694 - protein, 12 aa, Homo sapiens
  CDR3 for beta chain variable domain of TCR clone 96347 (TRBV11-2, TRBJ2-2)
CASSLGGGELFF

SEQ ID NO: 192695 - protein, 12 aa, Homo sapiens
  CDR3 for alpha chain variable domain of TCR clone 96348 (TRAV13-1, TRAJ54)
CAASGGAQKLVF

SEQ ID NO: 192696 - protein, 13 aa, Homo sapiens
  CDR3 for beta chain variable domain of TCR clone 96348 (TRBV7-9, TRBJ1-2)
CASSLKQNYGYTF

SEQ ID NO: 192697 - protein, 18 aa, Homo sapiens
  CDR3 for alpha chain variable domain of TCR clone 96349 (TRAV13-1, TRAJ4)
CSKYKEVPWRGGHNKLIF

SEQ ID NO: 192698 - protein, 13 aa, Homo sapiens
  CDR3 for beta chain variable domain of TCR clone 96349 (TRBV20-1, TRBJ1-1)
CSAPLGGGTEAFF

SEQ ID NO: 192699 - protein, 17 aa, Homo sapiens
  CDR3 for alpha chain variable domain of TCR clone 96350 (TRAV13-1, TRAJ52)
CAAGRNAGGTSYGKLTF

SEQ ID NO: 192700 - protein, 13 aa, Homo sapiens
  CDR3 for beta chain variable domain of TCR clone 96350 (TRBV7-3, TRBJ1-1)
CASSQDWGAEAFF

SEQ ID NO: 192701 - protein, 15 aa, Homo sapiens
  CDR3 for alpha chain variable domain of TCR clone 96351 (TRAV12-2, TRAJ53)
CAVNGGGGSNYKLTF

SEQ ID NO: 192702 - protein, 13 aa, Homo sapiens
  CDR3 for beta chain variable domain of TCR clone 96351 (TRBV7-8, TRBJ2-7)
RRVRLTEMGEQYF

SEQ ID NO: 192703 - protein, 14 aa, Homo sapiens
  CDR3 for alpha chain variable domain of TCR clone 96352 (TRAV29/DV5, TRAJ32)
CAAAYGGATNKLIF

SEQ ID NO: 192704 - protein, 16 aa, Homo sapiens
  CDR3 for beta chain variable domain of TCR clone 96352 (TRBV27, TRBJ1-5)
CASSLSGGASNQPQHF

SEQ ID NO: 192705 - protein, 17 aa, Homo sapiens
  CDR3 for alpha chain variable domain of TCR clone 96353 (TRAV3, TRAJ42)
CAVRDRDYGGSQGNLIF

SEQ ID NO: 192706 - protein, 16 aa, Homo sapiens
  CDR3 for beta chain variable domain of TCR clone 96353 (TRBV12-4, TRBJ1-5)
CASSRPVGGSNQPQHF

SEQ ID NO: 192707 - protein, 13 aa, Homo sapiens
  CDR3 for alpha chain variable domain of TCR clone 96354 (TRAV3, TRAJ27)
CAVRALGAGKSTF

SEQ ID NO: 192708 - protein, 13 aa, Homo sapiens
  CDR3 for beta chain variable domain of TCR clone 96354 (TRBV7-9, TRBJ2-3)
CASSPGSTDTQYF

SEQ ID NO: 192709 - protein, 14 aa, Homo sapiens
  CDR3 for alpha chain variable domain of TCR clone 96355 (TRAV13-1, TRAJ35)
CAASKGGFGNVLHC

SEQ ID NO: 192710 - protein, 14 aa, Homo sapiens
  CDR3 for beta chain variable domain of TCR clone 96355 (TRBV25-1, TRBJ2-2)
CASSELGLPGELFF

SEQ ID NO: 192711 - protein, 14 aa, Homo sapiens
  CDR3 for alpha chain variable domain of TCR clone 96356 (TRAV12-2, TRAJ13)
CAVKKTGGYQKVTF

SEQ ID NO: 192712 - protein, 14 aa, Homo sapiens
  CDR3 for beta chain variable domain of TCR clone 96356 (TRBV18, TRBJ2-5)
CASSPGVPQETQYF

SEQ ID NO: 192713 - protein, 18 aa, Homo sapiens
  CDR3 for alpha chain variable domain of TCR clone 96357 (TRAV12-3, TRAJ52)
CAMSRTNAGGTSYEKLTF

SEQ ID NO: 192714 - protein, 17 aa, Homo sapiens
  CDR3 for beta chain variable domain of TCR clone 96357 (TRBV7-3, TRBJ2-3)
CASSLMKRMRGADTQYF

SEQ ID NO: 192715 - protein, 15 aa, Homo sapiens
  CDR3 for alpha chain variable domain of TCR clone 96358 (TRAV21, TRAJ24)
CAARSSTDSWGKLQF

SEQ ID NO: 192716 - protein, 13 aa, Homo sapiens
  CDR3 for beta chain variable domain of TCR clone 96358 (TRBV11-2, TRBJ2-5)
CASSSTGEETQYF

SEQ ID NO: 192717 - protein, 11 aa, Homo sapiens
  CDR3 for alpha chain variable domain of TCR clone 96359 (TRAV1-2, TRAJ20)
CAVANDYKLSF

SEQ ID NO: 192718 - protein, 12 aa, Homo sapiens
  CDR3 for beta chain variable domain of TCR clone 96359 (TRBV5-1, TRBJ2-4)
LAGEWTKNIQYF

SEQ ID NO: 192719 - protein, 12 aa, Homo sapiens
  CDR3 for alpha chain variable domain of TCR clone 96360 (TRAV2, TRAJ33)
CAFMDSNYQLIW

SEQ ID NO: 192720 - protein, 20 aa, Homo sapiens
  CDR3 for beta chain variable domain of TCR clone 96360 (TRBV7-8, TRBJ2-2)
CASSHLFPGPTIHITGELFF

SEQ ID NO: 192721 - protein, 14 aa, Homo sapiens
  CDR3 for alpha chain variable domain of TCR clone 96361 (TRAV1-1, TRAJ28)
CAAPSGAGSYQLTF

SEQ ID NO: 192722 - protein, 14 aa, Homo sapiens
  CDR3 for beta chain variable domain of TCR clone 96361 (TRBV7-2, TRBJ2-7)
CASRSQGAAYEQYF

SEQ ID NO: 192723 - protein, 14 aa, Homo sapiens
  CDR3 for alpha chain variable domain of TCR clone 96362 (TRAV1-2, TRAJ8)
CAVREDTGFQELVF

SEQ ID NO: 192724 - protein, 14 aa, Homo sapiens
  CDR3 for beta chain variable domain of TCR clone 96362 (TRBV29-1, TRBJ2-5)
CSVETSGSGETQYF

SEQ ID NO: 192725 - protein, 12 aa, Homo sapiens
  CDR3 for alpha chain variable domain of TCR clone 96363 (TRAV35, TRAJ43)
CADAYSNNDMRF

SEQ ID NO: 192726 - protein, 14 aa, Homo sapiens
  CDR3 for beta chain variable domain of TCR clone 96363 (TRBV2, TRBJ2-2)
CASSWQGATGELFF

SEQ ID NO: 192727 - protein, 11 aa, Homo sapiens
  CDR3 for alpha chain variable domain of TCR clone 96364 (TRAV12-1, TRAJ43)
CVEYDNNDMRF

SEQ ID NO: 192728 - protein, 15 aa, Homo sapiens
  CDR3 for beta chain variable domain of TCR clone 96364 (TRBV18, TRBJ2-5)
CASSPRASEAETEYF

SEQ ID NO: 192729 - protein, 14 aa, Homo sapiens
  CDR3 for alpha chain variable domain of TCR clone 96365 (TRAV9-2, TRAJ39)
CALYIYNAGNMLTF

SEQ ID NO: 192730 - protein, 15 aa, Homo sapiens
  CDR3 for beta chain variable domain of TCR clone 96365 (TRBV6-5, TRBJ2-1)
CASSYDAGAGNEQFF

SEQ ID NO: 192731 - protein, 12 aa, Homo sapiens
  CDR3 for alpha chain variable domain of TCR clone 96366 (TRAV13-1, TRAJ48)
CTANFGNEKLTF

SEQ ID NO: 192732 - protein, 13 aa, Homo sapiens
  CDR3 for beta chain variable domain of TCR clone 96366 (TRBV7-3, TRBJ1-1)
CASSQDWGAEAFF

SEQ ID NO: 192733 - protein, 16 aa, Homo sapiens
  CDR3 for alpha chain variable domain of TCR clone 96367 (TRAV20, TRAJ28)
CAVRDPSGAGSYQLTF

SEQ ID NO: 192734 - protein, 13 aa, Homo sapiens
  CDR3 for beta chain variable domain of TCR clone 96367 (TRBV9, TRBJ2-1)
CASSVGQGGEQFF

SEQ ID NO: 192735 - protein, 14 aa, Homo sapiens
  CDR3 for alpha chain variable domain of TCR clone 96368 (TRAV1-1, TRAJ27)
CAVIYNTNAGKSTL

SEQ ID NO: 192736 - protein, 13 aa, Homo sapiens
  CDR3 for beta chain variable domain of TCR clone 96368 (TRBV7-9, TRBJ1-2)
CASSLKQNYGYTF

SEQ ID NO: 192737 - protein, 14 aa, Homo sapiens
  CDR3 for alpha chain variable domain of TCR clone 96369 (TRAV1-2, TRAJ16)
CAVNRFSDGQKLLF

SEQ ID NO: 192738 - protein, 16 aa, Homo sapiens
  CDR3 for beta chain variable domain of TCR clone 96369 (TRBV11-2, TRBJ1-2)
CASNLDTGGADYGYTF

SEQ ID NO: 192739 - protein, 14 aa, Homo sapiens
  CDR3 for alpha chain variable domain of TCR clone 96370 (TRAV3, TRAJ17)
CAVRERSCRQQANF

SEQ ID NO: 192740 - protein, 17 aa, Homo sapiens
  CDR3 for beta chain variable domain of TCR clone 96370 (TRBV13, TRBJ2-3)
CASSLSGVAGGRNTQYF

SEQ ID NO: 192741 - protein, 13 aa, Homo sapiens
  CDR3 for alpha chain variable domain of TCR clone 96371 (TRAV8-3, TRAJ28)
CAVGAVGSYQLTF

SEQ ID NO: 192742 - protein, 13 aa, Homo sapiens
  CDR3 for beta chain variable domain of TCR clone 96371 (TRBV20-1, TRBJ2-5)
CSARGDYQETQYF

SEQ ID NO: 192743 - protein, 16 aa, Homo sapiens
  CDR3 for alpha chain variable domain of TCR clone 96372 (TRAV26-1, TRAJ32)
CIVRTNYGGATNKLIF

SEQ ID NO: 192744 - protein, 15 aa, Homo sapiens
  CDR3 for beta chain variable domain of TCR clone 96372 (TRBV27, TRBJ1-6)
CASSFDRGLGSPLHF

SEQ ID NO: 192745 - protein, 15 aa, Homo sapiens
  CDR3 for alpha chain variable domain of TCR clone 96373 (TRAV17, TRAJ15)
CATASANQAGTALIF

SEQ ID NO: 192746 - protein, 15 aa, Homo sapiens
  CDR3 for beta chain variable domain of TCR clone 96373 (TRBV7-9, TRBJ1-6)
CASSSPGRGNSPLHF

SEQ ID NO: 192747 - protein, 14 aa, Homo sapiens
  CDR3 for alpha chain variable domain of TCR clone 96374 (TRAV12-2, TRAJ13)
CAVKKTGGCQKVTF

SEQ ID NO: 192748 - protein, 14 aa, Homo sapiens
  CDR3 for beta chain variable domain of TCR clone 96374 (TRBV2, TRBJ2-7)
CASSLTSGGYEQYF

SEQ ID NO: 192749 - protein, 14 aa, Homo sapiens
  CDR3 for alpha chain variable domain of TCR clone 96375 (TRAV1-2, TRAJ8)
CAVREDTGFQKLVF

SEQ ID NO: 192750 - protein, 13 aa, Homo sapiens
  CDR3 for beta chain variable domain of TCR clone 96375 (TRBV19, TRBJ2-5)
CASSGRAGETQYF

SEQ ID NO: 192751 - protein, 14 aa, Homo sapiens
  CDR3 for alpha chain variable domain of TCR clone 96376 (TRAV21, TRAJ50)
CAVRPRTSYDKVIF

SEQ ID NO: 192752 - protein, 15 aa, Homo sapiens
  CDR3 for beta chain variable domain of TCR clone 96376 (TRBV20-1, TRBJ2-7)
CSARDRVSGMDEQYF

SEQ ID NO: 192753 - protein, 14 aa, Homo sapiens
  CDR3 for alpha chain variable domain of TCR clone 96377 (TRAV38-1, TRAJ45)
CAYYSGGGADGLTF

SEQ ID NO: 192754 - protein, 16 aa, Homo sapiens
  CDR3 for beta chain variable domain of TCR clone 96377 (TRBV28, TRBJ2-1)
CASSSPEYPRDNEQFF

SEQ ID NO: 192755 - protein, 15 aa, Homo sapiens
  CDR3 for alpha chain variable domain of TCR clone 96378 (TRAV27, TRAJ38)
CAARRNAGNNRKLIW

SEQ ID NO: 192756 - protein, 18 aa, Homo sapiens
  CDR3 for beta chain variable domain of TCR clone 96378 (TRBV20-1, TRBJ2-6)
CSAETTPTHGSGANVLTF

SEQ ID NO: 192757 - protein, 11 aa, Homo sapiens
  CDR3 for alpha chain variable domain of TCR clone 96379 (TRAV1-2, TRAJ31)
CAVNNNAIPMF

SEQ ID NO: 192758 - protein, 15 aa, Homo sapiens
  CDR3 for beta chain variable domain of TCR clone 96379 (TRBV28, TRBJ2-1)
CASSIIAGGRSEQFF

SEQ ID NO: 192759 - protein, 15 aa, Homo sapiens
  CDR3 for alpha chain variable domain of TCR clone 96380 (TRAV2, TRAJ9)
CAVEDRGTGGFKTIF

SEQ ID NO: 192760 - protein, 19 aa, Homo sapiens
  CDR3 for beta chain variable domain of TCR clone 96380 (TRBV19, TRBJ2-5)
CASSIGQVTDFFLGEAQYF

SEQ ID NO: 192761 - protein, 23 aa, Homo sapiens
  CDR3 for alpha chain variable domain of TCR clone 96381 (TRAV26-1, )
CIADNAGNTHIQNPDPAVYQLRD

SEQ ID NO: 192762 - protein, 13 aa, Homo sapiens
  CDR3 for beta chain variable domain of TCR clone 96381 (TRBV20-1, TRBJ1-1)
CSARGGGNTEAFF

SEQ ID NO: 192763 - protein, 16 aa, Homo sapiens
  CDR3 for alpha chain variable domain of TCR clone 96382 (TRAV38-1, TRAJ56)
CAFMKRQTGANSKLTF

SEQ ID NO: 192764 - protein, 12 aa, Homo sapiens
  CDR3 for beta chain variable domain of TCR clone 96382 (TRBV24-1, TRBJ2-7)
CATSDPGYEQYF

SEQ ID NO: 192765 - protein, 19 aa, Homo sapiens
  CDR3 for alpha chain variable domain of TCR clone 96383 (TRAV1-2, TRAJ26)
CLLPLCCERPDNYGQNFVF

SEQ ID NO: 192766 - protein, 13 aa, Homo sapiens
  CDR3 for beta chain variable domain of TCR clone 96383 (TRBV12-4, TRBJ1-5)
CASSPDRAQPQHF

SEQ ID NO: 192767 - protein, 16 aa, Homo sapiens
  CDR3 for alpha chain variable domain of TCR clone 96384 (TRAV30, TRAJ24)
CGTEIADADSWGKFQF

SEQ ID NO: 192768 - protein, 16 aa, Homo sapiens
  CDR3 for beta chain variable domain of TCR clone 96384 (TRBV12-5, TRBJ2-5)
CASGPRTSGNQETQYF

SEQ ID NO: 192769 - protein, 15 aa, Homo sapiens
  CDR3 for alpha chain variable domain of TCR clone 96385 (TRAV3, TRAJ22)
CAVRDRGGSARQLTF

SEQ ID NO: 192770 - protein, 12 aa, Homo sapiens
  CDR3 for beta chain variable domain of TCR clone 96385 (TRBV12-4, TRBJ1-2)
CASSFTWLHLRF

SEQ ID NO: 192771 - protein, 15 aa, Homo sapiens
  CDR3 for alpha chain variable domain of TCR clone 96386 (TRAV13-1, TRAJ11)
CSASNRNSGYSTLTF

SEQ ID NO: 192772 - protein, 11 aa, Homo sapiens
  CDR3 for beta chain variable domain of TCR clone 96386 (TRBV20-1, TRBJ2-7)
CSARLSYEQYF

SEQ ID NO: 192773 - protein, 15 aa, Homo sapiens
  CDR3 for alpha chain variable domain of TCR clone 96387 (TRAV12-1, TRAJ6)
CVVTPTSGGSYIPTF

SEQ ID NO: 192774 - protein, 19 aa, Homo sapiens
  CDR3 for beta chain variable domain of TCR clone 96387 (TRBV7-3, TRBJ2-2)
CASSLRAGGSGPNTGELFF

SEQ ID NO: 192775 - protein, 14 aa, Homo sapiens
  CDR3 for alpha chain variable domain of TCR clone 96388 (TRAV8-1, TRAJ34)
CALPRGTTSSSLGL

SEQ ID NO: 192776 - protein, 16 aa, Homo sapiens
  CDR3 for beta chain variable domain of TCR clone 96388 (TRBV11-2, TRBJ1-2)
CASSLDTGGADYGDTF

SEQ ID NO: 192777 - protein, 14 aa, Homo sapiens
  CDR3 for alpha chain variable domain of TCR clone 96389 (TRAV13-1, TRAJ35)
CAASKGGFGNVLHC

SEQ ID NO: 192778 - protein, 11 aa, Homo sapiens
  CDR3 for beta chain variable domain of TCR clone 96389 (TRBV19, TRBJ2-5)
CASSIKETQYF

SEQ ID NO: 192779 - protein, 15 aa, Homo sapiens
  CDR3 for alpha chain variable domain of TCR clone 96390 (TRAV12-3, TRAJ6)
CAMSATSGGSYIPTF

SEQ ID NO: 192780 - protein, 15 aa, Homo sapiens
  CDR3 for beta chain variable domain of TCR clone 96390 (TRBV6-3, TRBJ2-2)
CASSFLATLTGELFF

SEQ ID NO: 192781 - protein, 13 aa, Homo sapiens
  CDR3 for alpha chain variable domain of TCR clone 96391 (TRAV35, TRAJ57)
CAGSQGGSAKLVF

SEQ ID NO: 192782 - protein, 14 aa, Homo sapiens
  CDR3 for beta chain variable domain of TCR clone 96391 (TRBV25-1, TRBJ1-1)
CASTHLGGNTEAFF

SEQ ID NO: 192783 - protein, 15 aa, Homo sapiens
  CDR3 for alpha chain variable domain of TCR clone 96392 (TRAV12-3, TRAJ52)
CNGGAGGTSYGKLTF

SEQ ID NO: 192784 - protein, 13 aa, Homo sapiens
  CDR3 for beta chain variable domain of TCR clone 96392 (TRBV20-1, TRBJ2-5)
CSAREAFQETQYF

SEQ ID NO: 192785 - protein, 14 aa, Homo sapiens
  CDR3 for alpha chain variable domain of TCR clone 96393 (TRAV36/DV7, TRAJ40)
CAVEGASGTYKYIF

SEQ ID NO: 192786 - protein, 15 aa, Homo sapiens
  CDR3 for beta chain variable domain of TCR clone 96393 (TRBV28, TRBJ2-2)
CASRLQGVGTGELFF

SEQ ID NO: 192787 - protein, 14 aa, Homo sapiens
  CDR3 for alpha chain variable domain of TCR clone 96394 (TRAV1-2, TRAJ16)
CAVNRFSDGQKLLF

SEQ ID NO: 192788 - protein, 14 aa, Homo sapiens
  CDR3 for beta chain variable domain of TCR clone 96394 (TRBV7-2, TRBJ2-7)
CASSHKTSFYEQYF

SEQ ID NO: 192789 - protein, 16 aa, Homo sapiens
  CDR3 for alpha chain variable domain of TCR clone 96395 (TRAV38-1, TRAJ37)
CAFKGDGSSNTGKLIF

SEQ ID NO: 192790 - protein, 15 aa, Homo sapiens
  CDR3 for beta chain variable domain of TCR clone 96395 (TRBV28, TRBJ2-1)
CASSLGTRLYNEQFF

SEQ ID NO: 192791 - protein, 13 aa, Homo sapiens
  CDR3 for alpha chain variable domain of TCR clone 96396 (TRAV8-4, TRAJ54)
CAVTGGGAQKLVF

SEQ ID NO: 192792 - protein, 16 aa, Homo sapiens
  CDR3 for beta chain variable domain of TCR clone 96396 (TRBV2, TRBJ2-6)
CASSEVGGAGANDLTF

SEQ ID NO: 192793 - protein, 17 aa, Homo sapiens
  CDR3 for alpha chain variable domain of TCR clone 96397 (TRAV3, TRAJ6)
CAVRDGPRAGGSYIPTF

SEQ ID NO: 192794 - protein, 18 aa, Homo sapiens
  CDR3 for beta chain variable domain of TCR clone 96397 (TRBV7-9, TRBJ2-7)
CAISLTTSGSRTWYEQYF

SEQ ID NO: 192795 - protein, 15 aa, Homo sapiens
  CDR3 for alpha chain variable domain of TCR clone 96398 (TRAV29/DV5, TRAJ29)
CAASERSSGNTPLVF

SEQ ID NO: 192796 - protein, 17 aa, Homo sapiens
  CDR3 for beta chain variable domain of TCR clone 96398 (TRBV13, TRBJ2-3)
CASSLSRVAGGRNTQYF

SEQ ID NO: 192797 - protein, 17 aa, Homo sapiens
  CDR3 for alpha chain variable domain of TCR clone 96399 (TRAV38-2/DV8, TRAJ45)
CAYRSRYSGGGADGLTV

SEQ ID NO: 192798 - protein, 15 aa, Homo sapiens
  CDR3 for beta chain variable domain of TCR clone 96399 (TRBV19, TRBJ2-1)
CASIKGRGPYNEQFF

SEQ ID NO: 192799 - protein, 13 aa, Homo sapiens
  CDR3 for alpha chain variable domain of TCR clone 96400 (TRAV23/DV6, TRAJ34)
CAAIKNNTDKLIF

SEQ ID NO: 192800 - protein, 13 aa, Homo sapiens
  CDR3 for beta chain variable domain of TCR clone 96400 (TRBV29-1, TRBJ2-7)
CSVGPSGGYEQYF

SEQ ID NO: 192801 - protein, 12 aa, Homo sapiens
  CDR3 for alpha chain variable domain of TCR clone 96401 (TRAV12-3, TRAJ17)
CAMTLTGNKLPF

SEQ ID NO: 192802 - protein, 15 aa, Homo sapiens
  CDR3 for beta chain variable domain of TCR clone 96401 (TRBV10-2, TRBJ2-6)
CASSEQGTGANVLTF

SEQ ID NO: 192803 - protein, 13 aa, Homo sapiens
  CDR3 for alpha chain variable domain of TCR clone 96402 (TRAV3, TRAJ21)
CAVREPDFNKFYF

SEQ ID NO: 192804 - protein, 16 aa, Homo sapiens
  CDR3 for beta chain variable domain of TCR clone 96402 (TRBV5-1, TRBJ2-2)
CASSLWDTTNTGELFF

SEQ ID NO: 192805 - protein, 14 aa, Homo sapiens
  CDR3 for alpha chain variable domain of TCR clone 96403 (TRAV27, TRAJ15)
CAGFDNQAGTALIF

SEQ ID NO: 192806 - protein, 15 aa, Homo sapiens
  CDR3 for beta chain variable domain of TCR clone 96403 (TRBV5-8, TRBJ2-6)
CASSLQGSGANVLTF

SEQ ID NO: 192807 - protein, 13 aa, Homo sapiens
  CDR3 for alpha chain variable domain of TCR clone 96404 (TRAV35, TRAJ42)
CAGFPGSQGNLIF

SEQ ID NO: 192808 - protein, 16 aa, Homo sapiens
  CDR3 for beta chain variable domain of TCR clone 96404 (TRBV7-2, TRBJ1-2)
CASSSNQDRRGHGYTF

SEQ ID NO: 192809 - protein, 18 aa, Homo sapiens
  CDR3 for alpha chain variable domain of TCR clone 96405 (TRAV29/DV5, TRAJ52)
CATGFRGAGGTSYGKLTF

SEQ ID NO: 192810 - protein, 16 aa, Homo sapiens
  CDR3 for beta chain variable domain of TCR clone 96405 (TRBV7-3, TRBJ2-2)
CASSLKRGTLSGELFF

SEQ ID NO: 192811 - protein, 13 aa, Homo sapiens
  CDR3 for alpha chain variable domain of TCR clone 96406 (TRAV36/DV7, TRAJ53)
CSLSGGSNYKLTF

SEQ ID NO: 192812 - protein, 13 aa, Homo sapiens
  CDR3 for beta chain variable domain of TCR clone 96406 (TRBV28, TRBJ2-7)
CASSLPSRYEQYF

SEQ ID NO: 192813 - protein, 14 aa, Homo sapiens
  CDR3 for alpha chain variable domain of TCR clone 96407 (TRAV12-2, TRAJ45)
CAVYSGGGADGLTF

SEQ ID NO: 192814 - protein, 14 aa, Homo sapiens
  CDR3 for beta chain variable domain of TCR clone 96407 (TRBV6-5, TRBJ1-2)
CASNRGGGSDGYTF

SEQ ID NO: 192815 - protein, 10 aa, Homo sapiens
  CDR3 for alpha chain variable domain of TCR clone 96408 (TRAV16, TRAJ22)
SAMYLRQLTF

SEQ ID NO: 192816 - protein, 15 aa, Homo sapiens
  CDR3 for beta chain variable domain of TCR clone 96408 (TRBV7-2, TRBJ2-1)
CASSFQADEYNEQFF

SEQ ID NO: 192817 - protein, 14 aa, Homo sapiens
  CDR3 for alpha chain variable domain of TCR clone 96409 (TRAV17, TRAJ35)
CATDRPGFGNVLHC

SEQ ID NO: 192818 - protein, 18 aa, Homo sapiens
  CDR3 for beta chain variable domain of TCR clone 96409 (TRBV20-1, TRBJ2-6)
CSARGSGTTRSGANVLTF

SEQ ID NO: 192819 - protein, 14 aa, Homo sapiens
  CDR3 for alpha chain variable domain of TCR clone 96410 (TRAV38-1, TRAJ30)
CAFMPMNRDDKIIV

SEQ ID NO: 192820 - protein, 15 aa, Homo sapiens
  CDR3 for beta chain variable domain of TCR clone 96410 (TRBV7-9, TRBJ2-7)
CASSLDLQGPYEQYF

SEQ ID NO: 192821 - protein, 18 aa, Homo sapiens
  CDR3 for alpha chain variable domain of TCR clone 96411 (TRAV21, TRAJ52)
CAVRPSPAGGTSYGKLTF

SEQ ID NO: 192822 - protein, 16 aa, Homo sapiens
  CDR3 for beta chain variable domain of TCR clone 96411 (TRBV7-8, TRBJ2-4)
CASSAERTLAKNIQYF

SEQ ID NO: 192823 - protein, 12 aa, Homo sapiens
  CDR3 for alpha chain variable domain of TCR clone 96412 (TRAV17, TRAJ39)
CATGAAGNTLTF

SEQ ID NO: 192824 - protein, 14 aa, Homo sapiens
  CDR3 for beta chain variable domain of TCR clone 96412 (TRBV7-9, TRBJ1-2)
CASSRQGANYGYTF

SEQ ID NO: 192825 - protein, 14 aa, Homo sapiens
  CDR3 for alpha chain variable domain of TCR clone 96413 (TRAV30, TRAJ26)
CGTEIVSYGQNFVF

SEQ ID NO: 192826 - protein, 14 aa, Homo sapiens
  CDR3 for beta chain variable domain of TCR clone 96413 (TRBV28, TRBJ1-5)
CASSGQALYQPQHF

SEQ ID NO: 192827 - protein, 14 aa, Homo sapiens
  CDR3 for alpha chain variable domain of TCR clone 96414 (TRAV8-2, TRAJ37)
CVVSISGNTGKLIF

SEQ ID NO: 192828 - protein, 14 aa, Homo sapiens
  CDR3 for beta chain variable domain of TCR clone 96414 (TRBV12-4, TRBJ2-7)
CASSPRQDLYEQYF

SEQ ID NO: 192829 - protein, 14 aa, Homo sapiens
  CDR3 for alpha chain variable domain of TCR clone 96415 (TRAV1-2, TRAJ8)
CAVREDTGFQKLVF

SEQ ID NO: 192830 - protein, 16 aa, Homo sapiens
  CDR3 for beta chain variable domain of TCR clone 96415 (TRBV5-1, TRBJ2-3)
CASSPGTGGRPDTQYF

SEQ ID NO: 192831 - protein, 12 aa, Homo sapiens
  CDR3 for alpha chain variable domain of TCR clone 96416 (TRAV26-2, TRAJ48)
CILRKGNEKLTF

SEQ ID NO: 192832 - protein, 14 aa, Homo sapiens
  CDR3 for beta chain variable domain of TCR clone 96416 (TRBV28, TRBJ2-7)
CASSTLRGRYEQYF

SEQ ID NO: 192833 - protein, 14 aa, Homo sapiens
  CDR3 for alpha chain variable domain of TCR clone 96417 (TRAV8-4, TRAJ9)
CAVRINTGGFKTIF

SEQ ID NO: 192834 - protein, 17 aa, Homo sapiens
  CDR3 for beta chain variable domain of TCR clone 96417 (TRBV29-1, TRBJ2-7)
CSVVFPADFTGAYEQYF

SEQ ID NO: 192835 - protein, 13 aa, Homo sapiens
  CDR3 for alpha chain variable domain of TCR clone 96418 (TRAV1-1, TRAJ23)
CAVVANQGGKLIF

SEQ ID NO: 192836 - protein, 16 aa, Homo sapiens
  CDR3 for beta chain variable domain of TCR clone 96418 (TRBV5-5, TRBJ1-2)
CASSTTWGRGLYGYTF

SEQ ID NO: 192837 - protein, 15 aa, Homo sapiens
  CDR3 for alpha chain variable domain of TCR clone 96419 (TRAV13-1, TRAJ15)
CAASIERQAGTDLIF

SEQ ID NO: 192838 - protein, 13 aa, Homo sapiens
  CDR3 for beta chain variable domain of TCR clone 96419 (TRBV5-1, TRBJ2-7)
CASSATGGNEQYF

SEQ ID NO: 192839 - protein, 14 aa, Homo sapiens
  CDR3 for alpha chain variable domain of TCR clone 96420 (TRAV21, TRAJ35)
CAVMPIGFGNVLHC

SEQ ID NO: 192840 - protein, 17 aa, Homo sapiens
  CDR3 for beta chain variable domain of TCR clone 96420 (TRBV11-2, TRBJ2-1)
CASSLYPPGVEYNEQFF

SEQ ID NO: 192841 - protein, 11 aa, Homo sapiens
  CDR3 for alpha chain variable domain of TCR clone 96421 (TRAV2, TRAJ21)
CAVFNFNKFYF

SEQ ID NO: 192842 - protein, 16 aa, Homo sapiens
  CDR3 for beta chain variable domain of TCR clone 96421 (TRBV11-2, TRBJ1-1)
CASSLRQGGEHSKAFF

SEQ ID NO: 192843 - protein, 12 aa, Homo sapiens
  CDR3 for alpha chain variable domain of TCR clone 96422 (TRAV12-2, TRAJ10)
WGVTGGGNKLTF

SEQ ID NO: 192844 - protein, 13 aa, Homo sapiens
  CDR3 for beta chain variable domain of TCR clone 96422 (TRBV20-1, TRBJ1-1)
CSARGGGNTEAFF

SEQ ID NO: 192845 - protein, 12 aa, Homo sapiens
  CDR3 for alpha chain variable domain of TCR clone 96423 (TRAV2, TRAJ10)
CASTGGGNKLTF

SEQ ID NO: 192846 - protein, 20 aa, Homo sapiens
  CDR3 for beta chain variable domain of TCR clone 96423 (TRBV7-8, TRBJ2-2)
CASSHLLPGPTIHITGELFF

SEQ ID NO: 192847 - protein, 11 aa, Homo sapiens
  CDR3 for alpha chain variable domain of TCR clone 96424 (TRAV17, TRAJ31)
CATSNNARLMF

SEQ ID NO: 192848 - protein, 14 aa, Homo sapiens
  CDR3 for beta chain variable domain of TCR clone 96424 (TRBV4-1, TRBJ2-2)
CASSQAVNTGELFF

SEQ ID NO: 192849 - protein, 17 aa, Homo sapiens
  CDR3 for alpha chain variable domain of TCR clone 96425 (TRAV8-3, TRAJ21)
CAVGALPPGGTNFTLDL

SEQ ID NO: 192850 - protein, 15 aa, Homo sapiens
  CDR3 for beta chain variable domain of TCR clone 96425 (TRBV7-8, TRBJ1-5)
CASSLERRGLEPQHF

SEQ ID NO: 192851 - protein, 13 aa, Homo sapiens
  CDR3 for alpha chain variable domain of TCR clone 96426 (TRAV27, TRAJ23)
CAGVLPKGGKLIF

SEQ ID NO: 192852 - protein, 16 aa, Homo sapiens
  CDR3 for beta chain variable domain of TCR clone 96426 (TRBV7-3, TRBJ2-2)
CASSLKRGTLSGELFF

SEQ ID NO: 192853 - protein, 16 aa, Homo sapiens
  CDR3 for alpha chain variable domain of TCR clone 96427 (TRAV13-1, TRAJ45)
RAARGSRKGGADGLTF

SEQ ID NO: 192854 - protein, 13 aa, Homo sapiens
  CDR3 for beta chain variable domain of TCR clone 96427 (TRBV12-4, TRBJ2-5)
CASRKRGKETQYF

SEQ ID NO: 192855 - protein, 16 aa, Homo sapiens
  CDR3 for alpha chain variable domain of TCR clone 96428 (TRAV1-1, TRAJ37)
CAVRDKALATQANKSL

SEQ ID NO: 192856 - protein, 14 aa, Homo sapiens
  CDR3 for beta chain variable domain of TCR clone 96428 (TRBV7-2, TRBJ2-7)
CASSPKTSFYEQYF

SEQ ID NO: 192857 - protein, 16 aa, Homo sapiens
  CDR3 for alpha chain variable domain of TCR clone 96429 (TRAV17, TRAJ52)
CATDPMGGTSYGKLTF

SEQ ID NO: 192858 - protein, 11 aa, Homo sapiens
  CDR3 for beta chain variable domain of TCR clone 96429 (TRBV5-6, TRBJ2-5)
CASSLERTQYF

SEQ ID NO: 192859 - protein, 14 aa, Homo sapiens
  CDR3 for alpha chain variable domain of TCR clone 96430 (TRAV16, TRAJ39)
CALSKNNAGNMLTF

SEQ ID NO: 192860 - protein, 11 aa, Homo sapiens
  CDR3 for beta chain variable domain of TCR clone 96430 (TRBV10-3, TRBJ2-7)
CAVSEGLEQYF

SEQ ID NO: 192861 - protein, 12 aa, Homo sapiens
  CDR3 for alpha chain variable domain of TCR clone 96431 (TRAV13-1, TRAJ21)
CAAKEGFNKFYF

SEQ ID NO: 192862 - protein, 18 aa, Homo sapiens
  CDR3 for beta chain variable domain of TCR clone 96431 (TRBV20-1, TRBJ2-6)
CSAETTPAHGSGANVLTF

SEQ ID NO: 192863 - protein, 15 aa, Homo sapiens
  CDR3 for alpha chain variable domain of TCR clone 96432 (TRAV8-3, TRAJ37)
CAVGARASNTGELIF

SEQ ID NO: 192864 - protein, 15 aa, Homo sapiens
  CDR3 for beta chain variable domain of TCR clone 96432 (TRBV5-4, TRBJ2-3)
CASSLAGRVTDTQYF

SEQ ID NO: 192865 - protein, 18 aa, Homo sapiens
  CDR3 for alpha chain variable domain of TCR clone 96433 (TRAV21, TRAJ53)
CAVKGGENSGGSNYKLTF

SEQ ID NO: 192866 - protein, 14 aa, Homo sapiens
  CDR3 for beta chain variable domain of TCR clone 96433 (TRBV7-2, TRBJ2-2)
CASSLGQNTGELFF

SEQ ID NO: 192867 - protein, 16 aa, Homo sapiens
  CDR3 for alpha chain variable domain of TCR clone 96434 (TRAV38-1, TRAJ32)
CAFMKGGGGATNKLIF

SEQ ID NO: 192868 - protein, 15 aa, Homo sapiens
  CDR3 for beta chain variable domain of TCR clone 96434 (TRBV5-1, TRBJ1-4)
FAPAAWKDGNEKLFF

SEQ ID NO: 192869 - protein, 14 aa, Homo sapiens
  CDR3 for alpha chain variable domain of TCR clone 96435 (TRAV8-4, TRAJ34)
CAVSDPGDTDKPIF

SEQ ID NO: 192870 - protein, 13 aa, Homo sapiens
  CDR3 for beta chain variable domain of TCR clone 96435 (TRBV7-9, TRBJ2-5)
CASLSPGQETQYF

SEQ ID NO: 192871 - protein, 15 aa, Homo sapiens
  CDR3 for alpha chain variable domain of TCR clone 96436 (TRAV3, TRAJ11)
CAVRDRGSGYSTLTF

SEQ ID NO: 192872 - protein, 12 aa, Homo sapiens
  CDR3 for beta chain variable domain of TCR clone 96436 (TRBV11-2, TRBJ2-2)
CASSLGGGELFF

SEQ ID NO: 192873 - protein, 14 aa, Homo sapiens
  CDR3 for alpha chain variable domain of TCR clone 96437 (TRAV13-1, TRAJ44)
CAAKATGTASKLTF

SEQ ID NO: 192874 - protein, 12 aa, Homo sapiens
  CDR3 for beta chain variable domain of TCR clone 96437 (TRBV12-4, TRBJ2-1)
CASSKDRRWQFF

SEQ ID NO: 192875 - protein, 11 aa, Homo sapiens
  CDR3 for alpha chain variable domain of TCR clone 96438 (TRAV12-1, TRAJ30)
GVVNGQDKIIF

SEQ ID NO: 192876 - protein, 12 aa, Homo sapiens
  CDR3 for beta chain variable domain of TCR clone 96438 (TRBV27, TRBJ2-2)
CASKLFTGELFF

SEQ ID NO: 192877 - protein, 12 aa, Homo sapiens
  CDR3 for alpha chain variable domain of TCR clone 96439 (TRAV3, TRAJ26)
CAVRDYGQNFVF

SEQ ID NO: 192878 - protein, 17 aa, Homo sapiens
  CDR3 for beta chain variable domain of TCR clone 96439 (TRBV2, TRBJ2-7)
CASSQALTGWDSYEQYF

SEQ ID NO: 192879 - protein, 13 aa, Homo sapiens
  CDR3 for alpha chain variable domain of TCR clone 96440 (TRAV27, TRAJ49)
CAPRPYTGNQFYC

SEQ ID NO: 192880 - protein, 16 aa, Homo sapiens
  CDR3 for beta chain variable domain of TCR clone 96440 (TRBV4-1, TRBJ1-2)
CASSQDAGQVLYGYTF

SEQ ID NO: 192881 - protein, 16 aa, Homo sapiens
  CDR3 for alpha chain variable domain of TCR clone 96441 (TRAV30, TRAJ24)
CGTEIVDADSWGKLQF

SEQ ID NO: 192882 - protein, 14 aa, Homo sapiens
  CDR3 for beta chain variable domain of TCR clone 96441 (TRBV13, TRBJ2-1)
CASSPRPRYNEQFF

SEQ ID NO: 192883 - protein, 10 aa, Homo sapiens
  CDR3 for alpha chain variable domain of TCR clone 96442 (TRAV12-3, TRAJ49)
CAMNDDQFYF

SEQ ID NO: 192884 - protein, 16 aa, Homo sapiens
  CDR3 for beta chain variable domain of TCR clone 96442 (TRBV4-1, TRBJ2-6)
CASSQDGGPGANVLTF

SEQ ID NO: 192885 - protein, 15 aa, Homo sapiens
  CDR3 for alpha chain variable domain of TCR clone 96443 (TRAV25, TRAJ52)
CAGTSGGTSYGKLTF

SEQ ID NO: 192886 - protein, 16 aa, Homo sapiens
  CDR3 for beta chain variable domain of TCR clone 96443 (TRBV15, TRBJ1-2)
CDTSRGPRTGGGGYTF

SEQ ID NO: 192887 - protein, 16 aa, Homo sapiens
  CDR3 for alpha chain variable domain of TCR clone 96444 (TRAV3, TRAJ37)
CAVRGKGSGNTGKLIF

SEQ ID NO: 192888 - protein, 14 aa, Homo sapiens
  CDR3 for beta chain variable domain of TCR clone 96444 (TRBV4-1, TRBJ2-2)
CASSQAVNTGELFF

SEQ ID NO: 192889 - protein, 14 aa, Homo sapiens
  CDR3 for alpha chain variable domain of TCR clone 96445 (TRAV26-1, TRAJ48)
CIVRVGFGKEKLTF

SEQ ID NO: 192890 - protein, 13 aa, Homo sapiens
  CDR3 for beta chain variable domain of TCR clone 96445 (TRBV11-3, TRBJ2-3)
CASSHDTKDTQYF

SEQ ID NO: 192891 - protein, 13 aa, Homo sapiens
  CDR3 for alpha chain variable domain of TCR clone 96446 (TRAV12-3, TRAJ9)
CAMRNTGGFKTIF

SEQ ID NO: 192892 - protein, 14 aa, Homo sapiens
  CDR3 for beta chain variable domain of TCR clone 96446 (TRBV11-2, TRBJ2-7)
CASSFTGEGYEQYF

SEQ ID NO: 192893 - protein, 13 aa, Homo sapiens
  CDR3 for alpha chain variable domain of TCR clone 96447 (TRAV14/DV4, TRAJ23)
CAMREVKGGKLIF

SEQ ID NO: 192894 - protein, 15 aa, Homo sapiens
  CDR3 for beta chain variable domain of TCR clone 96447 (TRBV28, TRBJ2-4)
CAAGSGTLLMGIQYF

SEQ ID NO: 192895 - protein, 15 aa, Homo sapiens
  CDR3 for alpha chain variable domain of TCR clone 96448 (TRAV17, TRAJ37)
CATDHGSSNTGKLIL

SEQ ID NO: 192896 - protein, 14 aa, Homo sapiens
  CDR3 for beta chain variable domain of TCR clone 96448 (TRBV7-2, TRBJ2-3)
CASSRTSGADTQYF

SEQ ID NO: 192897 - protein, 15 aa, Homo sapiens
  CDR3 for alpha chain variable domain of TCR clone 96449 (TRAV29/DV5, TRAJ40)
CAASAHGSGTYKYIF

SEQ ID NO: 192898 - protein, 15 aa, Homo sapiens
  CDR3 for beta chain variable domain of TCR clone 96449 (TRBV7-2, TRBJ2-3)
CASSLAGAFIDTQYF

SEQ ID NO: 192899 - protein, 14 aa, Homo sapiens
  CDR3 for alpha chain variable domain of TCR clone 96450 (TRAV38-1, TRAJ31)
CASMKHDNNARLMF

SEQ ID NO: 192900 - protein, 16 aa, Homo sapiens
  CDR3 for beta chain variable domain of TCR clone 96450 (TRBV23-1, TRBJ2-1)
CISAPATGPTYNEQFF

SEQ ID NO: 192901 - protein, 14 aa, Homo sapiens
  CDR3 for alpha chain variable domain of TCR clone 96451 (TRAV1-2, TRAJ8)
CAVREDTGFKKLVF

SEQ ID NO: 192902 - protein, 15 aa, Homo sapiens
  CDR3 for beta chain variable domain of TCR clone 96451 (TRBV4-1, TRBJ2-7)
CASSQNTGRLYEQYF

SEQ ID NO: 192903 - protein, 14 aa, Homo sapiens
  CDR3 for alpha chain variable domain of TCR clone 96452 (TRAV8-4, TRAJ34)
CAVSDPGDTDKLIF

SEQ ID NO: 192904 - protein, 14 aa, Homo sapiens
  CDR3 for beta chain variable domain of TCR clone 96452 (TRBV20-1, TRBJ2-5)
CSARNGRAGETQYF

SEQ ID NO: 192905 - protein, 17 aa, Homo sapiens
  CDR3 for alpha chain variable domain of TCR clone 96453 (TRAV3, TRAJ6)
FAVRDGPRAGGSYIPTL

SEQ ID NO: 192906 - protein, 14 aa, Homo sapiens
  CDR3 for beta chain variable domain of TCR clone 96453 (TRBV7-2, TRBJ2-7)
CASSPKTSFYEQYF

SEQ ID NO: 192907 - protein, 16 aa, Homo sapiens
  CDR3 for alpha chain variable domain of TCR clone 96454 (TRAV16, TRAJ42)
CALSGLLGGSQGNPIF

SEQ ID NO: 192908 - protein, 15 aa, Homo sapiens
  CDR3 for beta chain variable domain of TCR clone 96454 (TRBV5-1, TRBJ2-1)
CASSPGGLAGNEQFF

SEQ ID NO: 192909 - protein, 16 aa, Homo sapiens
  CDR3 for alpha chain variable domain of TCR clone 96455 (TRAV12-2, TRAJ28)
CAVITDSGAGSYQLNF

SEQ ID NO: 192910 - protein, 12 aa, Homo sapiens
  CDR3 for beta chain variable domain of TCR clone 96455 (TRBV9, TRBJ2-2)
CASSLVTGELFF

SEQ ID NO: 192911 - protein, 16 aa, Homo sapiens
  CDR3 for alpha chain variable domain of TCR clone 96456 (TRAV30, TRAJ24)
CGTEIVDADSWGRFQF

SEQ ID NO: 192912 - protein, 12 aa, Homo sapiens
  CDR3 for beta chain variable domain of TCR clone 96456 (TRBV11-2, TRBJ2-1)
CASSPGNNEQFF

SEQ ID NO: 192913 - protein, 13 aa, Homo sapiens
  CDR3 for alpha chain variable domain of TCR clone 96457 (TRAV1-2, TRAJ9)
CAALNTGGFKTIF

SEQ ID NO: 192914 - protein, 15 aa, Homo sapiens
  CDR3 for beta chain variable domain of TCR clone 96457 (TRBV13, TRBJ1-3)
CASSPNRGSGNTIYF

SEQ ID NO: 192915 - protein, 13 aa, Homo sapiens
  CDR3 for alpha chain variable domain of TCR clone 96458 (TRAV20, TRAJ37)
CAECSSNTGKLIF

SEQ ID NO: 192916 - protein, 13 aa, Homo sapiens
  CDR3 for beta chain variable domain of TCR clone 96458 (TRBV7-9, TRBJ2-2)
CASSSAGTGELFF

SEQ ID NO: 192917 - protein, 15 aa, Homo sapiens
  CDR3 for alpha chain variable domain of TCR clone 96459 (TRAV27, TRAJ38)
CAARRNAGNNRKLIW

SEQ ID NO: 192918 - protein, 13 aa, Homo sapiens
  CDR3 for beta chain variable domain of TCR clone 96459 (TRBV20-1, TRBJ2-5)
CSAREAFQETQYF

SEQ ID NO: 192919 - protein, 15 aa, Homo sapiens
  CDR3 for alpha chain variable domain of TCR clone 96460 (TRAV25, TRAJ52)
CAGRPGGTSYGKLTF

SEQ ID NO: 192920 - protein, 14 aa, Homo sapiens
  CDR3 for beta chain variable domain of TCR clone 96460 (TRBV19, TRBJ2-3)
CASSIDLGGDTQYF

SEQ ID NO: 192921 - protein, 12 aa, Homo sapiens
  CDR3 for alpha chain variable domain of TCR clone 96461 (TRAV1-1, TRAJ9)
CAVYTGGFKTIF

SEQ ID NO: 192922 - protein, 14 aa, Homo sapiens
  CDR3 for beta chain variable domain of TCR clone 96461 (TRBV7-8, TRBJ2-5)
CASSATGGQETQYF

SEQ ID NO: 192923 - protein, 12 aa, Homo sapiens
  CDR3 for alpha chain variable domain of TCR clone 96462 (TRAV12-3, TRAJ5)
CAMDTGRRALTF

SEQ ID NO: 192924 - protein, 13 aa, Homo sapiens
  CDR3 for beta chain variable domain of TCR clone 96462 (TRBV7-7, TRBJ2-2)
CASSLTSAGELFC

SEQ ID NO: 192925 - protein, 15 aa, Homo sapiens
  CDR3 for alpha chain variable domain of TCR clone 96463 (TRAV8-4, TRAJ7)
CAVSGGNYGNNRLSF

SEQ ID NO: 192926 - protein, 11 aa, Homo sapiens
  CDR3 for beta chain variable domain of TCR clone 96463 (TRBV20-1, TRBJ2-1)
CSLSSGSEQFF

SEQ ID NO: 192927 - protein, 15 aa, Homo sapiens
  CDR3 for alpha chain variable domain of TCR clone 96464 (TRAV23/DV6, TRAJ30)
CAASSQESRDDEIIF

SEQ ID NO: 192928 - protein, 17 aa, Homo sapiens
  CDR3 for beta chain variable domain of TCR clone 96464 (TRBV4-3, TRBJ2-1)
CASSQFSSGRASGEQFF

SEQ ID NO: 192929 - protein, 13 aa, Homo sapiens
  CDR3 for alpha chain variable domain of TCR clone 96465 (TRAV29/DV5, TRAJ31)
CAASRNNSARLMF

SEQ ID NO: 192930 - protein, 12 aa, Homo sapiens
  CDR3 for beta chain variable domain of TCR clone 96465 (TRBV14, TRBJ2-7)
CASSLYKDEQYF

SEQ ID NO: 192931 - protein, 12 aa, Homo sapiens
  CDR3 for alpha chain variable domain of TCR clone 96466 (TRAV17, TRAJ57)
CATDGGSEKLVF

SEQ ID NO: 192932 - protein, 13 aa, Homo sapiens
  CDR3 for beta chain variable domain of TCR clone 96466 (TRBV7-9, TRBJ2-7)
CASSFAGADEQYF

SEQ ID NO: 192933 - protein, 11 aa, Homo sapiens
  CDR3 for alpha chain variable domain of TCR clone 96467 (TRAV12-2, TRAJ49)
CALQGGNQFYF

SEQ ID NO: 192934 - protein, 13 aa, Homo sapiens
  CDR3 for beta chain variable domain of TCR clone 96467 (TRBV4-1, TRBJ1-1)
CASSQLGTGGAFF

SEQ ID NO: 192935 - protein, 13 aa, Homo sapiens
  CDR3 for alpha chain variable domain of TCR clone 96468 (TRAV21, TRAJ57)
CAVTQGGSEKLVF

SEQ ID NO: 192936 - protein, 12 aa, Homo sapiens
  CDR3 for beta chain variable domain of TCR clone 96468 (TRBV6-3, TRBJ2-7)
CASSLTPYEQYF

SEQ ID NO: 192937 - protein, 15 aa, Homo sapiens
  CDR3 for alpha chain variable domain of TCR clone 96469 (TRAV3, TRAJ9)
CAVRARNTGGLKTIF

SEQ ID NO: 192938 - protein, 12 aa, Homo sapiens
  CDR3 for beta chain variable domain of TCR clone 96469 (TRBV11-2, TRBJ2-7)
CASSLPTYEQYF

SEQ ID NO: 192939 - protein, 13 aa, Homo sapiens
  CDR3 for alpha chain variable domain of TCR clone 96470 (TRAV12-2, TRAJ34)
CAVRGYNTDKLIF

SEQ ID NO: 192940 - protein, 15 aa, Homo sapiens
  CDR3 for beta chain variable domain of TCR clone 96470 (TRBV28, TRBJ2-1)
CASRAGAGVIARQFF

SEQ ID NO: 192941 - protein, 14 aa, Homo sapiens
  CDR3 for alpha chain variable domain of TCR clone 96471 (TRAV17, TRAJ34)
CATDSLEGTDKPIF

SEQ ID NO: 192942 - protein, 14 aa, Homo sapiens
  CDR3 for beta chain variable domain of TCR clone 96471 (TRBV7-2, TRBJ2-7)
CASRSQGAAYEQYF

SEQ ID NO: 192943 - protein, 14 aa, Homo sapiens
  CDR3 for alpha chain variable domain of TCR clone 96472 (TRAV1-2, TRAJ16)
CAVNRFSDGQKLLF

SEQ ID NO: 192944 - protein, 11 aa, Homo sapiens
  CDR3 for beta chain variable domain of TCR clone 96472 (TRBV7-9, TRBJ2-3)
CASSGPDTQYF

SEQ ID NO: 192945 - protein, 17 aa, Homo sapiens
  CDR3 for alpha chain variable domain of TCR clone 96473 (TRAV3, TRAJ6)
CAVRDGPRAGGSYITTF

SEQ ID NO: 192946 - protein, 15 aa, Homo sapiens
  CDR3 for beta chain variable domain of TCR clone 96473 (TRBV7-6, TRBJ2-3)
CASSPIIYSTDTQYF

SEQ ID NO: 192947 - protein, 13 aa, Homo sapiens
  CDR3 for alpha chain variable domain of TCR clone 96474 (TRAV12-3, TRAJ33)
CAMSVNSNYQLIS

SEQ ID NO: 192948 - protein, 13 aa, Homo sapiens
  CDR3 for beta chain variable domain of TCR clone 96474 (TRBV7-2, TRBJ2-2)
CASSLAVTGELFF

SEQ ID NO: 192949 - protein, 18 aa, Homo sapiens
  CDR3 for alpha chain variable domain of TCR clone 96475 (TRAV13-1, TRAJ52)
CAAKNPNAGGTSYGKLTF

SEQ ID NO: 192950 - protein, 19 aa, Homo sapiens
  CDR3 for beta chain variable domain of TCR clone 96475 (TRBV19, TRBJ2-5)
CASSIGQVTDFFLGETQYF

SEQ ID NO: 192951 - protein, 14 aa, Homo sapiens
  CDR3 for alpha chain variable domain of TCR clone 96476 (TRAV1-1, TRAJ27)
CAFSEAPMQANQPL

SEQ ID NO: 192952 - protein, 17 aa, Homo sapiens
  CDR3 for beta chain variable domain of TCR clone 96476 (TRBV20-1, TRBJ2-3)
CSARDPKGVSATDTQYF

SEQ ID NO: 192953 - protein, 17 aa, Homo sapiens
  CDR3 for alpha chain variable domain of TCR clone 96477 (TRAV26-2, TRAJ42)
CILRVVGYGGSQGNLIF

SEQ ID NO: 192954 - protein, 16 aa, Homo sapiens
  CDR3 for beta chain variable domain of TCR clone 96477 (TRBV12-4, TRBJ2-7)
CASSLIGGTGTYEQYF

SEQ ID NO: 192955 - protein, 14 aa, Homo sapiens
  CDR3 for alpha chain variable domain of TCR clone 96478 (TRAV17, TRAJ15)
CATDRGQEGTALIF

SEQ ID NO: 192956 - protein, 17 aa, Homo sapiens
  CDR3 for beta chain variable domain of TCR clone 96478 (TRBV29-1, TRBJ2-1)
CSVVGLAGAYSYNEQFF

SEQ ID NO: 192957 - protein, 15 aa, Homo sapiens
  CDR3 for alpha chain variable domain of TCR clone 96479 (TRAV8-2, TRAJ40)
CVVLGTTSRTYKYIF

SEQ ID NO: 192958 - protein, 16 aa, Homo sapiens
  CDR3 for beta chain variable domain of TCR clone 96479 (TRBV7-3, TRBJ2-1)
CASSLEGYRSYNEQFF

SEQ ID NO: 192959 - protein, 13 aa, Homo sapiens
  CDR3 for alpha chain variable domain of TCR clone 96480 (TRAV13-2, TRAJ40)
CAEVTSGTYKYIF

SEQ ID NO: 192960 - protein, 14 aa, Homo sapiens
  CDR3 for beta chain variable domain of TCR clone 96480 (TRBV10-2, TRBJ1-5)
CASSSTGRNQPQHF

SEQ ID NO: 192961 - protein, 17 aa, Homo sapiens
  CDR3 for alpha chain variable domain of TCR clone 96481 (TRAV26-1, TRAJ37)
CIVRVITVSSNTGKLIF

SEQ ID NO: 192962 - protein, 15 aa, Homo sapiens
  CDR3 for beta chain variable domain of TCR clone 96481 (TRBV6-1, TRBJ2-1)
CASSEAAYSYNEQFF

SEQ ID NO: 192963 - protein, 15 aa, Homo sapiens
  CDR3 for alpha chain variable domain of TCR clone 96482 (TRAV12-2, TRAJ53)
CAVNGGGGSNYKLTF

SEQ ID NO: 192964 - protein, 13 aa, Homo sapiens
  CDR3 for beta chain variable domain of TCR clone 96482 (TRBV27, TRBJ2-7)
CASSFSQGYEQYF

SEQ ID NO: 192965 - protein, 12 aa, Homo sapiens
  CDR3 for alpha chain variable domain of TCR clone 96483 (TRAV17, TRAJ4)
CATDGGYNKLNF

SEQ ID NO: 192966 - protein, 13 aa, Homo sapiens
  CDR3 for beta chain variable domain of TCR clone 96483 (TRBV29-1, TRBJ2-2)
CSTTGVNTGELFF

SEQ ID NO: 192967 - protein, 14 aa, Homo sapiens
  CDR3 for alpha chain variable domain of TCR clone 96484 (TRAV1-2, TRAJ16)
CAVNRFSDGQKLLF

SEQ ID NO: 192968 - protein, 14 aa, Homo sapiens
  CDR3 for beta chain variable domain of TCR clone 96484 (TRBV6-1, TRBJ2-1)
CASARDGFYNEQFF

SEQ ID NO: 192969 - protein, 12 aa, Homo sapiens
  CDR3 for alpha chain variable domain of TCR clone 96485 (TRAV12-3, TRAJ17)
CTMTLTGNKLTL

SEQ ID NO: 192970 - protein, 15 aa, Homo sapiens
  CDR3 for beta chain variable domain of TCR clone 96485 (TRBV7-9, TRBJ1-6)
CASSSPGRGNSPLHF

SEQ ID NO: 192971 - protein, 16 aa, Homo sapiens
  CDR3 for alpha chain variable domain of TCR clone 96486 (TRAV8-3, TRAJ28)
CAVPPQRGAGSYQLTF

SEQ ID NO: 192972 - protein, 13 aa, Homo sapiens
  CDR3 for beta chain variable domain of TCR clone 96486 (TRBV7-6, TRBJ2-3)
CASSLRGDNTQYF

SEQ ID NO: 192973 - protein, 14 aa, Homo sapiens
  CDR3 for alpha chain variable domain of TCR clone 96487 (TRAV4, TRAJ20)
CLVGDFINDYKLSF

SEQ ID NO: 192974 - protein, 14 aa, Homo sapiens
  CDR3 for beta chain variable domain of TCR clone 96487 (TRBV12-5, TRBJ2-5)
CASGSRTHQETQYF

SEQ ID NO: 192975 - protein, 13 aa, Homo sapiens
  CDR3 for alpha chain variable domain of TCR clone 96488 (TRAV21, TRAJ45)
CAVMGGGADGLTF

SEQ ID NO: 192976 - protein, 16 aa, Homo sapiens
  CDR3 for beta chain variable domain of TCR clone 96488 (TRBV20-1, TRBJ2-1)
CSARDHLAGGRGKQFF

SEQ ID NO: 192977 - protein, 11 aa, Homo sapiens
  CDR3 for alpha chain variable domain of TCR clone 96489 (TRAV13-1, TRAJ6)
CSTLGSYIPTF

SEQ ID NO: 192978 - protein, 12 aa, Homo sapiens
  CDR3 for beta chain variable domain of TCR clone 96489 (TRBV11-2, TRBJ2-1)
CASSPGNNEQFF

SEQ ID NO: 192979 - protein, 13 aa, Homo sapiens
  CDR3 for alpha chain variable domain of TCR clone 96490 (TRAV12-1, TRAJ17)
CVVSKAAGNKLTF

SEQ ID NO: 192980 - protein, 17 aa, Homo sapiens
  CDR3 for beta chain variable domain of TCR clone 96490 (TRBV4-1, TRBJ2-5)
CASSQDPSGGPQDTQYF

SEQ ID NO: 192981 - protein, 13 aa, Homo sapiens
  CDR3 for alpha chain variable domain of TCR clone 96491 (TRAV1-2, TRAJ12)
CAVSMDSSYKLIF

SEQ ID NO: 192982 - protein, 14 aa, Homo sapiens
  CDR3 for beta chain variable domain of TCR clone 96491 (TRBV7-9, TRBJ1-5)
CASADLGSNQPQHF

SEQ ID NO: 192983 - protein, 11 aa, Homo sapiens
  CDR3 for alpha chain variable domain of TCR clone 96492 (TRAV27, TRAJ47)
CRSNQGKKLVF

SEQ ID NO: 192984 - protein, 16 aa, Homo sapiens
  CDR3 for beta chain variable domain of TCR clone 96492 (TRBV7-9, TRBJ2-1)
CASSDVAGGSYNEQFF

SEQ ID NO: 192985 - protein, 14 aa, Homo sapiens
  CDR3 for alpha chain variable domain of TCR clone 96493 (TRAV17, TRAJ57)
CATDPQGGSEKLVF

SEQ ID NO: 192986 - protein, 12 aa, Homo sapiens
  CDR3 for beta chain variable domain of TCR clone 96493 (TRBV16, TRBJ2-2)
CASSQSVGELFF

SEQ ID NO: 192987 - protein, 12 aa, Homo sapiens
  CDR3 for alpha chain variable domain of TCR clone 96494 (TRAV29/DV5, TRAJ49)
CAATDTGNQFYF

SEQ ID NO: 192988 - protein, 19 aa, Homo sapiens
  CDR3 for beta chain variable domain of TCR clone 96494 (TRBV25-1, TRBJ2-2)
CAILVYRVDRGRKTGELFS

SEQ ID NO: 192989 - protein, 19 aa, Homo sapiens
  CDR3 for alpha chain variable domain of TCR clone 96495 (TRAV38-1, TRAJ53)
CAFTKHGLESGGSNYKLTF

SEQ ID NO: 192990 - protein, 13 aa, Homo sapiens
  CDR3 for beta chain variable domain of TCR clone 96495 (TRBV19, TRBJ2-7)
CASSPRQSYEQYF

SEQ ID NO: 192991 - protein, 18 aa, Homo sapiens
  CDR3 for alpha chain variable domain of TCR clone 96496 (TRAV26-1, TRAJ22)
CIVRVALISSGSARQLTF

SEQ ID NO: 192992 - protein, 13 aa, Homo sapiens
  CDR3 for beta chain variable domain of TCR clone 96496 (TRBV13, TRBJ2-5)
CASSPEVGETQYF

SEQ ID NO: 192993 - protein, 13 aa, Homo sapiens
  CDR3 for alpha chain variable domain of TCR clone 96497 (TRAV13-1, TRAJ43)
CAASKNNNNDMRI

SEQ ID NO: 192994 - protein, 14 aa, Homo sapiens
  CDR3 for beta chain variable domain of TCR clone 96497 (TRBV14, TRBJ2-1)
CASSQVQGRGEQFF

SEQ ID NO: 192995 - protein, 15 aa, Homo sapiens
  CDR3 for alpha chain variable domain of TCR clone 96498 (TRAV3, TRAJ17)
CAVSPKEAAGNKLTF

SEQ ID NO: 192996 - protein, 12 aa, Homo sapiens
  CDR3 for beta chain variable domain of TCR clone 96498 (TRBV24-1, TRBJ1-1)
CATLYPDTEAFF

SEQ ID NO: 192997 - protein, 13 aa, Homo sapiens
  CDR3 for alpha chain variable domain of TCR clone 96499 (TRAV12-3, TRAJ33)
CAMSVNSNYQLIW

SEQ ID NO: 192998 - protein, 14 aa, Homo sapiens
  CDR3 for beta chain variable domain of TCR clone 96499 (TRBV19, TRBJ2-7)
CAITVQGRPYEQYF

SEQ ID NO: 192999 - protein, 15 aa, Homo sapiens
  CDR3 for alpha chain variable domain of TCR clone 96500 (TRAV25, TRAJ53)
CATSNSGGSNYKLTF

SEQ ID NO: 193000 - protein, 14 aa, Homo sapiens
  CDR3 for beta chain variable domain of TCR clone 96500 (TRBV11-2, TRBJ2-3)
CASSRLARTDTQYF

SEQ ID NO: 193001 - protein, 17 aa, Homo sapiens
  CDR3 for alpha chain variable domain of TCR clone 96501 (TRAV13-1, TRAJ28)
CAASPPYSGAGSYQLTF

SEQ ID NO: 193002 - protein, 12 aa, Homo sapiens
  CDR3 for beta chain variable domain of TCR clone 96501 (TRBV11-2, TRBJ2-2)
CAISLPTGELFF

SEQ ID NO: 193003 - protein, 14 aa, Homo sapiens
  CDR3 for alpha chain variable domain of TCR clone 96502 (TRAV21, TRAJ15)
CAVSLNQAGTALIF

SEQ ID NO: 193004 - protein, 11 aa, Homo sapiens
  CDR3 for beta chain variable domain of TCR clone 96502 (TRBV20-1, TRBJ2-7)
CSARTSYEQYL

SEQ ID NO: 193005 - protein, 12 aa, Homo sapiens
  CDR3 for alpha chain variable domain of TCR clone 96503 (TRAV12-3, TRAJ17)
CAMTLTGNKLTF

SEQ ID NO: 193006 - protein, 15 aa, Homo sapiens
  CDR3 for beta chain variable domain of TCR clone 96503 (TRBV6-1, TRBJ2-4)
CASSEAVWTINIQYF

SEQ ID NO: 193007 - protein, 11 aa, Homo sapiens
  CDR3 for alpha chain variable domain of TCR clone 96504 (TRAV13-1, TRAJ39)
CASHAGNMLTF

SEQ ID NO: 193008 - protein, 14 aa, Homo sapiens
  CDR3 for beta chain variable domain of TCR clone 96504 (TRBV4-2, TRBJ1-5)
CASSQDSINQPQHF

SEQ ID NO: 193009 - protein, 15 aa, Homo sapiens
  CDR3 for alpha chain variable domain of TCR clone 96505 (TRAV26-1, TRAJ29)
CIVRVEGSGNTPLVF

SEQ ID NO: 193010 - protein, 14 aa, Homo sapiens
  CDR3 for beta chain variable domain of TCR clone 96505 (TRBV18, TRBJ2-5)
CASSPGVSQETQNF

SEQ ID NO: 193011 - protein, 13 aa, Homo sapiens
  CDR3 for alpha chain variable domain of TCR clone 96506 (TRAV21, TRAJ57)
CAVNQGGSEKLVF

SEQ ID NO: 193012 - protein, 11 aa, Homo sapiens
  CDR3 for beta chain variable domain of TCR clone 96506 (TRBV11-2, TRBJ2-2)
CASSLPGELFF

SEQ ID NO: 193013 - protein, 13 aa, Homo sapiens
  CDR3 for alpha chain variable domain of TCR clone 96507 (TRAV21, TRAJ57)
CAVTQGGSGKLVF

SEQ ID NO: 193014 - protein, 14 aa, Homo sapiens
  CDR3 for beta chain variable domain of TCR clone 96507 (TRBV12-4, TRBJ2-2)
CASSFWERDGELFF

SEQ ID NO: 193015 - protein, 15 aa, Homo sapiens
  CDR3 for alpha chain variable domain of TCR clone 96508 (TRAV26-1, TRAJ42)
CIVRVAEGSQGNLIF

SEQ ID NO: 193016 - protein, 14 aa, Homo sapiens
  CDR3 for beta chain variable domain of TCR clone 96508 (TRBV7-3, TRBJ2-1)
CASSLAGGTNEQFF

SEQ ID NO: 193017 - protein, 16 aa, Homo sapiens
  CDR3 for alpha chain variable domain of TCR clone 96509 (TRAV35, TRAJ28)
CAGQKYSGAGSYQLTF

SEQ ID NO: 193018 - protein, 13 aa, Homo sapiens
  CDR3 for beta chain variable domain of TCR clone 96509 (TRBV19, TRBJ1-2)
CASSQGHVYGYTF

SEQ ID NO: 193019 - protein, 16 aa, Homo sapiens
  CDR3 for alpha chain variable domain of TCR clone 96510 (TRAV20, TRAJ17)
CAVQARWESCRQQANF

SEQ ID NO: 193020 - protein, 16 aa, Homo sapiens
  CDR3 for beta chain variable domain of TCR clone 96510 (TRBV7-3, TRBJ2-2)
CASSLKRGTLSGELFF

SEQ ID NO: 193021 - protein, 15 aa, Homo sapiens
  CDR3 for alpha chain variable domain of TCR clone 96511 (TRAV3, TRAJ20)
CAVRDSRSTDYKLSF

SEQ ID NO: 193022 - protein, 14 aa, Homo sapiens
  CDR3 for beta chain variable domain of TCR clone 96511 (TRBV20-1, TRBJ2-7)
CSARRGNGIYEQYF

SEQ ID NO: 193023 - protein, 14 aa, Homo sapiens
  CDR3 for alpha chain variable domain of TCR clone 96512 (TRAV22, TRAJ6)
FAGVGPGGSYIPTF

SEQ ID NO: 193024 - protein, 14 aa, Homo sapiens
  CDR3 for beta chain variable domain of TCR clone 96512 (TRBV9, TRBJ2-7)
CASSVGVGSYEQYF

SEQ ID NO: 193025 - protein, 10 aa, Homo sapiens
  CDR3 for alpha chain variable domain of TCR clone 96513 (TRAV1-2, TRAJ20)
CALSDYKLSF

SEQ ID NO: 193026 - protein, 16 aa, Homo sapiens
  CDR3 for beta chain variable domain of TCR clone 96513 (TRBV20-1, TRBJ1-1)
CSARALTQGMNTEAFF

SEQ ID NO: 193027 - protein, 15 aa, Homo sapiens
  CDR3 for alpha chain variable domain of TCR clone 96514 (TRAV35, TRAJ58)
CAGRRQETSGSRLTC

SEQ ID NO: 193028 - protein, 11 aa, Homo sapiens
  CDR3 for beta chain variable domain of TCR clone 96514 (TRBV11-2, TRBJ1-1)
CASSINTEAFF

SEQ ID NO: 193029 - protein, 14 aa, Homo sapiens
  CDR3 for alpha chain variable domain of TCR clone 96515 (TRAV26-1, TRAJ44)
CISPLPGTASKLTF

SEQ ID NO: 193030 - protein, 16 aa, Homo sapiens
  CDR3 for beta chain variable domain of TCR clone 96515 (TRBV19, TRBJ2-1)
WASSKAGPSSYNEQFF

SEQ ID NO: 193031 - protein, 13 aa, Homo sapiens
  CDR3 for alpha chain variable domain of TCR clone 96516 (TRAV2, TRAJ9)
CAVESTGGFKTIF

SEQ ID NO: 193032 - protein, 15 aa, Homo sapiens
  CDR3 for beta chain variable domain of TCR clone 96516 (TRBV10-3, TRBJ2-1)
CASTFGGGTDNEQFF

SEQ ID NO: 193033 - protein, 14 aa, Homo sapiens
  CDR3 for alpha chain variable domain of TCR clone 96517 (TRAV1-2, TRAJ16)
CAVNRFSDGQKLLF

SEQ ID NO: 193034 - protein, 15 aa, Homo sapiens
  CDR3 for beta chain variable domain of TCR clone 96517 (TRBV2, TRBJ2-1)
CATLPSGLPYNEQFF

SEQ ID NO: 193035 - protein, 15 aa, Homo sapiens
  CDR3 for alpha chain variable domain of TCR clone 96518 (TRAV17, TRAJ57)
CATGPSQGGSEKLVF

SEQ ID NO: 193036 - protein, 15 aa, Homo sapiens
  CDR3 for beta chain variable domain of TCR clone 96518 (TRBV11-3, TRBJ2-3)
CASLKDGREGDTQYF

SEQ ID NO: 193037 - protein, 11 aa, Homo sapiens
  CDR3 for alpha chain variable domain of TCR clone 96519 (TRAV17, TRAJ31)
CATDRTARLMF

SEQ ID NO: 193038 - protein, 15 aa, Homo sapiens
  CDR3 for beta chain variable domain of TCR clone 96519 (TRBV7-2, TRBJ2-2)
CASSTRTGYTGELFF

SEQ ID NO: 193039 - protein, 13 aa, Homo sapiens
  CDR3 for alpha chain variable domain of TCR clone 96520 (TRAV35, TRAJ42)
CSGFPGSQGNLIF

SEQ ID NO: 193040 - protein, 13 aa, Homo sapiens
  CDR3 for beta chain variable domain of TCR clone 96520 (TRBV29-1, TRBJ2-1)
CSVEGGRVNEQFF

SEQ ID NO: 193041 - protein, 23 aa, Homo sapiens
  CDR3 for alpha chain variable domain of TCR clone 96521 (TRAV26-2, TRAJ39)
GRCCCVLLHPESAFYNAGNMLTF

SEQ ID NO: 193042 - protein, 14 aa, Homo sapiens
  CDR3 for beta chain variable domain of TCR clone 96521 (TRBV12-4, TRBJ1-4)
CASRMTGRSEKLFF

SEQ ID NO: 193043 - protein, 11 aa, Homo sapiens
  CDR3 for alpha chain variable domain of TCR clone 96522 (TRAV13-1, TRAJ30)
CAASRDDKIII

SEQ ID NO: 193044 - protein, 15 aa, Homo sapiens
  CDR3 for beta chain variable domain of TCR clone 96522 (TRBV18, TRBJ1-1)
CASSPSSWVNTEAFF

SEQ ID NO: 193045 - protein, 12 aa, Homo sapiens
  CDR3 for alpha chain variable domain of TCR clone 96523 (TRAV12-2, TRAJ10)
WGVTGGGNKLTF

SEQ ID NO: 193046 - protein, 14 aa, Homo sapiens
  CDR3 for beta chain variable domain of TCR clone 96523 (TRBV7-3, TRBJ2-1)
CASSLAGGTNEQFF

SEQ ID NO: 193047 - protein, 18 aa, Homo sapiens
  CDR3 for alpha chain variable domain of TCR clone 96524 (TRAV13-1, TRAJ52)
CAAKNPNAGGTSYGKLTF

SEQ ID NO: 193048 - protein, 14 aa, Homo sapiens
  CDR3 for beta chain variable domain of TCR clone 96524 (TRBV7-3, TRBJ2-1)
CASSLAGGTSEQFF

SEQ ID NO: 193049 - protein, 17 aa, Homo sapiens
  CDR3 for alpha chain variable domain of TCR clone 96525 (TRAV8-1, TRAJ43)
CAVTNDMRFGAGNRLTV

SEQ ID NO: 193050 - protein, 17 aa, Homo sapiens
  CDR3 for beta chain variable domain of TCR clone 96525 (TRBV5-4, TRBJ2-1)
CASSSAGGRGPYNEQFF

SEQ ID NO: 193051 - protein, 16 aa, Homo sapiens
  CDR3 for alpha chain variable domain of TCR clone 96526 (TRAV8-3, TRAJ10)
CAVGPILTGGGNKLTF

SEQ ID NO: 193052 - protein, 13 aa, Homo sapiens
  CDR3 for beta chain variable domain of TCR clone 96526 (TRBV7-9, TRBJ1-2)
CASSLKQNYGYTF

SEQ ID NO: 193053 - protein, 15 aa, Homo sapiens
  CDR3 for alpha chain variable domain of TCR clone 96527 (TRAV26-1, TRAJ22)
CIVRVSFWFCKATDL

SEQ ID NO: 193054 - protein, 15 aa, Homo sapiens
  CDR3 for beta chain variable domain of TCR clone 96527 (TRBV20-1, TRBJ2-7)
CSARDRVSGMDEQYL

SEQ ID NO: 193055 - protein, 14 aa, Homo sapiens
  CDR3 for alpha chain variable domain of TCR clone 96528 (TRAV16, TRAJ17)
CVLSGRAAGNKLTF

SEQ ID NO: 193056 - protein, 15 aa, Homo sapiens
  CDR3 for beta chain variable domain of TCR clone 96528 (TRBV3-1, TRBJ1-2)
CASSPTRLPEGGYTF

SEQ ID NO: 193057 - protein, 16 aa, Homo sapiens
  CDR3 for alpha chain variable domain of TCR clone 96529 (TRAV8-3, TRAJ28)
CAVGATLGLGVTNSLS

SEQ ID NO: 193058 - protein, 12 aa, Homo sapiens
  CDR3 for beta chain variable domain of TCR clone 96529 (TRBV7-2, TRBJ2-7)
CASSLGDREQYF

SEQ ID NO: 193059 - protein, 13 aa, Homo sapiens
  CDR3 for alpha chain variable domain of TCR clone 96530 (TRAV12-2, TRAJ50)
CAVVVTSYDKVIF

SEQ ID NO: 193060 - protein, 14 aa, Homo sapiens
  CDR3 for beta chain variable domain of TCR clone 96530 (TRBV9, TRBJ2-1)
CASSVDPRGKEQFF

SEQ ID NO: 193061 - protein, 16 aa, Homo sapiens
  CDR3 for alpha chain variable domain of TCR clone 96531 (TRAV12-2, TRAJ32)
CAVNMNYGGATNKLIV

SEQ ID NO: 193062 - protein, 16 aa, Homo sapiens
  CDR3 for beta chain variable domain of TCR clone 96531 (TRBV7-8, TRBJ2-3)
CASSTEGQRETDTQYF

SEQ ID NO: 193063 - protein, 14 aa, Homo sapiens
  CDR3 for alpha chain variable domain of TCR clone 96532 (TRAV1-2, TRAJ16)
CAVNRFSGGQKLLF

SEQ ID NO: 193064 - protein, 14 aa, Homo sapiens
  CDR3 for beta chain variable domain of TCR clone 96532 (TRBV19, TRBJ2-2)
CASSTLHRSGELFF

SEQ ID NO: 193065 - protein, 12 aa, Homo sapiens
  CDR3 for alpha chain variable domain of TCR clone 96533 (TRAV12-3, TRAJ40)
CAMSSGTYKYIF

SEQ ID NO: 193066 - protein, 20 aa, Homo sapiens
  CDR3 for beta chain variable domain of TCR clone 96533 (TRBV7-8, TRBJ2-2)
CASSHLFPGPTIHITGELFL

SEQ ID NO: 193067 - protein, 14 aa, Homo sapiens
  CDR3 for alpha chain variable domain of TCR clone 96534 (TRAV12-1, TRAJ3)
CVVNPGSSDSKIIF

SEQ ID NO: 193068 - protein, 14 aa, Homo sapiens
  CDR3 for beta chain variable domain of TCR clone 96534 (TRBV20-1, TRBJ2-3)
CSARGGTSTDTQYF

SEQ ID NO: 193069 - protein, 14 aa, Homo sapiens
  CDR3 for alpha chain variable domain of TCR clone 96535 (TRAV26-1, TRAJ38)
CIADNAGNNRKLIW

SEQ ID NO: 193070 - protein, 15 aa, Homo sapiens
  CDR3 for beta chain variable domain of TCR clone 96535 (TRBV9, TRBJ2-1)
CASSLAGSSYNEQLF

SEQ ID NO: 193071 - protein, 15 aa, Homo sapiens
  CDR3 for alpha chain variable domain of TCR clone 96536 (TRAV20, TRAJ43)
CAVQARKSSNNDMRF

SEQ ID NO: 193072 - protein, 14 aa, Homo sapiens
  CDR3 for beta chain variable domain of TCR clone 96536 (TRBV27, TRBJ2-1)
CASRHLGGGKEQFF

SEQ ID NO: 193073 - protein, 11 aa, Homo sapiens
  CDR3 for alpha chain variable domain of TCR clone 96537 (TRAV35, TRAJ30)
CAGPGDDKIIF

SEQ ID NO: 193074 - protein, 13 aa, Homo sapiens
  CDR3 for beta chain variable domain of TCR clone 96537 (TRBV4-2, TRBJ1-1)
CASSQAGNTEAFF

SEQ ID NO: 193075 - protein, 13 aa, Homo sapiens
  CDR3 for alpha chain variable domain of TCR clone 96538 (TRAV35, TRAJ42)
CAGFPGSQGNLIF

SEQ ID NO: 193076 - protein, 13 aa, Homo sapiens
  CDR3 for beta chain variable domain of TCR clone 96538 (TRBV2, TRBJ1-4)
CASNRGTNEKLFF

SEQ ID NO: 193077 - protein, 14 aa, Homo sapiens
  CDR3 for alpha chain variable domain of TCR clone 96539 (TRAV3, TRAJ34)
CAVSAPGNTDKLIF

SEQ ID NO: 193078 - protein, 17 aa, Homo sapiens
  CDR3 for beta chain variable domain of TCR clone 96539 (TRBV20-1, TRBJ2-7)
CSAAPGLARGISYEQYF

SEQ ID NO: 193079 - protein, 16 aa, Homo sapiens
  CDR3 for alpha chain variable domain of TCR clone 96540 (TRAV30, TRAJ24)
CGTDIVDADSWGKFQF

SEQ ID NO: 193080 - protein, 15 aa, Homo sapiens
  CDR3 for beta chain variable domain of TCR clone 96540 (TRBV20-1, TRBJ2-7)
CSARDRVSGMDEQYF

SEQ ID NO: 193081 - protein, 11 aa, Homo sapiens
  CDR3 for alpha chain variable domain of TCR clone 96541 (TRAV3, TRAJ21)
CAVGNFNKFYF

SEQ ID NO: 193082 - protein, 14 aa, Homo sapiens
  CDR3 for beta chain variable domain of TCR clone 96541 (TRBV19, TRBJ1-2)
CASSVLGYNYGYTF

SEQ ID NO: 193083 - protein, 15 aa, Homo sapiens
  CDR3 for alpha chain variable domain of TCR clone 96542 (TRAV3, TRAJ3)
CAVRDGHSSASKIIF

SEQ ID NO: 193084 - protein, 14 aa, Homo sapiens
  CDR3 for beta chain variable domain of TCR clone 96542 (TRBV28, TRBJ1-4)
CASSSGTFDEKLFF

SEQ ID NO: 193085 - protein, 13 aa, Homo sapiens
  CDR3 for alpha chain variable domain of TCR clone 96543 (TRAV2, TRAJ40)
CAVVTSGTYRYIF

SEQ ID NO: 193086 - protein, 12 aa, Homo sapiens
  CDR3 for beta chain variable domain of TCR clone 96543 (TRBV11-2, TRBJ2-2)
CASSLGGGELFF

SEQ ID NO: 193087 - protein, 17 aa, Homo sapiens
  CDR3 for alpha chain variable domain of TCR clone 96544 (TRAV26-2, TRAJ42)
CILRDAGYGGSQGNLIF

SEQ ID NO: 193088 - protein, 16 aa, Homo sapiens
  CDR3 for beta chain variable domain of TCR clone 96544 (TRBV12-4, TRBJ2-7)
CASSLIGGTGTYGQYF

SEQ ID NO: 193089 - protein, 15 aa, Homo sapiens
  CDR3 for alpha chain variable domain of TCR clone 96545 (TRAV35, TRAJ50)
CAGQLRRTSYDKVIF

SEQ ID NO: 193090 - protein, 12 aa, Homo sapiens
  CDR3 for beta chain variable domain of TCR clone 96545 (TRBV5-1, TRBJ2-5)
CASSLGLETQYF

SEQ ID NO: 193091 - protein, 12 aa, Homo sapiens
  CDR3 for alpha chain variable domain of TCR clone 96546 (TRAV30, TRAJ39)
CGRGNAGNMLTF

SEQ ID NO: 193092 - protein, 16 aa, Homo sapiens
  CDR3 for beta chain variable domain of TCR clone 96546 (TRBV4-2, TRBJ2-2)
CAGSQDPSGREGELFF

SEQ ID NO: 193093 - protein, 12 aa, Homo sapiens
  CDR3 for alpha chain variable domain of TCR clone 96547 (TRAV29/DV5, TRAJ34)
CAASGNTAKLIF

SEQ ID NO: 193094 - protein, 16 aa, Homo sapiens
  CDR3 for beta chain variable domain of TCR clone 96547 (TRBV12-4, TRBJ1-5)
CASRQPVEGSNQPQHF

SEQ ID NO: 193095 - protein, 14 aa, Homo sapiens
  CDR3 for alpha chain variable domain of TCR clone 96548 (TRAV9-2, TRAJ39)
CALYIYNAGNILTF

SEQ ID NO: 193096 - protein, 15 aa, Homo sapiens
  CDR3 for beta chain variable domain of TCR clone 96548 (TRBV28, TRBJ1-3)
CASSMGWASGNTIYF

SEQ ID NO: 193097 - protein, 12 aa, Homo sapiens
  CDR3 for alpha chain variable domain of TCR clone 96549 (TRAV2, TRAJ31)
CAVEDNNARFMF

SEQ ID NO: 193098 - protein, 16 aa, Homo sapiens
  CDR3 for beta chain variable domain of TCR clone 96549 (TRBV10-3, TRBJ2-1)
CAISGVGDGGGGEQFF

SEQ ID NO: 193099 - protein, 11 aa, Homo sapiens
  CDR3 for alpha chain variable domain of TCR clone 96550 (TRAV23/DV6, TRAJ48)
CAPRWGEKLTF

SEQ ID NO: 193100 - protein, 13 aa, Homo sapiens
  CDR3 for beta chain variable domain of TCR clone 96550 (TRBV12-4, TRBJ2-5)
CASSPGTEETQYV

SEQ ID NO: 193101 - protein, 16 aa, Homo sapiens
  CDR3 for alpha chain variable domain of TCR clone 96551 (TRAV21, TRAJ37)
CAVRTAGPSDTGKLIF

SEQ ID NO: 193102 - protein, 13 aa, Homo sapiens
  CDR3 for beta chain variable domain of TCR clone 96551 (TRBV7-9, TRBJ2-5)
CASLPSGRETQYF

SEQ ID NO: 193103 - protein, 12 aa, Homo sapiens
  CDR3 for alpha chain variable domain of TCR clone 96552 (TRAV23/DV6, TRAJ30)
CAASKGDDKIIL

SEQ ID NO: 193104 - protein, 15 aa, Homo sapiens
  CDR3 for beta chain variable domain of TCR clone 96552 (TRBV12-4, TRBJ2-1)
CASRPTRTGYNEQFF

SEQ ID NO: 193105 - protein, 16 aa, Homo sapiens
  CDR3 for alpha chain variable domain of TCR clone 96553 (TRAV12-3, TRAJ53)
CAMSPGSGGSNYKLTF

SEQ ID NO: 193106 - protein, 16 aa, Homo sapiens
  CDR3 for beta chain variable domain of TCR clone 96553 (TRBV2, TRBJ1-1)
CASSPPNRGMNTEAFF

SEQ ID NO: 193107 - protein, 13 aa, Homo sapiens
  CDR3 for alpha chain variable domain of TCR clone 96554 (TRAV20, TRAJ37)
CAGYSSNTGKLIF

SEQ ID NO: 193108 - protein, 15 aa, Homo sapiens
  CDR3 for beta chain variable domain of TCR clone 96554 (TRBV7-2, TRBJ2-1)
CASSFQADEYNEQFF

SEQ ID NO: 193109 - protein, 15 aa, Homo sapiens
  CDR3 for alpha chain variable domain of TCR clone 96555 (TRAV14/DV4, TRAJ26)
CAMREGQNYGQNFVF

SEQ ID NO: 193110 - protein, 13 aa, Homo sapiens
  CDR3 for beta chain variable domain of TCR clone 96555 (TRBV6-5, TRBJ1-5)
CASRDGSKQPQHF

SEQ ID NO: 193111 - protein, 12 aa, Homo sapiens
  CDR3 for alpha chain variable domain of TCR clone 96556 (TRAV17, TRAJ12)
CATLRSSYKLIF

SEQ ID NO: 193112 - protein, 16 aa, Homo sapiens
  CDR3 for beta chain variable domain of TCR clone 96556 (TRBV28, TRBJ2-7)
CASSLFFETGDPEQYF

SEQ ID NO: 193113 - protein, 14 aa, Homo sapiens
  CDR3 for alpha chain variable domain of TCR clone 96557 (TRAV14/DV4, TRAJ15)
CAMRRDQAGNALIF

SEQ ID NO: 193114 - protein, 11 aa, Homo sapiens
  CDR3 for beta chain variable domain of TCR clone 96557 (TRBV7-2, TRBJ2-7)
CASSSGLWQYF

SEQ ID NO: 193115 - protein, 14 aa, Homo sapiens
  CDR3 for alpha chain variable domain of TCR clone 96558 (TRAV23/DV6, TRAJ17)
CAARGRAAGNKITF

SEQ ID NO: 193116 - protein, 12 aa, Homo sapiens
  CDR3 for beta chain variable domain of TCR clone 96558 (TRBV7-9, TRBJ2-3)
CASSFITDTQYF

SEQ ID NO: 193117 - protein, 16 aa, Homo sapiens
  CDR3 for alpha chain variable domain of TCR clone 96559 (TRAV12-3, TRAJ53)
CAMSPGSGGSNYKLTF

SEQ ID NO: 193118 - protein, 15 aa, Homo sapiens
  CDR3 for beta chain variable domain of TCR clone 96559 (TRBV7-3, TRBJ2-1)
CASSLSSGSFDEQFF

SEQ ID NO: 193119 - protein, 17 aa, Homo sapiens
  CDR3 for alpha chain variable domain of TCR clone 96560 (TRAV4, TRAJ18)
CLVGERSVGSTLGRLYF

SEQ ID NO: 193120 - protein, 17 aa, Homo sapiens
  CDR3 for beta chain variable domain of TCR clone 96560 (TRBV28, TRBJ2-3)
CASSFGLYVGGADTQYF

SEQ ID NO: 193121 - protein, 14 aa, Homo sapiens
  CDR3 for alpha chain variable domain of TCR clone 96561 (TRAV1-2, TRAJ8)
FAVREDTGFQKLVF

SEQ ID NO: 193122 - protein, 12 aa, Homo sapiens
  CDR3 for beta chain variable domain of TCR clone 96561 (TRBV11-2, TRBJ2-2)
CASSLGGGELFF

SEQ ID NO: 193123 - protein, 15 aa, Homo sapiens
  CDR3 for alpha chain variable domain of TCR clone 96562 (TRAV12-2, TRAJ43)
CAFDMRFGAGTRLTV

SEQ ID NO: 193124 - protein, 14 aa, Homo sapiens
  CDR3 for beta chain variable domain of TCR clone 96562 (TRBV4-3, TRBJ2-7)
CASSQDVAGGEQYF

SEQ ID NO: 193125 - protein, 15 aa, Homo sapiens
  CDR3 for alpha chain variable domain of TCR clone 96563 (TRAV26-1, TRAJ16)
CIVSFRFSDGQKLLF

SEQ ID NO: 193126 - protein, 16 aa, Homo sapiens
  CDR3 for beta chain variable domain of TCR clone 96563 (TRBV12-4, TRBJ2-7)
CASSLIGGTGTYEQYF

SEQ ID NO: 193127 - protein, 15 aa, Homo sapiens
  CDR3 for alpha chain variable domain of TCR clone 96564 (TRAV13-1, TRAJ5)
CAASKADTGRRARTF

SEQ ID NO: 193128 - protein, 16 aa, Homo sapiens
  CDR3 for beta chain variable domain of TCR clone 96564 (TRBV7-2, TRBJ2-1)
CASSLGRTSGDNEQFF

SEQ ID NO: 193129 - protein, 11 aa, Homo sapiens
  CDR3 for alpha chain variable domain of TCR clone 96565 (TRAV12-1, TRAJ34)
CVVTKGRELIF

SEQ ID NO: 193130 - protein, 12 aa, Homo sapiens
  CDR3 for beta chain variable domain of TCR clone 96565 (TRBV2, TRBJ2-1)
CAYGPPGNEQFF

SEQ ID NO: 193131 - protein, 13 aa, Homo sapiens
  CDR3 for alpha chain variable domain of TCR clone 96566 (TRAV1-2, TRAJ9)
CAALNTGGFKTIF

SEQ ID NO: 193132 - protein, 13 aa, Homo sapiens
  CDR3 for beta chain variable domain of TCR clone 96566 (TRBV11-2, TRBJ2-5)
CASSSTGEETQYF

SEQ ID NO: 193133 - protein, 14 aa, Homo sapiens
  CDR3 for alpha chain variable domain of TCR clone 96567 (TRAV20, TRAJ56)
CAVQFGGANSKLTF

SEQ ID NO: 193134 - protein, 14 aa, Homo sapiens
  CDR3 for beta chain variable domain of TCR clone 96567 (TRBV7-2, TRBJ1-1)
CASSFLTGMTEAFF

SEQ ID NO: 193135 - protein, 17 aa, Homo sapiens
  CDR3 for alpha chain variable domain of TCR clone 96568 (TRAV38-2/DV8, TRAJ28)
CAFLTLYSGAGSYPLTF

SEQ ID NO: 193136 - protein, 14 aa, Homo sapiens
  CDR3 for beta chain variable domain of TCR clone 96568 (TRBV7-2, TRBJ2-5)
CASSLSGGGETQYF

SEQ ID NO: 193137 - protein, 16 aa, Homo sapiens
  CDR3 for alpha chain variable domain of TCR clone 96569 (TRAV12-3, TRAJ45)
CAMGWGSGGGADGLTF

SEQ ID NO: 193138 - protein, 15 aa, Homo sapiens
  CDR3 for beta chain variable domain of TCR clone 96569 (TRBV2, TRBJ2-2)
CASSRETVGTGELFF

SEQ ID NO: 193139 - protein, 14 aa, Homo sapiens
  CDR3 for alpha chain variable domain of TCR clone 96570 (TRAV35, TRAJ46)
CAGPQKSSGDKLTF

SEQ ID NO: 193140 - protein, 15 aa, Homo sapiens
  CDR3 for beta chain variable domain of TCR clone 96570 (TRBV12-4, TRBJ1-1)
CASSWSQTGNTEAFF

SEQ ID NO: 193141 - protein, 17 aa, Homo sapiens
  CDR3 for alpha chain variable domain of TCR clone 96571 (TRAV3, TRAJ6)
CAVRDGPRAGGSYIPTF

SEQ ID NO: 193142 - protein, 14 aa, Homo sapiens
  CDR3 for beta chain variable domain of TCR clone 96571 (TRBV6-6, TRBJ2-7)
CASSDSGAGYEQYF

SEQ ID NO: 193143 - protein, 21 aa, Homo sapiens
  CDR3 for alpha chain variable domain of TCR clone 96572 (TRAV1-1, TRAJ6)
CLLLLRCERLERTGGSYIPTF

SEQ ID NO: 193144 - protein, 14 aa, Homo sapiens
  CDR3 for beta chain variable domain of TCR clone 96572 (TRBV7-2, TRBJ2-5)
CASSLSGGGETPYF

SEQ ID NO: 193145 - protein, 13 aa, Homo sapiens
  CDR3 for alpha chain variable domain of TCR clone 96573 (TRAV8-6, TRAJ16)
CAVSRWVGQKLLF

SEQ ID NO: 193146 - protein, 15 aa, Homo sapiens
  CDR3 for beta chain variable domain of TCR clone 96573 (TRBV12-4, TRBJ2-1)
CASSLSTGVSNKQFF

SEQ ID NO: 193147 - protein, 14 aa, Homo sapiens
  CDR3 for alpha chain variable domain of TCR clone 96574 (TRAV35, TRAJ22)
CAGLRPGSARQLTF

SEQ ID NO: 193148 - protein, 15 aa, Homo sapiens
  CDR3 for beta chain variable domain of TCR clone 96574 (TRBV12-4, TRBJ2-5)
CASSPPTGLQETPYF

SEQ ID NO: 193149 - protein, 14 aa, Homo sapiens
  CDR3 for alpha chain variable domain of TCR clone 96575 (TRAV4, TRAJ30)
CLVGDMNRDDKIIF

SEQ ID NO: 193150 - protein, 16 aa, Homo sapiens
  CDR3 for beta chain variable domain of TCR clone 96575 (TRBV20-1, TRBJ1-4)
CSAPGQGLLTNEKMFF

SEQ ID NO: 193151 - protein, 16 aa, Homo sapiens
  CDR3 for alpha chain variable domain of TCR clone 96576 (TRAV12-3, TRAJ53)
CAMSPGSGGSNYKLTF

SEQ ID NO: 193152 - protein, 15 aa, Homo sapiens
  CDR3 for beta chain variable domain of TCR clone 96576 (TRBV28, TRBJ1-4)
CASSVSGSGLEKLFF

SEQ ID NO: 193153 - protein, 15 aa, Homo sapiens
  CDR3 for alpha chain variable domain of TCR clone 96577 (TRAV23/DV6, TRAJ57)
CAASSTLSQGGSEKL

SEQ ID NO: 193154 - protein, 16 aa, Homo sapiens
  CDR3 for beta chain variable domain of TCR clone 96577 (TRBV12-4, TRBJ1-5)
CASSRPVGGSNQPQHF

SEQ ID NO: 193155 - protein, 17 aa, Homo sapiens
  CDR3 for alpha chain variable domain of TCR clone 96578 (TRAV3, TRAJ12)
CAVRDGGRMDSSYKLIF

SEQ ID NO: 193156 - protein, 16 aa, Homo sapiens
  CDR3 for beta chain variable domain of TCR clone 96578 (TRBV7-6, TRBJ2-7)
CASSGGTGALSYEQYF

SEQ ID NO: 193157 - protein, 15 aa, Homo sapiens
  CDR3 for alpha chain variable domain of TCR clone 96579 (TRAV20, TRAJ23)
CDVQAVRNQGGKLIF

SEQ ID NO: 193158 - protein, 16 aa, Homo sapiens
  CDR3 for beta chain variable domain of TCR clone 96579 (TRBV27, TRBJ2-7)
CASSKQGRGWAYEQYF

SEQ ID NO: 193159 - protein, 15 aa, Homo sapiens
  CDR3 for alpha chain variable domain of TCR clone 96580 (TRAV21, TRAJ24)
CAARSSTDSWGKLQS

SEQ ID NO: 193160 - protein, 15 aa, Homo sapiens
  CDR3 for beta chain variable domain of TCR clone 96580 (TRBV4-1, TRBJ2-7)
CASSQNTGRLYEQYF

SEQ ID NO: 193161 - protein, 14 aa, Homo sapiens
  CDR3 for alpha chain variable domain of TCR clone 96581 (TRAV1-2, TRAJ16)
CAVNRFSDGQKLLF

SEQ ID NO: 193162 - protein, 12 aa, Homo sapiens
  CDR3 for beta chain variable domain of TCR clone 96581 (TRBV18, TRBJ2-1)
CASSSDEDEQFF

SEQ ID NO: 193163 - protein, 17 aa, Homo sapiens
  CDR3 for alpha chain variable domain of TCR clone 96582 (TRAV13-1, TRAJ28)
CAASPPYSGAGSYHLTF

SEQ ID NO: 193164 - protein, 13 aa, Homo sapiens
  CDR3 for beta chain variable domain of TCR clone 96582 (TRBV12-5, TRBJ2-3)
CASGDRQSDTQYF

SEQ ID NO: 193165 - protein, 12 aa, Homo sapiens
  CDR3 for alpha chain variable domain of TCR clone 96583 (TRAV2, TRAJ9)
CAVGAGGFKTIF

SEQ ID NO: 193166 - protein, 14 aa, Homo sapiens
  CDR3 for beta chain variable domain of TCR clone 96583 (TRBV7-6, TRBJ2-7)
CASSFRQGADEQYF

SEQ ID NO: 193167 - protein, 13 aa, Homo sapiens
  CDR3 for alpha chain variable domain of TCR clone 96584 (TRAV8-6, TRAJ16)
CAVSPPDGQKLLF

SEQ ID NO: 193168 - protein, 16 aa, Homo sapiens
  CDR3 for beta chain variable domain of TCR clone 96584 (TRBV5-7, TRBJ2-3)
CASSSLGGAITDTQYF

SEQ ID NO: 193169 - protein, 11 aa, Homo sapiens
  CDR3 for alpha chain variable domain of TCR clone 96585 (TRAV1-2, TRAJ40)
CAVPGTYKYIF

SEQ ID NO: 193170 - protein, 13 aa, Homo sapiens
  CDR3 for beta chain variable domain of TCR clone 96585 (TRBV3-1, TRBJ1-1)
CASSPGVITEAFF

SEQ ID NO: 193171 - protein, 14 aa, Homo sapiens
  CDR3 for alpha chain variable domain of TCR clone 96586 (TRAV8-4, TRAJ3)
CAVIEYSSASKIIF

SEQ ID NO: 193172 - protein, 14 aa, Homo sapiens
  CDR3 for beta chain variable domain of TCR clone 96586 (TRBV27, TRBJ2-7)
CASATGTERREQYF

SEQ ID NO: 193173 - protein, 13 aa, Homo sapiens
  CDR3 for alpha chain variable domain of TCR clone 96587 (TRAV27, TRAJ42)
CAGARGSQGNLIF

SEQ ID NO: 193174 - protein, 15 aa, Homo sapiens
  CDR3 for beta chain variable domain of TCR clone 96587 (TRBV10-3, TRBJ2-2)
CAIRTDREDSGELFF

SEQ ID NO: 193175 - protein, 14 aa, Homo sapiens
  CDR3 for alpha chain variable domain of TCR clone 96588 (TRAV13-1, TRAJ44)
CAAKATGTASKLTF

SEQ ID NO: 193176 - protein, 14 aa, Homo sapiens
  CDR3 for beta chain variable domain of TCR clone 96588 (TRBV7-9, TRBJ2-2)
CASSLVQDTGELFF

SEQ ID NO: 193177 - protein, 14 aa, Homo sapiens
  CDR3 for alpha chain variable domain of TCR clone 96589 (TRAV30, TRAJ33)
CGTVAPRSNYQLIW

SEQ ID NO: 193178 - protein, 14 aa, Homo sapiens
  CDR3 for beta chain variable domain of TCR clone 96589 (TRBV19, TRBJ2-1)
CASPTVVLSGEQFF

SEQ ID NO: 193179 - protein, 19 aa, Homo sapiens
  CDR3 for alpha chain variable domain of TCR clone 96590 (TRAV29/DV5, TRAJ53)
CSVLLCSKPDRGSNYKLTF

SEQ ID NO: 193180 - protein, 15 aa, Homo sapiens
  CDR3 for beta chain variable domain of TCR clone 96590 (TRBV19, TRBJ2-4)
CAGSIGLAGANIQYF

SEQ ID NO: 193181 - protein, 13 aa, Homo sapiens
  CDR3 for alpha chain variable domain of TCR clone 96591 (TRAV12-2, TRAJ39)
CAVNNNACNMLTF

SEQ ID NO: 193182 - protein, 13 aa, Homo sapiens
  CDR3 for beta chain variable domain of TCR clone 96591 (TRBV2, TRBJ1-5)
CATAGPGNQPQHF

SEQ ID NO: 193183 - protein, 19 aa, Homo sapiens
  CDR3 for alpha chain variable domain of TCR clone 96592 (TRAV8-4, TRAJ38)
CARLNAGNNHIQNPDPAVY

SEQ ID NO: 193184 - protein, 14 aa, Homo sapiens
  CDR3 for beta chain variable domain of TCR clone 96592 (TRBV7-8, TRBJ2-3)
CASSLEAGTDTQYF

SEQ ID NO: 193185 - protein, 11 aa, Homo sapiens
  CDR3 for alpha chain variable domain of TCR clone 96593 (TRAV2, TRAJ33)
CAVDSIYQLIW

SEQ ID NO: 193186 - protein, 15 aa, Homo sapiens
  CDR3 for beta chain variable domain of TCR clone 96593 (TRBV19, TRBJ1-2)
CASSVGQVLNYGYTF

SEQ ID NO: 193187 - protein, 13 aa, Homo sapiens
  CDR3 for alpha chain variable domain of TCR clone 96594 (TRAV2, TRAJ15)
CAVASQAGTALIF

SEQ ID NO: 193188 - protein, 12 aa, Homo sapiens
  CDR3 for beta chain variable domain of TCR clone 96594 (TRBV12-4, TRBJ2-7)
CASSLGGYEQYF

SEQ ID NO: 193189 - protein, 10 aa, Homo sapiens
  CDR3 for alpha chain variable domain of TCR clone 96595 (TRAV36/DV7, TRAJ48)
CAVGNEKLTF

SEQ ID NO: 193190 - protein, 15 aa, Homo sapiens
  CDR3 for beta chain variable domain of TCR clone 96595 (TRBV11-2, TRBJ2-1)
CASSKNRGLIYEQFF

SEQ ID NO: 193191 - protein, 16 aa, Homo sapiens
  CDR3 for alpha chain variable domain of TCR clone 96596 (TRAV30, TRAJ24)
CGTEIVDADSWGKFQL

SEQ ID NO: 193192 - protein, 13 aa, Homo sapiens
  CDR3 for beta chain variable domain of TCR clone 96596 (TRBV10-3, TRBJ1-2)
CAISERDSYGYTF

SEQ ID NO: 193193 - protein, 13 aa, Homo sapiens
  CDR3 for alpha chain variable domain of TCR clone 96597 (TRAV12-3, TRAJ4)
CNEQAGGYNKLIF

SEQ ID NO: 193194 - protein, 15 aa, Homo sapiens
  CDR3 for beta chain variable domain of TCR clone 96597 (TRBV6-6, TRBJ2-7)
CASSYSYGGSYEQYF

SEQ ID NO: 193195 - protein, 15 aa, Homo sapiens
  CDR3 for alpha chain variable domain of TCR clone 96598 (TRAV26-1, TRAJ17)
CISQSCRQQANLWRR

SEQ ID NO: 193196 - protein, 16 aa, Homo sapiens
  CDR3 for beta chain variable domain of TCR clone 96598 (TRBV28, TRBJ1-4)
CASSSRTGAANEKLFF

SEQ ID NO: 193197 - protein, 12 aa, Homo sapiens
  CDR3 for alpha chain variable domain of TCR clone 96599 (TRAV12-3, TRAJ17)
CAMTLTGNKQTF

SEQ ID NO: 193198 - protein, 15 aa, Homo sapiens
  CDR3 for beta chain variable domain of TCR clone 96599 (TRBV20-1, TRBJ2-7)
CSARDRVSGMDEQCF

SEQ ID NO: 193199 - protein, 10 aa, Homo sapiens
  CDR3 for alpha chain variable domain of TCR clone 96600 (TRAV23/DV6, TRAJ57)
CAASSTLSQG

SEQ ID NO: 193200 - protein, 14 aa, Homo sapiens
  CDR3 for beta chain variable domain of TCR clone 96600 (TRBV25-1, TRBJ1-1)
CANTHLGGNTEAFF

SEQ ID NO: 193201 - protein, 18 aa, Homo sapiens
  CDR3 for alpha chain variable domain of TCR clone 96601 (TRAV12-3, TRAJ52)
CAMSRTNAGGTSYGKLTF

SEQ ID NO: 193202 - protein, 16 aa, Homo sapiens
  CDR3 for beta chain variable domain of TCR clone 96601 (TRBV7-3, TRBJ2-3)
CQQLNEKDAGADTQYF

SEQ ID NO: 193203 - protein, 15 aa, Homo sapiens
  CDR3 for alpha chain variable domain of TCR clone 96602 (TRAV10, TRAJ6)
CVVRPRTGGSYIPTF

SEQ ID NO: 193204 - protein, 14 aa, Homo sapiens
  CDR3 for beta chain variable domain of TCR clone 96602 (TRBV20-1, TRBJ2-4)
CSASGRVGENMQYF

SEQ ID NO: 193205 - protein, 13 aa, Homo sapiens
  CDR3 for alpha chain variable domain of TCR clone 96603 (TRAV8-3, TRAJ28)
CAVGSVGSYQLTF

SEQ ID NO: 193206 - protein, 14 aa, Homo sapiens
  CDR3 for beta chain variable domain of TCR clone 96603 (TRBV25-1, TRBJ1-1)
CASTHLGGNTEAFF

SEQ ID NO: 193207 - protein, 13 aa, Homo sapiens
  CDR3 for alpha chain variable domain of TCR clone 96604 (TRAV30, TRAJ49)
CGTESQPVTSSIL

SEQ ID NO: 193208 - protein, 18 aa, Homo sapiens
  CDR3 for beta chain variable domain of TCR clone 96604 (TRBV12-4, TRBJ2-2)
CASSLVAGTRGRTGELFF

SEQ ID NO: 193209 - protein, 11 aa, Homo sapiens
  CDR3 for alpha chain variable domain of TCR clone 96605 (TRAV13-2, TRAJ31)
CAENMDARLLF

SEQ ID NO: 193210 - protein, 15 aa, Homo sapiens
  CDR3 for beta chain variable domain of TCR clone 96605 (TRBV7-8, TRBJ1-2)
CASSLVRDGGLGYTF

SEQ ID NO: 193211 - protein, 18 aa, Homo sapiens
  CDR3 for alpha chain variable domain of TCR clone 96606 (TRAV12-3, TRAJ52)
CAMSRTNAGGTSYGKLTF

SEQ ID NO: 193212 - protein, 17 aa, Homo sapiens
  CDR3 for beta chain variable domain of TCR clone 96606 (TRBV20-1, TRBJ2-1)
CSASSSGLAGSYNEQFF

SEQ ID NO: 193213 - protein, 14 aa, Homo sapiens
  CDR3 for alpha chain variable domain of TCR clone 96607 (TRAV12-3, TRAJ58)
RAMSTETSGSRLTF

SEQ ID NO: 193214 - protein, 13 aa, Homo sapiens
  CDR3 for beta chain variable domain of TCR clone 96607 (TRBV27, TRBJ2-3)
CASSWGCTDTQYF

SEQ ID NO: 193215 - protein, 12 aa, Homo sapiens
  CDR3 for alpha chain variable domain of TCR clone 96608 (TRAV13-1, TRAJ15)
CAASQAGTALIF

SEQ ID NO: 193216 - protein, 18 aa, Homo sapiens
  CDR3 for beta chain variable domain of TCR clone 96608 (TRBV7-9, TRBJ2-3)
CSSSLPINGQISTDTQYF

SEQ ID NO: 193217 - protein, 12 aa, Homo sapiens
  CDR3 for alpha chain variable domain of TCR clone 96609 (TRAV29/DV5, TRAJ15)
CASNPAGTALIF

SEQ ID NO: 193218 - protein, 15 aa, Homo sapiens
  CDR3 for beta chain variable domain of TCR clone 96609 (TRBV11-2, TRBJ2-2)
CASSSDRVNAGELFF

SEQ ID NO: 193219 - protein, 15 aa, Homo sapiens
  CDR3 for alpha chain variable domain of TCR clone 96610 (TRAV3, TRAJ5)
RAVRDLDTGRRALTF

SEQ ID NO: 193220 - protein, 13 aa, Homo sapiens
  CDR3 for beta chain variable domain of TCR clone 96610 (TRBV12-4, TRBJ2-7)
CASSPAETYEQYF

SEQ ID NO: 193221 - protein, 14 aa, Homo sapiens
  CDR3 for alpha chain variable domain of TCR clone 96611 (TRAV12-1, TRAJ3)
CGAARYSSASKIIF

SEQ ID NO: 193222 - protein, 15 aa, Homo sapiens
  CDR3 for beta chain variable domain of TCR clone 96611 (TRBV7-2, TRBJ2-6)
CASGREGSGANVLTF

SEQ ID NO: 193223 - protein, 11 aa, Homo sapiens
  CDR3 for alpha chain variable domain of TCR clone 96612 (TRAV30, TRAJ43)
CGTDGNNDMRF

SEQ ID NO: 193224 - protein, 15 aa, Homo sapiens
  CDR3 for beta chain variable domain of TCR clone 96612 (TRBV12-4, TRBJ1-2)
CASRLGVAGNYGYTF

SEQ ID NO: 193225 - protein, 14 aa, Homo sapiens
  CDR3 for alpha chain variable domain of TCR clone 96613 (TRAV8-1, TRAJ5)
CAVSMDTGRRALTF

SEQ ID NO: 193226 - protein, 13 aa, Homo sapiens
  CDR3 for beta chain variable domain of TCR clone 96613 (TRBV20-1, TRBJ1-1)
CSARGGGNTEAFF

SEQ ID NO: 193227 - protein, 18 aa, Homo sapiens
  CDR3 for alpha chain variable domain of TCR clone 96614 (TRAV13-1, TRAJ52)
CAAKNPNAGGTSYGKLTF

SEQ ID NO: 193228 - protein, 14 aa, Homo sapiens
  CDR3 for beta chain variable domain of TCR clone 96614 (TRBV7-8, TRBJ2-7)
CASSLGRASYEQYF

SEQ ID NO: 193229 - protein, 13 aa, Homo sapiens
  CDR3 for alpha chain variable domain of TCR clone 96615 (TRAV17, TRAJ9)
CATDGTGGFKTIF

SEQ ID NO: 193230 - protein, 17 aa, Homo sapiens
  CDR3 for beta chain variable domain of TCR clone 96615 (TRBV6-5, TRBJ2-7)
CASSYSFWRQGSYEQYF

SEQ ID NO: 193231 - protein, 14 aa, Homo sapiens
  CDR3 for alpha chain variable domain of TCR clone 96616 (TRAV17, TRAJ57)
CATDPQGGSEKLVF

SEQ ID NO: 193232 - protein, 18 aa, Homo sapiens
  CDR3 for beta chain variable domain of TCR clone 96616 (TRBV6-6, TRBJ1-3)
CASSCSKWDSISGNTIYF

SEQ ID NO: 193233 - protein, 14 aa, Homo sapiens
  CDR3 for alpha chain variable domain of TCR clone 96617 (TRAV29/DV5, TRAJ36)
CAARRKTGANNLFF

SEQ ID NO: 193234 - protein, 16 aa, Homo sapiens
  CDR3 for beta chain variable domain of TCR clone 96617 (TRBV4-1, TRBJ2-3)
CASSQSTSGAEDTQYF

SEQ ID NO: 193235 - protein, 15 aa, Homo sapiens
  CDR3 for alpha chain variable domain of TCR clone 96618 (TRAV23/DV6, TRAJ21)
CAASREQLQQILLCI

SEQ ID NO: 193236 - protein, 16 aa, Homo sapiens
  CDR3 for beta chain variable domain of TCR clone 96618 (TRBV20-1, TRBJ2-3)
CSAVRDRGPIADTQYF

SEQ ID NO: 193237 - protein, 15 aa, Homo sapiens
  CDR3 for alpha chain variable domain of TCR clone 96619 (TRAV2, TRAJ9)
CAVEDRGTGGFKSIF

SEQ ID NO: 193238 - protein, 16 aa, Homo sapiens
  CDR3 for beta chain variable domain of TCR clone 96619 (TRBV24-1, TRBJ2-3)
CATSDPGTGATDTQYF

SEQ ID NO: 193239 - protein, 11 aa, Homo sapiens
  CDR3 for alpha chain variable domain of TCR clone 96620 (TRAV16, TRAJ31)
CALFNNARLMF

SEQ ID NO: 193240 - protein, 16 aa, Homo sapiens
  CDR3 for beta chain variable domain of TCR clone 96620 (TRBV12-5, TRBJ2-5)
CASGPRTSGNQETQYF

SEQ ID NO: 193241 - protein, 12 aa, Homo sapiens
  CDR3 for alpha chain variable domain of TCR clone 96621 (TRAV12-3, TRAJ17)
CAMTLTGNKLTF

SEQ ID NO: 193242 - protein, 13 aa, Homo sapiens
  CDR3 for beta chain variable domain of TCR clone 96621 (TRBV4-2, TRBJ2-3)
CASSQGNTDTQYF

SEQ ID NO: 193243 - protein, 14 aa, Homo sapiens
  CDR3 for alpha chain variable domain of TCR clone 96622 (TRAV26-1, TRAJ34)
GIVRVAYNTDKLIF

SEQ ID NO: 193244 - protein, 15 aa, Homo sapiens
  CDR3 for beta chain variable domain of TCR clone 96622 (TRBV20-1, TRBJ2-7)
CSARVPAAYFYEQYF

SEQ ID NO: 193245 - protein, 12 aa, Homo sapiens
  CDR3 for alpha chain variable domain of TCR clone 96623 (TRAV13-1, TRAJ15)
CAASQAGPALIF

SEQ ID NO: 193246 - protein, 14 aa, Homo sapiens
  CDR3 for beta chain variable domain of TCR clone 96623 (TRBV19, TRBJ2-2)
CASSTLHRSGELFF

SEQ ID NO: 193247 - protein, 16 aa, Homo sapiens
  CDR3 for alpha chain variable domain of TCR clone 96624 (TRAV13-1, TRAJ48)
CGKYRESNFGNEKLTF

SEQ ID NO: 193248 - protein, 17 aa, Homo sapiens
  CDR3 for beta chain variable domain of TCR clone 96624 (TRBV28, TRBJ2-1)
CASSSARQALTYNEQFF

SEQ ID NO: 193249 - protein, 13 aa, Homo sapiens
  CDR3 for alpha chain variable domain of TCR clone 96625 (TRAV14/DV4, TRAJ23)
CAMIDNQGGKLIF

SEQ ID NO: 193250 - protein, 17 aa, Homo sapiens
  CDR3 for beta chain variable domain of TCR clone 96625 (TRBV7-9, TRBJ1-4)
CASSSGQLGGRSEKLFF

SEQ ID NO: 193251 - protein, 14 aa, Homo sapiens
  CDR3 for alpha chain variable domain of TCR clone 96626 (TRAV16, TRAJ17)
CALSEGAAGNKLTF

SEQ ID NO: 193252 - protein, 13 aa, Homo sapiens
  CDR3 for beta chain variable domain of TCR clone 96626 (TRBV19, TRBJ2-7)
CASRKAGGSEQYF

SEQ ID NO: 193253 - protein, 13 aa, Homo sapiens
  CDR3 for alpha chain variable domain of TCR clone 96627 (TRAV1-2, TRAJ12)
FAVSMDSSYKLIF

SEQ ID NO: 193254 - protein, 15 aa, Homo sapiens
  CDR3 for beta chain variable domain of TCR clone 96627 (TRBV27, TRBJ2-5)
CASSLIPSGGETQYF

SEQ ID NO: 193255 - protein, 15 aa, Homo sapiens
  CDR3 for alpha chain variable domain of TCR clone 96628 (TRAV3, TRAJ42)
CALRGGTGSQGNLIF

SEQ ID NO: 193256 - protein, 14 aa, Homo sapiens
  CDR3 for beta chain variable domain of TCR clone 96628 (TRBV19, TRBJ1-2)
CASSSLFARDVYTF

SEQ ID NO: 193257 - protein, 13 aa, Homo sapiens
  CDR3 for alpha chain variable domain of TCR clone 96629 (TRAV8-2, TRAJ22)
CVVSEGSARQLTF

SEQ ID NO: 193258 - protein, 11 aa, Homo sapiens
  CDR3 for beta chain variable domain of TCR clone 96629 (TRBV7-9, TRBJ2-3)
CASSPTDTQYF

SEQ ID NO: 193259 - protein, 15 aa, Homo sapiens
  CDR3 for alpha chain variable domain of TCR clone 96630 (TRAV17, TRAJ56)
CATDANTGANSKLTF

SEQ ID NO: 193260 - protein, 14 aa, Homo sapiens
  CDR3 for beta chain variable domain of TCR clone 96630 (TRBV19, TRBJ1-5)
CARSLGTGGQPQHF

SEQ ID NO: 193261 - protein, 12 aa, Homo sapiens
  CDR3 for alpha chain variable domain of TCR clone 96631 (TRAV12-3, TRAJ17)
CAMTLKGNKLTF

SEQ ID NO: 193262 - protein, 15 aa, Homo sapiens
  CDR3 for beta chain variable domain of TCR clone 96631 (TRBV12-4, TRBJ2-5)
CASSPPTGLQETQYF

SEQ ID NO: 193263 - protein, 13 aa, Homo sapiens
  CDR3 for alpha chain variable domain of TCR clone 96632 (TRAV17, TRAJ21)
CATDGGNFNKFYF

SEQ ID NO: 193264 - protein, 15 aa, Homo sapiens
  CDR3 for beta chain variable domain of TCR clone 96632 (TRBV24-1, TRBJ2-4)
CATSDPRDRANIQYF

SEQ ID NO: 193265 - protein, 15 aa, Homo sapiens
  CDR3 for alpha chain variable domain of TCR clone 96633 (TRAV2, TRAJ27)
CAVDSITPMQANQPL

SEQ ID NO: 193266 - protein, 11 aa, Homo sapiens
  CDR3 for beta chain variable domain of TCR clone 96633 (TRBV12-4, TRBJ2-3)
CASTATDTQYF

SEQ ID NO: 193267 - protein, 11 aa, Homo sapiens
  CDR3 for alpha chain variable domain of TCR clone 96634 (TRAV12-1, TRAJ43)
CVEYANNDMRF

SEQ ID NO: 193268 - protein, 15 aa, Homo sapiens
  CDR3 for beta chain variable domain of TCR clone 96634 (TRBV18, TRBJ2-5)
CASSPRASEAETQYF

SEQ ID NO: 193269 - protein, 14 aa, Homo sapiens
  CDR3 for alpha chain variable domain of TCR clone 96635 (TRAV9-2, TRAJ39)
CALYIYNAGNVLTF

SEQ ID NO: 193270 - protein, 12 aa, Homo sapiens
  CDR3 for beta chain variable domain of TCR clone 96635 (TRBV7-9, TRBJ2-7)
CASSLEGYEQYF

SEQ ID NO: 193271 - protein, 14 aa, Homo sapiens
  CDR3 for alpha chain variable domain of TCR clone 96636 (TRAV12-2, TRAJ40)
CAVKIPSGTYKYIF

SEQ ID NO: 193272 - protein, 14 aa, Homo sapiens
  CDR3 for beta chain variable domain of TCR clone 96636 (TRBV20-1, TRBJ1-1)
CSAQTRIGGNEDFF

SEQ ID NO: 193273 - protein, 13 aa, Homo sapiens
  CDR3 for alpha chain variable domain of TCR clone 96637 (TRAV12-3, TRAJ43)
CAMIRPNNNDMRS

SEQ ID NO: 193274 - protein, 12 aa, Homo sapiens
  CDR3 for beta chain variable domain of TCR clone 96637 (TRBV11-2, TRBJ2-5)
CASSLGQETQYF

SEQ ID NO: 193275 - protein, 13 aa, Homo sapiens
  CDR3 for alpha chain variable domain of TCR clone 96638 (TRAV3, TRAJ21)
CAVREPDFNKFYF

SEQ ID NO: 193276 - protein, 15 aa, Homo sapiens
  CDR3 for beta chain variable domain of TCR clone 96638 (TRBV7-2, TRBJ1-2)
CASSLVSGGDYGYTF

SEQ ID NO: 193277 - protein, 15 aa, Homo sapiens
  CDR3 for alpha chain variable domain of TCR clone 96639 (TRAV26-1, TRAJ37)
CIAKTGSSNTGKLIF

SEQ ID NO: 193278 - protein, 12 aa, Homo sapiens
  CDR3 for beta chain variable domain of TCR clone 96639 (TRBV7-8, TRBJ2-7)
CASSLGDREQYF

SEQ ID NO: 193279 - protein, 11 aa, Homo sapiens
  CDR3 for alpha chain variable domain of TCR clone 96640 (TRAV2, TRAJ23)
CAVKTRGKLIF

SEQ ID NO: 193280 - protein, 16 aa, Homo sapiens
  CDR3 for beta chain variable domain of TCR clone 96640 (TRBV7-9, TRBJ1-2)
CASSLGFSSGEDGYTF

SEQ ID NO: 193281 - protein, 11 aa, Homo sapiens
  CDR3 for alpha chain variable domain of TCR clone 96641 (TRAV35, TRAJ30)
CAPGGDDKIIF

SEQ ID NO: 193282 - protein, 13 aa, Homo sapiens
  CDR3 for beta chain variable domain of TCR clone 96641 (TRBV7-6, TRBJ2-1)
CQQLGGGADKQFF

SEQ ID NO: 193283 - protein, 13 aa, Homo sapiens
  CDR3 for alpha chain variable domain of TCR clone 96642 (TRAV8-3, TRAJ44)
CAVVPGTASELTF

SEQ ID NO: 193284 - protein, 14 aa, Homo sapiens
  CDR3 for beta chain variable domain of TCR clone 96642 (TRBV11-2, TRBJ2-3)
CASRRLARTDTQYF

SEQ ID NO: 193285 - protein, 16 aa, Homo sapiens
  CDR3 for alpha chain variable domain of TCR clone 96643 (TRAV14/DV4, TRAJ53)
CAMREGGGGSNYKLTF

SEQ ID NO: 193286 - protein, 19 aa, Homo sapiens
  CDR3 for beta chain variable domain of TCR clone 96643 (TRBV25-1, TRBJ2-2)
CAILVYRVDRGRKTGELFF

SEQ ID NO: 193287 - protein, 15 aa, Homo sapiens
  CDR3 for alpha chain variable domain of TCR clone 96644 (TRAV14/DV4, TRAJ12)
CAMREGWDSSHKLIF

SEQ ID NO: 193288 - protein, 16 aa, Homo sapiens
  CDR3 for beta chain variable domain of TCR clone 96644 (TRBV2, TRBJ2-5)
CASSETQGVGEETQYF

SEQ ID NO: 193289 - protein, 17 aa, Homo sapiens
  CDR3 for alpha chain variable domain of TCR clone 96645 (TRAV3, TRAJ42)
CAVRDRDYVGSQGNLIF

SEQ ID NO: 193290 - protein, 13 aa, Homo sapiens
  CDR3 for beta chain variable domain of TCR clone 96645 (TRBV10-3, TRBJ2-7)
CASKLAVNYEQYF

SEQ ID NO: 193291 - protein, 13 aa, Homo sapiens
  CDR3 for alpha chain variable domain of TCR clone 96646 (TRAV27, TRAJ27)
CAGGITNASKSTF

SEQ ID NO: 193292 - protein, 13 aa, Homo sapiens
  CDR3 for beta chain variable domain of TCR clone 96646 (TRBV20-1, TRBJ1-2)
CSASLGVGYGYTF

SEQ ID NO: 193293 - protein, 17 aa, Homo sapiens
  CDR3 for alpha chain variable domain of TCR clone 96647 (TRAV23/DV6, TRAJ57)
CAASSTLSQGGSEKLVF

SEQ ID NO: 193294 - protein, 16 aa, Homo sapiens
  CDR3 for beta chain variable domain of TCR clone 96647 (TRBV5-1, TRBJ2-1)
CASSLSSLRESNEQFF

SEQ ID NO: 193295 - protein, 16 aa, Homo sapiens
  CDR3 for alpha chain variable domain of TCR clone 96648 (TRAV1-2, TRAJ10)
CAVRGVLTGGGNKLTF

SEQ ID NO: 193296 - protein, 18 aa, Homo sapiens
  CDR3 for beta chain variable domain of TCR clone 96648 (TRBV4-1, TRBJ2-3)
CASSHQLAGGRSTDTQYF

SEQ ID NO: 193297 - protein, 13 aa, Homo sapiens
  CDR3 for alpha chain variable domain of TCR clone 96649 (TRAV16, TRAJ28)
CALTGAGSYQPTF

SEQ ID NO: 193298 - protein, 16 aa, Homo sapiens
  CDR3 for beta chain variable domain of TCR clone 96649 (TRBV28, TRBJ1-5)
CASSLTGQGWNQPQHF

SEQ ID NO: 193299 - protein, 14 aa, Homo sapiens
  CDR3 for alpha chain variable domain of TCR clone 96650 (TRAV12-1, TRAJ17)
CVVNYKAAGNKLTF

SEQ ID NO: 193300 - protein, 15 aa, Homo sapiens
  CDR3 for beta chain variable domain of TCR clone 96650 (TRBV7-2, TRBJ2-7)
CASSLVLGSAYEQYF

SEQ ID NO: 193301 - protein, 14 aa, Homo sapiens
  CDR3 for alpha chain variable domain of TCR clone 96651 (TRAV12-2, TRAJ17)
CAVLFKAAGNKLTF

SEQ ID NO: 193302 - protein, 16 aa, Homo sapiens
  CDR3 for beta chain variable domain of TCR clone 96651 (TRBV5-1, TRBJ2-7)
CASSITVGTGGYEQYF

SEQ ID NO: 193303 - protein, 11 aa, Homo sapiens
  CDR3 for alpha chain variable domain of TCR clone 96652 (TRAV2, TRAJ33)
CAVESNYQLIW

SEQ ID NO: 193304 - protein, 12 aa, Homo sapiens
  CDR3 for beta chain variable domain of TCR clone 96652 (TRBV11-2, TRBJ2-2)
CARSLGGGELFF

SEQ ID NO: 193305 - protein, 19 aa, Homo sapiens
  CDR3 for alpha chain variable domain of TCR clone 96653 (TRAV3, TRAJ6)
CAVRDRNPSRSGGSYILTF

SEQ ID NO: 193306 - protein, 15 aa, Homo sapiens
  CDR3 for beta chain variable domain of TCR clone 96653 (TRBV18, TRBJ2-7)
CASSPTFMDSYEQYF

SEQ ID NO: 193307 - protein, 16 aa, Homo sapiens
  CDR3 for alpha chain variable domain of TCR clone 96654 (TRAV30, TRAJ24)
CGPEIVDADSWGKFQF

SEQ ID NO: 193308 - protein, 17 aa, Homo sapiens
  CDR3 for beta chain variable domain of TCR clone 96654 (TRBV20-1, TRBJ2-1)
CSAPPRLAGTRYNEQFF

SEQ ID NO: 193309 - protein, 14 aa, Homo sapiens
  CDR3 for alpha chain variable domain of TCR clone 96655 (TRAV26-1, TRAJ38)
CIADNAGNNRKLIW

SEQ ID NO: 193310 - protein, 16 aa, Homo sapiens
  CDR3 for beta chain variable domain of TCR clone 96655 (TRBV13, TRBJ2-2)
CASGPRTGEHTGELFF

SEQ ID NO: 193311 - protein, 14 aa, Homo sapiens
  CDR3 for alpha chain variable domain of TCR clone 96656 (TRAV16, TRAJ26)
CALSSANCGQNFVF

SEQ ID NO: 193312 - protein, 12 aa, Homo sapiens
  CDR3 for beta chain variable domain of TCR clone 96656 (TRBV6-5, TRBJ2-2)
CASRTGTGELFF

SEQ ID NO: 193313 - protein, 11 aa, Homo sapiens
  CDR3 for alpha chain variable domain of TCR clone 96657 (TRAV13-2, TRAJ20)
CADSNDYKLSF

SEQ ID NO: 193314 - protein, 15 aa, Homo sapiens
  CDR3 for beta chain variable domain of TCR clone 96657 (TRBV20-1, TRBJ2-7)
CSARDRVSGMDEQYF

SEQ ID NO: 193315 - protein, 14 aa, Homo sapiens
  CDR3 for alpha chain variable domain of TCR clone 96658 (TRAV4, TRAJ9)
CLVGSGTGGFKTIF

SEQ ID NO: 193316 - protein, 15 aa, Homo sapiens
  CDR3 for beta chain variable domain of TCR clone 96658 (TRBV28, TRBJ2-7)
CASSPGGRGFYEQYF

SEQ ID NO: 193317 - protein, 14 aa, Homo sapiens
  CDR3 for alpha chain variable domain of TCR clone 96659 (TRAV26-2, TRAJ27)
CILRDISDAGNSTF

SEQ ID NO: 193318 - protein, 15 aa, Homo sapiens
  CDR3 for beta chain variable domain of TCR clone 96659 (TRBV10-3, TRBJ2-7)
CATREQGLRSYEQYF

SEQ ID NO: 193319 - protein, 14 aa, Homo sapiens
  CDR3 for alpha chain variable domain of TCR clone 96660 (TRAV35, TRAJ13)
CAGRSPGGYQKVTF

SEQ ID NO: 193320 - protein, 13 aa, Homo sapiens
  CDR3 for beta chain variable domain of TCR clone 96660 (TRBV7-3, TRBJ2-7)
CASSQAGGYEQYF

SEQ ID NO: 193321 - protein, 14 aa, Homo sapiens
  CDR3 for alpha chain variable domain of TCR clone 96661 (TRAV4, TRAJ43)
CLVGPMYNNNDIRF

SEQ ID NO: 193322 - protein, 21 aa, Homo sapiens
  CDR3 for beta chain variable domain of TCR clone 96661 (TRBV11-1, TRBJ2-1)
CASSARERLRPEGPSYNEQFF

SEQ ID NO: 193323 - protein, 14 aa, Homo sapiens
  CDR3 for alpha chain variable domain of TCR clone 96662 (TRAV16, TRAJ33)
CALSAMDSNYQLIW

SEQ ID NO: 193324 - protein, 12 aa, Homo sapiens
  CDR3 for beta chain variable domain of TCR clone 96662 (TRBV5-1, TRBJ1-2)
CASSQDNYGYTF

SEQ ID NO: 193325 - protein, 11 aa, Homo sapiens
  CDR3 for alpha chain variable domain of TCR clone 96663 (TRAV1-2, TRAJ40)
CAVPGNYKYIF

SEQ ID NO: 193326 - protein, 16 aa, Homo sapiens
  CDR3 for beta chain variable domain of TCR clone 96663 (TRBV29-1, TRBJ2-7)
CSVEVVGTSGSYEQYF

SEQ ID NO: 193327 - protein, 17 aa, Homo sapiens
  CDR3 for alpha chain variable domain of TCR clone 96664 (TRAV12-2, TRAJ22)
CAVNRIPFSGSARQLTF

SEQ ID NO: 193328 - protein, 13 aa, Homo sapiens
  CDR3 for beta chain variable domain of TCR clone 96664 (TRBV11-3, TRBJ1-1)
CASSSNRETEAFF

SEQ ID NO: 193329 - protein, 12 aa, Homo sapiens
  CDR3 for alpha chain variable domain of TCR clone 96665 (TRAV36/DV7, TRAJ54)
CAVVRGAQKLVF

SEQ ID NO: 193330 - protein, 13 aa, Homo sapiens
  CDR3 for beta chain variable domain of TCR clone 96665 (TRBV7-3, TRBJ1-2)
CASSLKQNYGYTF

SEQ ID NO: 193331 - protein, 13 aa, Homo sapiens
  CDR3 for alpha chain variable domain of TCR clone 96666 (TRAV13-2, TRAJ16)
CADAWTDGQKLLF

SEQ ID NO: 193332 - protein, 15 aa, Homo sapiens
  CDR3 for beta chain variable domain of TCR clone 96666 (TRBV29-1, TRBJ2-1)
CSVEAPRGSPNEQFF

SEQ ID NO: 193333 - protein, 15 aa, Homo sapiens
  CDR3 for alpha chain variable domain of TCR clone 96667 (TRAV17, TRAJ42)
RATDHYGGSQGNLIF

SEQ ID NO: 193334 - protein, 14 aa, Homo sapiens
  CDR3 for beta chain variable domain of TCR clone 96667 (TRBV19, TRBJ2-5)
CASSIEHSQETQYF

SEQ ID NO: 193335 - protein, 12 aa, Homo sapiens
  CDR3 for alpha chain variable domain of TCR clone 96668 (TRAV1-1, TRAJ12)
CAVGDSSYKLIF

SEQ ID NO: 193336 - protein, 15 aa, Homo sapiens
  CDR3 for beta chain variable domain of TCR clone 96668 (TRBV9, TRBJ1-6)
CASGVAGTGDSPLHF

SEQ ID NO: 193337 - protein, 14 aa, Homo sapiens
  CDR3 for alpha chain variable domain of TCR clone 96669 (TRAV38-1, TRAJ35)
CAFLTIGFGNVLYC

SEQ ID NO: 193338 - protein, 17 aa, Homo sapiens
  CDR3 for beta chain variable domain of TCR clone 96669 (TRBV28, TRBJ1-1)
CASSGDLRTESNTEAFF

SEQ ID NO: 193339 - protein, 15 aa, Homo sapiens
  CDR3 for alpha chain variable domain of TCR clone 96670 (TRAV2, TRAJ9)
CAVAALNTGGFKTTF

SEQ ID NO: 193340 - protein, 14 aa, Homo sapiens
  CDR3 for beta chain variable domain of TCR clone 96670 (TRBV7-8, TRBJ2-5)
CASSATGGQETQYF

SEQ ID NO: 193341 - protein, 14 aa, Homo sapiens
  CDR3 for alpha chain variable domain of TCR clone 96671 (TRAV12-2, TRAJ40)
CAVKIPSGTYKYIF

SEQ ID NO: 193342 - protein, 13 aa, Homo sapiens
  CDR3 for beta chain variable domain of TCR clone 96671 (TRBV14, TRBJ2-7)
CASSQDRRYEQYF

SEQ ID NO: 193343 - protein, 18 aa, Homo sapiens
  CDR3 for alpha chain variable domain of TCR clone 96672 (TRAV21, TRAJ52)
CAVRPSPAGGTSYGKLTF

SEQ ID NO: 193344 - protein, 16 aa, Homo sapiens
  CDR3 for beta chain variable domain of TCR clone 96672 (TRBV3-1, TRBJ2-7)
CASSQGATGVAYEQYF

SEQ ID NO: 193345 - protein, 10 aa, Homo sapiens
  CDR3 for alpha chain variable domain of TCR clone 96673 (TRAV8-4, TRAJ12)
WRDSSYKLIF

SEQ ID NO: 193346 - protein, 13 aa, Homo sapiens
  CDR3 for beta chain variable domain of TCR clone 96673 (TRBV29-1, TRBJ2-5)
CSVEATAQGTQYF

SEQ ID NO: 193347 - protein, 12 aa, Homo sapiens
  CDR3 for alpha chain variable domain of TCR clone 96674 (TRAV1-1, TRAJ43)
CAPRVSSNDMRF

SEQ ID NO: 193348 - protein, 15 aa, Homo sapiens
  CDR3 for beta chain variable domain of TCR clone 96674 (TRBV4-1, TRBJ2-7)
CASSQQGQGFDEQYF

SEQ ID NO: 193349 - protein, 15 aa, Homo sapiens
  CDR3 for alpha chain variable domain of TCR clone 96675 (TRAV3, TRAJ22)
CAVRDRGGSARRLTF

SEQ ID NO: 193350 - protein, 14 aa, Homo sapiens
  CDR3 for beta chain variable domain of TCR clone 96675 (TRBV19, TRBJ2-1)
CASPTFVLSGEQFF

SEQ ID NO: 193351 - protein, 15 aa, Homo sapiens
  CDR3 for alpha chain variable domain of TCR clone 96676 (TRAV8-3, TRAJ45)
CASSYSGVGADGLTF

SEQ ID NO: 193352 - protein, 13 aa, Homo sapiens
  CDR3 for beta chain variable domain of TCR clone 96676 (TRBV7-9, TRBJ2-7)
CASSFAGAYEQYF

SEQ ID NO: 193353 - protein, 12 aa, Homo sapiens
  CDR3 for alpha chain variable domain of TCR clone 96677 (TRAV27, TRAJ41)
CAGRNSGYALNF

SEQ ID NO: 193354 - protein, 15 aa, Homo sapiens
  CDR3 for beta chain variable domain of TCR clone 96677 (TRBV20-1, TRBJ1-5)
CSATSDRGLGQTQHF

SEQ ID NO: 193355 - protein, 14 aa, Homo sapiens
  CDR3 for alpha chain variable domain of TCR clone 96678 (TRAV26-1, TRAJ38)
CIADNAGNNRKLIW

SEQ ID NO: 193356 - protein, 13 aa, Homo sapiens
  CDR3 for beta chain variable domain of TCR clone 96678 (TRBV20-1, TRBJ1-1)
CSARGGANTEAFF

SEQ ID NO: 193357 - protein, 14 aa, Homo sapiens
  CDR3 for alpha chain variable domain of TCR clone 96679 (TRAV26-1, TRAJ38)
CIADNAGNNRKLIW

SEQ ID NO: 193358 - protein, 15 aa, Homo sapiens
  CDR3 for beta chain variable domain of TCR clone 96679 (TRBV7-6, TRBJ1-4)
RASSLGAGAGEKLFF

SEQ ID NO: 193359 - protein, 12 aa, Homo sapiens
  CDR3 for alpha chain variable domain of TCR clone 96680 (TRAV21, TRAJ8)
CAVNTGFQKLVF

SEQ ID NO: 193360 - protein, 13 aa, Homo sapiens
  CDR3 for beta chain variable domain of TCR clone 96680 (TRBV6-3, TRBJ2-1)
CASSYDNYNDQFF

SEQ ID NO: 193361 - protein, 14 aa, Homo sapiens
  CDR3 for alpha chain variable domain of TCR clone 96681 (TRAV26-1, TRAJ49)
CIVRPSNTGNQFYL

SEQ ID NO: 193362 - protein, 15 aa, Homo sapiens
  CDR3 for beta chain variable domain of TCR clone 96681 (TRBV19, TRBJ1-1)
CASMGFRDVNTEAFF

SEQ ID NO: 193363 - protein, 16 aa, Homo sapiens
  CDR3 for alpha chain variable domain of TCR clone 96682 (TRAV30, TRAJ24)
CGTEIVDADSWGKFQL

SEQ ID NO: 193364 - protein, 14 aa, Homo sapiens
  CDR3 for beta chain variable domain of TCR clone 96682 (TRBV12-5, TRBJ2-5)
CASGARTHQETQYF

SEQ ID NO: 193365 - protein, 14 aa, Homo sapiens
  CDR3 for alpha chain variable domain of TCR clone 96683 (TRAV38-1, TRAJ29)
CAFITPSGNTPLVF

SEQ ID NO: 193366 - protein, 13 aa, Homo sapiens
  CDR3 for beta chain variable domain of TCR clone 96683 (TRBV7-3, TRBJ1-1)
CASSQDWGAEAFF

SEQ ID NO: 193367 - protein, 12 aa, Homo sapiens
  CDR3 for alpha chain variable domain of TCR clone 96684 (TRAV25, TRAJ11)
CAGASGYSPLTF

SEQ ID NO: 193368 - protein, 14 aa, Homo sapiens
  CDR3 for beta chain variable domain of TCR clone 96684 (TRBV5-8, TRBJ2-3)
CASSLGQGTDTQYF

SEQ ID NO: 193369 - protein, 11 aa, Homo sapiens
  CDR3 for alpha chain variable domain of TCR clone 96685 (TRAV2, TRAJ13)
CASGGYQKVTF

SEQ ID NO: 193370 - protein, 15 aa, Homo sapiens
  CDR3 for beta chain variable domain of TCR clone 96685 (TRBV10-3, TRBJ2-1)
CAIRNGTSGHNEQFF

SEQ ID NO: 193371 - protein, 13 aa, Homo sapiens
  CDR3 for alpha chain variable domain of TCR clone 96686 (TRAV8-6, TRAJ49)
CAVITNTGNQFYF

SEQ ID NO: 193372 - protein, 15 aa, Homo sapiens
  CDR3 for beta chain variable domain of TCR clone 96686 (TRBV4-1, TRBJ1-4)
CASSDTGGTNEKLFF

SEQ ID NO: 193373 - protein, 17 aa, Homo sapiens
  CDR3 for alpha chain variable domain of TCR clone 96687 (TRAV8-6, TRAJ8)
CAVKEGIENTGFQKLVF

SEQ ID NO: 193374 - protein, 12 aa, Homo sapiens
  CDR3 for beta chain variable domain of TCR clone 96687 (TRBV19, TRBJ1-4)
CASKDWPWGLFF

SEQ ID NO: 193375 - protein, 17 aa, Homo sapiens
  CDR3 for alpha chain variable domain of TCR clone 96688 (TRAV36/DV7, TRAJ52)
CAVAQRAGGTSYGKLTF

SEQ ID NO: 193376 - protein, 11 aa, Homo sapiens
  CDR3 for beta chain variable domain of TCR clone 96688 (TRBV12-4, TRBJ2-3)
CASTATDTQYF

SEQ ID NO: 193377 - protein, 14 aa, Homo sapiens
  CDR3 for alpha chain variable domain of TCR clone 96689 (TRAV1-2, TRAJ16)
CAVNRFSDGQKLLF

SEQ ID NO: 193378 - protein, 14 aa, Homo sapiens
  CDR3 for beta chain variable domain of TCR clone 96689 (TRBV5-8, TRBJ2-5)
CASSPSGGRETQYF

SEQ ID NO: 193379 - protein, 15 aa, Homo sapiens
  CDR3 for alpha chain variable domain of TCR clone 96690 (TRAV2, TRAJ9)
CAVEDRGTGGFKTIF

SEQ ID NO: 193380 - protein, 18 aa, Homo sapiens
  CDR3 for beta chain variable domain of TCR clone 96690 (TRBV6-6, TRBJ1-3)
CASSYSKWDSISGNTIYF

SEQ ID NO: 193381 - protein, 13 aa, Homo sapiens
  CDR3 for alpha chain variable domain of TCR clone 96691 (TRAV12-1, TRAJ49)
CVVGANTGNQFYF

SEQ ID NO: 193382 - protein, 15 aa, Homo sapiens
  CDR3 for beta chain variable domain of TCR clone 96691 (TRBV19, TRBJ1-5)
CASSIVWADNQPQHF

SEQ ID NO: 193383 - protein, 12 aa, Homo sapiens
  CDR3 for alpha chain variable domain of TCR clone 96692 (TRAV1-1, TRAJ43)
CAPRVSSNDMRF

SEQ ID NO: 193384 - protein, 13 aa, Homo sapiens
  CDR3 for beta chain variable domain of TCR clone 96692 (TRBV20-1, TRBJ1-1)
CSARVGGNTEAFF

SEQ ID NO: 193385 - protein, 15 aa, Homo sapiens
  CDR3 for alpha chain variable domain of TCR clone 96693 (TRAV8-2, TRAJ40)
CVVLGTTSGTYKYIS

SEQ ID NO: 193386 - protein, 16 aa, Homo sapiens
  CDR3 for beta chain variable domain of TCR clone 96693 (TRBV7-3, TRBJ2-1)
CASSLEGYRSYNEQFF

SEQ ID NO: 193387 - protein, 14 aa, Homo sapiens
  CDR3 for alpha chain variable domain of TCR clone 96694 (TRAV38-2/DV8, TRAJ23)
CAYRKPNQGGKLIF

SEQ ID NO: 193388 - protein, 12 aa, Homo sapiens
  CDR3 for beta chain variable domain of TCR clone 96694 (TRBV5-1, TRBJ2-1)
CASIGGYNEQFF

SEQ ID NO: 193389 - protein, 14 aa, Homo sapiens
  CDR3 for alpha chain variable domain of TCR clone 96695 (TRAV35, TRAJ23)
CAGHRKTSYDKLIF

SEQ ID NO: 193390 - protein, 20 aa, Homo sapiens
  CDR3 for beta chain variable domain of TCR clone 96695 (TRBV7-8, TRBJ2-2)
CASSHLFPGPTIHITGELFF

SEQ ID NO: 193391 - protein, 15 aa, Homo sapiens
  CDR3 for alpha chain variable domain of TCR clone 96696 (TRAV8-1, TRAJ6)
CAVNANPGGSYIPTF

SEQ ID NO: 193392 - protein, 14 aa, Homo sapiens
  CDR3 for beta chain variable domain of TCR clone 96696 (TRBV4-1, TRBJ2-2)
CASSQAVNTGELFF

SEQ ID NO: 193393 - protein, 15 aa, Homo sapiens
  CDR3 for alpha chain variable domain of TCR clone 96697 (TRAV8-3, TRAJ32)
CAVGPYGGATHKLIF

SEQ ID NO: 193394 - protein, 14 aa, Homo sapiens
  CDR3 for beta chain variable domain of TCR clone 96697 (TRBV29-1, TRBJ2-2)
CSVLAETNTGELFF

SEQ ID NO: 193395 - protein, 11 aa, Homo sapiens
  CDR3 for alpha chain variable domain of TCR clone 96698 (TRAV17, TRAJ9)
CGFTVGFKTIF

SEQ ID NO: 193396 - protein, 12 aa, Homo sapiens
  CDR3 for beta chain variable domain of TCR clone 96698 (TRBV29-1, TRBJ2-3)
CSVTGGADTQYF

SEQ ID NO: 193397 - protein, 10 aa, Homo sapiens
  CDR3 for alpha chain variable domain of TCR clone 96699 (TRAV1-2, TRAJ31)
CAFFDARLMF

SEQ ID NO: 193398 - protein, 16 aa, Homo sapiens
  CDR3 for beta chain variable domain of TCR clone 96699 (TRBV15, TRBJ2-5)
CATSRYLEAAQETQYF

SEQ ID NO: 193399 - protein, 14 aa, Homo sapiens
  CDR3 for alpha chain variable domain of TCR clone 96700 (TRAV13-1, TRAJ13)
CAASRVAGYQKVTF

SEQ ID NO: 193400 - protein, 17 aa, Homo sapiens
  CDR3 for beta chain variable domain of TCR clone 96700 (TRBV15, TRBJ1-5)
CATSRAPPGTRNQPQHF

SEQ ID NO: 193401 - protein, 14 aa, Homo sapiens
  CDR3 for alpha chain variable domain of TCR clone 96701 (TRAV12-2, TRAJ13)
CAVKKTGGYQKVTF

SEQ ID NO: 193402 - protein, 16 aa, Homo sapiens
  CDR3 for beta chain variable domain of TCR clone 96701 (TRBV5-1, TRBJ2-3)
CASSLGLAVYTDTQYF

SEQ ID NO: 193403 - protein, 14 aa, Homo sapiens
  CDR3 for alpha chain variable domain of TCR clone 96702 (TRAV13-1, TRAJ28)
CAASPGAGSYQLTF

SEQ ID NO: 193404 - protein, 15 aa, Homo sapiens
  CDR3 for beta chain variable domain of TCR clone 96702 (TRBV11-3, TRBJ2-7)
CASSLGDRGSYEQYF

SEQ ID NO: 193405 - protein, 10 aa, Homo sapiens
  CDR3 for alpha chain variable domain of TCR clone 96703 (TRAV36/DV7, TRAJ48)
CAVGNEKLTF

SEQ ID NO: 193406 - protein, 16 aa, Homo sapiens
  CDR3 for beta chain variable domain of TCR clone 96703 (TRBV15, TRBJ2-3)
CATRPSGGRAPDTQYF

SEQ ID NO: 193407 - protein, 14 aa, Homo sapiens
  CDR3 for alpha chain variable domain of TCR clone 96704 (TRAV1-2, TRAJ8)
CAVREETGFQKLVF

SEQ ID NO: 193408 - protein, 16 aa, Homo sapiens
  CDR3 for beta chain variable domain of TCR clone 96704 (TRBV19, TRBJ2-1)
CASSKAGPSSYNEQFF

SEQ ID NO: 193409 - protein, 15 aa, Homo sapiens
  CDR3 for alpha chain variable domain of TCR clone 96705 (TRAV17, TRAJ56)
CATEPFTGANSKLTF

SEQ ID NO: 193410 - protein, 15 aa, Homo sapiens
  CDR3 for beta chain variable domain of TCR clone 96705 (TRBV28, TRBJ1-5)
FASSRTGGYVQPQHF

SEQ ID NO: 193411 - protein, 14 aa, Homo sapiens
  CDR3 for alpha chain variable domain of TCR clone 96706 (TRAV17, TRAJ22)
CATSPSGSARQLTF

SEQ ID NO: 193412 - protein, 15 aa, Homo sapiens
  CDR3 for beta chain variable domain of TCR clone 96706 (TRBV19, TRBJ2-1)
CASSIQATSYNEQFF

SEQ ID NO: 193413 - protein, 14 aa, Homo sapiens
  CDR3 for alpha chain variable domain of TCR clone 96707 (TRAV13-1, TRAJ35)
CAASKGGFGNVLHC

SEQ ID NO: 193414 - protein, 14 aa, Homo sapiens
  CDR3 for beta chain variable domain of TCR clone 96707 (TRBV2, TRBJ2-1)
CASSLSGSQGEQFF

SEQ ID NO: 193415 - protein, 12 aa, Homo sapiens
  CDR3 for alpha chain variable domain of TCR clone 96708 (TRAV35, TRAJ30)
CAGLNRDDKIIF

SEQ ID NO: 193416 - protein, 15 aa, Homo sapiens
  CDR3 for beta chain variable domain of TCR clone 96708 (TRBV18, TRBJ2-3)
SASSPLAGETDTQYF

SEQ ID NO: 193417 - protein, 10 aa, Homo sapiens
  CDR3 for alpha chain variable domain of TCR clone 96709 (TRAV1-2, TRAJ20)
CACNDYKLSF

SEQ ID NO: 193418 - protein, 17 aa, Homo sapiens
  CDR3 for beta chain variable domain of TCR clone 96709 (TRBV13, TRBJ2-3)
CASSLSRVAGGRNTQYF

SEQ ID NO: 193419 - protein, 12 aa, Homo sapiens
  CDR3 for alpha chain variable domain of TCR clone 96710 (TRAV12-3, TRAJ40)
CAMSSGTYKYIF

SEQ ID NO: 193420 - protein, 14 aa, Homo sapiens
  CDR3 for beta chain variable domain of TCR clone 96710 (TRBV19, TRBJ2-1)
CASPTFVLSGEQFF

SEQ ID NO: 193421 - protein, 11 aa, Homo sapiens
  CDR3 for alpha chain variable domain of TCR clone 96711 (TRAV12-1, TRAJ37)
CVVNTPGKLIF

SEQ ID NO: 193422 - protein, 13 aa, Homo sapiens
  CDR3 for beta chain variable domain of TCR clone 96711 (TRBV12-4, TRBJ1-5)
CASSHDRAQPQHF

SEQ ID NO: 193423 - protein, 14 aa, Homo sapiens
  CDR3 for alpha chain variable domain of TCR clone 96712 (TRAV3, TRAJ17)
CAVRDAAAGNKLTF

SEQ ID NO: 193424 - protein, 15 aa, Homo sapiens
  CDR3 for beta chain variable domain of TCR clone 96712 (TRBV9, TRBJ1-6)
CASSVAGTGDSPLLF

SEQ ID NO: 193425 - protein, 18 aa, Homo sapiens
  CDR3 for alpha chain variable domain of TCR clone 96713 (TRAV26-1, TRAJ22)
CIVRVALISSGSARQLTF

SEQ ID NO: 193426 - protein, 13 aa, Homo sapiens
  CDR3 for beta chain variable domain of TCR clone 96713 (TRBV13, TRBJ2-5)
CASSPEVEETQYF

SEQ ID NO: 193427 - protein, 16 aa, Homo sapiens
  CDR3 for alpha chain variable domain of TCR clone 96714 (TRAV3, TRAJ37)
CAVRPHGSGNTGKLIF

SEQ ID NO: 193428 - protein, 13 aa, Homo sapiens
  CDR3 for beta chain variable domain of TCR clone 96714 (TRBV2, TRBJ1-5)
CASGTGGYQPQRF

SEQ ID NO: 193429 - protein, 13 aa, Homo sapiens
  CDR3 for alpha chain variable domain of TCR clone 96715 (TRAV13-1, TRAJ5)
CAASDTGRRALTF

SEQ ID NO: 193430 - protein, 12 aa, Homo sapiens
  CDR3 for beta chain variable domain of TCR clone 96715 (TRBV7-9, TRBJ1-5)
CASSPQGQPQHF

SEQ ID NO: 193431 - protein, 11 aa, Homo sapiens
  CDR3 for alpha chain variable domain of TCR clone 96716 (TRAV21, TRAJ34)
CAVTNTDKLIF

SEQ ID NO: 193432 - protein, 14 aa, Homo sapiens
  CDR3 for beta chain variable domain of TCR clone 96716 (TRBV7-3, TRBJ2-1)
CASSLAGGTNEQFF

SEQ ID NO: 193433 - protein, 14 aa, Homo sapiens
  CDR3 for alpha chain variable domain of TCR clone 96717 (TRAV12-2, TRAJ17)
CAVLFKAAGNKLTF

SEQ ID NO: 193434 - protein, 13 aa, Homo sapiens
  CDR3 for beta chain variable domain of TCR clone 96717 (TRBV7-9, TRBJ2-7)
CASSFAGAYEQYF

SEQ ID NO: 193435 - protein, 14 aa, Homo sapiens
  CDR3 for alpha chain variable domain of TCR clone 96718 (TRAV38-1, TRAJ40)
CALRPTSGTYKYIF

SEQ ID NO: 193436 - protein, 14 aa, Homo sapiens
  CDR3 for beta chain variable domain of TCR clone 96718 (TRBV7-2, TRBJ2-7)
CASRSQGAAYEQYF

SEQ ID NO: 193437 - protein, 16 aa, Homo sapiens
  CDR3 for alpha chain variable domain of TCR clone 96719 (TRAV13-1, TRAJ45)
CAARGSRKGGADGLTF

SEQ ID NO: 193438 - protein, 13 aa, Homo sapiens
  CDR3 for beta chain variable domain of TCR clone 96719 (TRBV12-4, TRBJ2-5)
CASRKRGKETQYV

SEQ ID NO: 193439 - protein, 12 aa, Homo sapiens
  CDR3 for alpha chain variable domain of TCR clone 96720 (TRAV1-1, TRAJ8)
CAGGTGFQKLVF

SEQ ID NO: 193440 - protein, 17 aa, Homo sapiens
  CDR3 for beta chain variable domain of TCR clone 96720 (TRBV11-2, TRBJ2-1)
CASSLYPPGVEYNEQFF

SEQ ID NO: 193441 - protein, 22 aa, Homo sapiens
  CDR3 for alpha chain variable domain of TCR clone 96721 (TRAV40, )
CLLGDGIPDIQNPDPAVYQLRD

SEQ ID NO: 193442 - protein, 16 aa, Homo sapiens
  CDR3 for beta chain variable domain of TCR clone 96721 (TRBV20-1, TRBJ1-5)
CSAELPGQQTNRPQHF

SEQ ID NO: 193443 - protein, 12 aa, Homo sapiens
  CDR3 for alpha chain variable domain of TCR clone 96722 (TRAV29/DV5, TRAJ49)
CAATDTGNQFYF

SEQ ID NO: 193444 - protein, 19 aa, Homo sapiens
  CDR3 for beta chain variable domain of TCR clone 96722 (TRBV25-1, TRBJ2-2)
CAILVYRVDRGRKTGEPFF

SEQ ID NO: 193445 - protein, 13 aa, Homo sapiens
  CDR3 for alpha chain variable domain of TCR clone 96723 (TRAV8-2, TRAJ43)
CVVSDQGDNDMRF

SEQ ID NO: 193446 - protein, 12 aa, Homo sapiens
  CDR3 for beta chain variable domain of TCR clone 96723 (TRBV7-9, TRBJ2-7)
CASRTGFDEHYF

SEQ ID NO: 193447 - protein, 16 aa, Homo sapiens
  CDR3 for alpha chain variable domain of TCR clone 96724 (TRAV14/DV4, TRAJ15)
CAMREGPAQAGTALIF

SEQ ID NO: 193448 - protein, 12 aa, Homo sapiens
  CDR3 for beta chain variable domain of TCR clone 96724 (TRBV28, TRBJ2-6)
CAIQAGANGLTF

SEQ ID NO: 193449 - protein, 16 aa, Homo sapiens
  CDR3 for alpha chain variable domain of TCR clone 96725 (TRAV30, TRAJ24)
CGTEIVDAESWGKFQF

SEQ ID NO: 193450 - protein, 14 aa, Homo sapiens
  CDR3 for beta chain variable domain of TCR clone 96725 (TRBV19, TRBJ2-1)
CASPTFVLSGEQFF

SEQ ID NO: 193451 - protein, 14 aa, Homo sapiens
  CDR3 for alpha chain variable domain of TCR clone 96726 (TRAV2, TRAJ20)
CAVEDVVNDYKLGF

SEQ ID NO: 193452 - protein, 15 aa, Homo sapiens
  CDR3 for beta chain variable domain of TCR clone 96726 (TRBV6-1, TRBJ2-3)
CASSEIAHSTDTQYF

SEQ ID NO: 193453 - protein, 13 aa, Homo sapiens
  CDR3 for alpha chain variable domain of TCR clone 96727 (TRAV13-1, TRAJ9)
CAASTTGGFKTIF

SEQ ID NO: 193454 - protein, 14 aa, Homo sapiens
  CDR3 for beta chain variable domain of TCR clone 96727 (TRBV5-1, TRBJ2-3)
CASRVDGVSDTQYF

SEQ ID NO: 193455 - protein, 15 aa, Homo sapiens
  CDR3 for alpha chain variable domain of TCR clone 96728 (TRAV27, TRAJ38)
CAGRVNAGNNRKLIW

SEQ ID NO: 193456 - protein, 13 aa, Homo sapiens
  CDR3 for beta chain variable domain of TCR clone 96728 (TRBV20-1, TRBJ2-1)
TSGALPPGNEQFF

SEQ ID NO: 193457 - protein, 16 aa, Homo sapiens
  CDR3 for alpha chain variable domain of TCR clone 96729 (TRAV3, TRAJ10)
CAVRDMRAGGGNKLTF

SEQ ID NO: 193458 - protein, 13 aa, Homo sapiens
  CDR3 for beta chain variable domain of TCR clone 96729 (TRBV12-4, TRBJ1-2)
CASSSGPNYGYTF

SEQ ID NO: 193459 - protein, 13 aa, Homo sapiens
  CDR3 for alpha chain variable domain of TCR clone 96730 (TRAV12-2, TRAJ24)
CAVSTDSWGKLQF

SEQ ID NO: 193460 - protein, 12 aa, Homo sapiens
  CDR3 for beta chain variable domain of TCR clone 96730 (TRBV7-6, TRBJ2-7)
CASSLADSEQYL

SEQ ID NO: 193461 - protein, 18 aa, Homo sapiens
  CDR3 for alpha chain variable domain of TCR clone 96731 (TRAV17, TRAJ45)
CATSLDLYSGGGADGLTF

SEQ ID NO: 193462 - protein, 15 aa, Homo sapiens
  CDR3 for beta chain variable domain of TCR clone 96731 (TRBV11-2, TRBJ2-1)
CASSKNRGLMYEQFF

SEQ ID NO: 193463 - protein, 13 aa, Homo sapiens
  CDR3 for alpha chain variable domain of TCR clone 96732 (TRAV27, TRAJ45)
CRSSGGGADGLTF

SEQ ID NO: 193464 - protein, 17 aa, Homo sapiens
  CDR3 for beta chain variable domain of TCR clone 96732 (TRBV11-2, TRBJ2-1)
CASSLYPPGVEYNQQFF

SEQ ID NO: 193465 - protein, 12 aa, Homo sapiens
  CDR3 for alpha chain variable domain of TCR clone 96733 (TRAV12-2, TRAJ8)
CAVNTGFQKLVF

SEQ ID NO: 193466 - protein, 14 aa, Homo sapiens
  CDR3 for beta chain variable domain of TCR clone 96733 (TRBV19, TRBJ2-1)
CASPTFVLSGEQFF

SEQ ID NO: 193467 - protein, 16 aa, Homo sapiens
  CDR3 for alpha chain variable domain of TCR clone 96734 (TRAV12-3, TRAJ20)
CAMDKLSFGAGTTVTV

SEQ ID NO: 193468 - protein, 12 aa, Homo sapiens
  CDR3 for beta chain variable domain of TCR clone 96734 (TRBV11-2, TRBJ2-2)
CASSLGGGELFF

SEQ ID NO: 193469 - protein, 13 aa, Homo sapiens
  CDR3 for alpha chain variable domain of TCR clone 96735 (TRAV27, TRAJ41)
CAGEGNSGYALNF

SEQ ID NO: 193470 - protein, 14 aa, Homo sapiens
  CDR3 for beta chain variable domain of TCR clone 96735 (TRBV7-2, TRBJ2-5)
CASSPRGSSETQYF

SEQ ID NO: 193471 - protein, 13 aa, Homo sapiens
  CDR3 for alpha chain variable domain of TCR clone 96736 (TRAV20, TRAJ26)
CAVPTSYGQNFFF

SEQ ID NO: 193472 - protein, 16 aa, Homo sapiens
  CDR3 for beta chain variable domain of TCR clone 96736 (TRBV28, TRBJ2-7)
CASSSPQGRDVYEQYF

SEQ ID NO: 193473 - protein, 16 aa, Homo sapiens
  CDR3 for alpha chain variable domain of TCR clone 96737 (TRAV12-1, TRAJ48)
CVMNMVSNFGNEKLTF

SEQ ID NO: 193474 - protein, 18 aa, Homo sapiens
  CDR3 for beta chain variable domain of TCR clone 96737 (TRBV11-2, TRBJ2-6)
CASSLNPFLGTGANVLTF

SEQ ID NO: 193475 - protein, 14 aa, Homo sapiens
  CDR3 for alpha chain variable domain of TCR clone 96738 (TRAV13-2, TRAJ17)
CAENSKAAGNKLTF

SEQ ID NO: 193476 - protein, 14 aa, Homo sapiens
  CDR3 for beta chain variable domain of TCR clone 96738 (TRBV25-1, TRBJ1-1)
CASTHLGGNTEAFF

SEQ ID NO: 193477 - protein, 14 aa, Homo sapiens
  CDR3 for alpha chain variable domain of TCR clone 96739 (TRAV23/DV6, TRAJ11)
CAASLKSGYSTLTF

SEQ ID NO: 193478 - protein, 13 aa, Homo sapiens
  CDR3 for beta chain variable domain of TCR clone 96739 (TRBV4-1, TRBJ2-5)
CASSLTRGETQYF

SEQ ID NO: 193479 - protein, 14 aa, Homo sapiens
  CDR3 for alpha chain variable domain of TCR clone 96740 (TRAV29/DV5, TRAJ34)
CAASASRETDKLIF

SEQ ID NO: 193480 - protein, 16 aa, Homo sapiens
  CDR3 for beta chain variable domain of TCR clone 96740 (TRBV18, TRBJ2-7)
CASSPYRDGQTYEQYF

SEQ ID NO: 193481 - protein, 12 aa, Homo sapiens
  CDR3 for alpha chain variable domain of TCR clone 96741 (TRAV1-2, TRAJ11)
CAATSGYSTLTF

SEQ ID NO: 193482 - protein, 16 aa, Homo sapiens
  CDR3 for beta chain variable domain of TCR clone 96741 (TRBV28, TRBJ2-2)
CASSLEGGSNTGELFF

SEQ ID NO: 193483 - protein, 13 aa, Homo sapiens
  CDR3 for alpha chain variable domain of TCR clone 96742 (TRAV38-1, TRAJ42)
CARWGGSQGNLIF

SEQ ID NO: 193484 - protein, 17 aa, Homo sapiens
  CDR3 for beta chain variable domain of TCR clone 96742 (TRBV20-1, TRBJ2-1)
CSAIDPLAGVWDNEQFF

SEQ ID NO: 193485 - protein, 14 aa, Homo sapiens
  CDR3 for alpha chain variable domain of TCR clone 96743 (TRAV12-2, TRAJ13)
RAVKKTGGYQKVTF

SEQ ID NO: 193486 - protein, 11 aa, Homo sapiens
  CDR3 for beta chain variable domain of TCR clone 96743 (TRBV11-2, TRBJ2-2)
CASSLPGELFF

SEQ ID NO: 193487 - protein, 13 aa, Homo sapiens
  CDR3 for alpha chain variable domain of TCR clone 96744 (TRAV12-2, TRAJ3)
CCEPYSSASKIIF

SEQ ID NO: 193488 - protein, 13 aa, Homo sapiens
  CDR3 for beta chain variable domain of TCR clone 96744 (TRBV11-2, TRBJ2-1)
CASSSEASNEQFF

SEQ ID NO: 193489 - protein, 13 aa, Homo sapiens
  CDR3 for alpha chain variable domain of TCR clone 96745 (TRAV8-6, TRAJ13)
CAVRDGGYQKVTF

SEQ ID NO: 193490 - protein, 15 aa, Homo sapiens
  CDR3 for beta chain variable domain of TCR clone 96745 (TRBV7-9, TRBJ2-2)
CASRPEGTSTGELLF

SEQ ID NO: 193491 - protein, 16 aa, Homo sapiens
  CDR3 for alpha chain variable domain of TCR clone 96746 (TRAV35, TRAJ28)
CAGQKYYGAGSYQLTF

SEQ ID NO: 193492 - protein, 13 aa, Homo sapiens
  CDR3 for beta chain variable domain of TCR clone 96746 (TRBV19, TRBJ1-2)
CASSQGQVYGYTF

SEQ ID NO: 193493 - protein, 15 aa, Homo sapiens
  CDR3 for alpha chain variable domain of TCR clone 96747 (TRAV23/DV6, TRAJ18)
CAARYRGPTLGRLYF

SEQ ID NO: 193494 - protein, 15 aa, Homo sapiens
  CDR3 for beta chain variable domain of TCR clone 96747 (TRBV9, TRBJ1-6)
CASSVAGTGDSPLHF

SEQ ID NO: 193495 - protein, 16 aa, Homo sapiens
  CDR3 for alpha chain variable domain of TCR clone 96748 (TRAV35, TRAJ42)
GRMERYYGGSQGNIIF

SEQ ID NO: 193496 - protein, 15 aa, Homo sapiens
  CDR3 for beta chain variable domain of TCR clone 96748 (TRBV6-1, TRBJ2-7)
CASSDWDKPNYEQYF

SEQ ID NO: 193497 - protein, 14 aa, Homo sapiens
  CDR3 for alpha chain variable domain of TCR clone 96749 (TRAV12-3, TRAJ12)
CAMSEVDSSYKLIF

SEQ ID NO: 193498 - protein, 12 aa, Homo sapiens
  CDR3 for beta chain variable domain of TCR clone 96749 (TRBV18, TRBJ1-4)
CASSPSREKLFV

SEQ ID NO: 193499 - protein, 21 aa, Homo sapiens
  CDR3 for alpha chain variable domain of TCR clone 96750 (TRAV12-1, TRAJ37)
CVVNGGLWQHRQTNLWARDNF

SEQ ID NO: 193500 - protein, 12 aa, Homo sapiens
  CDR3 for beta chain variable domain of TCR clone 96750 (TRBV20-1, TRBJ1-2)
CSAPGFNYGYSF

SEQ ID NO: 193501 - protein, 15 aa, Homo sapiens
  CDR3 for alpha chain variable domain of TCR clone 96751 (TRAV20, TRAJ23)
CAVQAVRNQGGKLIF

SEQ ID NO: 193502 - protein, 15 aa, Homo sapiens
  CDR3 for beta chain variable domain of TCR clone 96751 (TRBV6-6, TRBJ2-7)
CASSYSYGGSYEQYF

SEQ ID NO: 193503 - protein, 14 aa, Homo sapiens
  CDR3 for alpha chain variable domain of TCR clone 96752 (TRAV16, TRAJ37)
CALDISGNTGKLIF

SEQ ID NO: 193504 - protein, 12 aa, Homo sapiens
  CDR3 for beta chain variable domain of TCR clone 96752 (TRBV7-8, TRBJ2-7)
CASSLGDREQYF

SEQ ID NO: 193505 - protein, 16 aa, Homo sapiens
  CDR3 for alpha chain variable domain of TCR clone 96753 (TRAV22, TRAJ45)
CAVERGKRGGADGLTF

SEQ ID NO: 193506 - protein, 15 aa, Homo sapiens
  CDR3 for beta chain variable domain of TCR clone 96753 (TRBV7-3, TRBJ2-1)
CASSPTGGSRNEQFF

SEQ ID NO: 193507 - protein, 13 aa, Homo sapiens
  CDR3 for alpha chain variable domain of TCR clone 96754 (TRAV23/DV6, TRAJ16)
CAARISDGQKLLF

SEQ ID NO: 193508 - protein, 15 aa, Homo sapiens
  CDR3 for beta chain variable domain of TCR clone 96754 (TRBV2, TRBJ2-2)
CASSRETVGTGELFF

SEQ ID NO: 193509 - protein, 13 aa, Homo sapiens
  CDR3 for alpha chain variable domain of TCR clone 96755 (TRAV3, TRAJ3)
CAVADSSASNIIF

SEQ ID NO: 193510 - protein, 16 aa, Homo sapiens
  CDR3 for beta chain variable domain of TCR clone 96755 (TRBV5-1, TRBJ2-3)
CASSLGLAVYTDTQYF

SEQ ID NO: 193511 - protein, 13 aa, Homo sapiens
  CDR3 for alpha chain variable domain of TCR clone 96756 (TRAV8-6, TRAJ13)
CAVSSGGYQKVTF

SEQ ID NO: 193512 - protein, 16 aa, Homo sapiens
  CDR3 for beta chain variable domain of TCR clone 96756 (TRBV24-1, TRBJ2-3)
CATSDPGTGATDTQYF

SEQ ID NO: 193513 - protein, 17 aa, Homo sapiens
  CDR3 for alpha chain variable domain of TCR clone 96757 (TRAV26-1, TRAJ11)
CIVRVGQSNSGYGTLTF

SEQ ID NO: 193514 - protein, 15 aa, Homo sapiens
  CDR3 for beta chain variable domain of TCR clone 96757 (TRBV27, TRBJ2-5)
CASSLIPSGGETQYF

SEQ ID NO: 193515 - protein, 15 aa, Homo sapiens
  CDR3 for alpha chain variable domain of TCR clone 96758 (TRAV2, TRAJ9)
CAVEDRGTGGFKTIF

SEQ ID NO: 193516 - protein, 15 aa, Homo sapiens
  CDR3 for beta chain variable domain of TCR clone 96758 (TRBV20-1, TRBJ2-1)
CSARSPGGPGNEQFF

SEQ ID NO: 193517 - protein, 16 aa, Homo sapiens
  CDR3 for alpha chain variable domain of TCR clone 96759 (TRAV8-3, TRAJ44)
CAVGASNTGTASKLTF

SEQ ID NO: 193518 - protein, 15 aa, Homo sapiens
  CDR3 for beta chain variable domain of TCR clone 96759 (TRBV27, TRBJ1-5)
CASTFNRGSNQLQHF

SEQ ID NO: 193519 - protein, 15 aa, Homo sapiens
  CDR3 for alpha chain variable domain of TCR clone 96760 (TRAV26-1, TRAJ44)
CIVRANTGTASKLTF

SEQ ID NO: 193520 - protein, 14 aa, Homo sapiens
  CDR3 for beta chain variable domain of TCR clone 96760 (TRBV4-1, TRBJ2-2)
CASSQAVNTGELFF

SEQ ID NO: 193521 - protein, 13 aa, Homo sapiens
  CDR3 for alpha chain variable domain of TCR clone 96761 (TRAV12-1, TRAJ16)
CVVNGPDGQKLLF

SEQ ID NO: 193522 - protein, 13 aa, Homo sapiens
  CDR3 for beta chain variable domain of TCR clone 96761 (TRBV2, TRBJ1-1)
RARNPTGGFHAFF

SEQ ID NO: 193523 - protein, 13 aa, Homo sapiens
  CDR3 for alpha chain variable domain of TCR clone 96762 (TRAV8-3, TRAJ28)
CAVGAVGTYQLTF

SEQ ID NO: 193524 - protein, 15 aa, Homo sapiens
  CDR3 for beta chain variable domain of TCR clone 96762 (TRBV7-9, TRBJ1-5)
CASSQGHQPNQPQHF

SEQ ID NO: 193525 - protein, 13 aa, Homo sapiens
  CDR3 for alpha chain variable domain of TCR clone 96763 (TRAV26-1, TRAJ15)
CIADNAGNNRKLI

SEQ ID NO: 193526 - protein, 16 aa, Homo sapiens
  CDR3 for beta chain variable domain of TCR clone 96763 (TRBV5-1, TRBJ1-1)
CASSSGGNSLNTEAFF

SEQ ID NO: 193527 - protein, 13 aa, Homo sapiens
  CDR3 for alpha chain variable domain of TCR clone 96764 (TRAV23/DV6, TRAJ9)
CAASIDCKGLVIL

SEQ ID NO: 193528 - protein, 15 aa, Homo sapiens
  CDR3 for beta chain variable domain of TCR clone 96764 (TRBV6-3, TRBJ2-1)
CASSYASDSYNEQFF

SEQ ID NO: 193529 - protein, 12 aa, Homo sapiens
  CDR3 for alpha chain variable domain of TCR clone 96765 (TRAV35, TRAJ30)
CAGLNRDDKIIF

SEQ ID NO: 193530 - protein, 20 aa, Homo sapiens
  CDR3 for beta chain variable domain of TCR clone 96765 (TRBV7-8, TRBJ2-2)
SASSHLFPGPTIHITGELFF

SEQ ID NO: 193531 - protein, 18 aa, Homo sapiens
  CDR3 for alpha chain variable domain of TCR clone 96766 (TRAV12-3, TRAJ52)
CAMSVGGAGGTSYGKLTF

SEQ ID NO: 193532 - protein, 15 aa, Homo sapiens
  CDR3 for beta chain variable domain of TCR clone 96766 (TRBV27, TRBJ1-6)
CASSFDMGLGSPLHF

SEQ ID NO: 193533 - protein, 12 aa, Homo sapiens
  CDR3 for alpha chain variable domain of TCR clone 96767 (TRAV2, TRAJ9)
CAVGAGGFKTIF

SEQ ID NO: 193534 - protein, 16 aa, Homo sapiens
  CDR3 for beta chain variable domain of TCR clone 96767 (TRBV13, TRBJ2-2)
CASSPRTGEDTGELFF

SEQ ID NO: 193535 - protein, 19 aa, Homo sapiens
  CDR3 for alpha chain variable domain of TCR clone 96768 (TRAV2, TRAJ20)
ILQVREADAAVYRDCKLSF

SEQ ID NO: 193536 - protein, 13 aa, Homo sapiens
  CDR3 for beta chain variable domain of TCR clone 96768 (TRBV15, TRBJ1-6)
CATSGGLNSPLHC

SEQ ID NO: 193537 - protein, 14 aa, Homo sapiens
  CDR3 for alpha chain variable domain of TCR clone 96769 (TRAV38-1, TRAJ45)
CAYYSGGGADGLTF

SEQ ID NO: 193538 - protein, 20 aa, Homo sapiens
  CDR3 for beta chain variable domain of TCR clone 96769 (TRBV28, TRBJ2-1)
CASTPIGRSPGLAGGNDQFF

SEQ ID NO: 193539 - protein, 15 aa, Homo sapiens
  CDR3 for alpha chain variable domain of TCR clone 96770 (TRAV26-1, TRAJ44)
CIVRANTGTASKLTL

SEQ ID NO: 193540 - protein, 16 aa, Homo sapiens
  CDR3 for beta chain variable domain of TCR clone 96770 (TRBV7-7, TRBJ2-1)
CASSLASGTSYNEQFF

SEQ ID NO: 193541 - protein, 15 aa, Homo sapiens
  CDR3 for alpha chain variable domain of TCR clone 96771 (TRAV3, TRAJ22)
CAVRDRGGSARQLTF

SEQ ID NO: 193542 - protein, 15 aa, Homo sapiens
  CDR3 for beta chain variable domain of TCR clone 96771 (TRBV4-1, TRBJ2-5)
CASSQWDLYQETQYF

SEQ ID NO: 193543 - protein, 11 aa, Homo sapiens
  CDR3 for alpha chain variable domain of TCR clone 96772 (TRAV3, TRAJ17)
PRGAAGNKITF

SEQ ID NO: 193544 - protein, 16 aa, Homo sapiens
  CDR3 for beta chain variable domain of TCR clone 96772 (TRBV7-6, TRBJ2-1)
CASSAPGPSSYNEQFF

SEQ ID NO: 193545 - protein, 15 aa, Homo sapiens
  CDR3 for alpha chain variable domain of TCR clone 96773 (TRAV8-3, TRAJ27)
CAVGPSKTNAGKSTF

SEQ ID NO: 193546 - protein, 15 aa, Homo sapiens
  CDR3 for beta chain variable domain of TCR clone 96773 (TRBV7-2, TRBJ2-1)
YASSSGLAGGNEQFF

SEQ ID NO: 193547 - protein, 16 aa, Homo sapiens
  CDR3 for alpha chain variable domain of TCR clone 96774 (TRAV30, TRAJ24)
CGTEIVDADSWGKFQF

SEQ ID NO: 193548 - protein, 16 aa, Homo sapiens
  CDR3 for beta chain variable domain of TCR clone 96774 (TRBV13, TRBJ2-2)
CASSPRTGEHTVELFF

SEQ ID NO: 193549 - protein, 14 aa, Homo sapiens
  CDR3 for alpha chain variable domain of TCR clone 96775 (TRAV23/DV6, TRAJ4)
CAANLSGGYNKLNF

SEQ ID NO: 193550 - protein, 11 aa, Homo sapiens
  CDR3 for beta chain variable domain of TCR clone 96775 (TRBV7-9, TRBJ2-3)
CASSPTDTQYF

SEQ ID NO: 193551 - protein, 14 aa, Homo sapiens
  CDR3 for alpha chain variable domain of TCR clone 96776 (TRAV1-2, TRAJ16)
CAVNRFSDGQKLLF

SEQ ID NO: 193552 - protein, 15 aa, Homo sapiens
  CDR3 for beta chain variable domain of TCR clone 96776 (TRBV7-2, TRBJ2-3)
CASSPRGLSTDTQYF

SEQ ID NO: 193553 - protein, 14 aa, Homo sapiens
  CDR3 for alpha chain variable domain of TCR clone 96777 (TRAV29/DV5, TRAJ36)
CAARRKTGANNLFF

SEQ ID NO: 193554 - protein, 15 aa, Homo sapiens
  CDR3 for beta chain variable domain of TCR clone 96777 (TRBV9, TRBJ1-6)
CASSVAGTGDSTLHF

SEQ ID NO: 193555 - protein, 13 aa, Homo sapiens
  CDR3 for alpha chain variable domain of TCR clone 96778 (TRAV13-1, TRAJ21)
CAASIYNFNKFYF

SEQ ID NO: 193556 - protein, 11 aa, Homo sapiens
  CDR3 for beta chain variable domain of TCR clone 96778 (TRBV10-3, TRBJ2-7)
CAISEGLEQYF

SEQ ID NO: 193557 - protein, 13 aa, Homo sapiens
  CDR3 for alpha chain variable domain of TCR clone 96779 (TRAV3, TRAJ27)
CAVRPLGAGKSTF

SEQ ID NO: 193558 - protein, 13 aa, Homo sapiens
  CDR3 for beta chain variable domain of TCR clone 96779 (TRBV7-9, TRBJ2-3)
WASSPGSTDTQYF

SEQ ID NO: 193559 - protein, 10 aa, Homo sapiens
  CDR3 for alpha chain variable domain of TCR clone 96780 (TRAV17, TRAJ36)
CATVAGNLFL

SEQ ID NO: 193560 - protein, 12 aa, Homo sapiens
  CDR3 for beta chain variable domain of TCR clone 96780 (TRBV11-2, TRBJ2-4)
CASSSASGSEYF

SEQ ID NO: 193561 - protein, 11 aa, Homo sapiens
  CDR3 for alpha chain variable domain of TCR clone 96781 (TRAV2, TRAJ20)
CAVEYDYKLSF

SEQ ID NO: 193562 - protein, 16 aa, Homo sapiens
  CDR3 for beta chain variable domain of TCR clone 96781 (TRBV12-4, TRBJ2-1)
CASSAVGQGNGDEQFF

SEQ ID NO: 193563 - protein, 15 aa, Homo sapiens
  CDR3 for alpha chain variable domain of TCR clone 96782 (TRAV8-3, TRAJ40)
CAAPSLGSGTYKYIF

SEQ ID NO: 193564 - protein, 13 aa, Homo sapiens
  CDR3 for beta chain variable domain of TCR clone 96782 (TRBV7-2, TRBJ1-5)
CASSTQGSQPQHF

SEQ ID NO: 193565 - protein, 14 aa, Homo sapiens
  CDR3 for alpha chain variable domain of TCR clone 96783 (TRAV1-2, TRAJ8)
CAVREDTGFQKLVF

SEQ ID NO: 193566 - protein, 14 aa, Homo sapiens
  CDR3 for beta chain variable domain of TCR clone 96783 (TRBV4-1, TRBJ2-7)
CASSPVAGGDEQYL

SEQ ID NO: 193567 - protein, 18 aa, Homo sapiens
  CDR3 for alpha chain variable domain of TCR clone 96784 (TRAV13-1, TRAJ52)
CAAKNPNAGGTSYGKLTF

SEQ ID NO: 193568 - protein, 13 aa, Homo sapiens
  CDR3 for beta chain variable domain of TCR clone 96784 (TRBV15, TRBJ2-7)
CATSTTGHYEQYF

SEQ ID NO: 193569 - protein, 11 aa, Homo sapiens
  CDR3 for alpha chain variable domain of TCR clone 96785 (TRAV3, TRAJ21)
CAVGNFNKLYF

SEQ ID NO: 193570 - protein, 17 aa, Homo sapiens
  CDR3 for beta chain variable domain of TCR clone 96785 (TRBV24-1, TRBJ2-1)
CATSVVSTSGTYNEQFF

SEQ ID NO: 193571 - protein, 14 aa, Homo sapiens
  CDR3 for alpha chain variable domain of TCR clone 96786 (TRAV17, TRAJ6)
CATDASGGSYIHTF

SEQ ID NO: 193572 - protein, 19 aa, Homo sapiens
  CDR3 for beta chain variable domain of TCR clone 96786 (TRBV4-3, TRBJ2-7)
CASSQEFIGWQVTPYEQYF

SEQ ID NO: 193573 - protein, 13 aa, Homo sapiens
  CDR3 for alpha chain variable domain of TCR clone 96787 (TRAV23/DV6, TRAJ20)
CAAGGFHDYKLSF

SEQ ID NO: 193574 - protein, 14 aa, Homo sapiens
  CDR3 for beta chain variable domain of TCR clone 96787 (TRBV12-4, TRBJ1-3)
CASTLTGAGNTIYF

SEQ ID NO: 193575 - protein, 14 aa, Homo sapiens
  CDR3 for alpha chain variable domain of TCR clone 96788 (TRAV23/DV6, TRAJ4)
CAAPSSGGYNKLIF

SEQ ID NO: 193576 - protein, 16 aa, Homo sapiens
  CDR3 for beta chain variable domain of TCR clone 96788 (TRBV19, TRBJ1-1)
CASRFGGHVTGTEAFF

SEQ ID NO: 193577 - protein, 14 aa, Homo sapiens
  CDR3 for alpha chain variable domain of TCR clone 96789 (TRAV2, TRAJ9)
CAVEDRRGGFKTIF

SEQ ID NO: 193578 - protein, 18 aa, Homo sapiens
  CDR3 for beta chain variable domain of TCR clone 96789 (TRBV11-2, TRBJ2-3)
CASSLGGASRGAPNAQYF

SEQ ID NO: 193579 - protein, 12 aa, Homo sapiens
  CDR3 for alpha chain variable domain of TCR clone 96790 (TRAV12-2, TRAJ44)
CADTGTASKLTF

SEQ ID NO: 193580 - protein, 17 aa, Homo sapiens
  CDR3 for beta chain variable domain of TCR clone 96790 (TRBV20-1, TRBJ1-1)
CSARGTGGSDGNTGAFF

SEQ ID NO: 193581 - protein, 14 aa, Homo sapiens
  CDR3 for alpha chain variable domain of TCR clone 96791 (TRAV12-1, TRAJ3)
CVVILYSSASKIIF

SEQ ID NO: 193582 - protein, 13 aa, Homo sapiens
  CDR3 for beta chain variable domain of TCR clone 96791 (TRBV4-2, TRBJ1-1)
CASSQAGNTEAFF

SEQ ID NO: 193583 - protein, 15 aa, Homo sapiens
  CDR3 for alpha chain variable domain of TCR clone 96792 (TRAV17, TRAJ13)
CATDAGSGGYQKVTF

SEQ ID NO: 193584 - protein, 17 aa, Homo sapiens
  CDR3 for beta chain variable domain of TCR clone 96792 (TRBV11-2, TRBJ2-1)
CASSLYPTGVEYNEQFF

SEQ ID NO: 193585 - protein, 14 aa, Homo sapiens
  CDR3 for alpha chain variable domain of TCR clone 96793 (TRAV26-1, TRAJ45)
CIEVTGGGADGLTF

SEQ ID NO: 193586 - protein, 12 aa, Homo sapiens
  CDR3 for beta chain variable domain of TCR clone 96793 (TRBV19, TRBJ1-4)
CASSNSLEKLFF

SEQ ID NO: 193587 - protein, 14 aa, Homo sapiens
  CDR3 for alpha chain variable domain of TCR clone 96794 (TRAV3, TRAJ21)
CAVRDAYNFNKFYF

SEQ ID NO: 193588 - protein, 17 aa, Homo sapiens
  CDR3 for beta chain variable domain of TCR clone 96794 (TRBV20-1, TRBJ1-6)
CSARGGYTFSYNSTLHF

SEQ ID NO: 193589 - protein, 16 aa, Homo sapiens
  CDR3 for alpha chain variable domain of TCR clone 96795 (TRAV13-1, TRAJ48)
CAASIFGNFGNAKLTF

SEQ ID NO: 193590 - protein, 14 aa, Homo sapiens
  CDR3 for beta chain variable domain of TCR clone 96795 (TRBV7-3, TRBJ1-1)
CASSLKGGNTEAFF

SEQ ID NO: 193591 - protein, 14 aa, Homo sapiens
  CDR3 for alpha chain variable domain of TCR clone 96796 (TRAV13-1, TRAJ31)
CTQRQTHVWRWNSA

SEQ ID NO: 193592 - protein, 12 aa, Homo sapiens
  CDR3 for beta chain variable domain of TCR clone 96796 (TRBV7-9, TRBJ2-7)
CASSLEGYEQYF

SEQ ID NO: 193593 - protein, 14 aa, Homo sapiens
  CDR3 for alpha chain variable domain of TCR clone 96797 (TRAV26-1, TRAJ38)
CIADNAGNNRKLIW

SEQ ID NO: 193594 - protein, 13 aa, Homo sapiens
  CDR3 for beta chain variable domain of TCR clone 96797 (TRBV20-1, TRBJ2-5)
CSAREAFQETQYF

SEQ ID NO: 193595 - protein, 13 aa, Homo sapiens
  CDR3 for alpha chain variable domain of TCR clone 96798 (TRAV12-3, TRAJ13)
CAMSSGGYQKVTF

SEQ ID NO: 193596 - protein, 14 aa, Homo sapiens
  CDR3 for beta chain variable domain of TCR clone 96798 (TRBV18, TRBJ2-7)
CASSPRGGAYEQYF

SEQ ID NO: 193597 - protein, 14 aa, Homo sapiens
  CDR3 for alpha chain variable domain of TCR clone 96799 (TRAV12-1, TRAJ37)
CVVTGSSNTGKLIF

SEQ ID NO: 193598 - protein, 22 aa, Homo sapiens
  CDR3 for beta chain variable domain of TCR clone 96799 (TRBV23-1, TRBJ2-5)
CASSPCARPPHSRDPVLRARHA

SEQ ID NO: 193599 - protein, 11 aa, Homo sapiens
  CDR3 for alpha chain variable domain of TCR clone 96800 (TRAV2, TRAJ13)
FASGGYQKVTF

SEQ ID NO: 193600 - protein, 16 aa, Homo sapiens
  CDR3 for beta chain variable domain of TCR clone 96800 (TRBV6-1, TRBJ2-5)
CASSETLDRGAETQYF

SEQ ID NO: 193601 - protein, 14 aa, Homo sapiens
  CDR3 for alpha chain variable domain of TCR clone 96801 (TRAV12-2, TRAJ40)
CAVKIPSGTYKYIF

SEQ ID NO: 193602 - protein, 17 aa, Homo sapiens
  CDR3 for beta chain variable domain of TCR clone 96801 (TRBV19, TRBJ1-5)
CASSRDRILSRFQPQHF

SEQ ID NO: 193603 - protein, 13 aa, Homo sapiens
  CDR3 for alpha chain variable domain of TCR clone 96802 (TRAV29/DV5, TRAJ31)
CAASRNNNARLMF

SEQ ID NO: 193604 - protein, 13 aa, Homo sapiens
  CDR3 for beta chain variable domain of TCR clone 96802 (TRBV13, TRBJ2-5)
CASSPEVGETQYF

SEQ ID NO: 193605 - protein, 13 aa, Homo sapiens
  CDR3 for alpha chain variable domain of TCR clone 96803 (TRAV3, TRAJ21)
CAVREPDFNKFYF

SEQ ID NO: 193606 - protein, 16 aa, Homo sapiens
  CDR3 for beta chain variable domain of TCR clone 96803 (TRBV6-1, TRBJ2-5)
CASSETLDRGAETQYF

SEQ ID NO: 193607 - protein, 17 aa, Homo sapiens
  CDR3 for alpha chain variable domain of TCR clone 96804 (TRAV3, TRAJ6)
CAVRDGPRAGGSYIPTF

SEQ ID NO: 193608 - protein, 14 aa, Homo sapiens
  CDR3 for beta chain variable domain of TCR clone 96804 (TRBV6-1, TRBJ1-3)
CASVQGGGGNTIYF

SEQ ID NO: 193609 - protein, 15 aa, Homo sapiens
  CDR3 for alpha chain variable domain of TCR clone 96805 (TRAV35, TRAJ57)
CAGRAPKGGSEKLVF

SEQ ID NO: 193610 - protein, 17 aa, Homo sapiens
  CDR3 for beta chain variable domain of TCR clone 96805 (TRBV18, TRBJ2-1)
CASSKGLSGGADNEQFF

SEQ ID NO: 193611 - protein, 14 aa, Homo sapiens
  CDR3 for alpha chain variable domain of TCR clone 96806 (TRAV17, TRAJ5)
CATVDLTGRRALTF

SEQ ID NO: 193612 - protein, 14 aa, Homo sapiens
  CDR3 for beta chain variable domain of TCR clone 96806 (TRBV28, TRBJ2-7)
CASSPYGMAYEQYF

SEQ ID NO: 193613 - protein, 10 aa, Homo sapiens
  CDR3 for alpha chain variable domain of TCR clone 96807 (TRAV12-1, TRAJ26)
YLYYGQNFVF

SEQ ID NO: 193614 - protein, 15 aa, Homo sapiens
  CDR3 for beta chain variable domain of TCR clone 96807 (TRBV5-1, TRBJ2-6)
CASSLDPSGANVLTF

SEQ ID NO: 193615 - protein, 13 aa, Homo sapiens
  CDR3 for alpha chain variable domain of TCR clone 96808 (TRAV13-1, TRAJ5)
CAARVTGRRALTF

SEQ ID NO: 193616 - protein, 15 aa, Homo sapiens
  CDR3 for beta chain variable domain of TCR clone 96808 (TRBV7-9, TRBJ2-7)
CASRPGGGLTYEQYF

SEQ ID NO: 193617 - protein, 14 aa, Homo sapiens
  CDR3 for alpha chain variable domain of TCR clone 96809 (TRAV21, TRAJ40)
CAVKIPSGTYKYIF

SEQ ID NO: 193618 - protein, 13 aa, Homo sapiens
  CDR3 for beta chain variable domain of TCR clone 96809 (TRBV7-9, TRBJ1-2)
CASSLKKNYGYTF

SEQ ID NO: 193619 - protein, 12 aa, Homo sapiens
  CDR3 for alpha chain variable domain of TCR clone 96810 (TRAV12-2, TRAJ42)
CAVGGSQGNLIF

SEQ ID NO: 193620 - protein, 15 aa, Homo sapiens
  CDR3 for beta chain variable domain of TCR clone 96810 (TRBV9, TRBJ1-6)
CASSVAGTGDSPLLF

SEQ ID NO: 193621 - protein, 14 aa, Homo sapiens
  CDR3 for alpha chain variable domain of TCR clone 96811 (TRAV12-2, TRAJ13)
CAVKKTGGYQKVTF

SEQ ID NO: 193622 - protein, 15 aa, Homo sapiens
  CDR3 for beta chain variable domain of TCR clone 96811 (TRBV27, TRBJ2-1)
CASTNGGGSSNEQFF

SEQ ID NO: 193623 - protein, 12 aa, Homo sapiens
  CDR3 for alpha chain variable domain of TCR clone 96812 (TRAV17, TRAJ28)
WDSGAGSYQLTF

SEQ ID NO: 193624 - protein, 13 aa, Homo sapiens
  CDR3 for beta chain variable domain of TCR clone 96812 (TRBV11-3, TRBJ1-1)
CASSRQPNTEAVF

SEQ ID NO: 193625 - protein, 10 aa, Homo sapiens
  CDR3 for alpha chain variable domain of TCR clone 96813 (TRAV36/DV7, TRAJ49)
CALTGNQFYF

SEQ ID NO: 193626 - protein, 15 aa, Homo sapiens
  CDR3 for beta chain variable domain of TCR clone 96813 (TRBV7-8, TRBJ2-2)
CASSLDQGWAGELFF

SEQ ID NO: 193627 - protein, 16 aa, Homo sapiens
  CDR3 for alpha chain variable domain of TCR clone 96814 (TRAV1-2, TRAJ10)
CAVRGVLTGGGNKLTF

SEQ ID NO: 193628 - protein, 16 aa, Homo sapiens
  CDR3 for beta chain variable domain of TCR clone 96814 (TRBV28, TRBJ2-7)
CASSLFFETGGPEQYF

SEQ ID NO: 193629 - protein, 12 aa, Homo sapiens
  CDR3 for alpha chain variable domain of TCR clone 96815 (TRAV12-3, TRAJ17)
CAMTLTGNKLTF

SEQ ID NO: 193630 - protein, 17 aa, Homo sapiens
  CDR3 for beta chain variable domain of TCR clone 96815 (TRBV11-2, TRBJ2-1)
CASGLYPPGVEYNEQFF

SEQ ID NO: 193631 - protein, 15 aa, Homo sapiens
  CDR3 for alpha chain variable domain of TCR clone 96816 (TRAV16, TRAJ48)
CALFISNFGNEKLTF

SEQ ID NO: 193632 - protein, 16 aa, Homo sapiens
  CDR3 for beta chain variable domain of TCR clone 96816 (TRBV9, TRBJ2-1)
CASSVGGGGNYNEQFF

SEQ ID NO: 193633 - protein, 14 aa, Homo sapiens
  CDR3 for alpha chain variable domain of TCR clone 96817 (TRAV20, TRAJ29)
CAVQAWVGNTPLVF

SEQ ID NO: 193634 - protein, 15 aa, Homo sapiens
  CDR3 for beta chain variable domain of TCR clone 96817 (TRBV29-1, TRBJ2-7)
CSFEFFDRGSYEQYF

SEQ ID NO: 193635 - protein, 13 aa, Homo sapiens
  CDR3 for alpha chain variable domain of TCR clone 96818 (TRAV3, TRAJ15)
CAVRDQAGTALIF

SEQ ID NO: 193636 - protein, 14 aa, Homo sapiens
  CDR3 for beta chain variable domain of TCR clone 96818 (TRBV18, TRBJ1-5)
CASSPGNSNQPQHF

SEQ ID NO: 193637 - protein, 15 aa, Homo sapiens
  CDR3 for alpha chain variable domain of TCR clone 96819 (TRAV17, TRAJ56)
CATDANTGANSKLTF

SEQ ID NO: 193638 - protein, 14 aa, Homo sapiens
  CDR3 for beta chain variable domain of TCR clone 96819 (TRBV7-9, TRBJ2-1)
CASSPRDSLYEQFF

SEQ ID NO: 193639 - protein, 12 aa, Homo sapiens
  CDR3 for alpha chain variable domain of TCR clone 96820 (TRAV12-2, TRAJ31)
CAVNTPDARLMF

SEQ ID NO: 193640 - protein, 17 aa, Homo sapiens
  CDR3 for beta chain variable domain of TCR clone 96820 (TRBV20-1, TRBJ1-6)
CSARGGYTVSYNSPLHF

SEQ ID NO: 193641 - protein, 16 aa, Homo sapiens
  CDR3 for alpha chain variable domain of TCR clone 96821 (TRAV12-3, TRAJ53)
CAISPGSGGSNYKLTF

SEQ ID NO: 193642 - protein, 13 aa, Homo sapiens
  CDR3 for beta chain variable domain of TCR clone 96821 (TRBV10-3, TRBJ2-7)
CASKLAVNYEQYF

SEQ ID NO: 193643 - protein, 11 aa, Homo sapiens
  CDR3 for alpha chain variable domain of TCR clone 96822 (TRAV13-1, TRAJ20)
CAASKNYKLSF

SEQ ID NO: 193644 - protein, 16 aa, Homo sapiens
  CDR3 for beta chain variable domain of TCR clone 96822 (TRBV20-1, TRBJ1-4)
CSAPGQGLLTNETLFF

SEQ ID NO: 193645 - protein, 12 aa, Homo sapiens
  CDR3 for alpha chain variable domain of TCR clone 96823 (TRAV12-3, TRAJ17)
CAMTLTGNKLTF

SEQ ID NO: 193646 - protein, 17 aa, Homo sapiens
  CDR3 for beta chain variable domain of TCR clone 96823 (TRBV4-1, TRBJ2-3)
CASSQGYVSGGTDTQYF

SEQ ID NO: 193647 - protein, 15 aa, Homo sapiens
  CDR3 for alpha chain variable domain of TCR clone 96824 (TRAV8-3, TRAJ45)
CASSYSGGGADGLTF

SEQ ID NO: 193648 - protein, 13 aa, Homo sapiens
  CDR3 for beta chain variable domain of TCR clone 96824 (TRBV6-1, TRBJ1-1)
CAGSRQGNTEAFF

SEQ ID NO: 193649 - protein, 14 aa, Homo sapiens
  CDR3 for alpha chain variable domain of TCR clone 96825 (TRAV12-3, TRAJ10)
SHLPLTGGGNKLTF

SEQ ID NO: 193650 - protein, 14 aa, Homo sapiens
  CDR3 for beta chain variable domain of TCR clone 96825 (TRBV7-8, TRBJ2-3)
CASSSRDSTDTQYF

SEQ ID NO: 193651 - protein, 14 aa, Homo sapiens
  CDR3 for alpha chain variable domain of TCR clone 96826 (TRAV12-2, TRAJ17)
CAVLFKAAGNKLTF

SEQ ID NO: 193652 - protein, 17 aa, Homo sapiens
  CDR3 for beta chain variable domain of TCR clone 96826 (TRBV20-1, TRBJ2-1)
CSASSSGLAGSYNEQFF

SEQ ID NO: 193653 - protein, 13 aa, Homo sapiens
  CDR3 for alpha chain variable domain of TCR clone 96827 (TRAV2, TRAJ9)
CAVESTGGFKTNF

SEQ ID NO: 193654 - protein, 15 aa, Homo sapiens
  CDR3 for beta chain variable domain of TCR clone 96827 (TRBV10-3, TRBJ2-1)
CAITFGGGTDNEQFF

SEQ ID NO: 193655 - protein, 14 aa, Homo sapiens
  CDR3 for alpha chain variable domain of TCR clone 96828 (TRAV9-2, TRAJ39)
CALYIYNAGNMPTF

SEQ ID NO: 193656 - protein, 15 aa, Homo sapiens
  CDR3 for beta chain variable domain of TCR clone 96828 (TRBV20-1, TRBJ1-5)
CSAREGGYSNQPQHF

SEQ ID NO: 193657 - protein, 14 aa, Homo sapiens
  CDR3 for alpha chain variable domain of TCR clone 96829 (TRAV1-2, TRAJ8)
CAVRDDTGFQKLVF

SEQ ID NO: 193658 - protein, 16 aa, Homo sapiens
  CDR3 for beta chain variable domain of TCR clone 96829 (TRBV5-1, TRBJ2-2)
CASSLWDTTNTGELFF

SEQ ID NO: 193659 - protein, 20 aa, Homo sapiens
  CDR3 for alpha chain variable domain of TCR clone 96830 (TRAV12-3, TRAJ41)
SLFIRDSQPSDSATPEALNF

SEQ ID NO: 193660 - protein, 15 aa, Homo sapiens
  CDR3 for beta chain variable domain of TCR clone 96830 (TRBV20-1, TRBJ2-7)
CSARDRVSGMDEQYF

SEQ ID NO: 193661 - protein, 14 aa, Homo sapiens
  CDR3 for alpha chain variable domain of TCR clone 96831 (TRAV12-2, TRAJ23)
CAVGGYNQGGKLIL

SEQ ID NO: 193662 - protein, 15 aa, Homo sapiens
  CDR3 for beta chain variable domain of TCR clone 96831 (TRBV20-1, TRBJ2-3)
CSASSGGPRTDTQYF

SEQ ID NO: 193663 - protein, 14 aa, Homo sapiens
  CDR3 for alpha chain variable domain of TCR clone 96832 (TRAV17, TRAJ57)
CATDPQGGSEKLVF

SEQ ID NO: 193664 - protein, 14 aa, Homo sapiens
  CDR3 for beta chain variable domain of TCR clone 96832 (TRBV18, TRBJ2-3)
CASSRDRGTDTQYF

SEQ ID NO: 193665 - protein, 15 aa, Homo sapiens
  CDR3 for alpha chain variable domain of TCR clone 96833 (TRAV2, TRAJ15)
CAVEDREQAGTALSF

SEQ ID NO: 193666 - protein, 13 aa, Homo sapiens
  CDR3 for beta chain variable domain of TCR clone 96833 (TRBV10-2, TRBJ2-3)
CASSESGDHTQYF

SEQ ID NO: 193667 - protein, 14 aa, Homo sapiens
  CDR3 for alpha chain variable domain of TCR clone 96834 (TRAV21, TRAJ35)
CAVMPIGFGNVLHC

SEQ ID NO: 193668 - protein, 15 aa, Homo sapiens
  CDR3 for beta chain variable domain of TCR clone 96834 (TRBV2, TRBJ2-1)
CATQARLVMIGEQFF

SEQ ID NO: 193669 - protein, 15 aa, Homo sapiens
  CDR3 for alpha chain variable domain of TCR clone 96835 (TRAV13-1, TRAJ11)
CAASNRDSGYSTLTF

SEQ ID NO: 193670 - protein, 11 aa, Homo sapiens
  CDR3 for beta chain variable domain of TCR clone 96835 (TRBV20-1, TRBJ2-7)
CSARLSYEQYF

SEQ ID NO: 193671 - protein, 14 aa, Homo sapiens
  CDR3 for alpha chain variable domain of TCR clone 96836 (TRAV34, TRAJ22)
CGADTSGSARQLTF

SEQ ID NO: 193672 - protein, 16 aa, Homo sapiens
  CDR3 for beta chain variable domain of TCR clone 96836 (TRBV2, TRBJ2-3)
RQHRGAPRRWTDTQYF

SEQ ID NO: 193673 - protein, 14 aa, Homo sapiens
  CDR3 for alpha chain variable domain of TCR clone 96837 (TRAV1-2, TRAJ8)
CAVREDTGFQKLVF

SEQ ID NO: 193674 - protein, 12 aa, Homo sapiens
  CDR3 for beta chain variable domain of TCR clone 96837 (TRBV6-3, TRBJ2-1)
CASSGSYNEQFF

SEQ ID NO: 193675 - protein, 15 aa, Homo sapiens
  CDR3 for alpha chain variable domain of TCR clone 96838 (TRAV13-2, TRAJ5)
CAENPHWTGRRELTF

SEQ ID NO: 193676 - protein, 14 aa, Homo sapiens
  CDR3 for beta chain variable domain of TCR clone 96838 (TRBV5-7, TRBJ2-7)
CASSFKGATGEQYF

SEQ ID NO: 193677 - protein, 14 aa, Homo sapiens
  CDR3 for alpha chain variable domain of TCR clone 96839 (TRAV8-6, TRAJ29)
CAVSRASGNTPLVF

SEQ ID NO: 193678 - protein, 13 aa, Homo sapiens
  CDR3 for beta chain variable domain of TCR clone 96839 (TRBV19, TRBJ1-5)
CASSEGSNQHQHF

SEQ ID NO: 193679 - protein, 11 aa, Homo sapiens
  CDR3 for alpha chain variable domain of TCR clone 96840 (TRAV2, TRAJ13)
CASGGYQKVTF

SEQ ID NO: 193680 - protein, 13 aa, Homo sapiens
  CDR3 for beta chain variable domain of TCR clone 96840 (TRBV24-1, TRBJ2-3)
CATGTGGTDTQYF

SEQ ID NO: 193681 - protein, 14 aa, Homo sapiens
  CDR3 for alpha chain variable domain of TCR clone 96841 (TRAV12-1, TRAJ4)
CGEQRSGGYNKLIF

SEQ ID NO: 193682 - protein, 16 aa, Homo sapiens
  CDR3 for beta chain variable domain of TCR clone 96841 (TRBV28, TRBJ2-1)
CASSSRVRDSYNEQFF

SEQ ID NO: 193683 - protein, 18 aa, Homo sapiens
  CDR3 for alpha chain variable domain of TCR clone 96842 (TRAV13-1, TRAJ52)
CAAKNPNAGGTSYRKLTF

SEQ ID NO: 193684 - protein, 15 aa, Homo sapiens
  CDR3 for beta chain variable domain of TCR clone 96842 (TRBV28, TRBJ2-1)
CASSIIAGGRSEQFF

SEQ ID NO: 193685 - protein, 14 aa, Homo sapiens
  CDR3 for alpha chain variable domain of TCR clone 96843 (TRAV1-2, TRAJ8)
CAVREDTGFQKLVF

SEQ ID NO: 193686 - protein, 15 aa, Homo sapiens
  CDR3 for beta chain variable domain of TCR clone 96843 (TRBV12-4, TRBJ2-5)
CPSSPPTGLQETQYF

SEQ ID NO: 193687 - protein, 14 aa, Homo sapiens
  CDR3 for alpha chain variable domain of TCR clone 96844 (TRAV12-1, TRAJ23)
CVVMIYNQGGKLIF

SEQ ID NO: 193688 - protein, 23 aa, Homo sapiens
  CDR3 for beta chain variable domain of TCR clone 96844 (TRBV7-3, TRBJ1-6)
CASSLTSRDEASDPSSYNSALHF

SEQ ID NO: 193689 - protein, 12 aa, Homo sapiens
  CDR3 for alpha chain variable domain of TCR clone 96845 (TRAV3, TRAJ43)
CAVRDPNNDMRF

SEQ ID NO: 193690 - protein, 15 aa, Homo sapiens
  CDR3 for beta chain variable domain of TCR clone 96845 (TRBV6-1, TRBJ2-3)
CASSERGGITDTQYF

SEQ ID NO: 193691 - protein, 12 aa, Homo sapiens
  CDR3 for alpha chain variable domain of TCR clone 96846 (TRAV1-2, TRAJ29)
CAVPSGNTPLVF

SEQ ID NO: 193692 - protein, 14 aa, Homo sapiens
  CDR3 for beta chain variable domain of TCR clone 96846 (TRBV18, TRBJ2-5)
RASSPGVSQETQYF

SEQ ID NO: 193693 - protein, 13 aa, Homo sapiens
  CDR3 for alpha chain variable domain of TCR clone 96847 (TRAV8-3, TRAJ54)
CAVSIQGAQKLVF

SEQ ID NO: 193694 - protein, 14 aa, Homo sapiens
  CDR3 for beta chain variable domain of TCR clone 96847 (TRBV12-5, TRBJ2-5)
CASGSRTHQETQYF

SEQ ID NO: 193695 - protein, 13 aa, Homo sapiens
  CDR3 for alpha chain variable domain of TCR clone 96848 (TRAV36/DV7, TRAJ54)
CAVDIQGAQKLVF

SEQ ID NO: 193696 - protein, 19 aa, Homo sapiens
  CDR3 for beta chain variable domain of TCR clone 96848 (TRBV18, TRBJ2-3)
CASSPPVRAGGPGTDTQYF

SEQ ID NO: 193697 - protein, 16 aa, Homo sapiens
  CDR3 for alpha chain variable domain of TCR clone 96849 (TRAV26-1, TRAJ11)
CIVRVAKNSGYSTLTF

SEQ ID NO: 193698 - protein, 20 aa, Homo sapiens
  CDR3 for beta chain variable domain of TCR clone 96849 (TRBV11-2, TRBJ1-6)
CASSLVFATGGSVHPSTLGT

SEQ ID NO: 193699 - protein, 14 aa, Homo sapiens
  CDR3 for alpha chain variable domain of TCR clone 96850 (TRAV21, TRAJ15)
CAVSLNQAGTALIF

SEQ ID NO: 193700 - protein, 14 aa, Homo sapiens
  CDR3 for beta chain variable domain of TCR clone 96850 (TRBV19, TRBJ2-1)
CASPTFVLSGEQFF

SEQ ID NO: 193701 - protein, 21 aa, Homo sapiens
  CDR3 for alpha chain variable domain of TCR clone 96851 (TRAV1-2, TRAJ18)
CAVRGEAQPWGGYTLEEELSW

SEQ ID NO: 193702 - protein, 19 aa, Homo sapiens
  CDR3 for beta chain variable domain of TCR clone 96851 (TRBV6-3, TRBJ1-2)
CASSYSKGRTGPPNYGYTF

SEQ ID NO: 193703 - protein, 11 aa, Homo sapiens
  CDR3 for alpha chain variable domain of TCR clone 96852 (TRAV26-1, TRAJ27)
CIDPNAGKSTF

SEQ ID NO: 193704 - protein, 18 aa, Homo sapiens
  CDR3 for beta chain variable domain of TCR clone 96852 (TRBV7-9, TRBJ2-6)
CASSFPGAGISGANVLTF

SEQ ID NO: 193705 - protein, 12 aa, Homo sapiens
  CDR3 for alpha chain variable domain of TCR clone 96853 (TRAV29/DV5, TRAJ49)
CAATDTGNQFYF

SEQ ID NO: 193706 - protein, 19 aa, Homo sapiens
  CDR3 for beta chain variable domain of TCR clone 96853 (TRBV25-1, TRBJ2-2)
CAILVYRADRGRKTGELFF

SEQ ID NO: 193707 - protein, 13 aa, Homo sapiens
  CDR3 for alpha chain variable domain of TCR clone 96854 (TRAV1-1, TRAJ9)
CAAKNTGGFKTIF

SEQ ID NO: 193708 - protein, 15 aa, Homo sapiens
  CDR3 for beta chain variable domain of TCR clone 96854 (TRBV10-3, TRBJ2-3)
CAISLTSGGTDTQYF

SEQ ID NO: 193709 - protein, 15 aa, Homo sapiens
  CDR3 for alpha chain variable domain of TCR clone 96855 (TRAV17, TRAJ4)
CATGTWSGRYNKLIF

SEQ ID NO: 193710 - protein, 13 aa, Homo sapiens
  CDR3 for beta chain variable domain of TCR clone 96855 (TRBV6-6, TRBJ2-7)
CASSPKHLAEQYF

SEQ ID NO: 193711 - protein, 12 aa, Homo sapiens
  CDR3 for alpha chain variable domain of TCR clone 96856 (TRAV12-3, TRAJ17)
CAMTLTGNKLTF

SEQ ID NO: 193712 - protein, 13 aa, Homo sapiens
  CDR3 for beta chain variable domain of TCR clone 96856 (TRBV10-3, TRBJ2-7)
CASKLTVNYEQYF

SEQ ID NO: 193713 - protein, 16 aa, Homo sapiens
  CDR3 for alpha chain variable domain of TCR clone 96857 (TRAV3, TRAJ37)
CAVRGKGSGNTGKLIF

SEQ ID NO: 193714 - protein, 14 aa, Homo sapiens
  CDR3 for beta chain variable domain of TCR clone 96857 (TRBV7-7, TRBJ2-2)
CASSRDRSTGELFS

SEQ ID NO: 193715 - protein, 12 aa, Homo sapiens
  CDR3 for alpha chain variable domain of TCR clone 96858 (TRAV12-1, TRAJ16)
CVVFRDGQKLLF

SEQ ID NO: 193716 - protein, 14 aa, Homo sapiens
  CDR3 for beta chain variable domain of TCR clone 96858 (TRBV7-3, TRBJ1-1)
CASSLKGGNTEAFF

SEQ ID NO: 193717 - protein, 14 aa, Homo sapiens
  CDR3 for alpha chain variable domain of TCR clone 96859 (TRAV8-1, TRAJ5)
CAVRTDTGRRALTL

SEQ ID NO: 193718 - protein, 14 aa, Homo sapiens
  CDR3 for beta chain variable domain of TCR clone 96859 (TRBV19, TRBJ2-1)
CASPTFVLSGEQFF

SEQ ID NO: 193719 - protein, 12 aa, Homo sapiens
  CDR3 for alpha chain variable domain of TCR clone 96860 (TRAV12-3, TRAJ17)
CAMTLTGDKLTV

SEQ ID NO: 193720 - protein, 15 aa, Homo sapiens
  CDR3 for beta chain variable domain of TCR clone 96860 (TRBV20-1, TRBJ2-7)
CSARDRVSGMDEQYF

SEQ ID NO: 193721 - protein, 14 aa, Homo sapiens
  CDR3 for alpha chain variable domain of TCR clone 96861 (TRAV26-1, TRAJ38)
CIADNAGNNRKLIW

SEQ ID NO: 193722 - protein, 14 aa, Homo sapiens
  CDR3 for beta chain variable domain of TCR clone 96861 (TRBV20-1, TRBJ1-1)
CSAQTRIRGTEAFF

SEQ ID NO: 193723 - protein, 17 aa, Homo sapiens
  CDR3 for alpha chain variable domain of TCR clone 96862 (TRAV17, TRAJ28)
CATDPRRGGAGSYQLTF

SEQ ID NO: 193724 - protein, 14 aa, Homo sapiens
  CDR3 for beta chain variable domain of TCR clone 96862 (TRBV7-6, TRBJ2-3)
CASSLGTVTDTQYF

SEQ ID NO: 193725 - protein, 15 aa, Homo sapiens
  CDR3 for alpha chain variable domain of TCR clone 96863 (TRAV20, TRAJ4)
CAVTMFSGGYNKLIF

SEQ ID NO: 193726 - protein, 14 aa, Homo sapiens
  CDR3 for beta chain variable domain of TCR clone 96863 (TRBV11-2, TRBJ2-7)
CASSLGAGAYEQYF

SEQ ID NO: 193727 - protein, 15 aa, Homo sapiens
  CDR3 for alpha chain variable domain of TCR clone 96864 (TRAV3, TRAJ22)
CAVRDRGGSARQLTF

SEQ ID NO: 193728 - protein, 16 aa, Homo sapiens
  CDR3 for beta chain variable domain of TCR clone 96864 (TRBV5-4, TRBJ2-3)
FASQQPGAGGADTQYF

SEQ ID NO: 193729 - protein, 23 aa, Homo sapiens
  CDR3 for alpha chain variable domain of TCR clone 96865 (TRAV26-1, TRAJ38)
CISDNAGNNHIQNPDPAVYQLRD

SEQ ID NO: 193730 - protein, 13 aa, Homo sapiens
  CDR3 for beta chain variable domain of TCR clone 96865 (TRBV20-1, TRBJ1-1)
CSARGGGNTEAFF

SEQ ID NO: 193731 - protein, 15 aa, Homo sapiens
  CDR3 for alpha chain variable domain of TCR clone 96866 (TRAV16, TRAJ4)
CALEDPSGGDNKLIF

SEQ ID NO: 193732 - protein, 13 aa, Homo sapiens
  CDR3 for beta chain variable domain of TCR clone 96866 (TRBV7-3, TRBJ2-7)
CASSQAGGYEQYF

SEQ ID NO: 193733 - protein, 13 aa, Homo sapiens
  CDR3 for alpha chain variable domain of TCR clone 96867 (TRAV27, TRAJ6)
CAGGTRGSYIPTF

SEQ ID NO: 193734 - protein, 15 aa, Homo sapiens
  CDR3 for beta chain variable domain of TCR clone 96867 (TRBV5-5, TRBJ2-7)
CASSLAAPRSYEQYF

SEQ ID NO: 193735 - protein, 13 aa, Homo sapiens
  CDR3 for alpha chain variable domain of TCR clone 96868 (TRAV1-2, TRAJ9)
CAALNTGGFKTIF

SEQ ID NO: 193736 - protein, 13 aa, Homo sapiens
  CDR3 for beta chain variable domain of TCR clone 96868 (TRBV6-5, TRBJ2-5)
CATAPSPQETQYF

SEQ ID NO: 193737 - protein, 12 aa, Homo sapiens
  CDR3 for alpha chain variable domain of TCR clone 96869 (TRAV1-2, TRAJ33)
CAVLDSNYQLIW

SEQ ID NO: 193738 - protein, 16 aa, Homo sapiens
  CDR3 for beta chain variable domain of TCR clone 96869 (TRBV6-4, TRBJ1-2)
CASSEAVGDPNYGYTF

SEQ ID NO: 193739 - protein, 13 aa, Homo sapiens
  CDR3 for alpha chain variable domain of TCR clone 96870 (TRAV16, TRAJ11)
CSLTQSGYSTLTF

SEQ ID NO: 193740 - protein, 14 aa, Homo sapiens
  CDR3 for beta chain variable domain of TCR clone 96870 (TRBV19, TRBJ2-7)
CASSTTRSSYEQYF

SEQ ID NO: 193741 - protein, 11 aa, Homo sapiens
  CDR3 for alpha chain variable domain of TCR clone 96871 (TRAV3, TRAJ13)
CAGTSYQKVTF

SEQ ID NO: 193742 - protein, 15 aa, Homo sapiens
  CDR3 for beta chain variable domain of TCR clone 96871 (TRBV7-9, TRBJ2-7)
CASSSSGLAVYEQYF

SEQ ID NO: 193743 - protein, 15 aa, Homo sapiens
  CDR3 for alpha chain variable domain of TCR clone 96872 (TRAV25, TRAJ52)
CAGRPGGTSYGKLSF

SEQ ID NO: 193744 - protein, 17 aa, Homo sapiens
  CDR3 for beta chain variable domain of TCR clone 96872 (TRBV7-8, TRBJ2-6)
CASSAGTGGAGANVLTF

SEQ ID NO: 193745 - protein, 12 aa, Homo sapiens
  CDR3 for alpha chain variable domain of TCR clone 96873 (TRAV21, TRAJ33)
CAKMDSNYQLIW

SEQ ID NO: 193746 - protein, 19 aa, Homo sapiens
  CDR3 for beta chain variable domain of TCR clone 96873 (TRBV7-2, TRBJ2-3)
CASSSQGGPRLAGADTQYF

SEQ ID NO: 193747 - protein, 12 aa, Homo sapiens
  CDR3 for alpha chain variable domain of TCR clone 96874 (TRAV12-3, TRAJ34)
CAMGYNTDELIF

SEQ ID NO: 193748 - protein, 14 aa, Homo sapiens
  CDR3 for beta chain variable domain of TCR clone 96874 (TRBV4-1, TRBJ2-2)
CASSQAVNTGELFF

SEQ ID NO: 193749 - protein, 14 aa, Homo sapiens
  CDR3 for alpha chain variable domain of TCR clone 96875 (TRAV3, TRAJ44)
CAVNNTCTASKLTF

SEQ ID NO: 193750 - protein, 14 aa, Homo sapiens
  CDR3 for beta chain variable domain of TCR clone 96875 (TRBV11-2, TRBJ2-3)
CASSLGGGTDTQYF

SEQ ID NO: 193751 - protein, 12 aa, Homo sapiens
  CDR3 for alpha chain variable domain of TCR clone 96876 (TRAV8-3, TRAJ41)
CAVALSGYALNF

SEQ ID NO: 193752 - protein, 18 aa, Homo sapiens
  CDR3 for beta chain variable domain of TCR clone 96876 (TRBV20-1, TRBJ2-6)
CSAETTPAHGSGANVLTF

SEQ ID NO: 193753 - protein, 13 aa, Homo sapiens
  CDR3 for alpha chain variable domain of TCR clone 96877 (TRAV12-2, TRAJ6)
CAVNVSRKLHTYI

SEQ ID NO: 193754 - protein, 15 aa, Homo sapiens
  CDR3 for beta chain variable domain of TCR clone 96877 (TRBV7-2, TRBJ2-7)
CASSWGQGAIYEQYF

SEQ ID NO: 193755 - protein, 15 aa, Homo sapiens
  CDR3 for alpha chain variable domain of TCR clone 96878 (TRAV20, TRAJ4)
CAVEGSSGGYNKLIF

SEQ ID NO: 193756 - protein, 14 aa, Homo sapiens
  CDR3 for beta chain variable domain of TCR clone 96878 (TRBV7-8, TRBJ2-7)
CASTLGGGLGEQYF

SEQ ID NO: 193757 - protein, 19 aa, Homo sapiens
  CDR3 for alpha chain variable domain of TCR clone 96879 (TRAV25, TRAJ20)
TATQTTDVGILPHDYKLSF

SEQ ID NO: 193758 - protein, 15 aa, Homo sapiens
  CDR3 for beta chain variable domain of TCR clone 96879 (TRBV28, TRBJ1-3)
CASSTGWASGNTIYF

SEQ ID NO: 193759 - protein, 18 aa, Homo sapiens
  CDR3 for alpha chain variable domain of TCR clone 96880 (TRAV26-2, TRAJ45)
CILRVDKYSGGGADGLTF

SEQ ID NO: 193760 - protein, 16 aa, Homo sapiens
  CDR3 for beta chain variable domain of TCR clone 96880 (TRBV2, TRBJ1-4)
CASNRLQGATNEKLFF

SEQ ID NO: 193761 - protein, 19 aa, Homo sapiens
  CDR3 for alpha chain variable domain of TCR clone 96881 (TRAV3, TRAJ6)
CAVKDRNPSRSGGSYIPTF

SEQ ID NO: 193762 - protein, 15 aa, Homo sapiens
  CDR3 for beta chain variable domain of TCR clone 96881 (TRBV27, TRBJ2-1)
CASSNGGGSSNEQFF

SEQ ID NO: 193763 - protein, 16 aa, Homo sapiens
  CDR3 for alpha chain variable domain of TCR clone 96882 (TRAV35, TRAJ42)
GRMERNYGGSQGNLIF

SEQ ID NO: 193764 - protein, 15 aa, Homo sapiens
  CDR3 for beta chain variable domain of TCR clone 96882 (TRBV6-1, TRBJ2-7)
CASSDWDKPNYEQYF

SEQ ID NO: 193765 - protein, 13 aa, Homo sapiens
  CDR3 for alpha chain variable domain of TCR clone 96883 (TRAV12-3, TRAJ13)
CAMSSGGYQKVTF

SEQ ID NO: 193766 - protein, 14 aa, Homo sapiens
  CDR3 for beta chain variable domain of TCR clone 96883 (TRBV11-2, TRBJ1-5)
CASSSRTGNQPQHF

SEQ ID NO: 193767 - protein, 11 aa, Homo sapiens
  CDR3 for alpha chain variable domain of TCR clone 96884 (TRAV23/DV6, TRAJ56)
CAAPANSKLTF

SEQ ID NO: 193768 - protein, 14 aa, Homo sapiens
  CDR3 for beta chain variable domain of TCR clone 96884 (TRBV4-1, TRBJ2-2)
CASSQAVNTGELFF

SEQ ID NO: 193769 - protein, 12 aa, Homo sapiens
  CDR3 for alpha chain variable domain of TCR clone 96885 (TRAV12-1, TRAJ40)
CVVYSGTYKYIF

SEQ ID NO: 193770 - protein, 15 aa, Homo sapiens
  CDR3 for beta chain variable domain of TCR clone 96885 (TRBV7-9, TRBJ1-4)
CASSARTGGNEKLFF

SEQ ID NO: 193771 - protein, 11 aa, Homo sapiens
  CDR3 for alpha chain variable domain of TCR clone 96886 (TRAV30, TRAJ23)
CGTEIAGKLIF

SEQ ID NO: 193772 - protein, 13 aa, Homo sapiens
  CDR3 for beta chain variable domain of TCR clone 96886 (TRBV19, TRBJ2-7)
CASSIDRTYEQYF

SEQ ID NO: 193773 - protein, 15 aa, Homo sapiens
  CDR3 for alpha chain variable domain of TCR clone 96887 (TRAV13-2, TRAJ10)
CAENRDTGGGNKLTF

SEQ ID NO: 193774 - protein, 16 aa, Homo sapiens
  CDR3 for beta chain variable domain of TCR clone 96887 (TRBV7-6, TRBJ2-1)
CASSAPGPSSYNEQFF

SEQ ID NO: 193775 - protein, 17 aa, Homo sapiens
  CDR3 for alpha chain variable domain of TCR clone 96888 (TRAV12-2, TRAJ22)
CAVNRIPFSGSARQLTF

SEQ ID NO: 193776 - protein, 13 aa, Homo sapiens
  CDR3 for beta chain variable domain of TCR clone 96888 (TRBV11-3, TRBJ1-1)
CASSSNRDNEAFF

SEQ ID NO: 193777 - protein, 14 aa, Homo sapiens
  CDR3 for alpha chain variable domain of TCR clone 96889 (TRAV27, TRAJ22)
CAGLPSGSARQLTF

SEQ ID NO: 193778 - protein, 11 aa, Homo sapiens
  CDR3 for beta chain variable domain of TCR clone 96889 (TRBV6-3, TRBJ2-3)
CATGQADTQYF

SEQ ID NO: 193779 - protein, 14 aa, Homo sapiens
  CDR3 for alpha chain variable domain of TCR clone 96890 (TRAV12-1, TRAJ17)
CVVNYKAAGNKLTF

SEQ ID NO: 193780 - protein, 16 aa, Homo sapiens
  CDR3 for beta chain variable domain of TCR clone 96890 (TRBV7-9, TRBJ2-1)
CASSLVSGPSYNEQFF

SEQ ID NO: 193781 - protein, 13 aa, Homo sapiens
  CDR3 for alpha chain variable domain of TCR clone 96891 (TRAV17, TRAJ6)
CATGFGGSYIPPF

SEQ ID NO: 193782 - protein, 14 aa, Homo sapiens
  CDR3 for beta chain variable domain of TCR clone 96891 (TRBV5-1, TRBJ2-5)
CASSFGGSQETQYF

SEQ ID NO: 193783 - protein, 18 aa, Homo sapiens
  CDR3 for alpha chain variable domain of TCR clone 96892 (TRAV21, TRAJ52)
CAVRPSPAGGTSYGKLTF

SEQ ID NO: 193784 - protein, 14 aa, Homo sapiens
  CDR3 for beta chain variable domain of TCR clone 96892 (TRBV4-2, TRBJ2-1)
CASGLNRAYNEQFF

SEQ ID NO: 193785 - protein, 14 aa, Homo sapiens
  CDR3 for alpha chain variable domain of TCR clone 96893 (TRAV1-2, TRAJ6)
CAASLSGGSYIPTF

SEQ ID NO: 193786 - protein, 15 aa, Homo sapiens
  CDR3 for beta chain variable domain of TCR clone 96893 (TRBV28, TRBJ2-7)
CASSPGGGGFYEQYF

SEQ ID NO: 193787 - protein, 13 aa, Homo sapiens
  CDR3 for alpha chain variable domain of TCR clone 96894 (TRAV12-2, TRAJ9)
CAVNWAGGFKTIF

SEQ ID NO: 193788 - protein, 15 aa, Homo sapiens
  CDR3 for beta chain variable domain of TCR clone 96894 (TRBV5-1, TRBJ1-4)
CASSLTADSDEKLFF

SEQ ID NO: 193789 - protein, 13 aa, Homo sapiens
  CDR3 for alpha chain variable domain of TCR clone 96895 (TRAV23/DV6, TRAJ49)
CAASKNTGNQFYF

SEQ ID NO: 193790 - protein, 16 aa, Homo sapiens
  CDR3 for beta chain variable domain of TCR clone 96895 (TRBV7-3, TRBJ2-1)
CASSLEGYRSYNEQFF

SEQ ID NO: 193791 - protein, 15 aa, Homo sapiens
  CDR3 for alpha chain variable domain of TCR clone 96896 (TRAV38-1, TRAJ57)
CAFMDSQGGSEKLVF

SEQ ID NO: 193792 - protein, 16 aa, Homo sapiens
  CDR3 for beta chain variable domain of TCR clone 96896 (TRBV10-3, TRBJ2-1)
CDIRGGGRGDYNEQFF

SEQ ID NO: 193793 - protein, 12 aa, Homo sapiens
  CDR3 for alpha chain variable domain of TCR clone 96897 (TRAV17, TRAJ4)
CASDGGYNKLIF

SEQ ID NO: 193794 - protein, 13 aa, Homo sapiens
  CDR3 for beta chain variable domain of TCR clone 96897 (TRBV29-1, TRBJ2-2)
CSTTGVNTGELFF

SEQ ID NO: 193795 - protein, 12 aa, Homo sapiens
  CDR3 for alpha chain variable domain of TCR clone 96898 (TRAV8-2, TRAJ6)
CVVSKGSYIPTF

SEQ ID NO: 193796 - protein, 10 aa, Homo sapiens
  CDR3 for beta chain variable domain of TCR clone 96898 (TRBV4-1, TRBJ2-3)
CASSQGGASG

SEQ ID NO: 193797 - protein, 11 aa, Homo sapiens
  CDR3 for alpha chain variable domain of TCR clone 96899 (TRAV13-1, TRAJ39)
CASHAANMLTF

SEQ ID NO: 193798 - protein, 14 aa, Homo sapiens
  CDR3 for beta chain variable domain of TCR clone 96899 (TRBV11-2, TRBJ1-5)
CASSLDRGRQPQHF

SEQ ID NO: 193799 - protein, 14 aa, Homo sapiens
  CDR3 for alpha chain variable domain of TCR clone 96900 (TRAV12-3, TRAJ10)
SHLPLTGGGNKLNF

SEQ ID NO: 193800 - protein, 14 aa, Homo sapiens
  CDR3 for beta chain variable domain of TCR clone 96900 (TRBV7-2, TRBJ2-2)
CASSLNSNTGELFF

SEQ ID NO: 193801 - protein, 15 aa, Homo sapiens
  CDR3 for alpha chain variable domain of TCR clone 96901 (TRAV12-1, TRAJ42)
CVVTRDRGSQGNLIF

SEQ ID NO: 193802 - protein, 14 aa, Homo sapiens
  CDR3 for beta chain variable domain of TCR clone 96901 (TRBV11-2, TRBJ2-3)
CASSLGGGANTQYF

SEQ ID NO: 193803 - protein, 14 aa, Homo sapiens
  CDR3 for alpha chain variable domain of TCR clone 96902 (TRAV1-2, TRAJ16)
CAVNRFSDGQKLLF

SEQ ID NO: 193804 - protein, 15 aa, Homo sapiens
  CDR3 for beta chain variable domain of TCR clone 96902 (TRBV27, TRBJ2-1)
CASSNGGGSANEQFF

SEQ ID NO: 193805 - protein, 15 aa, Homo sapiens
  CDR3 for alpha chain variable domain of TCR clone 96903 (TRAV21, TRAJ37)
CAVRPTLSNTGKLTF

SEQ ID NO: 193806 - protein, 16 aa, Homo sapiens
  CDR3 for beta chain variable domain of TCR clone 96903 (TRBV24-1, TRBJ2-3)
CATSDRRQDLTDTQYF

SEQ ID NO: 193807 - protein, 16 aa, Homo sapiens
  CDR3 for alpha chain variable domain of TCR clone 96904 (TRAV13-1, TRAJ18)
CAASRIRGSTLGRLYF

SEQ ID NO: 193808 - protein, 16 aa, Homo sapiens
  CDR3 for beta chain variable domain of TCR clone 96904 (TRBV27, TRBJ1-1)
CASSSRGRTGYTEAFF

SEQ ID NO: 193809 - protein, 17 aa, Homo sapiens
  CDR3 for alpha chain variable domain of TCR clone 96905 (TRAV3, TRAJ12)
CAVRDGGRMDSSYKLIF

SEQ ID NO: 193810 - protein, 14 aa, Homo sapiens
  CDR3 for beta chain variable domain of TCR clone 96905 (TRBV6-5, TRBJ1-2)
CASTRGGGSDGYTF

SEQ ID NO: 193811 - protein, 13 aa, Homo sapiens
  CDR3 for alpha chain variable domain of TCR clone 96906 (TRAV8-3, TRAJ28)
CAGGAVGSYQLTF

SEQ ID NO: 193812 - protein, 13 aa, Homo sapiens
  CDR3 for beta chain variable domain of TCR clone 96906 (TRBV19, TRBJ1-2)
CASSVPGQDGYTF

SEQ ID NO: 193813 - protein, 15 aa, Homo sapiens
  CDR3 for alpha chain variable domain of TCR clone 96907 (TRAV35, TRAJ50)
CAWQLRKTSYDKVIF

SEQ ID NO: 193814 - protein, 12 aa, Homo sapiens
  CDR3 for beta chain variable domain of TCR clone 96907 (TRBV5-1, TRBJ2-5)
CASSLGLETQYF

SEQ ID NO: 193815 - protein, 17 aa, Homo sapiens
  CDR3 for alpha chain variable domain of TCR clone 96908 (TRAV3, TRAJ12)
CAVRDGGRMDSSYKLIF

SEQ ID NO: 193816 - protein, 13 aa, Homo sapiens
  CDR3 for beta chain variable domain of TCR clone 96908 (TRBV3-1, TRBJ2-2)
CASLARGSGELFF

SEQ ID NO: 193817 - protein, 16 aa, Homo sapiens
  CDR3 for alpha chain variable domain of TCR clone 96909 (TRAV3, TRAJ37)
CAVRGKGSGNIGKLIF

SEQ ID NO: 193818 - protein, 15 aa, Homo sapiens
  CDR3 for beta chain variable domain of TCR clone 96909 (TRBV9, TRBJ1-4)
CASSVGGSTNEKLFF

SEQ ID NO: 193819 - protein, 15 aa, Homo sapiens
  CDR3 for alpha chain variable domain of TCR clone 96910 (TRAV8-4, TRAJ29)
CAVSEDFRGNTPLVF

SEQ ID NO: 193820 - protein, 12 aa, Homo sapiens
  CDR3 for beta chain variable domain of TCR clone 96910 (TRBV14, TRBJ2-7)
CASSSLRGEQYI

SEQ ID NO: 193821 - protein, 14 aa, Homo sapiens
  CDR3 for alpha chain variable domain of TCR clone 96911 (TRAV17, TRAJ26)
CATDDHNYGQNFVF

SEQ ID NO: 193822 - protein, 15 aa, Homo sapiens
  CDR3 for beta chain variable domain of TCR clone 96911 (TRBV7-8, TRBJ2-1)
CASSLADSLYNEQFF

SEQ ID NO: 193823 - protein, 13 aa, Homo sapiens
  CDR3 for alpha chain variable domain of TCR clone 96912 (TRAV12-2, TRAJ9)
CAVKWAGGFKTIF

SEQ ID NO: 193824 - protein, 15 aa, Homo sapiens
  CDR3 for beta chain variable domain of TCR clone 96912 (TRBV5-1, TRBJ1-4)
CASSLTADGDEKLFF

SEQ ID NO: 193825 - protein, 13 aa, Homo sapiens
  CDR3 for alpha chain variable domain of TCR clone 96913 (TRAV12-2, TRAJ15)
CAVFNQAGTALIF

SEQ ID NO: 193826 - protein, 13 aa, Homo sapiens
  CDR3 for beta chain variable domain of TCR clone 96913 (TRBV7-9, TRBJ1-2)
CASSLKQNYGYTF

SEQ ID NO: 193827 - protein, 12 aa, Homo sapiens
  CDR3 for alpha chain variable domain of TCR clone 96914 (TRAV17, TRAJ39)
CAAGAAGNMLTF

SEQ ID NO: 193828 - protein, 14 aa, Homo sapiens
  CDR3 for beta chain variable domain of TCR clone 96914 (TRBV7-9, TRBJ1-2)
CASSRQGANYGYTF

SEQ ID NO: 193829 - protein, 14 aa, Homo sapiens
  CDR3 for alpha chain variable domain of TCR clone 96915 (TRAV26-1, TRAJ22)
CIVRVYGSARRLTF

SEQ ID NO: 193830 - protein, 17 aa, Homo sapiens
  CDR3 for beta chain variable domain of TCR clone 96915 (TRBV7-3, TRBJ2-3)
CASSPGGLAGFGDTQYF

SEQ ID NO: 193831 - protein, 16 aa, Homo sapiens
  CDR3 for alpha chain variable domain of TCR clone 96916 (TRAV30, TRAJ24)
CGTGIVDADSWGKFQF

SEQ ID NO: 193832 - protein, 12 aa, Homo sapiens
  CDR3 for beta chain variable domain of TCR clone 96916 (TRBV7-8, TRBJ2-7)
CASSLGDREQYF

SEQ ID NO: 193833 - protein, 16 aa, Homo sapiens
  CDR3 for alpha chain variable domain of TCR clone 96917 (TRAV3, TRAJ10)
CAVRDMRAGGGNKLTF

SEQ ID NO: 193834 - protein, 15 aa, Homo sapiens
  CDR3 for beta chain variable domain of TCR clone 96917 (TRBV2, TRBJ2-7)
CASSEGLARSYEQYF

SEQ ID NO: 193835 - protein, 16 aa, Homo sapiens
  CDR3 for alpha chain variable domain of TCR clone 96918 (TRAV4, TRAJ9)
CLVGDPNRPGGFRTIF

SEQ ID NO: 193836 - protein, 16 aa, Homo sapiens
  CDR3 for beta chain variable domain of TCR clone 96918 (TRBV28, TRBJ1-4)
CASSPPYRGRSEKLFF

SEQ ID NO: 193837 - protein, 14 aa, Homo sapiens
  CDR3 for alpha chain variable domain of TCR clone 96919 (TRAV1-2, TRAJ16)
CAVNRFSDGQKLLF

SEQ ID NO: 193838 - protein, 12 aa, Homo sapiens
  CDR3 for beta chain variable domain of TCR clone 96919 (TRBV7-9, TRBJ2-7)
CASSLEGYVQYF

SEQ ID NO: 193839 - protein, 11 aa, Homo sapiens
  CDR3 for alpha chain variable domain of TCR clone 96920 (TRAV13-1, TRAJ8)
CAARGFQKLVF

SEQ ID NO: 193840 - protein, 16 aa, Homo sapiens
  CDR3 for beta chain variable domain of TCR clone 96920 (TRBV19, TRBJ1-5)
CASSTRGTRSKQPQHF

SEQ ID NO: 193841 - protein, 16 aa, Homo sapiens
  CDR3 for alpha chain variable domain of TCR clone 96921 (TRAV3, TRAJ37)
CAVRGKGSGNTVKLIF

SEQ ID NO: 193842 - protein, 16 aa, Homo sapiens
  CDR3 for beta chain variable domain of TCR clone 96921 (TRBV12-4, TRBJ1-5)
CASSRPVGGSNQPQHF

SEQ ID NO: 193843 - protein, 16 aa, Homo sapiens
  CDR3 for alpha chain variable domain of TCR clone 96922 (TRAV26-2, TRAJ45)
CTTASPIGGGSDGLTF

SEQ ID NO: 193844 - protein, 20 aa, Homo sapiens
  CDR3 for beta chain variable domain of TCR clone 96922 (TRBV28, TRBJ2-1)
CASTPIGRSPGLAGGNEQFF

SEQ ID NO: 193845 - protein, 12 aa, Homo sapiens
  CDR3 for alpha chain variable domain of TCR clone 96923 (TRAV12-3, TRAJ3)
CAIDSSASKIIF

SEQ ID NO: 193846 - protein, 13 aa, Homo sapiens
  CDR3 for beta chain variable domain of TCR clone 96923 (TRBV14, TRBJ1-1)
CASSQEAGTEAFF

SEQ ID NO: 193847 - protein, 16 aa, Homo sapiens
  CDR3 for alpha chain variable domain of TCR clone 96924 (TRAV17, TRAJ53)
CATDALSGGSNYKLIF

SEQ ID NO: 193848 - protein, 12 aa, Homo sapiens
  CDR3 for beta chain variable domain of TCR clone 96924 (TRBV5-1, TRBJ2-7)
CASSFRGYEQYF

SEQ ID NO: 193849 - protein, 14 aa, Homo sapiens
  CDR3 for alpha chain variable domain of TCR clone 96925 (TRAV1-2, TRAJ16)
CAVNRFSDGQKLLF

SEQ ID NO: 193850 - protein, 14 aa, Homo sapiens
  CDR3 for beta chain variable domain of TCR clone 96925 (TRBV7-3, TRBJ2-7)
CASSLSGVSYEQYF

SEQ ID NO: 193851 - protein, 18 aa, Homo sapiens
  CDR3 for alpha chain variable domain of TCR clone 96926 (TRAV21, TRAJ52)
CAVRPSPAGGTSYGKLKF

SEQ ID NO: 193852 - protein, 13 aa, Homo sapiens
  CDR3 for beta chain variable domain of TCR clone 96926 (TRBV19, TRBJ1-2)
CASSVPGQDGYTF

SEQ ID NO: 193853 - protein, 13 aa, Homo sapiens
  CDR3 for alpha chain variable domain of TCR clone 96927 (TRAV21, TRAJ39)
CAVNNNAGNMLTF

SEQ ID NO: 193854 - protein, 13 aa, Homo sapiens
  CDR3 for beta chain variable domain of TCR clone 96927 (TRBV2, TRBJ1-5)
CATAGPGNQPQHF

SEQ ID NO: 193855 - protein, 15 aa, Homo sapiens
  CDR3 for alpha chain variable domain of TCR clone 96928 (TRAV3, TRAJ27)
CAVRDPLTNAGKSTL

SEQ ID NO: 193856 - protein, 15 aa, Homo sapiens
  CDR3 for beta chain variable domain of TCR clone 96928 (TRBV28, TRBJ2-1)
CASSIIAGGRSEQFF

SEQ ID NO: 193857 - protein, 14 aa, Homo sapiens
  CDR3 for alpha chain variable domain of TCR clone 96929 (TRAV26-1, TRAJ34)
CIVRVAYNTDKLIF

SEQ ID NO: 193858 - protein, 15 aa, Homo sapiens
  CDR3 for beta chain variable domain of TCR clone 96929 (TRBV20-1, TRBJ2-7)
CSARVPAADFYEQYF

SEQ ID NO: 193859 - protein, 15 aa, Homo sapiens
  CDR3 for alpha chain variable domain of TCR clone 96930 (TRAV36/DV7, TRAJ42)
CAVEWYGGSQGNLIF

SEQ ID NO: 193860 - protein, 14 aa, Homo sapiens
  CDR3 for beta chain variable domain of TCR clone 96930 (TRBV2, TRBJ1-6)
CASSEAYTYWALHF

SEQ ID NO: 193861 - protein, 12 aa, Homo sapiens
  CDR3 for alpha chain variable domain of TCR clone 96931 (TRAV21, TRAJ11)
CAATSGYSTLTF

SEQ ID NO: 193862 - protein, 14 aa, Homo sapiens
  CDR3 for beta chain variable domain of TCR clone 96931 (TRBV20-1, TRBJ2-7)
CSAPEMAGVGEQYF

SEQ ID NO: 193863 - protein, 16 aa, Homo sapiens
  CDR3 for alpha chain variable domain of TCR clone 96932 (TRAV38-1, TRAJ37)
CAFKGDGSSNTGKLII

SEQ ID NO: 193864 - protein, 13 aa, Homo sapiens
  CDR3 for beta chain variable domain of TCR clone 96932 (TRBV12-4, TRBJ2-5)
CASSLFRRETQYF

SEQ ID NO: 193865 - protein, 13 aa, Homo sapiens
  CDR3 for alpha chain variable domain of TCR clone 96933 (TRAV2, TRAJ40)
CAVVTSGTYKYIF

SEQ ID NO: 193866 - protein, 14 aa, Homo sapiens
  CDR3 for beta chain variable domain of TCR clone 96933 (TRBV7-3, TRBJ1-1)
CASSLKGGNTEAFF

SEQ ID NO: 193867 - protein, 14 aa, Homo sapiens
  CDR3 for alpha chain variable domain of TCR clone 96934 (TRAV26-1, TRAJ40)
CIVRLLSGTYKYIF

SEQ ID NO: 193868 - protein, 16 aa, Homo sapiens
  CDR3 for beta chain variable domain of TCR clone 96934 (TRBV19, TRBJ2-2)
CASRSPGTGATGELFF

SEQ ID NO: 193869 - protein, 14 aa, Homo sapiens
  CDR3 for alpha chain variable domain of TCR clone 96935 (TRAV12-1, TRAJ22)
CVVTTSGSARQLTF

SEQ ID NO: 193870 - protein, 15 aa, Homo sapiens
  CDR3 for beta chain variable domain of TCR clone 96935 (TRBV7-2, TRBJ2-1)
CASSSGLAGGNEQFF

SEQ ID NO: 193871 - protein, 12 aa, Homo sapiens
  CDR3 for alpha chain variable domain of TCR clone 96936 (TRAV12-3, TRAJ20)
CAMVRGDYKLSF

SEQ ID NO: 193872 - protein, 14 aa, Homo sapiens
  CDR3 for beta chain variable domain of TCR clone 96936 (TRBV19, TRBJ1-6)
CASSTDGWNSPLHF

SEQ ID NO: 193873 - protein, 15 aa, Homo sapiens
  CDR3 for alpha chain variable domain of TCR clone 96937 (TRAV12-1, TRAJ8)
CVVNVENTGFQKLVF

SEQ ID NO: 193874 - protein, 13 aa, Homo sapiens
  CDR3 for beta chain variable domain of TCR clone 96937 (TRBV24-1, TRBJ2-2)
CATSDWSTGELFF

SEQ ID NO: 193875 - protein, 11 aa, Homo sapiens
  CDR3 for alpha chain variable domain of TCR clone 96938 (TRAV12-3, TRAJ41)
CAMNAREALNF

SEQ ID NO: 193876 - protein, 16 aa, Homo sapiens
  CDR3 for beta chain variable domain of TCR clone 96938 (TRBV7-8, TRBJ2-3)
CASNTEGQRETDTQYF

SEQ ID NO: 193877 - protein, 14 aa, Homo sapiens
  CDR3 for alpha chain variable domain of TCR clone 96939 (TRAV12-3, TRAJ42)
CAMNYGGSQGNLIF

SEQ ID NO: 193878 - protein, 16 aa, Homo sapiens
  CDR3 for beta chain variable domain of TCR clone 96939 (TRBV28, TRBJ2-7)
CASSLFFETGGPEQYF

SEQ ID NO: 193879 - protein, 17 aa, Homo sapiens
  CDR3 for alpha chain variable domain of TCR clone 96940 (TRAV4, TRAJ13)
CLVGVPGSSGGYQKVTF

SEQ ID NO: 193880 - protein, 18 aa, Homo sapiens
  CDR3 for beta chain variable domain of TCR clone 96940 (TRBV15, TRBJ2-3)
CATSRDGARSWDTDTQYF

SEQ ID NO: 193881 - protein, 13 aa, Homo sapiens
  CDR3 for alpha chain variable domain of TCR clone 96941 (TRAV30, TRAJ49)
CGTEPNTGNQFYF

SEQ ID NO: 193882 - protein, 14 aa, Homo sapiens
  CDR3 for beta chain variable domain of TCR clone 96941 (TRBV29-1, TRBJ2-1)
CSVEFRGIPYEQFF

SEQ ID NO: 193883 - protein, 13 aa, Homo sapiens
  CDR3 for alpha chain variable domain of TCR clone 96942 (TRAV27, TRAJ8)
FAGGPTGFQKLVF

SEQ ID NO: 193884 - protein, 15 aa, Homo sapiens
  CDR3 for beta chain variable domain of TCR clone 96942 (TRBV6-1, TRBJ2-7)
CASSESMGDFYEQYF

SEQ ID NO: 193885 - protein, 14 aa, Homo sapiens
  CDR3 for alpha chain variable domain of TCR clone 96943 (TRAV2, TRAJ9)
CAVEDRCGGFKTIF

SEQ ID NO: 193886 - protein, 17 aa, Homo sapiens
  CDR3 for beta chain variable domain of TCR clone 96943 (TRBV4-1, TRBJ2-7)
CASSRDPLGVRGGEQYF

SEQ ID NO: 193887 - protein, 14 aa, Homo sapiens
  CDR3 for alpha chain variable domain of TCR clone 96944 (TRAV1-2, TRAJ16)
CAVNRFSDGQKLLF

SEQ ID NO: 193888 - protein, 14 aa, Homo sapiens
  CDR3 for beta chain variable domain of TCR clone 96944 (TRBV27, TRBJ2-1)
CSSNGGGSSNEQFF

SEQ ID NO: 193889 - protein, 13 aa, Homo sapiens
  CDR3 for alpha chain variable domain of TCR clone 96945 (TRAV35, TRAJ58)
CAGLETSGSRLTF

SEQ ID NO: 193890 - protein, 15 aa, Homo sapiens
  CDR3 for beta chain variable domain of TCR clone 96945 (TRBV20-1, TRBJ2-1)
CSARFAAGGLNEQFF

SEQ ID NO: 193891 - protein, 18 aa, Homo sapiens
  CDR3 for alpha chain variable domain of TCR clone 96946 (TRAV12-3, TRAJ52)
CAMSRTNASGTSYGKLTF

SEQ ID NO: 193892 - protein, 17 aa, Homo sapiens
  CDR3 for beta chain variable domain of TCR clone 96946 (TRBV7-3, TRBJ2-3)
CAGSLMKRMRGADTQYF

SEQ ID NO: 193893 - protein, 14 aa, Homo sapiens
  CDR3 for alpha chain variable domain of TCR clone 96947 (TRAV22, TRAJ58)
CAVEDRTSGSRLTF

SEQ ID NO: 193894 - protein, 15 aa, Homo sapiens
  CDR3 for beta chain variable domain of TCR clone 96947 (TRBV7-2, TRBJ2-1)
CASSSGLAGGNEQFF

SEQ ID NO: 193895 - protein, 15 aa, Homo sapiens
  CDR3 for alpha chain variable domain of TCR clone 96948 (TRAV21, TRAJ53)
CATLNSGGSNYKLTF

SEQ ID NO: 193896 - protein, 16 aa, Homo sapiens
  CDR3 for beta chain variable domain of TCR clone 96948 (TRBV27, TRBJ2-2)
CASSFRGLVRTGELFF

SEQ ID NO: 193897 - protein, 15 aa, Homo sapiens
  CDR3 for alpha chain variable domain of TCR clone 96949 (TRAV38-2/DV8, TRAJ26)
CAYRSRDNYGQNFVF

SEQ ID NO: 193898 - protein, 17 aa, Homo sapiens
  CDR3 for beta chain variable domain of TCR clone 96949 (TRBV13, TRBJ2-3)
CASSLSRVAGGRNTQYF

SEQ ID NO: 193899 - protein, 13 aa, Homo sapiens
  CDR3 for alpha chain variable domain of TCR clone 96950 (TRAV26-2, TRAJ43)
CILRAVINNDMRF

SEQ ID NO: 193900 - protein, 11 aa, Homo sapiens
  CDR3 for beta chain variable domain of TCR clone 96950 (TRBV29-1, TRBJ2-5)
CSEDRTGTQYF

SEQ ID NO: 193901 - protein, 23 aa, Homo sapiens
  CDR3 for alpha chain variable domain of TCR clone 96951 (TRAV13-1, )
CAASTRRAQIPDIQNPDPAVYQL

SEQ ID NO: 193902 - protein, 13 aa, Homo sapiens
  CDR3 for beta chain variable domain of TCR clone 96951 (TRBV27, TRBJ1-1)
CASSLSIGAEAFF

SEQ ID NO: 193903 - protein, 14 aa, Homo sapiens
  CDR3 for alpha chain variable domain of TCR clone 96952 (TRAV16, TRAJ54)
CALSGVQGAQKLVF

SEQ ID NO: 193904 - protein, 15 aa, Homo sapiens
  CDR3 for beta chain variable domain of TCR clone 96952 (TRBV18, TRBJ2-2)
CASSTSELHTGELFF

SEQ ID NO: 193905 - protein, 16 aa, Homo sapiens
  CDR3 for alpha chain variable domain of TCR clone 96953 (TRAV17, TRAJ22)
CATGPISSGSARQLTF

SEQ ID NO: 193906 - protein, 13 aa, Homo sapiens
  CDR3 for beta chain variable domain of TCR clone 96953 (TRBV11-2, TRBJ2-1)
CASSSGLAGGRFF

SEQ ID NO: 193907 - protein, 16 aa, Homo sapiens
  CDR3 for alpha chain variable domain of TCR clone 96954 (TRAV38-1, TRAJ56)
CAFMKRQTGANSKLTF

SEQ ID NO: 193908 - protein, 16 aa, Homo sapiens
  CDR3 for beta chain variable domain of TCR clone 96954 (TRBV11-2, TRBJ1-2)
CASSLDTGGADYGYTF

SEQ ID NO: 193909 - protein, 15 aa, Homo sapiens
  CDR3 for alpha chain variable domain of TCR clone 96955 (TRAV35, TRAJ40)
CAGQLGTSGTYKYSF

SEQ ID NO: 193910 - protein, 14 aa, Homo sapiens
  CDR3 for beta chain variable domain of TCR clone 96955 (TRBV7-3, TRBJ2-1)
CASSLAGGTNEQFF

SEQ ID NO: 193911 - protein, 15 aa, Homo sapiens
  CDR3 for alpha chain variable domain of TCR clone 96956 (TRAV38-2/DV8, TRAJ48)
CAYRSGGFGNEELTF

SEQ ID NO: 193912 - protein, 16 aa, Homo sapiens
  CDR3 for beta chain variable domain of TCR clone 96956 (TRBV28, TRBJ2-7)
CASSPWVATGDLSQYF

SEQ ID NO: 193913 - protein, 15 aa, Homo sapiens
  CDR3 for alpha chain variable domain of TCR clone 96957 (TRAV26-1, TRAJ48)
CIVRVGDSGNEKLTF

SEQ ID NO: 193914 - protein, 16 aa, Homo sapiens
  CDR3 for beta chain variable domain of TCR clone 96957 (TRBV4-1, TRBJ2-3)
CASSQRAGGLTDTQYF

SEQ ID NO: 193915 - protein, 14 aa, Homo sapiens
  CDR3 for alpha chain variable domain of TCR clone 96958 (TRAV17, TRAJ53)
CATDAGGSNYKLTF

SEQ ID NO: 193916 - protein, 16 aa, Homo sapiens
  CDR3 for beta chain variable domain of TCR clone 96958 (TRBV4-1, TRBJ1-1)
CASSQDAGMGNTEASF

SEQ ID NO: 193917 - protein, 16 aa, Homo sapiens
  CDR3 for alpha chain variable domain of TCR clone 96959 (TRAV1-2, TRAJ31)
CAFFRCQTHVWRWNSA

SEQ ID NO: 193918 - protein, 13 aa, Homo sapiens
  CDR3 for beta chain variable domain of TCR clone 96959 (TRBV7-9, TRBJ1-2)
CASSLKQNYGYTF

SEQ ID NO: 193919 - protein, 14 aa, Homo sapiens
  CDR3 for alpha chain variable domain of TCR clone 96960 (TRAV12-3, TRAJ22)
CAMSLFGSERQLTF

SEQ ID NO: 193920 - protein, 11 aa, Homo sapiens
  CDR3 for beta chain variable domain of TCR clone 96960 (TRBV12-4, TRBJ2-2)
CASSSAGELFF

SEQ ID NO: 193921 - protein, 13 aa, Homo sapiens
  CDR3 for alpha chain variable domain of TCR clone 96961 (TRAV13-2, TRAJ22)
CRDPSGSARQLTF

SEQ ID NO: 193922 - protein, 14 aa, Homo sapiens
  CDR3 for beta chain variable domain of TCR clone 96961 (TRBV19, TRBJ2-7)
CASSTTRSSYEQYF

SEQ ID NO: 193923 - protein, 13 aa, Homo sapiens
  CDR3 for alpha chain variable domain of TCR clone 96962 (TRAV36/DV7, TRAJ53)
CALSGGSNYKLTF

SEQ ID NO: 193924 - protein, 13 aa, Homo sapiens
  CDR3 for beta chain variable domain of TCR clone 96962 (TRBV28, TRBJ2-7)
CASSRPSRYEQYF

SEQ ID NO: 193925 - protein, 14 aa, Homo sapiens
  CDR3 for alpha chain variable domain of TCR clone 96963 (TRAV12-1, TRAJ17)
CVVNSKAAGNKLTF

SEQ ID NO: 193926 - protein, 17 aa, Homo sapiens
  CDR3 for beta chain variable domain of TCR clone 96963 (TRBV20-1, TRBJ2-1)
CSASSSGLAGSYNEQFF

SEQ ID NO: 193927 - protein, 15 aa, Homo sapiens
  CDR3 for alpha chain variable domain of TCR clone 96964 (TRAV12-2, TRAJ53)
CAVNGGGGSNYKLTF

SEQ ID NO: 193928 - protein, 17 aa, Homo sapiens
  CDR3 for beta chain variable domain of TCR clone 96964 (TRBV7-3, TRBJ2-3)
CASSLMKRMRGADTHYF

SEQ ID NO: 193929 - protein, 15 aa, Homo sapiens
  CDR3 for alpha chain variable domain of TCR clone 96965 (TRAV4, TRAJ39)
CLVGQNNNAGNMLTF

SEQ ID NO: 193930 - protein, 13 aa, Homo sapiens
  CDR3 for beta chain variable domain of TCR clone 96965 (TRBV11-2, TRBJ2-5)
CASSSTGEETQYF

SEQ ID NO: 193931 - protein, 15 aa, Homo sapiens
  CDR3 for alpha chain variable domain of TCR clone 96966 (TRAV21, TRAJ24)
CAARSSTDSWGKLQF

SEQ ID NO: 193932 - protein, 15 aa, Homo sapiens
  CDR3 for beta chain variable domain of TCR clone 96966 (TRBV20-1, TRBJ1-1)
CSASRGVTGKTEAFF

SEQ ID NO: 193933 - protein, 13 aa, Homo sapiens
  CDR3 for alpha chain variable domain of TCR clone 96967 (TRAV35, TRAJ22)
CAGLSGSARQLPF

SEQ ID NO: 193934 - protein, 16 aa, Homo sapiens
  CDR3 for beta chain variable domain of TCR clone 96967 (TRBV7-9, TRBJ2-1)
CASSLVLTGQGNEQFF

SEQ ID NO: 193935 - protein, 16 aa, Homo sapiens
  CDR3 for alpha chain variable domain of TCR clone 96968 (TRAV13-1, TRAJ10)
CAASSHFTGGGNKLTC

SEQ ID NO: 193936 - protein, 15 aa, Homo sapiens
  CDR3 for beta chain variable domain of TCR clone 96968 (TRBV7-9, TRBJ1-6)
CASSSPGRGNSPLHF

SEQ ID NO: 193937 - protein, 18 aa, Homo sapiens
  CDR3 for alpha chain variable domain of TCR clone 96969 (TRAV21, TRAJ52)
CAVRPSPAGGTRYGKLTF

SEQ ID NO: 193938 - protein, 14 aa, Homo sapiens
  CDR3 for beta chain variable domain of TCR clone 96969 (TRBV4-1, TRBJ2-2)
CASSQAVNTGELFF

SEQ ID NO: 193939 - protein, 15 aa, Homo sapiens
  CDR3 for alpha chain variable domain of TCR clone 96970 (TRAV34, TRAJ38)
CGADFTPGNNRKLIW

SEQ ID NO: 193940 - protein, 16 aa, Homo sapiens
  CDR3 for beta chain variable domain of TCR clone 96970 (TRBV12-5, TRBJ2-5)
CASGPRTSGNQETQYC

SEQ ID NO: 193941 - protein, 14 aa, Homo sapiens
  CDR3 for alpha chain variable domain of TCR clone 96971 (TRAV8-3, TRAJ4)
CAVGAAGGYNKLIF

SEQ ID NO: 193942 - protein, 12 aa, Homo sapiens
  CDR3 for beta chain variable domain of TCR clone 96971 (TRBV11-2, TRBJ2-2)
CASSLPTGELFF

SEQ ID NO: 193943 - protein, 15 aa, Homo sapiens
  CDR3 for alpha chain variable domain of TCR clone 96972 (TRAV35, TRAJ40)
CAGQLGTSGTYKYIF

SEQ ID NO: 193944 - protein, 14 aa, Homo sapiens
  CDR3 for beta chain variable domain of TCR clone 96972 (TRBV18, TRBJ2-7)
CASSPRGGAYEQYF

SEQ ID NO: 193945 - protein, 13 aa, Homo sapiens
  CDR3 for alpha chain variable domain of TCR clone 96973 (TRAV21, TRAJ57)
CAVTQGGSEKLVF

SEQ ID NO: 193946 - protein, 12 aa, Homo sapiens
  CDR3 for beta chain variable domain of TCR clone 96973 (TRBV7-2, TRBJ1-5)
CASSLWSQPQHF

SEQ ID NO: 193947 - protein, 14 aa, Homo sapiens
  CDR3 for alpha chain variable domain of TCR clone 96974 (TRAV12-1, TRAJ38)
CVVNDAGNNRKLIW

SEQ ID NO: 193948 - protein, 14 aa, Homo sapiens
  CDR3 for beta chain variable domain of TCR clone 96974 (TRBV19, TRBJ1-5)
CASSIVQGIQPQHF

SEQ ID NO: 193949 - protein, 17 aa, Homo sapiens
  CDR3 for alpha chain variable domain of TCR clone 96975 (TRAV26-1, TRAJ58)
CIVRVGAEETSGSRLTF

SEQ ID NO: 193950 - protein, 18 aa, Homo sapiens
  CDR3 for beta chain variable domain of TCR clone 96975 (TRBV7-9, TRBJ2-7)
CASSLTTGGSRTWYEQYF

SEQ ID NO: 193951 - protein, 14 aa, Homo sapiens
  CDR3 for alpha chain variable domain of TCR clone 96976 (TRAV29/DV5, TRAJ45)
CAASFRGGADGLTF

SEQ ID NO: 193952 - protein, 13 aa, Homo sapiens
  CDR3 for beta chain variable domain of TCR clone 96976 (TRBV18, TRBJ2-5)
CASSLQGQETQYF

SEQ ID NO: 193953 - protein, 13 aa, Homo sapiens
  CDR3 for alpha chain variable domain of TCR clone 96977 (TRAV35, TRAJ22)
CWAKAGSARQLTF

SEQ ID NO: 193954 - protein, 15 aa, Homo sapiens
  CDR3 for beta chain variable domain of TCR clone 96977 (TRBV12-4, TRBJ2-5)
CASSPPTGLQETQYF

SEQ ID NO: 193955 - protein, 13 aa, Homo sapiens
  CDR3 for alpha chain variable domain of TCR clone 96978 (TRAV2, TRAJ23)
CAVMGNQGGKLIF

SEQ ID NO: 193956 - protein, 14 aa, Homo sapiens
  CDR3 for beta chain variable domain of TCR clone 96978 (TRBV11-2, TRBJ2-1)
CASSRATSYNEQLF

SEQ ID NO: 193957 - protein, 20 aa, Homo sapiens
  CDR3 for alpha chain variable domain of TCR clone 96979 (TRAV13-2, )
CAEILSIPDIQNPDPAVYQL

SEQ ID NO: 193958 - protein, 11 aa, Homo sapiens
  CDR3 for beta chain variable domain of TCR clone 96979 (TRBV20-1, TRBJ2-7)
CSARLSYEQYF

SEQ ID NO: 193959 - protein, 15 aa, Homo sapiens
  CDR3 for alpha chain variable domain of TCR clone 96980 (TRAV4, TRAJ39)
CLVGPNNNAGNMLTF

SEQ ID NO: 193960 - protein, 16 aa, Homo sapiens
  CDR3 for beta chain variable domain of TCR clone 96980 (TRBV12-5, TRBJ2-5)
CASGPRTSGNQETQYF

SEQ ID NO: 193961 - protein, 13 aa, Homo sapiens
  CDR3 for alpha chain variable domain of TCR clone 96981 (TRAV8-6, TRAJ49)
CAVITNSGNQFYF

SEQ ID NO: 193962 - protein, 14 aa, Homo sapiens
  CDR3 for beta chain variable domain of TCR clone 96981 (TRBV5-1, TRBJ2-7)
CASSRGESLYEQYF

SEQ ID NO: 193963 - protein, 15 aa, Homo sapiens
  CDR3 for alpha chain variable domain of TCR clone 96982 (TRAV3, TRAJ22)
CAVRDRGGSARQLTF

SEQ ID NO: 193964 - protein, 14 aa, Homo sapiens
  CDR3 for beta chain variable domain of TCR clone 96982 (TRBV7-9, TRBJ2-5)
CASSLDTAQETQYF

SEQ ID NO: 193965 - protein, 15 aa, Homo sapiens
  CDR3 for alpha chain variable domain of TCR clone 96983 (TRAV8-3, TRAJ23)
CAVGDGYNQGGKLIF

SEQ ID NO: 193966 - protein, 22 aa, Homo sapiens
  CDR3 for beta chain variable domain of TCR clone 96983 (TRBV29-1, TRBJ2-5)
TVSNMSPEDSSIYLCSAGTQYF

SEQ ID NO: 193967 - protein, 12 aa, Homo sapiens
  CDR3 for alpha chain variable domain of TCR clone 96984 (TRAV12-3, TRAJ34)
CAMGYNTDKLIF

SEQ ID NO: 193968 - protein, 14 aa, Homo sapiens
  CDR3 for beta chain variable domain of TCR clone 96984 (TRBV5-7, TRBJ1-5)
CASSRTGGGEPQHF

SEQ ID NO: 193969 - protein, 14 aa, Homo sapiens
  CDR3 for alpha chain variable domain of TCR clone 96985 (TRAV3, TRAJ37)
CAVKESGNTGKLIF

SEQ ID NO: 193970 - protein, 11 aa, Homo sapiens
  CDR3 for beta chain variable domain of TCR clone 96985 (TRBV12-4, TRBJ2-3)
CASTATDTQYF

SEQ ID NO: 193971 - protein, 13 aa, Homo sapiens
  CDR3 for alpha chain variable domain of TCR clone 96986 (TRAV2, TRAJ23)
CAVMGNQGGKLIF

SEQ ID NO: 193972 - protein, 14 aa, Homo sapiens
  CDR3 for beta chain variable domain of TCR clone 96986 (TRBV11-2, TRBJ2-1)
CVSSRATSYNEQFF

SEQ ID NO: 193973 - protein, 15 aa, Homo sapiens
  CDR3 for alpha chain variable domain of TCR clone 96987 (TRAV3, TRAJ5)
CAVRDRKTGRRALTF

SEQ ID NO: 193974 - protein, 15 aa, Homo sapiens
  CDR3 for beta chain variable domain of TCR clone 96987 (TRBV7-9, TRBJ2-2)
CASGPLDTFPGELLF

SEQ ID NO: 193975 - protein, 16 aa, Homo sapiens
  CDR3 for alpha chain variable domain of TCR clone 96988 (TRAV38-1, TRAJ37)
CAFKGAGSSNTGKLIF

SEQ ID NO: 193976 - protein, 13 aa, Homo sapiens
  CDR3 for beta chain variable domain of TCR clone 96988 (TRBV12-4, TRBJ2-5)
CASSLFRRETQYF

SEQ ID NO: 193977 - protein, 13 aa, Homo sapiens
  CDR3 for alpha chain variable domain of TCR clone 96989 (TRAV17, TRAJ5)
CALRGTGRRALTF

SEQ ID NO: 193978 - protein, 15 aa, Homo sapiens
  CDR3 for beta chain variable domain of TCR clone 96989 (TRBV2, TRBJ2-1)
CASSEEREGDNEQFF

SEQ ID NO: 193979 - protein, 14 aa, Homo sapiens
  CDR3 for alpha chain variable domain of TCR clone 96990 (TRAV13-1, TRAJ16)
CAAAYFFRWPEAAL

SEQ ID NO: 193980 - protein, 17 aa, Homo sapiens
  CDR3 for beta chain variable domain of TCR clone 96990 (TRBV15, TRBJ1-1)
CATSRVGGADGDTEAFF

SEQ ID NO: 193981 - protein, 14 aa, Homo sapiens
  CDR3 for alpha chain variable domain of TCR clone 96991 (TRAV4, TRAJ26)
CLVGPHNYGENFVF

SEQ ID NO: 193982 - protein, 17 aa, Homo sapiens
  CDR3 for beta chain variable domain of TCR clone 96991 (TRBV24-1, TRBJ2-1)
CATSDVSTSGTYNEQFF

SEQ ID NO: 193983 - protein, 12 aa, Homo sapiens
  CDR3 for alpha chain variable domain of TCR clone 96992 (TRAV10, TRAJ6)
CVVSEGSYIPTF

SEQ ID NO: 193984 - protein, 15 aa, Homo sapiens
  CDR3 for beta chain variable domain of TCR clone 96992 (TRBV7-8, TRBJ1-1)
CASSLGDSRNTEAFF

SEQ ID NO: 193985 - protein, 16 aa, Homo sapiens
  CDR3 for alpha chain variable domain of TCR clone 96993 (TRAV3, TRAJ37)
CAVREKGSGNTGKLIF

SEQ ID NO: 193986 - protein, 13 aa, Homo sapiens
  CDR3 for beta chain variable domain of TCR clone 96993 (TRBV14, TRBJ2-7)
CASSQDRRYEQYF

SEQ ID NO: 193987 - protein, 16 aa, Homo sapiens
  CDR3 for alpha chain variable domain of TCR clone 96994 (TRAV12-1, TRAJ45)
CVVIRYSGGGADGLTF

SEQ ID NO: 193988 - protein, 12 aa, Homo sapiens
  CDR3 for beta chain variable domain of TCR clone 96994 (TRBV6-5, TRBJ2-2)
CASRQITGELFV

SEQ ID NO: 193989 - protein, 10 aa, Homo sapiens
  CDR3 for alpha chain variable domain of TCR clone 96995 (TRAV23/DV6, TRAJ57)
CAASSTLSQG

SEQ ID NO: 193990 - protein, 14 aa, Homo sapiens
  CDR3 for beta chain variable domain of TCR clone 96995 (TRBV7-8, TRBJ2-5)
CASNATGGQETQYF

SEQ ID NO: 193991 - protein, 17 aa, Homo sapiens
  CDR3 for alpha chain variable domain of TCR clone 96996 (TRAV13-1, TRAJ28)
CAASPPYSGAGSYQLTF

SEQ ID NO: 193992 - protein, 16 aa, Homo sapiens
  CDR3 for beta chain variable domain of TCR clone 96996 (TRBV4-3, TRBJ2-5)
CASSQDSIQLQETQYF

SEQ ID NO: 193993 - protein, 16 aa, Homo sapiens
  CDR3 for alpha chain variable domain of TCR clone 96997 (TRAV3, TRAJ3)
CAVRDRAKSSASKIIF

SEQ ID NO: 193994 - protein, 16 aa, Homo sapiens
  CDR3 for beta chain variable domain of TCR clone 96997 (TRBV20-1, TRBJ2-4)
CSATSLAELAKNRQYF

SEQ ID NO: 193995 - protein, 14 aa, Homo sapiens
  CDR3 for alpha chain variable domain of TCR clone 96998 (TRAV3, TRAJ7)
CAVREEEREKQTRF

SEQ ID NO: 193996 - protein, 12 aa, Homo sapiens
  CDR3 for beta chain variable domain of TCR clone 96998 (TRBV7-8, TRBJ2-7)
CASSLGDREQYF

SEQ ID NO: 193997 - protein, 13 aa, Homo sapiens
  CDR3 for alpha chain variable domain of TCR clone 96999 (TRAV2, TRAJ15)
CAVASQAGTALIF

SEQ ID NO: 193998 - protein, 17 aa, Homo sapiens
  CDR3 for beta chain variable domain of TCR clone 96999 (TRBV11-2, TRBJ2-1)
CASSLALAEFGRNEQFF

SEQ ID NO: 193999 - protein, 17 aa, Homo sapiens
  CDR3 for alpha chain variable domain of TCR clone 97000 (TRAV3, TRAJ12)
CAVRDGGRMDSSYKWIF

SEQ ID NO: 194000 - protein, 14 aa, Homo sapiens
  CDR3 for beta chain variable domain of TCR clone 97000 (TRBV7-9, TRBJ1-2)
CASSRQGANYGYTF

SEQ ID NO: 194001 - protein, 15 aa, Homo sapiens
  CDR3 for alpha chain variable domain of TCR clone 97001 (TRAV20, TRAJ53)
CAVQASGGSNYKLTF

SEQ ID NO: 194002 - protein, 12 aa, Homo sapiens
  CDR3 for beta chain variable domain of TCR clone 97001 (TRBV7-6, TRBJ2-5)
CASILSQETQYF

SEQ ID NO: 194003 - protein, 15 aa, Homo sapiens
  CDR3 for alpha chain variable domain of TCR clone 97002 (TRAV8-6, TRAJ45)
RAVSEQGGGADGLTF

SEQ ID NO: 194004 - protein, 14 aa, Homo sapiens
  CDR3 for beta chain variable domain of TCR clone 97002 (TRBV28, TRBJ2-5)
CASRGSSFWETQYF

SEQ ID NO: 194005 - protein, 15 aa, Homo sapiens
  CDR3 for alpha chain variable domain of TCR clone 97003 (TRAV3, TRAJ32)
CAVSSYGGATNKLIF

SEQ ID NO: 194006 - protein, 13 aa, Homo sapiens
  CDR3 for beta chain variable domain of TCR clone 97003 (TRBV20-1, TRBJ2-7)
CSARPSTNYEQFF

SEQ ID NO: 194007 - protein, 14 aa, Homo sapiens
  CDR3 for alpha chain variable domain of TCR clone 97004 (TRAV35, TRAJ38)
CAGSNAGNNRKLSW

SEQ ID NO: 194008 - protein, 12 aa, Homo sapiens
  CDR3 for beta chain variable domain of TCR clone 97004 (TRBV19, TRBJ2-7)
CASTDRGYEQYF

SEQ ID NO: 194009 - protein, 12 aa, Homo sapiens
  CDR3 for alpha chain variable domain of TCR clone 97005 (TRAV17, TRAJ53)
CAGGGSNYKLTF

SEQ ID NO: 194010 - protein, 16 aa, Homo sapiens
  CDR3 for beta chain variable domain of TCR clone 97005 (TRBV11-2, TRBJ2-3)
CASSCQGRGALDTQYF

SEQ ID NO: 194011 - protein, 12 aa, Homo sapiens
  CDR3 for alpha chain variable domain of TCR clone 97006 (TRAV2, TRAJ31)
CAVEDNNARLMF

SEQ ID NO: 194012 - protein, 16 aa, Homo sapiens
  CDR3 for beta chain variable domain of TCR clone 97006 (TRBV10-3, TRBJ2-1)
CAISGVGDGGGGEQFY

SEQ ID NO: 194013 - protein, 10 aa, Homo sapiens
  CDR3 for alpha chain variable domain of TCR clone 97007 (TRAV23/DV6, TRAJ57)
CAASSTLSQG

SEQ ID NO: 194014 - protein, 15 aa, Homo sapiens
  CDR3 for beta chain variable domain of TCR clone 97007 (TRBV5-1, TRBJ2-7)
CASSLNGGPAREQYF

SEQ ID NO: 194015 - protein, 14 aa, Homo sapiens
  CDR3 for alpha chain variable domain of TCR clone 97008 (TRAV26-1, TRAJ39)
CIVFTNNAGNLLTF

SEQ ID NO: 194016 - protein, 15 aa, Homo sapiens
  CDR3 for beta chain variable domain of TCR clone 97008 (TRBV19, TRBJ2-4)
CASSLTGLTKNIQYF

SEQ ID NO: 194017 - protein, 15 aa, Homo sapiens
  CDR3 for alpha chain variable domain of TCR clone 97009 (TRAV25, TRAJ52)
CAGRPGGTSYGKLTF

SEQ ID NO: 194018 - protein, 16 aa, Homo sapiens
  CDR3 for beta chain variable domain of TCR clone 97009 (TRBV12-4, TRBJ1-5)
CASSRPVGGSNQPQHF

SEQ ID NO: 194019 - protein, 13 aa, Homo sapiens
  CDR3 for alpha chain variable domain of TCR clone 97010 (TRAV8-6, TRAJ49)
CAVITNTGNQFYF

SEQ ID NO: 194020 - protein, 16 aa, Homo sapiens
  CDR3 for beta chain variable domain of TCR clone 97010 (TRBV28, TRBJ2-7)
CASSLFFETGGPEQYF

SEQ ID NO: 194021 - protein, 17 aa, Homo sapiens
  CDR3 for alpha chain variable domain of TCR clone 97011 (TRAV3, TRAJ42)
CAVRDRDYGGSQGNLIF

SEQ ID NO: 194022 - protein, 15 aa, Homo sapiens
  CDR3 for beta chain variable domain of TCR clone 97011 (TRBV19, TRBJ1-1)
CASTSGQIQNTEAFF

SEQ ID NO: 194023 - protein, 13 aa, Homo sapiens
  CDR3 for alpha chain variable domain of TCR clone 97012 (TRAV2, TRAJ40)
CAVVTSGTYKYIF

SEQ ID NO: 194024 - protein, 15 aa, Homo sapiens
  CDR3 for beta chain variable domain of TCR clone 97012 (TRBV18, TRBJ2-1)
CASSPPSAAYNEQFF

SEQ ID NO: 194025 - protein, 13 aa, Homo sapiens
  CDR3 for alpha chain variable domain of TCR clone 97013 (TRAV1-2, TRAJ9)
CAALNTGGFKTIF

SEQ ID NO: 194026 - protein, 14 aa, Homo sapiens
  CDR3 for beta chain variable domain of TCR clone 97013 (TRBV28, TRBJ2-1)
CASSYYTAYNEQFF

SEQ ID NO: 194027 - protein, 12 aa, Homo sapiens
  CDR3 for alpha chain variable domain of TCR clone 97014 (TRAV26-1, TRAJ26)
CIVYNYGQNFVF

SEQ ID NO: 194028 - protein, 15 aa, Homo sapiens
  CDR3 for beta chain variable domain of TCR clone 97014 (TRBV7-2, TRBJ2-3)
CASSLRGGSTDTKYF

SEQ ID NO: 194029 - protein, 13 aa, Homo sapiens
  CDR3 for alpha chain variable domain of TCR clone 97015 (TRAV17, TRAJ26)
CATVDNYGQTFVF

SEQ ID NO: 194030 - protein, 16 aa, Homo sapiens
  CDR3 for beta chain variable domain of TCR clone 97015 (TRBV2, TRBJ2-1)
CASSVGGSLSYNEQFF

SEQ ID NO: 194031 - protein, 19 aa, Homo sapiens
  CDR3 for alpha chain variable domain of TCR clone 97016 (TRAV1-2, TRAJ26)
CLLPLCCERPDNYGQNFVF

SEQ ID NO: 194032 - protein, 15 aa, Homo sapiens
  CDR3 for beta chain variable domain of TCR clone 97016 (TRBV2, TRBJ2-7)
CASSEGLARSYEQYF

SEQ ID NO: 194033 - protein, 14 aa, Homo sapiens
  CDR3 for alpha chain variable domain of TCR clone 97017 (TRAV2, TRAJ9)
CAVGDRSGGFKTIF

SEQ ID NO: 194034 - protein, 15 aa, Homo sapiens
  CDR3 for beta chain variable domain of TCR clone 97017 (TRBV18, TRBJ2-7)
CASSPSSTGNYEQYF

SEQ ID NO: 194035 - protein, 14 aa, Homo sapiens
  CDR3 for alpha chain variable domain of TCR clone 97018 (TRAV17, TRAJ45)
CATDTRGGADGLTF

SEQ ID NO: 194036 - protein, 11 aa, Homo sapiens
  CDR3 for beta chain variable domain of TCR clone 97018 (TRBV28, TRBJ2-5)
CATGNQETQYF

SEQ ID NO: 194037 - protein, 14 aa, Homo sapiens
  CDR3 for alpha chain variable domain of TCR clone 97019 (TRAV1-2, TRAJ8)
CAVREDTGSQKLVF

SEQ ID NO: 194038 - protein, 16 aa, Homo sapiens
  CDR3 for beta chain variable domain of TCR clone 97019 (TRBV12-5, TRBJ2-5)
CASGPRTSGNQETQYF

SEQ ID NO: 194039 - protein, 14 aa, Homo sapiens
  CDR3 for alpha chain variable domain of TCR clone 97020 (TRAV8-4, TRAJ4)
CAVSPSGGDNKLIF

SEQ ID NO: 194040 - protein, 15 aa, Homo sapiens
  CDR3 for beta chain variable domain of TCR clone 97020 (TRBV7-8, TRBJ2-3)
CASSLSADSGGAQYF

SEQ ID NO: 194041 - protein, 17 aa, Homo sapiens
  CDR3 for alpha chain variable domain of TCR clone 97021 (TRAV35, TRAJ38)
CAGQLQRNAGNNRKLIW

SEQ ID NO: 194042 - protein, 14 aa, Homo sapiens
  CDR3 for beta chain variable domain of TCR clone 97021 (TRBV7-2, TRBJ2-7)
CASSSISGFSEQYF

SEQ ID NO: 194043 - protein, 15 aa, Homo sapiens
  CDR3 for alpha chain variable domain of TCR clone 97022 (TRAV35, TRAJ40)
CAGQLWDSGTNKYIF

SEQ ID NO: 194044 - protein, 12 aa, Homo sapiens
  CDR3 for beta chain variable domain of TCR clone 97022 (TRBV7-8, TRBJ2-7)
CASSLAGYEQYF

SEQ ID NO: 194045 - protein, 15 aa, Homo sapiens
  CDR3 for alpha chain variable domain of TCR clone 97023 (TRAV25, TRAJ43)
CAVFMRFGAGTRLTV

SEQ ID NO: 194046 - protein, 13 aa, Homo sapiens
  CDR3 for beta chain variable domain of TCR clone 97023 (TRBV7-9, TRBJ1-2)
CASSLKQNYGYTF

SEQ ID NO: 194047 - protein, 14 aa, Homo sapiens
  CDR3 for alpha chain variable domain of TCR clone 97024 (TRAV35, TRAJ22)
CAGLRPGSARQLTF

SEQ ID NO: 194048 - protein, 13 aa, Homo sapiens
  CDR3 for beta chain variable domain of TCR clone 97024 (TRBV20-1, TRBJ2-7)
CSATHTSGYEQHF

SEQ ID NO: 194049 - protein, 14 aa, Homo sapiens
  CDR3 for alpha chain variable domain of TCR clone 97025 (TRAV12-2, TRAJ40)
CAVKIPSGTYKYIF

SEQ ID NO: 194050 - protein, 14 aa, Homo sapiens
  CDR3 for beta chain variable domain of TCR clone 97025 (TRBV20-1, TRBJ1-1)
CSAQTRIGGTQPFF

SEQ ID NO: 194051 - protein, 15 aa, Homo sapiens
  CDR3 for alpha chain variable domain of TCR clone 97026 (TRAV12-3, TRAJ49)
CAMAVTPNTGNQFYF

SEQ ID NO: 194052 - protein, 18 aa, Homo sapiens
  CDR3 for beta chain variable domain of TCR clone 97026 (TRBV4-1, TRBJ1-5)
YASSQDPRGQGLNQPQHF

SEQ ID NO: 194053 - protein, 17 aa, Homo sapiens
  CDR3 for alpha chain variable domain of TCR clone 97027 (TRAV14/DV4, TRAJ28)
CAMRGTSSGAGSYQITF

SEQ ID NO: 194054 - protein, 13 aa, Homo sapiens
  CDR3 for beta chain variable domain of TCR clone 97027 (TRBV28, TRBJ2-5)
CASSFAGGETQYF

SEQ ID NO: 194055 - protein, 15 aa, Homo sapiens
  CDR3 for alpha chain variable domain of TCR clone 97028 (TRAV8-6, TRAJ28)
CAVTRSGAGSYQLTF

SEQ ID NO: 194056 - protein, 16 aa, Homo sapiens
  CDR3 for beta chain variable domain of TCR clone 97028 (TRBV6-6, TRBJ2-3)
CASSYSHAGSTDTQYF

SEQ ID NO: 194057 - protein, 14 aa, Homo sapiens
  CDR3 for alpha chain variable domain of TCR clone 97029 (TRAV1-2, TRAJ16)
CAVNRFLDGQKLLF

SEQ ID NO: 194058 - protein, 15 aa, Homo sapiens
  CDR3 for beta chain variable domain of TCR clone 97029 (TRBV6-1, TRBJ2-3)
CASSERGGITDTQYF

SEQ ID NO: 194059 - protein, 14 aa, Homo sapiens
  CDR3 for alpha chain variable domain of TCR clone 97030 (TRAV26-1, TRAJ38)
CIADNAGNNRKLSW

SEQ ID NO: 194060 - protein, 13 aa, Homo sapiens
  CDR3 for beta chain variable domain of TCR clone 97030 (TRBV4-1, TRBJ2-7)
CASSQGQAYEQYF

SEQ ID NO: 194061 - protein, 18 aa, Homo sapiens
  CDR3 for alpha chain variable domain of TCR clone 97031 (TRAV26-2, TRAJ45)
CILRVYKYSGGGADGLTF

SEQ ID NO: 194062 - protein, 16 aa, Homo sapiens
  CDR3 for beta chain variable domain of TCR clone 97031 (TRBV2, TRBJ1-4)
CASNLLQGATNEKLFF

SEQ ID NO: 194063 - protein, 16 aa, Homo sapiens
  CDR3 for alpha chain variable domain of TCR clone 97032 (TRAV3, TRAJ37)
CAVRVRGSGNTGKLIF

SEQ ID NO: 194064 - protein, 16 aa, Homo sapiens
  CDR3 for beta chain variable domain of TCR clone 97032 (TRBV5-1, TRBJ2-1)
CASSGAGASDYNEQFF

SEQ ID NO: 194065 - protein, 21 aa, Homo sapiens
  CDR3 for alpha chain variable domain of TCR clone 97033 (TRAV23/DV6, TRAJ4)
CISWIPSLETQPPTSLQQEIF

SEQ ID NO: 194066 - protein, 13 aa, Homo sapiens
  CDR3 for beta chain variable domain of TCR clone 97033 (TRBV7-2, TRBJ1-1)
CASSRNTNTEAFF

SEQ ID NO: 194067 - protein, 15 aa, Homo sapiens
  CDR3 for alpha chain variable domain of TCR clone 97034 (TRAV3, TRAJ3)
CAVRDGHSSSSKIIF

SEQ ID NO: 194068 - protein, 14 aa, Homo sapiens
  CDR3 for beta chain variable domain of TCR clone 97034 (TRBV28, TRBJ1-4)
CASSFGTFDEKLFF

SEQ ID NO: 194069 - protein, 14 aa, Homo sapiens
  CDR3 for alpha chain variable domain of TCR clone 97035 (TRAV1-2, TRAJ8)
CAVREDTGFQKLVF

SEQ ID NO: 194070 - protein, 15 aa, Homo sapiens
  CDR3 for beta chain variable domain of TCR clone 97035 (TRBV13, TRBJ2-1)
CASSLLSGLNNEQFF

SEQ ID NO: 194071 - protein, 13 aa, Homo sapiens
  CDR3 for alpha chain variable domain of TCR clone 97036 (TRAV35, TRAJ42)
CVGFPGSQGNLIF

SEQ ID NO: 194072 - protein, 13 aa, Homo sapiens
  CDR3 for beta chain variable domain of TCR clone 97036 (TRBV29-1, TRBJ2-1)
CSVEGGRVNEQFF

SEQ ID NO: 194073 - protein, 16 aa, Homo sapiens
  CDR3 for alpha chain variable domain of TCR clone 97037 (TRAV23/DV6, TRAJ9)
CAASIGGNTGGFKTIF

SEQ ID NO: 194074 - protein, 14 aa, Homo sapiens
  CDR3 for beta chain variable domain of TCR clone 97037 (TRBV11-3, TRBJ2-3)
CASSLVTTTDTQYF

SEQ ID NO: 194075 - protein, 12 aa, Homo sapiens
  CDR3 for alpha chain variable domain of TCR clone 97038 (TRAV1-1, TRAJ39)
CAVPVVGNMLTF

SEQ ID NO: 194076 - protein, 14 aa, Homo sapiens
  CDR3 for beta chain variable domain of TCR clone 97038 (TRBV11-2, TRBJ2-7)
CASSLGNSLYEQYF

SEQ ID NO: 194077 - protein, 12 aa, Homo sapiens
  CDR3 for alpha chain variable domain of TCR clone 97039 (TRAV12-2, TRAJ37)
CAVDGNTGKLIF

SEQ ID NO: 194078 - protein, 14 aa, Homo sapiens
  CDR3 for beta chain variable domain of TCR clone 97039 (TRBV19, TRBJ2-5)
CASSMTGQQETQYF

SEQ ID NO: 194079 - protein, 13 aa, Homo sapiens
  CDR3 for alpha chain variable domain of TCR clone 97040 (TRAV36/DV7, TRAJ56)
CAGTTGANSKLTF

SEQ ID NO: 194080 - protein, 16 aa, Homo sapiens
  CDR3 for beta chain variable domain of TCR clone 97040 (TRBV19, TRBJ1-1)
CASSPTRFWPGTEAFF

SEQ ID NO: 194081 - protein, 18 aa, Homo sapiens
  CDR3 for alpha chain variable domain of TCR clone 97041 (TRAV13-1, TRAJ52)
CAAKNPNAGGTSYGKLTF

SEQ ID NO: 194082 - protein, 18 aa, Homo sapiens
  CDR3 for beta chain variable domain of TCR clone 97041 (TRBV12-4, TRBJ2-4)
CASSRTGAVDVAKNSQYF

SEQ ID NO: 194083 - protein, 15 aa, Homo sapiens
  CDR3 for alpha chain variable domain of TCR clone 97042 (TRAV16, TRAJ12)
CSKWPLRDSSYKLIF

SEQ ID NO: 194084 - protein, 15 aa, Homo sapiens
  CDR3 for beta chain variable domain of TCR clone 97042 (TRBV4-2, TRBJ1-1)
CASSQAGNTEAFLDK

SEQ ID NO: 194085 - protein, 12 aa, Homo sapiens
  CDR3 for alpha chain variable domain of TCR clone 97043 (TRAV3, TRAJ20)
CAVGDHDYKLSF

SEQ ID NO: 194086 - protein, 15 aa, Homo sapiens
  CDR3 for beta chain variable domain of TCR clone 97043 (TRBV9, TRBJ1-6)
CASSVAGTGDSPLHF

SEQ ID NO: 194087 - protein, 12 aa, Homo sapiens
  CDR3 for alpha chain variable domain of TCR clone 97044 (TRAV4, TRAJ34)
CLVGEGTDKPIF

SEQ ID NO: 194088 - protein, 13 aa, Homo sapiens
  CDR3 for beta chain variable domain of TCR clone 97044 (TRBV2, TRBJ2-7)
CATSMGLVYEQYF

SEQ ID NO: 194089 - protein, 15 aa, Homo sapiens
  CDR3 for alpha chain variable domain of TCR clone 97045 (TRAV3, TRAJ5)
CAVRDRKTGRRALTF

SEQ ID NO: 194090 - protein, 13 aa, Homo sapiens
  CDR3 for beta chain variable domain of TCR clone 97045 (TRBV7-9, TRBJ1-2)
CASSPSNFWGYTF

SEQ ID NO: 194091 - protein, 14 aa, Homo sapiens
  CDR3 for alpha chain variable domain of TCR clone 97046 (TRAV8-4, TRAJ48)
CAVSETFGNEKLTF

SEQ ID NO: 194092 - protein, 14 aa, Homo sapiens
  CDR3 for beta chain variable domain of TCR clone 97046 (TRBV13, TRBJ2-7)
CAISLKGASYEQYF

SEQ ID NO: 194093 - protein, 16 aa, Homo sapiens
  CDR3 for alpha chain variable domain of TCR clone 97047 (TRAV3, TRAJ18)
CVVRDGRGSTLGRLYF

SEQ ID NO: 194094 - protein, 15 aa, Homo sapiens
  CDR3 for beta chain variable domain of TCR clone 97047 (TRBV7-9, TRBJ1-6)
CASSSPGRGNSPLHF

SEQ ID NO: 194095 - protein, 13 aa, Homo sapiens
  CDR3 for alpha chain variable domain of TCR clone 97048 (TRAV13-2, TRAJ31)
CAENLNNNARLMF

SEQ ID NO: 194096 - protein, 15 aa, Homo sapiens
  CDR3 for beta chain variable domain of TCR clone 97048 (TRBV5-4, TRBJ2-1)
CASSREGLPYNEQFF

SEQ ID NO: 194097 - protein, 11 aa, Homo sapiens
  CDR3 for alpha chain variable domain of TCR clone 97049 (TRAV3, TRAJ21)
CAVGNFNKFYF

SEQ ID NO: 194098 - protein, 13 aa, Homo sapiens
  CDR3 for beta chain variable domain of TCR clone 97049 (TRBV20-1, TRBJ2-7)
CSARTGAGYEQYF

SEQ ID NO: 194099 - protein, 14 aa, Homo sapiens
  CDR3 for alpha chain variable domain of TCR clone 97050 (TRAV1-2, TRAJ8)
CAVREDTGVQKLVF

SEQ ID NO: 194100 - protein, 12 aa, Homo sapiens
  CDR3 for beta chain variable domain of TCR clone 97050 (TRBV11-2, TRBJ2-2)
CASSLPTGELFF

SEQ ID NO: 194101 - protein, 14 aa, Homo sapiens
  CDR3 for alpha chain variable domain of TCR clone 97051 (TRAV12-3, TRAJ54)
FAMRGIQGAQKLVF

SEQ ID NO: 194102 - protein, 13 aa, Homo sapiens
  CDR3 for beta chain variable domain of TCR clone 97051 (TRBV19, TRBJ1-1)
CASSPSNGGEAFF

SEQ ID NO: 194103 - protein, 17 aa, Homo sapiens
  CDR3 for alpha chain variable domain of TCR clone 97052 (TRAV23/DV6, TRAJ58)
CAARLLRGETSGSRLTF

SEQ ID NO: 194104 - protein, 13 aa, Homo sapiens
  CDR3 for beta chain variable domain of TCR clone 97052 (TRBV10-3, TRBJ2-7)
CASKLAVNYEQYF

SEQ ID NO: 194105 - protein, 12 aa, Homo sapiens
  CDR3 for alpha chain variable domain of TCR clone 97053 (TRAV27, TRAJ9)
CAGESGGFKTIF

SEQ ID NO: 194106 - protein, 17 aa, Homo sapiens
  CDR3 for beta chain variable domain of TCR clone 97053 (TRBV11-2, TRBJ2-1)
CASSLYPPGVEYNEQFF

SEQ ID NO: 194107 - protein, 13 aa, Homo sapiens
  CDR3 for alpha chain variable domain of TCR clone 97054 (TRAV30, TRAJ6)
CGFIEGGSYIPTF

SEQ ID NO: 194108 - protein, 16 aa, Homo sapiens
  CDR3 for beta chain variable domain of TCR clone 97054 (TRBV19, TRBJ2-1)
CASSKAGPSSYNEQFF

SEQ ID NO: 194109 - protein, 12 aa, Homo sapiens
  CDR3 for alpha chain variable domain of TCR clone 97055 (TRAV12-1, TRAJ40)
CVFYSGTYKYIF

SEQ ID NO: 194110 - protein, 11 aa, Homo sapiens
  CDR3 for beta chain variable domain of TCR clone 97055 (TRBV12-4, TRBJ2-2)
CASSLVAAPED

SEQ ID NO: 194111 - protein, 15 aa, Homo sapiens
  CDR3 for alpha chain variable domain of TCR clone 97056 (TRAV8-3, TRAJ11)
CAVGLLNSGCSTLTF

SEQ ID NO: 194112 - protein, 16 aa, Homo sapiens
  CDR3 for beta chain variable domain of TCR clone 97056 (TRBV7-9, TRBJ1-2)
CASSLGFSAGEDGYTF

SEQ ID NO: 194113 - protein, 15 aa, Homo sapiens
  CDR3 for alpha chain variable domain of TCR clone 97057 (TRAV26-1, TRAJ44)
CIVRIVTGTASKLTF

SEQ ID NO: 194114 - protein, 15 aa, Homo sapiens
  CDR3 for beta chain variable domain of TCR clone 97057 (TRBV7-6, TRBJ2-1)
CASSSLAGEGNEQFF

SEQ ID NO: 194115 - protein, 14 aa, Homo sapiens
  CDR3 for alpha chain variable domain of TCR clone 97058 (TRAV8-3, TRAJ10)
CAVDAGGGGNKLTF

SEQ ID NO: 194116 - protein, 15 aa, Homo sapiens
  CDR3 for beta chain variable domain of TCR clone 97058 (TRBV7-2, TRBJ2-1)
CASSSGLAGGNEQFF

SEQ ID NO: 194117 - protein, 15 aa, Homo sapiens
  CDR3 for alpha chain variable domain of TCR clone 97059 (TRAV23/DV6, TRAJ53)
CAASMERGSNYKLTF

SEQ ID NO: 194118 - protein, 13 aa, Homo sapiens
  CDR3 for beta chain variable domain of TCR clone 97059 (TRBV12-4, TRBJ1-2)
CASSLRQGKGYTF

SEQ ID NO: 194119 - protein, 13 aa, Homo sapiens
  CDR3 for alpha chain variable domain of TCR clone 97060 (TRAV13-1, TRAJ5)
CAASDTGRRALTF

SEQ ID NO: 194120 - protein, 12 aa, Homo sapiens
  CDR3 for beta chain variable domain of TCR clone 97060 (TRBV28, TRBJ2-3)
CASSIYRDTQYF

SEQ ID NO: 194121 - protein, 14 aa, Homo sapiens
  CDR3 for alpha chain variable domain of TCR clone 97061 (TRAV12-3, TRAJ29)
CAMILLSGDTPLVF

SEQ ID NO: 194122 - protein, 16 aa, Homo sapiens
  CDR3 for beta chain variable domain of TCR clone 97061 (TRBV28, TRBJ2-7)
CASSSGTSGRGYEQYF

SEQ ID NO: 194123 - protein, 14 aa, Homo sapiens
  CDR3 for alpha chain variable domain of TCR clone 97062 (TRAV1-1, TRAJ11)
CDRIMNSGYSTLTF

SEQ ID NO: 194124 - protein, 16 aa, Homo sapiens
  CDR3 for beta chain variable domain of TCR clone 97062 (TRBV6-5, TRBJ1-6)
CASSYSGESYNSPLRF

SEQ ID NO: 194125 - protein, 13 aa, Homo sapiens
  CDR3 for alpha chain variable domain of TCR clone 97063 (TRAV23/DV6, TRAJ22)
CAASKGSARQLTF

SEQ ID NO: 194126 - protein, 13 aa, Homo sapiens
  CDR3 for beta chain variable domain of TCR clone 97063 (TRBV7-9, TRBJ1-2)
CASSLKQNYGYTF

SEQ ID NO: 194127 - protein, 13 aa, Homo sapiens
  CDR3 for alpha chain variable domain of TCR clone 97064 (TRAV21, TRAJ20)
CAVGLRVDYKLSF

SEQ ID NO: 194128 - protein, 13 aa, Homo sapiens
  CDR3 for beta chain variable domain of TCR clone 97064 (TRBV7-2, TRBJ2-7)
CASSSPSGSEQYF

SEQ ID NO: 194129 - protein, 15 aa, Homo sapiens
  CDR3 for alpha chain variable domain of TCR clone 97065 (TRAV13-1, TRAJ11)
CAASNRNSGYRTLTF

SEQ ID NO: 194130 - protein, 11 aa, Homo sapiens
  CDR3 for beta chain variable domain of TCR clone 97065 (TRBV20-1, TRBJ2-7)
CSARLSYEQYF

SEQ ID NO: 194131 - protein, 13 aa, Homo sapiens
  CDR3 for alpha chain variable domain of TCR clone 97066 (TRAV27, TRAJ6)
CAGGTRGSYIPTF

SEQ ID NO: 194132 - protein, 14 aa, Homo sapiens
  CDR3 for beta chain variable domain of TCR clone 97066 (TRBV20-1, TRBJ2-4)
CSASGRVGENIQYL

SEQ ID NO: 194133 - protein, 14 aa, Homo sapiens
  CDR3 for alpha chain variable domain of TCR clone 97067 (TRAV17, TRAJ54)
CATDANQGAHKLVF

SEQ ID NO: 194134 - protein, 12 aa, Homo sapiens
  CDR3 for beta chain variable domain of TCR clone 97067 (TRBV7-9, TRBJ2-7)
CASSIKREEQYF

SEQ ID NO: 194135 - protein, 14 aa, Homo sapiens
  CDR3 for alpha chain variable domain of TCR clone 97068 (TRAV9-2, TRAJ39)
CALYIYNAGNMLTF

SEQ ID NO: 194136 - protein, 19 aa, Homo sapiens
  CDR3 for beta chain variable domain of TCR clone 97068 (TRBV28, TRBJ2-7)
CASSYSGTSRLGWVYEQYF

SEQ ID NO: 194137 - protein, 14 aa, Homo sapiens
  CDR3 for alpha chain variable domain of TCR clone 97069 (TRAV26-1, TRAJ57)
CIGAGQGGSEKLVF

SEQ ID NO: 194138 - protein, 13 aa, Homo sapiens
  CDR3 for beta chain variable domain of TCR clone 97069 (TRBV19, TRBJ2-7)
CASSLTTSYEQYF

SEQ ID NO: 194139 - protein, 15 aa, Homo sapiens
  CDR3 for alpha chain variable domain of TCR clone 97070 (TRAV12-2, TRAJ53)
CAVNGVGGSNYKLTF

SEQ ID NO: 194140 - protein, 17 aa, Homo sapiens
  CDR3 for beta chain variable domain of TCR clone 97070 (TRBV7-3, TRBJ2-3)
CASSLMKRMRGADTQYF

SEQ ID NO: 194141 - protein, 11 aa, Homo sapiens
  CDR3 for alpha chain variable domain of TCR clone 97071 (TRAV27, TRAJ47)
CAGASGNKLVF

SEQ ID NO: 194142 - protein, 14 aa, Homo sapiens
  CDR3 for beta chain variable domain of TCR clone 97071 (TRBV4-3, TRBJ1-1)
CASSQGWTPARAFF

SEQ ID NO: 194143 - protein, 10 aa, Homo sapiens
  CDR3 for alpha chain variable domain of TCR clone 97072 (TRAV23/DV6, TRAJ3)
CAATTFALGG

SEQ ID NO: 194144 - protein, 15 aa, Homo sapiens
  CDR3 for beta chain variable domain of TCR clone 97072 (TRBV19, TRBJ1-6)
CASSTQGAVGSPLHL

SEQ ID NO: 194145 - protein, 16 aa, Homo sapiens
  CDR3 for alpha chain variable domain of TCR clone 97073 (TRAV16, TRAJ4)
CALSRKFSGGYNKLIF

SEQ ID NO: 194146 - protein, 16 aa, Homo sapiens
  CDR3 for beta chain variable domain of TCR clone 97073 (TRBV24-1, TRBJ2-3)
CATSDPGTGATDTQYF

SEQ ID NO: 194147 - protein, 13 aa, Homo sapiens
  CDR3 for alpha chain variable domain of TCR clone 97074 (TRAV12-3, TRAJ53)
CAMRGGSNYKLTF

SEQ ID NO: 194148 - protein, 15 aa, Homo sapiens
  CDR3 for beta chain variable domain of TCR clone 97074 (TRBV2, TRBJ2-1)
CATQARLGMIGEQFF

SEQ ID NO: 194149 - protein, 14 aa, Homo sapiens
  CDR3 for alpha chain variable domain of TCR clone 97075 (TRAV23/DV6, TRAJ22)
CAASVSGSARQLTF

SEQ ID NO: 194150 - protein, 16 aa, Homo sapiens
  CDR3 for beta chain variable domain of TCR clone 97075 (TRBV19, TRBJ2-2)
CASSFPGQGRAGELFF

SEQ ID NO: 194151 - protein, 13 aa, Homo sapiens
  CDR3 for alpha chain variable domain of TCR clone 97076 (TRAV12-3, TRAJ9)
CAMRNTGGFKTIF

SEQ ID NO: 194152 - protein, 14 aa, Homo sapiens
  CDR3 for beta chain variable domain of TCR clone 97076 (TRBV11-2, TRBJ2-7)
CASSSTGEGCEQYF

SEQ ID NO: 194153 - protein, 12 aa, Homo sapiens
  CDR3 for alpha chain variable domain of TCR clone 97077 (TRAV27, TRAJ9)
CAGESGGFKTIF

SEQ ID NO: 194154 - protein, 13 aa, Homo sapiens
  CDR3 for beta chain variable domain of TCR clone 97077 (TRBV7-9, TRBJ1-2)
CASSLKQNYGYTF

SEQ ID NO: 194155 - protein, 15 aa, Homo sapiens
  CDR3 for alpha chain variable domain of TCR clone 97078 (TRAV3, TRAJ22)
CAVRDRGGSARQLTF

SEQ ID NO: 194156 - protein, 15 aa, Homo sapiens
  CDR3 for beta chain variable domain of TCR clone 97078 (TRBV28, TRBJ2-1)
CASSIIAGGRSEQFF

SEQ ID NO: 194157 - protein, 15 aa, Homo sapiens
  CDR3 for alpha chain variable domain of TCR clone 97079 (TRAV23/DV6, TRAJ18)
CAARYRGSTLGRLYF

SEQ ID NO: 194158 - protein, 12 aa, Homo sapiens
  CDR3 for beta chain variable domain of TCR clone 97079 (TRBV7-8, TRBJ2-7)
CAISLGDREQYF

SEQ ID NO: 194159 - protein, 12 aa, Homo sapiens
  CDR3 for alpha chain variable domain of TCR clone 97080 (TRAV12-3, TRAJ40)
CAMSTGTYKYIF

SEQ ID NO: 194160 - protein, 15 aa, Homo sapiens
  CDR3 for beta chain variable domain of TCR clone 97080 (TRBV9, TRBJ1-6)
CASSVAGTGDSPLHF

SEQ ID NO: 194161 - protein, 12 aa, Homo sapiens
  CDR3 for alpha chain variable domain of TCR clone 97081 (TRAV8-3, TRAJ40)
CAVTSGTYKYIF

SEQ ID NO: 194162 - protein, 14 aa, Homo sapiens
  CDR3 for beta chain variable domain of TCR clone 97081 (TRBV12-4, TRBJ2-3)
CASSGQGRTDTQYF

SEQ ID NO: 194163 - protein, 12 aa, Homo sapiens
  CDR3 for alpha chain variable domain of TCR clone 97082 (TRAV17, TRAJ20)
CATAHNDYKLSF

SEQ ID NO: 194164 - protein, 12 aa, Homo sapiens
  CDR3 for beta chain variable domain of TCR clone 97082 (TRBV10-3, TRBJ2-7)
CAHGADSGEQYF

SEQ ID NO: 194165 - protein, 13 aa, Homo sapiens
  CDR3 for alpha chain variable domain of TCR clone 97083 (TRAV12-1, TRAJ3)
CVVNPRGASKIIF

SEQ ID NO: 194166 - protein, 13 aa, Homo sapiens
  CDR3 for beta chain variable domain of TCR clone 97083 (TRBV24-1, TRBJ2-2)
CATSDWSTGELFF

SEQ ID NO: 194167 - protein, 13 aa, Homo sapiens
  CDR3 for alpha chain variable domain of TCR clone 97084 (TRAV1-2, TRAJ9)
CAVINTGGFKTIF

SEQ ID NO: 194168 - protein, 14 aa, Homo sapiens
  CDR3 for beta chain variable domain of TCR clone 97084 (TRBV20-1, TRBJ2-3)
CSARGGTSTDTQYF

SEQ ID NO: 194169 - protein, 12 aa, Homo sapiens
  CDR3 for alpha chain variable domain of TCR clone 97085 (TRAV17, TRAJ4)
CATDGGYNKLIF

SEQ ID NO: 194170 - protein, 14 aa, Homo sapiens
  CDR3 for beta chain variable domain of TCR clone 97085 (TRBV7-8, TRBJ1-2)
CASSPDSLSYGYTF

SEQ ID NO: 194171 - protein, 12 aa, Homo sapiens
  CDR3 for alpha chain variable domain of TCR clone 97086 (TRAV12-3, TRAJ20)
CAMVRGDYKLSF

SEQ ID NO: 194172 - protein, 13 aa, Homo sapiens
  CDR3 for beta chain variable domain of TCR clone 97086 (TRBV23-1, TRBJ1-4)
CASRGKFNENLFF

SEQ ID NO: 194173 - protein, 15 aa, Homo sapiens
  CDR3 for alpha chain variable domain of TCR clone 97087 (TRAV26-1, TRAJ44)
CIVRANTGSASKLTF

SEQ ID NO: 194174 - protein, 16 aa, Homo sapiens
  CDR3 for beta chain variable domain of TCR clone 97087 (TRBV7-7, TRBJ2-1)
CASSLASGTSYNEQFF

SEQ ID NO: 194175 - protein, 16 aa, Homo sapiens
  CDR3 for alpha chain variable domain of TCR clone 97088 (TRAV30, TRAJ24)
CGTEIVDADSGGKFQF

SEQ ID NO: 194176 - protein, 19 aa, Homo sapiens
  CDR3 for beta chain variable domain of TCR clone 97088 (TRBV25-1, TRBJ2-2)
CAILVYRVDRGRKTGELFF

SEQ ID NO: 194177 - protein, 14 aa, Homo sapiens
  CDR3 for alpha chain variable domain of TCR clone 97089 (TRAV36/DV7, TRAJ44)
CCGANTGTASKLTF

SEQ ID NO: 194178 - protein, 15 aa, Homo sapiens
  CDR3 for beta chain variable domain of TCR clone 97089 (TRBV11-2, TRBJ2-1)
CASSLGTSGLNEQFF

SEQ ID NO: 194179 - protein, 17 aa, Homo sapiens
  CDR3 for alpha chain variable domain of TCR clone 97090 (TRAV12-2, TRAJ48)
CASNEKLTFGTGTRLTI

SEQ ID NO: 194180 - protein, 15 aa, Homo sapiens
  CDR3 for beta chain variable domain of TCR clone 97090 (TRBV19, TRBJ2-1)
CASSIQATSYNEQFF

SEQ ID NO: 194181 - protein, 15 aa, Homo sapiens
  CDR3 for alpha chain variable domain of TCR clone 97091 (TRAV8-4, TRAJ7)
CAVSGGNYGNNRLAF

SEQ ID NO: 194182 - protein, 11 aa, Homo sapiens
  CDR3 for beta chain variable domain of TCR clone 97091 (TRBV20-1, TRBJ2-1)
CSLSGGSEQFF

SEQ ID NO: 194183 - protein, 17 aa, Homo sapiens
  CDR3 for alpha chain variable domain of TCR clone 97092 (TRAV3, TRAJ6)
CAVRDGPRAGGSYIPTF

SEQ ID NO: 194184 - protein, 14 aa, Homo sapiens
  CDR3 for beta chain variable domain of TCR clone 97092 (TRBV7-3, TRBJ2-1)
CASSTSGGWDEQFL

SEQ ID NO: 194185 - protein, 17 aa, Homo sapiens
  CDR3 for alpha chain variable domain of TCR clone 97093 (TRAV3, TRAJ6)
CAVRDGPRAGGSSIPTF

SEQ ID NO: 194186 - protein, 13 aa, Homo sapiens
  CDR3 for beta chain variable domain of TCR clone 97093 (TRBV27, TRBJ1-1)
CASSLSIGAEAFF

SEQ ID NO: 194187 - protein, 17 aa, Homo sapiens
  CDR3 for alpha chain variable domain of TCR clone 97094 (TRAV8-2, )
CVVNIQNPDPAVYQLRD

SEQ ID NO: 194188 - protein, 15 aa, Homo sapiens
  CDR3 for beta chain variable domain of TCR clone 97094 (TRBV7-2, TRBJ2-1)
CASSSGLAGGNEQFF

SEQ ID NO: 194189 - protein, 18 aa, Homo sapiens
  CDR3 for alpha chain variable domain of TCR clone 97095 (TRAV21, TRAJ52)
CAVRPSPAGGTSYGKLTF

SEQ ID NO: 194190 - protein, 13 aa, Homo sapiens
  CDR3 for beta chain variable domain of TCR clone 97095 (TRBV7-3, TRBJ1-1)
CAGSQDWGAEAFF

SEQ ID NO: 194191 - protein, 12 aa, Homo sapiens
  CDR3 for alpha chain variable domain of TCR clone 97096 (TRAV13-1, TRAJ15)
CAASQAGTARIF

SEQ ID NO: 194192 - protein, 14 aa, Homo sapiens
  CDR3 for beta chain variable domain of TCR clone 97096 (TRBV19, TRBJ2-2)
CASSTLHRSGELFF

SEQ ID NO: 194193 - protein, 14 aa, Homo sapiens
  CDR3 for alpha chain variable domain of TCR clone 97097 (TRAV13-2, TRAJ43)
CAEIPTHNNNDMRF

SEQ ID NO: 194194 - protein, 15 aa, Homo sapiens
  CDR3 for beta chain variable domain of TCR clone 97097 (TRBV7-9, TRBJ2-2)
CASGPLDTFPGELFF

SEQ ID NO: 194195 - protein, 14 aa, Homo sapiens
  CDR3 for alpha chain variable domain of TCR clone 97098 (TRAV1-2, TRAJ29)
CAVRELTIATPLVF

SEQ ID NO: 194196 - protein, 14 aa, Homo sapiens
  CDR3 for beta chain variable domain of TCR clone 97098 (TRBV3-1, TRBJ2-5)
CASSQGPDQETQYF

SEQ ID NO: 194197 - protein, 14 aa, Homo sapiens
  CDR3 for alpha chain variable domain of TCR clone 97099 (TRAV9-2, TRAJ39)
CALYIYNAGNMLTF

SEQ ID NO: 194198 - protein, 14 aa, Homo sapiens
  CDR3 for beta chain variable domain of TCR clone 97099 (TRBV10-2, TRBJ1-5)
CASSSTGRNQPQHF

SEQ ID NO: 194199 - protein, 14 aa, Homo sapiens
  CDR3 for alpha chain variable domain of TCR clone 97100 (TRAV12-2, TRAJ17)
CAVLFKAAGNKLTF

SEQ ID NO: 194200 - protein, 13 aa, Homo sapiens
  CDR3 for beta chain variable domain of TCR clone 97100 (TRBV10-2, TRBJ2-5)
CASGRLARETQYF

SEQ ID NO: 194201 - protein, 15 aa, Homo sapiens
  CDR3 for alpha chain variable domain of TCR clone 97101 (TRAV27, TRAJ33)
CAGADIMASNYQLIW

SEQ ID NO: 194202 - protein, 13 aa, Homo sapiens
  CDR3 for beta chain variable domain of TCR clone 97101 (TRBV28, TRBJ1-2)
CASSLQGRGGYTF

SEQ ID NO: 194203 - protein, 13 aa, Homo sapiens
  CDR3 for alpha chain variable domain of TCR clone 97102 (TRAV26-1, TRAJ48)
CIVSVVGDEKLTF

SEQ ID NO: 194204 - protein, 19 aa, Homo sapiens
  CDR3 for beta chain variable domain of TCR clone 97102 (TRBV11-3, TRBJ2-2)
CASSTRPGAKTTNTGELFF

SEQ ID NO: 194205 - protein, 14 aa, Homo sapiens
  CDR3 for alpha chain variable domain of TCR clone 97103 (TRAV3, TRAJ21)
CAVRDAYNFNKFYF

SEQ ID NO: 194206 - protein, 15 aa, Homo sapiens
  CDR3 for beta chain variable domain of TCR clone 97103 (TRBV6-5, TRBJ1-5)
CASSYSWDSNQTQHF

SEQ ID NO: 194207 - protein, 12 aa, Homo sapiens
  CDR3 for alpha chain variable domain of TCR clone 97104 (TRAV1-2, TRAJ29)
CAVHSGNTPLVF

SEQ ID NO: 194208 - protein, 12 aa, Homo sapiens
  CDR3 for beta chain variable domain of TCR clone 97104 (TRBV12-4, TRBJ2-7)
CASSLGGYEQYF

SEQ ID NO: 194209 - protein, 12 aa, Homo sapiens
  CDR3 for alpha chain variable domain of TCR clone 97105 (TRAV12-1, TRAJ40)
CVDYSGTYKYIF

SEQ ID NO: 194210 - protein, 18 aa, Homo sapiens
  CDR3 for beta chain variable domain of TCR clone 97105 (TRBV11-2, TRBJ2-3)
CASSLGGASRGAPNTQYF

SEQ ID NO: 194211 - protein, 13 aa, Homo sapiens
  CDR3 for alpha chain variable domain of TCR clone 97106 (TRAV12-3, TRAJ7)
CAMTPYWNNRLAF

SEQ ID NO: 194212 - protein, 16 aa, Homo sapiens
  CDR3 for beta chain variable domain of TCR clone 97106 (TRBV20-1, TRBJ1-4)
CSARPYGGELNEKLFF

SEQ ID NO: 194213 - protein, 14 aa, Homo sapiens
  CDR3 for alpha chain variable domain of TCR clone 97107 (TRAV1-2, TRAJ16)
CAVNRFSDGQKLLF

SEQ ID NO: 194214 - protein, 15 aa, Homo sapiens
  CDR3 for beta chain variable domain of TCR clone 97107 (TRBV28, TRBJ2-1)
CASRVGLDEYNEQFF

SEQ ID NO: 194215 - protein, 15 aa, Homo sapiens
  CDR3 for alpha chain variable domain of TCR clone 97108 (TRAV3, TRAJ27)
CAVRDPLTNAGKSTF

SEQ ID NO: 194216 - protein, 15 aa, Homo sapiens
  CDR3 for beta chain variable domain of TCR clone 97108 (TRBV28, TRBJ2-1)
CASSIIAGGRSEQFV

SEQ ID NO: 194217 - protein, 11 aa, Homo sapiens
  CDR3 for alpha chain variable domain of TCR clone 97109 (TRAV1-1, TRAJ20)
CAVFNDYKLSF

SEQ ID NO: 194218 - protein, 16 aa, Homo sapiens
  CDR3 for beta chain variable domain of TCR clone 97109 (TRBV29-1, TRBJ2-2)
RSVEKTSEGNTGELFF

SEQ ID NO: 194219 - protein, 15 aa, Homo sapiens
  CDR3 for alpha chain variable domain of TCR clone 97110 (TRAV17, TRAJ16)
CATALRFSDGQKLLF

SEQ ID NO: 194220 - protein, 14 aa, Homo sapiens
  CDR3 for beta chain variable domain of TCR clone 97110 (TRBV5-5, TRBJ2-7)
CASSLGQGTYEQYF

SEQ ID NO: 194221 - protein, 11 aa, Homo sapiens
  CDR3 for alpha chain variable domain of TCR clone 97111 (TRAV22, TRAJ47)
CAVLYGNKLVF

SEQ ID NO: 194222 - protein, 15 aa, Homo sapiens
  CDR3 for beta chain variable domain of TCR clone 97111 (TRBV20-1, TRBJ2-2)
CSAIPGHSNTGELFF

SEQ ID NO: 194223 - protein, 13 aa, Homo sapiens
  CDR3 for alpha chain variable domain of TCR clone 97112 (TRAV8-6, TRAJ49)
CAVITNTGNQFYF

SEQ ID NO: 194224 - protein, 14 aa, Homo sapiens
  CDR3 for beta chain variable domain of TCR clone 97112 (TRBV19, TRBJ2-1)
CASPTFVLSGEQFL

SEQ ID NO: 194225 - protein, 12 aa, Homo sapiens
  CDR3 for alpha chain variable domain of TCR clone 97113 (TRAV3, TRAJ31)
CAVRDGNARLMF

SEQ ID NO: 194226 - protein, 18 aa, Homo sapiens
  CDR3 for beta chain variable domain of TCR clone 97113 (TRBV7-2, TRBJ2-3)
CASSVKREGSGITDTQYF

SEQ ID NO: 194227 - protein, 13 aa, Homo sapiens
  CDR3 for alpha chain variable domain of TCR clone 97114 (TRAV35, TRAJ48)
CAGHEFGNEKLSF

SEQ ID NO: 194228 - protein, 14 aa, Homo sapiens
  CDR3 for beta chain variable domain of TCR clone 97114 (TRBV19, TRBJ2-1)
CASPTFVLSGEQFF

SEQ ID NO: 194229 - protein, 14 aa, Homo sapiens
  CDR3 for alpha chain variable domain of TCR clone 97115 (TRAV26-1, TRAJ38)
CIADNAGNNRKLIW

SEQ ID NO: 194230 - protein, 16 aa, Homo sapiens
  CDR3 for beta chain variable domain of TCR clone 97115 (TRBV27, TRBJ2-1)
SMNVEPGTSGDNEQFF

SEQ ID NO: 194231 - protein, 15 aa, Homo sapiens
  CDR3 for alpha chain variable domain of TCR clone 97116 (TRAV36/DV7, TRAJ22)
CAVTFSSGSARQLTF

SEQ ID NO: 194232 - protein, 14 aa, Homo sapiens
  CDR3 for beta chain variable domain of TCR clone 97116 (TRBV12-5, TRBJ2-5)
CASGSRTHQETQYF

SEQ ID NO: 194233 - protein, 13 aa, Homo sapiens
  CDR3 for alpha chain variable domain of TCR clone 97117 (TRAV1-1, TRAJ9)
CAAKSTGGFKTIF

SEQ ID NO: 194234 - protein, 14 aa, Homo sapiens
  CDR3 for beta chain variable domain of TCR clone 97117 (TRBV12-5, TRBJ2-5)
CASGSRTHQETQYF

SEQ ID NO: 194235 - protein, 16 aa, Homo sapiens
  CDR3 for alpha chain variable domain of TCR clone 97118 (TRAV3, TRAJ10)
CAVRDMRAGGGNKLTF

SEQ ID NO: 194236 - protein, 16 aa, Homo sapiens
  CDR3 for beta chain variable domain of TCR clone 97118 (TRBV28, TRBJ2-7)
CASSLFFETGGPEQYF

SEQ ID NO: 194237 - protein, 16 aa, Homo sapiens
  CDR3 for alpha chain variable domain of TCR clone 97119 (TRAV3, TRAJ37)
CAVRGTGSGNTGKLIF

SEQ ID NO: 194238 - protein, 12 aa, Homo sapiens
  CDR3 for beta chain variable domain of TCR clone 97119 (TRBV11-2, TRBJ2-2)
CASSLGGGELFF

SEQ ID NO: 194239 - protein, 15 aa, Homo sapiens
  CDR3 for alpha chain variable domain of TCR clone 97120 (TRAV26-1, TRAJ22)
CIVRVSFWFCKATDL

SEQ ID NO: 194240 - protein, 14 aa, Homo sapiens
  CDR3 for beta chain variable domain of TCR clone 97120 (TRBV4-1, TRBJ2-2)
CASSQAVNTGELLF

SEQ ID NO: 194241 - protein, 15 aa, Homo sapiens
  CDR3 for alpha chain variable domain of TCR clone 97121 (TRAV3, TRAJ5)
CAVRDRKTGRRALTF

SEQ ID NO: 194242 - protein, 16 aa, Homo sapiens
  CDR3 for beta chain variable domain of TCR clone 97121 (TRBV12-5, TRBJ2-5)
CASGPRTSGNQETQYF

SEQ ID NO: 194243 - protein, 11 aa, Homo sapiens
  CDR3 for alpha chain variable domain of TCR clone 97122 (TRAV3, TRAJ21)
CAVGNFNKFYF

SEQ ID NO: 194244 - protein, 13 aa, Homo sapiens
  CDR3 for beta chain variable domain of TCR clone 97122 (TRBV24-1, TRBJ2-1)
CATSAGPYNEQFF

SEQ ID NO: 194245 - protein, 19 aa, Homo sapiens
  CDR3 for alpha chain variable domain of TCR clone 97123 (TRAV29/DV5, TRAJ49)
CSVLLCSKLTVDTGNQFYF

SEQ ID NO: 194246 - protein, 15 aa, Homo sapiens
  CDR3 for beta chain variable domain of TCR clone 97123 (TRBV19, TRBJ2-1)
CASSIGLAGWDEQFF

SEQ ID NO: 194247 - protein, 16 aa, Homo sapiens
  CDR3 for alpha chain variable domain of TCR clone 97124 (TRAV8-3, TRAJ10)
CALLGGLTGGGNKLTF

SEQ ID NO: 194248 - protein, 13 aa, Homo sapiens
  CDR3 for beta chain variable domain of TCR clone 97124 (TRBV7-9, TRBJ2-7)
CASSFAGAYEQYF

SEQ ID NO: 194249 - protein, 12 aa, Homo sapiens
  CDR3 for alpha chain variable domain of TCR clone 97125 (TRAV36/DV7, TRAJ54)
CAVVRGAQKLVF

SEQ ID NO: 194250 - protein, 14 aa, Homo sapiens
  CDR3 for beta chain variable domain of TCR clone 97125 (TRBV7-2, TRBJ2-7)
CASSPKTSFYEQYF

SEQ ID NO: 194251 - protein, 12 aa, Homo sapiens
  CDR3 for alpha chain variable domain of TCR clone 97126 (TRAV8-6, TRAJ11)
CAVSSGYSTLTF

SEQ ID NO: 194252 - protein, 16 aa, Homo sapiens
  CDR3 for beta chain variable domain of TCR clone 97126 (TRBV5-1, TRBJ2-2)
CASSFGDRPNTGELFF

SEQ ID NO: 194253 - protein, 12 aa, Homo sapiens
  CDR3 for alpha chain variable domain of TCR clone 97127 (TRAV1-1, TRAJ8)
CAGGTGFQKLVF

SEQ ID NO: 194254 - protein, 17 aa, Homo sapiens
  CDR3 for beta chain variable domain of TCR clone 97127 (TRBV20-1, TRBJ2-2)
CSASGSGQGGLTGELFF

SEQ ID NO: 194255 - protein, 11 aa, Homo sapiens
  CDR3 for alpha chain variable domain of TCR clone 97128 (TRAV26-1, TRAJ37)
CIVRVGRKLIF

SEQ ID NO: 194256 - protein, 14 aa, Homo sapiens
  CDR3 for beta chain variable domain of TCR clone 97128 (TRBV28, TRBJ1-2)
CASRIQGANYGYTF

SEQ ID NO: 194257 - protein, 14 aa, Homo sapiens
  CDR3 for alpha chain variable domain of TCR clone 97129 (TRAV1-2, TRAJ8)
CAVRGDTGFQKLVF

SEQ ID NO: 194258 - protein, 15 aa, Homo sapiens
  CDR3 for beta chain variable domain of TCR clone 97129 (TRBV20-1, TRBJ2-7)
CSARDRVSGMDEQYF

SEQ ID NO: 194259 - protein, 13 aa, Homo sapiens
  CDR3 for alpha chain variable domain of TCR clone 97130 (TRAV35, TRAJ42)
CAGFPGSQGNLIF

SEQ ID NO: 194260 - protein, 16 aa, Homo sapiens
  CDR3 for beta chain variable domain of TCR clone 97130 (TRBV7-3, TRBJ2-2)
CASSLKRGTLSGELFF

SEQ ID NO: 194261 - protein, 15 aa, Homo sapiens
  CDR3 for alpha chain variable domain of TCR clone 97131 (TRAV13-2, TRAJ16)
CAENDRFSDGQKLLF

SEQ ID NO: 194262 - protein, 18 aa, Homo sapiens
  CDR3 for beta chain variable domain of TCR clone 97131 (TRBV12-4, TRBJ2-2)
CASSLVAVTRGRTGELFF

SEQ ID NO: 194263 - protein, 17 aa, Homo sapiens
  CDR3 for alpha chain variable domain of TCR clone 97132 (TRAV26-2, TRAJ42)
CILRGVGYGGSQGNLIF

SEQ ID NO: 194264 - protein, 16 aa, Homo sapiens
  CDR3 for beta chain variable domain of TCR clone 97132 (TRBV12-4, TRBJ2-7)
CASSLIGGTGTYEQYF

SEQ ID NO: 194265 - protein, 18 aa, Homo sapiens
  CDR3 for alpha chain variable domain of TCR clone 97133 (TRAV21, TRAJ52)
CAVRPSPAGGTSYGKLTF

SEQ ID NO: 194266 - protein, 19 aa, Homo sapiens
  CDR3 for beta chain variable domain of TCR clone 97133 (TRBV2, TRBJ2-7)
CASSRGPNDQGLASYEQYF

SEQ ID NO: 194267 - protein, 12 aa, Homo sapiens
  CDR3 for alpha chain variable domain of TCR clone 97134 (TRAV10, TRAJ34)
CVVSGKHRQAHL

SEQ ID NO: 194268 - protein, 14 aa, Homo sapiens
  CDR3 for beta chain variable domain of TCR clone 97134 (TRBV19, TRBJ2-1)
CASPTFVLSDEHFF

SEQ ID NO: 194269 - protein, 17 aa, Homo sapiens
  CDR3 for alpha chain variable domain of TCR clone 97135 (TRAV3, TRAJ6)
CDVRDGPRAGGSYIPTF

SEQ ID NO: 194270 - protein, 13 aa, Homo sapiens
  CDR3 for beta chain variable domain of TCR clone 97135 (TRBV4-1, TRBJ2-2)
CASSQENTGELFF

SEQ ID NO: 194271 - protein, 15 aa, Homo sapiens
  CDR3 for alpha chain variable domain of TCR clone 97136 (TRAV25, TRAJ52)
CAGTSGGTSYGKLTL

SEQ ID NO: 194272 - protein, 14 aa, Homo sapiens
  CDR3 for beta chain variable domain of TCR clone 97136 (TRBV4-1, TRBJ2-7)
CASSPVAGGDEQYF

SEQ ID NO: 194273 - protein, 11 aa, Homo sapiens
  CDR3 for alpha chain variable domain of TCR clone 97137 (TRAV1-2, TRAJ40)
CAVPGTYKYIF

SEQ ID NO: 194274 - protein, 11 aa, Homo sapiens
  CDR3 for beta chain variable domain of TCR clone 97137 (TRBV29-1, TRBJ2-5)
CSEDRTGTQYF

SEQ ID NO: 194275 - protein, 14 aa, Homo sapiens
  CDR3 for alpha chain variable domain of TCR clone 97138 (TRAV3, TRAJ21)
CAVESQANFNKFYF

SEQ ID NO: 194276 - protein, 15 aa, Homo sapiens
  CDR3 for beta chain variable domain of TCR clone 97138 (TRBV4-1, TRBJ2-7)
CASSQQGQGFDEQYF

SEQ ID NO: 194277 - protein, 13 aa, Homo sapiens
  CDR3 for alpha chain variable domain of TCR clone 97139 (TRAV13-1, TRAJ21)
CAASIYNFNKFYF

SEQ ID NO: 194278 - protein, 13 aa, Homo sapiens
  CDR3 for beta chain variable domain of TCR clone 97139 (TRBV7-7, TRBJ2-5)
CASSRSGQETQYF

SEQ ID NO: 194279 - protein, 12 aa, Homo sapiens
  CDR3 for alpha chain variable domain of TCR clone 97140 (TRAV27, TRAJ13)
CAGGRGYQKVTF

SEQ ID NO: 194280 - protein, 16 aa, Homo sapiens
  CDR3 for beta chain variable domain of TCR clone 97140 (TRBV28, TRBJ2-1)
CASSSSYSGSLNEQFF

SEQ ID NO: 194281 - protein, 12 aa, Homo sapiens
  CDR3 for alpha chain variable domain of TCR clone 97141 (TRAV29/DV5, TRAJ49)
CAATDTGNKFYF

SEQ ID NO: 194282 - protein, 15 aa, Homo sapiens
  CDR3 for beta chain variable domain of TCR clone 97141 (TRBV19, TRBJ2-2)
CASRQTGADTGELFF

SEQ ID NO: 194283 - protein, 14 aa, Homo sapiens
  CDR3 for alpha chain variable domain of TCR clone 97142 (TRAV8-3, TRAJ4)
CAVGAAGGYNKLIF

SEQ ID NO: 194284 - protein, 18 aa, Homo sapiens
  CDR3 for beta chain variable domain of TCR clone 97142 (TRBV5-4, TRBJ2-3)
CASSPTAGFLPSTDTQYF

SEQ ID NO: 194285 - protein, 14 aa, Homo sapiens
  CDR3 for alpha chain variable domain of TCR clone 97143 (TRAV2, TRAJ37)
CAVDFTSNTGKLLF

SEQ ID NO: 194286 - protein, 15 aa, Homo sapiens
  CDR3 for beta chain variable domain of TCR clone 97143 (TRBV20-1, TRBJ1-1)
CSASQGVTGNTEAFF

SEQ ID NO: 194287 - protein, 13 aa, Homo sapiens
  CDR3 for alpha chain variable domain of TCR clone 97144 (TRAV30, TRAJ24)
CGTVTDSWGKLQF

SEQ ID NO: 194288 - protein, 14 aa, Homo sapiens
  CDR3 for beta chain variable domain of TCR clone 97144 (TRBV6-3, TRBJ2-2)
CASAYTPDTGELFF

SEQ ID NO: 194289 - protein, 16 aa, Homo sapiens
  CDR3 for alpha chain variable domain of TCR clone 97145 (TRAV8-4, TRAJ18)
CAVTANGGSALGRLYF

SEQ ID NO: 194290 - protein, 14 aa, Homo sapiens
  CDR3 for beta chain variable domain of TCR clone 97145 (TRBV12-4, TRBJ1-2)
CASSSAGHIYGYTF

SEQ ID NO: 194291 - protein, 14 aa, Homo sapiens
  CDR3 for alpha chain variable domain of TCR clone 97146 (TRAV16, TRAJ32)
CALKLGGATSKLIF

SEQ ID NO: 194292 - protein, 13 aa, Homo sapiens
  CDR3 for beta chain variable domain of TCR clone 97146 (TRBV15, TRBJ1-6)
CATSGGLNSPLHF

SEQ ID NO: 194293 - protein, 15 aa, Homo sapiens
  CDR3 for alpha chain variable domain of TCR clone 97147 (TRAV17, TRAJ13)
CATDAGSGGYQKVTF

SEQ ID NO: 194294 - protein, 17 aa, Homo sapiens
  CDR3 for beta chain variable domain of TCR clone 97147 (TRBV11-2, TRBJ2-1)
YASSLYPPGVEYNEQFF

SEQ ID NO: 194295 - protein, 14 aa, Homo sapiens
  CDR3 for alpha chain variable domain of TCR clone 97148 (TRAV17, TRAJ34)
CATDSLEGTDKLIF

SEQ ID NO: 194296 - protein, 13 aa, Homo sapiens
  CDR3 for beta chain variable domain of TCR clone 97148 (TRBV11-2, TRBJ2-7)
CASSGTKPYEQYF

SEQ ID NO: 194297 - protein, 16 aa, Homo sapiens
  CDR3 for alpha chain variable domain of TCR clone 97149 (TRAV16, TRAJ4)
CALSRMFSGGYDKLIF

SEQ ID NO: 194298 - protein, 16 aa, Homo sapiens
  CDR3 for beta chain variable domain of TCR clone 97149 (TRBV24-1, TRBJ2-3)
CATSDPGTGATDTQYF

SEQ ID NO: 194299 - protein, 14 aa, Homo sapiens
  CDR3 for alpha chain variable domain of TCR clone 97150 (TRAV12-3, TRAJ42)
CAMNYGGSQGNLIF

SEQ ID NO: 194300 - protein, 14 aa, Homo sapiens
  CDR3 for beta chain variable domain of TCR clone 97150 (TRBV7-2, TRBJ2-7)
CASRSQGTAYEQYF

SEQ ID NO: 194301 - protein, 12 aa, Homo sapiens
  CDR3 for alpha chain variable domain of TCR clone 97151 (TRAV12-1, TRAJ16)
CVVFRDGQKLLF

SEQ ID NO: 194302 - protein, 15 aa, Homo sapiens
  CDR3 for beta chain variable domain of TCR clone 97151 (TRBV2, TRBJ2-3)
CASSDFEKATDTQYF

SEQ ID NO: 194303 - protein, 16 aa, Homo sapiens
  CDR3 for alpha chain variable domain of TCR clone 97152 (TRAV23/DV6, TRAJ48)
CAASGVVHFGNEKLTF

SEQ ID NO: 194304 - protein, 15 aa, Homo sapiens
  CDR3 for beta chain variable domain of TCR clone 97152 (TRBV20-1, TRBJ2-5)
CSAGLAGVSQETQYF

SEQ ID NO: 194305 - protein, 13 aa, Homo sapiens
  CDR3 for alpha chain variable domain of TCR clone 97153 (TRAV8-4, TRAJ40)
CAVSDRGTYKCIF

SEQ ID NO: 194306 - protein, 16 aa, Homo sapiens
  CDR3 for beta chain variable domain of TCR clone 97153 (TRBV29-1, TRBJ2-7)
CSVEVVGTSGSYEQYF

SEQ ID NO: 194307 - protein, 18 aa, Homo sapiens
  CDR3 for alpha chain variable domain of TCR clone 97154 (TRAV12-3, TRAJ52)
CAMSRTNAGGTSYGKLTF

SEQ ID NO: 194308 - protein, 17 aa, Homo sapiens
  CDR3 for beta chain variable domain of TCR clone 97154 (TRBV7-3, TRBJ2-3)
CASSLMKRMRGADTQYV

SEQ ID NO: 194309 - protein, 14 aa, Homo sapiens
  CDR3 for alpha chain variable domain of TCR clone 97155 (TRAV1-2, TRAJ6)
CAVSLSGGSDIPTF

SEQ ID NO: 194310 - protein, 15 aa, Homo sapiens
  CDR3 for beta chain variable domain of TCR clone 97155 (TRBV28, TRBJ2-7)
CASSPGGRGFYEQYF

SEQ ID NO: 194311 - protein, 12 aa, Homo sapiens
  CDR3 for alpha chain variable domain of TCR clone 97156 (TRAV26-2, TRAJ21)
CILKGNFNKFYF

SEQ ID NO: 194312 - protein, 12 aa, Homo sapiens
  CDR3 for beta chain variable domain of TCR clone 97156 (TRBV28, TRBJ2-3)
CASSLYRDTQYF

SEQ ID NO: 194313 - protein, 14 aa, Homo sapiens
  CDR3 for alpha chain variable domain of TCR clone 97157 (TRAV17, TRAJ6)
CATDASVGSYIPTF

SEQ ID NO: 194314 - protein, 19 aa, Homo sapiens
  CDR3 for beta chain variable domain of TCR clone 97157 (TRBV4-3, TRBJ2-7)
CASSQEFIGWQVTPYEQYF

SEQ ID NO: 194315 - protein, 17 aa, Homo sapiens
  CDR3 for alpha chain variable domain of TCR clone 97158 (TRAV13-1, )
CAANIQNPDPAVYQLRD

SEQ ID NO: 194316 - protein, 14 aa, Homo sapiens
  CDR3 for beta chain variable domain of TCR clone 97158 (TRBV19, TRBJ2-7)
CASSIGPNAYEQYF

SEQ ID NO: 194317 - protein, 20 aa, Homo sapiens
  CDR3 for alpha chain variable domain of TCR clone 97159 (TRAV12-3, TRAJ41)
SLFIRDSQPSDSATPEALNF

SEQ ID NO: 194318 - protein, 15 aa, Homo sapiens
  CDR3 for beta chain variable domain of TCR clone 97159 (TRBV9, TRBJ1-6)
CASSVAGTGDSPLHF

SEQ ID NO: 194319 - protein, 14 aa, Homo sapiens
  CDR3 for alpha chain variable domain of TCR clone 97160 (TRAV1-2, TRAJ8)
CAVREDTGFQKLVF

SEQ ID NO: 194320 - protein, 17 aa, Homo sapiens
  CDR3 for beta chain variable domain of TCR clone 97160 (TRBV28, TRBJ2-5)
FASSRQGGLAGAETQYF

SEQ ID NO: 194321 - protein, 15 aa, Homo sapiens
  CDR3 for alpha chain variable domain of TCR clone 97161 (TRAV21, TRAJ53)
CATLNSGGSNYKLTF

SEQ ID NO: 194322 - protein, 14 aa, Homo sapiens
  CDR3 for beta chain variable domain of TCR clone 97161 (TRBV7-3, TRBJ1-1)
CASSLKGGNTEAFF

SEQ ID NO: 194323 - protein, 16 aa, Homo sapiens
  CDR3 for alpha chain variable domain of TCR clone 97162 (TRAV12-2, TRAJ10)
CAVNRVLTGGGNKPTF

SEQ ID NO: 194324 - protein, 17 aa, Homo sapiens
  CDR3 for beta chain variable domain of TCR clone 97162 (TRBV11-2, TRBJ2-1)
CASSLYPPGVEYNEQFF

SEQ ID NO: 194325 - protein, 17 aa, Homo sapiens
  CDR3 for alpha chain variable domain of TCR clone 97163 (TRAV12-2, TRAJ6)
CVPQGPPRAGGSYIPTF

SEQ ID NO: 194326 - protein, 16 aa, Homo sapiens
  CDR3 for beta chain variable domain of TCR clone 97163 (TRBV19, TRBJ2-2)
CASSTARASNTGELFF

SEQ ID NO: 194327 - protein, 13 aa, Homo sapiens
  CDR3 for alpha chain variable domain of TCR clone 97164 (TRAV17, TRAJ9)
CATFLTGGFKTIF

SEQ ID NO: 194328 - protein, 16 aa, Homo sapiens
  CDR3 for beta chain variable domain of TCR clone 97164 (TRBV5-6, TRBJ1-4)
CASSPSGGLKTEELFF

SEQ ID NO: 194329 - protein, 16 aa, Homo sapiens
  CDR3 for alpha chain variable domain of TCR clone 97165 (TRAV20, TRAJ26)
CAVQHRRDNYGQNFAF

SEQ ID NO: 194330 - protein, 13 aa, Homo sapiens
  CDR3 for beta chain variable domain of TCR clone 97165 (TRBV7-9, TRBJ1-2)
CASSLKQNYGYTF

SEQ ID NO: 194331 - protein, 12 aa, Homo sapiens
  CDR3 for alpha chain variable domain of TCR clone 97166 (TRAV12-2, TRAJ21)
CAVNRNFNKFYF

SEQ ID NO: 194332 - protein, 13 aa, Homo sapiens
  CDR3 for beta chain variable domain of TCR clone 97166 (TRBV7-9, TRBJ1-2)
CASSLKQNYGYTF

SEQ ID NO: 194333 - protein, 13 aa, Homo sapiens
  CDR3 for alpha chain variable domain of TCR clone 97167 (TRAV21, TRAJ20)
CAVGLRVDYKLSF

SEQ ID NO: 194334 - protein, 14 aa, Homo sapiens
  CDR3 for beta chain variable domain of TCR clone 97167 (TRBV6-1, TRBJ1-3)
CASVQGGGGNTMYF

SEQ ID NO: 194335 - protein, 14 aa, Homo sapiens
  CDR3 for alpha chain variable domain of TCR clone 97168 (TRAV8-4, TRAJ17)
CAVSEGAAGNKLTF

SEQ ID NO: 194336 - protein, 15 aa, Homo sapiens
  CDR3 for beta chain variable domain of TCR clone 97168 (TRBV7-9, TRBJ2-7)
CASSSSGLAVYEQYF

SEQ ID NO: 194337 - protein, 15 aa, Homo sapiens
  CDR3 for alpha chain variable domain of TCR clone 97169 (TRAV8-1, TRAJ8)
CAVNAMNTGFQKLVF

SEQ ID NO: 194338 - protein, 12 aa, Homo sapiens
  CDR3 for beta chain variable domain of TCR clone 97169 (TRBV20-1, TRBJ1-2)
CSAPGFNYGYTF

SEQ ID NO: 194339 - protein, 18 aa, Homo sapiens
  CDR3 for alpha chain variable domain of TCR clone 97170 (TRAV12-3, TRAJ52)
CAMSRTNAGGTSYGKLTF

SEQ ID NO: 194340 - protein, 17 aa, Homo sapiens
  CDR3 for beta chain variable domain of TCR clone 97170 (TRBV7-3, TRBJ2-3)
CASSLMKRMREADTQYF

SEQ ID NO: 194341 - protein, 13 aa, Homo sapiens
  CDR3 for alpha chain variable domain of TCR clone 97171 (TRAV23/DV6, TRAJ9)
CAASIDGKGLVIL

SEQ ID NO: 194342 - protein, 15 aa, Homo sapiens
  CDR3 for beta chain variable domain of TCR clone 97171 (TRBV6-3, TRBJ2-1)
CASSYASDSYNEQFF

SEQ ID NO: 194343 - protein, 15 aa, Homo sapiens
  CDR3 for alpha chain variable domain of TCR clone 97172 (TRAV8-2, TRAJ40)
CVVLGTTSGTYKYIF

SEQ ID NO: 194344 - protein, 15 aa, Homo sapiens
  CDR3 for beta chain variable domain of TCR clone 97172 (TRBV7-6, TRBJ2-5)
CASSKPTGPQETQYF

SEQ ID NO: 194345 - protein, 14 aa, Homo sapiens
  CDR3 for alpha chain variable domain of TCR clone 97173 (TRAV13-1, TRAJ44)
CAAKATGTASKLTF

SEQ ID NO: 194346 - protein, 17 aa, Homo sapiens
  CDR3 for beta chain variable domain of TCR clone 97173 (TRBV25-1, TRBJ2-7)
CASSDARVVFSSYEQYF

SEQ ID NO: 194347 - protein, 15 aa, Homo sapiens
  CDR3 for alpha chain variable domain of TCR clone 97174 (TRAV20, TRAJ43)
CAVQAGKSSNNDMRI

SEQ ID NO: 194348 - protein, 14 aa, Homo sapiens
  CDR3 for beta chain variable domain of TCR clone 97174 (TRBV27, TRBJ2-1)
CASRHLGGGKEQFF

SEQ ID NO: 194349 - protein, 10 aa, Homo sapiens
  CDR3 for alpha chain variable domain of TCR clone 97175 (TRAV1-2, TRAJ23)
CAAWAGKLIF

SEQ ID NO: 194350 - protein, 14 aa, Homo sapiens
  CDR3 for beta chain variable domain of TCR clone 97175 (TRBV20-1, TRBJ2-7)
CSTKTGTGGYEQYF

SEQ ID NO: 194351 - protein, 12 aa, Homo sapiens
  CDR3 for alpha chain variable domain of TCR clone 97176 (TRAV17, TRAJ34)
CATDAKGDRLIF

SEQ ID NO: 194352 - protein, 12 aa, Homo sapiens
  CDR3 for beta chain variable domain of TCR clone 97176 (TRBV7-2, TRBJ2-7)
CASSSHSYEQYF

SEQ ID NO: 194353 - protein, 19 aa, Homo sapiens
  CDR3 for alpha chain variable domain of TCR clone 97177 (TRAV26-1, TRAJ52)
CIVRAHRNAGGTSYGKLTF

SEQ ID NO: 194354 - protein, 14 aa, Homo sapiens
  CDR3 for beta chain variable domain of TCR clone 97177 (TRBV12-4, TRBJ2-5)
CQQSPTGLQETQYF

SEQ ID NO: 194355 - protein, 12 aa, Homo sapiens
  CDR3 for alpha chain variable domain of TCR clone 97178 (TRAV27, TRAJ41)
CAGRNSGYALNF

SEQ ID NO: 194356 - protein, 15 aa, Homo sapiens
  CDR3 for beta chain variable domain of TCR clone 97178 (TRBV6-3, TRBJ2-7)
CASSSPVTVFYEQYF

SEQ ID NO: 194357 - protein, 20 aa, Homo sapiens
  CDR3 for alpha chain variable domain of TCR clone 97179 (TRAV1-1, TRAJ39)
CLLLLRCESSAYNAGNLLTF

SEQ ID NO: 194358 - protein, 13 aa, Homo sapiens
  CDR3 for beta chain variable domain of TCR clone 97179 (TRBV12-4, TRBJ1-5)
CASSPDRAQPQHF

SEQ ID NO: 194359 - protein, 11 aa, Homo sapiens
  CDR3 for alpha chain variable domain of TCR clone 97180 (TRAV21, TRAJ34)
CVVTNTDKLIF

SEQ ID NO: 194360 - protein, 13 aa, Homo sapiens
  CDR3 for beta chain variable domain of TCR clone 97180 (TRBV29-1, TRBJ1-3)
CSVEGGSGNTIYF

SEQ ID NO: 194361 - protein, 15 aa, Homo sapiens
  CDR3 for alpha chain variable domain of TCR clone 97181 (TRAV8-3, TRAJ45)
CASSYSGGGADGLTF

SEQ ID NO: 194362 - protein, 15 aa, Homo sapiens
  CDR3 for beta chain variable domain of TCR clone 97181 (TRBV2, TRBJ2-1)
CASSELAGSYNEQFF

SEQ ID NO: 194363 - protein, 12 aa, Homo sapiens
  CDR3 for alpha chain variable domain of TCR clone 97182 (TRAV16, TRAJ10)
YSRTGGGNKLTF

SEQ ID NO: 194364 - protein, 15 aa, Homo sapiens
  CDR3 for beta chain variable domain of TCR clone 97182 (TRBV6-3, TRBJ2-7)
CASSSPGTVFYEQYF

SEQ ID NO: 194365 - protein, 12 aa, Homo sapiens
  CDR3 for alpha chain variable domain of TCR clone 97183 (TRAV8-3, TRAJ26)
CAGDNSGQNFVF

SEQ ID NO: 194366 - protein, 11 aa, Homo sapiens
  CDR3 for beta chain variable domain of TCR clone 97183 (TRBV19, TRBJ1-1)
CASSIGSEAFF

SEQ ID NO: 194367 - protein, 16 aa, Homo sapiens
  CDR3 for alpha chain variable domain of TCR clone 97184 (TRAV30, TRAJ24)
CGTEIVDADSWGKFQF

SEQ ID NO: 194368 - protein, 17 aa, Homo sapiens
  CDR3 for beta chain variable domain of TCR clone 97184 (TRBV18, TRBJ2-2)
CASSQRSSGQGPGELFF

SEQ ID NO: 194369 - protein, 15 aa, Homo sapiens
  CDR3 for alpha chain variable domain of TCR clone 97185 (TRAV8-6, TRAJ6)
CAVRDASGRSYIPTF

SEQ ID NO: 194370 - protein, 13 aa, Homo sapiens
  CDR3 for beta chain variable domain of TCR clone 97185 (TRBV2, TRBJ2-2)
CASRAWRTGELFF

SEQ ID NO: 194371 - protein, 16 aa, Homo sapiens
  CDR3 for alpha chain variable domain of TCR clone 97186 (TRAV26-2, TRAJ45)
CTTASPIGGGADVLTF

SEQ ID NO: 194372 - protein, 20 aa, Homo sapiens
  CDR3 for beta chain variable domain of TCR clone 97186 (TRBV28, TRBJ2-1)
CASTPIGRSPGLAGGNEQFF

SEQ ID NO: 194373 - protein, 16 aa, Homo sapiens
  CDR3 for alpha chain variable domain of TCR clone 97187 (TRAV23/DV6, TRAJ9)
CAASIGGNTGGFKTIF

SEQ ID NO: 194374 - protein, 14 aa, Homo sapiens
  CDR3 for beta chain variable domain of TCR clone 97187 (TRBV7-2, TRBJ1-1)
CASSFLTGTTEAFF

SEQ ID NO: 194375 - protein, 12 aa, Homo sapiens
  CDR3 for alpha chain variable domain of TCR clone 97188 (TRAV1-1, TRAJ23)
CAVTNQGGKLIF

SEQ ID NO: 194376 - protein, 16 aa, Homo sapiens
  CDR3 for beta chain variable domain of TCR clone 97188 (TRBV7-3, TRBJ2-2)
CASSLKRGTLSGELFF

SEQ ID NO: 194377 - protein, 16 aa, Homo sapiens
  CDR3 for alpha chain variable domain of TCR clone 97189 (TRAV26-1, TRAJ53)
CIVRVAMGGSNYKLIF

SEQ ID NO: 194378 - protein, 12 aa, Homo sapiens
  CDR3 for beta chain variable domain of TCR clone 97189 (TRBV7-9, TRBJ1-5)
CASSPQGQPQHF

SEQ ID NO: 194379 - protein, 12 aa, Homo sapiens
  CDR3 for alpha chain variable domain of TCR clone 97190 (TRAV13-1, TRAJ53)
TASGGSNYKLTF

SEQ ID NO: 194380 - protein, 12 aa, Homo sapiens
  CDR3 for beta chain variable domain of TCR clone 97190 (TRBV18, TRBJ1-4)
CASSPSREKLFF

SEQ ID NO: 194381 - protein, 12 aa, Homo sapiens
  CDR3 for alpha chain variable domain of TCR clone 97191 (TRAV21, TRAJ11)
CAATSGYSTLTF

SEQ ID NO: 194382 - protein, 16 aa, Homo sapiens
  CDR3 for beta chain variable domain of TCR clone 97191 (TRBV7-3, TRBJ2-2)
CASSLKRGTLSGELFF

SEQ ID NO: 194383 - protein, 13 aa, Homo sapiens
  CDR3 for alpha chain variable domain of TCR clone 97192 (TRAV20, TRAJ57)
CAVHPGGSEELVF

SEQ ID NO: 194384 - protein, 14 aa, Homo sapiens
  CDR3 for beta chain variable domain of TCR clone 97192 (TRBV7-2, TRBJ2-7)
CASRSQGAAYEQYF

SEQ ID NO: 194385 - protein, 15 aa, Homo sapiens
  CDR3 for alpha chain variable domain of TCR clone 97193 (TRAV12-1, TRAJ41)
CVVNSRTGSGYALNF

SEQ ID NO: 194386 - protein, 14 aa, Homo sapiens
  CDR3 for beta chain variable domain of TCR clone 97193 (TRBV18, TRBJ2-7)
CASSPRGGAYEQYF

SEQ ID NO: 194387 - protein, 12 aa, Homo sapiens
  CDR3 for alpha chain variable domain of TCR clone 97194 (TRAV27, TRAJ35)
CAGADFGNVLHC

SEQ ID NO: 194388 - protein, 16 aa, Homo sapiens
  CDR3 for beta chain variable domain of TCR clone 97194 (TRBV28, TRBJ2-7)
CASSSGTSGRGYEQYF

SEQ ID NO: 194389 - protein, 11 aa, Homo sapiens
  CDR3 for alpha chain variable domain of TCR clone 97195 (TRAV17, TRAJ39)
CATGAGNMLTF

SEQ ID NO: 194390 - protein, 16 aa, Homo sapiens
  CDR3 for beta chain variable domain of TCR clone 97195 (TRBV19, TRBJ2-2)
CASRSPGTGATGELFF

SEQ ID NO: 194391 - protein, 11 aa, Homo sapiens
  CDR3 for alpha chain variable domain of TCR clone 97196 (TRAV2, TRAJ13)
CASGGYQKVTF

SEQ ID NO: 194392 - protein, 18 aa, Homo sapiens
  CDR3 for beta chain variable domain of TCR clone 97196 (TRBV12-4, TRBJ1-2)
CASSPNPGQAGPYYGYTF

SEQ ID NO: 194393 - protein, 16 aa, Homo sapiens
  CDR3 for alpha chain variable domain of TCR clone 97197 (TRAV14/DV4, TRAJ12)
CAMREGLMDSSYKLIF

SEQ ID NO: 194394 - protein, 14 aa, Homo sapiens
  CDR3 for beta chain variable domain of TCR clone 97197 (TRBV7-2, TRBJ2-5)
CASSFTQGQETQYF

SEQ ID NO: 194395 - protein, 14 aa, Homo sapiens
  CDR3 for alpha chain variable domain of TCR clone 97198 (TRAV35, TRAJ13)
CAGSPSGGYQKVTF

SEQ ID NO: 194396 - protein, 13 aa, Homo sapiens
  CDR3 for beta chain variable domain of TCR clone 97198 (TRBV29-1, TRBJ1-1)
CSVGDSRNTEACF

SEQ ID NO: 194397 - protein, 17 aa, Homo sapiens
  CDR3 for alpha chain variable domain of TCR clone 97199 (TRAV38-2/DV8, TRAJ28)
CAFLTLYSGAGSYQLTL

SEQ ID NO: 194398 - protein, 19 aa, Homo sapiens
  CDR3 for beta chain variable domain of TCR clone 97199 (TRBV6-1, TRBJ1-3)
CASVQGGGWKHHIFWRGKL

SEQ ID NO: 194399 - protein, 17 aa, Homo sapiens
  CDR3 for alpha chain variable domain of TCR clone 97200 (TRAV26-1, TRAJ53)
CIVRVDYSGGSNYKLTF

SEQ ID NO: 194400 - protein, 15 aa, Homo sapiens
  CDR3 for beta chain variable domain of TCR clone 97200 (TRBV20-1, TRBJ2-7)
CSARVPAAYFYEQYF

SEQ ID NO: 194401 - protein, 12 aa, Homo sapiens
  CDR3 for alpha chain variable domain of TCR clone 97201 (TRAV21, TRAJ37)
CAVRGNTGKLIF

SEQ ID NO: 194402 - protein, 17 aa, Homo sapiens
  CDR3 for beta chain variable domain of TCR clone 97201 (TRBV20-1, TRBJ2-1)
CSASSSGLAGSYNEQFF

SEQ ID NO: 194403 - protein, 12 aa, Homo sapiens
  CDR3 for alpha chain variable domain of TCR clone 97202 (TRAV8-4, TRAJ43)
CAVSVNNNDVRF

SEQ ID NO: 194404 - protein, 14 aa, Homo sapiens
  CDR3 for beta chain variable domain of TCR clone 97202 (TRBV11-2, TRBJ1-2)
CASSLGTANYGYTF

SEQ ID NO: 194405 - protein, 12 aa, Homo sapiens
  CDR3 for alpha chain variable domain of TCR clone 97203 (TRAV21, TRAJ13)
PGPSGGYQKVTF

SEQ ID NO: 194406 - protein, 14 aa, Homo sapiens
  CDR3 for beta chain variable domain of TCR clone 97203 (TRBV6-1, TRBJ1-3)
CASVQGGGGNTIYF

SEQ ID NO: 194407 - protein, 16 aa, Homo sapiens
  CDR3 for alpha chain variable domain of TCR clone 97204 (TRAV12-3, TRAJ53)
CAMSVGSGGSNYKLTF

SEQ ID NO: 194408 - protein, 13 aa, Homo sapiens
  CDR3 for beta chain variable domain of TCR clone 97204 (TRBV7-6, TRBJ1-2)
CASSLVGDYGYTF

SEQ ID NO: 194409 - protein, 14 aa, Homo sapiens
  CDR3 for alpha chain variable domain of TCR clone 97205 (TRAV12-2, TRAJ13)
CAEKKTGGYQKVTF

SEQ ID NO: 194410 - protein, 15 aa, Homo sapiens
  CDR3 for beta chain variable domain of TCR clone 97205 (TRBV27, TRBJ2-1)
CASSNGGGSSNEQFF

SEQ ID NO: 194411 - protein, 15 aa, Homo sapiens
  CDR3 for alpha chain variable domain of TCR clone 97206 (TRAV13-1, TRAJ43)
CAATPELGGNNDMRF

SEQ ID NO: 194412 - protein, 14 aa, Homo sapiens
  CDR3 for beta chain variable domain of TCR clone 97206 (TRBV4-2, TRBJ2-1)
CASGLDRAYNEQFF

SEQ ID NO: 194413 - protein, 11 aa, Homo sapiens
  CDR3 for alpha chain variable domain of TCR clone 97207 (TRAV17, TRAJ43)
CATPRSNDMRV

SEQ ID NO: 194414 - protein, 15 aa, Homo sapiens
  CDR3 for beta chain variable domain of TCR clone 97207 (TRBV11-2, TRBJ2-1)
CASSLGTSGLNEQFF

SEQ ID NO: 194415 - protein, 11 aa, Homo sapiens
  CDR3 for alpha chain variable domain of TCR clone 97208 (TRAV3, TRAJ17)
CAEAAGDKLTF

SEQ ID NO: 194416 - protein, 15 aa, Homo sapiens
  CDR3 for beta chain variable domain of TCR clone 97208 (TRBV12-4, TRBJ2-7)
CASSLGSGGPYEQYF

SEQ ID NO: 194417 - protein, 14 aa, Homo sapiens
  CDR3 for alpha chain variable domain of TCR clone 97209 (TRAV12-2, TRAJ17)
CAVNIKAAGNKLTF

SEQ ID NO: 194418 - protein, 16 aa, Homo sapiens
  CDR3 for beta chain variable domain of TCR clone 97209 (TRBV20-1, TRBJ2-6)
CRASSQGYDGANVLTF

SEQ ID NO: 194419 - protein, 14 aa, Homo sapiens
  CDR3 for alpha chain variable domain of TCR clone 97210 (TRAV17, TRAJ39)
CATDPVHAGNMITF

SEQ ID NO: 194420 - protein, 15 aa, Homo sapiens
  CDR3 for beta chain variable domain of TCR clone 97210 (TRBV13, TRBJ1-5)
CASSFGQGGVQPQHF

SEQ ID NO: 194421 - protein, 13 aa, Homo sapiens
  CDR3 for alpha chain variable domain of TCR clone 97211 (TRAV22, TRAJ29)
CAVGGSGNTPLVF

SEQ ID NO: 194422 - protein, 12 aa, Homo sapiens
  CDR3 for beta chain variable domain of TCR clone 97211 (TRBV7-8, TRBJ2-7)
CASSLGDREQYF

SEQ ID NO: 194423 - protein, 16 aa, Homo sapiens
  CDR3 for alpha chain variable domain of TCR clone 97212 (TRAV14/DV4, TRAJ54)
CAMREGRIQGAQKLVF

SEQ ID NO: 194424 - protein, 16 aa, Homo sapiens
  CDR3 for beta chain variable domain of TCR clone 97212 (TRBV19, TRBJ2-1)
CASSKAGPSSYNEQFF

SEQ ID NO: 194425 - protein, 15 aa, Homo sapiens
  CDR3 for alpha chain variable domain of TCR clone 97213 (TRAV8-3, TRAJ45)
CASSYSGGGADGLTF

SEQ ID NO: 194426 - protein, 13 aa, Homo sapiens
  CDR3 for beta chain variable domain of TCR clone 97213 (TRBV10-3, TRBJ2-7)
CASKLAVNNEQYF

SEQ ID NO: 194427 - protein, 10 aa, Homo sapiens
  CDR3 for alpha chain variable domain of TCR clone 97214 (TRAV8-4, TRAJ43)
CAVSADDMRF

SEQ ID NO: 194428 - protein, 15 aa, Homo sapiens
  CDR3 for beta chain variable domain of TCR clone 97214 (TRBV5-1, TRBJ2-3)
CASSYTSGSTDTQYF

SEQ ID NO: 194429 - protein, 12 aa, Homo sapiens
  CDR3 for alpha chain variable domain of TCR clone 97215 (TRAV2, TRAJ10)
CASTGGGNKLTF

SEQ ID NO: 194430 - protein, 14 aa, Homo sapiens
  CDR3 for beta chain variable domain of TCR clone 97215 (TRBV19, TRBJ2-5)
CASSMTGQQETQYL

SEQ ID NO: 194431 - protein, 13 aa, Homo sapiens
  CDR3 for alpha chain variable domain of TCR clone 97216 (TRAV21, TRAJ57)
CAVTQGGSEKLVF

SEQ ID NO: 194432 - protein, 16 aa, Homo sapiens
  CDR3 for beta chain variable domain of TCR clone 97216 (TRBV29-1, TRBJ2-7)
CSVEDAEDGTAYEPYF

SEQ ID NO: 194433 - protein, 17 aa, Homo sapiens
  CDR3 for alpha chain variable domain of TCR clone 97217 (TRAV4, TRAJ18)
CLVGERSVGSTLGRLYF

SEQ ID NO: 194434 - protein, 16 aa, Homo sapiens
  CDR3 for beta chain variable domain of TCR clone 97217 (TRBV6-1, TRBJ2-5)
CASSETLDRGAETQYF

SEQ ID NO: 194435 - protein, 14 aa, Homo sapiens
  CDR3 for alpha chain variable domain of TCR clone 97218 (TRAV35, TRAJ24)
CAGPRRDSWGKLQS

SEQ ID NO: 194436 - protein, 12 aa, Homo sapiens
  CDR3 for beta chain variable domain of TCR clone 97218 (TRBV12-4, TRBJ2-3)
CASSLGQDTQYF

SEQ ID NO: 194437 - protein, 16 aa, Homo sapiens
  CDR3 for alpha chain variable domain of TCR clone 97219 (TRAV3, TRAJ37)
CAVRDSGSGNTGKLIF

SEQ ID NO: 194438 - protein, 12 aa, Homo sapiens
  CDR3 for beta chain variable domain of TCR clone 97219 (TRBV7-2, TRBJ2-5)
CASSLYRETQYF

SEQ ID NO: 194439 - protein, 15 aa, Homo sapiens
  CDR3 for alpha chain variable domain of TCR clone 97220 (TRAV2, TRAJ15)
CAVEDRNQAGTALLF

SEQ ID NO: 194440 - protein, 13 aa, Homo sapiens
  CDR3 for beta chain variable domain of TCR clone 97220 (TRBV10-2, TRBJ2-7)
CASSESGVYEQYF

SEQ ID NO: 194441 - protein, 12 aa, Homo sapiens
  CDR3 for alpha chain variable domain of TCR clone 97221 (TRAV12-3, TRAJ17)
CAMKPTGNKLTF

SEQ ID NO: 194442 - protein, 15 aa, Homo sapiens
  CDR3 for beta chain variable domain of TCR clone 97221 (TRBV20-1, TRBJ2-7)
CSARDRVSGMDEQYF

SEQ ID NO: 194443 - protein, 15 aa, Homo sapiens
  CDR3 for alpha chain variable domain of TCR clone 97222 (TRAV8-3, TRAJ42)
GAGMNYGGSQGNLIF

SEQ ID NO: 194444 - protein, 11 aa, Homo sapiens
  CDR3 for beta chain variable domain of TCR clone 97222 (TRBV7-2, TRBJ2-3)
CASSSSDTQYF

SEQ ID NO: 194445 - protein, 14 aa, Homo sapiens
  CDR3 for alpha chain variable domain of TCR clone 97223 (TRAV12-3, TRAJ10)
SHLPLTGGGNKLTF

SEQ ID NO: 194446 - protein, 11 aa, Homo sapiens
  CDR3 for beta chain variable domain of TCR clone 97223 (TRBV19, TRBJ1-1)
CASSIGSEAVF

SEQ ID NO: 194447 - protein, 22 aa, Homo sapiens
  CDR3 for alpha chain variable domain of TCR clone 97224 (TRAV27, TRAJ41)
CAVRTQIPDIQNPDPAVYHLRD

SEQ ID NO: 194448 - protein, 16 aa, Homo sapiens
  CDR3 for beta chain variable domain of TCR clone 97224 (TRBV5-1, TRBJ2-3)
CASSLGLAVYTDTQYF

SEQ ID NO: 194449 - protein, 14 aa, Homo sapiens
  CDR3 for alpha chain variable domain of TCR clone 97225 (TRAV21, TRAJ37)
CAVKGSSNTGKLIF

SEQ ID NO: 194450 - protein, 12 aa, Homo sapiens
  CDR3 for beta chain variable domain of TCR clone 97225 (TRBV7-2, TRBJ2-5)
CSSQTSVETQYF

SEQ ID NO: 194451 - protein, 14 aa, Homo sapiens
  CDR3 for alpha chain variable domain of TCR clone 97226 (TRAV21, TRAJ12)
CAVRNGDSSYKLIF

SEQ ID NO: 194452 - protein, 14 aa, Homo sapiens
  CDR3 for beta chain variable domain of TCR clone 97226 (TRBV7-6, TRBJ2-7)
CANSLTGTGNEQYF

SEQ ID NO: 194453 - protein, 15 aa, Homo sapiens
  CDR3 for alpha chain variable domain of TCR clone 97227 (TRAV3, TRAJ29)
CAVRAPLSINTPLVF

SEQ ID NO: 194454 - protein, 15 aa, Homo sapiens
  CDR3 for beta chain variable domain of TCR clone 97227 (TRBV28, TRBJ1-1)
CASRIKGGLNTEAFF

SEQ ID NO: 194455 - protein, 14 aa, Homo sapiens
  CDR3 for alpha chain variable domain of TCR clone 97228 (TRAV26-1, TRAJ34)
CIVRVAYNTDKLIF

SEQ ID NO: 194456 - protein, 15 aa, Homo sapiens
  CDR3 for beta chain variable domain of TCR clone 97228 (TRBV20-1, TRBJ2-7)
SSARAPAAYFYEQYF

SEQ ID NO: 194457 - protein, 14 aa, Homo sapiens
  CDR3 for alpha chain variable domain of TCR clone 97229 (TRAV13-1, TRAJ13)
CAASRVGGYQKVTF

SEQ ID NO: 194458 - protein, 17 aa, Homo sapiens
  CDR3 for beta chain variable domain of TCR clone 97229 (TRBV15, TRBJ1-5)
CATSRATPGTRNQPQHF

SEQ ID NO: 194459 - protein, 16 aa, Homo sapiens
  CDR3 for alpha chain variable domain of TCR clone 97230 (TRAV38-1, TRAJ32)
CAFMKVGGGATNKLIF

SEQ ID NO: 194460 - protein, 13 aa, Homo sapiens
  CDR3 for beta chain variable domain of TCR clone 97230 (TRBV20-1, TRBJ2-5)
CSAREAFQETQYF

SEQ ID NO: 194461 - protein, 11 aa, Homo sapiens
  CDR3 for alpha chain variable domain of TCR clone 97231 (TRAV8-4, TRAJ26)
CDGGEGQNFVF

SEQ ID NO: 194462 - protein, 17 aa, Homo sapiens
  CDR3 for beta chain variable domain of TCR clone 97231 (TRBV7-9, TRBJ2-3)
CASSPTVAGDLTDTQYF

SEQ ID NO: 194463 - protein, 14 aa, Homo sapiens
  CDR3 for alpha chain variable domain of TCR clone 97232 (TRAV26-1, TRAJ34)
CIVRVAYNTDKLIS

SEQ ID NO: 194464 - protein, 15 aa, Homo sapiens
  CDR3 for beta chain variable domain of TCR clone 97232 (TRBV7-9, TRBJ1-4)
CAGSRTGGFDEKLFF

SEQ ID NO: 194465 - protein, 14 aa, Homo sapiens
  CDR3 for alpha chain variable domain of TCR clone 97233 (TRAV1-2, TRAJ8)
CAVREDTGFQKLVF

SEQ ID NO: 194466 - protein, 12 aa, Homo sapiens
  CDR3 for beta chain variable domain of TCR clone 97233 (TRBV7-3, TRBJ2-1)
CASSFQSGPQFF

SEQ ID NO: 194467 - protein, 13 aa, Homo sapiens
  CDR3 for alpha chain variable domain of TCR clone 97234 (TRAV21, TRAJ27)
CAARPGNAGKSTF

SEQ ID NO: 194468 - protein, 15 aa, Homo sapiens
  CDR3 for beta chain variable domain of TCR clone 97234 (TRBV27, TRBJ2-5)
CASSLYPRGGETQYF

SEQ ID NO: 194469 - protein, 15 aa, Homo sapiens
  CDR3 for alpha chain variable domain of TCR clone 97235 (TRAV38-1, TRAJ37)
CAFIFGSGNTGKPIF

SEQ ID NO: 194470 - protein, 15 aa, Homo sapiens
  CDR3 for beta chain variable domain of TCR clone 97235 (TRBV4-3, TRBJ2-7)
CASSKGGRGIYEQYF

SEQ ID NO: 194471 - protein, 16 aa, Homo sapiens
  CDR3 for alpha chain variable domain of TCR clone 97236 (TRAV30, TRAJ24)
CGTEIVDADSWGKFQF

SEQ ID NO: 194472 - protein, 13 aa, Homo sapiens
  CDR3 for beta chain variable domain of TCR clone 97236 (TRBV12-5, TRBJ2-5)
CSGSRTHQETQYF

SEQ ID NO: 194473 - protein, 14 aa, Homo sapiens
  CDR3 for alpha chain variable domain of TCR clone 97237 (TRAV17, TRAJ39)
CATDPVRAGNMLTF

SEQ ID NO: 194474 - protein, 15 aa, Homo sapiens
  CDR3 for beta chain variable domain of TCR clone 97237 (TRBV13, TRBJ1-5)
CASSFGQGGVQPQHF

SEQ ID NO: 194475 - protein, 15 aa, Homo sapiens
  CDR3 for alpha chain variable domain of TCR clone 97238 (TRAV8-3, TRAJ27)
CAVGPSKTNAGKSTF

SEQ ID NO: 194476 - protein, 15 aa, Homo sapiens
  CDR3 for beta chain variable domain of TCR clone 97238 (TRBV27, TRBJ2-1)
CASSNGGGSSNEQLF

SEQ ID NO: 194477 - protein, 12 aa, Homo sapiens
  CDR3 for alpha chain variable domain of TCR clone 97239 (TRAV8-3, TRAJ27)
CAVGAEAGKPTF

SEQ ID NO: 194478 - protein, 14 aa, Homo sapiens
  CDR3 for beta chain variable domain of TCR clone 97239 (TRBV2, TRBJ2-1)
CASRLIVGHDEQFF

SEQ ID NO: 194479 - protein, 15 aa, Homo sapiens
  CDR3 for alpha chain variable domain of TCR clone 97240 (TRAV23/DV6, )
CAEPDIQNPDPAVYQ

SEQ ID NO: 194480 - protein, 15 aa, Homo sapiens
  CDR3 for beta chain variable domain of TCR clone 97240 (TRBV12-4, TRBJ2-5)
CASTLNSGRGETQYF

SEQ ID NO: 194481 - protein, 14 aa, Homo sapiens
  CDR3 for alpha chain variable domain of TCR clone 97241 (TRAV8-6, TRAJ40)
CAVSVSSGTYKYIF

SEQ ID NO: 194482 - protein, 17 aa, Homo sapiens
  CDR3 for beta chain variable domain of TCR clone 97241 (TRBV7-9, TRBJ2-3)
CASSPTVAGDLTDTQYF

SEQ ID NO: 194483 - protein, 13 aa, Homo sapiens
  CDR3 for alpha chain variable domain of TCR clone 97242 (TRAV2, TRAJ40)
CAVVTSGTYKYIF

SEQ ID NO: 194484 - protein, 15 aa, Homo sapiens
  CDR3 for beta chain variable domain of TCR clone 97242 (TRBV11-3, TRBJ2-3)
CASLKDGREGDTQDF

SEQ ID NO: 194485 - protein, 13 aa, Homo sapiens
  CDR3 for alpha chain variable domain of TCR clone 97243 (TRAV12-2, TRAJ10)
CAVPTGGGNNLTF

SEQ ID NO: 194486 - protein, 16 aa, Homo sapiens
  CDR3 for beta chain variable domain of TCR clone 97243 (TRBV3-1, TRBJ2-5)
CASSQDWASGQETQYF

SEQ ID NO: 194487 - protein, 19 aa, Homo sapiens
  CDR3 for alpha chain variable domain of TCR clone 97244 (TRAV1-2, TRAJ26)
CLSPLCCERPDNYGQNFVF

SEQ ID NO: 194488 - protein, 15 aa, Homo sapiens
  CDR3 for beta chain variable domain of TCR clone 97244 (TRBV28, TRBJ1-2)
CASSLWQPTNYGYTF

SEQ ID NO: 194489 - protein, 15 aa, Homo sapiens
  CDR3 for alpha chain variable domain of TCR clone 97245 (TRAV3, TRAJ4)
CAVRDGTGGYNKLFF

SEQ ID NO: 194490 - protein, 13 aa, Homo sapiens
  CDR3 for beta chain variable domain of TCR clone 97245 (TRBV12-5, TRBJ1-2)
CASGVRTGNGYTF

SEQ ID NO: 194491 - protein, 13 aa, Homo sapiens
  CDR3 for alpha chain variable domain of TCR clone 97246 (TRAV3, TRAJ30)
CAVRDIPDDKIIL

SEQ ID NO: 194492 - protein, 17 aa, Homo sapiens
  CDR3 for beta chain variable domain of TCR clone 97246 (TRBV4-1, TRBJ1-4)
CASSQEGPRGVEEKLFF

SEQ ID NO: 194493 - protein, 13 aa, Homo sapiens
  CDR3 for alpha chain variable domain of TCR clone 97247 (TRAV13-1, TRAJ11)
CATSKEGYSTLTF

SEQ ID NO: 194494 - protein, 21 aa, Homo sapiens
  CDR3 for beta chain variable domain of TCR clone 97247 (TRBV23-1, TRBJ2-5)
CASTPPGQGPGGDPVLRARHA

SEQ ID NO: 194495 - protein, 16 aa, Homo sapiens
  CDR3 for alpha chain variable domain of TCR clone 97248 (TRAV30, TRAJ24)
CGTEIVDADSWGKFQL

SEQ ID NO: 194496 - protein, 15 aa, Homo sapiens
  CDR3 for beta chain variable domain of TCR clone 97248 (TRBV12-4, TRBJ2-2)
CASSPNDSGTGELFF

SEQ ID NO: 194497 - protein, 11 aa, Homo sapiens
  CDR3 for alpha chain variable domain of TCR clone 97249 (TRAV21, TRAJ11)
CAVNGYSTLTF

SEQ ID NO: 194498 - protein, 13 aa, Homo sapiens
  CDR3 for beta chain variable domain of TCR clone 97249 (TRBV12-4, TRBJ1-1)
CASSPGTGFEAFF

SEQ ID NO: 194499 - protein, 15 aa, Homo sapiens
  CDR3 for alpha chain variable domain of TCR clone 97250 (TRAV26-1, TRAJ29)
CIVRVEGSGNTPLVF

SEQ ID NO: 194500 - protein, 13 aa, Homo sapiens
  CDR3 for beta chain variable domain of TCR clone 97250 (TRBV12-4, TRBJ1-5)
CASSPDRAQPQHF

SEQ ID NO: 194501 - protein, 15 aa, Homo sapiens
  CDR3 for alpha chain variable domain of TCR clone 97251 (TRAV27, TRAJ38)
CSARRNAGNNRKRIW

SEQ ID NO: 194502 - protein, 13 aa, Homo sapiens
  CDR3 for beta chain variable domain of TCR clone 97251 (TRBV12-5, TRBJ2-3)
CASGDRQSDTQYF

SEQ ID NO: 194503 - protein, 14 aa, Homo sapiens
  CDR3 for alpha chain variable domain of TCR clone 97252 (TRAV8-4, TRAJ4)
CAVSPSVGYNKLIF

SEQ ID NO: 194504 - protein, 15 aa, Homo sapiens
  CDR3 for beta chain variable domain of TCR clone 97252 (TRBV7-8, TRBJ2-3)
CASSLSADSGGAQYF

SEQ ID NO: 194505 - protein, 12 aa, Homo sapiens
  CDR3 for alpha chain variable domain of TCR clone 97253 (TRAV1-1, TRAJ39)
CAVPVVGNMLTF

SEQ ID NO: 194506 - protein, 13 aa, Homo sapiens
  CDR3 for beta chain variable domain of TCR clone 97253 (TRBV20-1, TRBJ1-1)
CSAGTVGNTEAFF

SEQ ID NO: 194507 - protein, 15 aa, Homo sapiens
  CDR3 for alpha chain variable domain of TCR clone 97254 (TRAV16, TRAJ17)
CALSGNKAAGNKLTF

SEQ ID NO: 194508 - protein, 16 aa, Homo sapiens
  CDR3 for beta chain variable domain of TCR clone 97254 (TRBV7-6, TRBJ1-6)
CASSSLPAGEYSPPHF

SEQ ID NO: 194509 - protein, 14 aa, Homo sapiens
  CDR3 for alpha chain variable domain of TCR clone 97255 (TRAV12-1, TRAJ17)
CVVNPKAAGNKLTF

SEQ ID NO: 194510 - protein, 13 aa, Homo sapiens
  CDR3 for beta chain variable domain of TCR clone 97255 (TRBV7-2, TRBJ2-2)
CASSSVRAGELFF

SEQ ID NO: 194511 - protein, 13 aa, Homo sapiens
  CDR3 for alpha chain variable domain of TCR clone 97256 (TRAV16, TRAJ10)
CALLTGVGNKLTF

SEQ ID NO: 194512 - protein, 12 aa, Homo sapiens
  CDR3 for beta chain variable domain of TCR clone 97256 (TRBV28, TRBJ2-7)
CASTGNHYEQYF

SEQ ID NO: 194513 - protein, 15 aa, Homo sapiens
  CDR3 for alpha chain variable domain of TCR clone 97257 (TRAV8-3, TRAJ45)
CAVEGSGGGADGLTF

SEQ ID NO: 194514 - protein, 14 aa, Homo sapiens
  CDR3 for beta chain variable domain of TCR clone 97257 (TRBV7-2, TRBJ2-7)
CASSPKTSFYEQYF

SEQ ID NO: 194515 - protein, 14 aa, Homo sapiens
  CDR3 for alpha chain variable domain of TCR clone 97258 (TRAV26-2, TRAJ32)
CCVGYGGATNKLIF

SEQ ID NO: 194516 - protein, 14 aa, Homo sapiens
  CDR3 for beta chain variable domain of TCR clone 97258 (TRBV4-2, TRBJ2-1)
CASGLDRAYTEQFF

SEQ ID NO: 194517 - protein, 11 aa, Homo sapiens
  CDR3 for alpha chain variable domain of TCR clone 97259 (TRAV20, TRAJ26)
CAVRYGQNFAF

SEQ ID NO: 194518 - protein, 15 aa, Homo sapiens
  CDR3 for beta chain variable domain of TCR clone 97259 (TRBV28, TRBJ1-5)
CASSLSGYSNQPQHF

SEQ ID NO: 194519 - protein, 13 aa, Homo sapiens
  CDR3 for alpha chain variable domain of TCR clone 97260 (TRAV8-3, TRAJ28)
CAVGAVGSYQLTF

SEQ ID NO: 194520 - protein, 16 aa, Homo sapiens
  CDR3 for beta chain variable domain of TCR clone 97260 (TRBV7-9, TRBJ2-5)
CASSPSGQGVKGTQYF

SEQ ID NO: 194521 - protein, 14 aa, Homo sapiens
  CDR3 for alpha chain variable domain of TCR clone 97261 (TRAV12-1, TRAJ17)
CVVNYKAAGNKLTF

SEQ ID NO: 194522 - protein, 11 aa, Homo sapiens
  CDR3 for beta chain variable domain of TCR clone 97261 (TRBV11-2, TRBJ1-1)
CASSINTEAFF

SEQ ID NO: 194523 - protein, 13 aa, Homo sapiens
  CDR3 for alpha chain variable domain of TCR clone 97262 (TRAV12-3, TRAJ21)
CAPGPHNFNKFYF

SEQ ID NO: 194524 - protein, 15 aa, Homo sapiens
  CDR3 for beta chain variable domain of TCR clone 97262 (TRBV5-5, TRBJ1-5)
CASSLKGGGEQPQHF

SEQ ID NO: 194525 - protein, 14 aa, Homo sapiens
  CDR3 for alpha chain variable domain of TCR clone 97263 (TRAV8-3, TRAJ4)
CAVGASGGFNKLIF

SEQ ID NO: 194526 - protein, 13 aa, Homo sapiens
  CDR3 for beta chain variable domain of TCR clone 97263 (TRBV18, TRBJ2-5)
CASSLQGQETQYF

SEQ ID NO: 194527 - protein, 14 aa, Homo sapiens
  CDR3 for alpha chain variable domain of TCR clone 97264 (TRAV35, TRAJ33)
CAGSSQHSNYQLIW

SEQ ID NO: 194528 - protein, 15 aa, Homo sapiens
  CDR3 for beta chain variable domain of TCR clone 97264 (TRBV20-1, TRBJ2-7)
CSAESGTSGAYEQYF

SEQ ID NO: 194529 - protein, 10 aa, Homo sapiens
  CDR3 for alpha chain variable domain of TCR clone 97265 (TRAV5, TRAJ34)
CAEDTDKLIF

SEQ ID NO: 194530 - protein, 13 aa, Homo sapiens
  CDR3 for beta chain variable domain of TCR clone 97265 (TRBV10-2, TRBJ2-7)
CASGASGGYEQYF

SEQ ID NO: 194531 - protein, 12 aa, Homo sapiens
  CDR3 for alpha chain variable domain of TCR clone 97266 (TRAV12-3, TRAJ17)
CAMTLTGNKLTF

SEQ ID NO: 194532 - protein, 12 aa, Homo sapiens
  CDR3 for beta chain variable domain of TCR clone 97266 (TRBV20-1, TRBJ2-7)
CSAITPTKEQYF

SEQ ID NO: 194533 - protein, 16 aa, Homo sapiens
  CDR3 for alpha chain variable domain of TCR clone 97267 (TRAV3, TRAJ10)
CAVRDMRAGGGNKLTF

SEQ ID NO: 194534 - protein, 18 aa, Homo sapiens
  CDR3 for beta chain variable domain of TCR clone 97267 (TRBV25-1, TRBJ1-2)
CASSGLQNGQGLIFGYTF

SEQ ID NO: 194535 - protein, 15 aa, Homo sapiens
  CDR3 for alpha chain variable domain of TCR clone 97268 (TRAV2, TRAJ15)
FAVEDRNQAGTALIF

SEQ ID NO: 194536 - protein, 13 aa, Homo sapiens
  CDR3 for beta chain variable domain of TCR clone 97268 (TRBV10-2, TRBJ2-1)
CASGASGDAKQFF

SEQ ID NO: 194537 - protein, 16 aa, Homo sapiens
  CDR3 for alpha chain variable domain of TCR clone 97269 (TRAV3, TRAJ4)
CAVRPSPSGGSNKLIF

SEQ ID NO: 194538 - protein, 12 aa, Homo sapiens
  CDR3 for beta chain variable domain of TCR clone 97269 (TRBV7-9, TRBJ2-7)
CASSQGVYEQYF

SEQ ID NO: 194539 - protein, 15 aa, Homo sapiens
  CDR3 for alpha chain variable domain of TCR clone 97270 (TRAV12-1, TRAJ42)
CAVTRDGGSQGNLIF

SEQ ID NO: 194540 - protein, 14 aa, Homo sapiens
  CDR3 for beta chain variable domain of TCR clone 97270 (TRBV11-2, TRBJ2-3)
CASSLGGGANTQYF

SEQ ID NO: 194541 - protein, 15 aa, Homo sapiens
  CDR3 for alpha chain variable domain of TCR clone 97271 (TRAV12-3, TRAJ5)
CAMSGLGTGRRSLTF

SEQ ID NO: 194542 - protein, 15 aa, Homo sapiens
  CDR3 for beta chain variable domain of TCR clone 97271 (TRBV19, TRBJ1-1)
CASTSGQIQNTEAFF

SEQ ID NO: 194543 - protein, 17 aa, Homo sapiens
  CDR3 for alpha chain variable domain of TCR clone 97272 (TRAV4, TRAJ13)
RLVGVQGSSGGYQKVTF

SEQ ID NO: 194544 - protein, 18 aa, Homo sapiens
  CDR3 for beta chain variable domain of TCR clone 97272 (TRBV15, TRBJ2-3)
CATSRDGARSWDTDTQYF

SEQ ID NO: 194545 - protein, 16 aa, Homo sapiens
  CDR3 for alpha chain variable domain of TCR clone 97273 (TRAV30, TRAJ24)
CGTEIVDADSWGKFKF

SEQ ID NO: 194546 - protein, 16 aa, Homo sapiens
  CDR3 for beta chain variable domain of TCR clone 97273 (TRBV6-1, TRBJ2-1)
CASILRQGSSYNEQFF

SEQ ID NO: 194547 - protein, 14 aa, Homo sapiens
  CDR3 for alpha chain variable domain of TCR clone 97274 (TRAV17, TRAJ12)
CATDEKDSSYKLIF

SEQ ID NO: 194548 - protein, 16 aa, Homo sapiens
  CDR3 for beta chain variable domain of TCR clone 97274 (TRBV11-2, TRBJ2-1)
CASGPRLAGVYNEQFF

SEQ ID NO: 194549 - protein, 14 aa, Homo sapiens
  CDR3 for alpha chain variable domain of TCR clone 97275 (TRAV1-2, TRAJ8)
CAVREDTGFQKLVF

SEQ ID NO: 194550 - protein, 15 aa, Homo sapiens
  CDR3 for beta chain variable domain of TCR clone 97275 (TRBV5-1, TRBJ2-7)
CASSPQGRPLDEQYF

SEQ ID NO: 194551 - protein, 12 aa, Homo sapiens
  CDR3 for alpha chain variable domain of TCR clone 97276 (TRAV12-2, TRAJ24)
CAVTPADSWGEI

SEQ ID NO: 194552 - protein, 13 aa, Homo sapiens
  CDR3 for beta chain variable domain of TCR clone 97276 (TRBV19, TRBJ1-2)
CASSVPGQDGYTF

SEQ ID NO: 194553 - protein, 16 aa, Homo sapiens
  CDR3 for alpha chain variable domain of TCR clone 97277 (TRAV17, TRAJ52)
CATSNAGGTSYGKLTF

SEQ ID NO: 194554 - protein, 13 aa, Homo sapiens
  CDR3 for beta chain variable domain of TCR clone 97277 (TRBV27, TRBJ1-6)
CASRLVLVSPLHF

SEQ ID NO: 194555 - protein, 14 aa, Homo sapiens
  CDR3 for alpha chain variable domain of TCR clone 97278 (TRAV8-3, TRAJ31)
CAVGWGLNNARLMF

SEQ ID NO: 194556 - protein, 15 aa, Homo sapiens
  CDR3 for beta chain variable domain of TCR clone 97278 (TRBV7-2, TRBJ2-2)
CASSLAGGLTGELFF

SEQ ID NO: 194557 - protein, 18 aa, Homo sapiens
  CDR3 for alpha chain variable domain of TCR clone 97279 (TRAV12-3, TRAJ52)
CAMSRTNAGGTSYGKLTF

SEQ ID NO: 194558 - protein, 16 aa, Homo sapiens
  CDR3 for beta chain variable domain of TCR clone 97279 (TRBV5-7, TRBJ2-7)
CASCPTSGRELDEQYF

SEQ ID NO: 194559 - protein, 14 aa, Homo sapiens
  CDR3 for alpha chain variable domain of TCR clone 97280 (TRAV2, TRAJ9)
CAVDPNTGGFKTIF

SEQ ID NO: 194560 - protein, 13 aa, Homo sapiens
  CDR3 for beta chain variable domain of TCR clone 97280 (TRBV20-1, TRBJ2-1)
CSASTGTSSEQFF

SEQ ID NO: 194561 - protein, 17 aa, Homo sapiens
  CDR3 for alpha chain variable domain of TCR clone 97281 (TRAV38-2/DV8, TRAJ45)
CAYRSRDSGGGADGLTF

SEQ ID NO: 194562 - protein, 15 aa, Homo sapiens
  CDR3 for beta chain variable domain of TCR clone 97281 (TRBV19, TRBJ2-1)
CASIKGRGPYNEQFF

SEQ ID NO: 194563 - protein, 14 aa, Homo sapiens
  CDR3 for alpha chain variable domain of TCR clone 97282 (TRAV12-2, TRAJ13)
CAVTKTGGYQKVTF

SEQ ID NO: 194564 - protein, 15 aa, Homo sapiens
  CDR3 for beta chain variable domain of TCR clone 97282 (TRBV6-3, TRBJ2-7)
CASSSPGTVFYEQYF

SEQ ID NO: 194565 - protein, 15 aa, Homo sapiens
  CDR3 for alpha chain variable domain of TCR clone 97283 (TRAV3, TRAJ5)
CAVRDLDTGRRALTF

SEQ ID NO: 194566 - protein, 15 aa, Homo sapiens
  CDR3 for beta chain variable domain of TCR clone 97283 (TRBV5-1, TRBJ2-1)
CASSPPRAPYNEQFF

SEQ ID NO: 194567 - protein, 13 aa, Homo sapiens
  CDR3 for alpha chain variable domain of TCR clone 97284 (TRAV17, TRAJ5)
CALRGTGRRALTF

SEQ ID NO: 194568 - protein, 14 aa, Homo sapiens
  CDR3 for beta chain variable domain of TCR clone 97284 (TRBV10-3, TRBJ1-2)
CAISDGGRDYGYTF

SEQ ID NO: 194569 - protein, 15 aa, Homo sapiens
  CDR3 for alpha chain variable domain of TCR clone 97285 (TRAV2, TRAJ15)
CDVEDRGQAGTALIF

SEQ ID NO: 194570 - protein, 13 aa, Homo sapiens
  CDR3 for beta chain variable domain of TCR clone 97285 (TRBV10-2, TRBJ2-7)
CASGASGGYEQYF

SEQ ID NO: 194571 - protein, 12 aa, Homo sapiens
  CDR3 for alpha chain variable domain of TCR clone 97286 (TRAV12-2, TRAJ21)
CAVNRNFNKFYF

SEQ ID NO: 194572 - protein, 14 aa, Homo sapiens
  CDR3 for beta chain variable domain of TCR clone 97286 (TRBV12-4, TRBJ2-3)
CASSLSGATDTQYF

SEQ ID NO: 194573 - protein, 15 aa, Homo sapiens
  CDR3 for alpha chain variable domain of TCR clone 97287 (TRAV2, TRAJ9)
CAVAALNTGGFKTIF

SEQ ID NO: 194574 - protein, 14 aa, Homo sapiens
  CDR3 for beta chain variable domain of TCR clone 97287 (TRBV7-2, TRBJ1-2)
CASSQTGSTYGYTF

SEQ ID NO: 194575 - protein, 16 aa, Homo sapiens
  CDR3 for alpha chain variable domain of TCR clone 97288 (TRAV1-2, TRAJ10)
CAVRGVLSGGGNKLTF

SEQ ID NO: 194576 - protein, 12 aa, Homo sapiens
  CDR3 for beta chain variable domain of TCR clone 97288 (TRBV7-8, TRBJ2-7)
CASSLGDREQYF

SEQ ID NO: 194577 - protein, 17 aa, Homo sapiens
  CDR3 for alpha chain variable domain of TCR clone 97289 (TRAV9-2, TRAJ45)
CALSGYYSGGGADGLTF

SEQ ID NO: 194578 - protein, 11 aa, Homo sapiens
  CDR3 for beta chain variable domain of TCR clone 97289 (TRBV12-4, TRBJ2-3)
CASTATDTQYF

SEQ ID NO: 194579 - protein, 13 aa, Homo sapiens
  CDR3 for alpha chain variable domain of TCR clone 97290 (TRAV12-3, TRAJ54)
CAMTLQGAQKLVF

SEQ ID NO: 194580 - protein, 14 aa, Homo sapiens
  CDR3 for beta chain variable domain of TCR clone 97290 (TRBV4-1, TRBJ2-2)
CASSQALNTGELFF

SEQ ID NO: 194581 - protein, 16 aa, Homo sapiens
  CDR3 for alpha chain variable domain of TCR clone 97291 (TRAV1-2, TRAJ10)
CAVRGVLTGGGNKLTF

SEQ ID NO: 194582 - protein, 13 aa, Homo sapiens
  CDR3 for beta chain variable domain of TCR clone 97291 (TRBV20-1, TRBJ1-1)
CSAGTIGNTEAFF

SEQ ID NO: 194583 - protein, 14 aa, Homo sapiens
  CDR3 for alpha chain variable domain of TCR clone 97292 (TRAV8-1, TRAJ30)
CAVNGYQRDDKIIF

SEQ ID NO: 194584 - protein, 16 aa, Homo sapiens
  CDR3 for beta chain variable domain of TCR clone 97292 (TRBV5-1, TRBJ2-7)
CASSPGLAGVIYEQYF

SEQ ID NO: 194585 - protein, 13 aa, Homo sapiens
  CDR3 for alpha chain variable domain of TCR clone 97293 (TRAV8-4, TRAJ48)
CAVSLFGNEKSTF

SEQ ID NO: 194586 - protein, 15 aa, Homo sapiens
  CDR3 for beta chain variable domain of TCR clone 97293 (TRBV20-1, TRBJ2-7)
CSARKGLAESYEQYF

SEQ ID NO: 194587 - protein, 15 aa, Homo sapiens
  CDR3 for alpha chain variable domain of TCR clone 97294 (TRAV17, TRAJ16)
CAAALRFSDGRKLLF

SEQ ID NO: 194588 - protein, 15 aa, Homo sapiens
  CDR3 for beta chain variable domain of TCR clone 97294 (TRBV20-1, TRBJ1-1)
CSASRGVTGNTEAFF

SEQ ID NO: 194589 - protein, 12 aa, Homo sapiens
  CDR3 for alpha chain variable domain of TCR clone 97295 (TRAV12-3, TRAJ17)
CAMTLTGNKLTF

SEQ ID NO: 194590 - protein, 16 aa, Homo sapiens
  CDR3 for beta chain variable domain of TCR clone 97295 (TRBV7-6, TRBJ1-6)
CASSLSSRIGDSPLHF

SEQ ID NO: 194591 - protein, 15 aa, Homo sapiens
  CDR3 for alpha chain variable domain of TCR clone 97296 (TRAV8-3, TRAJ15)
CAVGAPNQAGTALIF

SEQ ID NO: 194592 - protein, 14 aa, Homo sapiens
  CDR3 for beta chain variable domain of TCR clone 97296 (TRBV20-1, TRBJ2-1)
CSPNDEASYNEQFC

SEQ ID NO: 194593 - protein, 16 aa, Homo sapiens
  CDR3 for alpha chain variable domain of TCR clone 97297 (TRAV12-2, TRAJ18)
CAVTTDRGSTLGRLYF

SEQ ID NO: 194594 - protein, 15 aa, Homo sapiens
  CDR3 for beta chain variable domain of TCR clone 97297 (TRBV9, TRBJ1-6)
CASSVAGTGDSPLLF

SEQ ID NO: 194595 - protein, 14 aa, Homo sapiens
  CDR3 for alpha chain variable domain of TCR clone 97298 (TRAV1-2, TRAJ16)
CAVTRFSDGQKLLF

SEQ ID NO: 194596 - protein, 15 aa, Homo sapiens
  CDR3 for beta chain variable domain of TCR clone 97298 (TRBV7-9, TRBJ1-6)
CASSSPGRGNSPLHF

SEQ ID NO: 194597 - protein, 16 aa, Homo sapiens
  CDR3 for alpha chain variable domain of TCR clone 97299 (TRAV3, TRAJ10)
CAVRDMRAGGGNKRTF

SEQ ID NO: 194598 - protein, 15 aa, Homo sapiens
  CDR3 for beta chain variable domain of TCR clone 97299 (TRBV9, TRBJ1-6)
CASSVAGTGDSPLHF

SEQ ID NO: 194599 - protein, 13 aa, Homo sapiens
  CDR3 for alpha chain variable domain of TCR clone 97300 (TRAV3, TRAJ27)
CAVRPLGAGKSTF

SEQ ID NO: 194600 - protein, 13 aa, Homo sapiens
  CDR3 for beta chain variable domain of TCR clone 97300 (TRBV12-4, TRBJ2-7)
CASSPTETYEQYF

SEQ ID NO: 194601 - protein, 12 aa, Homo sapiens
  CDR3 for alpha chain variable domain of TCR clone 97301 (TRAV21, TRAJ31)
CVLAGNNARLMF

SEQ ID NO: 194602 - protein, 13 aa, Homo sapiens
  CDR3 for beta chain variable domain of TCR clone 97301 (TRBV20-1, TRBJ1-1)
CSARGGGNTEAFF

SEQ ID NO: 194603 - protein, 13 aa, Homo sapiens
  CDR3 for alpha chain variable domain of TCR clone 97302 (TRAV8-3, TRAJ43)
CAVVPYNNNDMRF

SEQ ID NO: 194604 - protein, 14 aa, Homo sapiens
  CDR3 for beta chain variable domain of TCR clone 97302 (TRBV7-2, TRBJ1-1)
CASSFLTGTTEAFF

SEQ ID NO: 194605 - protein, 11 aa, Homo sapiens
  CDR3 for alpha chain variable domain of TCR clone 97303 (TRAV2, TRAJ13)
CASGGYQKVTF

SEQ ID NO: 194606 - protein, 13 aa, Homo sapiens
  CDR3 for beta chain variable domain of TCR clone 97303 (TRBV5-7, TRBJ1-2)
CASSLIRAPGYTF

SEQ ID NO: 194607 - protein, 15 aa, Homo sapiens
  CDR3 for alpha chain variable domain of TCR clone 97304 (TRAV21, TRAJ24)
CAAPSSTDSWGKLQF

SEQ ID NO: 194608 - protein, 13 aa, Homo sapiens
  CDR3 for beta chain variable domain of TCR clone 97304 (TRBV11-2, TRBJ2-5)
CASSSTGEETQYF

SEQ ID NO: 194609 - protein, 12 aa, Homo sapiens
  CDR3 for alpha chain variable domain of TCR clone 97305 (TRAV12-3, TRAJ17)
CAMTLTGNKLTF

SEQ ID NO: 194610 - protein, 16 aa, Homo sapiens
  CDR3 for beta chain variable domain of TCR clone 97305 (TRBV7-2, TRBJ1-4)
CASSPVGRFDREKLFF

SEQ ID NO: 194611 - protein, 15 aa, Homo sapiens
  CDR3 for alpha chain variable domain of TCR clone 97306 (TRAV23/DV6, TRAJ28)
CAALLAYSGAGSYQP

SEQ ID NO: 194612 - protein, 13 aa, Homo sapiens
  CDR3 for beta chain variable domain of TCR clone 97306 (TRBV4-2, TRBJ2-3)
CASSQGNTDTQYF

SEQ ID NO: 194613 - protein, 14 aa, Homo sapiens
  CDR3 for alpha chain variable domain of TCR clone 97307 (TRAV1-2, TRAJ16)
CAVNRFSDGQKLLF

SEQ ID NO: 194614 - protein, 14 aa, Homo sapiens
  CDR3 for beta chain variable domain of TCR clone 97307 (TRBV28, TRBJ2-3)
CASSFVQGTDTQYF

SEQ ID NO: 194615 - protein, 20 aa, Homo sapiens
  CDR3 for alpha chain variable domain of TCR clone 97308 (TRAV21, TRAJ22)
SLVTQPPTLKPSGSARQLTF

SEQ ID NO: 194616 - protein, 16 aa, Homo sapiens
  CDR3 for beta chain variable domain of TCR clone 97308 (TRBV7-3, TRBJ2-2)
CASSLKRGTLSGELFF

SEQ ID NO: 194617 - protein, 11 aa, Homo sapiens
  CDR3 for alpha chain variable domain of TCR clone 97309 (TRAV16, TRAJ42)
CALASQGNLIL

SEQ ID NO: 194618 - protein, 18 aa, Homo sapiens
  CDR3 for beta chain variable domain of TCR clone 97309 (TRBV6-4, TRBJ2-1)
CASSPDRMGSGSINEQFF

SEQ ID NO: 194619 - protein, 17 aa, Homo sapiens
  CDR3 for alpha chain variable domain of TCR clone 97310 (TRAV3, TRAJ42)
CAVRDRAYGGSQGNLIF

SEQ ID NO: 194620 - protein, 15 aa, Homo sapiens
  CDR3 for beta chain variable domain of TCR clone 97310 (TRBV2, TRBJ2-7)
CASSEGLARSYEQYF

SEQ ID NO: 194621 - protein, 11 aa, Homo sapiens
  CDR3 for alpha chain variable domain of TCR clone 97311 (TRAV27, TRAJ47)
SIVEYGNKLVF

SEQ ID NO: 194622 - protein, 14 aa, Homo sapiens
  CDR3 for beta chain variable domain of TCR clone 97311 (TRBV6-5, TRBJ1-5)
CASSFRQFNQPQHF

SEQ ID NO: 194623 - protein, 13 aa, Homo sapiens
  CDR3 for alpha chain variable domain of TCR clone 97312 (TRAV2, TRAJ29)
CAAQNSGNTALVF

SEQ ID NO: 194624 - protein, 14 aa, Homo sapiens
  CDR3 for beta chain variable domain of TCR clone 97312 (TRBV7-9, TRBJ2-4)
CASSLAMGGNIQYF

SEQ ID NO: 194625 - protein, 16 aa, Homo sapiens
  CDR3 for alpha chain variable domain of TCR clone 97313 (TRAV13-1, TRAJ37)
CAASSLGSSNTGKLIF

SEQ ID NO: 194626 - protein, 15 aa, Homo sapiens
  CDR3 for beta chain variable domain of TCR clone 97313 (TRBV7-2, TRBJ2-1)
CASSFQADEYNEQFF

SEQ ID NO: 194627 - protein, 13 aa, Homo sapiens
  CDR3 for alpha chain variable domain of TCR clone 97314 (TRAV1-1, TRAJ9)
CAAKNTGGFKTIF

SEQ ID NO: 194628 - protein, 14 aa, Homo sapiens
  CDR3 for beta chain variable domain of TCR clone 97314 (TRBV27, TRBJ2-3)
CATWTSGRPWGQYF

SEQ ID NO: 194629 - protein, 11 aa, Homo sapiens
  CDR3 for alpha chain variable domain of TCR clone 97315 (TRAV12-1, TRAJ3)
CVVNRQQCFQD

SEQ ID NO: 194630 - protein, 13 aa, Homo sapiens
  CDR3 for beta chain variable domain of TCR clone 97315 (TRBV19, TRBJ1-2)
CASSVPGQDGYTF

SEQ ID NO: 194631 - protein, 15 aa, Homo sapiens
  CDR3 for alpha chain variable domain of TCR clone 97316 (TRAV2, TRAJ9)
CAVEDRGTGGFKTIF

SEQ ID NO: 194632 - protein, 14 aa, Homo sapiens
  CDR3 for beta chain variable domain of TCR clone 97316 (TRBV4-1, TRBJ2-2)
CSSSQAVNTGELFF

SEQ ID NO: 194633 - protein, 18 aa, Homo sapiens
  CDR3 for alpha chain variable domain of TCR clone 97317 (TRAV26-2, TRAJ45)
CILRVDKYSGGGADGLTF

SEQ ID NO: 194634 - protein, 14 aa, Homo sapiens
  CDR3 for beta chain variable domain of TCR clone 97317 (TRBV18, TRBJ2-7)
CASSPRGGAYEQYF

SEQ ID NO: 194635 - protein, 12 aa, Homo sapiens
  CDR3 for alpha chain variable domain of TCR clone 97318 (TRAV2, TRAJ26)
CAVGEYGKNFVF

SEQ ID NO: 194636 - protein, 14 aa, Homo sapiens
  CDR3 for beta chain variable domain of TCR clone 97318 (TRBV7-2, TRBJ2-2)
CASSPSGGTGELFF

SEQ ID NO: 194637 - protein, 14 aa, Homo sapiens
  CDR3 for alpha chain variable domain of TCR clone 97319 (TRAV29/DV5, TRAJ36)
CAARRKTGANNLFF

SEQ ID NO: 194638 - protein, 13 aa, Homo sapiens
  CDR3 for beta chain variable domain of TCR clone 97319 (TRBV14, TRBJ2-7)
CASSQDRRYEQYF

SEQ ID NO: 194639 - protein, 16 aa, Homo sapiens
  CDR3 for alpha chain variable domain of TCR clone 97320 (TRAV30, TRAJ24)
CGTEIADADSWGKFQL

SEQ ID NO: 194640 - protein, 14 aa, Homo sapiens
  CDR3 for beta chain variable domain of TCR clone 97320 (TRBV12-5, TRBJ2-5)
CASGSRTHQETQYF

SEQ ID NO: 194641 - protein, 11 aa, Homo sapiens
  CDR3 for alpha chain variable domain of TCR clone 97321 (TRAV17, TRAJ31)
CATSNNARIMF

SEQ ID NO: 194642 - protein, 14 aa, Homo sapiens
  CDR3 for beta chain variable domain of TCR clone 97321 (TRBV18, TRBJ2-7)
CASSPRGGAYEQYF

SEQ ID NO: 194643 - protein, 13 aa, Homo sapiens
  CDR3 for alpha chain variable domain of TCR clone 97322 (TRAV20, TRAJ37)
CAGCSSNTGKLIF

SEQ ID NO: 194644 - protein, 14 aa, Homo sapiens
  CDR3 for beta chain variable domain of TCR clone 97322 (TRBV12-4, TRBJ1-3)
CASGQTVSGNTIYF

SEQ ID NO: 194645 - protein, 14 aa, Homo sapiens
  CDR3 for alpha chain variable domain of TCR clone 97323 (TRAV1-2, TRAJ8)
CAVREDTGFQKLVF

SEQ ID NO: 194646 - protein, 14 aa, Homo sapiens
  CDR3 for beta chain variable domain of TCR clone 97323 (TRBV6-1, TRBJ2-1)
CASAKDGFYNEQFF

SEQ ID NO: 194647 - protein, 13 aa, Homo sapiens
  CDR3 for alpha chain variable domain of TCR clone 97324 (TRAV8-3, TRAJ43)
CAVGPANNNDMRF

SEQ ID NO: 194648 - protein, 12 aa, Homo sapiens
  CDR3 for beta chain variable domain of TCR clone 97324 (TRBV7-2, TRBJ1-6)
CASSLSSSPLHF

SEQ ID NO: 194649 - protein, 16 aa, Homo sapiens
  CDR3 for alpha chain variable domain of TCR clone 97325 (TRAV12-2, TRAJ10)
CAVNRVLKGGGNKLTF

SEQ ID NO: 194650 - protein, 12 aa, Homo sapiens
  CDR3 for beta chain variable domain of TCR clone 97325 (TRBV28, TRBJ2-7)
CASSFSSYEQYF

SEQ ID NO: 194651 - protein, 17 aa, Homo sapiens
  CDR3 for alpha chain variable domain of TCR clone 97326 (TRAV3, TRAJ6)
CAVRDGPRAGGSYIPTF

SEQ ID NO: 194652 - protein, 13 aa, Homo sapiens
  CDR3 for beta chain variable domain of TCR clone 97326 (TRBV12-5, TRBJ2-3)
CASGDRQSDTQYC

SEQ ID NO: 194653 - protein, 12 aa, Homo sapiens
  CDR3 for alpha chain variable domain of TCR clone 97327 (TRAV20, TRAJ54)
CAVQEGAQKLVF

SEQ ID NO: 194654 - protein, 17 aa, Homo sapiens
  CDR3 for beta chain variable domain of TCR clone 97327 (TRBV13, TRBJ2-3)
CASSLSRVAGGRKTQYF

SEQ ID NO: 194655 - protein, 14 aa, Homo sapiens
  CDR3 for alpha chain variable domain of TCR clone 97328 (TRAV26-1, TRAJ38)
CIADNAGNNRELIW

SEQ ID NO: 194656 - protein, 16 aa, Homo sapiens
  CDR3 for beta chain variable domain of TCR clone 97328 (TRBV19, TRBJ2-1)
CASSKAGPSSYNEQFF

SEQ ID NO: 194657 - protein, 10 aa, Homo sapiens
  CDR3 for alpha chain variable domain of TCR clone 97329 (TRAV36/DV7, TRAJ31)
CASNNARLMF

SEQ ID NO: 194658 - protein, 13 aa, Homo sapiens
  CDR3 for beta chain variable domain of TCR clone 97329 (TRBV27, TRBJ2-7)
CASSLRHRYEQYF

SEQ ID NO: 194659 - protein, 14 aa, Homo sapiens
  CDR3 for alpha chain variable domain of TCR clone 97330 (TRAV1-1, TRAJ27)
CAVIYNTNAGKSTF

SEQ ID NO: 194660 - protein, 15 aa, Homo sapiens
  CDR3 for beta chain variable domain of TCR clone 97330 (TRBV7-2, TRBJ2-1)
CAGSSGLAVGNEQFF

SEQ ID NO: 194661 - protein, 15 aa, Homo sapiens
  CDR3 for alpha chain variable domain of TCR clone 97331 (TRAV23/DV6, TRAJ44)
CAAMKPTGTASKLTF

SEQ ID NO: 194662 - protein, 16 aa, Homo sapiens
  CDR3 for beta chain variable domain of TCR clone 97331 (TRBV28, TRBJ2-5)
CVTSGWPSRLKETQYF

SEQ ID NO: 194663 - protein, 10 aa, Homo sapiens
  CDR3 for alpha chain variable domain of TCR clone 97332 (TRAV12-1, TRAJ37)
GSSNTGKLIF

SEQ ID NO: 194664 - protein, 15 aa, Homo sapiens
  CDR3 for beta chain variable domain of TCR clone 97332 (TRBV12-5, TRBJ2-2)
CASGRLGGNTGELFF

SEQ ID NO: 194665 - protein, 14 aa, Homo sapiens
  CDR3 for alpha chain variable domain of TCR clone 97333 (TRAV4, TRAJ43)
CLVGPMYNNNDMRV

SEQ ID NO: 194666 - protein, 21 aa, Homo sapiens
  CDR3 for beta chain variable domain of TCR clone 97333 (TRBV11-1, TRBJ2-1)
CASSARERLRPEGPSYNEQFF

SEQ ID NO: 194667 - protein, 13 aa, Homo sapiens
  CDR3 for alpha chain variable domain of TCR clone 97334 (TRAV13-1, TRAJ21)
CAASIYNFNKFYF

SEQ ID NO: 194668 - protein, 14 aa, Homo sapiens
  CDR3 for beta chain variable domain of TCR clone 97334 (TRBV7-9, TRBJ2-4)
CASSLAMGGNIQYF

SEQ ID NO: 194669 - protein, 16 aa, Homo sapiens
  CDR3 for alpha chain variable domain of TCR clone 97335 (TRAV12-2, TRAJ40)
CAVIRGGTSGTYKYIF

SEQ ID NO: 194670 - protein, 12 aa, Homo sapiens
  CDR3 for beta chain variable domain of TCR clone 97335 (TRBV28, TRBJ2-3)
CASSLYRDTQYF

SEQ ID NO: 194671 - protein, 13 aa, Homo sapiens
  CDR3 for alpha chain variable domain of TCR clone 97336 (TRAV8-3, TRAJ4)
WVFYSGSYNKLIF

SEQ ID NO: 194672 - protein, 16 aa, Homo sapiens
  CDR3 for beta chain variable domain of TCR clone 97336 (TRBV7-8, TRBJ2-3)
CASSTEGQRETDTQYF

SEQ ID NO: 194673 - protein, 11 aa, Homo sapiens
  CDR3 for alpha chain variable domain of TCR clone 97337 (TRAV21, TRAJ9)
CAVPGGFKTIF

SEQ ID NO: 194674 - protein, 17 aa, Homo sapiens
  CDR3 for beta chain variable domain of TCR clone 97337 (TRBV7-9, TRBJ2-5)
CATSGGAIDPVLRARHA

SEQ ID NO: 194675 - protein, 16 aa, Homo sapiens
  CDR3 for alpha chain variable domain of TCR clone 97338 (TRAV12-3, TRAJ53)
CAMSPGSGGSNYKLTF

SEQ ID NO: 194676 - protein, 16 aa, Homo sapiens
  CDR3 for beta chain variable domain of TCR clone 97338 (TRBV2, TRBJ2-3)
CASSTSVEGVTDTQYF

SEQ ID NO: 194677 - protein, 13 aa, Homo sapiens
  CDR3 for alpha chain variable domain of TCR clone 97339 (TRAV27, TRAJ45)
CRSSGGGADGLTF

SEQ ID NO: 194678 - protein, 20 aa, Homo sapiens
  CDR3 for beta chain variable domain of TCR clone 97339 (TRBV7-8, TRBJ2-2)
CASSHLFPGPTIHITGELFF

SEQ ID NO: 194679 - protein, 14 aa, Homo sapiens
  CDR3 for alpha chain variable domain of TCR clone 97340 (TRAV8-6, TRAJ9)
CAVILNTGGFKTIF

SEQ ID NO: 194680 - protein, 15 aa, Homo sapiens
  CDR3 for beta chain variable domain of TCR clone 97340 (TRBV7-8, TRBJ2-7)
CASSLGTGNPYEQYF

SEQ ID NO: 194681 - protein, 12 aa, Homo sapiens
  CDR3 for alpha chain variable domain of TCR clone 97341 (TRAV12-2, TRAJ42)
CAVGGSQGNLIF

SEQ ID NO: 194682 - protein, 17 aa, Homo sapiens
  CDR3 for beta chain variable domain of TCR clone 97341 (TRBV11-2, TRBJ2-1)
CASSLYPPGVEYNEQFF

SEQ ID NO: 194683 - protein, 15 aa, Homo sapiens
  CDR3 for alpha chain variable domain of TCR clone 97342 (TRAV8-3, TRAJ45)
CASSYSGGYADGLTF

SEQ ID NO: 194684 - protein, 13 aa, Homo sapiens
  CDR3 for beta chain variable domain of TCR clone 97342 (TRBV10-3, TRBJ2-7)
CASKLAVNYEQYF

SEQ ID NO: 194685 - protein, 14 aa, Homo sapiens
  CDR3 for alpha chain variable domain of TCR clone 97343 (TRAV35, TRAJ22)
CAGLRPGSARQLTF

SEQ ID NO: 194686 - protein, 14 aa, Homo sapiens
  CDR3 for beta chain variable domain of TCR clone 97343 (TRBV4-1, TRBJ2-2)
CASSQAVNTGELFF

SEQ ID NO: 194687 - protein, 13 aa, Homo sapiens
  CDR3 for alpha chain variable domain of TCR clone 97344 (TRAV2, TRAJ10)
CAVETGGGNKLTS

SEQ ID NO: 194688 - protein, 14 aa, Homo sapiens
  CDR3 for beta chain variable domain of TCR clone 97344 (TRBV20-1, TRBJ2-3)
CSAGGRRGTDTQYF

SEQ ID NO: 194689 - protein, 11 aa, Homo sapiens
  CDR3 for alpha chain variable domain of TCR clone 97345 (TRAV3, TRAJ21)
CAVGNFNKFYF

SEQ ID NO: 194690 - protein, 21 aa, Homo sapiens
  CDR3 for beta chain variable domain of TCR clone 97345 (TRBV28, TRBJ2-7)
CASSANRNLRGPSGRVNEQYF

SEQ ID NO: 194691 - protein, 12 aa, Homo sapiens
  CDR3 for alpha chain variable domain of TCR clone 97346 (TRAV1-1, TRAJ24)
CAATDSWGKLQF

SEQ ID NO: 194692 - protein, 13 aa, Homo sapiens
  CDR3 for beta chain variable domain of TCR clone 97346 (TRBV7-2, TRBJ2-5)
CQQLVRGGETQYF

SEQ ID NO: 194693 - protein, 14 aa, Homo sapiens
  CDR3 for alpha chain variable domain of TCR clone 97347 (TRAV12-2, TRAJ44)
CAVNPAGTASKLTF

SEQ ID NO: 194694 - protein, 15 aa, Homo sapiens
  CDR3 for beta chain variable domain of TCR clone 97347 (TRBV18, TRBJ1-5)
CASSPSDRSNQPQHF

SEQ ID NO: 194695 - protein, 14 aa, Homo sapiens
  CDR3 for alpha chain variable domain of TCR clone 97348 (TRAV12-2, TRAJ40)
CAVKIPSGAYKYIF

SEQ ID NO: 194696 - protein, 20 aa, Homo sapiens
  CDR3 for beta chain variable domain of TCR clone 97348 (TRBV28, TRBJ2-1)
CASTPIGRSPGLAGGDEQFF

SEQ ID NO: 194697 - protein, 12 aa, Homo sapiens
  CDR3 for alpha chain variable domain of TCR clone 97349 (TRAV12-3, TRAJ17)
CAVMLTGNKLTF

SEQ ID NO: 194698 - protein, 15 aa, Homo sapiens
  CDR3 for beta chain variable domain of TCR clone 97349 (TRBV20-1, TRBJ2-7)
CSARDRVSGMDEQYF

SEQ ID NO: 194699 - protein, 10 aa, Homo sapiens
  CDR3 for alpha chain variable domain of TCR clone 97350 (TRAV23/DV6, TRAJ31)
CARGGARLLF

SEQ ID NO: 194700 - protein, 14 aa, Homo sapiens
  CDR3 for beta chain variable domain of TCR clone 97350 (TRBV7-8, TRBJ1-2)
CASSPDSLSYGYTF

SEQ ID NO: 194701 - protein, 16 aa, Homo sapiens
  CDR3 for alpha chain variable domain of TCR clone 97351 (TRAV2, TRAJ4)
CAVEDRFSGGYNKLIF

SEQ ID NO: 194702 - protein, 13 aa, Homo sapiens
  CDR3 for beta chain variable domain of TCR clone 97351 (TRBV7-7, TRBJ2-5)
CASSRSGQGTQYF

SEQ ID NO: 194703 - protein, 13 aa, Homo sapiens
  CDR3 for alpha chain variable domain of TCR clone 97352 (TRAV27, TRAJ45)
CRSSGGGADGLTF

SEQ ID NO: 194704 - protein, 11 aa, Homo sapiens
  CDR3 for beta chain variable domain of TCR clone 97352 (TRBV19, TRBJ1-1)
CASSIGSEVFF

SEQ ID NO: 194705 - protein, 14 aa, Homo sapiens
  CDR3 for alpha chain variable domain of TCR clone 97353 (TRAV12-2, TRAJ40)
CAVKIPSGTYKYIF

SEQ ID NO: 194706 - protein, 17 aa, Homo sapiens
  CDR3 for beta chain variable domain of TCR clone 97353 (TRBV7-8, TRBJ2-6)
CASSAGTGGAGANVLPF

SEQ ID NO: 194707 - protein, 14 aa, Homo sapiens
  CDR3 for alpha chain variable domain of TCR clone 97354 (TRAV35, TRAJ42)
CAGRYGGSQGNLIF

SEQ ID NO: 194708 - protein, 15 aa, Homo sapiens
  CDR3 for beta chain variable domain of TCR clone 97354 (TRBV7-9, TRBJ2-1)
CASSLGWGRANEQCF

SEQ ID NO: 194709 - protein, 17 aa, Homo sapiens
  CDR3 for alpha chain variable domain of TCR clone 97355 (TRAV13-1, TRAJ52)
CAAVRNAGGTSYGKLTF

SEQ ID NO: 194710 - protein, 13 aa, Homo sapiens
  CDR3 for beta chain variable domain of TCR clone 97355 (TRBV7-2, TRBJ1-1)
CASNLKGAKVAFF

SEQ ID NO: 194711 - protein, 14 aa, Homo sapiens
  CDR3 for alpha chain variable domain of TCR clone 97356 (TRAV1-2, TRAJ12)
CAVSGTDSSYKLIL

SEQ ID NO: 194712 - protein, 15 aa, Homo sapiens
  CDR3 for beta chain variable domain of TCR clone 97356 (TRBV2, TRBJ2-4)
CASSGTNLAKNIQYF

SEQ ID NO: 194713 - protein, 16 aa, Homo sapiens
  CDR3 for alpha chain variable domain of TCR clone 97357 (TRAV30, TRAJ24)
RGTEIVDADSWGKFQF

SEQ ID NO: 194714 - protein, 15 aa, Homo sapiens
  CDR3 for beta chain variable domain of TCR clone 97357 (TRBV6-3, TRBJ2-7)
CASSSPGTVFYEQYF

SEQ ID NO: 194715 - protein, 12 aa, Homo sapiens
  CDR3 for alpha chain variable domain of TCR clone 97358 (TRAV12-2, TRAJ42)
CAVGGSQGTLIF

SEQ ID NO: 194716 - protein, 15 aa, Homo sapiens
  CDR3 for beta chain variable domain of TCR clone 97358 (TRBV9, TRBJ1-6)
CASSVAGTGDSPLHF

SEQ ID NO: 194717 - protein, 14 aa, Homo sapiens
  CDR3 for alpha chain variable domain of TCR clone 97359 (TRAV12-2, TRAJ13)
CAVKKTGGYQKVAF

SEQ ID NO: 194718 - protein, 14 aa, Homo sapiens
  CDR3 for beta chain variable domain of TCR clone 97359 (TRBV19, TRBJ2-1)
CASPTFVLSGEQFF

SEQ ID NO: 194719 - protein, 15 aa, Homo sapiens
  CDR3 for alpha chain variable domain of TCR clone 97360 (TRAV13-2, TRAJ3)
CAENTAYSSASKIIF

SEQ ID NO: 194720 - protein, 15 aa, Homo sapiens
  CDR3 for beta chain variable domain of TCR clone 97360 (TRBV27, TRBJ2-1)
CASSNGGGSSNEQFF

SEQ ID NO: 194721 - protein, 14 aa, Homo sapiens
  CDR3 for alpha chain variable domain of TCR clone 97361 (TRAV1-2, TRAJ16)
CAVNRFSDGQKLLF

SEQ ID NO: 194722 - protein, 16 aa, Homo sapiens
  CDR3 for beta chain variable domain of TCR clone 97361 (TRBV6-6, TRBJ2-1)
CASSYSFSGPYNEQFF

SEQ ID NO: 194723 - protein, 13 aa, Homo sapiens
  CDR3 for alpha chain variable domain of TCR clone 97362 (TRAV12-3, TRAJ13)
CAMTSGGYQKVTF

SEQ ID NO: 194724 - protein, 13 aa, Homo sapiens
  CDR3 for beta chain variable domain of TCR clone 97362 (TRBV7-9, TRBJ1-2)
CASSLKQNYGYTL

SEQ ID NO: 194725 - protein, 11 aa, Homo sapiens
  CDR3 for alpha chain variable domain of TCR clone 97363 (TRAV12-3, TRAJ43)
CAMSVSNDMRF

SEQ ID NO: 194726 - protein, 17 aa, Homo sapiens
  CDR3 for beta chain variable domain of TCR clone 97363 (TRBV20-1, TRBJ2-1)
CSASSSGLAGAYNEQFF

SEQ ID NO: 194727 - protein, 14 aa, Homo sapiens
  CDR3 for alpha chain variable domain of TCR clone 97364 (TRAV8-4, TRAJ5)
CVVSTDTGRRALTF

SEQ ID NO: 194728 - protein, 14 aa, Homo sapiens
  CDR3 for beta chain variable domain of TCR clone 97364 (TRBV5-1, TRBJ2-2)
CASSLGGGSGELFF

SEQ ID NO: 194729 - protein, 16 aa, Homo sapiens
  CDR3 for alpha chain variable domain of TCR clone 97365 (TRAV17, TRAJ52)
CATGIIGGSSYGKLTF

SEQ ID NO: 194730 - protein, 14 aa, Homo sapiens
  CDR3 for beta chain variable domain of TCR clone 97365 (TRBV7-3, TRBJ2-2)
CASSSGGYTGELFF

SEQ ID NO: 194731 - protein, 11 aa, Homo sapiens
  CDR3 for alpha chain variable domain of TCR clone 97366 (TRAV12-3, TRAJ27)
CAMANAGKSTF

SEQ ID NO: 194732 - protein, 14 aa, Homo sapiens
  CDR3 for beta chain variable domain of TCR clone 97366 (TRBV12-4, TRBJ2-3)
CASSGQGSTDTQYF

SEQ ID NO: 194733 - protein, 13 aa, Homo sapiens
  CDR3 for alpha chain variable domain of TCR clone 97367 (TRAV12-2, TRAJ6)
CAVNVSRKLHTYI

SEQ ID NO: 194734 - protein, 16 aa, Homo sapiens
  CDR3 for beta chain variable domain of TCR clone 97367 (TRBV7-3, TRBJ2-2)
CASSLKRGTLSGELFF

SEQ ID NO: 194735 - protein, 12 aa, Homo sapiens
  CDR3 for alpha chain variable domain of TCR clone 97368 (TRAV23/DV6, TRAJ30)
CAASKGDDKIIF

SEQ ID NO: 194736 - protein, 15 aa, Homo sapiens
  CDR3 for beta chain variable domain of TCR clone 97368 (TRBV20-1, TRBJ2-7)
CSASDRVSGMDEQYF

SEQ ID NO: 194737 - protein, 16 aa, Homo sapiens
  CDR3 for alpha chain variable domain of TCR clone 97369 (TRAV3, TRAJ37)
CAVRGKGSGNTRKLIF

SEQ ID NO: 194738 - protein, 20 aa, Homo sapiens
  CDR3 for beta chain variable domain of TCR clone 97369 (TRBV7-8, TRBJ2-2)
CASSHLFPGPTIHITGELFF

SEQ ID NO: 194739 - protein, 17 aa, Homo sapiens
  CDR3 for alpha chain variable domain of TCR clone 97370 (TRAV3, TRAJ6)
CAVRDGPRAGGSYIPTF

SEQ ID NO: 194740 - protein, 14 aa, Homo sapiens
  CDR3 for beta chain variable domain of TCR clone 97370 (TRBV19, TRBJ2-1)
CDSPTFVLSGEQFF

SEQ ID NO: 194741 - protein, 14 aa, Homo sapiens
  CDR3 for alpha chain variable domain of TCR clone 97371 (TRAV26-1, TRAJ39)
CIVFTNNAGNMITF

SEQ ID NO: 194742 - protein, 15 aa, Homo sapiens
  CDR3 for beta chain variable domain of TCR clone 97371 (TRBV19, TRBJ2-4)
CASSLTGLTKNIQYF

SEQ ID NO: 194743 - protein, 15 aa, Homo sapiens
  CDR3 for alpha chain variable domain of TCR clone 97372 (TRAV26-2, TRAJ50)
CILGDEETSYDKVIF

SEQ ID NO: 194744 - protein, 12 aa, Homo sapiens
  CDR3 for beta chain variable domain of TCR clone 97372 (TRBV5-7, TRBJ1-2)
CASSDGPYGYTF

SEQ ID NO: 194745 - protein, 13 aa, Homo sapiens
  CDR3 for alpha chain variable domain of TCR clone 97373 (TRAV17, TRAJ26)
CATVDNYGQNFVF

SEQ ID NO: 194746 - protein, 16 aa, Homo sapiens
  CDR3 for beta chain variable domain of TCR clone 97373 (TRBV2, TRBJ2-1)
CAGSVGGSLSYNEQFF

SEQ ID NO: 194747 - protein, 18 aa, Homo sapiens
  CDR3 for alpha chain variable domain of TCR clone 97374 (TRAV17, TRAJ57)
CFLLLCYGTQGGSEKLVF

SEQ ID NO: 194748 - protein, 15 aa, Homo sapiens
  CDR3 for beta chain variable domain of TCR clone 97374 (TRBV5-1, TRBJ2-7)
CASSLDLTSSYEQYF

SEQ ID NO: 194749 - protein, 13 aa, Homo sapiens
  CDR3 for alpha chain variable domain of TCR clone 97375 (TRAV13-2, TRAJ48)
CAEMDFGNEKLTF

SEQ ID NO: 194750 - protein, 15 aa, Homo sapiens
  CDR3 for beta chain variable domain of TCR clone 97375 (TRBV7-9, TRBJ1-6)
CGSSSPGRGNSPLHF

SEQ ID NO: 194751 - protein, 13 aa, Homo sapiens
  CDR3 for alpha chain variable domain of TCR clone 97376 (TRAV1-2, TRAJ20)
CAVRDGNDYKLRF

SEQ ID NO: 194752 - protein, 16 aa, Homo sapiens
  CDR3 for beta chain variable domain of TCR clone 97376 (TRBV12-5, TRBJ2-5)
CASGPRTSGNQETQYF

SEQ ID NO: 194753 - protein, 14 aa, Homo sapiens
  CDR3 for alpha chain variable domain of TCR clone 97377 (TRAV26-1, TRAJ48)
CIVRVGFRNEKLTF

SEQ ID NO: 194754 - protein, 13 aa, Homo sapiens
  CDR3 for beta chain variable domain of TCR clone 97377 (TRBV11-3, TRBJ2-3)
CASSHDTKDTQYF

SEQ ID NO: 194755 - protein, 15 aa, Homo sapiens
  CDR3 for alpha chain variable domain of TCR clone 97378 (TRAV26-1, TRAJ44)
CIARVPFGTSSKLTF

SEQ ID NO: 194756 - protein, 17 aa, Homo sapiens
  CDR3 for beta chain variable domain of TCR clone 97378 (TRBV24-1, TRBJ2-4)
CATSDAEARGVRNIQYF

SEQ ID NO: 194757 - protein, 13 aa, Homo sapiens
  CDR3 for alpha chain variable domain of TCR clone 97379 (TRAV8-6, TRAJ49)
CAVITNTGNQFYF

SEQ ID NO: 194758 - protein, 15 aa, Homo sapiens
  CDR3 for beta chain variable domain of TCR clone 97379 (TRBV9, TRBJ2-3)
CASSTGGGEGDTQYF

SEQ ID NO: 194759 - protein, 13 aa, Homo sapiens
  CDR3 for alpha chain variable domain of TCR clone 97380 (TRAV13-2, TRAJ48)
CAEMDFGNEKLTF

SEQ ID NO: 194760 - protein, 17 aa, Homo sapiens
  CDR3 for beta chain variable domain of TCR clone 97380 (TRBV7-3, TRBJ2-5)
CASSLGSGRSGSETQYF

SEQ ID NO: 194761 - protein, 14 aa, Homo sapiens
  CDR3 for alpha chain variable domain of TCR clone 97381 (TRAV8-2, TRAJ4)
CVVSPSGGYNKLIF

SEQ ID NO: 194762 - protein, 14 aa, Homo sapiens
  CDR3 for beta chain variable domain of TCR clone 97381 (TRBV15, TRBJ1-5)
CATSTGYPDQPQHF

SEQ ID NO: 194763 - protein, 15 aa, Homo sapiens
  CDR3 for alpha chain variable domain of TCR clone 97382 (TRAV26-1, TRAJ23)
CIVRVAGYQGGKLIF

SEQ ID NO: 194764 - protein, 18 aa, Homo sapiens
  CDR3 for beta chain variable domain of TCR clone 97382 (TRBV28, TRBJ2-1)
CAGSSTSGRANSYNEQFF

SEQ ID NO: 194765 - protein, 15 aa, Homo sapiens
  CDR3 for alpha chain variable domain of TCR clone 97383 (TRAV17, TRAJ13)
CATDAGSGGYQKVPF

SEQ ID NO: 194766 - protein, 17 aa, Homo sapiens
  CDR3 for beta chain variable domain of TCR clone 97383 (TRBV11-2, TRBJ2-1)
CASSLYPPGVEYNEQFF

SEQ ID NO: 194767 - protein, 17 aa, Homo sapiens
  CDR3 for alpha chain variable domain of TCR clone 97384 (TRAV13-1, TRAJ53)
CAASWKSSGGSNYKLTF

SEQ ID NO: 194768 - protein, 13 aa, Homo sapiens
  CDR3 for beta chain variable domain of TCR clone 97384 (TRBV7-9, TRBJ1-2)
CASSLKQNYGYTF

SEQ ID NO: 194769 - protein, 14 aa, Homo sapiens
  CDR3 for alpha chain variable domain of TCR clone 97385 (TRAV3, TRAJ22)
CAVRDYGSARQLTF

SEQ ID NO: 194770 - protein, 13 aa, Homo sapiens
  CDR3 for beta chain variable domain of TCR clone 97385 (TRBV27, TRBJ1-4)
CASSLMGDEKLFF

SEQ ID NO: 194771 - protein, 10 aa, Homo sapiens
  CDR3 for alpha chain variable domain of TCR clone 97386 (TRAV8-4, TRAJ43)
CAVSADDMCF

SEQ ID NO: 194772 - protein, 11 aa, Homo sapiens
  CDR3 for beta chain variable domain of TCR clone 97386 (TRBV12-4, TRBJ2-3)
CASTATDTQYF

SEQ ID NO: 194773 - protein, 13 aa, Homo sapiens
  CDR3 for alpha chain variable domain of TCR clone 97387 (TRAV12-2, TRAJ15)
CAVFNQAGTALIF

SEQ ID NO: 194774 - protein, 22 aa, Homo sapiens
  CDR3 for beta chain variable domain of TCR clone 97387 (TRBV7-8, TRBJ1-5)
RAPPCISVPAAGGGGADQPQHF

SEQ ID NO: 194775 - protein, 13 aa, Homo sapiens
  CDR3 for alpha chain variable domain of TCR clone 97388 (TRAV2, TRAJ15)
CAVEAQAGTALIF

SEQ ID NO: 194776 - protein, 14 aa, Homo sapiens
  CDR3 for beta chain variable domain of TCR clone 97388 (TRBV18, TRBJ2-7)
CASSPRGGSYEQYF

SEQ ID NO: 194777 - protein, 11 aa, Homo sapiens
  CDR3 for alpha chain variable domain of TCR clone 97389 (TRAV2, TRAJ33)
CAVESNYQLIW

SEQ ID NO: 194778 - protein, 14 aa, Homo sapiens
  CDR3 for beta chain variable domain of TCR clone 97389 (TRBV19, TRBJ2-2)
CASSTLHRSGELFF

SEQ ID NO: 194779 - protein, 14 aa, Homo sapiens
  CDR3 for alpha chain variable domain of TCR clone 97390 (TRAV12-3, TRAJ10)
SHLPLTGGGNKLTF

SEQ ID NO: 194780 - protein, 14 aa, Homo sapiens
  CDR3 for beta chain variable domain of TCR clone 97390 (TRBV20-1, TRBJ1-1)
CSARAVNGYTEAFF

SEQ ID NO: 194781 - protein, 14 aa, Homo sapiens
  CDR3 for alpha chain variable domain of TCR clone 97391 (TRAV8-3, TRAJ39)
CAVGANNAGNMLTF

SEQ ID NO: 194782 - protein, 13 aa, Homo sapiens
  CDR3 for beta chain variable domain of TCR clone 97391 (TRBV7-9, TRBJ1-2)
CASSLKQNYGYTF

SEQ ID NO: 194783 - protein, 12 aa, Homo sapiens
  CDR3 for alpha chain variable domain of TCR clone 97392 (TRAV16, TRAJ13)
CITLRGYQKFTF

SEQ ID NO: 194784 - protein, 17 aa, Homo sapiens
  CDR3 for beta chain variable domain of TCR clone 97392 (TRBV28, TRBJ2-5)
CASSRQGGLAGAETQYF

SEQ ID NO: 194785 - protein, 15 aa, Homo sapiens
  CDR3 for alpha chain variable domain of TCR clone 97393 (TRAV8-6, TRAJ6)
CAVRDASGGSYIPTF

SEQ ID NO: 194786 - protein, 15 aa, Homo sapiens
  CDR3 for beta chain variable domain of TCR clone 97393 (TRBV7-9, TRBJ1-5)
CASSQGHQPNQPQHF

SEQ ID NO: 194787 - protein, 13 aa, Homo sapiens
  CDR3 for alpha chain variable domain of TCR clone 97394 (TRAV27, TRAJ11)
CAGARSGYSTLTL

SEQ ID NO: 194788 - protein, 16 aa, Homo sapiens
  CDR3 for beta chain variable domain of TCR clone 97394 (TRBV10-2, TRBJ2-2)
CASSESRDRGSGELFF

SEQ ID NO: 194789 - protein, 12 aa, Homo sapiens
  CDR3 for alpha chain variable domain of TCR clone 97395 (TRAV12-3, TRAJ17)
CAMTLTGNKLTF

SEQ ID NO: 194790 - protein, 16 aa, Homo sapiens
  CDR3 for beta chain variable domain of TCR clone 97395 (TRBV11-2, TRBJ2-1)
CASARGSYSHHNEQFF

SEQ ID NO: 194791 - protein, 14 aa, Homo sapiens
  CDR3 for alpha chain variable domain of TCR clone 97396 (TRAV39, TRAJ42)
CAVDIARSQGNLIF

SEQ ID NO: 194792 - protein, 12 aa, Homo sapiens
  CDR3 for beta chain variable domain of TCR clone 97396 (TRBV7-9, TRBJ1-5)
CASSPQGQPQHF

SEQ ID NO: 194793 - protein, 15 aa, Homo sapiens
  CDR3 for alpha chain variable domain of TCR clone 97397 (TRAV29/DV5, TRAJ31)
CAASGSLGNNARLMF

SEQ ID NO: 194794 - protein, 14 aa, Homo sapiens
  CDR3 for beta chain variable domain of TCR clone 97397 (TRBV6-1, TRBJ1-1)
CASRYAQRNTEAFF

SEQ ID NO: 194795 - protein, 16 aa, Homo sapiens
  CDR3 for alpha chain variable domain of TCR clone 97398 (TRAV30, TRAJ24)
CGTEIVGADSWGKFQF

SEQ ID NO: 194796 - protein, 16 aa, Homo sapiens
  CDR3 for beta chain variable domain of TCR clone 97398 (TRBV28, TRBJ1-4)
CASSPPYRGRSEKLFF

SEQ ID NO: 194797 - protein, 17 aa, Homo sapiens
  CDR3 for alpha chain variable domain of TCR clone 97399 (TRAV8-6, TRAJ58)
CAMSSWVGETSGSRLTF

SEQ ID NO: 194798 - protein, 17 aa, Homo sapiens
  CDR3 for beta chain variable domain of TCR clone 97399 (TRBV4-3, TRBJ1-2)
CASSSRLQAGGSVGYTF

SEQ ID NO: 194799 - protein, 17 aa, Homo sapiens
  CDR3 for alpha chain variable domain of TCR clone 97400 (TRAV3, TRAJ12)
CAVRDGGRMDSSYKLIF

SEQ ID NO: 194800 - protein, 15 aa, Homo sapiens
  CDR3 for beta chain variable domain of TCR clone 97400 (TRBV7-9, TRBJ1-4)
CASSRTGGFNEKLFF

SEQ ID NO: 194801 - protein, 17 aa, Homo sapiens
  CDR3 for alpha chain variable domain of TCR clone 97401 (TRAV4, TRAJ13)
CLVGVQGSSGGYQKVTF

SEQ ID NO: 194802 - protein, 18 aa, Homo sapiens
  CDR3 for beta chain variable domain of TCR clone 97401 (TRBV15, TRBJ2-3)
CATSRDGARRWDTDTQYF

SEQ ID NO: 194803 - protein, 14 aa, Homo sapiens
  CDR3 for alpha chain variable domain of TCR clone 97402 (TRAV13-2, TRAJ27)
CAEMQPTNAGKSTF

SEQ ID NO: 194804 - protein, 15 aa, Homo sapiens
  CDR3 for beta chain variable domain of TCR clone 97402 (TRBV28, TRBJ1-2)
CASSLWQPTNYGYTF

SEQ ID NO: 194805 - protein, 11 aa, Homo sapiens
  CDR3 for alpha chain variable domain of TCR clone 97403 (TRAV17, TRAJ31)
CATSNNARLMF

SEQ ID NO: 194806 - protein, 16 aa, Homo sapiens
  CDR3 for beta chain variable domain of TCR clone 97403 (TRBV7-8, TRBJ2-4)
CASSAERTLANNIQYF

SEQ ID NO: 194807 - protein, 17 aa, Homo sapiens
  CDR3 for alpha chain variable domain of TCR clone 97404 (TRAV8-3, TRAJ50)
CAVGAVDTETSYAKVIF

SEQ ID NO: 194808 - protein, 13 aa, Homo sapiens
  CDR3 for beta chain variable domain of TCR clone 97404 (TRBV7-9, TRBJ2-2)
CASSSAGTGELFF

SEQ ID NO: 194809 - protein, 14 aa, Homo sapiens
  CDR3 for alpha chain variable domain of TCR clone 97405 (TRAV12-3, TRAJ10)
SHLPLTGGGNKLTF

SEQ ID NO: 194810 - protein, 15 aa, Homo sapiens
  CDR3 for beta chain variable domain of TCR clone 97405 (TRBV10-3, TRBJ1-3)
CAISDSQCAGNTIYF

SEQ ID NO: 194811 - protein, 12 aa, Homo sapiens
  CDR3 for alpha chain variable domain of TCR clone 97406 (TRAV21, TRAJ49)
CAVNDGGNQFYF

SEQ ID NO: 194812 - protein, 13 aa, Homo sapiens
  CDR3 for beta chain variable domain of TCR clone 97406 (TRBV2, TRBJ1-1)
CDSSVLMNTEAFF

SEQ ID NO: 194813 - protein, 13 aa, Homo sapiens
  CDR3 for alpha chain variable domain of TCR clone 97407 (TRAV2, TRAJ40)
CAVVNSGTYKYIF

SEQ ID NO: 194814 - protein, 15 aa, Homo sapiens
  CDR3 for beta chain variable domain of TCR clone 97407 (TRBV11-3, TRBJ2-3)
CASLKDGREGDTQYF

SEQ ID NO: 194815 - protein, 14 aa, Homo sapiens
  CDR3 for alpha chain variable domain of TCR clone 97408 (TRAV2, TRAJ37)
CAVDFTSNTGKLIF

SEQ ID NO: 194816 - protein, 16 aa, Homo sapiens
  CDR3 for beta chain variable domain of TCR clone 97408 (TRBV20-1, TRBJ1-2)
CSASMGQGVANYGFTF

SEQ ID NO: 194817 - protein, 13 aa, Homo sapiens
  CDR3 for alpha chain variable domain of TCR clone 97409 (TRAV21, TRAJ57)
CAVTQGGSEKLVL

SEQ ID NO: 194818 - protein, 17 aa, Homo sapiens
  CDR3 for beta chain variable domain of TCR clone 97409 (TRBV20-1, TRBJ2-2)
CSASGSGQGGLTGELFF

SEQ ID NO: 194819 - protein, 14 aa, Homo sapiens
  CDR3 for alpha chain variable domain of TCR clone 97410 (TRAV12-2, TRAJ40)
CAVTIPSGTYKYIF

SEQ ID NO: 194820 - protein, 20 aa, Homo sapiens
  CDR3 for beta chain variable domain of TCR clone 97410 (TRBV28, TRBJ2-1)
CASTPIGRSPGLAGGNEQFF

SEQ ID NO: 194821 - protein, 12 aa, Homo sapiens
  CDR3 for alpha chain variable domain of TCR clone 97411 (TRAV12-1, TRAJ40)
CVVPSGTYKYIF

SEQ ID NO: 194822 - protein, 15 aa, Homo sapiens
  CDR3 for beta chain variable domain of TCR clone 97411 (TRBV12-4, TRBJ2-1)
RASSPLSGRNNEQFF

SEQ ID NO: 194823 - protein, 13 aa, Homo sapiens
  CDR3 for alpha chain variable domain of TCR clone 97412 (TRAV17, TRAJ9)
CATDYTGGFKTIF

SEQ ID NO: 194824 - protein, 16 aa, Homo sapiens
  CDR3 for beta chain variable domain of TCR clone 97412 (TRBV7-7, TRBJ2-1)
CASSLARGPPTMSSSS

SEQ ID NO: 194825 - protein, 14 aa, Homo sapiens
  CDR3 for alpha chain variable domain of TCR clone 97413 (TRAV16, TRAJ17)
CALSGRAAGNKLTF

SEQ ID NO: 194826 - protein, 15 aa, Homo sapiens
  CDR3 for beta chain variable domain of TCR clone 97413 (TRBV3-1, TRBJ1-2)
CASSPTRLPEGSYTF

SEQ ID NO: 194827 - protein, 19 aa, Homo sapiens
  CDR3 for alpha chain variable domain of TCR clone 97414 (TRAV2, TRAJ20)
ILQVREADAAVYRDCKLSF

SEQ ID NO: 194828 - protein, 17 aa, Homo sapiens
  CDR3 for beta chain variable domain of TCR clone 97414 (TRBV11-2, TRBJ2-1)
CASSLYPPGVEYNEQFL

SEQ ID NO: 194829 - protein, 11 aa, Homo sapiens
  CDR3 for alpha chain variable domain of TCR clone 97415 (TRAV1-1, TRAJ23)
CAVRQGGKLSS

SEQ ID NO: 194830 - protein, 20 aa, Homo sapiens
  CDR3 for beta chain variable domain of TCR clone 97415 (TRBV7-8, TRBJ2-2)
CASSHLFPGPTIHITGELFF

SEQ ID NO: 194831 - protein, 16 aa, Homo sapiens
  CDR3 for alpha chain variable domain of TCR clone 97416 (TRAV12-2, TRAJ43)
CAGDDMRFGAGTRLTV

SEQ ID NO: 194832 - protein, 14 aa, Homo sapiens
  CDR3 for beta chain variable domain of TCR clone 97416 (TRBV19, TRBJ2-1)
CASPTFVLSGEQFF

SEQ ID NO: 194833 - protein, 10 aa, Homo sapiens
  CDR3 for alpha chain variable domain of TCR clone 97417 (TRAV12-3, TRAJ49)
CAMNDDQFYF

SEQ ID NO: 194834 - protein, 14 aa, Homo sapiens
  CDR3 for beta chain variable domain of TCR clone 97417 (TRBV10-3, TRBJ2-3)
CAISEKGLGDTQYF

SEQ ID NO: 194835 - protein, 16 aa, Homo sapiens
  CDR3 for alpha chain variable domain of TCR clone 97418 (TRAV8-3, TRAJ8)
CAVPRDGNTGFQKLVF

SEQ ID NO: 194836 - protein, 15 aa, Homo sapiens
  CDR3 for beta chain variable domain of TCR clone 97418 (TRBV6-1, TRBJ2-6)
CASSSRPSGANGLTF

SEQ ID NO: 194837 - protein, 18 aa, Homo sapiens
  CDR3 for alpha chain variable domain of TCR clone 97419 (TRAV29/DV5, TRAJ52)
QCTSVQQADGTSYGKLTF

SEQ ID NO: 194838 - protein, 13 aa, Homo sapiens
  CDR3 for beta chain variable domain of TCR clone 97419 (TRBV7-2, TRBJ1-1)
CASNLKGVKVAFF

SEQ ID NO: 194839 - protein, 15 aa, Homo sapiens
  CDR3 for alpha chain variable domain of TCR clone 97420 (TRAV36/DV7, TRAJ53)
CAVAGSGGSNYKLTF

SEQ ID NO: 194840 - protein, 16 aa, Homo sapiens
  CDR3 for beta chain variable domain of TCR clone 97420 (TRBV27, TRBJ2-2)
CASSLSGFWVTGELFF

SEQ ID NO: 194841 - protein, 14 aa, Homo sapiens
  CDR3 for alpha chain variable domain of TCR clone 97421 (TRAV1-2, TRAJ8)
CAVREDTGFQKLVF

SEQ ID NO: 194842 - protein, 12 aa, Homo sapiens
  CDR3 for beta chain variable domain of TCR clone 97421 (TRBV28, TRBJ2-7)
CASSFSSYEQYF

SEQ ID NO: 194843 - protein, 12 aa, Homo sapiens
  CDR3 for alpha chain variable domain of TCR clone 97422 (TRAV12-1, TRAJ40)
CVFYSGTYKYIF

SEQ ID NO: 194844 - protein, 18 aa, Homo sapiens
  CDR3 for beta chain variable domain of TCR clone 97422 (TRBV12-4, TRBJ2-2)
CASSLVAGTRGRTGEMFF

SEQ ID NO: 194845 - protein, 14 aa, Homo sapiens
  CDR3 for alpha chain variable domain of TCR clone 97423 (TRAV8-4, TRAJ38)
CARLNAGNNHIQNP

SEQ ID NO: 194846 - protein, 14 aa, Homo sapiens
  CDR3 for beta chain variable domain of TCR clone 97423 (TRBV7-8, TRBJ2-3)
CASSLEAGTDTQYF

SEQ ID NO: 194847 - protein, 16 aa, Homo sapiens
  CDR3 for alpha chain variable domain of TCR clone 97424 (TRAV20, TRAJ28)
CAVRDPSGAGSYQLTF

SEQ ID NO: 194848 - protein, 13 aa, Homo sapiens
  CDR3 for beta chain variable domain of TCR clone 97424 (TRBV11-2, TRBJ1-1)
CASSLGNGAEAFF

SEQ ID NO: 194849 - protein, 12 aa, Homo sapiens
  CDR3 for alpha chain variable domain of TCR clone 97425 (TRAV8-3, TRAJ43)
CAVGAGNNDMRF

SEQ ID NO: 194850 - protein, 14 aa, Homo sapiens
  CDR3 for beta chain variable domain of TCR clone 97425 (TRBV4-2, TRBJ1-5)
CASRRDRGNQPQHF

SEQ ID NO: 194851 - protein, 14 aa, Homo sapiens
  CDR3 for alpha chain variable domain of TCR clone 97426 (TRAV12-2, TRAJ11)
CAVEGGSGYSTLTF

SEQ ID NO: 194852 - protein, 14 aa, Homo sapiens
  CDR3 for beta chain variable domain of TCR clone 97426 (TRBV11-3, TRBJ1-1)
CASSADRDHAEAFF

SEQ ID NO: 194853 - protein, 13 aa, Homo sapiens
  CDR3 for alpha chain variable domain of TCR clone 97427 (TRAV8-3, TRAJ28)
CAVGAVGSYQLTF

SEQ ID NO: 194854 - protein, 13 aa, Homo sapiens
  CDR3 for beta chain variable domain of TCR clone 97427 (TRBV12-4, TRBJ2-7)
CASSPTETYEQYF

SEQ ID NO: 194855 - protein, 14 aa, Homo sapiens
  CDR3 for alpha chain variable domain of TCR clone 97428 (TRAV35, TRAJ13)
CSGRSPGGYQKVTF

SEQ ID NO: 194856 - protein, 14 aa, Homo sapiens
  CDR3 for beta chain variable domain of TCR clone 97428 (TRBV19, TRBJ2-2)
CASSMVGLSGELFF

SEQ ID NO: 194857 - protein, 11 aa, Homo sapiens
  CDR3 for alpha chain variable domain of TCR clone 97429 (TRAV12-3, TRAJ43)
CAMSVSNDMRF

SEQ ID NO: 194858 - protein, 14 aa, Homo sapiens
  CDR3 for beta chain variable domain of TCR clone 97429 (TRBV15, TRBJ2-5)
CATSGGTRTETQYF

SEQ ID NO: 194859 - protein, 19 aa, Homo sapiens
  CDR3 for alpha chain variable domain of TCR clone 97430 (TRAV26-1, TRAJ52)
CIVRAHRNAGGTSYGKLTF

SEQ ID NO: 194860 - protein, 15 aa, Homo sapiens
  CDR3 for beta chain variable domain of TCR clone 97430 (TRBV12-4, TRBJ2-5)
CASSTPTGLQETQYF

SEQ ID NO: 194861 - protein, 16 aa, Homo sapiens
  CDR3 for alpha chain variable domain of TCR clone 97431 (TRAV30, TRAJ24)
CGTEIVDADSWGKFQF

SEQ ID NO: 194862 - protein, 14 aa, Homo sapiens
  CDR3 for beta chain variable domain of TCR clone 97431 (TRBV12-5, TRBJ2-5)
CSSGSRTHQGTQYF

SEQ ID NO: 194863 - protein, 13 aa, Homo sapiens
  CDR3 for alpha chain variable domain of TCR clone 97432 (TRAV20, TRAJ37)
CAGCSSNTGKLIF

SEQ ID NO: 194864 - protein, 11 aa, Homo sapiens
  CDR3 for beta chain variable domain of TCR clone 97432 (TRBV11-2, TRBJ1-1)
CASSINTEAFF

SEQ ID NO: 194865 - protein, 15 aa, Homo sapiens
  CDR3 for alpha chain variable domain of TCR clone 97433 (TRAV17, TRAJ56)
CATEPFTGANIKLTF

SEQ ID NO: 194866 - protein, 15 aa, Homo sapiens
  CDR3 for beta chain variable domain of TCR clone 97433 (TRBV28, TRBJ1-5)
CASSRTGGYVQPQHF

SEQ ID NO: 194867 - protein, 13 aa, Homo sapiens
  CDR3 for alpha chain variable domain of TCR clone 97434 (TRAV13-1, TRAJ4)
CAASIGGYNKLIF

SEQ ID NO: 194868 - protein, 13 aa, Homo sapiens
  CDR3 for beta chain variable domain of TCR clone 97434 (TRBV27, TRBJ1-1)
CASSLSIGAEAFF

SEQ ID NO: 194869 - protein, 11 aa, Homo sapiens
  CDR3 for alpha chain variable domain of TCR clone 97435 (TRAV4, TRAJ21)
CLIYNLNKFYF

SEQ ID NO: 194870 - protein, 13 aa, Homo sapiens
  CDR3 for beta chain variable domain of TCR clone 97435 (TRBV6-1, TRBJ2-7)
CASSADTSYERYF

SEQ ID NO: 194871 - protein, 14 aa, Homo sapiens
  CDR3 for alpha chain variable domain of TCR clone 97436 (TRAV1-1, TRAJ27)
CAVIYNTNAGKSTF

SEQ ID NO: 194872 - protein, 14 aa, Homo sapiens
  CDR3 for beta chain variable domain of TCR clone 97436 (TRBV6-5, TRBJ1-2)
CASSYDSTGGGYTF

SEQ ID NO: 194873 - protein, 12 aa, Homo sapiens
  CDR3 for alpha chain variable domain of TCR clone 97437 (TRAV36/DV7, TRAJ40)
CAVGTGTYKYIF

SEQ ID NO: 194874 - protein, 14 aa, Homo sapiens
  CDR3 for beta chain variable domain of TCR clone 97437 (TRBV19, TRBJ2-3)
CASSIELGGDTQYF

SEQ ID NO: 194875 - protein, 14 aa, Homo sapiens
  CDR3 for alpha chain variable domain of TCR clone 97438 (TRAV17, TRAJ31)
CSTVLRNNNARLMF

SEQ ID NO: 194876 - protein, 14 aa, Homo sapiens
  CDR3 for beta chain variable domain of TCR clone 97438 (TRBV12-4, TRBJ2-5)
CASSLWQKQETQYF

SEQ ID NO: 194877 - protein, 17 aa, Homo sapiens
  CDR3 for alpha chain variable domain of TCR clone 97439 (TRAV23/DV6, TRAJ57)
CAASSTLSQGGFEKLVF

SEQ ID NO: 194878 - protein, 14 aa, Homo sapiens
  CDR3 for beta chain variable domain of TCR clone 97439 (TRBV25-1, TRBJ1-1)
CASTHLGGNTEAFF

SEQ ID NO: 194879 - protein, 14 aa, Homo sapiens
  CDR3 for alpha chain variable domain of TCR clone 97440 (TRAV1-2, TRAJ8)
CAVREDTGFQKLVF

SEQ ID NO: 194880 - protein, 16 aa, Homo sapiens
  CDR3 for beta chain variable domain of TCR clone 97440 (TRBV7-3, TRBJ2-2)
CASSFLPSGYTGELFF

SEQ ID NO: 194881 - protein, 13 aa, Homo sapiens
  CDR3 for alpha chain variable domain of TCR clone 97441 (TRAV13-2, TRAJ48)
CAEMDFGNEKLTF

SEQ ID NO: 194882 - protein, 16 aa, Homo sapiens
  CDR3 for beta chain variable domain of TCR clone 97441 (TRBV7-9, TRBJ1-2)
CASSLGFSSGEDGYTF

SEQ ID NO: 194883 - protein, 18 aa, Homo sapiens
  CDR3 for alpha chain variable domain of TCR clone 97442 (TRAV12-3, TRAJ52)
CAMSVGVAGGTSYGKLTF

SEQ ID NO: 194884 - protein, 17 aa, Homo sapiens
  CDR3 for beta chain variable domain of TCR clone 97442 (TRBV13, TRBJ2-3)
CASSLSRVAGGRNTQYF

SEQ ID NO: 194885 - protein, 13 aa, Homo sapiens
  CDR3 for alpha chain variable domain of TCR clone 97443 (TRAV12-2, TRAJ34)
CAVRGYNTDKRIF

SEQ ID NO: 194886 - protein, 15 aa, Homo sapiens
  CDR3 for beta chain variable domain of TCR clone 97443 (TRBV28, TRBJ2-1)
CASRTGAGVIARQFF

SEQ ID NO: 194887 - protein, 13 aa, Homo sapiens
  CDR3 for alpha chain variable domain of TCR clone 97444 (TRAV35, TRAJ36)
CAGPRIGANNLFF

SEQ ID NO: 194888 - protein, 15 aa, Homo sapiens
  CDR3 for beta chain variable domain of TCR clone 97444 (TRBV28, TRBJ2-3)
CASSPDRQGANTQYF

SEQ ID NO: 194889 - protein, 12 aa, Homo sapiens
  CDR3 for alpha chain variable domain of TCR clone 97445 (TRAV3, TRAJ31)
CAVRDGNARLMF

SEQ ID NO: 194890 - protein, 16 aa, Homo sapiens
  CDR3 for beta chain variable domain of TCR clone 97445 (TRBV7-3, TRBJ2-2)
CASSLKRGTLSGELFF

SEQ ID NO: 194891 - protein, 14 aa, Homo sapiens
  CDR3 for alpha chain variable domain of TCR clone 97446 (TRAV3, TRAJ21)
CAVESQANFNKFYF

SEQ ID NO: 194892 - protein, 18 aa, Homo sapiens
  CDR3 for beta chain variable domain of TCR clone 97446 (TRBV7-9, TRBJ2-1)
CASSLAVSGTSGRKEQFF

SEQ ID NO: 194893 - protein, 16 aa, Homo sapiens
  CDR3 for alpha chain variable domain of TCR clone 97447 (TRAV3, TRAJ37)
CAVRGKGSGNTGKLIF

SEQ ID NO: 194894 - protein, 18 aa, Homo sapiens
  CDR3 for beta chain variable domain of TCR clone 97447 (TRBV7-7, TRBJ2-1)
RASSLALTSGRSYNEQFF

SEQ ID NO: 194895 - protein, 15 aa, Homo sapiens
  CDR3 for alpha chain variable domain of TCR clone 97448 (TRAV4, TRAJ8)
CLVGEQHTGFQTLVF

SEQ ID NO: 194896 - protein, 15 aa, Homo sapiens
  CDR3 for beta chain variable domain of TCR clone 97448 (TRBV7-9, TRBJ2-5)
CASSNRDYLQETQYF

SEQ ID NO: 194897 - protein, 13 aa, Homo sapiens
  CDR3 for alpha chain variable domain of TCR clone 97449 (TRAV3, TRAJ21)
CAVREPDFNKFYF

SEQ ID NO: 194898 - protein, 14 aa, Homo sapiens
  CDR3 for beta chain variable domain of TCR clone 97449 (TRBV4-1, TRBJ2-2)
CASSQAVNTGELFV

SEQ ID NO: 194899 - protein, 15 aa, Homo sapiens
  CDR3 for alpha chain variable domain of TCR clone 97450 (TRAV21, TRAJ37)
CAVRPTLSNTGKLIF

SEQ ID NO: 194900 - protein, 16 aa, Homo sapiens
  CDR3 for beta chain variable domain of TCR clone 97450 (TRBV24-1, TRBJ2-3)
CANSDRRQDLTDTQYF

SEQ ID NO: 194901 - protein, 13 aa, Homo sapiens
  CDR3 for alpha chain variable domain of TCR clone 97451 (TRAV27, TRAJ45)
CRRPGGGADGLTF

SEQ ID NO: 194902 - protein, 17 aa, Homo sapiens
  CDR3 for beta chain variable domain of TCR clone 97451 (TRBV11-2, TRBJ2-1)
CASSLYPPGVEYNEQFF

SEQ ID NO: 194903 - protein, 13 aa, Homo sapiens
  CDR3 for alpha chain variable domain of TCR clone 97452 (TRAV13-2, TRAJ48)
CAEMDFGNEKLTF

SEQ ID NO: 194904 - protein, 17 aa, Homo sapiens
  CDR3 for beta chain variable domain of TCR clone 97452 (TRBV2, TRBJ2-1)
CASILLGGSSSYNEQFF

SEQ ID NO: 194905 - protein, 16 aa, Homo sapiens
  CDR3 for alpha chain variable domain of TCR clone 97453 (TRAV12-2, TRAJ45)
CAVKRNPGGGADGLTF

SEQ ID NO: 194906 - protein, 12 aa, Homo sapiens
  CDR3 for beta chain variable domain of TCR clone 97453 (TRBV6-1, TRBJ2-5)
CASSEGRETQCF

SEQ ID NO: 194907 - protein, 12 aa, Homo sapiens
  CDR3 for alpha chain variable domain of TCR clone 97454 (TRAV12-1, TRAJ40)
CVVYSGTYKYIF

SEQ ID NO: 194908 - protein, 15 aa, Homo sapiens
  CDR3 for beta chain variable domain of TCR clone 97454 (TRBV11-2, TRBJ2-1)
CASSLGTSGLNEQFF

SEQ ID NO: 194909 - protein, 16 aa, Homo sapiens
  CDR3 for alpha chain variable domain of TCR clone 97455 (TRAV16, TRAJ21)
CACGWATASTNFTLDL

SEQ ID NO: 194910 - protein, 15 aa, Homo sapiens
  CDR3 for beta chain variable domain of TCR clone 97455 (TRBV19, TRBJ2-1)
CASSIQATSYNEQFF

SEQ ID NO: 194911 - protein, 12 aa, Homo sapiens
  CDR3 for alpha chain variable domain of TCR clone 97456 (TRAV12-2, TRAJ21)
CAVRYNFNKFYF

SEQ ID NO: 194912 - protein, 14 aa, Homo sapiens
  CDR3 for beta chain variable domain of TCR clone 97456 (TRBV12-5, TRBJ2-5)
CASGSRTHQETQYF

SEQ ID NO: 194913 - protein, 16 aa, Homo sapiens
  CDR3 for alpha chain variable domain of TCR clone 97457 (TRAV23/DV6, TRAJ3)
CAARAPQQCFQDNLRI

SEQ ID NO: 194914 - protein, 17 aa, Homo sapiens
  CDR3 for beta chain variable domain of TCR clone 97457 (TRBV7-9, TRBJ2-3)
CASSPTVAGDLTDTQYF

SEQ ID NO: 194915 - protein, 16 aa, Homo sapiens
  CDR3 for alpha chain variable domain of TCR clone 97458 (TRAV27, TRAJ52)
CSGAPAGGTSYGKLTF

SEQ ID NO: 194916 - protein, 12 aa, Homo sapiens
  CDR3 for beta chain variable domain of TCR clone 97458 (TRBV27, TRBJ2-1)
CASRGFYNEQFF

SEQ ID NO: 194917 - protein, 14 aa, Homo sapiens
  CDR3 for alpha chain variable domain of TCR clone 97459 (TRAV13-1, TRAJ40)
CAASMTSGTYKYIF

SEQ ID NO: 194918 - protein, 15 aa, Homo sapiens
  CDR3 for beta chain variable domain of TCR clone 97459 (TRBV9, TRBJ1-6)
CASSVAGTGDSPLHF

SEQ ID NO: 194919 - protein, 12 aa, Homo sapiens
  CDR3 for alpha chain variable domain of TCR clone 97460 (TRAV1-1, TRAJ9)
CAVDTGGFKTIF

SEQ ID NO: 194920 - protein, 12 aa, Homo sapiens
  CDR3 for beta chain variable domain of TCR clone 97460 (TRBV7-2, TRBJ1-6)
CASSLSSSPLHF

SEQ ID NO: 194921 - protein, 14 aa, Homo sapiens
  CDR3 for alpha chain variable domain of TCR clone 97461 (TRAV12-2, TRAJ9)
CAVNLNTGGFKTIF

SEQ ID NO: 194922 - protein, 13 aa, Homo sapiens
  CDR3 for beta chain variable domain of TCR clone 97461 (TRBV7-3, TRBJ2-5)
CASSFRGGETQYF

SEQ ID NO: 194923 - protein, 12 aa, Homo sapiens
  CDR3 for alpha chain variable domain of TCR clone 97462 (TRAV16, TRAJ10)
CSRTGGGNKLTF

SEQ ID NO: 194924 - protein, 13 aa, Homo sapiens
  CDR3 for beta chain variable domain of TCR clone 97462 (TRBV7-3, TRBJ1-1)
CASSQDWGAEAFC

SEQ ID NO: 194925 - protein, 19 aa, Homo sapiens
  CDR3 for alpha chain variable domain of TCR clone 97463 (TRAV1-2, TRAJ26)
CLLPLCCERPDNYGQNFVF

SEQ ID NO: 194926 - protein, 12 aa, Homo sapiens
  CDR3 for beta chain variable domain of TCR clone 97463 (TRBV20-1, TRBJ2-1)
CSAQYTYSEQFF

SEQ ID NO: 194927 - protein, 13 aa, Homo sapiens
  CDR3 for alpha chain variable domain of TCR clone 97464 (TRAV3, TRAJ21)
CAVREPDFNKFYF

SEQ ID NO: 194928 - protein, 18 aa, Homo sapiens
  CDR3 for beta chain variable domain of TCR clone 97464 (TRBV11-2, TRBJ2-3)
CASSLGGASRGAPNTQYV

SEQ ID NO: 194929 - protein, 16 aa, Homo sapiens
  CDR3 for alpha chain variable domain of TCR clone 97465 (TRAV1-2, TRAJ33)
CAVRAISMDSNYQLIW

SEQ ID NO: 194930 - protein, 14 aa, Homo sapiens
  CDR3 for beta chain variable domain of TCR clone 97465 (TRBV11-2, TRBJ2-3)
CASSLGGGANTQYF

SEQ ID NO: 194931 - protein, 16 aa, Homo sapiens
  CDR3 for alpha chain variable domain of TCR clone 97466 (TRAV16, TRAJ4)
CALSRMFSGGYNKLIF

SEQ ID NO: 194932 - protein, 16 aa, Homo sapiens
  CDR3 for beta chain variable domain of TCR clone 97466 (TRBV5-4, TRBJ2-3)
CASSFGAGEGTDTQYF

SEQ ID NO: 194933 - protein, 15 aa, Homo sapiens
  CDR3 for alpha chain variable domain of TCR clone 97467 (TRAV8-3, TRAJ7)
CALGSISYGNNRLAF

SEQ ID NO: 194934 - protein, 15 aa, Homo sapiens
  CDR3 for beta chain variable domain of TCR clone 97467 (TRBV4-2, TRBJ1-1)
CASSQEDLPRTEAFF

SEQ ID NO: 194935 - protein, 22 aa, Homo sapiens
  CDR3 for alpha chain variable domain of TCR clone 97468 (TRAV12-2, TRAJ53)
SPVIQPPTSLPPILSSNYKLTF

SEQ ID NO: 194936 - protein, 13 aa, Homo sapiens
  CDR3 for beta chain variable domain of TCR clone 97468 (TRBV7-7, TRBJ2-3)
CASSLSRADTQYF

SEQ ID NO: 194937 - protein, 14 aa, Homo sapiens
  CDR3 for alpha chain variable domain of TCR clone 97469 (TRAV38-2/DV8, TRAJ11)
CAYRPPSGYSTLTF

SEQ ID NO: 194938 - protein, 15 aa, Homo sapiens
  CDR3 for beta chain variable domain of TCR clone 97469 (TRBV5-1, TRBJ2-5)
CASSRLGTVQETQYF

SEQ ID NO: 194939 - protein, 13 aa, Homo sapiens
  CDR3 for alpha chain variable domain of TCR clone 97470 (TRAV8-3, TRAJ43)
CAVGPYNNNDMRF

SEQ ID NO: 194940 - protein, 13 aa, Homo sapiens
  CDR3 for beta chain variable domain of TCR clone 97470 (TRBV29-1, TRBJ2-1)
CSVEGGRVNEQFF

SEQ ID NO: 194941 - protein, 15 aa, Homo sapiens
  CDR3 for alpha chain variable domain of TCR clone 97471 (TRAV8-3, TRAJ45)
CASSYSGGGADGLTF

SEQ ID NO: 194942 - protein, 16 aa, Homo sapiens
  CDR3 for beta chain variable domain of TCR clone 97471 (TRBV7-9, TRBJ2-2)
CANSGFGGANTGELFF

SEQ ID NO: 194943 - protein, 11 aa, Homo sapiens
  CDR3 for alpha chain variable domain of TCR clone 97472 (TRAV20, TRAJ31)
CAVQMRARLMF

SEQ ID NO: 194944 - protein, 15 aa, Homo sapiens
  CDR3 for beta chain variable domain of TCR clone 97472 (TRBV19, TRBJ2-4)
CASRGPRRGENIQYF

SEQ ID NO: 194945 - protein, 14 aa, Homo sapiens
  CDR3 for alpha chain variable domain of TCR clone 97473 (TRAV2, TRAJ9)
WAVEDRSGGFKTIF

SEQ ID NO: 194946 - protein, 15 aa, Homo sapiens
  CDR3 for beta chain variable domain of TCR clone 97473 (TRBV11-3, TRBJ2-3)
CASSAGTVVTNTQYF

SEQ ID NO: 194947 - protein, 14 aa, Homo sapiens
  CDR3 for alpha chain variable domain of TCR clone 97474 (TRAV1-2, TRAJ16)
CAVNRLSDGQKLLF

SEQ ID NO: 194948 - protein, 14 aa, Homo sapiens
  CDR3 for beta chain variable domain of TCR clone 97474 (TRBV6-1, TRBJ1-3)
CASVQGGGGNTIYF

SEQ ID NO: 194949 - protein, 13 aa, Homo sapiens
  CDR3 for alpha chain variable domain of TCR clone 97475 (TRAV27, TRAJ41)
CAGEGNSGYALNF

SEQ ID NO: 194950 - protein, 15 aa, Homo sapiens
  CDR3 for beta chain variable domain of TCR clone 97475 (TRBV6-1, TRBJ2-4)
CASSEAVWTINIQYF

SEQ ID NO: 194951 - protein, 14 aa, Homo sapiens
  CDR3 for alpha chain variable domain of TCR clone 97476 (TRAV8-3, TRAJ10)
CAVGNAGGGNKPTF

SEQ ID NO: 194952 - protein, 17 aa, Homo sapiens
  CDR3 for beta chain variable domain of TCR clone 97476 (TRBV27, TRBJ2-7)
CASSTKRPGTGPYEQYF

SEQ ID NO: 194953 - protein, 12 aa, Homo sapiens
  CDR3 for alpha chain variable domain of TCR clone 97477 (TRAV13-1, TRAJ21)
CAAKEGFNKFYF

SEQ ID NO: 194954 - protein, 12 aa, Homo sapiens
  CDR3 for beta chain variable domain of TCR clone 97477 (TRBV11-3, TRBJ2-2)
CASSLGGGELFF

SEQ ID NO: 194955 - protein, 14 aa, Homo sapiens
  CDR3 for alpha chain variable domain of TCR clone 97478 (TRAV13-1, TRAJ44)
CAAKATGTASKLTF

SEQ ID NO: 194956 - protein, 17 aa, Homo sapiens
  CDR3 for beta chain variable domain of TCR clone 97478 (TRBV7-3, TRBJ2-3)
RASNLMKRMRGADTQYF

SEQ ID NO: 194957 - protein, 13 aa, Homo sapiens
  CDR3 for alpha chain variable domain of TCR clone 97479 (TRAV36/DV7, TRAJ49)
CAVAQTPVTSSIL

SEQ ID NO: 194958 - protein, 12 aa, Homo sapiens
  CDR3 for beta chain variable domain of TCR clone 97479 (TRBV7-2, TRBJ1-2)
CASRDSIYGYTF

SEQ ID NO: 194959 - protein, 14 aa, Homo sapiens
  CDR3 for alpha chain variable domain of TCR clone 97480 (TRAV3, TRAJ20)
CAVPPAPNDYKLSF

SEQ ID NO: 194960 - protein, 14 aa, Homo sapiens
  CDR3 for beta chain variable domain of TCR clone 97480 (TRBV2, TRBJ2-7)
CASSLTSGGYEQYF

SEQ ID NO: 194961 - protein, 14 aa, Homo sapiens
  CDR3 for alpha chain variable domain of TCR clone 97481 (TRAV12-3, TRAJ54)
CAMRGIQGAQKLEF

SEQ ID NO: 194962 - protein, 13 aa, Homo sapiens
  CDR3 for beta chain variable domain of TCR clone 97481 (TRBV19, TRBJ1-1)
CASSPSNGGEAFF

SEQ ID NO: 194963 - protein, 14 aa, Homo sapiens
  CDR3 for alpha chain variable domain of TCR clone 97482 (TRAV3, TRAJ22)
CAVRDYGAARQLTF

SEQ ID NO: 194964 - protein, 13 aa, Homo sapiens
  CDR3 for beta chain variable domain of TCR clone 97482 (TRBV11-2, TRBJ2-5)
CASGHGAKETQYF

SEQ ID NO: 194965 - protein, 15 aa, Homo sapiens
  CDR3 for alpha chain variable domain of TCR clone 97483 (TRAV34, TRAJ38)
CGADFTPGNNRKLIW

SEQ ID NO: 194966 - protein, 12 aa, Homo sapiens
  CDR3 for beta chain variable domain of TCR clone 97483 (TRBV7-2, TRBJ1-6)
CASSLSSSPLHF

SEQ ID NO: 194967 - protein, 16 aa, Homo sapiens
  CDR3 for alpha chain variable domain of TCR clone 97484 (TRAV3, TRAJ18)
CAVRDGRGSTLGRLYF

SEQ ID NO: 194968 - protein, 15 aa, Homo sapiens
  CDR3 for beta chain variable domain of TCR clone 97484 (TRBV7-9, TRBJ1-5)
CASSQGHQPNQPQHF

SEQ ID NO: 194969 - protein, 12 aa, Homo sapiens
  CDR3 for alpha chain variable domain of TCR clone 97485 (TRAV35, TRAJ39)
LAPNNAGNMFTF

SEQ ID NO: 194970 - protein, 16 aa, Homo sapiens
  CDR3 for beta chain variable domain of TCR clone 97485 (TRBV2, TRBJ2-3)
CASSTSVEGVTDTQYF

SEQ ID NO: 194971 - protein, 13 aa, Homo sapiens
  CDR3 for alpha chain variable domain of TCR clone 97486 (TRAV12-3, TRAJ33)
CAMSVNSNYQLIW

SEQ ID NO: 194972 - protein, 12 aa, Homo sapiens
  CDR3 for beta chain variable domain of TCR clone 97486 (TRBV11-2, TRBJ2-2)
CASSLGGGELLF

SEQ ID NO: 194973 - protein, 14 aa, Homo sapiens
  CDR3 for alpha chain variable domain of TCR clone 97487 (TRAV1-2, TRAJ17)
CALRRGAAGNKLTF

SEQ ID NO: 194974 - protein, 13 aa, Homo sapiens
  CDR3 for beta chain variable domain of TCR clone 97487 (TRBV12-4, TRBJ1-2)
CASSSGLTVISTF

SEQ ID NO: 194975 - protein, 11 aa, Homo sapiens
  CDR3 for alpha chain variable domain of TCR clone 97488 (TRAV2, TRAJ13)
CASGGYQKVTF

SEQ ID NO: 194976 - protein, 14 aa, Homo sapiens
  CDR3 for beta chain variable domain of TCR clone 97488 (TRBV20-1, TRBJ2-1)
CSAQIGGSANEQFF

SEQ ID NO: 194977 - protein, 14 aa, Homo sapiens
  CDR3 for alpha chain variable domain of TCR clone 97489 (TRAV12-1, TRAJ12)
CVVISMDSSYKLIF

SEQ ID NO: 194978 - protein, 13 aa, Homo sapiens
  CDR3 for beta chain variable domain of TCR clone 97489 (TRBV7-9, TRBJ1-2)
CASSLKQNYGYTF

SEQ ID NO: 194979 - protein, 16 aa, Homo sapiens
  CDR3 for alpha chain variable domain of TCR clone 97490 (TRAV3, TRAJ18)
CAVRDWRGSTLGRLYF

SEQ ID NO: 194980 - protein, 15 aa, Homo sapiens
  CDR3 for beta chain variable domain of TCR clone 97490 (TRBV7-9, TRBJ1-6)
CASSSPGRGNSPLHF

SEQ ID NO: 194981 - protein, 12 aa, Homo sapiens
  CDR3 for alpha chain variable domain of TCR clone 97491 (TRAV12-3, TRAJ17)
CAMTLTGNKPTF

SEQ ID NO: 194982 - protein, 14 aa, Homo sapiens
  CDR3 for beta chain variable domain of TCR clone 97491 (TRBV20-1, TRBJ2-1)
CSAQIGGSANEQFF

SEQ ID NO: 194983 - protein, 14 aa, Homo sapiens
  CDR3 for alpha chain variable domain of TCR clone 97492 (TRAV13-1, TRAJ40)
CAASMISGTYKYIF

SEQ ID NO: 194984 - protein, 15 aa, Homo sapiens
  CDR3 for beta chain variable domain of TCR clone 97492 (TRBV7-3, TRBJ2-1)
CASSPTGGGEVEQFF

SEQ ID NO: 194985 - protein, 10 aa, Homo sapiens
  CDR3 for alpha chain variable domain of TCR clone 97493 (TRAV30, TRAJ48)
CGIGNEKLTF

SEQ ID NO: 194986 - protein, 14 aa, Homo sapiens
  CDR3 for beta chain variable domain of TCR clone 97493 (TRBV7-9, TRBJ2-7)
CASSPRTGTYEQYF

SEQ ID NO: 194987 - protein, 17 aa, Homo sapiens
  CDR3 for alpha chain variable domain of TCR clone 97494 (TRAV8-6, TRAJ58)
CAVSSWVGETSGSRLTF

SEQ ID NO: 194988 - protein, 15 aa, Homo sapiens
  CDR3 for beta chain variable domain of TCR clone 97494 (TRBV7-9, TRBJ2-7)
CASSSSGLAVYEQYF

SEQ ID NO: 194989 - protein, 12 aa, Homo sapiens
  CDR3 for alpha chain variable domain of TCR clone 97495 (TRAV13-1, TRAJ21)
CAANEGFNKFYF

SEQ ID NO: 194990 - protein, 13 aa, Homo sapiens
  CDR3 for beta chain variable domain of TCR clone 97495 (TRBV7-3, TRBJ1-1)
CASSQDWGAEAFF

SEQ ID NO: 194991 - protein, 16 aa, Homo sapiens
  CDR3 for alpha chain variable domain of TCR clone 97496 (TRAV3, TRAJ37)
CAVRPHGSGNTGKLIF

SEQ ID NO: 194992 - protein, 14 aa, Homo sapiens
  CDR3 for beta chain variable domain of TCR clone 97496 (TRBV2, TRBJ2-1)
CASSDRGYYNEQFF

SEQ ID NO: 194993 - protein, 15 aa, Homo sapiens
  CDR3 for alpha chain variable domain of TCR clone 97497 (TRAV13-1, TRAJ44)
CAASRNTGTASKLTF

SEQ ID NO: 194994 - protein, 14 aa, Homo sapiens
  CDR3 for beta chain variable domain of TCR clone 97497 (TRBV11-2, TRBJ1-2)
CDSSLYRGNYGYTF

SEQ ID NO: 194995 - protein, 15 aa, Homo sapiens
  CDR3 for alpha chain variable domain of TCR clone 97498 (TRAV8-4, TRAJ11)
CAVSRALSGYSTITF

SEQ ID NO: 194996 - protein, 13 aa, Homo sapiens
  CDR3 for beta chain variable domain of TCR clone 97498 (TRBV10-3, TRBJ2-7)
CASKLAVNYEQYF

SEQ ID NO: 194997 - protein, 18 aa, Homo sapiens
  CDR3 for alpha chain variable domain of TCR clone 97499 (TRAV21, TRAJ52)
CAVRPSPAGGTSYGKLTF

SEQ ID NO: 194998 - protein, 14 aa, Homo sapiens
  CDR3 for beta chain variable domain of TCR clone 97499 (TRBV4-2, TRBJ2-5)
CASSQDRGRETQYF

SEQ ID NO: 194999 - protein, 14 aa, Homo sapiens
  CDR3 for alpha chain variable domain of TCR clone 97500 (TRAV13-1, TRAJ44)
CAAKATGTASKLTF

SEQ ID NO: 195000 - protein, 15 aa, Homo sapiens
  CDR3 for beta chain variable domain of TCR clone 97500 (TRBV11-3, TRBJ2-3)
CASLKDGREGDTQYF

SEQ ID NO: 195001 - protein, 11 aa, Homo sapiens
  CDR3 for alpha chain variable domain of TCR clone 97501 (TRAV27, TRAJ45)
CAGAQEEVLTD

SEQ ID NO: 195002 - protein, 17 aa, Homo sapiens
  CDR3 for beta chain variable domain of TCR clone 97501 (TRBV11-2, TRBJ2-1)
CASSLYPPGAEYNEQFF

SEQ ID NO: 195003 - protein, 13 aa, Homo sapiens
  CDR3 for alpha chain variable domain of TCR clone 97502 (TRAV12-1, TRAJ22)
CVVYSGSARQLPF

SEQ ID NO: 195004 - protein, 10 aa, Homo sapiens
  CDR3 for beta chain variable domain of TCR clone 97502 (TRBV6-3, TRBJ2-2)
CASRDGELFF

SEQ ID NO: 195005 - protein, 13 aa, Homo sapiens
  CDR3 for alpha chain variable domain of TCR clone 97503 (TRAV36/DV7, TRAJ33)
CAVFSSYTGKLII

SEQ ID NO: 195006 - protein, 14 aa, Homo sapiens
  CDR3 for beta chain variable domain of TCR clone 97503 (TRBV2, TRBJ2-7)
CASSLTSGGYEQYF

SEQ ID NO: 195007 - protein, 15 aa, Homo sapiens
  CDR3 for alpha chain variable domain of TCR clone 97504 (TRAV3, TRAJ13)
CAVRVYSGGYQKVTF

SEQ ID NO: 195008 - protein, 16 aa, Homo sapiens
  CDR3 for beta chain variable domain of TCR clone 97504 (TRBV12-4, TRBJ2-7)
CASSPEGQGSSYEQYF

SEQ ID NO: 195009 - protein, 14 aa, Homo sapiens
  CDR3 for alpha chain variable domain of TCR clone 97505 (TRAV12-2, TRAJ44)
CAVTPAGTASKLTF

SEQ ID NO: 195010 - protein, 13 aa, Homo sapiens
  CDR3 for beta chain variable domain of TCR clone 97505 (TRBV20-1, TRBJ1-6)
CSAPLGVGSPLHF

SEQ ID NO: 195011 - protein, 12 aa, Homo sapiens
  CDR3 for alpha chain variable domain of TCR clone 97506 (TRAV12-2, TRAJ43)
CAVNVSNNDMRF

SEQ ID NO: 195012 - protein, 14 aa, Homo sapiens
  CDR3 for beta chain variable domain of TCR clone 97506 (TRBV12-5, TRBJ2-5)
CASGSRTHQETQYF

SEQ ID NO: 195013 - protein, 19 aa, Homo sapiens
  CDR3 for alpha chain variable domain of TCR clone 97507 (TRAV26-1, TRAJ52)
CIVRAHRNAGGTSYGKLTF

SEQ ID NO: 195014 - protein, 15 aa, Homo sapiens
  CDR3 for beta chain variable domain of TCR clone 97507 (TRBV12-4, TRBJ2-5)
CASSPPTGRQETQYF

SEQ ID NO: 195015 - protein, 13 aa, Homo sapiens
  CDR3 for alpha chain variable domain of TCR clone 97508 (TRAV27, TRAJ3)
ASLRGSSASKIIF

SEQ ID NO: 195016 - protein, 15 aa, Homo sapiens
  CDR3 for beta chain variable domain of TCR clone 97508 (TRBV28, TRBJ1-3)
CASGMGWASGNTIYF

SEQ ID NO: 195017 - protein, 10 aa, Homo sapiens
  CDR3 for alpha chain variable domain of TCR clone 97509 (TRAV8-4, TRAJ43)
CAVSADDMRF

SEQ ID NO: 195018 - protein, 13 aa, Homo sapiens
  CDR3 for beta chain variable domain of TCR clone 97509 (TRBV19, TRBJ1-5)
CASSEGSNQPQHF

SEQ ID NO: 195019 - protein, 13 aa, Homo sapiens
  CDR3 for alpha chain variable domain of TCR clone 97510 (TRAV36/DV7, TRAJ29)
CAVEPSGNTPLVF

SEQ ID NO: 195020 - protein, 16 aa, Homo sapiens
  CDR3 for beta chain variable domain of TCR clone 97510 (TRBV19, TRBJ2-1)
CASSSKGTRSYNEQFF

SEQ ID NO: 195021 - protein, 16 aa, Homo sapiens
  CDR3 for alpha chain variable domain of TCR clone 97511 (TRAV8-3, TRAJ8)
CAVPRDGNTGFQKLVF

SEQ ID NO: 195022 - protein, 14 aa, Homo sapiens
  CDR3 for beta chain variable domain of TCR clone 97511 (TRBV25-1, TRBJ1-1)
CASTHLGGNTEAFF

SEQ ID NO: 195023 - protein, 11 aa, Homo sapiens
  CDR3 for alpha chain variable domain of TCR clone 97512 (TRAV3, TRAJ21)
CAVGNFNKFYF

SEQ ID NO: 195024 - protein, 12 aa, Homo sapiens
  CDR3 for beta chain variable domain of TCR clone 97512 (TRBV7-9, TRBJ1-1)
CASSLVRGEAFF

SEQ ID NO: 195025 - protein, 13 aa, Homo sapiens
  CDR3 for alpha chain variable domain of TCR clone 97513 (TRAV3, TRAJ31)
CAVREGNNARLMF

SEQ ID NO: 195026 - protein, 14 aa, Homo sapiens
  CDR3 for beta chain variable domain of TCR clone 97513 (TRBV7-2, TRBJ2-7)
CASSPKTSFYEQYF

SEQ ID NO: 195027 - protein, 10 aa, Homo sapiens
  CDR3 for alpha chain variable domain of TCR clone 97514 (TRAV38-2/DV8, TRAJ40)
CAPGTYKYIF

SEQ ID NO: 195028 - protein, 14 aa, Homo sapiens
  CDR3 for beta chain variable domain of TCR clone 97514 (TRBV7-9, TRBJ2-1)
CASSPRDSLYEQFF

SEQ ID NO: 195029 - protein, 15 aa, Homo sapiens
  CDR3 for alpha chain variable domain of TCR clone 97515 (TRAV12-2, TRAJ53)
RAVNGGGGSNYKLTF

SEQ ID NO: 195030 - protein, 16 aa, Homo sapiens
  CDR3 for beta chain variable domain of TCR clone 97515 (TRBV6-6, TRBJ2-7)
CASIETGTNSSYEQYF

SEQ ID NO: 195031 - protein, 14 aa, Homo sapiens
  CDR3 for alpha chain variable domain of TCR clone 97516 (TRAV4, TRAJ6)
CLVGEAGGSYIPTF

SEQ ID NO: 195032 - protein, 16 aa, Homo sapiens
  CDR3 for beta chain variable domain of TCR clone 97516 (TRBV7-6, TRBJ2-1)
CASGLNEGPSYNEQFF

SEQ ID NO: 195033 - protein, 13 aa, Homo sapiens
  CDR3 for alpha chain variable domain of TCR clone 97517 (TRAV13-1, TRAJ9)
CSASGTGGFKTIF

SEQ ID NO: 195034 - protein, 13 aa, Homo sapiens
  CDR3 for beta chain variable domain of TCR clone 97517 (TRBV12-4, TRBJ2-7)
CASSLERVREQYF

SEQ ID NO: 195035 - protein, 11 aa, Homo sapiens
  CDR3 for alpha chain variable domain of TCR clone 97518 (TRAV12-1, TRAJ30)
CVVNGQDKIIF

SEQ ID NO: 195036 - protein, 16 aa, Homo sapiens
  CDR3 for beta chain variable domain of TCR clone 97518 (TRBV4-1, TRBJ1-2)
CASSQDAGQVLYGYTF

SEQ ID NO: 195037 - protein, 15 aa, Homo sapiens
  CDR3 for alpha chain variable domain of TCR clone 97519 (TRAV3, TRAJ29)
CAVRDINSGNTPLVS

SEQ ID NO: 195038 - protein, 16 aa, Homo sapiens
  CDR3 for beta chain variable domain of TCR clone 97519 (TRBV4-1, TRBJ2-5)
CASSQTFYGDQETQYF

SEQ ID NO: 195039 - protein, 14 aa, Homo sapiens
  CDR3 for alpha chain variable domain of TCR clone 97520 (TRAV1-2, TRAJ16)
CAVNRFSDGQKLLF

SEQ ID NO: 195040 - protein, 16 aa, Homo sapiens
  CDR3 for beta chain variable domain of TCR clone 97520 (TRBV12-4, TRBJ2-5)
CASSLFVRGRQETQYF

SEQ ID NO: 195041 - protein, 14 aa, Homo sapiens
  CDR3 for alpha chain variable domain of TCR clone 97521 (TRAV8-4, TRAJ9)
CAVRIDTGGFKTIF

SEQ ID NO: 195042 - protein, 14 aa, Homo sapiens
  CDR3 for beta chain variable domain of TCR clone 97521 (TRBV5-1, TRBJ1-1)
CASSLQGASTEAFS

SEQ ID NO: 195043 - protein, 17 aa, Homo sapiens
  CDR3 for alpha chain variable domain of TCR clone 97522 (TRAV12-3, TRAJ6)
CAMSARGGTGGSYIPTF

SEQ ID NO: 195044 - protein, 12 aa, Homo sapiens
  CDR3 for beta chain variable domain of TCR clone 97522 (TRBV12-4, TRBJ2-3)
CASSTLPDTQYF

SEQ ID NO: 195045 - protein, 13 aa, Homo sapiens
  CDR3 for alpha chain variable domain of TCR clone 97523 (TRAV12-2, TRAJ12)
CAVNWDSSYKLIF

SEQ ID NO: 195046 - protein, 13 aa, Homo sapiens
  CDR3 for beta chain variable domain of TCR clone 97523 (TRBV20-1, TRBJ2-7)
CSATTPGIYEQYF

SEQ ID NO: 195047 - protein, 15 aa, Homo sapiens
  CDR3 for alpha chain variable domain of TCR clone 97524 (TRAV2, TRAJ9)
CAVEDRGTGGFKTIF

SEQ ID NO: 195048 - protein, 14 aa, Homo sapiens
  CDR3 for beta chain variable domain of TCR clone 97524 (TRBV19, TRBJ2-1)
CATSQGDTYNEQFF

SEQ ID NO: 195049 - protein, 16 aa, Homo sapiens
  CDR3 for alpha chain variable domain of TCR clone 97525 (TRAV30, TRAJ24)
CGTEIVDADSWGKFQF

SEQ ID NO: 195050 - protein, 17 aa, Homo sapiens
  CDR3 for beta chain variable domain of TCR clone 97525 (TRBV19, TRBJ2-7)
CASSISFYDSYPYEQYF

SEQ ID NO: 195051 - protein, 10 aa, Homo sapiens
  CDR3 for alpha chain variable domain of TCR clone 97526 (TRAV20, TRAJ22)
CAAPARQLTF

SEQ ID NO: 195052 - protein, 14 aa, Homo sapiens
  CDR3 for beta chain variable domain of TCR clone 97526 (TRBV19, TRBJ2-1)
CASSMVSGATEQFF

SEQ ID NO: 195053 - protein, 15 aa, Homo sapiens
  CDR3 for alpha chain variable domain of TCR clone 97527 (TRAV3, TRAJ22)
CAVRDRGGSSRQLTF

SEQ ID NO: 195054 - protein, 18 aa, Homo sapiens
  CDR3 for beta chain variable domain of TCR clone 97527 (TRBV28, TRBJ2-1)
CASSSTSGRANSYNEQFF

SEQ ID NO: 195055 - protein, 15 aa, Homo sapiens
  CDR3 for alpha chain variable domain of TCR clone 97528 (TRAV3, TRAJ17)
CAVGPKEAAGNKLTF

SEQ ID NO: 195056 - protein, 12 aa, Homo sapiens
  CDR3 for beta chain variable domain of TCR clone 97528 (TRBV7-9, TRBJ1-6)
CASSLMTSPLHF

SEQ ID NO: 195057 - protein, 13 aa, Homo sapiens
  CDR3 for alpha chain variable domain of TCR clone 97529 (TRAV12-2, TRAJ13)
CREEDWGYQKVTF

SEQ ID NO: 195058 - protein, 15 aa, Homo sapiens
  CDR3 for beta chain variable domain of TCR clone 97529 (TRBV27, TRBJ2-1)
CASSNGGGSSNEQFL

SEQ ID NO: 195059 - protein, 15 aa, Homo sapiens
  CDR3 for alpha chain variable domain of TCR clone 97530 (TRAV8-4, TRAJ48)
CAVSSAYFGNEKLTF

SEQ ID NO: 195060 - protein, 12 aa, Homo sapiens
  CDR3 for beta chain variable domain of TCR clone 97530 (TRBV3-1, TRBJ2-5)
CASSQRGETQYF

SEQ ID NO: 195061 - protein, 14 aa, Homo sapiens
  CDR3 for alpha chain variable domain of TCR clone 97531 (TRAV13-2, TRAJ15)
CAENPNQAGTALIF

SEQ ID NO: 195062 - protein, 13 aa, Homo sapiens
  CDR3 for beta chain variable domain of TCR clone 97531 (TRBV4-2, TRBJ1-1)
CASSQAGNTEALF

SEQ ID NO: 195063 - protein, 13 aa, Homo sapiens
  CDR3 for alpha chain variable domain of TCR clone 97532 (TRAV8-2, TRAJ21)
CVVSSYNFNKFYF

SEQ ID NO: 195064 - protein, 14 aa, Homo sapiens
  CDR3 for beta chain variable domain of TCR clone 97532 (TRBV18, TRBJ2-3)
CASSRDRGTDTQYF

SEQ ID NO: 195065 - protein, 14 aa, Homo sapiens
  CDR3 for alpha chain variable domain of TCR clone 97533 (TRAV2, TRAJ9)
CAVEDRSGGFKTIF

SEQ ID NO: 195066 - protein, 16 aa, Homo sapiens
  CDR3 for beta chain variable domain of TCR clone 97533 (TRBV5-5, TRBJ2-2)
CASSGRREGATGELFF

SEQ ID NO: 195067 - protein, 14 aa, Homo sapiens
  CDR3 for alpha chain variable domain of TCR clone 97534 (TRAV35, TRAJ33)
CAGSSQDSNYQLIW

SEQ ID NO: 195068 - protein, 15 aa, Homo sapiens
  CDR3 for beta chain variable domain of TCR clone 97534 (TRBV20-1, TRBJ2-7)
CSAESGTSGAYEQNF

SEQ ID NO: 195069 - protein, 12 aa, Homo sapiens
  CDR3 for alpha chain variable domain of TCR clone 97535 (TRAV2, TRAJ3)
CAVRSSASKIIF

SEQ ID NO: 195070 - protein, 12 aa, Homo sapiens
  CDR3 for beta chain variable domain of TCR clone 97535 (TRBV19, TRBJ1-1)
CASSIGTEEAFF

SEQ ID NO: 195071 - protein, 14 aa, Homo sapiens
  CDR3 for alpha chain variable domain of TCR clone 97536 (TRAV8-3, TRAJ4)
CAVGAAGGYNKLIF

SEQ ID NO: 195072 - protein, 16 aa, Homo sapiens
  CDR3 for beta chain variable domain of TCR clone 97536 (TRBV15, TRBJ2-3)
CATSRDLGIVTDTQYF

SEQ ID NO: 195073 - protein, 17 aa, Homo sapiens
  CDR3 for alpha chain variable domain of TCR clone 97537 (TRAV13-1, TRAJ31)
CAPRDRLMFGDGTQLVV

SEQ ID NO: 195074 - protein, 16 aa, Homo sapiens
  CDR3 for beta chain variable domain of TCR clone 97537 (TRBV28, TRBJ2-2)
CASSLEGGSNTGELFF

SEQ ID NO: 195075 - protein, 16 aa, Homo sapiens
  CDR3 for alpha chain variable domain of TCR clone 97538 (TRAV26-1, TRAJ33)
CIVPFWGEDSNYQLIW

SEQ ID NO: 195076 - protein, 14 aa, Homo sapiens
  CDR3 for beta chain variable domain of TCR clone 97538 (TRBV7-8, TRBJ2-3)
CASSLEAGTDTQYF

SEQ ID NO: 195077 - protein, 18 aa, Homo sapiens
  CDR3 for alpha chain variable domain of TCR clone 97539 (TRAV3, TRAJ17)
CAVRARRRGRSCRQQANF

SEQ ID NO: 195078 - protein, 14 aa, Homo sapiens
  CDR3 for beta chain variable domain of TCR clone 97539 (TRBV4-1, TRBJ2-2)
CASSQAVNTGELFF

SEQ ID NO: 195079 - protein, 15 aa, Homo sapiens
  CDR3 for alpha chain variable domain of TCR clone 97540 (TRAV2, TRAJ13)
CATPSYSGGYQKVTF

SEQ ID NO: 195080 - protein, 17 aa, Homo sapiens
  CDR3 for beta chain variable domain of TCR clone 97540 (TRBV20-1, TRBJ2-1)
CSASSSGLAGSYNEQFF

SEQ ID NO: 195081 - protein, 14 aa, Homo sapiens
  CDR3 for alpha chain variable domain of TCR clone 97541 (TRAV1-2, TRAJ8)
CAVREDTGFQKLVF

SEQ ID NO: 195082 - protein, 15 aa, Homo sapiens
  CDR3 for beta chain variable domain of TCR clone 97541 (TRBV20-1, TRBJ2-1)
CSARGIGGTYNEQFF

SEQ ID NO: 195083 - protein, 13 aa, Homo sapiens
  CDR3 for alpha chain variable domain of TCR clone 97542 (TRAV12-3, TRAJ7)
CAMSASGNNRLAF

SEQ ID NO: 195084 - protein, 15 aa, Homo sapiens
  CDR3 for beta chain variable domain of TCR clone 97542 (TRBV5-1, TRBJ1-1)
CASSSTTGTNTEAFF

SEQ ID NO: 195085 - protein, 17 aa, Homo sapiens
  CDR3 for alpha chain variable domain of TCR clone 97543 (TRAV3, TRAJ6)
CAVRDGPRAGGSYISTF

SEQ ID NO: 195086 - protein, 13 aa, Homo sapiens
  CDR3 for beta chain variable domain of TCR clone 97543 (TRBV20-1, TRBJ1-6)
CSAPLGVGSPLHF

SEQ ID NO: 195087 - protein, 18 aa, Homo sapiens
  CDR3 for alpha chain variable domain of TCR clone 97544 (TRAV21, TRAJ52)
CAVRPSPAGGTSYGKLPF

SEQ ID NO: 195088 - protein, 15 aa, Homo sapiens
  CDR3 for beta chain variable domain of TCR clone 97544 (TRBV27, TRBJ2-1)
CASSNGGGSSNEQFF

SEQ ID NO: 195089 - protein, 15 aa, Homo sapiens
  CDR3 for alpha chain variable domain of TCR clone 97545 (TRAV17, TRAJ52)
CATEAGGTSYGKLIF

SEQ ID NO: 195090 - protein, 14 aa, Homo sapiens
  CDR3 for beta chain variable domain of TCR clone 97545 (TRBV28, TRBJ1-5)
CASSLGVLVKPQHF

SEQ ID NO: 195091 - protein, 12 aa, Homo sapiens
  CDR3 for alpha chain variable domain of TCR clone 97546 (TRAV5, TRAJ41)
CAENNSGYALNF

SEQ ID NO: 195092 - protein, 13 aa, Homo sapiens
  CDR3 for beta chain variable domain of TCR clone 97546 (TRBV29-1, TRBJ1-3)
CSAGVDSGNTIYF

SEQ ID NO: 195093 - protein, 14 aa, Homo sapiens
  CDR3 for alpha chain variable domain of TCR clone 97547 (TRAV12-2, TRAJ33)
CAVKRAKSNYQLIW

SEQ ID NO: 195094 - protein, 12 aa, Homo sapiens
  CDR3 for beta chain variable domain of TCR clone 97547 (TRBV24-1, TRBJ2-3)
CATSDSTDTQYF

SEQ ID NO: 195095 - protein, 16 aa, Homo sapiens
  CDR3 for alpha chain variable domain of TCR clone 97548 (TRAV12-3, TRAJ53)
CAMSPGSGGSNYKLTF

SEQ ID NO: 195096 - protein, 17 aa, Homo sapiens
  CDR3 for beta chain variable domain of TCR clone 97548 (TRBV28, TRBJ2-5)
CASSTPEGDAVQETQYF

SEQ ID NO: 195097 - protein, 15 aa, Homo sapiens
  CDR3 for alpha chain variable domain of TCR clone 97549 (TRAV2, TRAJ9)
CAVEDRGTGGFKTIF

SEQ ID NO: 195098 - protein, 17 aa, Homo sapiens
  CDR3 for beta chain variable domain of TCR clone 97549 (TRBV28, TRBJ1-1)
CASSLSGTGYENTEAFF

SEQ ID NO: 195099 - protein, 14 aa, Homo sapiens
  CDR3 for alpha chain variable domain of TCR clone 97550 (TRAV1-2, TRAJ27)
CAPAEYTNAGKSTF

SEQ ID NO: 195100 - protein, 13 aa, Homo sapiens
  CDR3 for beta chain variable domain of TCR clone 97550 (TRBV7-9, TRBJ2-5)
CASLSPGQETQYF

SEQ ID NO: 195101 - protein, 10 aa, Homo sapiens
  CDR3 for alpha chain variable domain of TCR clone 97551 (TRAV12-1, TRAJ43)
CVVHNNDMRF

SEQ ID NO: 195102 - protein, 13 aa, Homo sapiens
  CDR3 for beta chain variable domain of TCR clone 97551 (TRBV12-4, TRBJ1-2)
CASSSGLTGISTF

SEQ ID NO: 195103 - protein, 16 aa, Homo sapiens
  CDR3 for alpha chain variable domain of TCR clone 97552 (TRAV12-2, TRAJ43)
CAGDGMRFGAGTRLTV

SEQ ID NO: 195104 - protein, 16 aa, Homo sapiens
  CDR3 for beta chain variable domain of TCR clone 97552 (TRBV2, TRBJ2-4)
CASSEAPGGEQNIQYF

SEQ ID NO: 195105 - protein, 12 aa, Homo sapiens
  CDR3 for alpha chain variable domain of TCR clone 97553 (TRAV12-1, TRAJ40)
CVVYSGTYKYIF

SEQ ID NO: 195106 - protein, 18 aa, Homo sapiens
  CDR3 for beta chain variable domain of TCR clone 97553 (TRBV20-1, TRBJ2-6)
CSAETTPTHGSGANVLTF

SEQ ID NO: 195107 - protein, 13 aa, Homo sapiens
  CDR3 for alpha chain variable domain of TCR clone 97554 (TRAV1-2, TRAJ9)
CAALNTGGFKTIF

SEQ ID NO: 195108 - protein, 15 aa, Homo sapiens
  CDR3 for beta chain variable domain of TCR clone 97554 (TRBV7-2, TRBJ2-2)
CASSLATGGAGELFF

SEQ ID NO: 195109 - protein, 15 aa, Homo sapiens
  CDR3 for alpha chain variable domain of TCR clone 97555 (TRAV3, TRAJ22)
CAVRDRGGSARQLTF

SEQ ID NO: 195110 - protein, 13 aa, Homo sapiens
  CDR3 for beta chain variable domain of TCR clone 97555 (TRBV27, TRBJ2-3)
CASSLSQGDTQYF

SEQ ID NO: 195111 - protein, 12 aa, Homo sapiens
  CDR3 for alpha chain variable domain of TCR clone 97556 (TRAV16, TRAJ10)
CSRTGGGNKLTF

SEQ ID NO: 195112 - protein, 15 aa, Homo sapiens
  CDR3 for beta chain variable domain of TCR clone 97556 (TRBV20-1, TRBJ2-2)
CSAIPGHSNTGELFF

SEQ ID NO: 195113 - protein, 11 aa, Homo sapiens
  CDR3 for alpha chain variable domain of TCR clone 97557 (TRAV21, TRAJ34)
CAVTNTDKLIF

SEQ ID NO: 195114 - protein, 16 aa, Homo sapiens
  CDR3 for beta chain variable domain of TCR clone 97557 (TRBV19, TRBJ2-1)
CASSKAGPSSYNEQFF

SEQ ID NO: 195115 - protein, 15 aa, Homo sapiens
  CDR3 for alpha chain variable domain of TCR clone 97558 (TRAV12-3, TRAJ49)
CAMTAPGNTGNQFYF

SEQ ID NO: 195116 - protein, 13 aa, Homo sapiens
  CDR3 for beta chain variable domain of TCR clone 97558 (TRBV19, TRBJ2-7)
CASSTSGSYEQYF

SEQ ID NO: 195117 - protein, 11 aa, Homo sapiens
  CDR3 for alpha chain variable domain of TCR clone 97559 (TRAV12-1, TRAJ30)
CVVNGQDKIIF

SEQ ID NO: 195118 - protein, 15 aa, Homo sapiens
  CDR3 for beta chain variable domain of TCR clone 97559 (TRBV7-3, TRBJ2-1)
CASSPTGGGEVEQFF

SEQ ID NO: 195119 - protein, 14 aa, Homo sapiens
  CDR3 for alpha chain variable domain of TCR clone 97560 (TRAV17, TRAJ22)
CATVLSGSARQLTF

SEQ ID NO: 195120 - protein, 13 aa, Homo sapiens
  CDR3 for beta chain variable domain of TCR clone 97560 (TRBV15, TRBJ1-6)
CATSGGLNSPLRF

SEQ ID NO: 195121 - protein, 10 aa, Homo sapiens
  CDR3 for alpha chain variable domain of TCR clone 97561 (TRAV13-2, TRAJ49)
CADTGNQFYF

SEQ ID NO: 195122 - protein, 15 aa, Homo sapiens
  CDR3 for beta chain variable domain of TCR clone 97561 (TRBV6-1, TRBJ2-7)
CAASTPRAGTYEQYF

SEQ ID NO: 195123 - protein, 14 aa, Homo sapiens
  CDR3 for alpha chain variable domain of TCR clone 97562 (TRAV8-3, TRAJ12)
CAVGARDSSYKLIF

SEQ ID NO: 195124 - protein, 14 aa, Homo sapiens
  CDR3 for beta chain variable domain of TCR clone 97562 (TRBV7-2, TRBJ1-2)
CASSQTGSTYGYTF

SEQ ID NO: 195125 - protein, 15 aa, Homo sapiens
  CDR3 for alpha chain variable domain of TCR clone 97563 (TRAV25, TRAJ10)
CAGRLLTGGGNKLTF

SEQ ID NO: 195126 - protein, 14 aa, Homo sapiens
  CDR3 for beta chain variable domain of TCR clone 97563 (TRBV6-5, TRBJ2-7)
CASSRTEGGHEQYF

SEQ ID NO: 195127 - protein, 15 aa, Homo sapiens
  CDR3 for alpha chain variable domain of TCR clone 97564 (TRAV17, TRAJ6)
CATDLPSGGSYIPTF

SEQ ID NO: 195128 - protein, 16 aa, Homo sapiens
  CDR3 for beta chain variable domain of TCR clone 97564 (TRBV4-1, TRBJ2-7)
CASSQAPTGYSYEQYF

SEQ ID NO: 195129 - protein, 15 aa, Homo sapiens
  CDR3 for alpha chain variable domain of TCR clone 97565 (TRAV26-1, TRAJ29)
CIVRVEGSGNTPLVF

SEQ ID NO: 195130 - protein, 13 aa, Homo sapiens
  CDR3 for beta chain variable domain of TCR clone 97565 (TRBV28, TRBJ1-2)
CASSYRVAYGYTF

SEQ ID NO: 195131 - protein, 13 aa, Homo sapiens
  CDR3 for alpha chain variable domain of TCR clone 97566 (TRAV13-2, TRAJ5)
CAVMETGRRALTF

SEQ ID NO: 195132 - protein, 12 aa, Homo sapiens
  CDR3 for beta chain variable domain of TCR clone 97566 (TRBV28, TRBJ2-7)
CASSFSSYEQYF

SEQ ID NO: 195133 - protein, 14 aa, Homo sapiens
  CDR3 for alpha chain variable domain of TCR clone 97567 (TRAV23/DV6, TRAJ8)
CAASKAKGFQKLVF

SEQ ID NO: 195134 - protein, 15 aa, Homo sapiens
  CDR3 for beta chain variable domain of TCR clone 97567 (TRBV28, TRBJ2-3)
CASSPDRQGANTQYF

SEQ ID NO: 195135 - protein, 16 aa, Homo sapiens
  CDR3 for alpha chain variable domain of TCR clone 97568 (TRAV1-2, TRAJ10)
CAVRGVLTGGGNKLTF

SEQ ID NO: 195136 - protein, 15 aa, Homo sapiens
  CDR3 for beta chain variable domain of TCR clone 97568 (TRBV7-3, TRBJ2-1)
CASSLGQGPFGEQFF

SEQ ID NO: 195137 - protein, 14 aa, Homo sapiens
  CDR3 for alpha chain variable domain of TCR clone 97569 (TRAV1-2, TRAJ16)
CAVNRFSDGQELLF

SEQ ID NO: 195138 - protein, 17 aa, Homo sapiens
  CDR3 for beta chain variable domain of TCR clone 97569 (TRBV20-1, TRBJ2-1)
CSASSSGLAGSYNEQFF

SEQ ID NO: 195139 - protein, 14 aa, Homo sapiens
  CDR3 for alpha chain variable domain of TCR clone 97570 (TRAV1-2, TRAJ16)
CAVNLFSDGQKLLF

SEQ ID NO: 195140 - protein, 10 aa, Homo sapiens
  CDR3 for beta chain variable domain of TCR clone 97570 (TRBV5-1, TRBJ2-2)
CASSLAGLSG

SEQ ID NO: 195141 - protein, 14 aa, Homo sapiens
  CDR3 for alpha chain variable domain of TCR clone 97571 (TRAV12-2, TRAJ40)
CAVKIPSGTYKYIF

SEQ ID NO: 195142 - protein, 14 aa, Homo sapiens
  CDR3 for beta chain variable domain of TCR clone 97571 (TRBV19, TRBJ1-6)
CASSSGTGYSPLHF

SEQ ID NO: 195143 - protein, 15 aa, Homo sapiens
  CDR3 for alpha chain variable domain of TCR clone 97572 (TRAV35, TRAJ50)
CAGQLRKTSYDKVIF

SEQ ID NO: 195144 - protein, 12 aa, Homo sapiens
  CDR3 for beta chain variable domain of TCR clone 97572 (TRBV5-1, TRBJ2-5)
CASSLGLETQHF

SEQ ID NO: 195145 - protein, 13 aa, Homo sapiens
  CDR3 for alpha chain variable domain of TCR clone 97573 (TRAV13-1, TRAJ21)
CAASIYNFNKFYF

SEQ ID NO: 195146 - protein, 20 aa, Homo sapiens
  CDR3 for beta chain variable domain of TCR clone 97573 (TRBV7-8, TRBJ2-2)
CASSHLSPGPTIHITGELFF

SEQ ID NO: 195147 - protein, 13 aa, Homo sapiens
  CDR3 for alpha chain variable domain of TCR clone 97574 (TRAV35, TRAJ36)
CAGPRIGANNLFF

SEQ ID NO: 195148 - protein, 13 aa, Homo sapiens
  CDR3 for beta chain variable domain of TCR clone 97574 (TRBV2, TRBJ2-3)
CASGRGRTDTQYF

SEQ ID NO: 195149 - protein, 10 aa, Homo sapiens
  CDR3 for alpha chain variable domain of TCR clone 97575 (TRAV23/DV6, TRAJ43)
CAAAVAALDQ

SEQ ID NO: 195150 - protein, 13 aa, Homo sapiens
  CDR3 for beta chain variable domain of TCR clone 97575 (TRBV12-4, TRBJ1-2)
CASSLRQGKGYTF

SEQ ID NO: 195151 - protein, 11 aa, Homo sapiens
  CDR3 for alpha chain variable domain of TCR clone 97576 (TRAV2, TRAJ13)
CASGGYQKVTF

SEQ ID NO: 195152 - protein, 20 aa, Homo sapiens
  CDR3 for beta chain variable domain of TCR clone 97576 (TRBV28, TRBJ2-1)
CASTPIGRSPGLAGGNEQSF

SEQ ID NO: 195153 - protein, 14 aa, Homo sapiens
  CDR3 for alpha chain variable domain of TCR clone 97577 (TRAV20, TRAJ22)
CAAALGGSARQLTF

SEQ ID NO: 195154 - protein, 15 aa, Homo sapiens
  CDR3 for beta chain variable domain of TCR clone 97577 (TRBV7-2, TRBJ1-1)
CASSFAGDRDTEAFF

SEQ ID NO: 195155 - protein, 14 aa, Homo sapiens
  CDR3 for alpha chain variable domain of TCR clone 97578 (TRAV9-2, TRAJ9)
CALSDPTGGFKTIF

SEQ ID NO: 195156 - protein, 14 aa, Homo sapiens
  CDR3 for beta chain variable domain of TCR clone 97578 (TRBV20-1, TRBJ2-4)
CSARDRGQGGMQYF

SEQ ID NO: 195157 - protein, 15 aa, Homo sapiens
  CDR3 for alpha chain variable domain of TCR clone 97579 (TRAV2, TRAJ15)
CAVEDREQAGTAMIF

SEQ ID NO: 195158 - protein, 13 aa, Homo sapiens
  CDR3 for beta chain variable domain of TCR clone 97579 (TRBV10-2, TRBJ2-3)
CASSESGDHTQYF

SEQ ID NO: 195159 - protein, 11 aa, Homo sapiens
  CDR3 for alpha chain variable domain of TCR clone 97580 (TRAV12-1, TRAJ43)
CVEYDNNDMRF

SEQ ID NO: 195160 - protein, 16 aa, Homo sapiens
  CDR3 for beta chain variable domain of TCR clone 97580 (TRBV20-1, TRBJ2-2)
CSASASGIPGAGELFF

SEQ ID NO: 195161 - protein, 14 aa, Homo sapiens
  CDR3 for alpha chain variable domain of TCR clone 97581 (TRAV12-2, TRAJ3)
CAVSLYSSASKIIF

SEQ ID NO: 195162 - protein, 14 aa, Homo sapiens
  CDR3 for beta chain variable domain of TCR clone 97581 (TRBV27, TRBJ2-1)
CAGSIAETDNEQFF

SEQ ID NO: 195163 - protein, 13 aa, Homo sapiens
  CDR3 for alpha chain variable domain of TCR clone 97582 (TRAV13-2, TRAJ40)
CAENTSGTYKYIF

SEQ ID NO: 195164 - protein, 17 aa, Homo sapiens
  CDR3 for beta chain variable domain of TCR clone 97582 (TRBV12-4, TRBJ1-3)
CASRRSGTPSSGNTMYF

SEQ ID NO: 195165 - protein, 14 aa, Homo sapiens
  CDR3 for alpha chain variable domain of TCR clone 97583 (TRAV1-2, TRAJ16)
CAVNRFSDGQKLLF

SEQ ID NO: 195166 - protein, 11 aa, Homo sapiens
  CDR3 for beta chain variable domain of TCR clone 97583 (TRBV7-8, TRBJ2-5)
CASSPSETQYF

SEQ ID NO: 195167 - protein, 13 aa, Homo sapiens
  CDR3 for alpha chain variable domain of TCR clone 97584 (TRAV3, TRAJ21)
CAVREPDFNKFYF

SEQ ID NO: 195168 - protein, 16 aa, Homo sapiens
  CDR3 for beta chain variable domain of TCR clone 97584 (TRBV19, TRBJ2-2)
CASSAAGTGGTGELFF

SEQ ID NO: 195169 - protein, 12 aa, Homo sapiens
  CDR3 for alpha chain variable domain of TCR clone 97585 (TRAV2, TRAJ9)
GAVGAGGFKTIF

SEQ ID NO: 195170 - protein, 16 aa, Homo sapiens
  CDR3 for beta chain variable domain of TCR clone 97585 (TRBV13, TRBJ2-2)
CASSPRTGEHTGELFF

SEQ ID NO: 195171 - protein, 16 aa, Homo sapiens
  CDR3 for alpha chain variable domain of TCR clone 97586 (TRAV21, TRAJ37)
CAVRPRGSSNTGKLIF

SEQ ID NO: 195172 - protein, 13 aa, Homo sapiens
  CDR3 for beta chain variable domain of TCR clone 97586 (TRBV7-2, TRBJ2-4)
CASSREHANIQYF

SEQ ID NO: 195173 - protein, 13 aa, Homo sapiens
  CDR3 for alpha chain variable domain of TCR clone 97587 (TRAV2, TRAJ29)
CAAGNSVNTPLVF

SEQ ID NO: 195174 - protein, 16 aa, Homo sapiens
  CDR3 for beta chain variable domain of TCR clone 97587 (TRBV7-9, TRBJ1-2)
CASSPGGGAINYGYTF

SEQ ID NO: 195175 - protein, 14 aa, Homo sapiens
  CDR3 for alpha chain variable domain of TCR clone 97588 (TRAV1-2, TRAJ16)
CAVNRFSDGQKLLF

SEQ ID NO: 195176 - protein, 15 aa, Homo sapiens
  CDR3 for beta chain variable domain of TCR clone 97588 (TRBV27, TRBJ2-1)
CDSSNGGGSSNEQFF

SEQ ID NO: 195177 - protein, 14 aa, Homo sapiens
  CDR3 for alpha chain variable domain of TCR clone 97589 (TRAV1-2, TRAJ8)
CAVREDTGFQKLVF

SEQ ID NO: 195178 - protein, 15 aa, Homo sapiens
  CDR3 for beta chain variable domain of TCR clone 97589 (TRBV6-3, TRBJ2-4)
CASSSPGTVFYEQYF

SEQ ID NO: 195179 - protein, 14 aa, Homo sapiens
  CDR3 for alpha chain variable domain of TCR clone 97590 (TRAV1-2, TRAJ8)
CAVREDTGFQKLVF

SEQ ID NO: 195180 - protein, 15 aa, Homo sapiens
  CDR3 for beta chain variable domain of TCR clone 97590 (TRBV6-3, TRBJ2-1)
CASSSPGTVFYEQYF

SEQ ID NO: 195181 - protein, 14 aa, Homo sapiens
  CDR3 for alpha chain variable domain of TCR clone 97591 (TRAV29/DV5, TRAJ38)
CIADNAGNNRKLIW

SEQ ID NO: 195182 - protein, 17 aa, Homo sapiens
  CDR3 for beta chain variable domain of TCR clone 97591 (TRBV7-9, TRBJ2-3)
CASSPTVARDLTDTQYF

SEQ ID NO: 195183 - protein, 14 aa, Homo sapiens
  CDR3 for alpha chain variable domain of TCR clone 97592 (TRAV12-2, TRAJ5)
CAVNRSTGRRALTF

SEQ ID NO: 195184 - protein, 15 aa, Homo sapiens
  CDR3 for beta chain variable domain of TCR clone 97592 (TRBV7-3, TRBJ2-1)
CASSPTGGGEVEQFF

SEQ ID NO: 195185 - protein, 16 aa, Homo sapiens
  CDR3 for alpha chain variable domain of TCR clone 97593 (TRAV21, TRAJ52)
CAVKNAGGTSYGKLTF

SEQ ID NO: 195186 - protein, 11 aa, Homo sapiens
  CDR3 for beta chain variable domain of TCR clone 97593 (TRBV2, TRBJ1-1)
CASREGTEAFF

SEQ ID NO: 195187 - protein, 14 aa, Homo sapiens
  CDR3 for alpha chain variable domain of TCR clone 97594 (TRAV4, TRAJ17)
CLVGDMAAGNKLTF

SEQ ID NO: 195188 - protein, 14 aa, Homo sapiens
  CDR3 for beta chain variable domain of TCR clone 97594 (TRBV4-1, TRBJ2-7)
CASSPVAVGDEQYF

SEQ ID NO: 195189 - protein, 11 aa, Homo sapiens
  CDR3 for alpha chain variable domain of TCR clone 97595 (TRAV21, TRAJ34)
CAVTNTDKLIF

SEQ ID NO: 195190 - protein, 15 aa, Homo sapiens
  CDR3 for beta chain variable domain of TCR clone 97595 (TRBV7-9, TRBJ1-2)
CASSLDREPNYGYTF

SEQ ID NO: 195191 - protein, 13 aa, Homo sapiens
  CDR3 for alpha chain variable domain of TCR clone 97596 (TRAV21, TRAJ57)
CAVTQGGSEKLVF

SEQ ID NO: 195192 - protein, 18 aa, Homo sapiens
  CDR3 for beta chain variable domain of TCR clone 97596 (TRBV29-1, TRBJ2-7)
CSVEDAEDGTAYEQYSGR

SEQ ID NO: 195193 - protein, 10 aa, Homo sapiens
  CDR3 for alpha chain variable domain of TCR clone 97597 (TRAV16, TRAJ22)
SAMYLRQLTF

SEQ ID NO: 195194 - protein, 15 aa, Homo sapiens
  CDR3 for beta chain variable domain of TCR clone 97597 (TRBV7-9, TRBJ1-6)
CASSSLGRGNSPLHF

SEQ ID NO: 195195 - protein, 14 aa, Homo sapiens
  CDR3 for alpha chain variable domain of TCR clone 97598 (TRAV21, TRAJ42)
CAVLGGGSQGNLIF

SEQ ID NO: 195196 - protein, 14 aa, Homo sapiens
  CDR3 for beta chain variable domain of TCR clone 97598 (TRBV23-1, TRBJ2-5)
CASSFLRSQETQYF

SEQ ID NO: 195197 - protein, 19 aa, Homo sapiens
  CDR3 for alpha chain variable domain of TCR clone 97599 (TRAV2, TRAJ20)
ILQVREADAAVYRDCKLSF

SEQ ID NO: 195198 - protein, 20 aa, Homo sapiens
  CDR3 for beta chain variable domain of TCR clone 97599 (TRBV19, TRBJ2-1)
CASSISRTVTSTRLNNEQFF

SEQ ID NO: 195199 - protein, 10 aa, Homo sapiens
  CDR3 for alpha chain variable domain of TCR clone 97600 (TRAV23/DV6, TRAJ31)
CARGGTRLMF

SEQ ID NO: 195200 - protein, 14 aa, Homo sapiens
  CDR3 for beta chain variable domain of TCR clone 97600 (TRBV7-8, TRBJ1-2)
CASSPDSLSYGYTF

SEQ ID NO: 195201 - protein, 13 aa, Homo sapiens
  CDR3 for alpha chain variable domain of TCR clone 97601 (TRAV2, TRAJ11)
CAVEEIGYRTLTF

SEQ ID NO: 195202 - protein, 17 aa, Homo sapiens
  CDR3 for beta chain variable domain of TCR clone 97601 (TRBV7-2, TRBJ2-1)
CASSRGTSGAVGWEQFF

SEQ ID NO: 195203 - protein, 15 aa, Homo sapiens
  CDR3 for alpha chain variable domain of TCR clone 97602 (TRAV8-3, TRAJ11)
CAVGLLNSGYSTLTF

SEQ ID NO: 195204 - protein, 16 aa, Homo sapiens
  CDR3 for beta chain variable domain of TCR clone 97602 (TRBV7-9, TRBJ1-2)
CASSLGFSSWEDGYTF

SEQ ID NO: 195205 - protein, 16 aa, Homo sapiens
  CDR3 for alpha chain variable domain of TCR clone 97603 (TRAV30, TRAJ24)
CGTEIVDADSWGNSSL

SEQ ID NO: 195206 - protein, 14 aa, Homo sapiens
  CDR3 for beta chain variable domain of TCR clone 97603 (TRBV12-5, TRBJ2-5)
CASGSRTHQEAQYF

SEQ ID NO: 195207 - protein, 12 aa, Homo sapiens
  CDR3 for alpha chain variable domain of TCR clone 97604 (TRAV16, TRAJ10)
CSRTGGGNKLTF

SEQ ID NO: 195208 - protein, 14 aa, Homo sapiens
  CDR3 for beta chain variable domain of TCR clone 97604 (TRBV19, TRBJ2-2)
CASSTLHRSGELFF

SEQ ID NO: 195209 - protein, 12 aa, Homo sapiens
  CDR3 for alpha chain variable domain of TCR clone 97605 (TRAV12-1, TRAJ40)
CVVYSGTYKYIF

SEQ ID NO: 195210 - protein, 18 aa, Homo sapiens
  CDR3 for beta chain variable domain of TCR clone 97605 (TRBV11-1, TRBJ2-3)
CASSLGGASRGAPNTQYF

SEQ ID NO: 195211 - protein, 23 aa, Homo sapiens
  CDR3 for alpha chain variable domain of TCR clone 97606 (TRAV26-1, TRAJ38)
CIADNAGNNHIQNPDPAVYQLND

SEQ ID NO: 195212 - protein, 13 aa, Homo sapiens
  CDR3 for beta chain variable domain of TCR clone 97606 (TRBV20-1, TRBJ1-1)
CSARGGGNTEAFF

SEQ ID NO: 195213 - protein, 12 aa, Homo sapiens
  CDR3 for alpha chain variable domain of TCR clone 97607 (TRAV27, TRAJ35)
CAGADFGNVLHR

SEQ ID NO: 195214 - protein, 16 aa, Homo sapiens
  CDR3 for beta chain variable domain of TCR clone 97607 (TRBV6-1, TRBJ2-1)
CASISRQGSSYNEQFF

SEQ ID NO: 195215 - protein, 15 aa, Homo sapiens
  CDR3 for alpha chain variable domain of TCR clone 97608 (TRAV17, TRAJ56)
CATDANTVANSKLTF

SEQ ID NO: 195216 - protein, 14 aa, Homo sapiens
  CDR3 for beta chain variable domain of TCR clone 97608 (TRBV19, TRBJ1-5)
CASSLGTGGQPQHF

SEQ ID NO: 195217 - protein, 11 aa, Homo sapiens
  CDR3 for alpha chain variable domain of TCR clone 97609 (TRAV1-2, TRAJ20)
CAVSNDYKFSF

SEQ ID NO: 195218 - protein, 16 aa, Homo sapiens
  CDR3 for beta chain variable domain of TCR clone 97609 (TRBV29-1, TRBJ2-6)
CSVEDITYSGANVLTF

SEQ ID NO: 195219 - protein, 15 aa, Homo sapiens
  CDR3 for alpha chain variable domain of TCR clone 97610 (TRAV13-2, TRAJ23)
CAERGFYNQGGKLIF

SEQ ID NO: 195220 - protein, 14 aa, Homo sapiens
  CDR3 for beta chain variable domain of TCR clone 97610 (TRBV4-1, TRBJ2-3)
CASSQDWSTDTQYF

SEQ ID NO: 195221 - protein, 18 aa, Homo sapiens
  CDR3 for alpha chain variable domain of TCR clone 97611 (TRAV13-1, TRAJ52)
CAASKRSAGGTSYGKLTF

SEQ ID NO: 195222 - protein, 12 aa, Homo sapiens
  CDR3 for beta chain variable domain of TCR clone 97611 (TRBV27, TRBJ2-5)
CASSLKGETQYF

SEQ ID NO: 195223 - protein, 17 aa, Homo sapiens
  CDR3 for alpha chain variable domain of TCR clone 97612 (TRAV3, TRAJ6)
CAVRDGPRAGGSYIPTF

SEQ ID NO: 195224 - protein, 14 aa, Homo sapiens
  CDR3 for beta chain variable domain of TCR clone 97612 (TRBV28, TRBJ1-1)
CASSSEQGYTEAFF

SEQ ID NO: 195225 - protein, 14 aa, Homo sapiens
  CDR3 for alpha chain variable domain of TCR clone 97613 (TRAV12-2, TRAJ45)
CAVYSGGGAAGLTF

SEQ ID NO: 195226 - protein, 13 aa, Homo sapiens
  CDR3 for beta chain variable domain of TCR clone 97613 (TRBV7-7, TRBJ2-3)
CASSLSRADTQYF

SEQ ID NO: 195227 - protein, 15 aa, Homo sapiens
  CDR3 for alpha chain variable domain of TCR clone 97614 (TRAV8-6, TRAJ6)
CAVSGESGGSYIPTF

SEQ ID NO: 195228 - protein, 14 aa, Homo sapiens
  CDR3 for beta chain variable domain of TCR clone 97614 (TRBV7-9, TRBJ2-1)
CASSSMVGFGDQFF

SEQ ID NO: 195229 - protein, 15 aa, Homo sapiens
  CDR3 for alpha chain variable domain of TCR clone 97615 (TRAV12-3, TRAJ27)
CAMRAYNTNAAKSTF

SEQ ID NO: 195230 - protein, 13 aa, Homo sapiens
  CDR3 for beta chain variable domain of TCR clone 97615 (TRBV11-2, TRBJ2-5)
CASSRGPSETQYF

SEQ ID NO: 195231 - protein, 14 aa, Homo sapiens
  CDR3 for alpha chain variable domain of TCR clone 97616 (TRAV12-2, TRAJ53)
CAVKGGGSNYKLTF

SEQ ID NO: 195232 - protein, 14 aa, Homo sapiens
  CDR3 for beta chain variable domain of TCR clone 97616 (TRBV10-3, TRBJ2-5)
CATSRDRDRETQYF

SEQ ID NO: 195233 - protein, 17 aa, Homo sapiens
  CDR3 for alpha chain variable domain of TCR clone 97617 (TRAV38-2/DV8, TRAJ28)
CAFLTLYSGAGSYQLTF

SEQ ID NO: 195234 - protein, 14 aa, Homo sapiens
  CDR3 for beta chain variable domain of TCR clone 97617 (TRBV7-2, TRBJ2-5)
CASSLSGGGVTQYF

SEQ ID NO: 195235 - protein, 13 aa, Homo sapiens
  CDR3 for alpha chain variable domain of TCR clone 97618 (TRAV20, TRAJ54)
CAVQAGGAQKLVF

SEQ ID NO: 195236 - protein, 14 aa, Homo sapiens
  CDR3 for beta chain variable domain of TCR clone 97618 (TRBV4-3, TRBJ2-2)
CASSQGHVTGELFF

SEQ ID NO: 195237 - protein, 15 aa, Homo sapiens
  CDR3 for alpha chain variable domain of TCR clone 97619 (TRAV26-1, TRAJ17)
CIVSSFKAAGNKLTF

SEQ ID NO: 195238 - protein, 15 aa, Homo sapiens
  CDR3 for beta chain variable domain of TCR clone 97619 (TRBV5-1, TRBJ2-2)
CASSSQGGNTGELFF

SEQ ID NO: 195239 - protein, 14 aa, Homo sapiens
  CDR3 for alpha chain variable domain of TCR clone 97620 (TRAV1-1, TRAJ27)
CAVIYNTNAGKSTF

SEQ ID NO: 195240 - protein, 15 aa, Homo sapiens
  CDR3 for beta chain variable domain of TCR clone 97620 (TRBV7-2, TRBJ2-1)
CGSSSGLAGGNEQFF

SEQ ID NO: 195241 - protein, 15 aa, Homo sapiens
  CDR3 for alpha chain variable domain of TCR clone 97621 (TRAV3, TRAJ22)
CAVRDRGGSAGQLTF

SEQ ID NO: 195242 - protein, 15 aa, Homo sapiens
  CDR3 for beta chain variable domain of TCR clone 97621 (TRBV7-3, TRBJ2-1)
CASSPTGGGEVEQFF

SEQ ID NO: 195243 - protein, 12 aa, Homo sapiens
  CDR3 for alpha chain variable domain of TCR clone 97622 (TRAV36/DV7, TRAJ37)
CACYGNTGKLIF

SEQ ID NO: 195244 - protein, 14 aa, Homo sapiens
  CDR3 for beta chain variable domain of TCR clone 97622 (TRBV6-3, TRBJ1-4)
CASSGKNLNEKLFF

SEQ ID NO: 195245 - protein, 15 aa, Homo sapiens
  CDR3 for alpha chain variable domain of TCR clone 97623 (TRAV3, TRAJ17)
CAVRDTGAAGNKLTF

SEQ ID NO: 195246 - protein, 15 aa, Homo sapiens
  CDR3 for beta chain variable domain of TCR clone 97623 (TRBV10-2, TRBJ2-5)
CASRGSGGPQETQYF

SEQ ID NO: 195247 - protein, 15 aa, Homo sapiens
  CDR3 for alpha chain variable domain of TCR clone 97624 (TRAV3, TRAJ4)
CAVRDGTGGYNKLIF

SEQ ID NO: 195248 - protein, 13 aa, Homo sapiens
  CDR3 for beta chain variable domain of TCR clone 97624 (TRBV20-1, TRBJ1-1)
CSARGGGNTEAFF

SEQ ID NO: 195249 - protein, 13 aa, Homo sapiens
  CDR3 for alpha chain variable domain of TCR clone 97625 (TRAV12-2, TRAJ39)
CAVNNNAGNMLTF

SEQ ID NO: 195250 - protein, 15 aa, Homo sapiens
  CDR3 for beta chain variable domain of TCR clone 97625 (TRBV7-2, TRBJ2-1)
CASSSGLAGGNEQFF

SEQ ID NO: 195251 - protein, 12 aa, Homo sapiens
  CDR3 for alpha chain variable domain of TCR clone 97626 (TRAV9-2, TRAJ36)
CALKKGANNIFF

SEQ ID NO: 195252 - protein, 13 aa, Homo sapiens
  CDR3 for beta chain variable domain of TCR clone 97626 (TRBV27, TRBJ1-1)
CASSLSIGAEAFF

SEQ ID NO: 195253 - protein, 14 aa, Homo sapiens
  CDR3 for alpha chain variable domain of TCR clone 97627 (TRAV1-2, TRAJ8)
CAVREDTGFQKLVF

SEQ ID NO: 195254 - protein, 15 aa, Homo sapiens
  CDR3 for beta chain variable domain of TCR clone 97627 (TRBV7-6, TRBJ1-2)
CASSSGGRGGYGYTF

SEQ ID NO: 195255 - protein, 14 aa, Homo sapiens
  CDR3 for alpha chain variable domain of TCR clone 97628 (TRAV8-3, TRAJ9)
CAVVHNTGGSKTIF

SEQ ID NO: 195256 - protein, 14 aa, Homo sapiens
  CDR3 for beta chain variable domain of TCR clone 97628 (TRBV7-3, TRBJ2-2)
CASSSGGYTGELFF

SEQ ID NO: 195257 - protein, 15 aa, Homo sapiens
  CDR3 for alpha chain variable domain of TCR clone 97629 (TRAV8-6, TRAJ10)
CAVSDLAGGGNKLTF

SEQ ID NO: 195258 - protein, 15 aa, Homo sapiens
  CDR3 for beta chain variable domain of TCR clone 97629 (TRBV3-1, TRBJ2-5)
CASSANLGGPETQYF

SEQ ID NO: 195259 - protein, 10 aa, Homo sapiens
  CDR3 for alpha chain variable domain of TCR clone 97630 (TRAV23/DV6, TRAJ57)
CAASYTLSQG

SEQ ID NO: 195260 - protein, 14 aa, Homo sapiens
  CDR3 for beta chain variable domain of TCR clone 97630 (TRBV13, TRBJ2-5)
CASSLGQGKETQYF

SEQ ID NO: 195261 - protein, 11 aa, Homo sapiens
  CDR3 for alpha chain variable domain of TCR clone 97631 (TRAV12-3, TRAJ43)
CAMSVSNDMRF

SEQ ID NO: 195262 - protein, 14 aa, Homo sapiens
  CDR3 for beta chain variable domain of TCR clone 97631 (TRBV2, TRBJ1-5)
CASSEAAGGQPQHF

SEQ ID NO: 195263 - protein, 12 aa, Homo sapiens
  CDR3 for alpha chain variable domain of TCR clone 97632 (TRAV12-3, TRAJ17)
CAMTLTGNKLAF

SEQ ID NO: 195264 - protein, 15 aa, Homo sapiens
  CDR3 for beta chain variable domain of TCR clone 97632 (TRBV20-1, TRBJ2-7)
CSARDRVSGMDDQYF

SEQ ID NO: 195265 - protein, 14 aa, Homo sapiens
  CDR3 for alpha chain variable domain of TCR clone 97633 (TRAV12-1, TRAJ17)
CVVNYKAAGNKLNF

SEQ ID NO: 195266 - protein, 14 aa, Homo sapiens
  CDR3 for beta chain variable domain of TCR clone 97633 (TRBV7-8, TRBJ2-3)
CASSLEAGTDTQYF

SEQ ID NO: 195267 - protein, 17 aa, Homo sapiens
  CDR3 for alpha chain variable domain of TCR clone 97634 (TRAV3, TRAJ42)
CAVRDRDYGGSKGNLIF

SEQ ID NO: 195268 - protein, 15 aa, Homo sapiens
  CDR3 for beta chain variable domain of TCR clone 97634 (TRBV7-2, TRBJ2-7)
CASSWGQGAIYEQYF

SEQ ID NO: 195269 - protein, 13 aa, Homo sapiens
  CDR3 for alpha chain variable domain of TCR clone 97635 (TRAV27, TRAJ57)
CRSAQGGSEKLVF

SEQ ID NO: 195270 - protein, 11 aa, Homo sapiens
  CDR3 for beta chain variable domain of TCR clone 97635 (TRBV11-2, TRBJ1-1)
CDSSINTEAFF

SEQ ID NO: 195271 - protein, 14 aa, Homo sapiens
  CDR3 for alpha chain variable domain of TCR clone 97636 (TRAV14/DV4, TRAJ32)
SNVLPLTPTNKLIF

SEQ ID NO: 195272 - protein, 12 aa, Homo sapiens
  CDR3 for beta chain variable domain of TCR clone 97636 (TRBV27, TRBJ2-2)
CASKLFTGELFF

SEQ ID NO: 195273 - protein, 12 aa, Homo sapiens
  CDR3 for alpha chain variable domain of TCR clone 97637 (TRAV1-1, TRAJ8)
CAGGTGFQKLVF

SEQ ID NO: 195274 - protein, 12 aa, Homo sapiens
  CDR3 for beta chain variable domain of TCR clone 97637 (TRBV29-1, TRBJ2-3)
CSVTGGADTQYF

SEQ ID NO: 195275 - protein, 13 aa, Homo sapiens
  CDR3 for alpha chain variable domain of TCR clone 97638 (TRAV20, TRAJ34)
CAVSSYNTDKLIF

SEQ ID NO: 195276 - protein, 15 aa, Homo sapiens
  CDR3 for beta chain variable domain of TCR clone 97638 (TRBV20-1, TRBJ1-2)
CSAAGEGARIYGDTF

SEQ ID NO: 195277 - protein, 15 aa, Homo sapiens
  CDR3 for alpha chain variable domain of TCR clone 97639 (TRAV26-1, TRAJ48)
CIVRVGGFGNEKLTF

SEQ ID NO: 195278 - protein, 16 aa, Homo sapiens
  CDR3 for beta chain variable domain of TCR clone 97639 (TRBV4-1, TRBJ2-3)
RASSQRAGGLTDTQYF

SEQ ID NO: 195279 - protein, 11 aa, Homo sapiens
  CDR3 for alpha chain variable domain of TCR clone 97640 (TRAV12-1, TRAJ8)
RVLTGFQKLVF

SEQ ID NO: 195280 - protein, 14 aa, Homo sapiens
  CDR3 for beta chain variable domain of TCR clone 97640 (TRBV19, TRBJ2-1)
CASGKSTQYNEQFF

SEQ ID NO: 195281 - protein, 15 aa, Homo sapiens
  CDR3 for alpha chain variable domain of TCR clone 97641 (TRAV3, TRAJ5)
CAVRALDTGRRALTF

SEQ ID NO: 195282 - protein, 15 aa, Homo sapiens
  CDR3 for beta chain variable domain of TCR clone 97641 (TRBV20-1, TRBJ2-1)
CSARSPGGPGNEQFF

SEQ ID NO: 195283 - protein, 17 aa, Homo sapiens
  CDR3 for alpha chain variable domain of TCR clone 97642 (TRAV13-1, TRAJ28)
CGASPPYSGAGSYQLTF

SEQ ID NO: 195284 - protein, 15 aa, Homo sapiens
  CDR3 for beta chain variable domain of TCR clone 97642 (TRBV6-3, TRBJ2-2)
CASSFLATLTGELFF

SEQ ID NO: 195285 - protein, 13 aa, Homo sapiens
  CDR3 for alpha chain variable domain of TCR clone 97643 (TRAV17, TRAJ21)
CATDGGNFNKFYF

SEQ ID NO: 195286 - protein, 13 aa, Homo sapiens
  CDR3 for beta chain variable domain of TCR clone 97643 (TRBV27, TRBJ2-3)
CACRETSTDTQYF

SEQ ID NO: 195287 - protein, 15 aa, Homo sapiens
  CDR3 for alpha chain variable domain of TCR clone 97644 (TRAV3, TRAJ29)
CAVRAPLSGNTPLVF

SEQ ID NO: 195288 - protein, 14 aa, Homo sapiens
  CDR3 for beta chain variable domain of TCR clone 97644 (TRBV25-1, TRBJ1-1)
CASTHLGGNTEAFF

SEQ ID NO: 195289 - protein, 14 aa, Homo sapiens
  CDR3 for alpha chain variable domain of TCR clone 97645 (TRAV12-1, TRAJ12)
CVVTRMDSSYKLIF

SEQ ID NO: 195290 - protein, 12 aa, Homo sapiens
  CDR3 for beta chain variable domain of TCR clone 97645 (TRBV11-2, TRBJ2-2)
CASSLGGGELFF

SEQ ID NO: 195291 - protein, 12 aa, Homo sapiens
  CDR3 for alpha chain variable domain of TCR clone 97646 (TRAV13-1, TRAJ21)
CAAKEGFNKFYF

SEQ ID NO: 195292 - protein, 15 aa, Homo sapiens
  CDR3 for beta chain variable domain of TCR clone 97646 (TRBV7-2, TRBJ2-2)
CASRRPGQNTGELFF

SEQ ID NO: 195293 - protein, 12 aa, Homo sapiens
  CDR3 for alpha chain variable domain of TCR clone 97647 (TRAV8-3, TRAJ41)
CAVALSGYALNF

SEQ ID NO: 195294 - protein, 18 aa, Homo sapiens
  CDR3 for beta chain variable domain of TCR clone 97647 (TRBV20-1, TRBJ2-6)
CSAETTPTRGSGANVLTF

SEQ ID NO: 195295 - protein, 16 aa, Homo sapiens
  CDR3 for alpha chain variable domain of TCR clone 97648 (TRAV12-3, TRAJ45)
CAMGWGSGGGADGLTF

SEQ ID NO: 195296 - protein, 13 aa, Homo sapiens
  CDR3 for beta chain variable domain of TCR clone 97648 (TRBV20-1, TRBJ1-1)
CSARVGGNTEAFF

SEQ ID NO: 195297 - protein, 15 aa, Homo sapiens
  CDR3 for alpha chain variable domain of TCR clone 97649 (TRAV2, TRAJ15)
CAVEDRGQAGSALIF

SEQ ID NO: 195298 - protein, 13 aa, Homo sapiens
  CDR3 for beta chain variable domain of TCR clone 97649 (TRBV10-2, TRBJ2-7)
CASGASGGYEQYF

SEQ ID NO: 195299 - protein, 14 aa, Homo sapiens
  CDR3 for alpha chain variable domain of TCR clone 97650 (TRAV4, TRAJ9)
CLVGSGTGGVKTIF

SEQ ID NO: 195300 - protein, 14 aa, Homo sapiens
  CDR3 for beta chain variable domain of TCR clone 97650 (TRBV7-9, TRBJ2-4)
CASSLAMGGNIQYF

SEQ ID NO: 195301 - protein, 16 aa, Homo sapiens
  CDR3 for alpha chain variable domain of TCR clone 97651 (TRAV14/DV4, TRAJ54)
CAMREGRIQGAQKLVF

SEQ ID NO: 195302 - protein, 14 aa, Homo sapiens
  CDR3 for beta chain variable domain of TCR clone 97651 (TRBV7-3, TRBJ2-1)
CASSLAGGTNEQFF

SEQ ID NO: 195303 - protein, 17 aa, Homo sapiens
  CDR3 for alpha chain variable domain of TCR clone 97652 (TRAV3, TRAJ42)
CAVRDRDYGGSQGNLIS

SEQ ID NO: 195304 - protein, 15 aa, Homo sapiens
  CDR3 for beta chain variable domain of TCR clone 97652 (TRBV6-3, TRBJ2-7)
CASSSPGTVFYEQYF

SEQ ID NO: 195305 - protein, 15 aa, Homo sapiens
  CDR3 for alpha chain variable domain of TCR clone 97653 (TRAV2, TRAJ11)
CAVGGRNSGYGTLTF

SEQ ID NO: 195306 - protein, 12 aa, Homo sapiens
  CDR3 for beta chain variable domain of TCR clone 97653 (TRBV5-4, TRBJ2-7)
CASSLEAYEQYF

SEQ ID NO: 195307 - protein, 14 aa, Homo sapiens
  CDR3 for alpha chain variable domain of TCR clone 97654 (TRAV12-2, TRAJ17)
CAVLFKAAGNKLTF

SEQ ID NO: 195308 - protein, 17 aa, Homo sapiens
  CDR3 for beta chain variable domain of TCR clone 97654 (TRBV20-1, TRBJ2-2)
CSASGWGQGGLTGELFF

SEQ ID NO: 195309 - protein, 15 aa, Homo sapiens
  CDR3 for alpha chain variable domain of TCR clone 97655 (TRAV8-3, TRAJ34)
DAAEYFCAIPGKLIF

SEQ ID NO: 195310 - protein, 15 aa, Homo sapiens
  CDR3 for beta chain variable domain of TCR clone 97655 (TRBV5-6, TRBJ2-1)
CASSRRLAGDNEQFF

SEQ ID NO: 195311 - protein, 14 aa, Homo sapiens
  CDR3 for alpha chain variable domain of TCR clone 97656 (TRAV13-2, TRAJ17)
CAENSKAAGNKLTF

SEQ ID NO: 195312 - protein, 14 aa, Homo sapiens
  CDR3 for beta chain variable domain of TCR clone 97656 (TRBV19, TRBJ2-1)
CASPTVVLSGEQFF

SEQ ID NO: 195313 - protein, 17 aa, Homo sapiens
  CDR3 for alpha chain variable domain of TCR clone 97657 (TRAV13-1, TRAJ52)
CAASSGAGGTSYGKLTF

SEQ ID NO: 195314 - protein, 15 aa, Homo sapiens
  CDR3 for beta chain variable domain of TCR clone 97657 (TRBV7-2, TRBJ2-1)
GASSSGLAGGNEQFF

SEQ ID NO: 195315 - protein, 15 aa, Homo sapiens
  CDR3 for alpha chain variable domain of TCR clone 97658 (TRAV3, TRAJ22)
CAVRDRGGSARQLTF

SEQ ID NO: 195316 - protein, 13 aa, Homo sapiens
  CDR3 for beta chain variable domain of TCR clone 97658 (TRBV4-2, TRBJ2-3)
CASSQDWQHTQYF

SEQ ID NO: 195317 - protein, 13 aa, Homo sapiens
  CDR3 for alpha chain variable domain of TCR clone 97659 (TRAV12-3, TRAJ7)
CAMSASGNNRLSF

SEQ ID NO: 195318 - protein, 14 aa, Homo sapiens
  CDR3 for beta chain variable domain of TCR clone 97659 (TRBV13, TRBJ2-5)
CASSLGPRGETQYF

SEQ ID NO: 195319 - protein, 14 aa, Homo sapiens
  CDR3 for alpha chain variable domain of TCR clone 97660 (TRAV35, TRAJ13)
CAGSPSGGYPKVTF

SEQ ID NO: 195320 - protein, 13 aa, Homo sapiens
  CDR3 for beta chain variable domain of TCR clone 97660 (TRBV29-1, TRBJ1-1)
CSVGDSRNTEAFF

SEQ ID NO: 195321 - protein, 14 aa, Homo sapiens
  CDR3 for alpha chain variable domain of TCR clone 97661 (TRAV3, TRAJ8)
CAALMNTGFQKLVF

SEQ ID NO: 195322 - protein, 15 aa, Homo sapiens
  CDR3 for beta chain variable domain of TCR clone 97661 (TRBV28, TRBJ2-5)
CASSLGLGDQETQYF

SEQ ID NO: 195323 - protein, 12 aa, Homo sapiens
  CDR3 for alpha chain variable domain of TCR clone 97662 (TRAV2, TRAJ26)
CAGSPGRLWSEF

SEQ ID NO: 195324 - protein, 15 aa, Homo sapiens
  CDR3 for beta chain variable domain of TCR clone 97662 (TRBV7-6, TRBJ2-5)
CASSKPTGPQETQYF

SEQ ID NO: 195325 - protein, 15 aa, Homo sapiens
  CDR3 for alpha chain variable domain of TCR clone 97663 (TRAV35, TRAJ23)
CAGPLGNNQGGKLIF

SEQ ID NO: 195326 - protein, 14 aa, Homo sapiens
  CDR3 for beta chain variable domain of TCR clone 97663 (TRBV7-9, TRBJ1-1)
CASTPLQSYTVAFF

SEQ ID NO: 195327 - protein, 18 aa, Homo sapiens
  CDR3 for alpha chain variable domain of TCR clone 97664 (TRAV9-2, TRAJ52)
CALSRHNAGGTSYGKLTF

SEQ ID NO: 195328 - protein, 13 aa, Homo sapiens
  CDR3 for beta chain variable domain of TCR clone 97664 (TRBV7-9, TRBJ1-2)
CDSSLKQNYGYTF

SEQ ID NO: 195329 - protein, 11 aa, Homo sapiens
  CDR3 for alpha chain variable domain of TCR clone 97665 (TRAV3, TRAJ21)
CAVGNFNKFYF

SEQ ID NO: 195330 - protein, 12 aa, Homo sapiens
  CDR3 for beta chain variable domain of TCR clone 97665 (TRBV28, TRBJ2-1)
CASSVQINEQFF

SEQ ID NO: 195331 - protein, 20 aa, Homo sapiens
  CDR3 for alpha chain variable domain of TCR clone 97666 (TRAV27, TRAJ53)
QAPTSVQSRNSGGSNYKLTF

SEQ ID NO: 195332 - protein, 14 aa, Homo sapiens
  CDR3 for beta chain variable domain of TCR clone 97666 (TRBV11-1, TRBJ2-7)
CASTFAVPSYEQYF

SEQ ID NO: 195333 - protein, 13 aa, Homo sapiens
  CDR3 for alpha chain variable domain of TCR clone 97667 (TRAV41, TRAJ58)
CAVEETSGSRLTF

SEQ ID NO: 195334 - protein, 16 aa, Homo sapiens
  CDR3 for beta chain variable domain of TCR clone 97667 (TRBV11-2, TRBJ2-1)
CASSPRLAGVYNEQFF

SEQ ID NO: 195335 - protein, 12 aa, Homo sapiens
  CDR3 for alpha chain variable domain of TCR clone 97668 (TRAV13-2, TRAJ39)
CAENNAGNMLTF

SEQ ID NO: 195336 - protein, 12 aa, Homo sapiens
  CDR3 for beta chain variable domain of TCR clone 97668 (TRBV11-2, TRBJ2-2)
CASSLGGGELSF

SEQ ID NO: 195337 - protein, 11 aa, Homo sapiens
  CDR3 for alpha chain variable domain of TCR clone 97669 (TRAV12-1, TRAJ26)
CVVAYGQNFVF

SEQ ID NO: 195338 - protein, 15 aa, Homo sapiens
  CDR3 for beta chain variable domain of TCR clone 97669 (TRBV12-4, TRBJ2-5)
CASSGTGQAQETQYC

SEQ ID NO: 195339 - protein, 19 aa, Homo sapiens
  CDR3 for alpha chain variable domain of TCR clone 97670 (TRAV26-1, TRAJ22)
CCVLLHRWVFSGSSRQLTF

SEQ ID NO: 195340 - protein, 19 aa, Homo sapiens
  CDR3 for beta chain variable domain of TCR clone 97670 (TRBV19, TRBJ2-5)
CASSIGQVTDFFLGETQYF

SEQ ID NO: 195341 - protein, 14 aa, Homo sapiens
  CDR3 for alpha chain variable domain of TCR clone 97671 (TRAV2, TRAJ37)
CAVDFTSNTGKLIF

SEQ ID NO: 195342 - protein, 14 aa, Homo sapiens
  CDR3 for beta chain variable domain of TCR clone 97671 (TRBV11-2, TRBJ1-2)
CASSLGTANYGYTF

SEQ ID NO: 195343 - protein, 15 aa, Homo sapiens
  CDR3 for alpha chain variable domain of TCR clone 97672 (TRAV38-2/DV8, TRAJ47)
CAYRSAKGYGNKLVF

SEQ ID NO: 195344 - protein, 15 aa, Homo sapiens
  CDR3 for beta chain variable domain of TCR clone 97672 (TRBV6-6, TRBJ2-7)
CASSYSYGGSYEHYF

SEQ ID NO: 195345 - protein, 14 aa, Homo sapiens
  CDR3 for alpha chain variable domain of TCR clone 97673 (TRAV1-2, TRAJ8)
CAVREDTGFQKLVF

SEQ ID NO: 195346 - protein, 15 aa, Homo sapiens
  CDR3 for beta chain variable domain of TCR clone 97673 (TRBV7-3, TRBJ2-2)
CASSETGQGTRELFF

SEQ ID NO: 195347 - protein, 13 aa, Homo sapiens
  CDR3 for alpha chain variable domain of TCR clone 97674 (TRAV17, TRAJ26)
CATVDNYGQNFVF

SEQ ID NO: 195348 - protein, 13 aa, Homo sapiens
  CDR3 for beta chain variable domain of TCR clone 97674 (TRBV7-3, TRBJ1-1)
CASSQDWGAEAFF

SEQ ID NO: 195349 - protein, 14 aa, Homo sapiens
  CDR3 for alpha chain variable domain of TCR clone 97675 (TRAV3, TRAJ33)
CAVRDMDSNYQLIR

SEQ ID NO: 195350 - protein, 19 aa, Homo sapiens
  CDR3 for beta chain variable domain of TCR clone 97675 (TRBV7-3, TRBJ1-2)
CASSFPQGNDGELWLHLRF

SEQ ID NO: 195351 - protein, 15 aa, Homo sapiens
  CDR3 for alpha chain variable domain of TCR clone 97676 (TRAV29/DV5, TRAJ42)
CAAKTDGGSQGNLII

SEQ ID NO: 195352 - protein, 15 aa, Homo sapiens
  CDR3 for beta chain variable domain of TCR clone 97676 (TRBV5-1, TRBJ2-2)
CASSSQGGNTGELFF

SEQ ID NO: 195353 - protein, 11 aa, Homo sapiens
  CDR3 for alpha chain variable domain of TCR clone 97677 (TRAV17, TRAJ43)
CATPRSNDMRF

SEQ ID NO: 195354 - protein, 15 aa, Homo sapiens
  CDR3 for beta chain variable domain of TCR clone 97677 (TRBV7-9, TRBJ1-6)
CASSSPGRGNSPLHF

SEQ ID NO: 195355 - protein, 17 aa, Homo sapiens
  CDR3 for alpha chain variable domain of TCR clone 97678 (TRAV38-2/DV8, TRAJ23)
CALSRKLIFGQGTALSV

SEQ ID NO: 195356 - protein, 17 aa, Homo sapiens
  CDR3 for beta chain variable domain of TCR clone 97678 (TRBV5-4, TRBJ2-1)
CASSSAGGRGPYNEQFF

SEQ ID NO: 195357 - protein, 14 aa, Homo sapiens
  CDR3 for alpha chain variable domain of TCR clone 97679 (TRAV12-2, TRAJ13)
CAVKKTGGYQKVTF

SEQ ID NO: 195358 - protein, 14 aa, Homo sapiens
  CDR3 for beta chain variable domain of TCR clone 97679 (TRBV3-1, TRBJ2-5)
CASSQAVRQETQYF

SEQ ID NO: 195359 - protein, 16 aa, Homo sapiens
  CDR3 for alpha chain variable domain of TCR clone 97680 (TRAV16, TRAJ4)
CALSRMFSGGYNKLIF

SEQ ID NO: 195360 - protein, 16 aa, Homo sapiens
  CDR3 for beta chain variable domain of TCR clone 97680 (TRBV12-4, TRBJ1-5)
CASSRPVGGSNQTQHF

SEQ ID NO: 195361 - protein, 14 aa, Homo sapiens
  CDR3 for alpha chain variable domain of TCR clone 97681 (TRAV12-2, TRAJ11)
CAVNRESGYSNLTF

SEQ ID NO: 195362 - protein, 10 aa, Homo sapiens
  CDR3 for beta chain variable domain of TCR clone 97681 (TRBV20-1, TRBJ2-5)
CSARFETQYF

SEQ ID NO: 195363 - protein, 12 aa, Homo sapiens
  CDR3 for alpha chain variable domain of TCR clone 97682 (TRAV36/DV7, TRAJ54)
CAVVRGAQKLVF

SEQ ID NO: 195364 - protein, 13 aa, Homo sapiens
  CDR3 for beta chain variable domain of TCR clone 97682 (TRBV7-9, TRBJ1-2)
CASSVKQNYGYTF

SEQ ID NO: 195365 - protein, 15 aa, Homo sapiens
  CDR3 for alpha chain variable domain of TCR clone 97683 (TRAV13-1, TRAJ18)
CAASGGGSTLGRLYF

SEQ ID NO: 195366 - protein, 15 aa, Homo sapiens
  CDR3 for beta chain variable domain of TCR clone 97683 (TRBV7-3, TRBJ2-1)
CASSPTGGGEVEQFF

SEQ ID NO: 195367 - protein, 14 aa, Homo sapiens
  CDR3 for alpha chain variable domain of TCR clone 97684 (TRAV8-4, TRAJ13)
CAVTLSGGYQKVTF

SEQ ID NO: 195368 - protein, 14 aa, Homo sapiens
  CDR3 for beta chain variable domain of TCR clone 97684 (TRBV7-2, TRBJ1-2)
CASSLTGSTYGYTF

SEQ ID NO: 195369 - protein, 12 aa, Homo sapiens
  CDR3 for alpha chain variable domain of TCR clone 97685 (TRAV2, TRAJ31)
CAVEDNNARLMF

SEQ ID NO: 195370 - protein, 15 aa, Homo sapiens
  CDR3 for beta chain variable domain of TCR clone 97685 (TRBV11-3, TRBJ2-3)
CASSAGTVVTNTQYF

SEQ ID NO: 195371 - protein, 18 aa, Homo sapiens
  CDR3 for alpha chain variable domain of TCR clone 97686 (TRAV9-2, TRAJ52)
CALSRHNAGGTGYGKLTF

SEQ ID NO: 195372 - protein, 13 aa, Homo sapiens
  CDR3 for beta chain variable domain of TCR clone 97686 (TRBV7-9, TRBJ1-2)
CASSLKQNYGYTF

SEQ ID NO: 195373 - protein, 11 aa, Homo sapiens
  CDR3 for alpha chain variable domain of TCR clone 97687 (TRAV29/DV5, TRAJ49)
CAAVPGNQFYF

SEQ ID NO: 195374 - protein, 15 aa, Homo sapiens
  CDR3 for beta chain variable domain of TCR clone 97687 (TRBV9, TRBJ1-6)
CASSVAGTGDSPLHF

SEQ ID NO: 195375 - protein, 17 aa, Homo sapiens
  CDR3 for alpha chain variable domain of TCR clone 97688 (TRAV12-2, TRAJ43)
CAVNNDMRFGAGTRLTV

SEQ ID NO: 195376 - protein, 14 aa, Homo sapiens
  CDR3 for beta chain variable domain of TCR clone 97688 (TRBV25-1, TRBJ1-1)
CASTHLGGNTEAFF

SEQ ID NO: 195377 - protein, 15 aa, Homo sapiens
  CDR3 for alpha chain variable domain of TCR clone 97689 (TRAV12-3, TRAJ49)
CAMAVTPNTGNQFYF

SEQ ID NO: 195378 - protein, 18 aa, Homo sapiens
  CDR3 for beta chain variable domain of TCR clone 97689 (TRBV4-1, TRBJ1-5)
CASSQDPRGQGINQPQHF

SEQ ID NO: 195379 - protein, 12 aa, Homo sapiens
  CDR3 for alpha chain variable domain of TCR clone 97690 (TRAV21, TRAJ49)
CAVNDGGNQFYF

SEQ ID NO: 195380 - protein, 12 aa, Homo sapiens
  CDR3 for beta chain variable domain of TCR clone 97690 (TRBV12-4, TRBJ2-7)
CASSLGGYEQYF

SEQ ID NO: 195381 - protein, 15 aa, Homo sapiens
  CDR3 for alpha chain variable domain of TCR clone 97691 (TRAV26-1, TRAJ44)
CIVRIGTGTASKLTF

SEQ ID NO: 195382 - protein, 15 aa, Homo sapiens
  CDR3 for beta chain variable domain of TCR clone 97691 (TRBV6-3, TRBJ2-7)
CASSSPGTVFYEQYF

SEQ ID NO: 195383 - protein, 13 aa, Homo sapiens
  CDR3 for alpha chain variable domain of TCR clone 97692 (TRAV35, TRAJ36)
CAGPRIGANNLFF

SEQ ID NO: 195384 - protein, 15 aa, Homo sapiens
  CDR3 for beta chain variable domain of TCR clone 97692 (TRBV28, TRBJ2-5)
CASRPPWSYQETQYF

SEQ ID NO: 195385 - protein, 13 aa, Homo sapiens
  CDR3 for alpha chain variable domain of TCR clone 97693 (TRAV2, TRAJ40)
CAVFTSGTYKYIF

SEQ ID NO: 195386 - protein, 12 aa, Homo sapiens
  CDR3 for beta chain variable domain of TCR clone 97693 (TRBV11-2, TRBJ2-1)
CASSPGNNEQFF

SEQ ID NO: 195387 - protein, 15 aa, Homo sapiens
  CDR3 for alpha chain variable domain of TCR clone 97694 (TRAV8-4, TRAJ37)
CAVTYGSSNTGKLIF

SEQ ID NO: 195388 - protein, 12 aa, Homo sapiens
  CDR3 for beta chain variable domain of TCR clone 97694 (TRBV12-4, TRBJ1-3)
CASSFSGNTIYF

SEQ ID NO: 195389 - protein, 15 aa, Homo sapiens
  CDR3 for alpha chain variable domain of TCR clone 97695 (TRAV8-4, TRAJ53)
CAVSDGGGSNYKMTF

SEQ ID NO: 195390 - protein, 15 aa, Homo sapiens
  CDR3 for beta chain variable domain of TCR clone 97695 (TRBV19, TRBJ2-5)
CASHGLAGAQETQYF

SEQ ID NO: 195391 - protein, 10 aa, Homo sapiens
  CDR3 for alpha chain variable domain of TCR clone 97696 (TRAV5, TRAJ34)
CAEDTDKLIF

SEQ ID NO: 195392 - protein, 12 aa, Homo sapiens
  CDR3 for beta chain variable domain of TCR clone 97696 (TRBV11-2, TRBJ2-2)
CASSLGGGELLF

SEQ ID NO: 195393 - protein, 16 aa, Homo sapiens
  CDR3 for alpha chain variable domain of TCR clone 97697 (TRAV13-1, TRAJ17)
CAASKGVKAAGNKLTF

SEQ ID NO: 195394 - protein, 15 aa, Homo sapiens
  CDR3 for beta chain variable domain of TCR clone 97697 (TRBV20-1, TRBJ1-5)
CSAREGGYSNQHQHF

SEQ ID NO: 195395 - protein, 14 aa, Homo sapiens
  CDR3 for alpha chain variable domain of TCR clone 97698 (TRAV2, TRAJ9)
CAVEDRSGGFKTIF

SEQ ID NO: 195396 - protein, 13 aa, Homo sapiens
  CDR3 for beta chain variable domain of TCR clone 97698 (TRBV20-1, TRBJ1-1)
CSAPLGGGTEAFF

SEQ ID NO: 195397 - protein, 14 aa, Homo sapiens
  CDR3 for alpha chain variable domain of TCR clone 97699 (TRAV12-2, TRAJ13)
CAVKKTGGYQKVTF

SEQ ID NO: 195398 - protein, 16 aa, Homo sapiens
  CDR3 for beta chain variable domain of TCR clone 97699 (TRBV4-1, TRBJ1-4)
CASSQDLRRGGEKLFF

SEQ ID NO: 195399 - protein, 13 aa, Homo sapiens
  CDR3 for alpha chain variable domain of TCR clone 97700 (TRAV8-6, TRAJ49)
CAVITNTGNQFYF

SEQ ID NO: 195400 - protein, 17 aa, Homo sapiens
  CDR3 for beta chain variable domain of TCR clone 97700 (TRBV28, TRBJ2-1)
CASTGPGLAVSEDEQFF

SEQ ID NO: 195401 - protein, 13 aa, Homo sapiens
  CDR3 for alpha chain variable domain of TCR clone 97701 (TRAV35, TRAJ42)
CVPYGGSQGNLIF

SEQ ID NO: 195402 - protein, 18 aa, Homo sapiens
  CDR3 for beta chain variable domain of TCR clone 97701 (TRBV13, TRBJ2-6)
CASSPMTSGGSGANVLTF

SEQ ID NO: 195403 - protein, 15 aa, Homo sapiens
  CDR3 for alpha chain variable domain of TCR clone 97702 (TRAV12-3, TRAJ6)
CAMSATTGGSYIPTF

SEQ ID NO: 195404 - protein, 11 aa, Homo sapiens
  CDR3 for beta chain variable domain of TCR clone 97702 (TRBV29-1, TRBJ2-5)
CSEDRTGTQYF

SEQ ID NO: 195405 - protein, 10 aa, Homo sapiens
  CDR3 for alpha chain variable domain of TCR clone 97703 (TRAV13-1, TRAJ26)
CAPYGQNFVF

SEQ ID NO: 195406 - protein, 14 aa, Homo sapiens
  CDR3 for beta chain variable domain of TCR clone 97703 (TRBV28, TRBJ2-3)
CQQPELGGTDTQYF

SEQ ID NO: 195407 - protein, 16 aa, Homo sapiens
  CDR3 for alpha chain variable domain of TCR clone 97704 (TRAV30, TRAJ24)
CGTEIVDADSWGKFQF

SEQ ID NO: 195408 - protein, 16 aa, Homo sapiens
  CDR3 for beta chain variable domain of TCR clone 97704 (TRBV28, TRBJ2-7)
CASSLFFETGGSEQYF

SEQ ID NO: 195409 - protein, 14 aa, Homo sapiens
  CDR3 for alpha chain variable domain of TCR clone 97705 (TRAV13-1, TRAJ40)
CAASMTLGTYKYIF

SEQ ID NO: 195410 - protein, 15 aa, Homo sapiens
  CDR3 for beta chain variable domain of TCR clone 97705 (TRBV7-3, TRBJ2-1)
CASSPTGGGEVEQFF

SEQ ID NO: 195411 - protein, 14 aa, Homo sapiens
  CDR3 for alpha chain variable domain of TCR clone 97706 (TRAV1-1, TRAJ27)
CAVIYNTNAGKSTF

SEQ ID NO: 195412 - protein, 14 aa, Homo sapiens
  CDR3 for beta chain variable domain of TCR clone 97706 (TRBV12-4, TRBJ1-1)
CASSLGTGGTEAFF

SEQ ID NO: 195413 - protein, 13 aa, Homo sapiens
  CDR3 for alpha chain variable domain of TCR clone 97707 (TRAV13-1, TRAJ5)
CAASDTGRRALTF

SEQ ID NO: 195414 - protein, 12 aa, Homo sapiens
  CDR3 for beta chain variable domain of TCR clone 97707 (TRBV28, TRBJ2-3)
CACSLYRDTQYF

SEQ ID NO: 195415 - protein, 12 aa, Homo sapiens
  CDR3 for alpha chain variable domain of TCR clone 97708 (TRAV27, TRAJ9)
CAGESGGFKTIF

SEQ ID NO: 195416 - protein, 14 aa, Homo sapiens
  CDR3 for beta chain variable domain of TCR clone 97708 (TRBV11-1, TRBJ2-7)
CASSFRQGSYEQYF

SEQ ID NO: 195417 - protein, 16 aa, Homo sapiens
  CDR3 for alpha chain variable domain of TCR clone 97709 (TRAV14/DV4, TRAJ53)
CAMREGGGGSNYKLTF

SEQ ID NO: 195418 - protein, 15 aa, Homo sapiens
  CDR3 for beta chain variable domain of TCR clone 97709 (TRBV5-1, TRBJ2-1)
CASSPPRAPYNEQFF

SEQ ID NO: 195419 - protein, 13 aa, Homo sapiens
  CDR3 for alpha chain variable domain of TCR clone 97710 (TRAV27, TRAJ45)
CRSSGGGADGLTF

SEQ ID NO: 195420 - protein, 11 aa, Homo sapiens
  CDR3 for beta chain variable domain of TCR clone 97710 (TRBV29-1, TRBJ2-5)
CSEDRTGTQYF

SEQ ID NO: 195421 - protein, 15 aa, Homo sapiens
  CDR3 for alpha chain variable domain of TCR clone 97711 (TRAV12-3, TRAJ42)
CAMSGHGGSRGNLIF

SEQ ID NO: 195422 - protein, 13 aa, Homo sapiens
  CDR3 for beta chain variable domain of TCR clone 97711 (TRBV19, TRBJ2-5)
CASSGRAGETQYF

SEQ ID NO: 195423 - protein, 11 aa, Homo sapiens
  CDR3 for alpha chain variable domain of TCR clone 97712 (TRAV13-2, TRAJ47)
CAEIRGNKLVF

SEQ ID NO: 195424 - protein, 14 aa, Homo sapiens
  CDR3 for beta chain variable domain of TCR clone 97712 (TRBV7-6, TRBJ2-3)
CASSLGTVTDTQYF

SEQ ID NO: 195425 - protein, 11 aa, Homo sapiens
  CDR3 for alpha chain variable domain of TCR clone 97713 (TRAV3, TRAJ21)
CAVGNFDKFYF

SEQ ID NO: 195426 - protein, 15 aa, Homo sapiens
  CDR3 for beta chain variable domain of TCR clone 97713 (TRBV5-1, TRBJ2-1)
CASSLVANSYNEQFF

SEQ ID NO: 195427 - protein, 15 aa, Homo sapiens
  CDR3 for alpha chain variable domain of TCR clone 97714 (TRAV35, TRAJ40)
CAGQLGTSGTYKYIF

SEQ ID NO: 195428 - protein, 14 aa, Homo sapiens
  CDR3 for beta chain variable domain of TCR clone 97714 (TRBV7-3, TRBJ2-1)
CSSSLAGGTNEQFF

SEQ ID NO: 195429 - protein, 15 aa, Homo sapiens
  CDR3 for alpha chain variable domain of TCR clone 97715 (TRAV4, TRAJ39)
CLVGPNNNAGNMLTF

SEQ ID NO: 195430 - protein, 14 aa, Homo sapiens
  CDR3 for beta chain variable domain of TCR clone 97715 (TRBV19, TRBJ2-1)
CASPTFVLSDEQFF

SEQ ID NO: 195431 - protein, 13 aa, Homo sapiens
  CDR3 for alpha chain variable domain of TCR clone 97716 (TRAV12-1, TRAJ7)
CVVNMRGNNRLAF

SEQ ID NO: 195432 - protein, 16 aa, Homo sapiens
  CDR3 for beta chain variable domain of TCR clone 97716 (TRBV7-3, TRBJ2-2)
CASSLKRGTLSGELFF

SEQ ID NO: 195433 - protein, 14 aa, Homo sapiens
  CDR3 for alpha chain variable domain of TCR clone 97717 (TRAV8-1, TRAJ23)
CAVGTYNQGGKLIF

SEQ ID NO: 195434 - protein, 14 aa, Homo sapiens
  CDR3 for beta chain variable domain of TCR clone 97717 (TRBV25-1, TRBJ1-1)
CASTHLGGNTEAFF

SEQ ID NO: 195435 - protein, 15 aa, Homo sapiens
  CDR3 for alpha chain variable domain of TCR clone 97718 (TRAV2, TRAJ15)
CAVEDRGQAGTALIF

SEQ ID NO: 195436 - protein, 13 aa, Homo sapiens
  CDR3 for beta chain variable domain of TCR clone 97718 (TRBV10-2, TRBJ2-7)
CASGAGGGYEQYF

SEQ ID NO: 195437 - protein, 14 aa, Homo sapiens
  CDR3 for alpha chain variable domain of TCR clone 97719 (TRAV13-1, TRAJ44)
CAAKATGTASKLTF

SEQ ID NO: 195438 - protein, 15 aa, Homo sapiens
  CDR3 for beta chain variable domain of TCR clone 97719 (TRBV7-2, TRBJ2-7)
CASSWGQGAIYEQYF

SEQ ID NO: 195439 - protein, 16 aa, Homo sapiens
  CDR3 for alpha chain variable domain of TCR clone 97720 (TRAV30, TRAJ24)
SGTEIVDADSWGKFQF

SEQ ID NO: 195440 - protein, 12 aa, Homo sapiens
  CDR3 for beta chain variable domain of TCR clone 97720 (TRBV11-2, TRBJ2-2)
CASSLGGGELFF

SEQ ID NO: 195441 - protein, 12 aa, Homo sapiens
  CDR3 for alpha chain variable domain of TCR clone 97721 (TRAV1-1, TRAJ20)
CAVREDDYKLSF

SEQ ID NO: 195442 - protein, 13 aa, Homo sapiens
  CDR3 for beta chain variable domain of TCR clone 97721 (TRBV4-1, TRBJ2-2)
CASSQENTGELFF

SEQ ID NO: 195443 - protein, 11 aa, Homo sapiens
  CDR3 for alpha chain variable domain of TCR clone 97722 (TRAV21, TRAJ34)
CAHYNTDKLIF

SEQ ID NO: 195444 - protein, 15 aa, Homo sapiens
  CDR3 for beta chain variable domain of TCR clone 97722 (TRBV7-2, TRBJ2-7)
CASSLSSGRTYEQYF

SEQ ID NO: 195445 - protein, 12 aa, Homo sapiens
  CDR3 for alpha chain variable domain of TCR clone 97723 (TRAV27, TRAJ9)
CAGESGGFKTIF

SEQ ID NO: 195446 - protein, 18 aa, Homo sapiens
  CDR3 for beta chain variable domain of TCR clone 97723 (TRBV10-2, TRBJ2-2)
CISAQAVHRQADAGELFF

SEQ ID NO: 195447 - protein, 19 aa, Homo sapiens
  CDR3 for alpha chain variable domain of TCR clone 97724 (TRAV40, )
CLPIPDIQNTDPAVYQLRD

SEQ ID NO: 195448 - protein, 15 aa, Homo sapiens
  CDR3 for beta chain variable domain of TCR clone 97724 (TRBV2, TRBJ1-2)
CASSEIGGANYGYTF

SEQ ID NO: 195449 - protein, 13 aa, Homo sapiens
  CDR3 for alpha chain variable domain of TCR clone 97725 (TRAV21, TRAJ36)
WAVIKTGANNLFF

SEQ ID NO: 195450 - protein, 13 aa, Homo sapiens
  CDR3 for beta chain variable domain of TCR clone 97725 (TRBV29-1, TRBJ2-3)
CSATRGGRDTQYF

SEQ ID NO: 195451 - protein, 12 aa, Homo sapiens
  CDR3 for alpha chain variable domain of TCR clone 97726 (TRAV9-2, TRAJ26)
CALRGYGQNFVF

SEQ ID NO: 195452 - protein, 14 aa, Homo sapiens
  CDR3 for beta chain variable domain of TCR clone 97726 (TRBV4-1, TRBJ2-2)
CASSQAVNTGELFF

SEQ ID NO: 195453 - protein, 18 aa, Homo sapiens
  CDR3 for alpha chain variable domain of TCR clone 97727 (TRAV26-1, TRAJ52)
SIVRVEGAGGTSYGKLTF

SEQ ID NO: 195454 - protein, 13 aa, Homo sapiens
  CDR3 for beta chain variable domain of TCR clone 97727 (TRBV7-3, TRBJ1-2)
CASSLKRGYGYTF

SEQ ID NO: 195455 - protein, 14 aa, Homo sapiens
  CDR3 for alpha chain variable domain of TCR clone 97728 (TRAV1-2, TRAJ8)
CSVREDTGFQKLVF

SEQ ID NO: 195456 - protein, 14 aa, Homo sapiens
  CDR3 for beta chain variable domain of TCR clone 97728 (TRBV7-9, TRBJ1-1)
CASSLGGANTEAFF

SEQ ID NO: 195457 - protein, 12 aa, Homo sapiens
  CDR3 for alpha chain variable domain of TCR clone 97729 (TRAV1-1, TRAJ39)
CAVPVVGNMLTF

SEQ ID NO: 195458 - protein, 15 aa, Homo sapiens
  CDR3 for beta chain variable domain of TCR clone 97729 (TRBV19, TRBJ1-6)
CASSTQGAVVSPLHF

SEQ ID NO: 195459 - protein, 18 aa, Homo sapiens
  CDR3 for alpha chain variable domain of TCR clone 97730 (TRAV21, TRAJ52)
CAVRPSPAGGTSYGKLTF

SEQ ID NO: 195460 - protein, 13 aa, Homo sapiens
  CDR3 for beta chain variable domain of TCR clone 97730 (TRBV7-3, TRBJ1-1)
CARSQDWGAEAFF

SEQ ID NO: 195461 - protein, 14 aa, Homo sapiens
  CDR3 for alpha chain variable domain of TCR clone 97731 (TRAV2, TRAJ9)
CAVEDRSGGFKTIF

SEQ ID NO: 195462 - protein, 13 aa, Homo sapiens
  CDR3 for beta chain variable domain of TCR clone 97731 (TRBV11-2, TRBJ2-5)
CASSRGPSETQYF

SEQ ID NO: 195463 - protein, 16 aa, Homo sapiens
  CDR3 for alpha chain variable domain of TCR clone 97732 (TRAV21, TRAJ37)
CAVRTAGSSNTGKLIF

SEQ ID NO: 195464 - protein, 13 aa, Homo sapiens
  CDR3 for beta chain variable domain of TCR clone 97732 (TRBV12-4, TRBJ1-1)
CASSPGTGFEAFF

SEQ ID NO: 195465 - protein, 13 aa, Homo sapiens
  CDR3 for alpha chain variable domain of TCR clone 97733 (TRAV21, TRAJ27)
CAARPGNAGKSTF

SEQ ID NO: 195466 - protein, 14 aa, Homo sapiens
  CDR3 for beta chain variable domain of TCR clone 97733 (TRBV28, TRBJ1-2)
CASRIQGANYGYTF

SEQ ID NO: 195467 - protein, 11 aa, Homo sapiens
  CDR3 for alpha chain variable domain of TCR clone 97734 (TRAV12-1, TRAJ34)
CVVNKGRELIF

SEQ ID NO: 195468 - protein, 12 aa, Homo sapiens
  CDR3 for beta chain variable domain of TCR clone 97734 (TRBV2, TRBJ2-1)
CAYGPHGNEQFF

SEQ ID NO: 195469 - protein, 13 aa, Homo sapiens
  CDR3 for alpha chain variable domain of TCR clone 97735 (TRAV1-2, TRAJ9)
CAALNTGGFKTIF

SEQ ID NO: 195470 - protein, 14 aa, Homo sapiens
  CDR3 for beta chain variable domain of TCR clone 97735 (TRBV5-5, TRBJ1-4)
CASSPRGYNEKLFF

SEQ ID NO: 195471 - protein, 13 aa, Homo sapiens
  CDR3 for alpha chain variable domain of TCR clone 97736 (TRAV2, TRAJ40)
CAVVTSGTYKYIF

SEQ ID NO: 195472 - protein, 12 aa, Homo sapiens
  CDR3 for beta chain variable domain of TCR clone 97736 (TRBV14, TRBJ2-7)
CASSLYKDEQYF

SEQ ID NO: 195473 - protein, 14 aa, Homo sapiens
  CDR3 for alpha chain variable domain of TCR clone 97737 (TRAV12-3, TRAJ10)
SHLPLTGGGNKLTF

SEQ ID NO: 195474 - protein, 14 aa, Homo sapiens
  CDR3 for beta chain variable domain of TCR clone 97737 (TRBV2, TRBJ2-5)
CASSEVLAQETQYF

SEQ ID NO: 195475 - protein, 14 aa, Homo sapiens
  CDR3 for alpha chain variable domain of TCR clone 97738 (TRAV8-4, TRAJ9)
CAVRINTGGFKTIF

SEQ ID NO: 195476 - protein, 12 aa, Homo sapiens
  CDR3 for beta chain variable domain of TCR clone 97738 (TRBV7-6, TRBJ2-7)
CASSLADSEQYF

SEQ ID NO: 195477 - protein, 11 aa, Homo sapiens
  CDR3 for alpha chain variable domain of TCR clone 97739 (TRAV13-1, TRAJ5)
CAPKGRRALTF

SEQ ID NO: 195478 - protein, 13 aa, Homo sapiens
  CDR3 for beta chain variable domain of TCR clone 97739 (TRBV19, TRBJ1-2)
CASSQGQVYGYTF

SEQ ID NO: 195479 - protein, 15 aa, Homo sapiens
  CDR3 for alpha chain variable domain of TCR clone 97740 (TRAV3, TRAJ17)
CAVSPKEAAGNKLTF

SEQ ID NO: 195480 - protein, 12 aa, Homo sapiens
  CDR3 for beta chain variable domain of TCR clone 97740 (TRBV7-9, TRBJ1-6)
CASSLMTAPLHF

SEQ ID NO: 195481 - protein, 15 aa, Homo sapiens
  CDR3 for alpha chain variable domain of TCR clone 97741 (TRAV17, TRAJ37)
CATDHGSSNTGKLIF

SEQ ID NO: 195482 - protein, 13 aa, Homo sapiens
  CDR3 for beta chain variable domain of TCR clone 97741 (TRBV7-3, TRBJ1-1)
CASSQDWGAEAFF

SEQ ID NO: 195483 - protein, 16 aa, Homo sapiens
  CDR3 for alpha chain variable domain of TCR clone 97742 (TRAV3, TRAJ37)
CAVRPHGSGNTGKLIF

SEQ ID NO: 195484 - protein, 13 aa, Homo sapiens
  CDR3 for beta chain variable domain of TCR clone 97742 (TRBV12-4, TRBJ1-1)
CASSPGTGFEAFF

SEQ ID NO: 195485 - protein, 15 aa, Homo sapiens
  CDR3 for alpha chain variable domain of TCR clone 97743 (TRAV17, TRAJ16)
CATALRFSDGHKLLF

SEQ ID NO: 195486 - protein, 12 aa, Homo sapiens
  CDR3 for beta chain variable domain of TCR clone 97743 (TRBV2, TRBJ2-7)
CASSDPDYEQYF

SEQ ID NO: 195487 - protein, 14 aa, Homo sapiens
  CDR3 for alpha chain variable domain of TCR clone 97744 (TRAV1-2, TRAJ16)
CAVNRFSDGQKLLF

SEQ ID NO: 195488 - protein, 13 aa, Homo sapiens
  CDR3 for beta chain variable domain of TCR clone 97744 (TRBV19, TRBJ2-7)
CASSTGGSYEQYF

SEQ ID NO: 195489 - protein, 13 aa, Homo sapiens
  CDR3 for alpha chain variable domain of TCR clone 97745 (TRAV36/DV7, TRAJ54)
CAVLIQGAQKLVF

SEQ ID NO: 195490 - protein, 13 aa, Homo sapiens
  CDR3 for beta chain variable domain of TCR clone 97745 (TRBV29-1, TRBJ2-4)
YSVGEGTKNIQYF

SEQ ID NO: 195491 - protein, 11 aa, Homo sapiens
  CDR3 for alpha chain variable domain of TCR clone 97746 (TRAV13-1, TRAJ30)
CAASIDDKIIF

SEQ ID NO: 195492 - protein, 14 aa, Homo sapiens
  CDR3 for beta chain variable domain of TCR clone 97746 (TRBV19, TRBJ2-1)
CASPTFVLSGEQFF

SEQ ID NO: 195493 - protein, 14 aa, Homo sapiens
  CDR3 for alpha chain variable domain of TCR clone 97747 (TRAV35, TRAJ33)
CCPRGRDSNYQLIW

SEQ ID NO: 195494 - protein, 11 aa, Homo sapiens
  CDR3 for beta chain variable domain of TCR clone 97747 (TRBV10-3, TRBJ2-7)
CAISEGLEQYF

SEQ ID NO: 195495 - protein, 13 aa, Homo sapiens
  CDR3 for alpha chain variable domain of TCR clone 97748 (TRAV23/DV6, TRAJ22)
CAPYSGSARQLTF

SEQ ID NO: 195496 - protein, 15 aa, Homo sapiens
  CDR3 for beta chain variable domain of TCR clone 97748 (TRBV11-2, TRBJ1-6)
CASSLDPWAVSPLHY

SEQ ID NO: 195497 - protein, 10 aa, Homo sapiens
  CDR3 for alpha chain variable domain of TCR clone 97749 (TRAV3, TRAJ30)
CAVREIEIIF

SEQ ID NO: 195498 - protein, 12 aa, Homo sapiens
  CDR3 for beta chain variable domain of TCR clone 97749 (TRBV20-1, TRBJ2-3)
CGADGAGDTQYF

SEQ ID NO: 195499 - protein, 16 aa, Homo sapiens
  CDR3 for alpha chain variable domain of TCR clone 97750 (TRAV3, TRAJ37)
CAVRGKGSGNTGKLIF

SEQ ID NO: 195500 - protein, 16 aa, Homo sapiens
  CDR3 for beta chain variable domain of TCR clone 97750 (TRBV12-4, TRBJ1-5)
CASSRPVGGSKQPQHF

SEQ ID NO: 195501 - protein, 14 aa, Homo sapiens
  CDR3 for alpha chain variable domain of TCR clone 97751 (TRAV13-1, TRAJ35)
CAASKGGFGNVLHC

SEQ ID NO: 195502 - protein, 14 aa, Homo sapiens
  CDR3 for beta chain variable domain of TCR clone 97751 (TRBV7-9, TRBJ2-1)
CASSPRDSLHEQFF

SEQ ID NO: 195503 - protein, 19 aa, Homo sapiens
  CDR3 for alpha chain variable domain of TCR clone 97752 (TRAV3, TRAJ6)
CAVRDRNPSRSGGSYIPTF

SEQ ID NO: 195504 - protein, 13 aa, Homo sapiens
  CDR3 for beta chain variable domain of TCR clone 97752 (TRBV4-1, TRBJ2-1)
CASSQEAQYEQFF

SEQ ID NO: 195505 - protein, 16 aa, Homo sapiens
  CDR3 for alpha chain variable domain of TCR clone 97753 (TRAV16, TRAJ4)
CALSRMFSGGYNKLIF

SEQ ID NO: 195506 - protein, 14 aa, Homo sapiens
  CDR3 for beta chain variable domain of TCR clone 97753 (TRBV18, TRBJ2-5)
CASSPGVSQETQYF

SEQ ID NO: 195507 - protein, 18 aa, Homo sapiens
  CDR3 for alpha chain variable domain of TCR clone 97754 (TRAV13-1, TRAJ52)
CAAKNPNAGGTSYGKLTF

SEQ ID NO: 195508 - protein, 15 aa, Homo sapiens
  CDR3 for beta chain variable domain of TCR clone 97754 (TRBV25-1, TRBJ1-4)
CASSGSGTGIEKLFF

SEQ ID NO: 195509 - protein, 12 aa, Homo sapiens
  CDR3 for alpha chain variable domain of TCR clone 97755 (TRAV3, TRAJ39)
CAVIEWSNMLTF

SEQ ID NO: 195510 - protein, 14 aa, Homo sapiens
  CDR3 for beta chain variable domain of TCR clone 97755 (TRBV7-8, TRBJ2-3)
FASSFPDGQDTQYF

SEQ ID NO: 195511 - protein, 11 aa, Homo sapiens
  CDR3 for alpha chain variable domain of TCR clone 97756 (TRAV21, TRAJ39)
LLVNAGNMLTF

SEQ ID NO: 195512 - protein, 15 aa, Homo sapiens
  CDR3 for beta chain variable domain of TCR clone 97756 (TRBV29-1, TRBJ2-1)
CSGRDRKSSYSEPFF

SEQ ID NO: 195513 - protein, 15 aa, Homo sapiens
  CDR3 for alpha chain variable domain of TCR clone 97757 (TRAV1-2, TRAJ15)
CAVDVMGSAGTALIF

SEQ ID NO: 195514 - protein, 18 aa, Homo sapiens
  CDR3 for beta chain variable domain of TCR clone 97757 (TRBV4-1, TRBJ2-7)
CASSQAPGTGTLGDEQYF

SEQ ID NO: 195515 - protein, 10 aa, Homo sapiens
  CDR3 for alpha chain variable domain of TCR clone 97758 (TRAV21, TRAJ31)
CAVDNARLMF

SEQ ID NO: 195516 - protein, 13 aa, Homo sapiens
  CDR3 for beta chain variable domain of TCR clone 97758 (TRBV12-4, TRBJ1-5)
CASSPDRAQPQHF

SEQ ID NO: 195517 - protein, 13 aa, Homo sapiens
  CDR3 for alpha chain variable domain of TCR clone 97759 (TRAV3, TRAJ36)
CAVRDIGANNLFF

SEQ ID NO: 195518 - protein, 15 aa, Homo sapiens
  CDR3 for beta chain variable domain of TCR clone 97759 (TRBV24-1, TRBJ2-1)
CATSGSGGFYNEQFF

SEQ ID NO: 195519 - protein, 15 aa, Homo sapiens
  CDR3 for alpha chain variable domain of TCR clone 97760 (TRAV20, TRAJ53)
CAVQASGGSNYKLTF

SEQ ID NO: 195520 - protein, 14 aa, Homo sapiens
  CDR3 for beta chain variable domain of TCR clone 97760 (TRBV19, TRBJ2-1)
CASPTFVLSGEQFF

SEQ ID NO: 195521 - protein, 15 aa, Homo sapiens
  CDR3 for alpha chain variable domain of TCR clone 97761 (TRAV8-4, TRAJ7)
CALSGGNYGNNRLAF

SEQ ID NO: 195522 - protein, 11 aa, Homo sapiens
  CDR3 for beta chain variable domain of TCR clone 97761 (TRBV20-1, TRBJ2-1)
CSLSSGSEQFF

SEQ ID NO: 195523 - protein, 12 aa, Homo sapiens
  CDR3 for alpha chain variable domain of TCR clone 97762 (TRAV26-1, TRAJ26)
CIVFIYGKNFVF

SEQ ID NO: 195524 - protein, 13 aa, Homo sapiens
  CDR3 for beta chain variable domain of TCR clone 97762 (TRBV27, TRBJ1-1)
CASSLSIGAEAFF

SEQ ID NO: 195525 - protein, 12 aa, Homo sapiens
  CDR3 for alpha chain variable domain of TCR clone 97763 (TRAV29/DV5, TRAJ49)
CAATDTGNQFYF

SEQ ID NO: 195526 - protein, 19 aa, Homo sapiens
  CDR3 for beta chain variable domain of TCR clone 97763 (TRBV25-1, TRBJ2-2)
YAILVYRVDRGRKTGELFF

SEQ ID NO: 195527 - protein, 13 aa, Homo sapiens
  CDR3 for alpha chain variable domain of TCR clone 97764 (TRAV12-2, TRAJ47)
CAVVMEYGNKLVF

SEQ ID NO: 195528 - protein, 14 aa, Homo sapiens
  CDR3 for beta chain variable domain of TCR clone 97764 (TRBV4-1, TRBJ1-5)
CASSQGPTNQPQHF

SEQ ID NO: 195529 - protein, 11 aa, Homo sapiens
  CDR3 for alpha chain variable domain of TCR clone 97765 (TRAV13-1, TRAJ30)
CAASRDDKIIF

SEQ ID NO: 195530 - protein, 12 aa, Homo sapiens
  CDR3 for beta chain variable domain of TCR clone 97765 (TRBV11-2, TRBJ2-2)
CASSLGGGELFF

SEQ ID NO: 195531 - protein, 18 aa, Homo sapiens
  CDR3 for alpha chain variable domain of TCR clone 97766 (TRAV21, TRAJ52)
CAVRPSPAGGTSYGKLTF

SEQ ID NO: 195532 - protein, 14 aa, Homo sapiens
  CDR3 for beta chain variable domain of TCR clone 97766 (TRBV5-5, TRBJ1-2)
CASSLDPYNYGYTF

SEQ ID NO: 195533 - protein, 18 aa, Homo sapiens
  CDR3 for alpha chain variable domain of TCR clone 97767 (TRAV17, TRAJ45)
CATSLDLYSGGGADGLTF

SEQ ID NO: 195534 - protein, 15 aa, Homo sapiens
  CDR3 for beta chain variable domain of TCR clone 97767 (TRBV11-2, TRBJ2-1)
CDSSKNRGLIYEQFF

SEQ ID NO: 195535 - protein, 11 aa, Homo sapiens
  CDR3 for alpha chain variable domain of TCR clone 97768 (TRAV2, TRAJ33)
CAVDSNYQLIW

SEQ ID NO: 195536 - protein, 11 aa, Homo sapiens
  CDR3 for beta chain variable domain of TCR clone 97768 (TRBV11-2, TRBJ2-2)
CASSLPGELFF

SEQ ID NO: 195537 - protein, 14 aa, Homo sapiens
  CDR3 for alpha chain variable domain of TCR clone 97769 (TRAV12-3, TRAJ12)
FAMSEVDSSYKLIF

SEQ ID NO: 195538 - protein, 12 aa, Homo sapiens
  CDR3 for beta chain variable domain of TCR clone 97769 (TRBV18, TRBJ1-4)
CASSPSREKLFF

SEQ ID NO: 195539 - protein, 14 aa, Homo sapiens
  CDR3 for alpha chain variable domain of TCR clone 97770 (TRAV8-2, TRAJ4)
CVVSPSGGYNKLIF

SEQ ID NO: 195540 - protein, 14 aa, Homo sapiens
  CDR3 for beta chain variable domain of TCR clone 97770 (TRBV7-2, TRBJ1-1)
CASSFLTGTTEAFF

SEQ ID NO: 195541 - protein, 14 aa, Homo sapiens
  CDR3 for alpha chain variable domain of TCR clone 97771 (TRAV17, TRAJ57)
CATDPQGGSEKLVF

SEQ ID NO: 195542 - protein, 14 aa, Homo sapiens
  CDR3 for beta chain variable domain of TCR clone 97771 (TRBV18, TRBJ2-1)
CASSPPTSGGIVIF

SEQ ID NO: 195543 - protein, 14 aa, Homo sapiens
  CDR3 for alpha chain variable domain of TCR clone 97772 (TRAV12-2, TRAJ24)
CAVTPAESWGKLQF

SEQ ID NO: 195544 - protein, 12 aa, Homo sapiens
  CDR3 for beta chain variable domain of TCR clone 97772 (TRBV3-1, TRBJ2-1)
CASSQGSSGQFF

SEQ ID NO: 195545 - protein, 12 aa, Homo sapiens
  CDR3 for alpha chain variable domain of TCR clone 97773 (TRAV8-3, TRAJ20)
CAVDFNDYKLRF

SEQ ID NO: 195546 - protein, 13 aa, Homo sapiens
  CDR3 for beta chain variable domain of TCR clone 97773 (TRBV5-7, TRBJ2-3)
CASSLGRTDTQYF

SEQ ID NO: 195547 - protein, 13 aa, Homo sapiens
  CDR3 for alpha chain variable domain of TCR clone 97774 (TRAV1-1, TRAJ9)
CAAKNTGGFKTIF

SEQ ID NO: 195548 - protein, 13 aa, Homo sapiens
  CDR3 for beta chain variable domain of TCR clone 97774 (TRBV4-1, TRBJ2-2)
CASSQENTGELFF

SEQ ID NO: 195549 - protein, 15 aa, Homo sapiens
  CDR3 for alpha chain variable domain of TCR clone 97775 (TRAV26-1, TRAJ38)
CIVRAEGGNNRKLIW

SEQ ID NO: 195550 - protein, 14 aa, Homo sapiens
  CDR3 for beta chain variable domain of TCR clone 97775 (TRBV7-6, TRBJ2-5)
CASSCPSGSETQYF

SEQ ID NO: 195551 - protein, 14 aa, Homo sapiens
  CDR3 for alpha chain variable domain of TCR clone 97776 (TRAV13-1, TRAJ44)
RAAKATGTASKLTF

SEQ ID NO: 195552 - protein, 13 aa, Homo sapiens
  CDR3 for beta chain variable domain of TCR clone 97776 (TRBV5-5, TRBJ1-2)
CTSSFWRGEDYTF

SEQ ID NO: 195553 - protein, 12 aa, Homo sapiens
  CDR3 for alpha chain variable domain of TCR clone 97777 (TRAV13-1, TRAJ49)
CAAPNTGNQFYF

SEQ ID NO: 195554 - protein, 17 aa, Homo sapiens
  CDR3 for beta chain variable domain of TCR clone 97777 (TRBV25-1, TRBJ2-7)
CASSDARVVFSAYEQYF

SEQ ID NO: 195555 - protein, 14 aa, Homo sapiens
  CDR3 for alpha chain variable domain of TCR clone 97778 (TRAV12-3, TRAJ9)
CAMSPNTGGFKTIF

SEQ ID NO: 195556 - protein, 12 aa, Homo sapiens
  CDR3 for beta chain variable domain of TCR clone 97778 (TRBV12-5, TRBJ2-5)
CASGQGVETQYF

SEQ ID NO: 195557 - protein, 13 aa, Homo sapiens
  CDR3 for alpha chain variable domain of TCR clone 97779 (TRAV17, TRAJ5)
CALRGTGRRALTF

SEQ ID NO: 195558 - protein, 13 aa, Homo sapiens
  CDR3 for beta chain variable domain of TCR clone 97779 (TRBV4-2, TRBJ1-1)
CASSQSGNTEAFF

SEQ ID NO: 195559 - protein, 14 aa, Homo sapiens
  CDR3 for alpha chain variable domain of TCR clone 97780 (TRAV8-4, TRAJ9)
CAVRINTGGFKTIF

SEQ ID NO: 195560 - protein, 14 aa, Homo sapiens
  CDR3 for beta chain variable domain of TCR clone 97780 (TRBV6-1, TRBJ1-3)
CASVQGGGGNNIYF

SEQ ID NO: 195561 - protein, 15 aa, Homo sapiens
  CDR3 for alpha chain variable domain of TCR clone 97781 (TRAV8-3, TRAJ45)
CASSYSGGGADGLTF

SEQ ID NO: 195562 - protein, 16 aa, Homo sapiens
  CDR3 for beta chain variable domain of TCR clone 97781 (TRBV27, TRBJ2-2)
CANSFRGLVRTGELFF

SEQ ID NO: 195563 - protein, 13 aa, Homo sapiens
  CDR3 for alpha chain variable domain of TCR clone 97782 (TRAV39, TRAJ58)
CAGEETSGSRLTF

SEQ ID NO: 195564 - protein, 14 aa, Homo sapiens
  CDR3 for beta chain variable domain of TCR clone 97782 (TRBV6-1, TRBJ1-3)
CASVQGGGGNTIYF

SEQ ID NO: 195565 - protein, 12 aa, Homo sapiens
  CDR3 for alpha chain variable domain of TCR clone 97783 (TRAV8-3, TRAJ26)
CAGDNYGQNFVF

SEQ ID NO: 195566 - protein, 15 aa, Homo sapiens
  CDR3 for beta chain variable domain of TCR clone 97783 (TRBV11-2, TRBJ2-1)
CASSLGTSGLNEQFS

SEQ ID NO: 195567 - protein, 14 aa, Homo sapiens
  CDR3 for alpha chain variable domain of TCR clone 97784 (TRAV12-2, TRAJ13)
CAVAGSGGYQKVTF

SEQ ID NO: 195568 - protein, 14 aa, Homo sapiens
  CDR3 for beta chain variable domain of TCR clone 97784 (TRBV6-5, TRBJ2-7)
CASSCGVGEAEQYF

SEQ ID NO: 195569 - protein, 21 aa, Homo sapiens
  CDR3 for alpha chain variable domain of TCR clone 97785 (TRAV1-1, TRAJ30)
CLLLLRCEREGGENRDDKIIF

SEQ ID NO: 195570 - protein, 17 aa, Homo sapiens
  CDR3 for beta chain variable domain of TCR clone 97785 (TRBV7-8, TRBJ2-6)
CASHWGPYSSGANVLTF

SEQ ID NO: 195571 - protein, 16 aa, Homo sapiens
  CDR3 for alpha chain variable domain of TCR clone 97786 (TRAV14/DV4, TRAJ54)
CAMREGRIQGAQKLVF

SEQ ID NO: 195572 - protein, 13 aa, Homo sapiens
  CDR3 for beta chain variable domain of TCR clone 97786 (TRBV20-1, TRBJ1-1)
CSARGGGNTEAFF

SEQ ID NO: 195573 - protein, 16 aa, Homo sapiens
  CDR3 for alpha chain variable domain of TCR clone 97787 (TRAV30, TRAJ24)
CGTEIVDADSWGKFQF

SEQ ID NO: 195574 - protein, 15 aa, Homo sapiens
  CDR3 for beta chain variable domain of TCR clone 97787 (TRBV3-1, TRBJ2-2)
CASSQDWTRAGELFF

SEQ ID NO: 195575 - protein, 15 aa, Homo sapiens
  CDR3 for alpha chain variable domain of TCR clone 97788 (TRAV26-1, TRAJ38)
CIVRAEGGNNRKLLW

SEQ ID NO: 195576 - protein, 14 aa, Homo sapiens
  CDR3 for beta chain variable domain of TCR clone 97788 (TRBV7-6, TRBJ2-5)
CASSSPSGSETQYF

SEQ ID NO: 195577 - protein, 17 aa, Homo sapiens
  CDR3 for alpha chain variable domain of TCR clone 97789 (TRAV26-2, TRAJ37)
CILRELVGSSNTGKLIF

SEQ ID NO: 195578 - protein, 14 aa, Homo sapiens
  CDR3 for beta chain variable domain of TCR clone 97789 (TRBV6-6, TRBJ2-7)
CASSDSGAGYEQYF

SEQ ID NO: 195579 - protein, 14 aa, Homo sapiens
  CDR3 for alpha chain variable domain of TCR clone 97790 (TRAV12-2, TRAJ45)
CAVNIGGGADGLTF

SEQ ID NO: 195580 - protein, 15 aa, Homo sapiens
  CDR3 for beta chain variable domain of TCR clone 97790 (TRBV11-3, TRBJ2-3)
CASLKDGREGDTQYF

SEQ ID NO: 195581 - protein, 11 aa, Homo sapiens
  CDR3 for alpha chain variable domain of TCR clone 97791 (TRAV21, TRAJ34)
CAVTNTDKLIF

SEQ ID NO: 195582 - protein, 13 aa, Homo sapiens
  CDR3 for beta chain variable domain of TCR clone 97791 (TRBV5-5, TRBJ1-2)
CASSFWRGEDYAF

SEQ ID NO: 195583 - protein, 13 aa, Homo sapiens
  CDR3 for alpha chain variable domain of TCR clone 97792 (TRAV13-1, TRAJ21)
CAASIYSFNKFYF

SEQ ID NO: 195584 - protein, 14 aa, Homo sapiens
  CDR3 for beta chain variable domain of TCR clone 97792 (TRBV12-5, TRBJ2-5)
CASGSRTHQETQYF

SEQ ID NO: 195585 - protein, 14 aa, Homo sapiens
  CDR3 for alpha chain variable domain of TCR clone 97793 (TRAV34, TRAJ22)
CGADTSGSARQLTF

SEQ ID NO: 195586 - protein, 15 aa, Homo sapiens
  CDR3 for beta chain variable domain of TCR clone 97793 (TRBV10-3, TRBJ1-3)
CAISDSQGAGNTIYF

SEQ ID NO: 195587 - protein, 16 aa, Homo sapiens
  CDR3 for alpha chain variable domain of TCR clone 97794 (TRAV8-3, TRAJ13)
CAVGAYPSGGYQKVTF

SEQ ID NO: 195588 - protein, 13 aa, Homo sapiens
  CDR3 for beta chain variable domain of TCR clone 97794 (TRBV7-9, TRBJ1-2)
CASSLNQNYGYTF

SEQ ID NO: 195589 - protein, 14 aa, Homo sapiens
  CDR3 for alpha chain variable domain of TCR clone 97795 (TRAV2, TRAJ9)
CAVEDRSGGFKTIF

SEQ ID NO: 195590 - protein, 15 aa, Homo sapiens
  CDR3 for beta chain variable domain of TCR clone 97795 (TRBV4-1, TRBJ2-5)
CASSQWDLYQETQYF

SEQ ID NO: 195591 - protein, 11 aa, Homo sapiens
  CDR3 for alpha chain variable domain of TCR clone 97796 (TRAV2, TRAJ33)
CAVESNYQLIW

SEQ ID NO: 195592 - protein, 14 aa, Homo sapiens
  CDR3 for beta chain variable domain of TCR clone 97796 (TRBV19, TRBJ1-1)
CSTSGQIQNTEAFF

SEQ ID NO: 195593 - protein, 14 aa, Homo sapiens
  CDR3 for alpha chain variable domain of TCR clone 97797 (TRAV12-1, TRAJ27)
CGEHIRTNAGKSTF

SEQ ID NO: 195594 - protein, 20 aa, Homo sapiens
  CDR3 for beta chain variable domain of TCR clone 97797 (TRBV7-8, TRBJ2-2)
CASSHLFPGPTIHITGELFF

SEQ ID NO: 195595 - protein, 14 aa, Homo sapiens
  CDR3 for alpha chain variable domain of TCR clone 97798 (TRAV26-1, TRAJ45)
CIVRVVGGADGLTF

SEQ ID NO: 195596 - protein, 16 aa, Homo sapiens
  CDR3 for beta chain variable domain of TCR clone 97798 (TRBV7-9, TRBJ1-1)
CASSLTQVRSNTDAFF

SEQ ID NO: 195597 - protein, 14 aa, Homo sapiens
  CDR3 for alpha chain variable domain of TCR clone 97799 (TRAV8-6, TRAJ13)
CAVFSSGGYQKVTF

SEQ ID NO: 195598 - protein, 16 aa, Homo sapiens
  CDR3 for beta chain variable domain of TCR clone 97799 (TRBV10-3, TRBJ2-7)
CAISADFADRPYEQYF

SEQ ID NO: 195599 - protein, 15 aa, Homo sapiens
  CDR3 for alpha chain variable domain of TCR clone 97800 (TRAV3, TRAJ5)
CAVKDLDTGRRALTF

SEQ ID NO: 195600 - protein, 13 aa, Homo sapiens
  CDR3 for beta chain variable domain of TCR clone 97800 (TRBV12-4, TRBJ2-7)
CASSPTETYEQYF

SEQ ID NO: 195601 - protein, 14 aa, Homo sapiens
  CDR3 for alpha chain variable domain of TCR clone 97801 (TRAV4, TRAJ17)
CLVGDMAAGNKLTF

SEQ ID NO: 195602 - protein, 16 aa, Homo sapiens
  CDR3 for beta chain variable domain of TCR clone 97801 (TRBV7-3, TRBJ2-2)
CASSLKRGTLSGELFF

SEQ ID NO: 195603 - protein, 17 aa, Homo sapiens
  CDR3 for alpha chain variable domain of TCR clone 97802 (TRAV38-1, TRAJ28)
CAFMKPTSGAGSYQLTS

SEQ ID NO: 195604 - protein, 15 aa, Homo sapiens
  CDR3 for beta chain variable domain of TCR clone 97802 (TRBV5-1, TRBJ2-4)
CASSLGGGGSYIQYF

SEQ ID NO: 195605 - protein, 11 aa, Homo sapiens
  CDR3 for alpha chain variable domain of TCR clone 97803 (TRAV1-1, TRAJ20)
CAVFNDYKLSF

SEQ ID NO: 195606 - protein, 14 aa, Homo sapiens
  CDR3 for beta chain variable domain of TCR clone 97803 (TRBV19, TRBJ2-1)
RASSKDRGQDEQFF

SEQ ID NO: 195607 - protein, 16 aa, Homo sapiens
  CDR3 for alpha chain variable domain of TCR clone 97804 (TRAV30, TRAJ24)
CGTEIVDADSWGKFQF

SEQ ID NO: 195608 - protein, 19 aa, Homo sapiens
  CDR3 for beta chain variable domain of TCR clone 97804 (TRBV7-9, TRBJ2-1)
CASSHNRGALLRSYNEQFF

SEQ ID NO: 195609 - protein, 14 aa, Homo sapiens
  CDR3 for alpha chain variable domain of TCR clone 97805 (TRAV1-2, TRAJ16)
CAVNRFSAGQKLLF

SEQ ID NO: 195610 - protein, 13 aa, Homo sapiens
  CDR3 for beta chain variable domain of TCR clone 97805 (TRBV15, TRBJ1-6)
CATSGGLNSPLHF

SEQ ID NO: 195611 - protein, 15 aa, Homo sapiens
  CDR3 for alpha chain variable domain of TCR clone 97806 (TRAV26-1, TRAJ44)
CIVRANTGTASKLTF

SEQ ID NO: 195612 - protein, 16 aa, Homo sapiens
  CDR3 for beta chain variable domain of TCR clone 97806 (TRBV7-7, TRBJ2-1)
CASSLASGTSYNEHFF

SEQ ID NO: 195613 - protein, 13 aa, Homo sapiens
  CDR3 for alpha chain variable domain of TCR clone 97807 (TRAV29/DV5, TRAJ31)
CAASRNNNARLMF

SEQ ID NO: 195614 - protein, 15 aa, Homo sapiens
  CDR3 for beta chain variable domain of TCR clone 97807 (TRBV9, TRBJ1-6)
CASSVAGTGDPPLHF

SEQ ID NO: 195615 - protein, 13 aa, Homo sapiens
  CDR3 for alpha chain variable domain of TCR clone 97808 (TRAV38-2/DV8, TRAJ34)
CAYRNYDTDKLIF

SEQ ID NO: 195616 - protein, 15 aa, Homo sapiens
  CDR3 for beta chain variable domain of TCR clone 97808 (TRBV20-1, TRBJ2-5)
CSAEGTGGLQETQYF

SEQ ID NO: 195617 - protein, 16 aa, Homo sapiens
  CDR3 for alpha chain variable domain of TCR clone 97809 (TRAV4, TRAJ22)
CLVGDLYSGSARQLTF

SEQ ID NO: 195618 - protein, 13 aa, Homo sapiens
  CDR3 for beta chain variable domain of TCR clone 97809 (TRBV4-2, TRBJ1-1)
CASSQAGNTEAFF

SEQ ID NO: 195619 - protein, 22 aa, Homo sapiens
  CDR3 for alpha chain variable domain of TCR clone 97810 (TRAV27, TRAJ41)
CAVRTQIPDIQNPDPAAYQLRD

SEQ ID NO: 195620 - protein, 16 aa, Homo sapiens
  CDR3 for beta chain variable domain of TCR clone 97810 (TRBV5-1, TRBJ2-3)
CASSLGLAVYTDTQYF

SEQ ID NO: 195621 - protein, 12 aa, Homo sapiens
  CDR3 for alpha chain variable domain of TCR clone 97811 (TRAV3, TRAJ7)
CADLLWEQQTRF

SEQ ID NO: 195622 - protein, 16 aa, Homo sapiens
  CDR3 for beta chain variable domain of TCR clone 97811 (TRBV7-3, TRBJ2-2)
CASSLKRGTLSGELFF

SEQ ID NO: 195623 - protein, 15 aa, Homo sapiens
  CDR3 for alpha chain variable domain of TCR clone 97812 (TRAV8-4, TRAJ42)
CAVSDDRGSLGNLIF

SEQ ID NO: 195624 - protein, 17 aa, Homo sapiens
  CDR3 for beta chain variable domain of TCR clone 97812 (TRBV11-2, TRBJ2-1)
CASSLYPPGVEYNEQFF

SEQ ID NO: 195625 - protein, 14 aa, Homo sapiens
  CDR3 for alpha chain variable domain of TCR clone 97813 (TRAV8-4, TRAJ54)
CAVSEILGAQKLVF

SEQ ID NO: 195626 - protein, 17 aa, Homo sapiens
  CDR3 for beta chain variable domain of TCR clone 97813 (TRBV4-1, TRBJ1-4)
CASSQEGPRGVEEKLFF

SEQ ID NO: 195627 - protein, 13 aa, Homo sapiens
  CDR3 for alpha chain variable domain of TCR clone 97814 (TRAV1-2, TRAJ9)
CAGLNTGGFKTIF

SEQ ID NO: 195628 - protein, 14 aa, Homo sapiens
  CDR3 for beta chain variable domain of TCR clone 97814 (TRBV20-1, TRBJ2-3)
CSARGGTSTDTQYF

SEQ ID NO: 195629 - protein, 13 aa, Homo sapiens
  CDR3 for alpha chain variable domain of TCR clone 97815 (TRAV13-2, TRAJ48)
FAEMDFGNEKLTF

SEQ ID NO: 195630 - protein, 15 aa, Homo sapiens
  CDR3 for beta chain variable domain of TCR clone 97815 (TRBV7-9, TRBJ1-6)
CASSSPGRGNSPLHF

SEQ ID NO: 195631 - protein, 13 aa, Homo sapiens
  CDR3 for alpha chain variable domain of TCR clone 97816 (TRAV12-3, TRAJ40)
CAMSDSGTYKYIF

SEQ ID NO: 195632 - protein, 14 aa, Homo sapiens
  CDR3 for beta chain variable domain of TCR clone 97816 (TRBV7-2, TRBJ1-5)
CASSTHGAGQPQHF

SEQ ID NO: 195633 - protein, 14 aa, Homo sapiens
  CDR3 for alpha chain variable domain of TCR clone 97817 (TRAV13-1, TRAJ35)
CAASKEALGMCCIA

SEQ ID NO: 195634 - protein, 16 aa, Homo sapiens
  CDR3 for beta chain variable domain of TCR clone 97817 (TRBV2, TRBJ1-4)
CASNLLQGATNEKLFF

SEQ ID NO: 195635 - protein, 15 aa, Homo sapiens
  CDR3 for alpha chain variable domain of TCR clone 97818 (TRAV12-3, TRAJ6)
CAMSATSGGSYIPTF

SEQ ID NO: 195636 - protein, 17 aa, Homo sapiens
  CDR3 for beta chain variable domain of TCR clone 97818 (TRBV13, TRBJ2-3)
CASSLSRVAGGRNTQYS

SEQ ID NO: 195637 - protein, 14 aa, Homo sapiens
  CDR3 for alpha chain variable domain of TCR clone 97819 (TRAV12-3, TRAJ42)
CAMNYGGSQGNLIF

SEQ ID NO: 195638 - protein, 14 aa, Homo sapiens
  CDR3 for beta chain variable domain of TCR clone 97819 (TRBV7-2, TRBJ2-5)
CASSVTQGQETQYF

SEQ ID NO: 195639 - protein, 13 aa, Homo sapiens
  CDR3 for alpha chain variable domain of TCR clone 97820 (TRAV21, TRAJ37)
CAVSSGNTGKLIF

SEQ ID NO: 195640 - protein, 17 aa, Homo sapiens
  CDR3 for beta chain variable domain of TCR clone 97820 (TRBV5-1, TRBJ2-5)
CASSLLGLAANQEAQYF

SEQ ID NO: 195641 - protein, 14 aa, Homo sapiens
  CDR3 for alpha chain variable domain of TCR clone 97821 (TRAV2, TRAJ9)
CAVEDRSGGFKTIF

SEQ ID NO: 195642 - protein, 18 aa, Homo sapiens
  CDR3 for beta chain variable domain of TCR clone 97821 (TRBV20-1, TRBJ2-5)
CSQTGDSGRLGRKETQYF

SEQ ID NO: 195643 - protein, 17 aa, Homo sapiens
  CDR3 for alpha chain variable domain of TCR clone 97822 (TRAV3, TRAJ13)
CAVRDGPRAGGSYIPTF

SEQ ID NO: 195644 - protein, 14 aa, Homo sapiens
  CDR3 for beta chain variable domain of TCR clone 97822 (TRBV12-4, TRBJ1-1)
CASSLGTGGTEAFF

SEQ ID NO: 195645 - protein, 11 aa, Homo sapiens
  CDR3 for alpha chain variable domain of TCR clone 97823 (TRAV23/DV6, TRAJ58)
CAARLLRGETS

SEQ ID NO: 195646 - protein, 13 aa, Homo sapiens
  CDR3 for beta chain variable domain of TCR clone 97823 (TRBV28, TRBJ2-5)
CASRTGLRETQYF

SEQ ID NO: 195647 - protein, 15 aa, Homo sapiens
  CDR3 for alpha chain variable domain of TCR clone 97824 (TRAV12-2, TRAJ53)
CAVNGGGGSNYKLTF

SEQ ID NO: 195648 - protein, 13 aa, Homo sapiens
  CDR3 for beta chain variable domain of TCR clone 97824 (TRBV3-1, TRBJ1-1)
CASSPGVITEAFV

SEQ ID NO: 195649 - protein, 19 aa, Homo sapiens
  CDR3 for alpha chain variable domain of TCR clone 97825 (TRAV13-1, TRAJ52)
CAASPYQNAGGTSYGKLTF

SEQ ID NO: 195650 - protein, 15 aa, Homo sapiens
  CDR3 for beta chain variable domain of TCR clone 97825 (TRBV7-2, TRBJ2-2)
CASSLVAGSAGELFF

SEQ ID NO: 195651 - protein, 15 aa, Homo sapiens
  CDR3 for alpha chain variable domain of TCR clone 97826 (TRAV4, TRAJ10)
CLVGVEEGGGNKLTF

SEQ ID NO: 195652 - protein, 15 aa, Homo sapiens
  CDR3 for beta chain variable domain of TCR clone 97826 (TRBV7-2, TRBJ2-7)
CASSLTGQGTYEQYF

SEQ ID NO: 195653 - protein, 13 aa, Homo sapiens
  CDR3 for alpha chain variable domain of TCR clone 97827 (TRAV21, TRAJ27)
CAARPGNAGKSTF

SEQ ID NO: 195654 - protein, 14 aa, Homo sapiens
  CDR3 for beta chain variable domain of TCR clone 97827 (TRBV19, TRBJ1-5)
CASRAPDSFLSQHF

SEQ ID NO: 195655 - protein, 17 aa, Homo sapiens
  CDR3 for alpha chain variable domain of TCR clone 97828 (TRAV3, TRAJ12)
CAVRDGGRMDSSYKLIF

SEQ ID NO: 195656 - protein, 11 aa, Homo sapiens
  CDR3 for beta chain variable domain of TCR clone 97828 (TRBV12-4, TRBJ2-3)
CASTATDTQYF

SEQ ID NO: 195657 - protein, 11 aa, Homo sapiens
  CDR3 for alpha chain variable domain of TCR clone 97829 (TRAV1-2, TRAJ40)
CAVPGTYKYIF

SEQ ID NO: 195658 - protein, 12 aa, Homo sapiens
  CDR3 for beta chain variable domain of TCR clone 97829 (TRBV11-3, TRBJ1-1)
CASSLRDSEAFF

SEQ ID NO: 195659 - protein, 13 aa, Homo sapiens
  CDR3 for alpha chain variable domain of TCR clone 97830 (TRAV21, TRAJ57)
CAVTQGGSENPVF

SEQ ID NO: 195660 - protein, 16 aa, Homo sapiens
  CDR3 for beta chain variable domain of TCR clone 97830 (TRBV29-1, TRBJ2-7)
CSVEDAEDGTAYEQYF

SEQ ID NO: 195661 - protein, 13 aa, Homo sapiens
  CDR3 for alpha chain variable domain of TCR clone 97831 (TRAV8-3, TRAJ31)
RAVGARNNARLMF

SEQ ID NO: 195662 - protein, 14 aa, Homo sapiens
  CDR3 for beta chain variable domain of TCR clone 97831 (TRBV12-5, TRBJ2-5)
CASGSRTHQETQYF

SEQ ID NO: 195663 - protein, 15 aa, Homo sapiens
  CDR3 for alpha chain variable domain of TCR clone 97832 (TRAV12-1, TRAJ44)
CVADLPTGTASKHTF

SEQ ID NO: 195664 - protein, 13 aa, Homo sapiens
  CDR3 for beta chain variable domain of TCR clone 97832 (TRBV6-5, TRBJ2-5)
CASSPQGGETQYF

SEQ ID NO: 195665 - protein, 15 aa, Homo sapiens
  CDR3 for alpha chain variable domain of TCR clone 97833 (TRAV12-3, TRAJ11)
CAMSEENSGYSTLTF

SEQ ID NO: 195666 - protein, 16 aa, Homo sapiens
  CDR3 for beta chain variable domain of TCR clone 97833 (TRBV13, TRBJ2-2)
CASSPRTGEHTGELFF

SEQ ID NO: 195667 - protein, 17 aa, Homo sapiens
  CDR3 for alpha chain variable domain of TCR clone 97834 (TRAV12-2, TRAJ48)
CASNEKLTFGTGTRLTI

SEQ ID NO: 195668 - protein, 16 aa, Homo sapiens
  CDR3 for beta chain variable domain of TCR clone 97834 (TRBV2, TRBJ2-3)
CASSTSVEGVTDTQYF

SEQ ID NO: 195669 - protein, 14 aa, Homo sapiens
  CDR3 for alpha chain variable domain of TCR clone 97835 (TRAV20, TRAJ29)
CAVQAGVGNTPLVF

SEQ ID NO: 195670 - protein, 14 aa, Homo sapiens
  CDR3 for beta chain variable domain of TCR clone 97835 (TRBV11-2, TRBJ2-3)
CASSRLARTDTQYF

SEQ ID NO: 195671 - protein, 16 aa, Homo sapiens
  CDR3 for alpha chain variable domain of TCR clone 97836 (TRAV8-3, TRAJ10)
CAVGPILTGGGNKLTF

SEQ ID NO: 195672 - protein, 15 aa, Homo sapiens
  CDR3 for beta chain variable domain of TCR clone 97836 (TRBV7-2, TRBJ1-1)
CASSFAGDRDTEAFF

SEQ ID NO: 195673 - protein, 10 aa, Homo sapiens
  CDR3 for alpha chain variable domain of TCR clone 97837 (TRAV30, TRAJ48)
CGIGNKKLTF

SEQ ID NO: 195674 - protein, 14 aa, Homo sapiens
  CDR3 for beta chain variable domain of TCR clone 97837 (TRBV7-6, TRBJ2-3)
CASSVAGGTDTQYF

SEQ ID NO: 195675 - protein, 15 aa, Homo sapiens
  CDR3 for alpha chain variable domain of TCR clone 97838 (TRAV12-2, TRAJ53)
CAVNGGGGSNYKLTF

SEQ ID NO: 195676 - protein, 13 aa, Homo sapiens
  CDR3 for beta chain variable domain of TCR clone 97838 (TRBV7-3, TRBJ2-1)
CASSLDSYNEQFF

SEQ ID NO: 195677 - protein, 14 aa, Homo sapiens
  CDR3 for alpha chain variable domain of TCR clone 97839 (TRAV17, TRAJ57)
CATDPQGGSEKLVF

SEQ ID NO: 195678 - protein, 18 aa, Homo sapiens
  CDR3 for beta chain variable domain of TCR clone 97839 (TRBV6-6, TRBJ1-3)
CASSYSKWDSISVNTIYF

SEQ ID NO: 195679 - protein, 10 aa, Homo sapiens
  CDR3 for alpha chain variable domain of TCR clone 97840 (TRAV21, TRAJ31)
CAVDNARLLF

SEQ ID NO: 195680 - protein, 13 aa, Homo sapiens
  CDR3 for beta chain variable domain of TCR clone 97840 (TRBV4-1, TRBJ1-1)
CASSRKMNTEAFF

SEQ ID NO: 195681 - protein, 11 aa, Homo sapiens
  CDR3 for alpha chain variable domain of TCR clone 97841 (TRAV2, TRAJ13)
CASGGYQKVTF

SEQ ID NO: 195682 - protein, 15 aa, Homo sapiens
  CDR3 for beta chain variable domain of TCR clone 97841 (TRBV6-6, TRBJ2-7)
CASSYSYGGSYEQYF

SEQ ID NO: 195683 - protein, 12 aa, Homo sapiens
  CDR3 for alpha chain variable domain of TCR clone 97842 (TRAV12-3, TRAJ17)
CAMTLTGNKLTF

SEQ ID NO: 195684 - protein, 18 aa, Homo sapiens
  CDR3 for beta chain variable domain of TCR clone 97842 (TRBV28, TRBJ2-6)
CASSLAGRAVSGANDLTF

SEQ ID NO: 195685 - protein, 17 aa, Homo sapiens
  CDR3 for alpha chain variable domain of TCR clone 97843 (TRAV2, TRAJ36)
CAVEDRGNWGKQPLLWD

SEQ ID NO: 195686 - protein, 14 aa, Homo sapiens
  CDR3 for beta chain variable domain of TCR clone 97843 (TRBV7-9, TRBJ2-5)
CASSLNTAQETQYF

SEQ ID NO: 195687 - protein, 10 aa, Homo sapiens
  CDR3 for alpha chain variable domain of TCR clone 97844 (TRAV20, TRAJ22)
CSAPARQLTF

SEQ ID NO: 195688 - protein, 14 aa, Homo sapiens
  CDR3 for beta chain variable domain of TCR clone 97844 (TRBV19, TRBJ2-1)
CASSMGSGATEQFF

SEQ ID NO: 195689 - protein, 13 aa, Homo sapiens
  CDR3 for alpha chain variable domain of TCR clone 97845 (TRAV17, TRAJ5)
CAPMDTGRRELTF

SEQ ID NO: 195690 - protein, 15 aa, Homo sapiens
  CDR3 for beta chain variable domain of TCR clone 97845 (TRBV6-6, TRBJ2-5)
CASSPGGGLEETQYF

SEQ ID NO: 195691 - protein, 13 aa, Homo sapiens
  CDR3 for alpha chain variable domain of TCR clone 97846 (TRAV27, TRAJ49)
CAPCPYTGNQFYF

SEQ ID NO: 195692 - protein, 16 aa, Homo sapiens
  CDR3 for beta chain variable domain of TCR clone 97846 (TRBV4-1, TRBJ1-2)
CASSQDAGQVLYGYTF

SEQ ID NO: 195693 - protein, 18 aa, Homo sapiens
  CDR3 for alpha chain variable domain of TCR clone 97847 (TRAV27, TRAJ3)
SLVIQASLRGSSASKVIF

SEQ ID NO: 195694 - protein, 15 aa, Homo sapiens
  CDR3 for beta chain variable domain of TCR clone 97847 (TRBV28, TRBJ1-3)
CASSMGWASGNTIYF

SEQ ID NO: 195695 - protein, 15 aa, Homo sapiens
  CDR3 for alpha chain variable domain of TCR clone 97848 (TRAV35, TRAJ23)
CAGQRGYNQGGKLIF

SEQ ID NO: 195696 - protein, 16 aa, Homo sapiens
  CDR3 for beta chain variable domain of TCR clone 97848 (TRBV27, TRBJ2-1)
CAGSSRLAGNYNEQFF

SEQ ID NO: 195697 - protein, 13 aa, Homo sapiens
  CDR3 for alpha chain variable domain of TCR clone 97849 (TRAV27, TRAJ36)
CRTPKRGANNLFF

SEQ ID NO: 195698 - protein, 15 aa, Homo sapiens
  CDR3 for beta chain variable domain of TCR clone 97849 (TRBV18, TRBJ2-7)
CASSPASTPNYEQYF

SEQ ID NO: 195699 - protein, 13 aa, Homo sapiens
  CDR3 for alpha chain variable domain of TCR clone 97850 (TRAV12-2, TRAJ6)
CAVNVSRKLPTYI

SEQ ID NO: 195700 - protein, 12 aa, Homo sapiens
  CDR3 for beta chain variable domain of TCR clone 97850 (TRBV29-1, TRBJ2-3)
CSVTGGADTQYF

SEQ ID NO: 195701 - protein, 14 aa, Homo sapiens
  CDR3 for alpha chain variable domain of TCR clone 97851 (TRAV12-3, TRAJ6)
CAMSATGGSYIPTF

SEQ ID NO: 195702 - protein, 10 aa, Homo sapiens
  CDR3 for beta chain variable domain of TCR clone 97851 (TRBV20-1, TRBJ2-5)
CSARFETQYF

SEQ ID NO: 195703 - protein, 12 aa, Homo sapiens
  CDR3 for alpha chain variable domain of TCR clone 97852 (TRAV12-3, TRAJ29)
CAAREGNTPLVF

SEQ ID NO: 195704 - protein, 11 aa, Homo sapiens
  CDR3 for beta chain variable domain of TCR clone 97852 (TRBV18, TRBJ2-1)
AAGAGDNEQFF

SEQ ID NO: 195705 - protein, 11 aa, Homo sapiens
  CDR3 for alpha chain variable domain of TCR clone 97853 (TRAV35, TRAJ22)
CAGPGVGQLTF

SEQ ID NO: 195706 - protein, 19 aa, Homo sapiens
  CDR3 for beta chain variable domain of TCR clone 97853 (TRBV11-2, TRBJ2-3)
CASSAPRAGGNPSTGTQYF

SEQ ID NO: 195707 - protein, 15 aa, Homo sapiens
  CDR3 for alpha chain variable domain of TCR clone 97854 (TRAV8-3, TRAJ11)
CAVGLLNSGYSTLTF

SEQ ID NO: 195708 - protein, 15 aa, Homo sapiens
  CDR3 for beta chain variable domain of TCR clone 97854 (TRBV6-1, TRBJ2-6)
CASSSRPSGANVLTF

SEQ ID NO: 195709 - protein, 14 aa, Homo sapiens
  CDR3 for alpha chain variable domain of TCR clone 97855 (TRAV12-2, TRAJ11)
CAVNRESGYSTLTF

SEQ ID NO: 195710 - protein, 14 aa, Homo sapiens
  CDR3 for beta chain variable domain of TCR clone 97855 (TRBV7-2, TRBJ2-7)
CASSPKTSFYEQYF

SEQ ID NO: 195711 - protein, 18 aa, Homo sapiens
  CDR3 for alpha chain variable domain of TCR clone 97856 (TRAV3, TRAJ17)
CAVRARRGGRSCRQQANF

SEQ ID NO: 195712 - protein, 14 aa, Homo sapiens
  CDR3 for beta chain variable domain of TCR clone 97856 (TRBV4-1, TRBJ2-2)
CASSHAVNTGELFF

SEQ ID NO: 195713 - protein, 13 aa, Homo sapiens
  CDR3 for alpha chain variable domain of TCR clone 97857 (TRAV21, TRAJ57)
CAVTQGGSEKLVF

SEQ ID NO: 195714 - protein, 15 aa, Homo sapiens
  CDR3 for beta chain variable domain of TCR clone 97857 (TRBV7-9, TRBJ2-7)
CASSLPMGQANEQYF

SEQ ID NO: 195715 - protein, 14 aa, Homo sapiens
  CDR3 for alpha chain variable domain of TCR clone 97858 (TRAV35, TRAJ33)
CAGSSQDSNYQLIW

SEQ ID NO: 195716 - protein, 14 aa, Homo sapiens
  CDR3 for beta chain variable domain of TCR clone 97858 (TRBV10-2, TRBJ1-5)
CASSSTGRNQPQHF

SEQ ID NO: 195717 - protein, 13 aa, Homo sapiens
  CDR3 for alpha chain variable domain of TCR clone 97859 (TRAV8-3, TRAJ28)
CAVRAVGSYQLTF

SEQ ID NO: 195718 - protein, 14 aa, Homo sapiens
  CDR3 for beta chain variable domain of TCR clone 97859 (TRBV7-2, TRBJ2-7)
CASRSQGAAYEQYF

SEQ ID NO: 195719 - protein, 17 aa, Homo sapiens
  CDR3 for alpha chain variable domain of TCR clone 97860 (TRAV12-3, TRAJ18)
CAMIRADRGSTLGRLYF

SEQ ID NO: 195720 - protein, 14 aa, Homo sapiens
  CDR3 for beta chain variable domain of TCR clone 97860 (TRBV5-6, TRBJ1-6)
CASTPWPADSPLHF

SEQ ID NO: 195721 - protein, 13 aa, Homo sapiens
  CDR3 for alpha chain variable domain of TCR clone 97861 (TRAV21, TRAJ36)
CAVIKTGANNLFF

SEQ ID NO: 195722 - protein, 10 aa, Homo sapiens
  CDR3 for beta chain variable domain of TCR clone 97861 (TRBV29-1, TRBJ2-3)
NAGGQRYAVF

SEQ ID NO: 195723 - protein, 16 aa, Homo sapiens
  CDR3 for alpha chain variable domain of TCR clone 97862 (TRAV17, TRAJ22)
CATGPISSGSARQMTF

SEQ ID NO: 195724 - protein, 13 aa, Homo sapiens
  CDR3 for beta chain variable domain of TCR clone 97862 (TRBV11-2, TRBJ2-1)
CASSLGLAGERFF

SEQ ID NO: 195725 - protein, 14 aa, Homo sapiens
  CDR3 for alpha chain variable domain of TCR clone 97863 (TRAV3, TRAJ9)
CAVRDDTGGFKTIF

SEQ ID NO: 195726 - protein, 13 aa, Homo sapiens
  CDR3 for beta chain variable domain of TCR clone 97863 (TRBV27, TRBJ2-7)
CASSFVSSYEQHF

SEQ ID NO: 195727 - protein, 14 aa, Homo sapiens
  CDR3 for alpha chain variable domain of TCR clone 97864 (TRAV38-1, TRAJ29)
CAFITPSGNTPLVF

SEQ ID NO: 195728 - protein, 15 aa, Homo sapiens
  CDR3 for beta chain variable domain of TCR clone 97864 (TRBV11-3, TRBJ2-3)
CASLKDGREGDTQYF

SEQ ID NO: 195729 - protein, 13 aa, Homo sapiens
  CDR3 for alpha chain variable domain of TCR clone 97865 (TRAV12-1, TRAJ43)
CVVSHHNNNDMRF

SEQ ID NO: 195730 - protein, 13 aa, Homo sapiens
  CDR3 for beta chain variable domain of TCR clone 97865 (TRBV19, TRBJ2-7)
CDSSPRQSYEQYF

SEQ ID NO: 195731 - protein, 15 aa, Homo sapiens
  CDR3 for alpha chain variable domain of TCR clone 97866 (TRAV26-1, TRAJ29)
CIVRVEGSGNTPLVF

SEQ ID NO: 195732 - protein, 11 aa, Homo sapiens
  CDR3 for beta chain variable domain of TCR clone 97866 (TRBV12-4, TRBJ2-3)
CASTATDTQYF

SEQ ID NO: 195733 - protein, 15 aa, Homo sapiens
  CDR3 for alpha chain variable domain of TCR clone 97867 (TRAV26-2, TRAJ13)
CILRDLSGGYHKVTF

SEQ ID NO: 195734 - protein, 11 aa, Homo sapiens
  CDR3 for beta chain variable domain of TCR clone 97867 (TRBV7-9, TRBJ2-5)
CASSLSATQYF

SEQ ID NO: 195735 - protein, 11 aa, Homo sapiens
  CDR3 for alpha chain variable domain of TCR clone 97868 (TRAV12-2, TRAJ31)
CAVTRWARLMF

SEQ ID NO: 195736 - protein, 15 aa, Homo sapiens
  CDR3 for beta chain variable domain of TCR clone 97868 (TRBV19, TRBJ2-7)
CASSIGGGLVNEQYS

SEQ ID NO: 195737 - protein, 14 aa, Homo sapiens
  CDR3 for alpha chain variable domain of TCR clone 97869 (TRAV1-2, TRAJ8)
CAVREDTGFQKLVS

SEQ ID NO: 195738 - protein, 15 aa, Homo sapiens
  CDR3 for beta chain variable domain of TCR clone 97869 (TRBV7-9, TRBJ1-6)
CASSSPGRGNSPLHF

SEQ ID NO: 195739 - protein, 13 aa, Homo sapiens
  CDR3 for alpha chain variable domain of TCR clone 97870 (TRAV2, TRAJ15)
CAVASQAVTALIF

SEQ ID NO: 195740 - protein, 14 aa, Homo sapiens
  CDR3 for beta chain variable domain of TCR clone 97870 (TRBV20-1, TRBJ1-1)
CSAQTRIGGTEAFF

SEQ ID NO: 195741 - protein, 12 aa, Homo sapiens
  CDR3 for alpha chain variable domain of TCR clone 97871 (TRAV12-3, TRAJ40)
CAMSSGTYKYIF

SEQ ID NO: 195742 - protein, 15 aa, Homo sapiens
  CDR3 for beta chain variable domain of TCR clone 97871 (TRBV7-9, TRBJ1-4)
CASSARTGGNEKLFF

SEQ ID NO: 195743 - protein, 14 aa, Homo sapiens
  CDR3 for alpha chain variable domain of TCR clone 97872 (TRAV12-2, TRAJ53)
CAVKGGGSNYKLTF

SEQ ID NO: 195744 - protein, 14 aa, Homo sapiens
  CDR3 for beta chain variable domain of TCR clone 97872 (TRBV7-6, TRBJ2-3)
CASSLGTVTDTQYF

SEQ ID NO: 195745 - protein, 14 aa, Homo sapiens
  CDR3 for alpha chain variable domain of TCR clone 97873 (TRAV30, TRAJ33)
CGTVAPRSNYQLIW

SEQ ID NO: 195746 - protein, 16 aa, Homo sapiens
  CDR3 for beta chain variable domain of TCR clone 97873 (TRBV3-1, TRBJ2-5)
CASSPGQFNGFGTQYV

SEQ ID NO: 195747 - protein, 11 aa, Homo sapiens
  CDR3 for alpha chain variable domain of TCR clone 97874 (TRAV16, TRAJ33)
CTLHSNYQLIW

SEQ ID NO: 195748 - protein, 15 aa, Homo sapiens
  CDR3 for beta chain variable domain of TCR clone 97874 (TRBV4-1, TRBJ2-7)
CASSQQGQGFDEQYF

SEQ ID NO: 195749 - protein, 13 aa, Homo sapiens
  CDR3 for alpha chain variable domain of TCR clone 97875 (TRAV38-2/DV8, TRAJ34)
CAYRTWNTDKLIF

SEQ ID NO: 195750 - protein, 12 aa, Homo sapiens
  CDR3 for beta chain variable domain of TCR clone 97875 (TRBV7-8, TRBJ2-7)
CASSLGDREQYF

SEQ ID NO: 195751 - protein, 15 aa, Homo sapiens
  CDR3 for alpha chain variable domain of TCR clone 97876 (TRAV3, TRAJ3)
CAVRDRDSSASKIIF

SEQ ID NO: 195752 - protein, 13 aa, Homo sapiens
  CDR3 for beta chain variable domain of TCR clone 97876 (TRBV20-1, TRBJ1-1)
CSAPLGGGTEAFF

SEQ ID NO: 195753 - protein, 15 aa, Homo sapiens
  CDR3 for alpha chain variable domain of TCR clone 97877 (TRAV17, TRAJ42)
CATDHYGGSQGNLIF

SEQ ID NO: 195754 - protein, 13 aa, Homo sapiens
  CDR3 for beta chain variable domain of TCR clone 97877 (TRBV7-9, TRBJ1-2)
CASSLKQNYGYTF

SEQ ID NO: 195755 - protein, 14 aa, Homo sapiens
  CDR3 for alpha chain variable domain of TCR clone 97878 (TRAV1-2, TRAJ8)
CAVREDTGFQKLVF

SEQ ID NO: 195756 - protein, 12 aa, Homo sapiens
  CDR3 for beta chain variable domain of TCR clone 97878 (TRBV4-2, TRBJ1-2)
CASSHRQDGYTF

SEQ ID NO: 195757 - protein, 13 aa, Homo sapiens
  CDR3 for alpha chain variable domain of TCR clone 97879 (TRAV8-3, TRAJ48)
CAVVPFGNEILTF

SEQ ID NO: 195758 - protein, 15 aa, Homo sapiens
  CDR3 for beta chain variable domain of TCR clone 97879 (TRBV11-2, TRBJ2-1)
CASSSPSTRYNEQFF

SEQ ID NO: 195759 - protein, 12 aa, Homo sapiens
  CDR3 for alpha chain variable domain of TCR clone 97880 (TRAV12-3, TRAJ5)
CAMDTGRRALPF

SEQ ID NO: 195760 - protein, 13 aa, Homo sapiens
  CDR3 for beta chain variable domain of TCR clone 97880 (TRBV7-7, TRBJ2-2)
CASSLTSAGELFF

SEQ ID NO: 195761 - protein, 14 aa, Homo sapiens
  CDR3 for alpha chain variable domain of TCR clone 97881 (TRAV1-2, TRAJ8)
CAVREETGFQKLVF

SEQ ID NO: 195762 - protein, 15 aa, Homo sapiens
  CDR3 for beta chain variable domain of TCR clone 97881 (TRBV28, TRBJ2-6)
CASSLAGSGANVLTF

SEQ ID NO: 195763 - protein, 15 aa, Homo sapiens
  CDR3 for alpha chain variable domain of TCR clone 97882 (TRAV13-2, TRAJ5)
CAENPHWTGRRALTF

SEQ ID NO: 195764 - protein, 16 aa, Homo sapiens
  CDR3 for beta chain variable domain of TCR clone 97882 (TRBV7-9, TRBJ1-3)
CACSQTSGLRMGTIYF

SEQ ID NO: 195765 - protein, 14 aa, Homo sapiens
  CDR3 for alpha chain variable domain of TCR clone 97883 (TRAV1-2, TRAJ16)
CAVNRFSDGQKLLF

SEQ ID NO: 195766 - protein, 14 aa, Homo sapiens
  CDR3 for beta chain variable domain of TCR clone 97883 (TRBV25-1, TRBJ1-1)
CASTHLGGNTEAFC

SEQ ID NO: 195767 - protein, 15 aa, Homo sapiens
  CDR3 for alpha chain variable domain of TCR clone 97884 (TRAV12-3, TRAJ6)
CAMRATSGGSYIPTF

SEQ ID NO: 195768 - protein, 13 aa, Homo sapiens
  CDR3 for beta chain variable domain of TCR clone 97884 (TRBV7-9, TRBJ1-2)
CASSLKQNYGYTF

SEQ ID NO: 195769 - protein, 17 aa, Homo sapiens
  CDR3 for alpha chain variable domain of TCR clone 97885 (TRAV3, TRAJ6)
CAVRDGPRAGGSYIPTF

SEQ ID NO: 195770 - protein, 12 aa, Homo sapiens
  CDR3 for beta chain variable domain of TCR clone 97885 (TRBV12-4, TRBJ1-3)
CASSFSGNTIYF

SEQ ID NO: 195771 - protein, 17 aa, Homo sapiens
  CDR3 for alpha chain variable domain of TCR clone 97886 (TRAV12-2, TRAJ52)
CAVNPYAGGTSYGKLTF

SEQ ID NO: 195772 - protein, 15 aa, Homo sapiens
  CDR3 for beta chain variable domain of TCR clone 97886 (TRBV5-1, TRBJ2-1)
CASSPPRAPYNEQFF

SEQ ID NO: 195773 - protein, 13 aa, Homo sapiens
  CDR3 for alpha chain variable domain of TCR clone 97887 (TRAV26-1, TRAJ34)
CIVRPCITDKLIF

SEQ ID NO: 195774 - protein, 13 aa, Homo sapiens
  CDR3 for beta chain variable domain of TCR clone 97887 (TRBV5-1, TRBJ2-1)
CASSLGSYNEQFF

SEQ ID NO: 195775 - protein, 13 aa, Homo sapiens
  CDR3 for alpha chain variable domain of TCR clone 97888 (TRAV21, TRAJ36)
CAVIKTGANNLFS

SEQ ID NO: 195776 - protein, 13 aa, Homo sapiens
  CDR3 for beta chain variable domain of TCR clone 97888 (TRBV29-1, TRBJ2-3)
CSATRGGRDTQYF

SEQ ID NO: 195777 - protein, 14 aa, Homo sapiens
  CDR3 for alpha chain variable domain of TCR clone 97889 (TRAV38-1, TRAJ29)
CAFITPSGNTPLVF

SEQ ID NO: 195778 - protein, 14 aa, Homo sapiens
  CDR3 for beta chain variable domain of TCR clone 97889 (TRBV20-1, TRBJ1-1)
CSAQTRIGGTEAFF

SEQ ID NO: 195779 - protein, 13 aa, Homo sapiens
  CDR3 for alpha chain variable domain of TCR clone 97890 (TRAV8-2, TRAJ43)
CAVSDQGDNDMRF

SEQ ID NO: 195780 - protein, 12 aa, Homo sapiens
  CDR3 for beta chain variable domain of TCR clone 97890 (TRBV7-9, TRBJ2-7)
CASRTGFDEQYF

SEQ ID NO: 195781 - protein, 16 aa, Homo sapiens
  CDR3 for alpha chain variable domain of TCR clone 97891 (TRAV17, TRAJ52)
CATSNAGGTSYGKLTF

SEQ ID NO: 195782 - protein, 13 aa, Homo sapiens
  CDR3 for beta chain variable domain of TCR clone 97891 (TRBV27, TRBJ1-6)
CASSLALVSPLHF

SEQ ID NO: 195783 - protein, 14 aa, Homo sapiens
  CDR3 for alpha chain variable domain of TCR clone 97892 (TRAV1-2, TRAJ8)
CAMREDTGFQKLVF

SEQ ID NO: 195784 - protein, 13 aa, Homo sapiens
  CDR3 for beta chain variable domain of TCR clone 97892 (TRBV12-4, TRBJ1-5)
CASSPDRAQPQHF

SEQ ID NO: 195785 - protein, 14 aa, Homo sapiens
  CDR3 for alpha chain variable domain of TCR clone 97893 (TRAV12-3, TRAJ10)
SHLPLTGGGNKLTF

SEQ ID NO: 195786 - protein, 14 aa, Homo sapiens
  CDR3 for beta chain variable domain of TCR clone 97893 (TRBV7-8, TRBJ2-7)
CASTFRGGPNEQYF

SEQ ID NO: 195787 - protein, 16 aa, Homo sapiens
  CDR3 for alpha chain variable domain of TCR clone 97894 (TRAV26-1, TRAJ23)
CIVRVHPYNQGGKLIF

SEQ ID NO: 195788 - protein, 15 aa, Homo sapiens
  CDR3 for beta chain variable domain of TCR clone 97894 (TRBV28, TRBJ2-7)
CASSPGGRGFYEQYF

SEQ ID NO: 195789 - protein, 14 aa, Homo sapiens
  CDR3 for alpha chain variable domain of TCR clone 97895 (TRAV12-2, TRAJ45)
CALPERGGADGLTF

SEQ ID NO: 195790 - protein, 14 aa, Homo sapiens
  CDR3 for beta chain variable domain of TCR clone 97895 (TRBV18, TRBJ1-5)
RASSPGNSNQPQHF

SEQ ID NO: 195791 - protein, 17 aa, Homo sapiens
  CDR3 for alpha chain variable domain of TCR clone 97896 (TRAV3, TRAJ6)
CAVRDGPRAGGSYIPTF

SEQ ID NO: 195792 - protein, 15 aa, Homo sapiens
  CDR3 for beta chain variable domain of TCR clone 97896 (TRBV4-2, TRBJ1-1)
CASSQVGSMNTEAFF

SEQ ID NO: 195793 - protein, 13 aa, Homo sapiens
  CDR3 for alpha chain variable domain of TCR clone 97897 (TRAV8-4, TRAJ9)
CAVSETGGFKTIF

SEQ ID NO: 195794 - protein, 14 aa, Homo sapiens
  CDR3 for beta chain variable domain of TCR clone 97897 (TRBV7-2, TRBJ2-7)
CASSLYPGRYEQYF

SEQ ID NO: 195795 - protein, 13 aa, Homo sapiens
  CDR3 for alpha chain variable domain of TCR clone 97898 (TRAV12-2, TRAJ20)
CAVYPSNDNKLSF

SEQ ID NO: 195796 - protein, 15 aa, Homo sapiens
  CDR3 for beta chain variable domain of TCR clone 97898 (TRBV27, TRBJ2-5)
CASSLYPRGGETQYF

SEQ ID NO: 195797 - protein, 10 aa, Homo sapiens
  CDR3 for alpha chain variable domain of TCR clone 97899 (TRAV12-2, TRAJ22)
CAVNETQLTF

SEQ ID NO: 195798 - protein, 13 aa, Homo sapiens
  CDR3 for beta chain variable domain of TCR clone 97899 (TRBV6-5, TRBJ2-6)
CASSTSGPLRLDV

SEQ ID NO: 195799 - protein, 14 aa, Homo sapiens
  CDR3 for alpha chain variable domain of TCR clone 97900 (TRAV12-1, TRAJ17)
CVVNYKAAGNKLTF

SEQ ID NO: 195800 - protein, 17 aa, Homo sapiens
  CDR3 for beta chain variable domain of TCR clone 97900 (TRBV20-1, TRBJ2-1)
CSASSSGLAGCYNEQFF

SEQ ID NO: 195801 - protein, 18 aa, Homo sapiens
  CDR3 for alpha chain variable domain of TCR clone 97901 (TRAV21, TRAJ52)
CTVRPSPAGGTSYGKLTF

SEQ ID NO: 195802 - protein, 15 aa, Homo sapiens
  CDR3 for beta chain variable domain of TCR clone 97901 (TRBV19, TRBJ1-1)
CASTSGQIQNTEAFF

SEQ ID NO: 195803 - protein, 13 aa, Homo sapiens
  CDR3 for alpha chain variable domain of TCR clone 97902 (TRAV12-1, TRAJ33)
CVDAPDSNYQLIW

SEQ ID NO: 195804 - protein, 12 aa, Homo sapiens
  CDR3 for beta chain variable domain of TCR clone 97902 (TRBV11-2, TRBJ2-2)
CASSLGGGELFF

SEQ ID NO: 195805 - protein, 14 aa, Homo sapiens
  CDR3 for alpha chain variable domain of TCR clone 97903 (TRAV2, TRAJ9)
CAVEDRSGGFKTIF

SEQ ID NO: 195806 - protein, 14 aa, Homo sapiens
  CDR3 for beta chain variable domain of TCR clone 97903 (TRBV7-6, TRBJ2-7)
CASSFRQGADEQYF

SEQ ID NO: 195807 - protein, 14 aa, Homo sapiens
  CDR3 for alpha chain variable domain of TCR clone 97904 (TRAV20, TRAJ42)
CPVQAGGSQGNLIF

SEQ ID NO: 195808 - protein, 14 aa, Homo sapiens
  CDR3 for beta chain variable domain of TCR clone 97904 (TRBV28, TRBJ1-2)
CASRIQGANYGYTF

SEQ ID NO: 195809 - protein, 15 aa, Homo sapiens
  CDR3 for alpha chain variable domain of TCR clone 97905 (TRAV3, TRAJ13)
CAVRVYSGGYQKVTF

SEQ ID NO: 195810 - protein, 15 aa, Homo sapiens
  CDR3 for beta chain variable domain of TCR clone 97905 (TRBV6-1, TRBJ2-1)
CASSELRGQYNEQFF

SEQ ID NO: 195811 - protein, 16 aa, Homo sapiens
  CDR3 for alpha chain variable domain of TCR clone 97906 (TRAV8-2, TRAJ48)
CVVSDVSNFGNEKLTF

SEQ ID NO: 195812 - protein, 16 aa, Homo sapiens
  CDR3 for beta chain variable domain of TCR clone 97906 (TRBV7-3, TRBJ2-2)
CASSLKRGTLSGELFF

SEQ ID NO: 195813 - protein, 16 aa, Homo sapiens
  CDR3 for alpha chain variable domain of TCR clone 97907 (TRAV12-2, TRAJ39)
CAVNRGPDNAGNMLTF

SEQ ID NO: 195814 - protein, 10 aa, Homo sapiens
  CDR3 for beta chain variable domain of TCR clone 97907 (TRBV2, TRBJ2-4)
CASRGSIQYF

SEQ ID NO: 195815 - protein, 13 aa, Homo sapiens
  CDR3 for alpha chain variable domain of TCR clone 97908 (TRAV2, TRAJ40)
CAVVTSGTYKYIF

SEQ ID NO: 195816 - protein, 16 aa, Homo sapiens
  CDR3 for beta chain variable domain of TCR clone 97908 (TRBV19, TRBJ2-1)
CASSKAGPSSYNEQVF

SEQ ID NO: 195817 - protein, 13 aa, Homo sapiens
  CDR3 for alpha chain variable domain of TCR clone 97909 (TRAV3, TRAJ27)
CAVRPLGAGKSTS

SEQ ID NO: 195818 - protein, 20 aa, Homo sapiens
  CDR3 for beta chain variable domain of TCR clone 97909 (TRBV19, TRBJ2-1)
CASSISRTVTSTRLNNEQFF

SEQ ID NO: 195819 - protein, 13 aa, Homo sapiens
  CDR3 for alpha chain variable domain of TCR clone 97910 (TRAV12-2, TRAJ18)
CAVRGSTLGRLYF

SEQ ID NO: 195820 - protein, 18 aa, Homo sapiens
  CDR3 for beta chain variable domain of TCR clone 97910 (TRBV27, TRBJ2-3)
CASSLSGTSGRGTDTQYF

SEQ ID NO: 195821 - protein, 11 aa, Homo sapiens
  CDR3 for alpha chain variable domain of TCR clone 97911 (TRAV21, TRAJ34)
CAVTNTDKLIF

SEQ ID NO: 195822 - protein, 16 aa, Homo sapiens
  CDR3 for beta chain variable domain of TCR clone 97911 (TRBV11-2, TRBJ1-2)
CASSLDTGGADYGYTF

SEQ ID NO: 195823 - protein, 17 aa, Homo sapiens
  CDR3 for alpha chain variable domain of TCR clone 97912 (TRAV17, TRAJ7)
CSTLGRLAFGKGNQVVV

SEQ ID NO: 195824 - protein, 13 aa, Homo sapiens
  CDR3 for beta chain variable domain of TCR clone 97912 (TRBV12-4, TRBJ2-7)
CASSLERVREQYF

SEQ ID NO: 195825 - protein, 15 aa, Homo sapiens
  CDR3 for alpha chain variable domain of TCR clone 97913 (TRAV26-1, TRAJ40)
CIVRVTTSGTYKYIF

SEQ ID NO: 195826 - protein, 17 aa, Homo sapiens
  CDR3 for beta chain variable domain of TCR clone 97913 (TRBV18, TRBJ2-1)
CASSKGLSGGADNEQFF

SEQ ID NO: 195827 - protein, 14 aa, Homo sapiens
  CDR3 for alpha chain variable domain of TCR clone 97914 (TRAV17, TRAJ57)
CATDPQGGSEKLVF

SEQ ID NO: 195828 - protein, 16 aa, Homo sapiens
  CDR3 for beta chain variable domain of TCR clone 97914 (TRBV7-9, TRBJ1-2)
CASSLGFSSGEDGYTF

SEQ ID NO: 195829 - protein, 13 aa, Homo sapiens
  CDR3 for alpha chain variable domain of TCR clone 97915 (TRAV13-1, TRAJ39)
CAASIWARNMLTF

SEQ ID NO: 195830 - protein, 15 aa, Homo sapiens
  CDR3 for beta chain variable domain of TCR clone 97915 (TRBV7-9, TRBJ1-1)
CASSLLEQGGTEAFF

SEQ ID NO: 195831 - protein, 15 aa, Homo sapiens
  CDR3 for alpha chain variable domain of TCR clone 97916 (TRAV12-3, TRAJ49)
CAMTAPGNTGNQFYF

SEQ ID NO: 195832 - protein, 14 aa, Homo sapiens
  CDR3 for beta chain variable domain of TCR clone 97916 (TRBV25-1, TRBJ1-1)
CASTHLGGNTEAFF

SEQ ID NO: 195833 - protein, 16 aa, Homo sapiens
  CDR3 for alpha chain variable domain of TCR clone 97917 (TRAV27, TRAJ53)
CAAPEGSGGSNYKLTF

SEQ ID NO: 195834 - protein, 16 aa, Homo sapiens
  CDR3 for beta chain variable domain of TCR clone 97917 (TRBV2, TRBJ2-1)
CASSVGGSLSYNEQFF

SEQ ID NO: 195835 - protein, 14 aa, Homo sapiens
  CDR3 for alpha chain variable domain of TCR clone 97918 (TRAV17, TRAJ37)
CATDGSSNTGKLIF

SEQ ID NO: 195836 - protein, 16 aa, Homo sapiens
  CDR3 for beta chain variable domain of TCR clone 97918 (TRBV12-5, TRBJ2-5)
CASGPRTSGNQETQYF

SEQ ID NO: 195837 - protein, 14 aa, Homo sapiens
  CDR3 for alpha chain variable domain of TCR clone 97919 (TRAV12-3, TRAJ10)
SYLPLTGGGNKLTF

SEQ ID NO: 195838 - protein, 14 aa, Homo sapiens
  CDR3 for beta chain variable domain of TCR clone 97919 (TRBV4-2, TRBJ2-1)
CASGLDRAYNEQFF

SEQ ID NO: 195839 - protein, 11 aa, Homo sapiens
  CDR3 for alpha chain variable domain of TCR clone 97920 (TRAV13-2, TRAJ20)
CAENISYKLSF

SEQ ID NO: 195840 - protein, 13 aa, Homo sapiens
  CDR3 for beta chain variable domain of TCR clone 97920 (TRBV20-1, TRBJ2-5)
CSARYTGEETQYF

SEQ ID NO: 195841 - protein, 15 aa, Homo sapiens
  CDR3 for alpha chain variable domain of TCR clone 97921 (TRAV3, TRAJ4)
CAVRDGPGGYNKLIF

SEQ ID NO: 195842 - protein, 15 aa, Homo sapiens
  CDR3 for beta chain variable domain of TCR clone 97921 (TRBV27, TRBJ2-7)
CASSPDQGRLYEQYF

SEQ ID NO: 195843 - protein, 15 aa, Homo sapiens
  CDR3 for alpha chain variable domain of TCR clone 97922 (TRAV12-3, TRAJ49)
CAMAVTPNTGHQFYF

SEQ ID NO: 195844 - protein, 18 aa, Homo sapiens
  CDR3 for beta chain variable domain of TCR clone 97922 (TRBV4-1, TRBJ1-5)
CASSQDPRGQGLNQPQHF

SEQ ID NO: 195845 - protein, 14 aa, Homo sapiens
  CDR3 for alpha chain variable domain of TCR clone 97923 (TRAV17, TRAJ39)
CATDPVRAGNMLTF

SEQ ID NO: 195846 - protein, 15 aa, Homo sapiens
  CDR3 for beta chain variable domain of TCR clone 97923 (TRBV5-5, TRBJ2-2)
CASSRQASGAGELFF

SEQ ID NO: 195847 - protein, 14 aa, Homo sapiens
  CDR3 for alpha chain variable domain of TCR clone 97924 (TRAV38-1, TRAJ40)
CALRPTSGTYKYIF

SEQ ID NO: 195848 - protein, 15 aa, Homo sapiens
  CDR3 for beta chain variable domain of TCR clone 97924 (TRBV7-9, TRBJ1-5)
CASSQGHQPNQPQHF

SEQ ID NO: 195849 - protein, 13 aa, Homo sapiens
  CDR3 for alpha chain variable domain of TCR clone 97925 (TRAV21, TRAJ27)
CAARPGNAGKSTF

SEQ ID NO: 195850 - protein, 13 aa, Homo sapiens
  CDR3 for beta chain variable domain of TCR clone 97925 (TRBV20-1, TRBJ2-2)
CSASAAGTGELFF

SEQ ID NO: 195851 - protein, 14 aa, Homo sapiens
  CDR3 for alpha chain variable domain of TCR clone 97926 (TRAV2, TRAJ37)
CAVDFTSNTGKLIF

SEQ ID NO: 195852 - protein, 15 aa, Homo sapiens
  CDR3 for beta chain variable domain of TCR clone 97926 (TRBV11-2, TRBJ1-6)
CASTGFGTAVSPLHF

SEQ ID NO: 195853 - protein, 17 aa, Homo sapiens
  CDR3 for alpha chain variable domain of TCR clone 97927 (TRAV29/DV5, TRAJ42)
CAASAGNYGGSQGNLIF

SEQ ID NO: 195854 - protein, 14 aa, Homo sapiens
  CDR3 for beta chain variable domain of TCR clone 97927 (TRBV25-1, TRBJ1-1)
CASTHLGGNTEAFF

SEQ ID NO: 195855 - protein, 11 aa, Homo sapiens
  CDR3 for alpha chain variable domain of TCR clone 97928 (TRAV3, TRAJ21)
CAVGNFNKFYF

SEQ ID NO: 195856 - protein, 15 aa, Homo sapiens
  CDR3 for beta chain variable domain of TCR clone 97928 (TRBV5-1, TRBJ2-1)
CASSSVANSYNEQFF

SEQ ID NO: 195857 - protein, 16 aa, Homo sapiens
  CDR3 for alpha chain variable domain of TCR clone 97929 (TRAV3, TRAJ21)
CAVRDIERGNFNKFSF

SEQ ID NO: 195858 - protein, 13 aa, Homo sapiens
  CDR3 for beta chain variable domain of TCR clone 97929 (TRBV27, TRBJ2-7)
CASSLTTGYEQYF

SEQ ID NO: 195859 - protein, 15 aa, Homo sapiens
  CDR3 for alpha chain variable domain of TCR clone 97930 (TRAV3, TRAJ16)
CAVRDGFSDGQKLLF

SEQ ID NO: 195860 - protein, 14 aa, Homo sapiens
  CDR3 for beta chain variable domain of TCR clone 97930 (TRBV19, TRBJ2-1)
CASPTFVLSGEQFF

SEQ ID NO: 195861 - protein, 14 aa, Homo sapiens
  CDR3 for alpha chain variable domain of TCR clone 97931 (TRAV9-2, TRAJ56)
CALSYTGANSKLTF

SEQ ID NO: 195862 - protein, 16 aa, Homo sapiens
  CDR3 for beta chain variable domain of TCR clone 97931 (TRBV5-1, TRBJ2-2)
CASSLWDTTNTGELFF

SEQ ID NO: 195863 - protein, 13 aa, Homo sapiens
  CDR3 for alpha chain variable domain of TCR clone 97932 (TRAV21, TRAJ27)
CAARPGNAGKSTF

SEQ ID NO: 195864 - protein, 14 aa, Homo sapiens
  CDR3 for beta chain variable domain of TCR clone 97932 (TRBV7-9, TRBJ2-5)
CASSLDTAQETQYV

SEQ ID NO: 195865 - protein, 14 aa, Homo sapiens
  CDR3 for alpha chain variable domain of TCR clone 97933 (TRAV1-2, TRAJ8)
CAVREDTGFQKLVF

SEQ ID NO: 195866 - protein, 12 aa, Homo sapiens
  CDR3 for beta chain variable domain of TCR clone 97933 (TRBV28, TRBJ2-1)
CASSVQINEQFF

SEQ ID NO: 195867 - protein, 12 aa, Homo sapiens
  CDR3 for alpha chain variable domain of TCR clone 97934 (TRAV9-2, TRAJ26)
CALRGYGQNFVF

SEQ ID NO: 195868 - protein, 12 aa, Homo sapiens
  CDR3 for beta chain variable domain of TCR clone 97934 (TRBV29-1, TRBJ2-3)
CSVTGGADKQYF

SEQ ID NO: 195869 - protein, 15 aa, Homo sapiens
  CDR3 for alpha chain variable domain of TCR clone 97935 (TRAV21, TRAJ53)
CATLNSGGSNYKLTF

SEQ ID NO: 195870 - protein, 16 aa, Homo sapiens
  CDR3 for beta chain variable domain of TCR clone 97935 (TRBV20-1, TRBJ1-4)
CSAPGQGLLTNENLFF

SEQ ID NO: 195871 - protein, 16 aa, Homo sapiens
  CDR3 for alpha chain variable domain of TCR clone 97936 (TRAV3, TRAJ37)
CAVRGKGSGNTGKLIF

SEQ ID NO: 195872 - protein, 15 aa, Homo sapiens
  CDR3 for beta chain variable domain of TCR clone 97936 (TRBV4-3, TRBJ1-5)
CASSQEAVGGQPQHF

SEQ ID NO: 195873 - protein, 13 aa, Homo sapiens
  CDR3 for alpha chain variable domain of TCR clone 97937 (TRAV3, TRAJ21)
CAVREPDFNKFYF

SEQ ID NO: 195874 - protein, 17 aa, Homo sapiens
  CDR3 for beta chain variable domain of TCR clone 97937 (TRBV20-1, TRBJ1-6)
CSARGGYTFSYNSPLHF

SEQ ID NO: 195875 - protein, 14 aa, Homo sapiens
  CDR3 for alpha chain variable domain of TCR clone 97938 (TRAV1-2, TRAJ16)
CAVNRFSDGQQLLF

SEQ ID NO: 195876 - protein, 13 aa, Homo sapiens
  CDR3 for beta chain variable domain of TCR clone 97938 (TRBV10-3, TRBJ2-7)
CASKLAVNYEQYF

SEQ ID NO: 195877 - protein, 14 aa, Homo sapiens
  CDR3 for alpha chain variable domain of TCR clone 97939 (TRAV12-2, TRAJ53)
CAVKGGGSNYKLTF

SEQ ID NO: 195878 - protein, 14 aa, Homo sapiens
  CDR3 for beta chain variable domain of TCR clone 97939 (TRBV7-7, TRBJ2-2)
CATCQDSDTGELFF

SEQ ID NO: 195879 - protein, 14 aa, Homo sapiens
  CDR3 for alpha chain variable domain of TCR clone 97940 (TRAV12-2, TRAJ17)
CAVLFKAAGNKLTF

SEQ ID NO: 195880 - protein, 14 aa, Homo sapiens
  CDR3 for beta chain variable domain of TCR clone 97940 (TRBV12-5, TRBJ2-5)
CASGSRTNQETQYF

SEQ ID NO: 195881 - protein, 14 aa, Homo sapiens
  CDR3 for alpha chain variable domain of TCR clone 97941 (TRAV20, TRAJ10)
CAVRVEGVGNKLTF

SEQ ID NO: 195882 - protein, 18 aa, Homo sapiens
  CDR3 for beta chain variable domain of TCR clone 97941 (TRBV24-1, TRBJ2-1)
CATSDLMFLGRGVHEQFF

SEQ ID NO: 195883 - protein, 12 aa, Homo sapiens
  CDR3 for alpha chain variable domain of TCR clone 97942 (TRAV8-3, TRAJ43)
CAVGAGNNDMRF

SEQ ID NO: 195884 - protein, 14 aa, Homo sapiens
  CDR3 for beta chain variable domain of TCR clone 97942 (TRBV4-1, TRBJ2-2)
CASSQAVNTGELFF

SEQ ID NO: 195885 - protein, 20 aa, Homo sapiens
  CDR3 for alpha chain variable domain of TCR clone 97943 (TRAV1-1, TRAJ4)
CLLLLRCEGFLSGGYNKLMF

SEQ ID NO: 195886 - protein, 16 aa, Homo sapiens
  CDR3 for beta chain variable domain of TCR clone 97943 (TRBV28, TRBJ1-4)
CASSPPYRGRSEKLFF

SEQ ID NO: 195887 - protein, 12 aa, Homo sapiens
  CDR3 for alpha chain variable domain of TCR clone 97944 (TRAV9-2, TRAJ36)
CALKKGANNLFF

SEQ ID NO: 195888 - protein, 13 aa, Homo sapiens
  CDR3 for beta chain variable domain of TCR clone 97944 (TRBV7-3, TRBJ1-1)
CASSQDWGAEAFF

SEQ ID NO: 195889 - protein, 15 aa, Homo sapiens
  CDR3 for alpha chain variable domain of TCR clone 97945 (TRAV3, TRAJ5)
CAVRDRKTGRRALTF

SEQ ID NO: 195890 - protein, 12 aa, Homo sapiens
  CDR3 for beta chain variable domain of TCR clone 97945 (TRBV12-5, TRBJ2-5)
CASGQGVETQYF

SEQ ID NO: 195891 - protein, 14 aa, Homo sapiens
  CDR3 for alpha chain variable domain of TCR clone 97946 (TRAV16, TRAJ15)
CALSGPQAGTALIF

SEQ ID NO: 195892 - protein, 12 aa, Homo sapiens
  CDR3 for beta chain variable domain of TCR clone 97946 (TRBV18, TRBJ2-5)
CACSPSKETQYF

SEQ ID NO: 195893 - protein, 11 aa, Homo sapiens
  CDR3 for alpha chain variable domain of TCR clone 97947 (TRAV21, TRAJ34)
CAVTNTDKLIF

SEQ ID NO: 195894 - protein, 16 aa, Homo sapiens
  CDR3 for beta chain variable domain of TCR clone 97947 (TRBV29-1, TRBJ2-7)
CSVEDAEDGTAYEQYF

SEQ ID NO: 195895 - protein, 13 aa, Homo sapiens
  CDR3 for alpha chain variable domain of TCR clone 97948 (TRAV27, TRAJ45)
CRSSGGGADGLTF

SEQ ID NO: 195896 - protein, 12 aa, Homo sapiens
  CDR3 for beta chain variable domain of TCR clone 97948 (TRBV11-2, TRBJ2-2)
CASSLPTGELFF

SEQ ID NO: 195897 - protein, 15 aa, Homo sapiens
  CDR3 for alpha chain variable domain of TCR clone 97949 (TRAV3, TRAJ20)
CAVRDIKLSDSKLSF

SEQ ID NO: 195898 - protein, 18 aa, Homo sapiens
  CDR3 for beta chain variable domain of TCR clone 97949 (TRBV20-1, TRBJ2-5)
CSQTGDSGRLGGKETQYF

SEQ ID NO: 195899 - protein, 14 aa, Homo sapiens
  CDR3 for alpha chain variable domain of TCR clone 97950 (TRAV1-2, TRAJ16)
CAVNRFSDGQKLLF

SEQ ID NO: 195900 - protein, 16 aa, Homo sapiens
  CDR3 for beta chain variable domain of TCR clone 97950 (TRBV7-3, TRBJ2-1)
CASSFTGRRSYNEQFF

SEQ ID NO: 195901 - protein, 14 aa, Homo sapiens
  CDR3 for alpha chain variable domain of TCR clone 97951 (TRAV1-2, TRAJ16)
CAVNRFSDGQKLLC

SEQ ID NO: 195902 - protein, 16 aa, Homo sapiens
  CDR3 for beta chain variable domain of TCR clone 97951 (TRBV11-2, TRBJ1-2)
CASSLDTGGADYGYTF

SEQ ID NO: 195903 - protein, 13 aa, Homo sapiens
  CDR3 for alpha chain variable domain of TCR clone 97952 (TRAV9-2, TRAJ53)
CALSGGSNYKLTF

SEQ ID NO: 195904 - protein, 17 aa, Homo sapiens
  CDR3 for beta chain variable domain of TCR clone 97952 (TRBV11-2, TRBJ2-1)
CASSLCPPGVEYNEQFF

SEQ ID NO: 195905 - protein, 13 aa, Homo sapiens
  CDR3 for alpha chain variable domain of TCR clone 97953 (TRAV8-4, TRAJ48)
CAVSLFGNEKLTF

SEQ ID NO: 195906 - protein, 15 aa, Homo sapiens
  CDR3 for beta chain variable domain of TCR clone 97953 (TRBV20-1, TRBJ2-7)
CSARKGIAESYEQYF

SEQ ID NO: 195907 - protein, 11 aa, Homo sapiens
  CDR3 for alpha chain variable domain of TCR clone 97954 (TRAV17, TRAJ31)
CAMSNNARLMF

SEQ ID NO: 195908 - protein, 16 aa, Homo sapiens
  CDR3 for beta chain variable domain of TCR clone 97954 (TRBV7-8, TRBJ2-4)
CASSAERTLAKNIQYF

SEQ ID NO: 195909 - protein, 18 aa, Homo sapiens
  CDR3 for alpha chain variable domain of TCR clone 97955 (TRAV26-2, TRAJ32)
CILRAPLNYGGATNKLIF

SEQ ID NO: 195910 - protein, 14 aa, Homo sapiens
  CDR3 for beta chain variable domain of TCR clone 97955 (TRBV19, TRBJ1-4)
CASAIEAEGEKLFF

SEQ ID NO: 195911 - protein, 14 aa, Homo sapiens
  CDR3 for alpha chain variable domain of TCR clone 97956 (TRAV1-2, TRAJ16)
CAVNRFSDGQKLLF

SEQ ID NO: 195912 - protein, 15 aa, Homo sapiens
  CDR3 for beta chain variable domain of TCR clone 97956 (TRBV2, TRBJ2-1)
CASSEEREGDNEQFS

SEQ ID NO: 195913 - protein, 21 aa, Homo sapiens
  CDR3 for alpha chain variable domain of TCR clone 97957 (TRAV1-1, TRAJ6)
CLLLLRCERLERTGGSYIPTF

SEQ ID NO: 195914 - protein, 14 aa, Homo sapiens
  CDR3 for beta chain variable domain of TCR clone 97957 (TRBV7-2, TRBJ2-5)
CASSLAGGGETQYF

SEQ ID NO: 195915 - protein, 14 aa, Homo sapiens
  CDR3 for alpha chain variable domain of TCR clone 97958 (TRAV3, TRAJ6)
CAVRDSRRKLHTDI

SEQ ID NO: 195916 - protein, 15 aa, Homo sapiens
  CDR3 for beta chain variable domain of TCR clone 97958 (TRBV18, TRBJ2-7)
CASSPLQGRTYEQYF

SEQ ID NO: 195917 - protein, 14 aa, Homo sapiens
  CDR3 for alpha chain variable domain of TCR clone 97959 (TRAV9-2, TRAJ39)
CALYIYNAGNMLTF

SEQ ID NO: 195918 - protein, 14 aa, Homo sapiens
  CDR3 for beta chain variable domain of TCR clone 97959 (TRBV15, TRBJ2-7)
CATSRVARGYEQYF

SEQ ID NO: 195919 - protein, 16 aa, Homo sapiens
  CDR3 for alpha chain variable domain of TCR clone 97960 (TRAV30, TRAJ24)
CGTEIVDADSWGKFQF

SEQ ID NO: 195920 - protein, 16 aa, Homo sapiens
  CDR3 for beta chain variable domain of TCR clone 97960 (TRBV7-3, TRBJ2-2)
CASSLKRGTLSGELFS

SEQ ID NO: 195921 - protein, 14 aa, Homo sapiens
  CDR3 for alpha chain variable domain of TCR clone 97961 (TRAV2, TRAJ9)
CAVEDRSGGFKTIF

SEQ ID NO: 195922 - protein, 13 aa, Homo sapiens
  CDR3 for beta chain variable domain of TCR clone 97961 (TRBV7-9, TRBJ1-2)
CAISLKRNYGYTF

SEQ ID NO: 195923 - protein, 12 aa, Homo sapiens
  CDR3 for alpha chain variable domain of TCR clone 97962 (TRAV12-3, TRAJ20)
CAMVRGDYKLSL

SEQ ID NO: 195924 - protein, 13 aa, Homo sapiens
  CDR3 for beta chain variable domain of TCR clone 97962 (TRBV23-1, TRBJ1-4)
CASRGKFNEKLFF

SEQ ID NO: 195925 - protein, 20 aa, Homo sapiens
  CDR3 for alpha chain variable domain of TCR clone 97963 (TRAV12-1, TRAJ42)
SSVIQPPTSVKGGSQGNLIF

SEQ ID NO: 195926 - protein, 14 aa, Homo sapiens
  CDR3 for beta chain variable domain of TCR clone 97963 (TRBV12-4, TRBJ1-1)
CASSIGTGGTEAFF

SEQ ID NO: 195927 - protein, 14 aa, Homo sapiens
  CDR3 for alpha chain variable domain of TCR clone 97964 (TRAV12-2, TRAJ13)
CAVKKTGGYQEVIF

SEQ ID NO: 195928 - protein, 15 aa, Homo sapiens
  CDR3 for beta chain variable domain of TCR clone 97964 (TRBV27, TRBJ2-1)
CASSNGGGSSNEQFF

SEQ ID NO: 195929 - protein, 16 aa, Homo sapiens
  CDR3 for alpha chain variable domain of TCR clone 97965 (TRAV3, TRAJ37)
CAVRPHGSGNTGKLIL

SEQ ID NO: 195930 - protein, 14 aa, Homo sapiens
  CDR3 for beta chain variable domain of TCR clone 97965 (TRBV25-1, TRBJ1-1)
CASTHLGGNTEAFF

SEQ ID NO: 195931 - protein, 14 aa, Homo sapiens
  CDR3 for alpha chain variable domain of TCR clone 97966 (TRAV12-1, TRAJ15)
CLPPANQAGTALIF

SEQ ID NO: 195932 - protein, 12 aa, Homo sapiens
  CDR3 for beta chain variable domain of TCR clone 97966 (TRBV7-8, TRBJ2-7)
CASSLGDREQYF

SEQ ID NO: 195933 - protein, 13 aa, Homo sapiens
  CDR3 for alpha chain variable domain of TCR clone 97967 (TRAV3, TRAJ26)
CAVSRGYGQNFVF

SEQ ID NO: 195934 - protein, 14 aa, Homo sapiens
  CDR3 for beta chain variable domain of TCR clone 97967 (TRBV6-5, TRBJ2-2)
CQQFVTRRHRGAVF

SEQ ID NO: 195935 - protein, 13 aa, Homo sapiens
  CDR3 for alpha chain variable domain of TCR clone 97968 (TRAV21, TRAJ56)
CAVRLGANSKLTF

SEQ ID NO: 195936 - protein, 14 aa, Homo sapiens
  CDR3 for beta chain variable domain of TCR clone 97968 (TRBV28, TRBJ2-7)
CASSLLRISYEQYF

SEQ ID NO: 195937 - protein, 14 aa, Homo sapiens
  CDR3 for alpha chain variable domain of TCR clone 97969 (TRAV1-1, TRAJ27)
CAVIYNTNAGKSTF

SEQ ID NO: 195938 - protein, 13 aa, Homo sapiens
  CDR3 for beta chain variable domain of TCR clone 97969 (TRBV12-5, TRBJ1-2)
CAGGVRTGNGYTF

SEQ ID NO: 195939 - protein, 14 aa, Homo sapiens
  CDR3 for alpha chain variable domain of TCR clone 97970 (TRAV36/DV7, TRAJ44)
CCGANTGTASKLTF

SEQ ID NO: 195940 - protein, 14 aa, Homo sapiens
  CDR3 for beta chain variable domain of TCR clone 97970 (TRBV20-1, TRBJ1-3)
CSASPTGAGNTTYF

SEQ ID NO: 195941 - protein, 12 aa, Homo sapiens
  CDR3 for alpha chain variable domain of TCR clone 97971 (TRAV12-1, TRAJ23)
CVGNNQGGKLIF

SEQ ID NO: 195942 - protein, 16 aa, Homo sapiens
  CDR3 for beta chain variable domain of TCR clone 97971 (TRBV11-1, TRBJ2-7)
CASSAQTGTLSYEQYF

SEQ ID NO: 195943 - protein, 14 aa, Homo sapiens
  CDR3 for alpha chain variable domain of TCR clone 97972 (TRAV12-2, TRAJ40)
CAVKIHSGTYKYIF

SEQ ID NO: 195944 - protein, 16 aa, Homo sapiens
  CDR3 for beta chain variable domain of TCR clone 97972 (TRBV5-1, TRBJ2-2)
CASSLWDTTNTGELFF

SEQ ID NO: 195945 - protein, 14 aa, Homo sapiens
  CDR3 for alpha chain variable domain of TCR clone 97973 (TRAV1-2, TRAJ16)
CAVNRFSDGQKLLF

SEQ ID NO: 195946 - protein, 15 aa, Homo sapiens
  CDR3 for beta chain variable domain of TCR clone 97973 (TRBV28, TRBJ2-1)
CASRTGAGVIARQFF

SEQ ID NO: 195947 - protein, 13 aa, Homo sapiens
  CDR3 for alpha chain variable domain of TCR clone 97974 (TRAV3, TRAJ43)
CTVRDTRGGDMRF

SEQ ID NO: 195948 - protein, 15 aa, Homo sapiens
  CDR3 for beta chain variable domain of TCR clone 97974 (TRBV6-5, TRBJ1-5)
CASSYSRRSNQPQHF

SEQ ID NO: 195949 - protein, 13 aa, Homo sapiens
  CDR3 for alpha chain variable domain of TCR clone 97975 (TRAV23/DV6, TRAJ22)
CAPYSGSARQLTF

SEQ ID NO: 195950 - protein, 14 aa, Homo sapiens
  CDR3 for beta chain variable domain of TCR clone 97975 (TRBV4-2, TRBJ1-5)
CASSRDRGNQPQHF

SEQ ID NO: 195951 - protein, 10 aa, Homo sapiens
  CDR3 for alpha chain variable domain of TCR clone 97976 (TRAV23/DV6, TRAJ45)
TGGGADGLTF

SEQ ID NO: 195952 - protein, 20 aa, Homo sapiens
  CDR3 for beta chain variable domain of TCR clone 97976 (TRBV28, TRBJ2-1)
CASTPIGRSPGLAGGNEQFF

SEQ ID NO: 195953 - protein, 16 aa, Homo sapiens
  CDR3 for alpha chain variable domain of TCR clone 97977 (TRAV8-2, TRAJ45)
CVVSEGTGGGADGLTF

SEQ ID NO: 195954 - protein, 14 aa, Homo sapiens
  CDR3 for beta chain variable domain of TCR clone 97977 (TRBV11-2, TRBJ2-5)
CASSRTGGIETQYF

SEQ ID NO: 195955 - protein, 12 aa, Homo sapiens
  CDR3 for alpha chain variable domain of TCR clone 97978 (TRAV12-3, TRAJ17)
CAMTLTGNKLTF

SEQ ID NO: 195956 - protein, 16 aa, Homo sapiens
  CDR3 for beta chain variable domain of TCR clone 97978 (TRBV20-1, TRBJ1-1)
CSARALTQGMNTEAFF

SEQ ID NO: 195957 - protein, 12 aa, Homo sapiens
  CDR3 for alpha chain variable domain of TCR clone 97979 (TRAV8-3, TRAJ20)
CAVDFNDYKLSF

SEQ ID NO: 195958 - protein, 16 aa, Homo sapiens
  CDR3 for beta chain variable domain of TCR clone 97979 (TRBV20-1, TRBJ1-4)
CSAPGQGLLTNEKLFF

SEQ ID NO: 195959 - protein, 13 aa, Homo sapiens
  CDR3 for alpha chain variable domain of TCR clone 97980 (TRAV12-2, TRAJ40)
CAVKRTGTYKYIF

SEQ ID NO: 195960 - protein, 16 aa, Homo sapiens
  CDR3 for beta chain variable domain of TCR clone 97980 (TRBV4-2, TRBJ2-3)
CASSQELAGDTDTQYF

SEQ ID NO: 195961 - protein, 14 aa, Homo sapiens
  CDR3 for alpha chain variable domain of TCR clone 97981 (TRAV12-2, TRAJ13)
CAVKKTGAYQKVTF

SEQ ID NO: 195962 - protein, 15 aa, Homo sapiens
  CDR3 for beta chain variable domain of TCR clone 97981 (TRBV27, TRBJ2-1)
CASSNGGGSSNEQFF

SEQ ID NO: 195963 - protein, 11 aa, Homo sapiens
  CDR3 for alpha chain variable domain of TCR clone 97982 (TRAV21, TRAJ34)
CAVTNTDKLIF

SEQ ID NO: 195964 - protein, 16 aa, Homo sapiens
  CDR3 for beta chain variable domain of TCR clone 97982 (TRBV20-1, TRBJ1-2)
CSASMGQGVANYGYTF

SEQ ID NO: 195965 - protein, 14 aa, Homo sapiens
  CDR3 for alpha chain variable domain of TCR clone 97983 (TRAV23/DV6, TRAJ11)
CAASLDSGYSTLTF

SEQ ID NO: 195966 - protein, 13 aa, Homo sapiens
  CDR3 for beta chain variable domain of TCR clone 97983 (TRBV4-1, TRBJ2-5)
CASSLTRGETQYF

SEQ ID NO: 195967 - protein, 16 aa, Homo sapiens
  CDR3 for alpha chain variable domain of TCR clone 97984 (TRAV17, TRAJ52)
CATDPMGGTSYGKLTF

SEQ ID NO: 195968 - protein, 15 aa, Homo sapiens
  CDR3 for beta chain variable domain of TCR clone 97984 (TRBV4-1, TRBJ1-4)
CASSDTGGTNEKLFF

SEQ ID NO: 195969 - protein, 14 aa, Homo sapiens
  CDR3 for alpha chain variable domain of TCR clone 97985 (TRAV23/DV6, TRAJ45)
CAVYSGGGADGLTF

SEQ ID NO: 195970 - protein, 15 aa, Homo sapiens
  CDR3 for beta chain variable domain of TCR clone 97985 (TRBV10-3, TRBJ2-3)
CAISLTSGGTDTQYF

SEQ ID NO: 195971 - protein, 13 aa, Homo sapiens
  CDR3 for alpha chain variable domain of TCR clone 97986 (TRAV12-1, TRAJ20)
CVVNRETDYKLSF

SEQ ID NO: 195972 - protein, 19 aa, Homo sapiens
  CDR3 for beta chain variable domain of TCR clone 97986 (TRBV7-2, TRBJ2-3)
CASSFLSRNWGGGTDTQYF

SEQ ID NO: 195973 - protein, 14 aa, Homo sapiens
  CDR3 for alpha chain variable domain of TCR clone 97987 (TRAV13-1, TRAJ35)
CAASKGGFGNVLHC

SEQ ID NO: 195974 - protein, 16 aa, Homo sapiens
  CDR3 for beta chain variable domain of TCR clone 97987 (TRBV24-1, TRBJ2-4)
CATSDFPSGGENIQYF

SEQ ID NO: 195975 - protein, 16 aa, Homo sapiens
  CDR3 for alpha chain variable domain of TCR clone 97988 (TRAV16, TRAJ52)
CALSAAGGTSYGKLTF

SEQ ID NO: 195976 - protein, 12 aa, Homo sapiens
  CDR3 for beta chain variable domain of TCR clone 97988 (TRBV12-4, TRBJ1-3)
YASSFSGNTIYF

SEQ ID NO: 195977 - protein, 12 aa, Homo sapiens
  CDR3 for alpha chain variable domain of TCR clone 97989 (TRAV2, TRAJ33)
CAVPDSNYQLIW

SEQ ID NO: 195978 - protein, 16 aa, Homo sapiens
  CDR3 for beta chain variable domain of TCR clone 97989 (TRBV12-4, TRBJ2-7)
CASSPEGQGSSYEQYF

SEQ ID NO: 195979 - protein, 14 aa, Homo sapiens
  CDR3 for alpha chain variable domain of TCR clone 97990 (TRAV13-1, TRAJ40)
CAASMTSGTYKYIF

SEQ ID NO: 195980 - protein, 14 aa, Homo sapiens
  CDR3 for beta chain variable domain of TCR clone 97990 (TRBV5-1, TRBJ2-3)
CASSLFGPTDTQYF

SEQ ID NO: 195981 - protein, 21 aa, Homo sapiens
  CDR3 for alpha chain variable domain of TCR clone 97991 (TRAV36/DV7, TRAJ39)
TATQTGDSAIYLPNAGNMPTF

SEQ ID NO: 195982 - protein, 13 aa, Homo sapiens
  CDR3 for beta chain variable domain of TCR clone 97991 (TRBV18, TRBJ2-3)
CASSTGRTDTQYF

SEQ ID NO: 195983 - protein, 11 aa, Homo sapiens
  CDR3 for alpha chain variable domain of TCR clone 97992 (TRAV2, TRAJ21)
CPVFNFNKFYF

SEQ ID NO: 195984 - protein, 14 aa, Homo sapiens
  CDR3 for beta chain variable domain of TCR clone 97992 (TRBV15, TRBJ2-3)
CATRSGTSTDTQYF

SEQ ID NO: 195985 - protein, 15 aa, Homo sapiens
  CDR3 for alpha chain variable domain of TCR clone 97993 (TRAV4, TRAJ39)
CLVGPNNNAGNMLTF

SEQ ID NO: 195986 - protein, 16 aa, Homo sapiens
  CDR3 for beta chain variable domain of TCR clone 97993 (TRBV27, TRBJ2-2)
CASSCRGLVRTGELFF

SEQ ID NO: 195987 - protein, 13 aa, Homo sapiens
  CDR3 for alpha chain variable domain of TCR clone 97994 (TRAV12-3, TRAJ56)
CAMSFGANSKLTF

SEQ ID NO: 195988 - protein, 15 aa, Homo sapiens
  CDR3 for beta chain variable domain of TCR clone 97994 (TRBV25-1, TRBJ1-4)
CASSPGDSTNEKLFF

SEQ ID NO: 195989 - protein, 12 aa, Homo sapiens
  CDR3 for alpha chain variable domain of TCR clone 97995 (TRAV21, TRAJ33)
CAKMDSNYHLIW

SEQ ID NO: 195990 - protein, 14 aa, Homo sapiens
  CDR3 for beta chain variable domain of TCR clone 97995 (TRBV2, TRBJ2-7)
CASSLTSGGYEQYF

SEQ ID NO: 195991 - protein, 15 aa, Homo sapiens
  CDR3 for alpha chain variable domain of TCR clone 97996 (TRAV36/DV7, TRAJ40)
CAVGPFGSGTYKYIF

SEQ ID NO: 195992 - protein, 16 aa, Homo sapiens
  CDR3 for beta chain variable domain of TCR clone 97996 (TRBV12-5, TRBJ2-5)
CASGPRTSGNQETQYF

SEQ ID NO: 195993 - protein, 15 aa, Homo sapiens
  CDR3 for alpha chain variable domain of TCR clone 97997 (TRAV8-2, TRAJ40)
CVVLGTTSGTYKYIF

SEQ ID NO: 195994 - protein, 15 aa, Homo sapiens
  CDR3 for beta chain variable domain of TCR clone 97997 (TRBV20-1, TRBJ2-7)
CSARDRVSGMDEQYF

SEQ ID NO: 195995 - protein, 15 aa, Homo sapiens
  CDR3 for alpha chain variable domain of TCR clone 97998 (TRAV21, TRAJ10)
CAVPLLTGGGNKLNF

SEQ ID NO: 195996 - protein, 14 aa, Homo sapiens
  CDR3 for beta chain variable domain of TCR clone 97998 (TRBV12-4, TRBJ1-1)
CASSLGTGGTEAFF

SEQ ID NO: 195997 - protein, 14 aa, Homo sapiens
  CDR3 for alpha chain variable domain of TCR clone 97999 (TRAV12-2, TRAJ9)
CAVNALEGGFKTIF

SEQ ID NO: 195998 - protein, 13 aa, Homo sapiens
  CDR3 for beta chain variable domain of TCR clone 97999 (TRBV7-3, TRBJ1-1)
CASSQDWGAEAFF

SEQ ID NO: 195999 - protein, 15 aa, Homo sapiens
  CDR3 for alpha chain variable domain of TCR clone 98000 (TRAV17, TRAJ52)
CATEAGGTIYGKLTF

SEQ ID NO: 196000 - protein, 14 aa, Homo sapiens
  CDR3 for beta chain variable domain of TCR clone 98000 (TRBV28, TRBJ1-5)
CASSLGVLVKPQHF

SEQ ID NO: 196001 - protein, 12 aa, Homo sapiens
  CDR3 for alpha chain variable domain of TCR clone 98001 (TRAV8-4, TRAJ43)
CAVSVNNNYMRF

SEQ ID NO: 196002 - protein, 14 aa, Homo sapiens
  CDR3 for beta chain variable domain of TCR clone 98001 (TRBV11-2, TRBJ1-2)
CASSLGTANYGYTF

SEQ ID NO: 196003 - protein, 14 aa, Homo sapiens
  CDR3 for alpha chain variable domain of TCR clone 98002 (TRAV13-1, TRAJ9)
CAASALTGGFKTIF

SEQ ID NO: 196004 - protein, 15 aa, Homo sapiens
  CDR3 for beta chain variable domain of TCR clone 98002 (TRBV9, TRBJ1-6)
CASSVAGTGDSPLHF

SEQ ID NO: 196005 - protein, 12 aa, Homo sapiens
  CDR3 for alpha chain variable domain of TCR clone 98003 (TRAV13-2, TRAJ47)
CAEALYGNKLVF

SEQ ID NO: 196006 - protein, 14 aa, Homo sapiens
  CDR3 for beta chain variable domain of TCR clone 98003 (TRBV11-2, TRBJ2-3)
CASSRLARTDTQYF

SEQ ID NO: 196007 - protein, 15 aa, Homo sapiens
  CDR3 for alpha chain variable domain of TCR clone 98004 (TRAV3, TRAJ3)
CAVRDMRSSASKIIF

SEQ ID NO: 196008 - protein, 14 aa, Homo sapiens
  CDR3 for beta chain variable domain of TCR clone 98004 (TRBV19, TRBJ2-1)
CASPTFVLSGEQFF

SEQ ID NO: 196009 - protein, 14 aa, Homo sapiens
  CDR3 for alpha chain variable domain of TCR clone 98005 (TRAV2, TRAJ21)
CAVEDLNNFNKFYF

SEQ ID NO: 196010 - protein, 11 aa, Homo sapiens
  CDR3 for beta chain variable domain of TCR clone 98005 (TRBV10-3, TRBJ2-1)
CAISDRGVQFF

SEQ ID NO: 196011 - protein, 12 aa, Homo sapiens
  CDR3 for alpha chain variable domain of TCR clone 98006 (TRAV3, TRAJ20)
CAVRDGDYKLSF

SEQ ID NO: 196012 - protein, 13 aa, Homo sapiens
  CDR3 for beta chain variable domain of TCR clone 98006 (TRBV19, TRBJ2-7)
CASRKAGGSEQYF

SEQ ID NO: 196013 - protein, 14 aa, Homo sapiens
  CDR3 for alpha chain variable domain of TCR clone 98007 (TRAV12-2, TRAJ15)
CAPHTGQAGTALIF

SEQ ID NO: 196014 - protein, 12 aa, Homo sapiens
  CDR3 for beta chain variable domain of TCR clone 98007 (TRBV11-2, TRBJ2-2)
CASSLGGGELFF

SEQ ID NO: 196015 - protein, 15 aa, Homo sapiens
  CDR3 for alpha chain variable domain of TCR clone 98008 (TRAV8-4, TRAJ12)
CAVSDRVDSSYKLIF

SEQ ID NO: 196016 - protein, 15 aa, Homo sapiens
  CDR3 for beta chain variable domain of TCR clone 98008 (TRBV5-1, TRBJ2-1)
CASSWGPGPGGEQFF

SEQ ID NO: 196017 - protein, 14 aa, Homo sapiens
  CDR3 for alpha chain variable domain of TCR clone 98009 (TRAV21, TRAJ21)
CAVGVEDNSNKFYF

SEQ ID NO: 196018 - protein, 17 aa, Homo sapiens
  CDR3 for beta chain variable domain of TCR clone 98009 (TRBV20-1, TRBJ2-2)
CSASGSGQGGLTGELFF

SEQ ID NO: 196019 - protein, 13 aa, Homo sapiens
  CDR3 for alpha chain variable domain of TCR clone 98010 (TRAV20, TRAJ37)
CAGRSSNTGKLIF

SEQ ID NO: 196020 - protein, 21 aa, Homo sapiens
  CDR3 for beta chain variable domain of TCR clone 98010 (TRBV4-2, TRBJ2-3)
PCSQKTRPCISVPAAPDTQYF

SEQ ID NO: 196021 - protein, 13 aa, Homo sapiens
  CDR3 for alpha chain variable domain of TCR clone 98011 (TRAV21, TRAJ32)
CAVRGGATNKLIF

SEQ ID NO: 196022 - protein, 15 aa, Homo sapiens
  CDR3 for beta chain variable domain of TCR clone 98011 (TRBV23-1, TRBJ2-1)
CASSQWPQLTMSSSS

SEQ ID NO: 196023 - protein, 14 aa, Homo sapiens
  CDR3 for alpha chain variable domain of TCR clone 98012 (TRAV1-2, TRAJ8)
CAVREDTGFQKLVL

SEQ ID NO: 196024 - protein, 15 aa, Homo sapiens
  CDR3 for beta chain variable domain of TCR clone 98012 (TRBV20-1, TRBJ2-7)
CSARDRVSGMDEQYF

SEQ ID NO: 196025 - protein, 14 aa, Homo sapiens
  CDR3 for alpha chain variable domain of TCR clone 98013 (TRAV13-1, TRAJ44)
CAAKATGTTSKLTF

SEQ ID NO: 196026 - protein, 17 aa, Homo sapiens
  CDR3 for beta chain variable domain of TCR clone 98013 (TRBV7-3, TRBJ2-3)
RASSLMKRMRGADTQYF

SEQ ID NO: 196027 - protein, 14 aa, Homo sapiens
  CDR3 for alpha chain variable domain of TCR clone 98014 (TRAV12-2, TRAJ5)
CAVNRSTGRRALTF

SEQ ID NO: 196028 - protein, 17 aa, Homo sapiens
  CDR3 for beta chain variable domain of TCR clone 98014 (TRBV5-1, TRBJ2-5)
CASSPVALGQNQETQYF

SEQ ID NO: 196029 - protein, 16 aa, Homo sapiens
  CDR3 for alpha chain variable domain of TCR clone 98015 (TRAV2, TRAJ4)
CAVEDRCSGGYNKLIF

SEQ ID NO: 196030 - protein, 13 aa, Homo sapiens
  CDR3 for beta chain variable domain of TCR clone 98015 (TRBV7-7, TRBJ2-5)
CASSRSGQETQYF

SEQ ID NO: 196031 - protein, 13 aa, Homo sapiens
  CDR3 for alpha chain variable domain of TCR clone 98016 (TRAV12-1, TRAJ11)
CLVNRAGYSTLTF

SEQ ID NO: 196032 - protein, 15 aa, Homo sapiens
  CDR3 for beta chain variable domain of TCR clone 98016 (TRBV7-3, TRBJ2-2)
CASSETGQGTGELFF

SEQ ID NO: 196033 - protein, 15 aa, Homo sapiens
  CDR3 for alpha chain variable domain of TCR clone 98017 (TRAV26-2, TRAJ13)
CILRDLSGGYRKVTF

SEQ ID NO: 196034 - protein, 11 aa, Homo sapiens
  CDR3 for beta chain variable domain of TCR clone 98017 (TRBV7-9, TRBJ2-5)
CASSLSATQYF

SEQ ID NO: 196035 - protein, 14 aa, Homo sapiens
  CDR3 for alpha chain variable domain of TCR clone 98018 (TRAV12-2, TRAJ45)
CAVNIGGGDDGLTF

SEQ ID NO: 196036 - protein, 13 aa, Homo sapiens
  CDR3 for beta chain variable domain of TCR clone 98018 (TRBV19, TRBJ2-2)
CASSIWSTGELFF

SEQ ID NO: 196037 - protein, 17 aa, Homo sapiens
  CDR3 for alpha chain variable domain of TCR clone 98019 (TRAV13-1, TRAJ28)
CAASPPYSGAGSYQLTF

SEQ ID NO: 196038 - protein, 16 aa, Homo sapiens
  CDR3 for beta chain variable domain of TCR clone 98019 (TRBV4-2, TRBJ2-3)
CASSQELAGDTDTQYF

SEQ ID NO: 196039 - protein, 14 aa, Homo sapiens
  CDR3 for alpha chain variable domain of TCR clone 98020 (TRAV1-2, TRAJ12)
CAVSGTYSSYKLIF

SEQ ID NO: 196040 - protein, 15 aa, Homo sapiens
  CDR3 for beta chain variable domain of TCR clone 98020 (TRBV2, TRBJ2-4)
CASSGTNLAKNIQYF

SEQ ID NO: 196041 - protein, 15 aa, Homo sapiens
  CDR3 for alpha chain variable domain of TCR clone 98021 (TRAV3, TRAJ22)
CAVRDRGGSARQLTF

SEQ ID NO: 196042 - protein, 15 aa, Homo sapiens
  CDR3 for beta chain variable domain of TCR clone 98021 (TRBV7-2, TRBJ1-5)
CASSRGQGDNQPQHF

SEQ ID NO: 196043 - protein, 13 aa, Homo sapiens
  CDR3 for alpha chain variable domain of TCR clone 98022 (TRAV12-2, TRAJ9)
CAVQWAGGFKTIF

SEQ ID NO: 196044 - protein, 15 aa, Homo sapiens
  CDR3 for beta chain variable domain of TCR clone 98022 (TRBV5-1, TRBJ1-4)
CASSLTADSDEKLFF

SEQ ID NO: 196045 - protein, 13 aa, Homo sapiens
  CDR3 for alpha chain variable domain of TCR clone 98023 (TRAV21, TRAJ11)
CAVPNSGYSTLTF

SEQ ID NO: 196046 - protein, 13 aa, Homo sapiens
  CDR3 for beta chain variable domain of TCR clone 98023 (TRBV3-1, TRBJ2-7)
CASSLRDGYQQYF

SEQ ID NO: 196047 - protein, 16 aa, Homo sapiens
  CDR3 for alpha chain variable domain of TCR clone 98024 (TRAV30, TRAJ24)
CGTEIVDADSWGKFQF

SEQ ID NO: 196048 - protein, 17 aa, Homo sapiens
  CDR3 for beta chain variable domain of TCR clone 98024 (TRBV3-1, TRBJ2-5)
CASSQGLARMYQETQYF

SEQ ID NO: 196049 - protein, 12 aa, Homo sapiens
  CDR3 for alpha chain variable domain of TCR clone 98025 (TRAV21, TRAJ6)
CAAKGGSYIPTF

SEQ ID NO: 196050 - protein, 13 aa, Homo sapiens
  CDR3 for beta chain variable domain of TCR clone 98025 (TRBV11-2, TRBJ1-1)
CASSFTEKTEAFF

SEQ ID NO: 196051 - protein, 16 aa, Homo sapiens
  CDR3 for alpha chain variable domain of TCR clone 98026 (TRAV3, TRAJ10)
CAVRDMRAGGGNKLNF

SEQ ID NO: 196052 - protein, 12 aa, Homo sapiens
  CDR3 for beta chain variable domain of TCR clone 98026 (TRBV20-1, TRBJ2-7)
CSAGLKMGEQYF

SEQ ID NO: 196053 - protein, 14 aa, Homo sapiens
  CDR3 for alpha chain variable domain of TCR clone 98027 (TRAV8-4, TRAJ29)
CAVSAVEGNTPLVF

SEQ ID NO: 196054 - protein, 13 aa, Homo sapiens
  CDR3 for beta chain variable domain of TCR clone 98027 (TRBV12-4, TRBJ2-7)
CASSFQGCYEQYF

SEQ ID NO: 196055 - protein, 16 aa, Homo sapiens
  CDR3 for alpha chain variable domain of TCR clone 98028 (TRAV30, TRAJ24)
CGTEIVDDDSWGKFQF

SEQ ID NO: 196056 - protein, 12 aa, Homo sapiens
  CDR3 for beta chain variable domain of TCR clone 98028 (TRBV11-2, TRBJ2-2)
CASSLPTGELFF

SEQ ID NO: 196057 - protein, 12 aa, Homo sapiens
  CDR3 for alpha chain variable domain of TCR clone 98029 (TRAV12-3, TRAJ17)
CAMTLTGNKLTF

SEQ ID NO: 196058 - protein, 10 aa, Homo sapiens
  CDR3 for beta chain variable domain of TCR clone 98029 (TRBV24-1, TRBJ2-2)
CATSEADLER

SEQ ID NO: 196059 - protein, 13 aa, Homo sapiens
  CDR3 for alpha chain variable domain of TCR clone 98030 (TRAV21, TRAJ11)
CAVPNSGYSTLTF

SEQ ID NO: 196060 - protein, 14 aa, Homo sapiens
  CDR3 for beta chain variable domain of TCR clone 98030 (TRBV12-5, TRBJ2-5)
CASGSRTHQETQYF

SEQ ID NO: 196061 - protein, 14 aa, Homo sapiens
  CDR3 for alpha chain variable domain of TCR clone 98031 (TRAV12-3, TRAJ29)
CAMSPYSGSTPLVF

SEQ ID NO: 196062 - protein, 15 aa, Homo sapiens
  CDR3 for beta chain variable domain of TCR clone 98031 (TRBV27, TRBJ2-1)
CASSNGGGSSNEQFF

SEQ ID NO: 196063 - protein, 12 aa, Homo sapiens
  CDR3 for alpha chain variable domain of TCR clone 98032 (TRAV12-1, TRAJ40)
CVVYSGTYKYIF

SEQ ID NO: 196064 - protein, 18 aa, Homo sapiens
  CDR3 for beta chain variable domain of TCR clone 98032 (TRBV11-2, TRBJ2-3)
CASSLGGASRGAPNTQYF

SEQ ID NO: 196065 - protein, 12 aa, Homo sapiens
  CDR3 for alpha chain variable domain of TCR clone 98033 (TRAV21, TRAJ15)
CAVNQAGTALIF

SEQ ID NO: 196066 - protein, 13 aa, Homo sapiens
  CDR3 for beta chain variable domain of TCR clone 98033 (TRBV11-2, TRBJ2-5)
RASSSTGEETQYF

SEQ ID NO: 196067 - protein, 16 aa, Homo sapiens
  CDR3 for alpha chain variable domain of TCR clone 98034 (TRAV14/DV4, TRAJ53)
CAMREGGGGSNYKLTF

SEQ ID NO: 196068 - protein, 12 aa, Homo sapiens
  CDR3 for beta chain variable domain of TCR clone 98034 (TRBV7-7, TRBJ2-5)
CASSLGGETQYF

SEQ ID NO: 196069 - protein, 15 aa, Homo sapiens
  CDR3 for alpha chain variable domain of TCR clone 98035 (TRAV3, TRAJ20)
CAVRDIKLSDYKLSF

SEQ ID NO: 196070 - protein, 15 aa, Homo sapiens
  CDR3 for beta chain variable domain of TCR clone 98035 (TRBV7-9, TRBJ1-6)
CASRSPGRGNSPLHF

SEQ ID NO: 196071 - protein, 13 aa, Homo sapiens
  CDR3 for alpha chain variable domain of TCR clone 98036 (TRAV13-1, TRAJ5)
CAASDTGRRALTF

SEQ ID NO: 196072 - protein, 12 aa, Homo sapiens
  CDR3 for beta chain variable domain of TCR clone 98036 (TRBV28, TRBJ2-3)
CASSLYRDTLYF

SEQ ID NO: 196073 - protein, 11 aa, Homo sapiens
  CDR3 for alpha chain variable domain of TCR clone 98037 (TRAV17, TRAJ9)
CGFTGGFKTIF

SEQ ID NO: 196074 - protein, 14 aa, Homo sapiens
  CDR3 for beta chain variable domain of TCR clone 98037 (TRBV7-9, TRBJ2-2)
CASSLGQDTGELFF

SEQ ID NO: 196075 - protein, 14 aa, Homo sapiens
  CDR3 for alpha chain variable domain of TCR clone 98038 (TRAV12-3, TRAJ9)
CAMSPNTGGFKTIF

SEQ ID NO: 196076 - protein, 20 aa, Homo sapiens
  CDR3 for beta chain variable domain of TCR clone 98038 (TRBV4-2, TRBJ2-7)
CASSQASGGNLRAVLRAGHQ

SEQ ID NO: 196077 - protein, 12 aa, Homo sapiens
  CDR3 for alpha chain variable domain of TCR clone 98039 (TRAV12-2, TRAJ43)
CAVNVNNNDMRF

SEQ ID NO: 196078 - protein, 14 aa, Homo sapiens
  CDR3 for beta chain variable domain of TCR clone 98039 (TRBV7-2, TRBJ2-7)
CASSFLGRVYGQYF

SEQ ID NO: 196079 - protein, 16 aa, Homo sapiens
  CDR3 for alpha chain variable domain of TCR clone 98040 (TRAV2, TRAJ4)
CAVEDRFSGGYNKLIF

SEQ ID NO: 196080 - protein, 16 aa, Homo sapiens
  CDR3 for beta chain variable domain of TCR clone 98040 (TRBV7-9, TRBJ2-1)
CASSPRLGSSYNEQFF

SEQ ID NO: 196081 - protein, 15 aa, Homo sapiens
  CDR3 for alpha chain variable domain of TCR clone 98041 (TRAV25, TRAJ52)
CAGTSGSTSYRKLTF

SEQ ID NO: 196082 - protein, 16 aa, Homo sapiens
  CDR3 for beta chain variable domain of TCR clone 98041 (TRBV15, TRBJ1-2)
CATSRGPRTGGGGYTF

SEQ ID NO: 196083 - protein, 15 aa, Homo sapiens
  CDR3 for alpha chain variable domain of TCR clone 98042 (TRAV20, TRAJ58)
CAVQDLETSGSRLTF

SEQ ID NO: 196084 - protein, 18 aa, Homo sapiens
  CDR3 for beta chain variable domain of TCR clone 98042 (TRBV12-4, TRBJ2-2)
CASSLVAGTRGRTGELFF

SEQ ID NO: 196085 - protein, 18 aa, Homo sapiens
  CDR3 for alpha chain variable domain of TCR clone 98043 (TRAV13-1, TRAJ52)
CAAKNPNAGGTSYGKLTF

SEQ ID NO: 196086 - protein, 14 aa, Homo sapiens
  CDR3 for beta chain variable domain of TCR clone 98043 (TRBV7-3, TRBJ2-1)
CASSLAGGTNEQSF

SEQ ID NO: 196087 - protein, 13 aa, Homo sapiens
  CDR3 for alpha chain variable domain of TCR clone 98044 (TRAV12-1, TRAJ6)
CVVFPGGSYIPTF

SEQ ID NO: 196088 - protein, 14 aa, Homo sapiens
  CDR3 for beta chain variable domain of TCR clone 98044 (TRBV20-1, TRBJ1-3)
CSASPTGAGNTVYF

SEQ ID NO: 196089 - protein, 12 aa, Homo sapiens
  CDR3 for alpha chain variable domain of TCR clone 98045 (TRAV13-1, TRAJ53)
AASGGSNYKLTF

SEQ ID NO: 196090 - protein, 17 aa, Homo sapiens
  CDR3 for beta chain variable domain of TCR clone 98045 (TRBV13, TRBJ2-3)
CASSLSRVAGGRNTQYF

SEQ ID NO: 196091 - protein, 10 aa, Homo sapiens
  CDR3 for alpha chain variable domain of TCR clone 98046 (TRAV16, TRAJ22)
SAMYLRQLTF

SEQ ID NO: 196092 - protein, 16 aa, Homo sapiens
  CDR3 for beta chain variable domain of TCR clone 98046 (TRBV4-1, TRBJ1-4)
CASSRGGTASNEKLFF

SEQ ID NO: 196093 - protein, 12 aa, Homo sapiens
  CDR3 for alpha chain variable domain of TCR clone 98047 (TRAV2, TRAJ33)
CAVPDSNYQLIL

SEQ ID NO: 196094 - protein, 17 aa, Homo sapiens
  CDR3 for beta chain variable domain of TCR clone 98047 (TRBV6-5, TRBJ2-3)
CASSYGTSLYKSDTQYF

SEQ ID NO: 196095 - protein, 14 aa, Homo sapiens
  CDR3 for alpha chain variable domain of TCR clone 98048 (TRAV3, TRAJ40)
FAVRDRRGTYKYIF

SEQ ID NO: 196096 - protein, 15 aa, Homo sapiens
  CDR3 for beta chain variable domain of TCR clone 98048 (TRBV11-1, TRBJ1-3)
CASTDPRAFGNTIYF

SEQ ID NO: 196097 - protein, 15 aa, Homo sapiens
  CDR3 for alpha chain variable domain of TCR clone 98049 (TRAV12-2, TRAJ50)
CAVNGLETSYDKVIF

SEQ ID NO: 196098 - protein, 13 aa, Homo sapiens
  CDR3 for beta chain variable domain of TCR clone 98049 (TRBV7-3, TRBJ1-1)
CASSQDWGAEAFF

SEQ ID NO: 196099 - protein, 15 aa, Homo sapiens
  CDR3 for alpha chain variable domain of TCR clone 98050 (TRAV2, TRAJ28)
CAVPYSGAGSYQLTF

SEQ ID NO: 196100 - protein, 14 aa, Homo sapiens
  CDR3 for beta chain variable domain of TCR clone 98050 (TRBV7-6, TRBJ2-3)
CASSLGTVTDTQYF

SEQ ID NO: 196101 - protein, 16 aa, Homo sapiens
  CDR3 for alpha chain variable domain of TCR clone 98051 (TRAV3, TRAJ37)
CAVRPHGSANTGKLIF

SEQ ID NO: 196102 - protein, 16 aa, Homo sapiens
  CDR3 for beta chain variable domain of TCR clone 98051 (TRBV9, TRBJ1-2)
CASSVEEKVSPYGYTF

SEQ ID NO: 196103 - protein, 16 aa, Homo sapiens
  CDR3 for alpha chain variable domain of TCR clone 98052 (TRAV30, TRAJ24)
CGTAIVDADSWGKFQF

SEQ ID NO: 196104 - protein, 15 aa, Homo sapiens
  CDR3 for beta chain variable domain of TCR clone 98052 (TRBV15, TRBJ1-5)
CATSRDPVSNQPQHF

SEQ ID NO: 196105 - protein, 10 aa, Homo sapiens
  CDR3 for alpha chain variable domain of TCR clone 98053 (TRAV1-2, TRAJ31)
CAFFRCQTHV

SEQ ID NO: 196106 - protein, 13 aa, Homo sapiens
  CDR3 for beta chain variable domain of TCR clone 98053 (TRBV7-9, TRBJ1-2)
CASSVKQNYGYTF

SEQ ID NO: 196107 - protein, 11 aa, Homo sapiens
  CDR3 for alpha chain variable domain of TCR clone 98054 (TRAV3, TRAJ21)
CAVGNFNKFYF

SEQ ID NO: 196108 - protein, 15 aa, Homo sapiens
  CDR3 for beta chain variable domain of TCR clone 98054 (TRBV6-3, TRBJ2-1)
RASSAGLAGNNEQFF

SEQ ID NO: 196109 - protein, 14 aa, Homo sapiens
  CDR3 for alpha chain variable domain of TCR clone 98055 (TRAV12-3, TRAJ20)
CAMSARRGDYKLRF

SEQ ID NO: 196110 - protein, 14 aa, Homo sapiens
  CDR3 for beta chain variable domain of TCR clone 98055 (TRBV7-3, TRBJ2-3)
CASSPSARTDTQYF

SEQ ID NO: 196111 - protein, 13 aa, Homo sapiens
  CDR3 for alpha chain variable domain of TCR clone 98056 (TRAV23/DV6, TRAJ22)
CAPWGGSARQLTF

SEQ ID NO: 196112 - protein, 14 aa, Homo sapiens
  CDR3 for beta chain variable domain of TCR clone 98056 (TRBV18, TRBJ2-7)
CASSPTSGGYEKYF

SEQ ID NO: 196113 - protein, 16 aa, Homo sapiens
  CDR3 for alpha chain variable domain of TCR clone 98057 (TRAV20, TRAJ28)
CAVRDPSGAGSYQLTF

SEQ ID NO: 196114 - protein, 13 aa, Homo sapiens
  CDR3 for beta chain variable domain of TCR clone 98057 (TRBV12-4, TRBJ2-5)
CASRLAVQETQYF

SEQ ID NO: 196115 - protein, 12 aa, Homo sapiens
  CDR3 for alpha chain variable domain of TCR clone 98058 (TRAV1-2, TRAJ17)
CAMRAAGNKLTF

SEQ ID NO: 196116 - protein, 16 aa, Homo sapiens
  CDR3 for beta chain variable domain of TCR clone 98058 (TRBV20-1, TRBJ2-1)
CSAPGLAGSYSDEQFF

SEQ ID NO: 196117 - protein, 11 aa, Homo sapiens
  CDR3 for alpha chain variable domain of TCR clone 98059 (TRAV2, TRAJ33)
CAVESNYQLIW

SEQ ID NO: 196118 - protein, 15 aa, Homo sapiens
  CDR3 for beta chain variable domain of TCR clone 98059 (TRBV27, TRBJ2-1)
CASSNGGGSSNEQFF

SEQ ID NO: 196119 - protein, 14 aa, Homo sapiens
  CDR3 for alpha chain variable domain of TCR clone 98060 (TRAV12-1, TRAJ38)
CVVHNAGSNRKLIW

SEQ ID NO: 196120 - protein, 13 aa, Homo sapiens
  CDR3 for beta chain variable domain of TCR clone 98060 (TRBV19, TRBJ2-1)
CATSRGVYNEQFF

SEQ ID NO: 196121 - protein, 12 aa, Homo sapiens
  CDR3 for alpha chain variable domain of TCR clone 98061 (TRAV12-1, TRAJ40)
CVVYSGTYKDIF

SEQ ID NO: 196122 - protein, 17 aa, Homo sapiens
  CDR3 for beta chain variable domain of TCR clone 98061 (TRBV11-3, TRBJ1-5)
CASSPLTGLRGNQPQHF

SEQ ID NO: 196123 - protein, 15 aa, Homo sapiens
  CDR3 for alpha chain variable domain of TCR clone 98062 (TRAV26-1, TRAJ17)
CVVRVVKAAGNKLTF

SEQ ID NO: 196124 - protein, 16 aa, Homo sapiens
  CDR3 for beta chain variable domain of TCR clone 98062 (TRBV7-9, TRBJ2-1)
CASSLVSGPSYNEQFF

SEQ ID NO: 196125 - protein, 13 aa, Homo sapiens
  CDR3 for alpha chain variable domain of TCR clone 98063 (TRAV3, TRAJ29)
CAVKDIIDTPLVF

SEQ ID NO: 196126 - protein, 14 aa, Homo sapiens
  CDR3 for beta chain variable domain of TCR clone 98063 (TRBV27, TRBJ2-1)
CASSATGGYNEQFF

SEQ ID NO: 196127 - protein, 16 aa, Homo sapiens
  CDR3 for alpha chain variable domain of TCR clone 98064 (TRAV3, TRAJ6)
CAVRDGMGRRKLHTYI

SEQ ID NO: 196128 - protein, 15 aa, Homo sapiens
  CDR3 for beta chain variable domain of TCR clone 98064 (TRBV5-1, TRBJ2-1)
CASSLGDFTTYEQYF

SEQ ID NO: 196129 - protein, 12 aa, Homo sapiens
  CDR3 for alpha chain variable domain of TCR clone 98065 (TRAV16, TRAJ10)
CSRTGGGNKLTF

SEQ ID NO: 196130 - protein, 14 aa, Homo sapiens
  CDR3 for beta chain variable domain of TCR clone 98065 (TRBV7-3, TRBJ1-1)
CASSLKGGNTEAFF

SEQ ID NO: 196131 - protein, 14 aa, Homo sapiens
  CDR3 for alpha chain variable domain of TCR clone 98066 (TRAV35, TRAJ50)
CAGHRKTSYDKVIF

SEQ ID NO: 196132 - protein, 17 aa, Homo sapiens
  CDR3 for beta chain variable domain of TCR clone 98066 (TRBV7-8, TRBJ2-6)
CANSAGTGGAGANDLTF

SEQ ID NO: 196133 - protein, 13 aa, Homo sapiens
  CDR3 for alpha chain variable domain of TCR clone 98067 (TRAV27, TRAJ3)
ASLRGSSASKIIF

SEQ ID NO: 196134 - protein, 12 aa, Homo sapiens
  CDR3 for beta chain variable domain of TCR clone 98067 (TRBV28, TRBJ2-3)
CASSLYRDTQYF

SEQ ID NO: 196135 - protein, 14 aa, Homo sapiens
  CDR3 for alpha chain variable domain of TCR clone 98068 (TRAV8-3, TRAJ23)
CAVIIYNQGGKLIF

SEQ ID NO: 196136 - protein, 15 aa, Homo sapiens
  CDR3 for beta chain variable domain of TCR clone 98068 (TRBV7-9, TRBJ1-6)
CASSSPGRGNSPLHF

SEQ ID NO: 196137 - protein, 15 aa, Homo sapiens
  CDR3 for alpha chain variable domain of TCR clone 98069 (TRAV25, TRAJ53)
CAATGGGGSNYKLTF

SEQ ID NO: 196138 - protein, 19 aa, Homo sapiens
  CDR3 for beta chain variable domain of TCR clone 98069 (TRBV7-2, TRBJ2-3)
CASSFLSRNWCGGTDTQYF

SEQ ID NO: 196139 - protein, 13 aa, Homo sapiens
  CDR3 for alpha chain variable domain of TCR clone 98070 (TRAV40, TRAJ41)
CLLGAKSGYALNF

SEQ ID NO: 196140 - protein, 15 aa, Homo sapiens
  CDR3 for beta chain variable domain of TCR clone 98070 (TRBV4-2, TRBJ1-1)
CASSQLQGASAEAFF

SEQ ID NO: 196141 - protein, 14 aa, Homo sapiens
  CDR3 for alpha chain variable domain of TCR clone 98071 (TRAV8-3, TRAJ9)
CAVVYNTGGFKTIF

SEQ ID NO: 196142 - protein, 14 aa, Homo sapiens
  CDR3 for beta chain variable domain of TCR clone 98071 (TRBV2, TRBJ2-3)
CASNRGTSTETQYF

SEQ ID NO: 196143 - protein, 14 aa, Homo sapiens
  CDR3 for alpha chain variable domain of TCR clone 98072 (TRAV12-1, TRAJ12)
CVVNGRDSSYKLIF

SEQ ID NO: 196144 - protein, 13 aa, Homo sapiens
  CDR3 for beta chain variable domain of TCR clone 98072 (TRBV28, TRBJ2-2)
CPSIRESTGELFF

SEQ ID NO: 196145 - protein, 12 aa, Homo sapiens
  CDR3 for alpha chain variable domain of TCR clone 98073 (TRAV8-3, TRAJ26)
CAGDNYGQNFVF

SEQ ID NO: 196146 - protein, 15 aa, Homo sapiens
  CDR3 for beta chain variable domain of TCR clone 98073 (TRBV9, TRBJ2-1)
CASSLTGSSYNEQFF

SEQ ID NO: 196147 - protein, 15 aa, Homo sapiens
  CDR3 for alpha chain variable domain of TCR clone 98074 (TRAV1-2, TRAJ36)
CAASADQTGANNLFF

SEQ ID NO: 196148 - protein, 15 aa, Homo sapiens
  CDR3 for beta chain variable domain of TCR clone 98074 (TRBV5-1, TRBJ2-7)
CASSFLTDSVYEQYF

SEQ ID NO: 196149 - protein, 13 aa, Homo sapiens
  CDR3 for alpha chain variable domain of TCR clone 98075 (TRAV8-6, TRAJ50)
CAVIKTSYDKEIF

SEQ ID NO: 196150 - protein, 13 aa, Homo sapiens
  CDR3 for beta chain variable domain of TCR clone 98075 (TRBV4-2, TRBJ1-1)
CASSQAGNTEAFF

SEQ ID NO: 196151 - protein, 13 aa, Homo sapiens
  CDR3 for alpha chain variable domain of TCR clone 98076 (TRAV13-2, TRAJ13)
CAERPGGYQKVTF

SEQ ID NO: 196152 - protein, 14 aa, Homo sapiens
  CDR3 for beta chain variable domain of TCR clone 98076 (TRBV28, TRBJ1-1)
CASSSEQGYTEAFF

SEQ ID NO: 196153 - protein, 13 aa, Homo sapiens
  CDR3 for alpha chain variable domain of TCR clone 98077 (TRAV27, TRAJ45)
CRRSGGGADGLTF

SEQ ID NO: 196154 - protein, 15 aa, Homo sapiens
  CDR3 for beta chain variable domain of TCR clone 98077 (TRBV20-1, TRBJ2-7)
CSARDRVSGMDEQYF

SEQ ID NO: 196155 - protein, 17 aa, Homo sapiens
  CDR3 for alpha chain variable domain of TCR clone 98078 (TRAV17, TRAJ28)
CATDPRRGGAGSYQLTF

SEQ ID NO: 196156 - protein, 16 aa, Homo sapiens
  CDR3 for beta chain variable domain of TCR clone 98078 (TRBV25-1, TRBJ1-1)
CASSGDSDRGRIEAFF

SEQ ID NO: 196157 - protein, 17 aa, Homo sapiens
  CDR3 for alpha chain variable domain of TCR clone 98079 (TRAV26-2, TRAJ42)
YILRDVGYGGSQGNLIF

SEQ ID NO: 196158 - protein, 16 aa, Homo sapiens
  CDR3 for beta chain variable domain of TCR clone 98079 (TRBV12-3, TRBJ2-7)
CASSLIGGTGTYEQYF

SEQ ID NO: 196159 - protein, 14 aa, Homo sapiens
  CDR3 for alpha chain variable domain of TCR clone 98080 (TRAV17, TRAJ40)
CATSPSGSARQLTF

SEQ ID NO: 196160 - protein, 14 aa, Homo sapiens
  CDR3 for beta chain variable domain of TCR clone 98080 (TRBV25-1, TRBJ1-1)
CASTHLGGNTEAFF

SEQ ID NO: 196161 - protein, 19 aa, Homo sapiens
  CDR3 for alpha chain variable domain of TCR clone 98081 (TRAV1-2, TRAJ26)
CLLPLCCERPDNYGQNFVF

SEQ ID NO: 196162 - protein, 15 aa, Homo sapiens
  CDR3 for beta chain variable domain of TCR clone 98081 (TRBV9, TRBJ1-6)
CASSVSGTGDSPLHF

SEQ ID NO: 196163 - protein, 13 aa, Homo sapiens
  CDR3 for alpha chain variable domain of TCR clone 98082 (TRAV17, TRAJ26)
CATVDNYGQNFVF

SEQ ID NO: 196164 - protein, 16 aa, Homo sapiens
  CDR3 for beta chain variable domain of TCR clone 98082 (TRBV2, TRBJ2-1)
CASSVGGSLSYNEPFF

SEQ ID NO: 196165 - protein, 13 aa, Homo sapiens
  CDR3 for alpha chain variable domain of TCR clone 98083 (TRAV27, TRAJ43)
CAGAGNNNNDMRF

SEQ ID NO: 196166 - protein, 14 aa, Homo sapiens
  CDR3 for beta chain variable domain of TCR clone 98083 (TRBV7-2, TRBJ2-7)
CASRSQGAEYEQYF

SEQ ID NO: 196167 - protein, 14 aa, Homo sapiens
  CDR3 for alpha chain variable domain of TCR clone 98084 (TRAV13-1, TRAJ35)
CAASKGGFGNVLNF

SEQ ID NO: 196168 - protein, 13 aa, Homo sapiens
  CDR3 for beta chain variable domain of TCR clone 98084 (TRBV7-3, TRBJ1-1)
CASSQDWGAEAFF

SEQ ID NO: 196169 - protein, 13 aa, Homo sapiens
  CDR3 for alpha chain variable domain of TCR clone 98085 (TRAV35, TRAJ48)
CAGHEFGKEKLTF

SEQ ID NO: 196170 - protein, 14 aa, Homo sapiens
  CDR3 for beta chain variable domain of TCR clone 98085 (TRBV19, TRBJ2-1)
CASPTFVLSGEQFF

SEQ ID NO: 196171 - protein, 19 aa, Homo sapiens
  CDR3 for alpha chain variable domain of TCR clone 98086 (TRAV2, TRAJ20)
ILQVREADAAVYRDCKLSF

SEQ ID NO: 196172 - protein, 18 aa, Homo sapiens
  CDR3 for beta chain variable domain of TCR clone 98086 (TRBV20-1, TRBJ2-3)
CSASGLAGGPGTTDMQYF

SEQ ID NO: 196173 - protein, 14 aa, Homo sapiens
  CDR3 for alpha chain variable domain of TCR clone 98087 (TRAV1-1, TRAJ35)
CAVRSIGFGNVLHC

SEQ ID NO: 196174 - protein, 14 aa, Homo sapiens
  CDR3 for beta chain variable domain of TCR clone 98087 (TRBV5-7, TRBJ2-7)
CASSGGLSSYEHYF

SEQ ID NO: 196175 - protein, 14 aa, Homo sapiens
  CDR3 for alpha chain variable domain of TCR clone 98088 (TRAV13-1, TRAJ44)
CAAKATGTASKLTF

SEQ ID NO: 196176 - protein, 13 aa, Homo sapiens
  CDR3 for beta chain variable domain of TCR clone 98088 (TRBV12-4, TRBJ2-7)
CASSPTETYEQYF

SEQ ID NO: 196177 - protein, 13 aa, Homo sapiens
  CDR3 for alpha chain variable domain of TCR clone 98089 (TRAV1-2, TRAJ9)
CAVLNTGGFKTIF

SEQ ID NO: 196178 - protein, 14 aa, Homo sapiens
  CDR3 for beta chain variable domain of TCR clone 98089 (TRBV20-1, TRBJ2-3)
CSARGGTSTYTQYF

SEQ ID NO: 196179 - protein, 12 aa, Homo sapiens
  CDR3 for alpha chain variable domain of TCR clone 98090 (TRAV21, TRAJ20)
CAVRGNDYKLSF

SEQ ID NO: 196180 - protein, 14 aa, Homo sapiens
  CDR3 for beta chain variable domain of TCR clone 98090 (TRBV7-8, TRBJ2-7)
CVSSQTQGADEQYF

SEQ ID NO: 196181 - protein, 14 aa, Homo sapiens
  CDR3 for alpha chain variable domain of TCR clone 98091 (TRAV1-2, TRAJ16)
CAVNRFSDGQKLLF

SEQ ID NO: 196182 - protein, 11 aa, Homo sapiens
  CDR3 for beta chain variable domain of TCR clone 98091 (TRBV11-2, TRBJ2-2)
CAGSLPGELFF

SEQ ID NO: 196183 - protein, 18 aa, Homo sapiens
  CDR3 for alpha chain variable domain of TCR clone 98092 (TRAV26-1, TRAJ52)
CTVRVEGAGGTSYGKLTF

SEQ ID NO: 196184 - protein, 13 aa, Homo sapiens
  CDR3 for beta chain variable domain of TCR clone 98092 (TRBV7-3, TRBJ1-2)
CASSLKRGYGYTF

SEQ ID NO: 196185 - protein, 15 aa, Homo sapiens
  CDR3 for alpha chain variable domain of TCR clone 98093 (TRAV17, TRAJ57)
CATGPSQGGSEQLVF

SEQ ID NO: 196186 - protein, 11 aa, Homo sapiens
  CDR3 for beta chain variable domain of TCR clone 98093 (TRBV11-2, TRBJ2-2)
CASSLPGELFF

SEQ ID NO: 196187 - protein, 15 aa, Homo sapiens
  CDR3 for alpha chain variable domain of TCR clone 98094 (TRAV12-1, TRAJ45)
CVVLSGGGGADGLTF

SEQ ID NO: 196188 - protein, 13 aa, Homo sapiens
  CDR3 for beta chain variable domain of TCR clone 98094 (TRBV4-1, TRBJ2-1)
CASSQAGGDEQFF

SEQ ID NO: 196189 - protein, 18 aa, Homo sapiens
  CDR3 for alpha chain variable domain of TCR clone 98095 (TRAV12-3, TRAJ52)
CAMSRTNAGGTSYGKLTF

SEQ ID NO: 196190 - protein, 17 aa, Homo sapiens
  CDR3 for beta chain variable domain of TCR clone 98095 (TRBV7-3, TRBJ2-3)
WASSLMKRMRGADTQYF

SEQ ID NO: 196191 - protein, 14 aa, Homo sapiens
  CDR3 for alpha chain variable domain of TCR clone 98096 (TRAV12-1, TRAJ23)
CVVMIYNQGGKLIF

SEQ ID NO: 196192 - protein, 13 aa, Homo sapiens
  CDR3 for beta chain variable domain of TCR clone 98096 (TRBV12-4, TRBJ1-2)
CASSSGLTVISTF

SEQ ID NO: 196193 - protein, 18 aa, Homo sapiens
  CDR3 for alpha chain variable domain of TCR clone 98097 (TRAV26-1, TRAJ5)
CIVRVVPPRDTVRRALTF

SEQ ID NO: 196194 - protein, 15 aa, Homo sapiens
  CDR3 for beta chain variable domain of TCR clone 98097 (TRBV7-9, TRBJ2-7)
CASSLPMGQANEQYF

SEQ ID NO: 196195 - protein, 13 aa, Homo sapiens
  CDR3 for alpha chain variable domain of TCR clone 98098 (TRAV16, TRAJ52)
CALRGTSYGKLTF

SEQ ID NO: 196196 - protein, 15 aa, Homo sapiens
  CDR3 for beta chain variable domain of TCR clone 98098 (TRBV27, TRBJ2-5)
CASSLIPSGGETQYF

SEQ ID NO: 196197 - protein, 14 aa, Homo sapiens
  CDR3 for alpha chain variable domain of TCR clone 98099 (TRAV12-2, TRAJ45)
CAVYSGGGAGGLTF

SEQ ID NO: 196198 - protein, 13 aa, Homo sapiens
  CDR3 for beta chain variable domain of TCR clone 98099 (TRBV7-7, TRBJ2-3)
CASSLSRADTQYF

SEQ ID NO: 196199 - protein, 16 aa, Homo sapiens
  CDR3 for alpha chain variable domain of TCR clone 98100 (TRAV30, TRAJ24)
CGTEIVDADSWGKFHF

SEQ ID NO: 196200 - protein, 17 aa, Homo sapiens
  CDR3 for beta chain variable domain of TCR clone 98100 (TRBV20-1, TRBJ2-1)
CSARDPLAGVWDNEQFF

SEQ ID NO: 196201 - protein, 12 aa, Homo sapiens
  CDR3 for alpha chain variable domain of TCR clone 98101 (TRAV25, TRAJ5)
CAGGGGRRALTF

SEQ ID NO: 196202 - protein, 15 aa, Homo sapiens
  CDR3 for beta chain variable domain of TCR clone 98101 (TRBV20-1, TRBJ2-7)
CSVRDRVSGMDEQYF

SEQ ID NO: 196203 - protein, 10 aa, Homo sapiens
  CDR3 for alpha chain variable domain of TCR clone 98102 (TRAV12-3, TRAJ49)
CAMNDDQFYF

SEQ ID NO: 196204 - protein, 14 aa, Homo sapiens
  CDR3 for beta chain variable domain of TCR clone 98102 (TRBV12-4, TRBJ1-1)
CASRPGQGRTEAFF

SEQ ID NO: 196205 - protein, 16 aa, Homo sapiens
  CDR3 for alpha chain variable domain of TCR clone 98103 (TRAV12-2, TRAJ40)
CAVIRGGTSGTYKYIF

SEQ ID NO: 196206 - protein, 15 aa, Homo sapiens
  CDR3 for beta chain variable domain of TCR clone 98103 (TRBV6-3, TRBJ2-7)
CASSSPGTVFYEQYF

SEQ ID NO: 196207 - protein, 12 aa, Homo sapiens
  CDR3 for alpha chain variable domain of TCR clone 98104 (TRAV16, TRAJ10)
CSRTGGGNKLTF

SEQ ID NO: 196208 - protein, 13 aa, Homo sapiens
  CDR3 for beta chain variable domain of TCR clone 98104 (TRBV7-2, TRBJ1-1)
CASNLKGAKVAFF

SEQ ID NO: 196209 - protein, 12 aa, Homo sapiens
  CDR3 for alpha chain variable domain of TCR clone 98105 (TRAV16, TRAJ10)
CSRTGGGNKLTF

SEQ ID NO: 196210 - protein, 12 aa, Homo sapiens
  CDR3 for beta chain variable domain of TCR clone 98105 (TRBV12-4, TRBJ2-7)
CASSLGGYEQYF

SEQ ID NO: 196211 - protein, 14 aa, Homo sapiens
  CDR3 for alpha chain variable domain of TCR clone 98106 (TRAV8-3, TRAJ10)
CAVGNAGGGNKLPF

SEQ ID NO: 196212 - protein, 16 aa, Homo sapiens
  CDR3 for beta chain variable domain of TCR clone 98106 (TRBV11-2, TRBJ1-2)
CASSLDTGGADYGYTF

SEQ ID NO: 196213 - protein, 14 aa, Homo sapiens
  CDR3 for alpha chain variable domain of TCR clone 98107 (TRAV8-4, TRAJ13)
CAMTLSGGYQKVTF

SEQ ID NO: 196214 - protein, 14 aa, Homo sapiens
  CDR3 for beta chain variable domain of TCR clone 98107 (TRBV7-2, TRBJ1-2)
CASSQTGSTYGYTF

SEQ ID NO: 196215 - protein, 14 aa, Homo sapiens
  CDR3 for alpha chain variable domain of TCR clone 98108 (TRAV35, TRAJ42)
CAGRYGGSQGNLIF

SEQ ID NO: 196216 - protein, 13 aa, Homo sapiens
  CDR3 for beta chain variable domain of TCR clone 98108 (TRBV5-1, TRBJ1-2)
CASSIDRPEGYTF

SEQ ID NO: 196217 - protein, 15 aa, Homo sapiens
  CDR3 for alpha chain variable domain of TCR clone 98109 (TRAV38-1, TRAJ37)
CAFIFGSGNTGKLIF

SEQ ID NO: 196218 - protein, 20 aa, Homo sapiens
  CDR3 for beta chain variable domain of TCR clone 98109 (TRBV7-8, TRBJ2-2)
CASSHLFPGPTIHITGELFF

SEQ ID NO: 196219 - protein, 12 aa, Homo sapiens
  CDR3 for alpha chain variable domain of TCR clone 98110 (TRAV12-1, TRAJ40)
CVFYSGTYKYIF

SEQ ID NO: 196220 - protein, 18 aa, Homo sapiens
  CDR3 for beta chain variable domain of TCR clone 98110 (TRBV12-4, TRBJ2-2)
CASSLGAGTRGRTGELFF

SEQ ID NO: 196221 - protein, 15 aa, Homo sapiens
  CDR3 for alpha chain variable domain of TCR clone 98111 (TRAV1-2, TRAJ12)
CAVIPEADSSYKLIF

SEQ ID NO: 196222 - protein, 16 aa, Homo sapiens
  CDR3 for beta chain variable domain of TCR clone 98111 (TRBV4-1, TRBJ2-1)
CASSQEAGQGSDEQFF

SEQ ID NO: 196223 - protein, 14 aa, Homo sapiens
  CDR3 for alpha chain variable domain of TCR clone 98112 (TRAV25, TRAJ22)
CAVRSSGSARQLTF

SEQ ID NO: 196224 - protein, 16 aa, Homo sapiens
  CDR3 for beta chain variable domain of TCR clone 98112 (TRBV4-2, TRBJ1-1)
CASIPSPGRAAPEAFF

SEQ ID NO: 196225 - protein, 14 aa, Homo sapiens
  CDR3 for alpha chain variable domain of TCR clone 98113 (TRAV17, TRAJ31)
CATVSRNNNARLMF

SEQ ID NO: 196226 - protein, 14 aa, Homo sapiens
  CDR3 for beta chain variable domain of TCR clone 98113 (TRBV12-4, TRBJ2-5)
CASSLWQKQETQYF

SEQ ID NO: 196227 - protein, 13 aa, Homo sapiens
  CDR3 for alpha chain variable domain of TCR clone 98114 (TRAV13-1, TRAJ39)
CSKYSNAGNMLTF

SEQ ID NO: 196228 - protein, 14 aa, Homo sapiens
  CDR3 for beta chain variable domain of TCR clone 98114 (TRBV12-5, TRBJ2-5)
CASGSRTHQETQYF

SEQ ID NO: 196229 - protein, 11 aa, Homo sapiens
  CDR3 for alpha chain variable domain of TCR clone 98115 (TRAV23/DV6, TRAJ56)
CAAPANSKLTF

SEQ ID NO: 196230 - protein, 17 aa, Homo sapiens
  CDR3 for beta chain variable domain of TCR clone 98115 (TRBV11-2, TRBJ2-1)
CASSLYPPGVEYNEQFF

SEQ ID NO: 196231 - protein, 12 aa, Homo sapiens
  CDR3 for alpha chain variable domain of TCR clone 98116 (TRAV21, TRAJ29)
CAVTSGNTPLVF

SEQ ID NO: 196232 - protein, 14 aa, Homo sapiens
  CDR3 for beta chain variable domain of TCR clone 98116 (TRBV7-6, TRBJ2-3)
CASSLGTVTDTQYF

SEQ ID NO: 196233 - protein, 15 aa, Homo sapiens
  CDR3 for alpha chain variable domain of TCR clone 98117 (TRAV2, TRAJ9)
CAVAALNTGGFKTIL

SEQ ID NO: 196234 - protein, 15 aa, Homo sapiens
  CDR3 for beta chain variable domain of TCR clone 98117 (TRBV6-3, TRBJ2-7)
CASSSPGTVFYEQYF

SEQ ID NO: 196235 - protein, 14 aa, Homo sapiens
  CDR3 for alpha chain variable domain of TCR clone 98118 (TRAV1-2, TRAJ8)
CAVREDTGFQKLVF

SEQ ID NO: 196236 - protein, 13 aa, Homo sapiens
  CDR3 for beta chain variable domain of TCR clone 98118 (TRBV11-2, TRBJ2-2)
CASGRDREEELFF

SEQ ID NO: 196237 - protein, 16 aa, Homo sapiens
  CDR3 for alpha chain variable domain of TCR clone 98119 (TRAV12-2, TRAJ40)
CAVIRGGTSGTYKYIF

SEQ ID NO: 196238 - protein, 14 aa, Homo sapiens
  CDR3 for beta chain variable domain of TCR clone 98119 (TRBV20-1, TRBJ2-5)
CSARDGRAGETQYC

SEQ ID NO: 196239 - protein, 12 aa, Homo sapiens
  CDR3 for alpha chain variable domain of TCR clone 98120 (TRAV1-1, TRAJ20)
CAVREDDYKLSF

SEQ ID NO: 196240 - protein, 11 aa, Homo sapiens
  CDR3 for beta chain variable domain of TCR clone 98120 (TRBV12-4, TRBJ2-3)
CASTATDTQYF

SEQ ID NO: 196241 - protein, 15 aa, Homo sapiens
  CDR3 for alpha chain variable domain of TCR clone 98121 (TRAV8-3, TRAJ27)
CAVGPSKTNAGKSTF

SEQ ID NO: 196242 - protein, 15 aa, Homo sapiens
  CDR3 for beta chain variable domain of TCR clone 98121 (TRBV7-2, TRBJ2-1)
CASSSGLAGGNDQFF

SEQ ID NO: 196243 - protein, 15 aa, Homo sapiens
  CDR3 for alpha chain variable domain of TCR clone 98122 (TRAV35, TRAJ23)
CAGQRGDNQGGKLIF

SEQ ID NO: 196244 - protein, 16 aa, Homo sapiens
  CDR3 for beta chain variable domain of TCR clone 98122 (TRBV27, TRBJ2-1)
CASSSRLAGNYNEQFF

SEQ ID NO: 196245 - protein, 16 aa, Homo sapiens
  CDR3 for alpha chain variable domain of TCR clone 98123 (TRAV9-2, TRAJ18)
CALTSDKGSTLGRLYF

SEQ ID NO: 196246 - protein, 14 aa, Homo sapiens
  CDR3 for beta chain variable domain of TCR clone 98123 (TRBV29-1, TRBJ2-1)
CSVLGTGVWNEQFF

SEQ ID NO: 196247 - protein, 12 aa, Homo sapiens
  CDR3 for alpha chain variable domain of TCR clone 98124 (TRAV8-3, TRAJ26)
CAGDNYGLNFVF

SEQ ID NO: 196248 - protein, 15 aa, Homo sapiens
  CDR3 for beta chain variable domain of TCR clone 98124 (TRBV9, TRBJ2-1)
CASSLAGSSYNEQFF

SEQ ID NO: 196249 - protein, 13 aa, Homo sapiens
  CDR3 for alpha chain variable domain of TCR clone 98125 (TRAV8-3, TRAJ28)
CAVGAVGSYQLTF

SEQ ID NO: 196250 - protein, 17 aa, Homo sapiens
  CDR3 for beta chain variable domain of TCR clone 98125 (TRBV28, TRBJ2-5)
CASSRQGGLAGAETQYF

SEQ ID NO: 196251 - protein, 14 aa, Homo sapiens
  CDR3 for alpha chain variable domain of TCR clone 98126 (TRAV13-1, TRAJ39)
CAASYNNAGNMPTF

SEQ ID NO: 196252 - protein, 13 aa, Homo sapiens
  CDR3 for beta chain variable domain of TCR clone 98126 (TRBV24-1, TRBJ1-4)
CATNNGRSEKLFF

SEQ ID NO: 196253 - protein, 18 aa, Homo sapiens
  CDR3 for alpha chain variable domain of TCR clone 98127 (TRAV13-1, TRAJ52)
CAAKNPNAGGTSYGKLTF

SEQ ID NO: 196254 - protein, 16 aa, Homo sapiens
  CDR3 for beta chain variable domain of TCR clone 98127 (TRBV20-1, TRBJ1-2)
CSASMGQGVANYGYTF

SEQ ID NO: 196255 - protein, 16 aa, Homo sapiens
  CDR3 for alpha chain variable domain of TCR clone 98128 (TRAV12-3, TRAJ53)
CAMSPGSGGSNYKLTF

SEQ ID NO: 196256 - protein, 15 aa, Homo sapiens
  CDR3 for beta chain variable domain of TCR clone 98128 (TRBV5-1, TRBJ2-7)
CASSLNGGPAREQYF

SEQ ID NO: 196257 - protein, 15 aa, Homo sapiens
  CDR3 for alpha chain variable domain of TCR clone 98129 (TRAV12-1, TRAJ44)
CVVFVNTGTASKLTF

SEQ ID NO: 196258 - protein, 14 aa, Homo sapiens
  CDR3 for beta chain variable domain of TCR clone 98129 (TRBV12-4, TRBJ1-1)
CASSLGTGGTEAFF

SEQ ID NO: 196259 - protein, 15 aa, Homo sapiens
  CDR3 for alpha chain variable domain of TCR clone 98130 (TRAV17, TRAJ23)
CATDAEDNQGGKLIF

SEQ ID NO: 196260 - protein, 12 aa, Homo sapiens
  CDR3 for beta chain variable domain of TCR clone 98130 (TRBV2, TRBJ2-1)
CAKRDGYNEQFF

SEQ ID NO: 196261 - protein, 13 aa, Homo sapiens
  CDR3 for alpha chain variable domain of TCR clone 98131 (TRAV22, TRAJ29)
FAVRGSGNTPLVF

SEQ ID NO: 196262 - protein, 13 aa, Homo sapiens
  CDR3 for beta chain variable domain of TCR clone 98131 (TRBV4-2, TRBJ1-1)
CASSQAGNTEAFF

SEQ ID NO: 196263 - protein, 11 aa, Homo sapiens
  CDR3 for alpha chain variable domain of TCR clone 98132 (TRAV2, TRAJ21)
CAVFNFNKFYL

SEQ ID NO: 196264 - protein, 14 aa, Homo sapiens
  CDR3 for beta chain variable domain of TCR clone 98132 (TRBV15, TRBJ2-3)
CATRSGTSTDTQYF

SEQ ID NO: 196265 - protein, 18 aa, Homo sapiens
  CDR3 for alpha chain variable domain of TCR clone 98133 (TRAV13-1, TRAJ52)
CAASKRSAGGTSYGKLTF

SEQ ID NO: 196266 - protein, 12 aa, Homo sapiens
  CDR3 for beta chain variable domain of TCR clone 98133 (TRBV5-5, TRBJ2-5)
CASSYFGETQYF

SEQ ID NO: 196267 - protein, 14 aa, Homo sapiens
  CDR3 for alpha chain variable domain of TCR clone 98134 (TRAV26-1, TRAJ38)
CIADNAGNNRKLTW

SEQ ID NO: 196268 - protein, 16 aa, Homo sapiens
  CDR3 for beta chain variable domain of TCR clone 98134 (TRBV20-1, TRBJ2-7)
CSASTSGRLSSYEQYF

SEQ ID NO: 196269 - protein, 13 aa, Homo sapiens
  CDR3 for alpha chain variable domain of TCR clone 98135 (TRAV1-1, TRAJ23)
CAVVANQGGKLIF

SEQ ID NO: 196270 - protein, 16 aa, Homo sapiens
  CDR3 for beta chain variable domain of TCR clone 98135 (TRBV15, TRBJ2-3)
CATSRDLGIVTDTQYF

SEQ ID NO: 196271 - protein, 15 aa, Homo sapiens
  CDR3 for alpha chain variable domain of TCR clone 98136 (TRAV35, TRAJ40)
CAGVPGASGTYKSIF

SEQ ID NO: 196272 - protein, 14 aa, Homo sapiens
  CDR3 for beta chain variable domain of TCR clone 98136 (TRBV11-2, TRBJ2-5)
CASSRTGGIETQYF

SEQ ID NO: 196273 - protein, 13 aa, Homo sapiens
  CDR3 for alpha chain variable domain of TCR clone 98137 (TRAV12-2, TRAJ26)
CAVNDNYGQNFVF

SEQ ID NO: 196274 - protein, 16 aa, Homo sapiens
  CDR3 for beta chain variable domain of TCR clone 98137 (TRBV9, TRBJ2-1)
CASSVGGGGNYNEQFF

SEQ ID NO: 196275 - protein, 16 aa, Homo sapiens
  CDR3 for alpha chain variable domain of TCR clone 98138 (TRAV3, TRAJ5)
CAVRNLMDTGRRALTF

SEQ ID NO: 196276 - protein, 16 aa, Homo sapiens
  CDR3 for beta chain variable domain of TCR clone 98138 (TRBV12-5, TRBJ2-5)
CAIGPRTSGNQETQYF

SEQ ID NO: 196277 - protein, 13 aa, Homo sapiens
  CDR3 for alpha chain variable domain of TCR clone 98139 (TRAV8-4, TRAJ30)
CAVSVNRDDKIIF

SEQ ID NO: 196278 - protein, 13 aa, Homo sapiens
  CDR3 for beta chain variable domain of TCR clone 98139 (TRBV3-1, TRBJ2-2)
CARLARGSGELFF

SEQ ID NO: 196279 - protein, 16 aa, Homo sapiens
  CDR3 for alpha chain variable domain of TCR clone 98140 (TRAV30, TRAJ24)
CGTEIVDADSRGKFQF

SEQ ID NO: 196280 - protein, 16 aa, Homo sapiens
  CDR3 for beta chain variable domain of TCR clone 98140 (TRBV27, TRBJ2-5)
CASSYGPGGQKETQYS

SEQ ID NO: 196281 - protein, 14 aa, Homo sapiens
  CDR3 for alpha chain variable domain of TCR clone 98141 (TRAV12-3, TRAJ58)
CATSTETSGSRLTF

SEQ ID NO: 196282 - protein, 11 aa, Homo sapiens
  CDR3 for beta chain variable domain of TCR clone 98141 (TRBV29-1, TRBJ2-5)
CSEDRTGTQYF

SEQ ID NO: 196283 - protein, 15 aa, Homo sapiens
  CDR3 for alpha chain variable domain of TCR clone 98142 (TRAV14/DV4, TRAJ12)
CAMREERDSSYKLIF

SEQ ID NO: 196284 - protein, 14 aa, Homo sapiens
  CDR3 for beta chain variable domain of TCR clone 98142 (TRBV25-1, TRBJ1-1)
CASTHLGGNTEAFF

SEQ ID NO: 196285 - protein, 13 aa, Homo sapiens
  CDR3 for alpha chain variable domain of TCR clone 98143 (TRAV8-6, TRAJ49)
CAVITNTGNQFYF

SEQ ID NO: 196286 - protein, 18 aa, Homo sapiens
  CDR3 for beta chain variable domain of TCR clone 98143 (TRBV11-2, TRBJ2-6)
CASSLNPFLGTGANVLAF

SEQ ID NO: 196287 - protein, 15 aa, Homo sapiens
  CDR3 for alpha chain variable domain of TCR clone 98144 (TRAV17, TRAJ57)
CATGPSQGGSEKLVF

SEQ ID NO: 196288 - protein, 16 aa, Homo sapiens
  CDR3 for beta chain variable domain of TCR clone 98144 (TRBV2, TRBJ1-1)
CASSPPNRGMNTEAFF

SEQ ID NO: 196289 - protein, 13 aa, Homo sapiens
  CDR3 for alpha chain variable domain of TCR clone 98145 (TRAV12-1, TRAJ33)
CGDAPDSNYQVIW

SEQ ID NO: 196290 - protein, 15 aa, Homo sapiens
  CDR3 for beta chain variable domain of TCR clone 98145 (TRBV27, TRBJ2-1)
CASSNGGGSSNEQFF

SEQ ID NO: 196291 - protein, 16 aa, Homo sapiens
  CDR3 for alpha chain variable domain of TCR clone 98146 (TRAV30, TRAJ24)
CGTEIVDADSWGKFQF

SEQ ID NO: 196292 - protein, 19 aa, Homo sapiens
  CDR3 for beta chain variable domain of TCR clone 98146 (TRBV25-1, TRBJ2-2)
CVILVYRVDRGRKTGELFF

SEQ ID NO: 196293 - protein, 17 aa, Homo sapiens
  CDR3 for alpha chain variable domain of TCR clone 98147 (TRAV4, TRAJ13)
CLVGVQGSSGGYQNVTF

SEQ ID NO: 196294 - protein, 18 aa, Homo sapiens
  CDR3 for beta chain variable domain of TCR clone 98147 (TRBV15, TRBJ2-3)
CATSRDGARSWDADTQYF

SEQ ID NO: 196295 - protein, 14 aa, Homo sapiens
  CDR3 for alpha chain variable domain of TCR clone 98148 (TRAV8-3, TRAJ4)
CAVGAAGGYNKLIF

SEQ ID NO: 196296 - protein, 15 aa, Homo sapiens
  CDR3 for beta chain variable domain of TCR clone 98148 (TRBV4-1, TRBJ2-5)
CASSQWDLYQETQYF

SEQ ID NO: 196297 - protein, 18 aa, Homo sapiens
  CDR3 for alpha chain variable domain of TCR clone 98149 (TRAV13-1, TRAJ52)
CAAKNPNAGGTSYGKLTF

SEQ ID NO: 196298 - protein, 12 aa, Homo sapiens
  CDR3 for beta chain variable domain of TCR clone 98149 (TRBV2, TRBJ2-1)
CAYGPPGNEQFF

SEQ ID NO: 196299 - protein, 11 aa, Homo sapiens
  CDR3 for alpha chain variable domain of TCR clone 98150 (TRAV13-1, TRAJ30)
CAASRDDKIIF

SEQ ID NO: 196300 - protein, 19 aa, Homo sapiens
  CDR3 for beta chain variable domain of TCR clone 98150 (TRBV25-1, TRBJ2-2)
CAILVYRVDRGRKTGELFF

SEQ ID NO: 196301 - protein, 14 aa, Homo sapiens
  CDR3 for alpha chain variable domain of TCR clone 98151 (TRAV1-1, TRAJ27)
CAVISNTNAGKSTF

SEQ ID NO: 196302 - protein, 15 aa, Homo sapiens
  CDR3 for beta chain variable domain of TCR clone 98151 (TRBV7-2, TRBJ2-1)
CASSSGLAGGNEQFF

SEQ ID NO: 196303 - protein, 14 aa, Homo sapiens
  CDR3 for alpha chain variable domain of TCR clone 98152 (TRAV12-1, TRAJ13)
CVVIDSGGYQKVTF

SEQ ID NO: 196304 - protein, 19 aa, Homo sapiens
  CDR3 for beta chain variable domain of TCR clone 98152 (TRBV25-1, TRBJ2-2)
CAILVYRVDRGRKTGELFF

SEQ ID NO: 196305 - protein, 14 aa, Homo sapiens
  CDR3 for alpha chain variable domain of TCR clone 98153 (TRAV12-3, TRAJ43)
CAMSLGGAGTRLTV

SEQ ID NO: 196306 - protein, 11 aa, Homo sapiens
  CDR3 for beta chain variable domain of TCR clone 98153 (TRBV12-4, TRBJ2-3)
CASTATDTQYF

SEQ ID NO: 196307 - protein, 12 aa, Homo sapiens
  CDR3 for alpha chain variable domain of TCR clone 98154 (TRAV8-3, TRAJ20)
CAVGANDYKLSF

SEQ ID NO: 196308 - protein, 16 aa, Homo sapiens
  CDR3 for beta chain variable domain of TCR clone 98154 (TRBV20-1, TRBJ1-2)
CSASMGQGVANYGYTF

SEQ ID NO: 196309 - protein, 10 aa, Homo sapiens
  CDR3 for alpha chain variable domain of TCR clone 98155 (TRAV8-4, TRAJ43)
CAVSADDMRF

SEQ ID NO: 196310 - protein, 14 aa, Homo sapiens
  CDR3 for beta chain variable domain of TCR clone 98155 (TRBV7-2, TRBJ1-1)
CASSFLTGTTEAFF

SEQ ID NO: 196311 - protein, 16 aa, Homo sapiens
  CDR3 for alpha chain variable domain of TCR clone 98156 (TRAV30, TRAJ49)
SAAQRVGTNTGNQFYF

SEQ ID NO: 196312 - protein, 15 aa, Homo sapiens
  CDR3 for beta chain variable domain of TCR clone 98156 (TRBV2, TRBJ2-1)
CASSELAGSYNEQFF

SEQ ID NO: 196313 - protein, 13 aa, Homo sapiens
  CDR3 for alpha chain variable domain of TCR clone 98157 (TRAV8-4, TRAJ48)
CAVSLFGNERLTF

SEQ ID NO: 196314 - protein, 15 aa, Homo sapiens
  CDR3 for beta chain variable domain of TCR clone 98157 (TRBV20-1, TRBJ2-7)
CSARKGLAESYEQYF

SEQ ID NO: 196315 - protein, 17 aa, Homo sapiens
  CDR3 for alpha chain variable domain of TCR clone 98158 (TRAV36/DV7, TRAJ52)
CAVAQRAGGTSYGKLTF

SEQ ID NO: 196316 - protein, 15 aa, Homo sapiens
  CDR3 for beta chain variable domain of TCR clone 98158 (TRBV5-1, TRBJ2-1)
CASSPPRAPYNEQFF

SEQ ID NO: 196317 - protein, 12 aa, Homo sapiens
  CDR3 for alpha chain variable domain of TCR clone 98159 (TRAV21, TRAJ29)
CAVTSRNTPLVF

SEQ ID NO: 196318 - protein, 15 aa, Homo sapiens
  CDR3 for beta chain variable domain of TCR clone 98159 (TRBV10-2, TRBJ2-6)
CASSEQGTGANVLTF

SEQ ID NO: 196319 - protein, 12 aa, Homo sapiens
  CDR3 for alpha chain variable domain of TCR clone 98160 (TRAV21, TRAJ31)
CAVWGNNARLRF

SEQ ID NO: 196320 - protein, 16 aa, Homo sapiens
  CDR3 for beta chain variable domain of TCR clone 98160 (TRBV27, TRBJ2-5)
CASSYGPGGQKETQYF

SEQ ID NO: 196321 - protein, 11 aa, Homo sapiens
  CDR3 for alpha chain variable domain of TCR clone 98161 (TRAV13-1, TRAJ39)
CASHAGNMLTF

SEQ ID NO: 196322 - protein, 14 aa, Homo sapiens
  CDR3 for beta chain variable domain of TCR clone 98161 (TRBV11-2, TRBJ1-5)
CASSLDRGGQPQHF

SEQ ID NO: 196323 - protein, 14 aa, Homo sapiens
  CDR3 for alpha chain variable domain of TCR clone 98162 (TRAV1-2, TRAJ16)
CAVNRFSDGQKLLL

SEQ ID NO: 196324 - protein, 12 aa, Homo sapiens
  CDR3 for beta chain variable domain of TCR clone 98162 (TRBV12-4, TRBJ2-7)
CASSLGGYEQYF

SEQ ID NO: 196325 - protein, 14 aa, Homo sapiens
  CDR3 for alpha chain variable domain of TCR clone 98163 (TRAV29/DV5, TRAJ34)
CAASASGNTDKLIF

SEQ ID NO: 196326 - protein, 14 aa, Homo sapiens
  CDR3 for beta chain variable domain of TCR clone 98163 (TRBV7-6, TRBJ2-3)
CASSLGTVTDTQYF

SEQ ID NO: 196327 - protein, 12 aa, Homo sapiens
  CDR3 for alpha chain variable domain of TCR clone 98164 (TRAV13-2, TRAJ23)
CAERHRGGKLIF

SEQ ID NO: 196328 - protein, 13 aa, Homo sapiens
  CDR3 for beta chain variable domain of TCR clone 98164 (TRBV19, TRBJ1-2)
CASSVPGQGGYTF

SEQ ID NO: 196329 - protein, 12 aa, Homo sapiens
  CDR3 for alpha chain variable domain of TCR clone 98165 (TRAV8-3, TRAJ26)
CAGDNYGQNFVF

SEQ ID NO: 196330 - protein, 11 aa, Homo sapiens
  CDR3 for beta chain variable domain of TCR clone 98165 (TRBV12-4, TRBJ2-3)
CASTATDTQYF

SEQ ID NO: 196331 - protein, 14 aa, Homo sapiens
  CDR3 for alpha chain variable domain of TCR clone 98166 (TRAV1-1, TRAJ27)
CAVIYNTNAGKSTF

SEQ ID NO: 196332 - protein, 12 aa, Homo sapiens
  CDR3 for beta chain variable domain of TCR clone 98166 (TRBV12-5, TRBJ2-5)
CASGQGVETQYF

SEQ ID NO: 196333 - protein, 16 aa, Homo sapiens
  CDR3 for alpha chain variable domain of TCR clone 98167 (TRAV35, TRAJ28)
CAGQKYSGAGSYQLTF

SEQ ID NO: 196334 - protein, 13 aa, Homo sapiens
  CDR3 for beta chain variable domain of TCR clone 98167 (TRBV19, TRBJ1-2)
CASSRGQVYGYTF

SEQ ID NO: 196335 - protein, 15 aa, Homo sapiens
  CDR3 for alpha chain variable domain of TCR clone 98168 (TRAV17, TRAJ57)
CATGPSQGGSEKLVF

SEQ ID NO: 196336 - protein, 12 aa, Homo sapiens
  CDR3 for beta chain variable domain of TCR clone 98168 (TRBV24-1, TRBJ1-1)
CATLYPDTEAFF

SEQ ID NO: 196337 - protein, 15 aa, Homo sapiens
  CDR3 for alpha chain variable domain of TCR clone 98169 (TRAV8-2, TRAJ40)
CVVLGTTSGTYKYIF

SEQ ID NO: 196338 - protein, 12 aa, Homo sapiens
  CDR3 for beta chain variable domain of TCR clone 98169 (TRBV11-2, TRBJ2-2)
CASSLGGGELFF

SEQ ID NO: 196339 - protein, 12 aa, Homo sapiens
  CDR3 for alpha chain variable domain of TCR clone 98170 (TRAV12-2, TRAJ43)
CAVNVNNNDMRF

SEQ ID NO: 196340 - protein, 14 aa, Homo sapiens
  CDR3 for beta chain variable domain of TCR clone 98170 (TRBV25-1, TRBJ2-2)
CASSELGLTGELFF

SEQ ID NO: 196341 - protein, 13 aa, Homo sapiens
  CDR3 for alpha chain variable domain of TCR clone 98171 (TRAV12-2, TRAJ50)
CAVIVTSHDKVIF

SEQ ID NO: 196342 - protein, 14 aa, Homo sapiens
  CDR3 for beta chain variable domain of TCR clone 98171 (TRBV9, TRBJ2-1)
CASSVDPRGKEQFF

SEQ ID NO: 196343 - protein, 14 aa, Homo sapiens
  CDR3 for alpha chain variable domain of TCR clone 98172 (TRAV26-1, TRAJ34)
CIVRVAYNTDKLIF

SEQ ID NO: 196344 - protein, 16 aa, Homo sapiens
  CDR3 for beta chain variable domain of TCR clone 98172 (TRBV19, TRBJ2-2)
CASRSPGTGATGELFF

SEQ ID NO: 196345 - protein, 15 aa, Homo sapiens
  CDR3 for alpha chain variable domain of TCR clone 98173 (TRAV12-3, TRAJ49)
CAMTVTPNTGNQFYF

SEQ ID NO: 196346 - protein, 18 aa, Homo sapiens
  CDR3 for beta chain variable domain of TCR clone 98173 (TRBV4-1, TRBJ1-5)
CASSQDPRGQGLNQPQHF

SEQ ID NO: 196347 - protein, 15 aa, Homo sapiens
  CDR3 for alpha chain variable domain of TCR clone 98174 (TRAV3, TRAJ20)
CAVRDKKLSDYKLSF

SEQ ID NO: 196348 - protein, 15 aa, Homo sapiens
  CDR3 for beta chain variable domain of TCR clone 98174 (TRBV7-9, TRBJ1-6)
CASSSPGRGNSPLHF

SEQ ID NO: 196349 - protein, 16 aa, Homo sapiens
  CDR3 for alpha chain variable domain of TCR clone 98175 (TRAV8-3, TRAJ10)
CAVGPILTGGGNKLTF

SEQ ID NO: 196350 - protein, 15 aa, Homo sapiens
  CDR3 for beta chain variable domain of TCR clone 98175 (TRBV7-2, TRBJ1-2)
CASRLGTGGNYGYTF

SEQ ID NO: 196351 - protein, 15 aa, Homo sapiens
  CDR3 for alpha chain variable domain of TCR clone 98176 (TRAV3, TRAJ4)
CAQNMFSGGYNKLIF

SEQ ID NO: 196352 - protein, 16 aa, Homo sapiens
  CDR3 for beta chain variable domain of TCR clone 98176 (TRBV3-1, TRBJ1-6)
CASSQEFQGSYSSLHF

SEQ ID NO: 196353 - protein, 16 aa, Homo sapiens
  CDR3 for alpha chain variable domain of TCR clone 98177 (TRAV3, TRAJ21)
CAVRDIERGNFNKFYF

SEQ ID NO: 196354 - protein, 19 aa, Homo sapiens
  CDR3 for beta chain variable domain of TCR clone 98177 (TRBV28, TRBJ2-7)
CASSYSGTSRLGWVYEQYF

SEQ ID NO: 196355 - protein, 14 aa, Homo sapiens
  CDR3 for alpha chain variable domain of TCR clone 98178 (TRAV12-2, TRAJ40)
CAVKIPSGTYKYIF

SEQ ID NO: 196356 - protein, 16 aa, Homo sapiens
  CDR3 for beta chain variable domain of TCR clone 98178 (TRBV11-2, TRBJ2-7)
CASSTVTAPKTYEQYF

SEQ ID NO: 196357 - protein, 14 aa, Homo sapiens
  CDR3 for alpha chain variable domain of TCR clone 98179 (TRAV17, TRAJ53)
CATDAGGSNYKLTF

SEQ ID NO: 196358 - protein, 16 aa, Homo sapiens
  CDR3 for beta chain variable domain of TCR clone 98179 (TRBV4-1, TRBJ1-1)
CASNQDAGMGNTEAFF

SEQ ID NO: 196359 - protein, 13 aa, Homo sapiens
  CDR3 for alpha chain variable domain of TCR clone 98180 (TRAV8-3, TRAJ36)
CAVGATGANNLFF

SEQ ID NO: 196360 - protein, 15 aa, Homo sapiens
  CDR3 for beta chain variable domain of TCR clone 98180 (TRBV7-2, TRBJ1-2)
CASSPRAGWNYGETF

SEQ ID NO: 196361 - protein, 17 aa, Homo sapiens
  CDR3 for alpha chain variable domain of TCR clone 98181 (TRAV4, TRAJ18)
CLVGERSVGSTLGRLYF

SEQ ID NO: 196362 - protein, 14 aa, Homo sapiens
  CDR3 for beta chain variable domain of TCR clone 98181 (TRBV6-5, TRBJ1-2)
CASSYDGTGGGYSF

SEQ ID NO: 196363 - protein, 14 aa, Homo sapiens
  CDR3 for alpha chain variable domain of TCR clone 98182 (TRAV1-2, TRAJ16)
CAVNRFSDGQQLLF

SEQ ID NO: 196364 - protein, 14 aa, Homo sapiens
  CDR3 for beta chain variable domain of TCR clone 98182 (TRBV4-1, TRBJ2-2)
CASSQAVNTGELFF

SEQ ID NO: 196365 - protein, 15 aa, Homo sapiens
  CDR3 for alpha chain variable domain of TCR clone 98183 (TRAV8-4, TRAJ45)
CALIWTGGGADGLTF

SEQ ID NO: 196366 - protein, 12 aa, Homo sapiens
  CDR3 for beta chain variable domain of TCR clone 98183 (TRBV29-1, TRBJ2-7)
CSVGPSGDEQYF

SEQ ID NO: 196367 - protein, 14 aa, Homo sapiens
  CDR3 for alpha chain variable domain of TCR clone 98184 (TRAV9-2, TRAJ39)
CALYIYNAGNMLTF

SEQ ID NO: 196368 - protein, 14 aa, Homo sapiens
  CDR3 for beta chain variable domain of TCR clone 98184 (TRBV13, TRBJ2-7)
CASSLKGASYEQYF

SEQ ID NO: 196369 - protein, 15 aa, Homo sapiens
  CDR3 for alpha chain variable domain of TCR clone 98185 (TRAV26-1, TRAJ42)
CIVRVKGGSQGNLIF

SEQ ID NO: 196370 - protein, 14 aa, Homo sapiens
  CDR3 for beta chain variable domain of TCR clone 98185 (TRBV19, TRBJ2-2)
CATTGHANTGELFF

SEQ ID NO: 196371 - protein, 23 aa, Homo sapiens
  CDR3 for alpha chain variable domain of TCR clone 98186 (TRAV26-1, TRAJ38)
CIADNAGNNHIQNPDPAVYQLRD

SEQ ID NO: 196372 - protein, 17 aa, Homo sapiens
  CDR3 for beta chain variable domain of TCR clone 98186 (TRBV20-1, TRBJ2-2)
CSASGSGQGGLTGELFF

SEQ ID NO: 196373 - protein, 14 aa, Homo sapiens
  CDR3 for alpha chain variable domain of TCR clone 98187 (TRAV1-1, TRAJ27)
CAVIYNTNAGKSTF

SEQ ID NO: 196374 - protein, 14 aa, Homo sapiens
  CDR3 for beta chain variable domain of TCR clone 98187 (TRBV2, TRBJ1-5)
CASSENRGGQPQHF

SEQ ID NO: 196375 - protein, 15 aa, Homo sapiens
  CDR3 for alpha chain variable domain of TCR clone 98188 (TRAV25, TRAJ52)
CAGTSGGTSFGKLTF

SEQ ID NO: 196376 - protein, 16 aa, Homo sapiens
  CDR3 for beta chain variable domain of TCR clone 98188 (TRBV15, TRBJ1-2)
CATSRGPRTGGGGYTF

SEQ ID NO: 196377 - protein, 12 aa, Homo sapiens
  CDR3 for alpha chain variable domain of TCR clone 98189 (TRAV27, TRAJ9)
CAGESGGFKTIF

SEQ ID NO: 196378 - protein, 12 aa, Homo sapiens
  CDR3 for beta chain variable domain of TCR clone 98189 (TRBV11-2, TRBJ2-2)
CASSLGGGELFF

SEQ ID NO: 196379 - protein, 11 aa, Homo sapiens
  CDR3 for alpha chain variable domain of TCR clone 98190 (TRAV3, TRAJ21)
CAVGNFNKFYF

SEQ ID NO: 196380 - protein, 15 aa, Homo sapiens
  CDR3 for beta chain variable domain of TCR clone 98190 (TRBV7-2, TRBJ2-7)
CASSLKGALTYEQYF

SEQ ID NO: 196381 - protein, 13 aa, Homo sapiens
  CDR3 for alpha chain variable domain of TCR clone 98191 (TRAV27, TRAJ53)
CAGQGGSNYKLTL

SEQ ID NO: 196382 - protein, 13 aa, Homo sapiens
  CDR3 for beta chain variable domain of TCR clone 98191 (TRBV29-1, TRBJ1-1)
CSVESGFGTEAFF

SEQ ID NO: 196383 - protein, 16 aa, Homo sapiens
  CDR3 for alpha chain variable domain of TCR clone 98192 (TRAV23/DV6, TRAJ9)
CAASIGGNTGGFKPIF

SEQ ID NO: 196384 - protein, 18 aa, Homo sapiens
  CDR3 for beta chain variable domain of TCR clone 98192 (TRBV7-9, TRBJ2-7)
CASSLTTSGSRTWYEQYF

SEQ ID NO: 196385 - protein, 12 aa, Homo sapiens
  CDR3 for alpha chain variable domain of TCR clone 98193 (TRAV8-3, TRAJ26)
CAGDNYGQNFVF

SEQ ID NO: 196386 - protein, 16 aa, Homo sapiens
  CDR3 for beta chain variable domain of TCR clone 98193 (TRBV7-7, TRBJ2-1)
CASSLASGTSYNEQFF

SEQ ID NO: 196387 - protein, 14 aa, Homo sapiens
  CDR3 for alpha chain variable domain of TCR clone 98194 (TRAV26-1, TRAJ34)
CIVIVAYNTDKLIF

SEQ ID NO: 196388 - protein, 15 aa, Homo sapiens
  CDR3 for beta chain variable domain of TCR clone 98194 (TRBV20-1, TRBJ2-7)
CSARVPAAYSYEQYF

SEQ ID NO: 196389 - protein, 23 aa, Homo sapiens
  CDR3 for alpha chain variable domain of TCR clone 98195 (TRAV26-1, TRAJ38)
CIADNAGNNHIQNPDPPVYQLRD

SEQ ID NO: 196390 - protein, 17 aa, Homo sapiens
  CDR3 for beta chain variable domain of TCR clone 98195 (TRBV11-2, TRBJ2-6)
CASSQRDIFSGANVLTF

SEQ ID NO: 196391 - protein, 13 aa, Homo sapiens
  CDR3 for alpha chain variable domain of TCR clone 98196 (TRAV12-3, TRAJ13)
CAMTSGGYQKVTF

SEQ ID NO: 196392 - protein, 16 aa, Homo sapiens
  CDR3 for beta chain variable domain of TCR clone 98196 (TRBV7-3, TRBJ2-1)
CASSLEGYRSYNEQFF

SEQ ID NO: 196393 - protein, 16 aa, Homo sapiens
  CDR3 for alpha chain variable domain of TCR clone 98197 (TRAV30, TRAJ24)
CGTEIVDADSWGKFQF

SEQ ID NO: 196394 - protein, 15 aa, Homo sapiens
  CDR3 for beta chain variable domain of TCR clone 98197 (TRBV4-2, TRBJ1-2)
CASSRNTGAGYGYTF

SEQ ID NO: 196395 - protein, 10 aa, Homo sapiens
  CDR3 for alpha chain variable domain of TCR clone 98198 (TRAV2, TRAJ34)
CAVVNDKLIF

SEQ ID NO: 196396 - protein, 17 aa, Homo sapiens
  CDR3 for beta chain variable domain of TCR clone 98198 (TRBV13, TRBJ2-3)
CASSLSRVAGGRNTQYF

SEQ ID NO: 196397 - protein, 14 aa, Homo sapiens
  CDR3 for alpha chain variable domain of TCR clone 98199 (TRAV12-2, TRAJ8)
CAVNENTGFQKLVF

SEQ ID NO: 196398 - protein, 13 aa, Homo sapiens
  CDR3 for beta chain variable domain of TCR clone 98199 (TRBV18, TRBJ1-2)
CASSASATEGYTF

SEQ ID NO: 196399 - protein, 17 aa, Homo sapiens
  CDR3 for alpha chain variable domain of TCR clone 98200 (TRAV12-3, TRAJ26)
CAMSGGRWDNYGQNFGF

SEQ ID NO: 196400 - protein, 12 aa, Homo sapiens
  CDR3 for beta chain variable domain of TCR clone 98200 (TRBV19, TRBJ1-1)
CASSTTGIEAFF

SEQ ID NO: 196401 - protein, 13 aa, Homo sapiens
  CDR3 for alpha chain variable domain of TCR clone 98201 (TRAV12-2, TRAJ57)
CAVTQGGSEKLVF

SEQ ID NO: 196402 - protein, 16 aa, Homo sapiens
  CDR3 for beta chain variable domain of TCR clone 98201 (TRBV29-1, TRBJ2-7)
CSVEDAEDGTAYEQYF

SEQ ID NO: 196403 - protein, 21 aa, Homo sapiens
  CDR3 for alpha chain variable domain of TCR clone 98202 (TRAV8-3, TRAJ10)
CAVGHTHGRRKQNHLWDRHSA

SEQ ID NO: 196404 - protein, 10 aa, Homo sapiens
  CDR3 for beta chain variable domain of TCR clone 98202 (TRBV20-1, TRBJ2-5)
CSARFETQYF

SEQ ID NO: 196405 - protein, 16 aa, Homo sapiens
  CDR3 for alpha chain variable domain of TCR clone 98203 (TRAV13-1, TRAJ48)
CAASIFGNFGNEKLTF

SEQ ID NO: 196406 - protein, 12 aa, Homo sapiens
  CDR3 for beta chain variable domain of TCR clone 98203 (TRBV14, TRBJ2-4)
CASSNPKSIQYF

SEQ ID NO: 196407 - protein, 19 aa, Homo sapiens
  CDR3 for alpha chain variable domain of TCR clone 98204 (TRAV13-1, TRAJ52)
CAASPYQNAGGTSYGKLTF

SEQ ID NO: 196408 - protein, 12 aa, Homo sapiens
  CDR3 for beta chain variable domain of TCR clone 98204 (TRBV2, TRBJ2-1)
CAYGPPGNEQFF

SEQ ID NO: 196409 - protein, 11 aa, Homo sapiens
  CDR3 for alpha chain variable domain of TCR clone 98205 (TRAV3, TRAJ21)
RAVGNFNNFYF

SEQ ID NO: 196410 - protein, 16 aa, Homo sapiens
  CDR3 for beta chain variable domain of TCR clone 98205 (TRBV19, TRBJ2-1)
CASSKAGPSSYNEQFF

SEQ ID NO: 196411 - protein, 11 aa, Homo sapiens
  CDR3 for alpha chain variable domain of TCR clone 98206 (TRAV12-2, TRAJ39)
CAVNNMLTFGG

SEQ ID NO: 196412 - protein, 14 aa, Homo sapiens
  CDR3 for beta chain variable domain of TCR clone 98206 (TRBV4-1, TRBJ2-2)
CASSQAVNTGELFF

SEQ ID NO: 196413 - protein, 14 aa, Homo sapiens
  CDR3 for alpha chain variable domain of TCR clone 98207 (TRAV13-1, TRAJ6)
CAASNGGGSYIPTF

SEQ ID NO: 196414 - protein, 17 aa, Homo sapiens
  CDR3 for beta chain variable domain of TCR clone 98207 (TRBV11-2, TRBJ2-1)
CASSLYPPGVEYNEQFF

SEQ ID NO: 196415 - protein, 17 aa, Homo sapiens
  CDR3 for alpha chain variable domain of TCR clone 98208 (TRAV3, TRAJ42)
CAVRDRDYGGSQGNLLF

SEQ ID NO: 196416 - protein, 14 aa, Homo sapiens
  CDR3 for beta chain variable domain of TCR clone 98208 (TRBV7-2, TRBJ2-5)
CASSPRGSSETQYF

SEQ ID NO: 196417 - protein, 13 aa, Homo sapiens
  CDR3 for alpha chain variable domain of TCR clone 98209 (TRAV20, TRAJ48)
CAVQGVGNEKLTF

SEQ ID NO: 196418 - protein, 19 aa, Homo sapiens
  CDR3 for beta chain variable domain of TCR clone 98209 (TRBV2, TRBJ2-2)
CASSQPGVAGGGNTGELFF

SEQ ID NO: 196419 - protein, 16 aa, Homo sapiens
  CDR3 for alpha chain variable domain of TCR clone 98210 (TRAV8-3, TRAJ8)
CAVPRDRNTGFQKLVF

SEQ ID NO: 196420 - protein, 14 aa, Homo sapiens
  CDR3 for beta chain variable domain of TCR clone 98210 (TRBV28, TRBJ1-1)
CASSESGRGTEAFF

SEQ ID NO: 196421 - protein, 14 aa, Homo sapiens
  CDR3 for alpha chain variable domain of TCR clone 98211 (TRAV38-1, TRAJ45)
CAYYSGGGADGLTF

SEQ ID NO: 196422 - protein, 20 aa, Homo sapiens
  CDR3 for beta chain variable domain of TCR clone 98211 (TRBV28, TRBJ2-1)
CASTPIGRSPGLARGNEQFF

SEQ ID NO: 196423 - protein, 13 aa, Homo sapiens
  CDR3 for alpha chain variable domain of TCR clone 98212 (TRAV13-2, TRAJ48)
CVEMDFGNEKLTF

SEQ ID NO: 196424 - protein, 13 aa, Homo sapiens
  CDR3 for beta chain variable domain of TCR clone 98212 (TRBV7-9, TRBJ1-2)
CASSLKQNYGYTF

SEQ ID NO: 196425 - protein, 13 aa, Homo sapiens
  CDR3 for alpha chain variable domain of TCR clone 98213 (TRAV29/DV5, TRAJ31)
CAAIRNNNARLMF

SEQ ID NO: 196426 - protein, 12 aa, Homo sapiens
  CDR3 for beta chain variable domain of TCR clone 98213 (TRBV14, TRBJ2-5)
CASSQLKETQYF

SEQ ID NO: 196427 - protein, 23 aa, Homo sapiens
  CDR3 for alpha chain variable domain of TCR clone 98214 (TRAV26-1, TRAJ38)
CIVRPLNAGNNHIQNPDPDVYQL

SEQ ID NO: 196428 - protein, 13 aa, Homo sapiens
  CDR3 for beta chain variable domain of TCR clone 98214 (TRBV18, TRBJ1-1)
CASSPNGDTEAFF

SEQ ID NO: 196429 - protein, 13 aa, Homo sapiens
  CDR3 for alpha chain variable domain of TCR clone 98215 (TRAV17, TRAJ7)
CATDNYGNKRLAF

SEQ ID NO: 196430 - protein, 16 aa, Homo sapiens
  CDR3 for beta chain variable domain of TCR clone 98215 (TRBV4-1, TRBJ2-5)
CASSQAIAASSATQYF

SEQ ID NO: 196431 - protein, 13 aa, Homo sapiens
  CDR3 for alpha chain variable domain of TCR clone 98216 (TRAV1-2, TRAJ9)
CAALNTGGFKTIF

SEQ ID NO: 196432 - protein, 15 aa, Homo sapiens
  CDR3 for beta chain variable domain of TCR clone 98216 (TRBV2, TRBJ2-7)
CASSEGLARSYEQYF

SEQ ID NO: 196433 - protein, 14 aa, Homo sapiens
  CDR3 for alpha chain variable domain of TCR clone 98217 (TRAV1-2, TRAJ16)
CAVNRFSDGQKLLF

SEQ ID NO: 196434 - protein, 13 aa, Homo sapiens
  CDR3 for beta chain variable domain of TCR clone 98217 (TRBV19, TRBJ1-1)
CASSGQVNTEAFF

SEQ ID NO: 196435 - protein, 14 aa, Homo sapiens
  CDR3 for alpha chain variable domain of TCR clone 98218 (TRAV38-2/DV8, TRAJ54)
AAMYQIQGAQKLVF

SEQ ID NO: 196436 - protein, 17 aa, Homo sapiens
  CDR3 for beta chain variable domain of TCR clone 98218 (TRBV6-1, TRBJ2-3)
CASSAALRLISTDTQYF

SEQ ID NO: 196437 - protein, 12 aa, Homo sapiens
  CDR3 for alpha chain variable domain of TCR clone 98219 (TRAV21, TRAJ27)
CAARPQCRQINL

SEQ ID NO: 196438 - protein, 14 aa, Homo sapiens
  CDR3 for beta chain variable domain of TCR clone 98219 (TRBV7-6, TRBJ2-3)
CASSLGTVTDTQYF

SEQ ID NO: 196439 - protein, 13 aa, Homo sapiens
  CDR3 for alpha chain variable domain of TCR clone 98220 (TRAV2, TRAJ40)
CAVVTSGTYKYIF

SEQ ID NO: 196440 - protein, 16 aa, Homo sapiens
  CDR3 for beta chain variable domain of TCR clone 98220 (TRBV4-2, TRBJ2-7)
CASSQDGVERGYEQYF

SEQ ID NO: 196441 - protein, 12 aa, Homo sapiens
  CDR3 for alpha chain variable domain of TCR clone 98221 (TRAV12-1, TRAJ29)
CVADSGKTPLVF

SEQ ID NO: 196442 - protein, 12 aa, Homo sapiens
  CDR3 for beta chain variable domain of TCR clone 98221 (TRBV2, TRBJ2-7)
CASKRGSYEQYF

SEQ ID NO: 196443 - protein, 13 aa, Homo sapiens
  CDR3 for alpha chain variable domain of TCR clone 98222 (TRAV21, TRAJ27)
CAALNTNAGKSTF

SEQ ID NO: 196444 - protein, 14 aa, Homo sapiens
  CDR3 for beta chain variable domain of TCR clone 98222 (TRBV25-1, TRBJ1-1)
CASTHLGGNTEAFF

SEQ ID NO: 196445 - protein, 13 aa, Homo sapiens
  CDR3 for alpha chain variable domain of TCR clone 98223 (TRAV27, TRAJ41)
CAGEGNSGYALNF

SEQ ID NO: 196446 - protein, 13 aa, Homo sapiens
  CDR3 for beta chain variable domain of TCR clone 98223 (TRBV24-1, TRBJ2-2)
CATSDWSTGELFF

SEQ ID NO: 196447 - protein, 12 aa, Homo sapiens
  CDR3 for alpha chain variable domain of TCR clone 98224 (TRAV21, TRAJ20)
CAVRRNDYKLSF

SEQ ID NO: 196448 - protein, 14 aa, Homo sapiens
  CDR3 for beta chain variable domain of TCR clone 98224 (TRBV7-8, TRBJ2-7)
CASSQTQGADEQYF

SEQ ID NO: 196449 - protein, 14 aa, Homo sapiens
  CDR3 for alpha chain variable domain of TCR clone 98225 (TRAV23/DV6, TRAJ37)
CAASASSNTGKLIF

SEQ ID NO: 196450 - protein, 13 aa, Homo sapiens
  CDR3 for beta chain variable domain of TCR clone 98225 (TRBV7-7, TRBJ1-1)
CASSLGANTEAFF

SEQ ID NO: 196451 - protein, 11 aa, Homo sapiens
  CDR3 for alpha chain variable domain of TCR clone 98226 (TRAV8-4, TRAJ39)
CAVSDMATCSP

SEQ ID NO: 196452 - protein, 14 aa, Homo sapiens
  CDR3 for beta chain variable domain of TCR clone 98226 (TRBV18, TRBJ2-5)
CASSPPGHQETQYF

SEQ ID NO: 196453 - protein, 14 aa, Homo sapiens
  CDR3 for alpha chain variable domain of TCR clone 98227 (TRAV8-1, TRAJ5)
CAVRTDTGRIALTF

SEQ ID NO: 196454 - protein, 12 aa, Homo sapiens
  CDR3 for beta chain variable domain of TCR clone 98227 (TRBV11-2, TRBJ2-1)
CASSPGNNEQFF

SEQ ID NO: 196455 - protein, 13 aa, Homo sapiens
  CDR3 for alpha chain variable domain of TCR clone 98228 (TRAV27, TRAJ8)
CAGGPTGFQKLVF

SEQ ID NO: 196456 - protein, 13 aa, Homo sapiens
  CDR3 for beta chain variable domain of TCR clone 98228 (TRBV10-3, TRBJ2-7)
CASKLAVNNEQYF

SEQ ID NO: 196457 - protein, 13 aa, Homo sapiens
  CDR3 for alpha chain variable domain of TCR clone 98229 (TRAV2, TRAJ34)
CAVEEDNTDKLIF

SEQ ID NO: 196458 - protein, 15 aa, Homo sapiens
  CDR3 for beta chain variable domain of TCR clone 98229 (TRBV7-2, TRBJ2-1)
CASSSGLAGGNEQFF

SEQ ID NO: 196459 - protein, 14 aa, Homo sapiens
  CDR3 for alpha chain variable domain of TCR clone 98230 (TRAV1-2, TRAJ16)
CAVNRFSDVQKLLF

SEQ ID NO: 196460 - protein, 13 aa, Homo sapiens
  CDR3 for beta chain variable domain of TCR clone 98230 (TRBV19, TRBJ1-2)
CASSVPGQDGYTF

SEQ ID NO: 196461 - protein, 16 aa, Homo sapiens
  CDR3 for alpha chain variable domain of TCR clone 98231 (TRAV12-3, TRAJ53)
RAMSPGSGGSNYKLTF

SEQ ID NO: 196462 - protein, 15 aa, Homo sapiens
  CDR3 for beta chain variable domain of TCR clone 98231 (TRBV28, TRBJ2-5)
CASSPGQGSIETQYF

SEQ ID NO: 196463 - protein, 12 aa, Homo sapiens
  CDR3 for alpha chain variable domain of TCR clone 98232 (TRAV12-3, TRAJ17)
CAMTLTGNKLTF

SEQ ID NO: 196464 - protein, 14 aa, Homo sapiens
  CDR3 for beta chain variable domain of TCR clone 98232 (TRBV11-2, TRBJ2-3)
CASSLYAGRDTQYF

SEQ ID NO: 196465 - protein, 14 aa, Homo sapiens
  CDR3 for alpha chain variable domain of TCR clone 98233 (TRAV1-2, TRAJ16)
CAVNRFSDGQKLLF

SEQ ID NO: 196466 - protein, 17 aa, Homo sapiens
  CDR3 for beta chain variable domain of TCR clone 98233 (TRBV20-1, TRBJ2-1)
CSASSSGLAGPYNEQFF

SEQ ID NO: 196467 - protein, 14 aa, Homo sapiens
  CDR3 for alpha chain variable domain of TCR clone 98234 (TRAV1-2, TRAJ8)
CAVREDTGFQKLVF

SEQ ID NO: 196468 - protein, 14 aa, Homo sapiens
  CDR3 for beta chain variable domain of TCR clone 98234 (TRBV11-2, TRBJ2-3)
CASSRLARTDAQYF

SEQ ID NO: 196469 - protein, 13 aa, Homo sapiens
  CDR3 for alpha chain variable domain of TCR clone 98235 (TRAV12-2, TRAJ52)
CAVGGTSYGKLTF

SEQ ID NO: 196470 - protein, 14 aa, Homo sapiens
  CDR3 for beta chain variable domain of TCR clone 98235 (TRBV10-2, TRBJ1-1)
CASSFGEGNTEAFF

SEQ ID NO: 196471 - protein, 13 aa, Homo sapiens
  CDR3 for alpha chain variable domain of TCR clone 98236 (TRAV23/DV6, TRAJ5)
CAARAAGRRALTF

SEQ ID NO: 196472 - protein, 13 aa, Homo sapiens
  CDR3 for beta chain variable domain of TCR clone 98236 (TRBV10-3, TRBJ2-7)
CASKLAVNYEQYF

SEQ ID NO: 196473 - protein, 13 aa, Homo sapiens
  CDR3 for alpha chain variable domain of TCR clone 98237 (TRAV16, TRAJ34)
CALTGYNTDKLIF

SEQ ID NO: 196474 - protein, 14 aa, Homo sapiens
  CDR3 for beta chain variable domain of TCR clone 98237 (TRBV2, TRBJ1-5)
CASSENRGGQPQHF

SEQ ID NO: 196475 - protein, 14 aa, Homo sapiens
  CDR3 for alpha chain variable domain of TCR clone 98238 (TRAV17, TRAJ57)
CATDPQGGSEKLVF

SEQ ID NO: 196476 - protein, 19 aa, Homo sapiens
  CDR3 for beta chain variable domain of TCR clone 98238 (TRBV28, TRBJ2-1)
CASSFSIRGSGRTRYEQFF

SEQ ID NO: 196477 - protein, 13 aa, Homo sapiens
  CDR3 for alpha chain variable domain of TCR clone 98239 (TRAV2, TRAJ15)
CAVASQAGTALIF

SEQ ID NO: 196478 - protein, 15 aa, Homo sapiens
  CDR3 for beta chain variable domain of TCR clone 98239 (TRBV11-2, TRBJ1-2)
CASSLEGVQRNGYTF

SEQ ID NO: 196479 - protein, 13 aa, Homo sapiens
  CDR3 for alpha chain variable domain of TCR clone 98240 (TRAV13-1, TRAJ20)
CAARVSNDYKLSF

SEQ ID NO: 196480 - protein, 16 aa, Homo sapiens
  CDR3 for beta chain variable domain of TCR clone 98240 (TRBV7-3, TRBJ2-2)
CASSLKRGTLSGELFF

SEQ ID NO: 196481 - protein, 12 aa, Homo sapiens
  CDR3 for alpha chain variable domain of TCR clone 98241 (TRAV38-2/DV8, TRAJ47)
CVLMEYGNKLVF

SEQ ID NO: 196482 - protein, 14 aa, Homo sapiens
  CDR3 for beta chain variable domain of TCR clone 98241 (TRBV18, TRBJ2-5)
CASSPGVSQETQYF

SEQ ID NO: 196483 - protein, 13 aa, Homo sapiens
  CDR3 for alpha chain variable domain of TCR clone 98242 (TRAV2, TRAJ29)
CAAQNSGNTPLVF

SEQ ID NO: 196484 - protein, 13 aa, Homo sapiens
  CDR3 for beta chain variable domain of TCR clone 98242 (TRBV4-1, TRBJ2-7)
CASSQGQAYEQYF

SEQ ID NO: 196485 - protein, 16 aa, Homo sapiens
  CDR3 for alpha chain variable domain of TCR clone 98243 (TRAV30, TRAJ24)
CGTEIVDADSWGKFQF

SEQ ID NO: 196486 - protein, 13 aa, Homo sapiens
  CDR3 for beta chain variable domain of TCR clone 98243 (TRBV18, TRBJ2-5)
CASSLQGQETQYF

SEQ ID NO: 196487 - protein, 11 aa, Homo sapiens
  CDR3 for alpha chain variable domain of TCR clone 98244 (TRAV12-1, TRAJ37)
CVVYNTGKLIF

SEQ ID NO: 196488 - protein, 12 aa, Homo sapiens
  CDR3 for beta chain variable domain of TCR clone 98244 (TRBV7-2, TRBJ2-5)
CASSLGPETHYF

SEQ ID NO: 196489 - protein, 15 aa, Homo sapiens
  CDR3 for alpha chain variable domain of TCR clone 98245 (TRAV26-1, TRAJ48)
CIVRVGDFGNEKLTF

SEQ ID NO: 196490 - protein, 16 aa, Homo sapiens
  CDR3 for beta chain variable domain of TCR clone 98245 (TRBV4-1, TRBJ2-3)
CASSQIAGGLTDTQYF

SEQ ID NO: 196491 - protein, 15 aa, Homo sapiens
  CDR3 for alpha chain variable domain of TCR clone 98246 (TRAV3, TRAJ3)
CAVRDRDSSASKIIF

SEQ ID NO: 196492 - protein, 14 aa, Homo sapiens
  CDR3 for beta chain variable domain of TCR clone 98246 (TRBV18, TRBJ2-5)
CASSPGVSQETQYF

SEQ ID NO: 196493 - protein, 11 aa, Homo sapiens
  CDR3 for alpha chain variable domain of TCR clone 98247 (TRAV21, TRAJ31)
CAVRNNARLMF

SEQ ID NO: 196494 - protein, 15 aa, Homo sapiens
  CDR3 for beta chain variable domain of TCR clone 98247 (TRBV20-1, TRBJ2-7)
CSARDRASGMDEQYF

SEQ ID NO: 196495 - protein, 14 aa, Homo sapiens
  CDR3 for alpha chain variable domain of TCR clone 98248 (TRAV29/DV5, TRAJ45)
CAPYSGGGADVLTF

SEQ ID NO: 196496 - protein, 13 aa, Homo sapiens
  CDR3 for beta chain variable domain of TCR clone 98248 (TRBV29-1, TRBJ2-3)
CSATRGGRDTQYF

SEQ ID NO: 196497 - protein, 18 aa, Homo sapiens
  CDR3 for alpha chain variable domain of TCR clone 98249 (TRAV21, TRAJ53)
CAVKGGENSGGSNYKLTF

SEQ ID NO: 196498 - protein, 20 aa, Homo sapiens
  CDR3 for beta chain variable domain of TCR clone 98249 (TRBV7-8, TRBJ2-2)
CASSHLFPGPTIHITGELFF

SEQ ID NO: 196499 - protein, 14 aa, Homo sapiens
  CDR3 for alpha chain variable domain of TCR clone 98250 (TRAV1-2, TRAJ8)
CAVREDTGFQKLVF

SEQ ID NO: 196500 - protein, 13 aa, Homo sapiens
  CDR3 for beta chain variable domain of TCR clone 98250 (TRBV12-4, TRBJ1-1)
CASSFGEDTEAFF

SEQ ID NO: 196501 - protein, 13 aa, Homo sapiens
  CDR3 for alpha chain variable domain of TCR clone 98251 (TRAV13-2, TRAJ13)
CAERPGGYQKVTF

SEQ ID NO: 196502 - protein, 14 aa, Homo sapiens
  CDR3 for beta chain variable domain of TCR clone 98251 (TRBV19, TRBJ2-2)
CATTGHANTGELFF

SEQ ID NO: 196503 - protein, 14 aa, Homo sapiens
  CDR3 for alpha chain variable domain of TCR clone 98252 (TRAV30, TRAJ26)
CGTEIVSYGQNFVF

SEQ ID NO: 196504 - protein, 15 aa, Homo sapiens
  CDR3 for beta chain variable domain of TCR clone 98252 (TRBV6-3, TRBJ2-7)
CASSSPGTVFYEQYF

SEQ ID NO: 196505 - protein, 16 aa, Homo sapiens
  CDR3 for alpha chain variable domain of TCR clone 98253 (TRAV13-1, TRAJ48)
CAARIFGNFGNEKLTF

SEQ ID NO: 196506 - protein, 16 aa, Homo sapiens
  CDR3 for beta chain variable domain of TCR clone 98253 (TRBV18, TRBJ1-5)
CASSPYRVEGNQPQHF

SEQ ID NO: 196507 - protein, 12 aa, Homo sapiens
  CDR3 for alpha chain variable domain of TCR clone 98254 (TRAV9-2, TRAJ26)
CALRGYGQNFVF

SEQ ID NO: 196508 - protein, 15 aa, Homo sapiens
  CDR3 for beta chain variable domain of TCR clone 98254 (TRBV11-2, TRBJ1-6)
CASSLDPWAVSPLHF

SEQ ID NO: 196509 - protein, 11 aa, Homo sapiens
  CDR3 for alpha chain variable domain of TCR clone 98255 (TRAV1-2, TRAJ20)
CAVANDYKLSF

SEQ ID NO: 196510 - protein, 18 aa, Homo sapiens
  CDR3 for beta chain variable domain of TCR clone 98255 (TRBV20-1, TRBJ2-6)
CSAETTPTHGSGTNVLTF

SEQ ID NO: 196511 - protein, 15 aa, Homo sapiens
  CDR3 for alpha chain variable domain of TCR clone 98256 (TRAV35, TRAJ50)
CAGQLRKTSYDKVIF

SEQ ID NO: 196512 - protein, 14 aa, Homo sapiens
  CDR3 for beta chain variable domain of TCR clone 98256 (TRBV19, TRBJ2-1)
CASPTFVLSGEQFF

SEQ ID NO: 196513 - protein, 13 aa, Homo sapiens
  CDR3 for alpha chain variable domain of TCR clone 98257 (TRAV12-3, TRAJ43)
CAMRPYNNNDMRF

SEQ ID NO: 196514 - protein, 16 aa, Homo sapiens
  CDR3 for beta chain variable domain of TCR clone 98257 (TRBV11-3, TRBJ2-1)
CASSLLLLSSYNEQFF

SEQ ID NO: 196515 - protein, 18 aa, Homo sapiens
  CDR3 for alpha chain variable domain of TCR clone 98258 (TRAV23/DV6, TRAJ21)
CAASSGGGTTSTNFTLDL

SEQ ID NO: 196516 - protein, 11 aa, Homo sapiens
  CDR3 for beta chain variable domain of TCR clone 98258 (TRBV7-8, TRBJ2-7)
CASSLSHEQYF

SEQ ID NO: 196517 - protein, 16 aa, Homo sapiens
  CDR3 for alpha chain variable domain of TCR clone 98259 (TRAV1-2, TRAJ10)
CAVRGVLTGGGNKLTF

SEQ ID NO: 196518 - protein, 14 aa, Homo sapiens
  CDR3 for beta chain variable domain of TCR clone 98259 (TRBV5-5, TRBJ1-2)
CASSLDPYNYGYTF

SEQ ID NO: 196519 - protein, 12 aa, Homo sapiens
  CDR3 for alpha chain variable domain of TCR clone 98260 (TRAV17, TRAJ4)
CAKDGGYNKLIF

SEQ ID NO: 196520 - protein, 13 aa, Homo sapiens
  CDR3 for beta chain variable domain of TCR clone 98260 (TRBV29-1, TRBJ2-2)
CSTTGVNTGELFF

SEQ ID NO: 196521 - protein, 16 aa, Homo sapiens
  CDR3 for alpha chain variable domain of TCR clone 98261 (TRAV12-3, TRAJ53)
CAMSPGSGGSNYKLTF

SEQ ID NO: 196522 - protein, 15 aa, Homo sapiens
  CDR3 for beta chain variable domain of TCR clone 98261 (TRBV6-1, TRBJ2-3)
CASSERGGNTDTQYF

SEQ ID NO: 196523 - protein, 16 aa, Homo sapiens
  CDR3 for alpha chain variable domain of TCR clone 98262 (TRAV16, TRAJ52)
CALSGVGGTSYGKLTF

SEQ ID NO: 196524 - protein, 14 aa, Homo sapiens
  CDR3 for beta chain variable domain of TCR clone 98262 (TRBV19, TRBJ1-2)
CASSLQGQAYGYTL

SEQ ID NO: 196525 - protein, 17 aa, Homo sapiens
  CDR3 for alpha chain variable domain of TCR clone 98263 (TRAV8-6, TRAJ58)
CAVSSWVGETSGSRVTF

SEQ ID NO: 196526 - protein, 17 aa, Homo sapiens
  CDR3 for beta chain variable domain of TCR clone 98263 (TRBV4-3, TRBJ1-2)
CASSSRLQAGGSVGYTF

SEQ ID NO: 196527 - protein, 15 aa, Homo sapiens
  CDR3 for alpha chain variable domain of TCR clone 98264 (TRAV3, TRAJ22)
CAVRDRGGSARQLTF

SEQ ID NO: 196528 - protein, 16 aa, Homo sapiens
  CDR3 for beta chain variable domain of TCR clone 98264 (TRBV11-2, TRBJ1-2)
CASSLDTGGADYGYTF

SEQ ID NO: 196529 - protein, 14 aa, Homo sapiens
  CDR3 for alpha chain variable domain of TCR clone 98265 (TRAV12-3, TRAJ21)
CAATDLYNFNKFHF

SEQ ID NO: 196530 - protein, 13 aa, Homo sapiens
  CDR3 for beta chain variable domain of TCR clone 98265 (TRBV19, TRBJ2-2)
CASSSKNTGELFF

SEQ ID NO: 196531 - protein, 12 aa, Homo sapiens
  CDR3 for alpha chain variable domain of TCR clone 98266 (TRAV29/DV5, TRAJ49)
CAATDTGNQFYF

SEQ ID NO: 196532 - protein, 16 aa, Homo sapiens
  CDR3 for beta chain variable domain of TCR clone 98266 (TRBV20-1, TRBJ1-2)
CSASMGQGVANYGYTF

SEQ ID NO: 196533 - protein, 16 aa, Homo sapiens
  CDR3 for alpha chain variable domain of TCR clone 98267 (TRAV12-3, TRAJ53)
CAMSPGSGGSNYKLTF

SEQ ID NO: 196534 - protein, 15 aa, Homo sapiens
  CDR3 for beta chain variable domain of TCR clone 98267 (TRBV2, TRBJ2-1)
CASSDRSSGAREQFF

SEQ ID NO: 196535 - protein, 15 aa, Homo sapiens
  CDR3 for alpha chain variable domain of TCR clone 98268 (TRAV12-1, TRAJ44)
CVVDTPQGTASNLTF

SEQ ID NO: 196536 - protein, 13 aa, Homo sapiens
  CDR3 for beta chain variable domain of TCR clone 98268 (TRBV27, TRBJ2-1)
CASSSGSYNEQFF

SEQ ID NO: 196537 - protein, 19 aa, Homo sapiens
  CDR3 for alpha chain variable domain of TCR clone 98269 (TRAV26-1, TRAJ29)
CCVLFIVRVEGSGNTPLVF

SEQ ID NO: 196538 - protein, 15 aa, Homo sapiens
  CDR3 for beta chain variable domain of TCR clone 98269 (TRBV7-9, TRBJ1-5)
CASSQGHQPNQPQHF

SEQ ID NO: 196539 - protein, 13 aa, Homo sapiens
  CDR3 for alpha chain variable domain of TCR clone 98270 (TRAV21, TRAJ20)
CAVSRLGDYKLSF

SEQ ID NO: 196540 - protein, 13 aa, Homo sapiens
  CDR3 for beta chain variable domain of TCR clone 98270 (TRBV7-3, TRBJ1-1)
CASSPAGGIEAFF

SEQ ID NO: 196541 - protein, 14 aa, Homo sapiens
  CDR3 for alpha chain variable domain of TCR clone 98271 (TRAV8-1, TRAJ5)
CAVRTDTGRRALTF

SEQ ID NO: 196542 - protein, 13 aa, Homo sapiens
  CDR3 for beta chain variable domain of TCR clone 98271 (TRBV19, TRBJ1-2)
CASSVPGQDGYTF

SEQ ID NO: 196543 - protein, 14 aa, Homo sapiens
  CDR3 for alpha chain variable domain of TCR clone 98272 (TRAV1-2, TRAJ8)
CAVREDTGFQKLVF

SEQ ID NO: 196544 - protein, 16 aa, Homo sapiens
  CDR3 for beta chain variable domain of TCR clone 98272 (TRBV7-2, TRBJ2-7)
CASSFPLAGGPLEQYF

SEQ ID NO: 196545 - protein, 14 aa, Homo sapiens
  CDR3 for alpha chain variable domain of TCR clone 98273 (TRAV26-1, TRAJ38)
CIADNAGTNRKLIW

SEQ ID NO: 196546 - protein, 13 aa, Homo sapiens
  CDR3 for beta chain variable domain of TCR clone 98273 (TRBV7-9, TRBJ1-2)
CASSLKQNYGYTF

SEQ ID NO: 196547 - protein, 14 aa, Homo sapiens
  CDR3 for alpha chain variable domain of TCR clone 98274 (TRAV1-2, TRAJ16)
CAVNRFSYGQKLLF

SEQ ID NO: 196548 - protein, 14 aa, Homo sapiens
  CDR3 for beta chain variable domain of TCR clone 98274 (TRBV13, TRBJ2-5)
CASSLGRGQETQYF

SEQ ID NO: 196549 - protein, 11 aa, Homo sapiens
  CDR3 for alpha chain variable domain of TCR clone 98275 (TRAV6, TRAJ39)
CAPDAGNMITF

SEQ ID NO: 196550 - protein, 14 aa, Homo sapiens
  CDR3 for beta chain variable domain of TCR clone 98275 (TRBV28, TRBJ1-5)
CASSRTGLNQPQHF

SEQ ID NO: 196551 - protein, 14 aa, Homo sapiens
  CDR3 for alpha chain variable domain of TCR clone 98276 (TRAV8-1, TRAJ15)
CAVNGQQAGTALIF

SEQ ID NO: 196552 - protein, 16 aa, Homo sapiens
  CDR3 for beta chain variable domain of TCR clone 98276 (TRBV27, TRBJ1-1)
CASSSRGRTGYTEAFF

SEQ ID NO: 196553 - protein, 15 aa, Homo sapiens
  CDR3 for alpha chain variable domain of TCR clone 98277 (TRAV38-1, TRAJ37)
CAFIHGSGNTGKLIV

SEQ ID NO: 196554 - protein, 12 aa, Homo sapiens
  CDR3 for beta chain variable domain of TCR clone 98277 (TRBV7-9, TRBJ2-7)
CASSFGSYEQYF

SEQ ID NO: 196555 - protein, 11 aa, Homo sapiens
  CDR3 for alpha chain variable domain of TCR clone 98278 (TRAV12-2, TRAJ31)
CAVTRWARLIF

SEQ ID NO: 196556 - protein, 14 aa, Homo sapiens
  CDR3 for beta chain variable domain of TCR clone 98278 (TRBV12-4, TRBJ1-1)
CASSLRSSGTEAFF

SEQ ID NO: 196557 - protein, 15 aa, Homo sapiens
  CDR3 for alpha chain variable domain of TCR clone 98279 (TRAV8-2, TRAJ16)
CVASDGFSDGQKLLF

SEQ ID NO: 196558 - protein, 14 aa, Homo sapiens
  CDR3 for beta chain variable domain of TCR clone 98279 (TRBV7-3, TRBJ1-1)
CASSLGTGYTEAFF
